United States Patent Application Publication US 2024/0263153 A1 - sequence listing, part 6

SEQ ID NO: 20411 - DNA, 260 bp, Unknown
  Description of Unknown: LeftRegion for integrase B7412 sequence
ttattgattctaacgaagatataaaagttcattcttatgaggtacttgataatattataaatagctttattgataacggattaatttcacctgatggaaaaatggataaagatacagaagaatttttaaataaaacattaatgaaagaaattatgtataaattaagcattagaaataatgacaaataatgaggtgatttcatgagaatcgcaatatatgtaaggaaatccgttgctggtgatgacaggtctataagttta

SEQ ID NO: 20412 - DNA, 260 bp, Unknown
  Description of Unknown: LeftRegion for integrase B7413 sequence
gcttattaggctatccccagatagattgggcatttcaaatacaataattaacgatatttgcaatttaaaagagaaatatcctttcgtcgatttgaaacattatggattcactaaaaattggaaaaatataatagaccatttagtttatgaatatgaaaataataaatgaggtcttttgtgttatttaaggaggttccatcatgaaaacagcagccgcctacatacgtgtatctacagatgaacaaacagaacacagccca

SEQ ID NO: 20413 - DNA, 260 bp, Unknown
  Description of Unknown: LeftRegion for integrase B7414 sequence
ctactgagtgttttttgtttcataaaatatttaataaaatcaaaaagccccctgtgttaccagcacagagagccttggcatcggtatgttaccagcataccgacatataaaccgctggaatatgcaaccaacggactaaccacccttattttagcatattctggcggtatcatcaaataaaataatcatgaggtgatactatgtcccaagatatgattgttgtgggctatgttcgtgtttccacggagcatcagcttgac

SEQ ID NO: 20414 - DNA, 260 bp, Unknown
  Description of Unknown: LeftRegion for integrase B7415 sequence
ggaatgatatgggatataataaaaaaagaaatagtaatcaaaaagaaaaaacaaggtaattaatttccttgtttattttttaagtattcatataattttaaatattcttccaaaaagtagtcaatccccatcagcaccattccttgtctttttttaagtttaacatatttaatttaaaatttcaaataaaaggtggtattatgtataaaatagctatttatgtccgaaaaagtgtgaaaagcgaaaaaaactctgtttct

SEQ ID NO: 20415 - DNA, 260 bp, Unknown
  Description of Unknown: LeftRegion for integrase B7416 sequence
gattttttctaaccctttagatagcaaaaccgcccggtgctggtaacaccgaacggcttcacatagatttctcttaccggatgcccggaaagatacattcaaaatcgaacactttgaattatatcattctttcgggcacctcgcaagaggtgtattttttatacccttttttaatatttttatacgaaaggatgatcgaaatgagaataggtgcagcttatatccgtgtcagcacggacgaccagctggatatcagcccg

SEQ ID NO: 20416 - DNA, 260 bp, Unknown
  Description of Unknown: LeftRegion for integrase B7417 sequence
tatcacccaagcagatataagcaagttggaaagtggaaacgctaacccctctttgcgcactttacaaagattagcttccggtatgggtatgaaagttaaaattgagtttcaaccaatcagacaaaattaaaacatttatcccctatccgctctcaaaatagcagaaaggggatttttatttcaaaaaaacaggtgattatatgaaaattgctgccgcatacgtcagagtgtcaaccgaagatcagacagagcttagtcct

SEQ ID NO: 20417 - DNA, 260 bp, Unknown
  Description of Unknown: LeftRegion for integrase B7418 sequence
aattctttaggagaataaaataaaaaccgccccggtgctaccaacaccgagacggtaatacatatccgaagatatgcaatctgaagccaagaatattgtatcatcttcgggacagctacacaatccagaacatttgttcatgtgctggctgttatttttgtacctatttttacataaattaaatgaggagatgatctaaaatgagcgcaagatatgcctatggttacgtccgtgtgtccactgataaacaggaagaactc

SEQ ID NO: 20418 - DNA, 260 bp, Unknown
  Description of Unknown: LeftRegion for integrase B7419 sequence
cttataacaaggtttatcataagactacatttggtctatctgacatcatgaaattatttaagtaaacaaaaaaagcccacgctcaaattttggacgaggagagcgtgagcaaggaagtatacaagaaaaacaggcattaaaaagccctttttcttgtactcattttaacattttttaacaaattttgaaagagggtacaaatgaactcaaaacgaaaagtagccatatatagccgtgtttctacactacaccaagctgaa

SEQ ID NO: 20419 - DNA, 260 bp, Unknown
  Description of Unknown: LeftRegion for integrase B7420 sequence
attaaaataaaaactgcaacaaaataccgccccagtgctaccaacactgagacggtccacatacccgaagatatgcaatctgaagccaagaatattgtatcatcttcggagcagctacacaatccagaacattcgttcatgtgctggctgttatttttgtacctatttttgcataaaactaaacaaggagatgatataaaatgagcgcaagatatgcctatggttacgtccgcgtatccacagataaacaggaagagctt

SEQ ID NO: 20420 - DNA, 260 bp, Unknown
  Description of Unknown: LeftRegion for integrase B7421 sequence
aaacaataatttttcagaacacaaaaaccgccccagtgctaccaacactgagacggtctacacatccgaagatatgctattgaaatccacgaatattgtatcatcttcggaaacagcttgcaatccagaacatttgttcatgtgctggctgttatttttgtgcctatttttacataaattaaatgaggagatgatctaaaatgagcgcaagatatgcctatggttacgtccgtgtatccactgataagcaagaagaactt

SEQ ID NO: 20421 - DNA, 260 bp, Unknown
  Description of Unknown: LeftRegion for integrase B7422 sequence
tttaacctcccccttcggggatatattatatagtatatttttatatactaaaattaaaaaagactcattgcagcgaacaatgagcctaccctcaaaaaagaggtacacaaataaaaaataatctagcacgaaaattcttttttgtgtatctcaattatagcatttatttaaagatttcgcaataattgggagtgattttaatgagtaaaataattaagaatgtaaaggataaaataataagagttgctatatatataaga

SEQ ID NO: 20422 - DNA, 260 bp, Unknown
  Description of Unknown: LeftRegion for integrase B7423 sequence
cctcctttcatcgtattttgtcgaatccggattacagttattattatactcagcaaatttcagattgcaatagatttgtcgtagaagttgcatttcgtgccgtagaagttttaaaatgtcaaaaatcaacactatgatatgtgaaaaatacacaaaaaaacttgccagttggcaagacatgtaaatacaaggaggttaaaatgaaaacagcagctgcatatatacgtgtttcaactgatgatcaaattgaatattcacca

SEQ ID NO: 20423 - DNA, 260 bp, Unknown
  Description of Unknown: LeftRegion for integrase B7424 sequence
gatgatttattgaaataaaataaaaccgccccggtgctaccaacaccagggcggcaatacatatccgaagatatgctattgaaatccacgaatattgtatcatcttcggaaacagcttgcaatccagaacattcgttcatgtgctggctgttatttttgtaccattttttgcataaaactaaacaaggagatgatctaaaatgagcgcaagatatgcctatggttacgtccgtgtatccactgataagcaggaagaactt

SEQ ID NO: 20424 - DNA, 260 bp, Unknown
  Description of Unknown: LeftRegion for integrase B7425 sequence
cttcagacaacactgataattaattttatataaaaaccggcccagtgctaccaacactgaaccggcttagttctccgaagagataccacgttttgcacgaattattgtatcatcttcggaggcagcgcacaagcagaacatttgtgtggctgttatttttgtacccaattttacatattttataaaaccgaggtgatatcatgagtgatcgtattggagctttatatatacgagtctccacagatgatcaggcggagctt

SEQ ID NO: 20425 - DNA, 260 bp, Unknown
  Description of Unknown: LeftRegion for integrase B7426 sequence
tattaaaataaaaactgcaacaaaataccgccccagtgctaccaacactgagacggtccacatacccgaagatatgcaatctgaagccaagaatattgtatcatcttcggagcagctacacaatccagaacattcgttcatgtgctggctgttatttttgtacttgtttttacataaattaaatgaggagatgatctactatgagcgtaaagtatgcctatggttacgtccgtgtatccaccgataagcaggaagaacta

SEQ ID NO: 20426 - DNA, 260 bp, Unknown
  Description of Unknown: LeftRegion for integrase B7427 sequence
gaaaaaattatccgaaaaataataaaaccgccccagtgctaccaacactgagacggtatacatacccgaagatatgcgattgaaatccacgaatattgtatcatcttcggaacagctacacaatccagaacatttgttcatgtgctggctgttatttttgtacttatttttacataaattaaatgaggagatgatctactatgagcgtaaagtatgcctatggttacgttcgcgtatccactgataagcaggaagagctt

SEQ ID NO: 20427 - DNA, 260 bp, Unknown
  Description of Unknown: LeftRegion for integrase B7428 sequence
tctcgattctttaggacaataaaataccgccccggtgctaccaacaccgggacggcaatacatatccgaagatatgctattgaaatccacgaatattgtatcatcttcggagcagctacacaatccagaacattcgttcatgtgctggctgttatttttgtacctatttttacataaattaaatgaggagatgatctaaaatgagcgcaagatatgcctatggttacgtccgtgtatccactgataagcaagaagaactt

SEQ ID NO: 20428 - DNA, 260 bp, Unknown
  Description of Unknown: LeftRegion for integrase B7429 sequence
tgtcaatatcatcagaataaaaacaataaaaaccgcccctgcgccaacaggaacggtctacatatccgaagatatgcaatctgaagccaagaatattgtatcatcttcgggacagctacacaatccagaacatttgttcatgtgctggctgttatttttgtacctatttttacataaattaaatgaggagatgatctaaaatgagcgcaagatatgcctatggttacgtccgtgtatccactgataagcaagaagaactt

SEQ ID NO: 20429 - DNA, 260 bp, Unknown
  Description of Unknown: LeftRegion for integrase B7430 sequence
ttaacctccccccttcggggatatattatatagtatatttttatatactaaaattaaaaaagactcattgcagcgaacaatgagcctaccctcaaaaaagaggtacacaaataaaaaataatctagcacgaaaattcttttttgtgtatctcaattatagcatttatttaaagatttcgcaataattgggagtgattttaatgagtaaaataattaagaatgtaaaggataaaataataagagttgctatatatataaga

SEQ ID NO: 20430 - DNA, 260 bp, Unknown
  Description of Unknown: LeftRegion for integrase B7431 sequence
ttgccagatacaagaaataaagattcaataaaataaaaaaaccggcccctgcgccaacagagaccggctaatatctccgaagagatacccgttttgcataaatattgtatcatcttcggagcaggcgcacaatcagaacatttgtgtggctgttatttttgtacccaattttacatattttataaaaccgaggtgatatcatgagtgatcgtattggagctttatatatacgagtctccacagatgatcaggctgagctt

SEQ ID NO: 20431 - DNA, 260 bp, Unknown
  Description of Unknown: LeftRegion for integrase B7432 sequence
aatcactaaacactacgccaatagtgtttaatcctcgtaatcaatacgaggtcgtatataacgcacacatctcgaagatgcgtacaatactcaccacatatattgtatcatcttcgagcagtcatcgcaatcgaaacatattttcggtggctgttatttttatacccttttttacataaaattagtaaggagtgatacacatggtaaaatatgcttatggttatatccgcgtaagtacagacaagcaagaggagctttct

SEQ ID NO: 20432 - DNA, 260 bp, Unknown
  Description of Unknown: LeftRegion for integrase B7433 sequence
agtgacgatgaataataaaacaaaaaaccgtcccactgctaccaacaccgggacggcaatacatatccgaagatatgcgatcaaaatccaagaatattgtatcatcttcggaaacagcttgcaagcggaacatttgttcatgtgctggctgttatttttgtacctatttttacataaattaaatgaggagatgatctaaaatgagcgcaagatatgcctatggttacgtccgtgtatccactgataagcaagaagaactt

SEQ ID NO: 20433 - DNA, 260 bp, Unknown
  Description of Unknown: LeftRegion for integrase B7434 sequence
aaagcagcttataacaaggtttatcataaaactacatttggtctatctgacatcatgaaattatttaagtaaacaaaaaaagcccacgctcaaattttggacgaggagagcgtgagctaataattaatagtatagtaaaagcctacttttagtagggctctttactatacccattttaacaagaaatgaggtataaatcaatgcaaacaaaacgaaaagtagctatatacagtcgtgtttctacactacaccaagccgag

SEQ ID NO: 20434 - DNA, 260 bp, Unknown
  Description of Unknown: LeftRegion for integrase B7435 sequence
ttttatttattataacaaactgcaacaaaaaaccgcccctgcgccaacagagacggtctacatatccgaagatatgcgattaaaatccaagaatattgtatcatcttcggaaacagcttgcaatccagaacatttgttcatgtgctggctgttatttttgtacctatttttacataaattaaatgaggagatgatctaaaatgagcgcaagatatgcctatggttacgtccgtgtatccactgataagcaagaagaactt

SEQ ID NO: 20435 - DNA, 260 bp, Unknown
  Description of Unknown: LeftRegion for integrase B7436 sequence
attctttaggagaataaaataaaaaaccgccccggtgctaccaacactgagacggtcaacatatccgaagatatgctattgaaatccaagaatattgtatcatcttcggtagcagcttgcaatccagaacattcgttcatgtgctggctgttatttttgtaccaatttttgcataaaactaaacaaggagatgatctaaaatgagcgcaagatatgcctatggttacgtccgtgtatccactgataagcaagaagaactt

SEQ ID NO: 20436 - DNA, 260 bp, Unknown
  Description of Unknown: LeftRegion for integrase B7437 sequence
cttgccagatacaagaaataaagattcaataaaataaaaaaaccggcccctgcgccaacagagaccggctaatatctccgaagagatacctttgagcaaaaatattgtatcatcttcggagcaggcgcacaaccagaacatttgtgtggctgttatttttgtacccaattttacatattttataaaaccgaggtgatatcatgagtgatcgcattggagctttatatatacgagtctccacagatgatcaggcagagctt

SEQ ID NO: 20437 - DNA, 156 bp, Unknown
  Description of Unknown: LeftRegion for integrase B7438 sequence
tagctcagaaatgagtgcgtgtaaaccatagctggtttgttatggatttaccgactaatattattgtaacaggagagtgcaaaggaacttttcgatgtggtcattgtttggaagctggacagatttgcaagaaacagatatgactcagcacattac

SEQ ID NO: 20438 - DNA, 260 bp, Unknown
  Description of Unknown: LeftRegion for integrase B7439 sequence
atcactaaacactacgccaatagtgtttaatcctcgtaatcaatacgaggtcgtatataacgcacacatctcgaaagatgcatacaatactcaccacatatattgtatcatcttcgaacggtcatcgcaatcgaaacatgttttcggtggctgttatttttatacccttttttacataaaattagcaaggagtgatacacatggtaaaatatgcttatggttatatccgcgtaagtacagacaagcaagaggagctttct

SEQ ID NO: 20439 - DNA, 260 bp, Unknown
  Description of Unknown: LeftRegion for integrase B7440 sequence
tattacccaagcagatataagtaagctggaaagtggcaacgccaatccttctttgcgtactttacagagattagcttccggtatgggcatgaaagttaaaattgaatttcaaccaatcggacacaattaaacatttatcccctatccgctcccaaaagagcagaaaaggggatttttattttaaaaaaacaggtgattatatgaaaattgctgctgcatacgtcagagtatcaaccgaagatcaaacagagcttagccct

SEQ ID NO: 20440 - DNA, 260 bp, Unknown
  Description of Unknown: LeftRegion for integrase B7441 sequence
aaaaaattatccgaaaaataataaaaccgccccggtgctaccaacaccgagacggtaatacatatccgaagatatgcaatctgaagccaagaatattgtatcatcttcgggacagctacacaatccagaacatttgttcatgtgctggctgttatttttgtacctatttttacataaattaaatgaggagatgatctaaaatgagcgcaagatatgcctatggttacgtccgtgtgtccactgataaacaggaagaactc

SEQ ID NO: 20441 - DNA, 260 bp, Unknown
  Description of Unknown: LeftRegion for integrase B7442 sequence
ttgccagatacaagaaataaagattcaataaaataaaaaaaccgacccctgcgccaacagagaccggctaatatctccgaagagatacccgttttgcataaatattgtatcatcttcggagcaggcgcacaatcagaacatttgtgtggctgttatttttgtacccaattttacatattttataaaaccgaggtgatatcatgagtgatcgtattggagctttatatatacgtgtctccacagatgatcaggctgagctt

SEQ ID NO: 20442 - DNA, 260 bp, Unknown
  Description of Unknown: LeftRegion for integrase B7443 sequence
gtatcacttataaaaaataaataaaagcaataaaaaaccggttcagtgctaccaacactgaaccggttcagatctccgaagagatacctcattttgcaaagatattgtatcatcttcggagcagtcatacaaccagaacgtttgtgtggctgttatttttgtacccaatttaacatattttttaaaaccgaggtgatattatgaatgatcgtacaggagcgttatatatccgcgtctcgacagaagatcaaacagagctc

SEQ ID NO: 20443 - DNA, 260 bp, Unknown
  Description of Unknown: LeftRegion for integrase B7444 sequence
tatcaattattcccaataaggaatttattgctaatccggatatcctgacaaatgccagctaacaaaaaaatcctcatgttcaccatcgccaaatttagaacatgaggaaagataaaactacaagaaaaacaggcattaaaaagccctttttcttgtactcattttaacatttttttacaaaatttgaaagagggtacaatatgaacacaaaacgaaaagtagctatatatagccgtgtttctacactacaccaagccgaa

SEQ ID NO: 20444 - DNA, 260 bp, Unknown; identical to SEQ ID NO: 20423
  Description of Unknown: LeftRegion for integrase B7445 sequence

SEQ ID NO: 20445 - DNA, 260 bp, Unknown
  Description of Unknown: LeftRegion for integrase B7446 sequence
agcgaaaacaataatttttcagaacacaaaaaccgcccctgcgccaacagagacggtctacatatccgaagatatgctattgaaatccacgaatattgtatcatcttcggaaacagcttgcaatccagaacattcgttcatgtgctggctgttatttttgtacctatttttacataaattaaatgaggagatgatctactatgagcgtaaagtatgcctatggttacgttcgcgtatccactgataagcaggaagagctt

SEQ ID NO: 20446 - DNA, 260 bp, Unknown
  Description of Unknown: LeftRegion for integrase B7447 sequence
aattgatacctagcgaatagtaaataaggctaaaaataccccctgcgttactagcacagagggcatgggtaaacataccagcaaatgccgatacgatataaaagagcacttatattgtatcatttctggcacttgctgtaaatcagtatggtgtattatttgcacacattattaatacattaaaacaaggagatgatataatgcaagaaaaaatacagcgctgcgctatctatattcgtgtatccactgctgagcaggcc

SEQ ID NO: 20447 - DNA, 260 bp, Unknown
  Description of Unknown: LeftRegion for integrase B7448 sequence
aaaataacagtgcagtaaaataaaataccgccccagcgctaccaacactgagacggtctacatatctgaagatatgcgattaaaatccatgaatattgtatcatcttcgggacagctacacaatccagaacatttgttcatgtgctggctgttatttttgtacctatttttacataaattaaatgaggagatgatctaaaatgagcgcaagatatgcctatggttacgtccgtgtatccactgataagcaagaagaactt

SEQ ID NO: 20448 - DNA, 260 bp, Unknown
  Description of Unknown: LeftRegion for integrase B7449 sequence
aggttttacaaaatcagaagccaactacgctattaaacatttagaagacgaagattaaaataaacaaaaaaacccacgctcaaattttggacgaggagagcgtgagctaataagtatgtatgagaaaaacaggcattaaaaagccctttttcttgtacctattttatcatttttaaataaattttgaaagagggtactatatgaattcaaaacgaaaagtagctatatacagtcgtgtttctacactacaccaagccgag

SEQ ID NO: 20449 - DNA, 260 bp, Unknown
  Description of Unknown: LeftRegion for integrase B7450 sequence
agcgaaaacaataatttttcagaatacaaaaaccgcccctgcgccaacagagacggtatacatatccgaagatatgcaatctgaagccaagaatattgtatcatcttcggaacagctacacaatccagaacatttgttcatgtgctggctgttatttttgtacttatttttacataaattaaatgaggagatgatctactatgagcgtaaagtatgcctatggttacgttcgcgtatccactgataagcaggaagagctt

SEQ ID NO: 20450 - DNA, 260 bp, Unknown
  Description of Unknown: LeftRegion for integrase B7451 sequence
aggttttacaaaatcagaagccaactacgctattaaacatttagaagacgaagattaaaataaacaaaaaagcccacgctcaaattttggacgaggagagcgtgagctaataagtatgtataagaaaaacaggcattaaaaagccctttttcttgtactcattttaacatttttttacaaaatttgaaagagggtacaatatgaacacgaaacgaaaagtagctatatatagccgtgtttctacactacaccaagccgag

SEQ ID NO: 20451 - DNA, 260 bp, Unknown
  Description of Unknown: LeftRegion for integrase B7452 sequence
attctttaggacaataaaacaaaaaaccgccccggtgctaccaacactgagacggtcaacatatccgaagatatgcaaatctgaagccaagaatattgtatcatcttcgggacagctacacaatccagaacatttgttcatgtgctggctgttatttttgtacctatttttacataaattaaatgaggagatgatctaaaatgagcgcaagatatgcctatggttacgtccgtgtatccactgataagcaggaagaactt

SEQ ID NO: 20452 - DNA, 260 bp, Unknown
  Description of Unknown: LeftRegion for integrase B7453 sequence
tctcgattctttaggacaataaaataccgccccggtgctaccaacaccgggacggcaatacatatccgaagatatgctattgaaatccacgaatattgtatcatcttcggagcagctacacaatccagaacatttgttcatgtgctggctgttatttttgtgcctatttttacataaattaaatgaggagatgatctaaaatgagcgcaagatatgcctatggttacgtccgtgtatccactgataagcaagaagaactt

SEQ ID NO: 20453 - DNA, 260 bp, Unknown
  Description of Unknown: LeftRegion for integrase B7454 sequence
aattctttaggagaataaaataaaaaccgccccggtgctaccaacaccgagacggtaatacatatccgaagatatgcaatctgaagccaagaatattgtatcatcttcgggacagctacacaatccagaacatttgttcatgtgctggctgttatttttgtacctatttttacataaattaaatgaggagatgatctaaaatgagcgcaagatatgcctatggttacgtccgtgtatccactgataagcaggaagaactt

SEQ ID NO: 20454 - DNA, 260 bp, Unknown; identical to SEQ ID NO: 20452
  Description of Unknown: LeftRegion for integrase B7455 sequence

SEQ ID NO: 20455 - DNA, 148 bp, Unknown
  Description of Unknown: LeftRegion for integrase B7456 sequence
cttcggagcagtcgcacaacccaaacatttgtgtggctgttatttttgtacccaattttacatatttttataaaaccgaggtgatattatgagtgatcgtattggagctttgtatatccgtgtctccacagatgatcaggcagaactt

SEQ ID NO: 20456 - DNA, 260 bp, Unknown; identical to SEQ ID NO: 20445
  Description of Unknown: LeftRegion for integrase B7457 sequence

SEQ ID NO: 20457 - DNA, 260 bp, Unknown
  Description of Unknown: LeftRegion for integrase B7458 sequence
ctcgggtgtcttttacttttatgttaatatataaaaaatcgccccagtgttggcgcaccaggacgattcaggtctccgaagagatactcgttttgcaagaattattgtatcatcttcggagcaggcgcacaaccagaacgtttgtgtggctgttatttttgtacccaaatttacatattttataaaaccgaggtgatatcatgagtgatcgtattggagctttatatatacgagtctccacagatgatcaagcggagctt

SEQ ID NO: 20458 - DNA, 260 bp, Unknown
  Description of Unknown: LeftRegion for integrase B7459 sequence
agctacaaccatagagcttggttatgaacaacaagaagatttttcttgcaaatattggagataaaaggaaaggagctaagtataatatggaaactaataaaccagtaaaaaacgaagaaataaatataataaaaagagcagtagtagaacaaattgaagaactttacaataaattaatcttaaagaaaaaggcttcataaatggaaaaagttgccatttatattagagtatcaaaaaaagaacaaactagagataaaggg

SEQ ID NO: 20459 - DNA, 260 bp, Unknown; identical to SEQ ID NO: 20433
  Description of Unknown: LeftRegion for integrase B7460 sequence

SEQ ID NO: 20460 - DNA, 260 bp, Unknown
  Description of Unknown: LeftRegion for integrase B7461 sequence
cgcgcttagggttagctagctagtaaaagagcgccgctcgcgcgacgctccactcgcactcgcttgcaggagcaagcagagagcagccttgtctattataatagcacattctgctgctcttgtcttgcgagtacatgcccgaaaaaggaaaataatgtatctttaccatgcttttactgtacatttggaggtaaataaaaatgatgagagcagctatctacatccgggtcagcactgatgagcaggccaggcacggcttt

SEQ ID NO: 20461 - DNA, 260 bp, Unknown
  Description of Unknown: LeftRegion for integrase B7462 sequence
gtatcacttataaaaaataaataaaagcaataaaaaaccgatccagtgctaccaacactgaaccggctcagatctccgaagagatacctcattttgcaaagatattgtatcatcttcggaagcagcgcacaacccaaacatttgtgtggctgttatttttgtacccatttacacataattataacaaccgaggtgatattatgagtgatcgtattggagctttgtatatccgtgtctccacagatgatcaggcggagctt

SEQ ID NO: 20462 - DNA, 260 bp, Unknown
  Description of Unknown: LeftRegion for integrase B7463 sequence
atcgacaagaattggtttaaatgaatcaaaccacaattatgataaagaaattattgaaacaagaaatttcctcgcttctgcggttggagtaagtgagagataacactcaactttttccaaaatggaaataattcaaatcccctatccgctcccaaaatagcagaaaaggggatttttatttgaaaaaaacaggtgattatatgaaaattgctgctgcatatgtcagagtatcaaccgaagatcaaacagaacttagtcct

SEQ ID NO: 20463 - DNA, 260 bp, Unknown
  Description of Unknown: LeftRegion for integrase B7464 sequence
tggcaacgtaagttttcgtaaaataaaaaaaccgcccctgtgctaccaacacaaggacggctcatatctccgaagagatacccgttttgcattaaatattgtatcatcttcggagcaggcgcacaaccagaacatttgtgtggctgttatttttgtacccaattttacatattttataaatataaaaccgaggtgatatcatgagtgatcgtattggagctttatatatacgagtctccacagatgatcaggcagagctt

SEQ ID NO: 20464 - DNA, 260 bp, Unknown
  Description of Unknown: LeftRegion for integrase B7465 sequence
ttctgatgatgcagataatattttagaataaaataaaaaccgcctcagtattggcgtactgaagcggcttaggtctccgaagagatactcgttttgcaaagatattgtatcatcttcggagcagacgcacaaccagaacatttgtgtggctgttatttttgtacccaattttacatattttataaaaccgaggtgatatcatgagtgatcgtattggagctttgtatatacgagtctccacagatgatcaggcggagctt

SEQ ID NO: 20465 - DNA, 260 bp, Unknown
  Description of Unknown: LeftRegion for integrase B7466 sequence
cctcctttcatcgtattttgtcgaatccggattacagttattattatactcggcaaatttcagattgcaatagatttgtcgtagaagttgcatttcgtgccgtagaagtttgaaaatgtcaaaaaccaacactatgatatgtgaaaaatacacaaaaaaacttgccagttagcaagacatgtaaatacaaggaggttaaaatgaaaacagcagctgcatatatacgtgtttcaactgatgatcaaattgaatattcacca

SEQ ID NO: 20466 - DNA, 260 bp, Unknown
  Description of Unknown: LeftRegion for integrase B7467 sequence
ctctcgattctttaggacaataaaacaaaaaaccgcccctgcgccaacagagacggtctacatatccgaagatatgcgattgaaatccacgaatattgtatcatcttcggaaacagcttgcaatccagaacattcgttcatgtgccggctgttatttttgtacttatttttacataaattaaatgaggagatgatctactatgagcgtaaagtatgcctatggttacgttcgcgtatccactgataagcaggaagaactc

SEQ ID NO: 20467 - DNA, 260 bp, Unknown; identical to SEQ ID NO: 20426
  Description of Unknown: LeftRegion for integrase B7468 sequence

SEQ ID NO: 20468 - DNA, 260 bp, Unknown; identical to SEQ ID NO: 20423
  Description of Unknown: LeftRegion for integrase B7469 sequence

SEQ ID NO: 20469 - DNA, 260 bp, Unknown
  Description of Unknown: LeftRegion for integrase B7470 sequence
tgtatcacttataaaaaataaataaaagcaataaaaaaccgatccagtgctaccaacactgaaccggttcagatctccgaagagatgctcattttgcaaagatattgtatcatcttcggagcaggcgcacaaccagaacgtttgtgtggctgttatttttgtacccaattttacatattttataaaaccgaggtgatatcatgagtgatcgtattggagctttatatatacgagtctccacagatgatcaggcggagctt

SEQ ID NO: 20470 - DNA, 260 bp, Unknown; identical to SEQ ID NO: 20435
  Description of Unknown: LeftRegion for integrase B7471 sequence

SEQ ID NO: 20471 - DNA, 260 bp, Unknown
  Description of Unknown: LeftRegion for integrase B7472 sequence
ccggttgggtaatgtttaatttcaaaataaaaaccgcccctgcgccaacagagacggtctacatatccgaagatatgcaatctgaagccaagaatattgtatcatcttcggaagcagcttgcaatccagaacatttgttttgcgctggctgttatttttgtacctatttttacataaattaaatgaggagatgatctaaaatgagcgcaagatatgcctatggttacgtccgtgtatccactgataagcaagaagaactt

SEQ ID NO: 20472 - DNA, 260 bp, Unknown
  Description of Unknown: LeftRegion for integrase B7473 sequence
aaccgacatgggagaaggcgtgcgcgatagtcgatgcgttcggcctaacggttgacgaatttagacagattcagaacgcagaatgacatgcagatagcataaggccccggtaccgtccgccaagacaacacaccggggcctcaatggaacgcggggccgtggccttccgcattcaacacccatagaagggcaaccaaattatgacacagaaaacagcggttatatacgcccgcttcagctgctccaagcagcgcgaggcg

SEQ ID NO: 20473 - DNA, 260 bp, Unknown
  Description of Unknown: LeftRegion for integrase B7474 sequence
atggcggaggttttacaaaatcagaagccaactacgctattaaacatttagaagacgaagattaaaataaacaaaaaaagcccacgctcaaattttggacgaggagagcgtgagctaataattggtagtatagtaaaaagcctacttttagtaggtctctttactatacccattttaacacagaaatgaggtataaatcaatgcaaacaaaacgaaaagtagctatatatagccgtgtctctacactacaccaagccgag

SEQ ID NO: 20474 - DNA, 260 bp, Unknown; identical to SEQ ID NO: 20426
  Description of Unknown: LeftRegion for integrase B7475 sequence

SEQ ID NO: 20475 - DNA, 260 bp, Unknown
  Description of Unknown: LeftRegion for integrase B7476 sequence
aagataataatttttcataataaaaaccgccccggtgctaccaacactgagacggtaatacatatccgaagatatgcaatctgaagccaagaatattgtatcatcttcgggacagctacacaatccagaacatttgttcatgtgctggctgttatttttgtacctatttttacataaattaaatgaggagatgatctaaaatgagcgcaagatatgcctatggttacgtccgtgtatccactgataagcaagaagaactt

SEQ ID NO: 20476 - DNA, 260 bp, Unknown
  Description of Unknown: LeftRegion for integrase B7477 sequence
agctattactgctaattaggcataataaaaaccgcccctgtgctaccaacacaaggacggctcatatctccgaagagatacccgttttgcattaaatattgtatcatcttcggagcaggcgcacaaccagaacatttgtgtggctgttatttttgtacccaattttacatattttataaatataaaaccgaggtgatatcatgagtgatcgtattggagctttatatatacgagtctccacagatgatcaggcagagctt

SEQ ID NO: 20477 - DNA, 260 bp, Unknown; identical to SEQ ID NO: 20476
  Description of Unknown: LeftRegion for integrase B7478 sequence

SEQ ID NO: 20478 - DNA, 260 bp, Unknown
  Description of Unknown: LeftRegion for integrase B7479 sequence
aatcactaaacactacgccaatagtgtttaatcctcgtaatcaatacgaggtcgtatataacgcacacatctcgaagatgcgtacaatactcaccacatatattgtatcatcttcgagcagtcatcgcaatcgaaacatattttcggtggctgttatttttatacctatttttacataagattagctaggagtgatacacatggtaaaatatgcctatggctacattcgtgtaagcacagacaagcaggaggagctttct

SEQ ID NO: 20479 - DNA, 260 bp, Unknown
  Description of Unknown: LeftRegion for integrase B7480 sequence
aacaaagcagcataggcgtaaaaaaataccgccccagtgctaccaacactgagacggtctacatatccgaagatatgcgattgaaatccacgaatattgtatcatcttcggaaacagcttgcaatccagaacatttgttctgtgctggctgttatttttgtacctatttttacataaattaaatgaggagatgatctaaaatgagcgcaagatatgcctatggttacgtccgtgtgtccactgataaacaggaagaactc

SEQ ID NO: 20480 - DNA, 260 bp, Unknown
  Description of Unknown: LeftRegion for integrase B7481 sequence
ttggataatgtttaatttcaaaataaaaaccgccccagtgctaccaacactgagacggtctacatatccggagatatgcctatttctaccaagaatattgtatcatcttcggaacagtcacgcaagcggaacgtttgttttgcgctggctgttatttttgtacttatttttacataaattaaatgaggagatgatctactatgagcgtaaagtatgcctatggttacgtccgcgtgtccactgataagcaggaagaactc

SEQ ID NO: 20481 - DNA, 260 bp, Unknown
  Description of Unknown: LeftRegion for integrase B7482 sequence
aagagatgcacaaagtagttattcattaaaaaccgcccctgcgccaacagagacggtctacatatccgaagatatgcgattgaaatccaagaatattgtatcatcttcgggacagctacacaatccagaacatttgttcatgtgctggctgttatttttgtacctatttttacataaattaaatgaggagatgatctaaaatgagcgcaagatatgcctatggttacgtccgtgtgtccactgataaacaggaagagctc

SEQ ID NO: 20482 - DNA, 260 bp, Unknown
  Description of Unknown: LeftRegion for integrase B7483 sequence
tctcgattctttaggagaataaaataccgccccagtgctaccaacaccgggacggcaatacatatccgaagatatgcgattgaaatccaagaatattgtatcatcttcggaaacagcttgcaatccagaacattcgttcatgtgctggctgttatttttgtacctatttttacataaattaaatgaggagatgatctactatgagcgtaaagtatgcctatggttacgttcgcgtatccactgataagcaggaagagctt

SEQ ID NO: 20483 - DNA, 260 bp, Unknown
  Description of Unknown: LeftRegion for integrase B7484 sequence
agaggatggcggaggttttacaaaatcagaagccaactacgctattaaacatttagaagacgaagattaaaataaaaaagcccacgctcaaattttggacgaggagagcgtgagctaataattggtagtatagtaaaaagcctacttttagtaggtctctttactatacccattttaacacagaaatgaggtataaatcaatgcaaacaaaacgaaaagtagctatatatagccgtgtctctacactacaccaagccgag

SEQ ID NO: 20484 - DNA, 260 bp, Unknown
  Description of Unknown: LeftRegion for integrase B7485 sequence
tttatcaattgtgatctctgaattattataataaaaaccgcccctgttggtagcagggacggctcaagaatctccgaagagatccctttcttttggcaaagatattgtatcatcttcggagcagttgcacaatcagaacgtttgtgtggctgttatttttatactttaaattacatattttataaaactgaggtgatattatgagtagtaaagtagcagctctctatatccgtgtctcgacagaggaccaaacagagtta

SEQ ID NO: 20485 - DNA, 260 bp, Unknown
  Description of Unknown: LeftRegion for integrase B7486 sequence
ttatcaattgcgatctctgaattattataataaaaaccgcccctgctggtaacagggacggatcaagaatctccgaagagatccagtactttagcaaagatattgctatcatcttcggagcagttacacaagccaaacgtttgtgtggctgttatttttatgcttaaaattacatattttataaaaccgaggtgatatttatgagcagtaaagtggcatgtctttacatccgcgtctcgacagaggaccaaacagagtta

SEQ ID NO: 20486 - DNA, 97 bp, Unknown
  Description of Unknown: LeftRegion for integrase B7487 sequence
ttaaaattacatattttataaaaccgaggtgatatttatgagcagtaaagtggcatgtctttacatccgcgtttcgacagaggaccaaacagagctt

SEQ ID NO: 20487 - DNA, 260 bp, Unknown
  Description of Unknown: LeftRegion for integrase B7488 sequence
ttatcaattgtgatctctgaattattataataaaaaccgcccctgttggtagcagggacggctcaagaatctccgaagagattcctttcttttggcaaagatattgtatcatcttcggagcagttacacaatcagaacgtttgtgtggctgttatttttatgcttaaaattacatattttataaaaccgaggtgatatttatgagtagtaaagtagcagctctctatatccgtgtctcgacagaggaccaaacagagtta

SEQ ID NO: 20488 - DNA, 260 bp, Unknown
  Description of Unknown: LeftRegion for integrase B7489 sequence
tttatcaattgtgatctctgaattattataataaaaaccgcccctgttggtagcagggacggctcaagaatctccgaagagatccagtactttagcaaagatattgtatcatcttcggagcagttacacaatcagaacgtttgtgtggctgttatttttatacttaaaattacatattttataaaaccgaggtgatatttatgagtagtaaagtagcagctctctatatccgtgtctcgacagaggaccaaacagagtta

SEQ ID NO: 20489 - DNA, 260 bp, Unknown
  Description of Unknown: LeftRegion for integrase B7490 sequence
tttatcaattgcgatctctgaattattataataaaaaccgcccccgctggtaacagggacggctcaagaatctccgaagagattccgtactttggcaaagatattgtatcatcttcggagcagttgcacaatcagaacatttgtgtggctgttatttttgcacttaaaattacatattttataaaaccgaggtgatatttatgagtagtaaagtagcagctctctatatccgtgtctcgacagaggaccaaacagagtta

SEQ ID NO: 20490 - DNA, 260 bp, Unknown
  Description of Unknown: LeftRegion for integrase B7491 sequence
tcagtgctaccaacaccgaaccgattgcaccctgaccggatgccagccaggactttactataacatctccggagatgctacagctttcaaccacgcatattgtatcatcttcggagcagccacgcaagcggaatgagatatttttccagctggctgttatttttgtacccatttttacataatttagacgaggtgatatcatggaaaatcgtgtaggtgcactctatgtgcgtgtctcgacagatgatcagacagatctc

SEQ ID NO: 20491 - DNA, 260 bp, Unknown
  Description of Unknown: LeftRegion for integrase B7492 sequence
tttatcaattgtgatctctgaattattataataaaaaccgcccctgctggtaacagggacggatcaagaatctccgaagagatccagtactttggcaaagatattgtatcatcttcggagcagttacacaatcagaacatttgtgtggctgttatttttatactttaaattacatattttataaaaccgaggtgatatttatgagtagtaaagtagcagctctctatatccgtgtctcgacagaggaccaaacagagtta

SEQ ID NO: 20492 - DNA, 260 bp, Unknown
  Description of Unknown: LeftRegion for integrase B7493 sequence
tttatcaattgtgatctctgaattattataataaaaaccgcccctgttggtagcagggacggctcaagaatctccgaagagattccgtactttggcaaagatattgtatcatcttcggagcagttgcacaatcagaacatttgtgtggctgttatttttatgcttaaaattacatattttataaaaccgaggtgatatttatgagtagtaaagtagcagctctctatatccgtgtctcgacagaggaccaaacagagtta

SEQ ID NO: 20493 - DNA, 260 bp, Unknown
  Description of Unknown: LeftRegion for integrase B7494 sequence
tttatcaattgtgatctctgaattattataataaaaaccgcccctgttggtagcagggacggctcaagaatctccgaagagattccgtactttggcaaagatattgtatcatcttcggagcagttacacaatcagaacgtttgtgtggctgttatttttatgcttaaaattacatattttataaaaccgaggtgatatttatgagtagtaaagtagcagctctctatatccgtgtctcgacagaggaccaaacagagtta

SEQ ID NO: 20494 - DNA, 260 bp, Unknown
  Description of Unknown: LeftRegion for integrase B7495 sequence
ttatcaattgcgatctctgaattattataataaaaaccgcccccgctggtaacagggacggctcaagaatctccgaagagatccctttcttttggcaaagatattgtatcatcttcggagcagttacacaagccaaacgtttgtgtggctgttatttttatgcttaaaattacatattttataaaaccgaggtgatatttatgagcagtaaagtggcatgtctttacatccgcgtctcgacagaggaccaaacagagtta

SEQ ID NO: 20495 - DNA, 260 bp, Unknown
  Description of Unknown: LeftRegion for integrase B7496 sequence
gttatagacactaatttaataggagagttgataatatggagaatttagacacaaagaaagaatatgtcctaaataaaaatggattaaaaataaaggtaacagctaataaaccaagtgatgaaactttatataaatttgctaataaatgtaaagatttatatgataaaatagagcataggaagaaaggaagtgtggcataaatgaacgtaatatatcttagaaagtctagggaggatttaaacagcgaagatacattatgg

SEQ ID NO: 20496 - DNA, 260 bp, Unknown
  Description of Unknown: LeftRegion for integrase B7497 sequence
tttatcaattgtgatctctgaattattataataaaaaacgcccctgctggtaacagggacggatcaagaatctccgaagagatccagtactttggcaaagatattatatcatcttcggagcagttacacaatcagaacgtttgtgtggctgttatttttatacttaaaattacatattttataaaaccgaggtgatatttatgagtagtaaagtagcagctctctatatccgtgtctcgacagaggaccaaacagagtta

SEQ ID NO: 20497 - DNA, 260 bp, Unknown
  Description of Unknown: LeftRegion for integrase B7498 sequence
gctttacatgatacaatacgagaaaaaaaacatataaatgttttaaatggggcatggagtaaaaaatatgaatgttgcattaactgtggttcaactacagttaaacataaaggcaatggcttatgtgttaactgctacgctacaatgttgcgccacaaaaaggaggtgatgccctatgtcgaacattagagccgcactctatgttcgcgtttaacgcaagcacgatggaacaagcgaccgacggatattccataggcgag

SEQ ID NO: 20498 - DNA, 260 bp, Unknown
  Description of Unknown: LeftRegion for integrase B7499 sequence
ttatcaattgcgatctctgaattattataataaaaaccgcccccgctggtaacagggacggctcaagaatctccgaagagatccctttcttttggcaaagatattgtatcatcttcggagcagttacacaagccaaacgtttgtgtggctgttatttttatgcttaaaattacatattttataaaaccgaggtgatatttatgagtagtaaagtagcagctctctatatccgtgtctcgacagaggaccaaacagagtta

SEQ ID NO: 20499 - DNA, 260 bp, Unknown
  Description of Unknown: LeftRegion for integrase B7500 sequence
tggcaccgaattataactcaaaaatactaaaaccgccccagtgcgccaacaccggagcggccacatatccgaggatatgcaagtactttgatcggtaatattgtatcatcttcggagcagcttcgcaatcctgaacgattgttcggctgttattttcgtacttatttttacataagttcaataaataaggagatgatcttatgccttttgaagactatattgacggggccgcatatacccgtgtaagctccggtaagcaa

SEQ ID NO: 20500 - DNA, 260 bp, Unknown
  Description of Unknown: LeftRegion for integrase B7501 sequence
aatctttaatataaaagtcaattaaatataaaaaccgccccagtacgccaataccgggacggtggtggatctccgaagagatatccaatttttaccaaagatattgtatcatcttcggagcggctacacaatcagaacgtttgtgtggctgttatttttgtacttaaaattacatattttataaaaccgaggtgatatttatgagcagtaaagtggcatgtctttacatccgcgtctcgacagaggatcaaacagaactt

SEQ ID NO: 20501 - DNA, 260 bp, Unknown
  Description of Unknown: LeftRegion for integrase B7502 sequence
tttatcaattgtgatctctgaattattataataaaaaccgcccctgctggtaacagggacggatcaagaatctccgaagagatccagtactttggcaaagatattgtatcatcttcggagcagttacacaatcagaacatttgtgtggctgttatttttatacctaaaattacatattttataaaaccgaggtgatatttatgagtagtaaagtagcagctctctatatccgtgtctcgacagaggaccaaacagagtta

SEQ ID NO: 20502 - DNA, 260 bp, Unknown
  Description of Unknown: LeftRegion for integrase B7503 sequence
agacaataacgaataaattaacattaacaaaaaccgccccagtattggcatactgagacggtgatcagaatctccgaagagattcggtactttggcaaagatattgtatcatcttcggagcagttacacaatcagaacatttgtgtggctgttatttttatacttaaaattacatattttataaaaccgaggtgatatttatgagtagtaaagtagcagctctctatatccgtgtctcgacagaggaccaaacagagtta

SEQ ID NO: 20503 - DNA, 260 bp, Unknown
  Description of Unknown: LeftRegion for integrase B7504 sequence
tttatcaattgtgatctctgaattattataataaaaaccgcccctgttggtagcagggacggctcaagaatctccgaagagattccgtactttggcaaagatattgtatcatcttcggagcagttacacaatcagaacatttgtgtggctgttatttttatacttaaaattacatattttataaaaccgaggtgatatttatgagcagtaaagtggcatgtctttacatccgcgtctcgacagaggaccaaacagaactt

SEQ ID NO: 20504 - DNA, 260 bp, Unknown; identical to SEQ ID NO: 20498
  Description of Unknown: LeftRegion for integrase B7505 sequence

SEQ ID NO: 20505 - DNA, 260 bp, Unknown
  Description of Unknown: LeftRegion for integrase B7506 sequence
tttatcaattgtgatctctgaattattataataaaaaccgcccctgttggtagcagggacggctcaagaatctccgaagagattccgtactttggcaaagatattgtatcatcttcggagcagttacacaatcagaacgtttgtgtgtctgttatttttatacttaaaattacatattttataaaaccgaggtgatatttatgagcagtaaagtggcatgtctttacatccgcgtctcgacagaggaccaaacagaactt

SEQ ID NO: 20506 - DNA, 260 bp, Unknown
  Description of Unknown: LeftRegion for integrase B7507 sequence
tttatcaattgtgatctctgaattattataataaaaaccgcccctgctggtaacagggacggatcaagaatctccgaagagatccagtactttggcaaagatattgtatcatcttcggagcagttacacaatcagaacgtttgtgtggctgttatttttatgcttaaaattacatattttataaaaccgaggtgatatttatgagtagtaaagtagcagctctctatatccgtgtctcgacagaggaccaaacagagtta

SEQ ID NO: 20507 - DNA, 260 bp, Unknown; identical to SEQ ID NO: 20498
  Description of Unknown: LeftRegion for integrase B7508 sequence

SEQ ID NO: 20508 - DNA, 260 bp, Unknown
  Description of Unknown: LeftRegion for integrase B7509 sequence
aaaaccgtccctgcgccaacaggaacggtttgcaccctgaccggataccagccaggactttactataacatctccggagatgctacaacttagagcaaagatattgtatcatcttcggaacagtcgcacaaccagaacatttgtgtggctgttatttttataccataaattacatattttataaaatcgaggtgatatttatgagtagcaaggtagcagctctctatagccgtgtctcgacagaggaccaaacagagtta

SEQ ID NO: 20509 - DNA, 260 bp, Unknown
  Description of Unknown: LeftRegion for integrase B7510 sequence
ttctttttcattatctcccacgacctttcttttatcggaaaagctgggcgcttttcaattataaaggtctggcaggtttgcaactactgttaaaaattggcaattaaaaacacccgcagtgctgggaacactccgggtgcggtgcaaagatatatcataccagatacaacataccgtctgcatttattatattatcacctgtggacgggaaattaaaggaaattgacaagaattgtggtgatattatgagaaacaaggaa

SEQ ID NO: 20510 - DNA, 260 bp, Unknown
  Description of Unknown: LeftRegion for integrase B7511 sequence
tgataattggcgtaatttgaataatctataaaataaaaaccggctcctgcgccaacagaaaccggtcagcatctccgaagagatacccttattagcaaagatattgtatcatcttcggagcagttacacaagccaaacgtttgtgtggctgttatttttatgcttaaaattacatattttataaaaccgaggtgatatttatgagtagtaaagtagcatgtctttacatccgcgtctcgacagaggaccaaacagagtta

SEQ ID NO: 20511 - DNA, 260 bp, Unknown
  Description of Unknown: LeftRegion for integrase B7512 sequence
tcgactaatcacacaaaaattcatataaaaaaccgcccctgcgctatcaacacaaggacggcaatcagaatctccgaagagatcctctcttttggcaaagatattgtatcatcttcggagcagttacacaatcagaacgtttgtgtggctgttatttttgtacttaaaattacatattttataaaaccgaggtgatatttatgagtagtaaagtagcagctctctatatccgtgtctcgacagaggaccaaacagagtta

SEQ ID NO: 20512 - DNA, 260 bp, Unknown
  Description of Unknown: LeftRegion for integrase B7513 sequence
tttatcaattgcgatctctgaattattataataaaaaccgcccctgctggtaacagggacggatcaagaatctccgaagagatccagtactttggcaaagatattgtatcatcttcggagcagttacacaatcagaacgtttgtgtggctgttatttttgtacttaaaattacatattttataaaaccgaggtgatatttatgagtagtaaagtagcagctctctatatccgtgtctcgacagaggaccaaacagagtta

SEQ ID NO: 20513 - DNA, 260 bp, Unknown
  Description of Unknown: LeftRegion for integrase B7514 sequence
ttatcaattgcgatctctgaattattataataaaaaccgcccccgctggtaacagggacggctcaagaatctccgaagagatccctttcttttggcaaagatattgtatcatcttcggagcagttacacaatcagaacatttgtgtggctgttatttttatacttaaaattacatattttataaaaccgaggtgatatttatgagcagtaaagtggcatgtctttacatccgcgtctcgacagaggaccaaacagaactt

SEQ ID NO: 20514 - DNA, 260 bp, Unknown
  Description of Unknown: LeftRegion for integrase B7515 sequence
ctgggcgcttttcaattataaaggtctggcaggtttgcaactactgttaaaaattggcaataaaaacacccgcagtgctgggaacactccgggtgcggtgcaaagatatatcataccagatacaacataccgtctgcacttattatattatcactgacagacgggaaataaaaggaaattgaaagaaagttggtgattttatgataccagccattgtgtatgcaagggcttctacggaccatcaagaatattccgtaaat

SEQ ID NO: 20515 - DNA, 260 bp, Unknown
  Description of Unknown: LeftRegion for integrase B7516 sequence
attgctcgggtgtcttttactttttaaataaaaaatcggctcagtgctgctaacaccgaaccgatcagatctccgaagagatgctcttgcgcaaacatattgtatcatcttcggaacagccatgcaagcggaatgaaatatttttccagctggctgttatttttgtacccatttttacataatttagacgaggtgatatcatggaaaatcgtgtaggtgcactctatgtgcgtgtctcgacagatgatcagacagatctc

SEQ ID NO: 20516 - DNA, 236 bp, Unknown
  Description of Unknown: LeftRegion for integrase B7517 sequence
cagtccttttttgatcttttaccttatcgactgattctattataccatgaatcgcattgcagaacaagcgttcttttctgttttttttgcaattcatctcccacctatagaggaaggagaattcttgctatatattatgttaaaattacatattttataaaaccgaggtgatatttatgagcagtaaagtggcatgtctttacatccgtgtctcgacagaggaccaaacagagtta

SEQ ID NO: 20517 - DNA, 260 bp, Unknown
  Description of Unknown: LeftRegion for integrase B7518 sequence
tttatcaattgtgatctctgaattattataataaaaaccgcccctgctggtaacagggacggatcaagaatctccgaagagatccagtactttggcaaagatattgtatcatcttcggagcagttacacaatcagaacgtttgtgtggctgttatttttatacttgaaattacatattttataaaaccgaggtgatatttatgagtagtaaagtagcagctctctatatccgtgtctcgacagaggaccaaacagagtta

SEQ ID NO: 20518 - DNA, 260 bp, Unknown
  Description of Unknown: LeftRegion for integrase B7519 sequence
ttatcaattgtgatctctgaattattataataaaaaccgcccctgttggtagcagggacggctcaagaatctccgaagagatccctttcttttggcaaagatattgtatcatcttcggagcagttacacaatcagaacgtttgtgtggctgttatttttatacttaaaattacatattttataaaaccgaggtgatatttatgagtagtaaagtagcagctctctatatccgtgtctcgacagaggaccaaacagagtta

SEQ ID NO: 20519 - DNA, 260 bp, Unknown
  Description of Unknown: LeftRegion for integrase B7520 sequence
tgtcaggtgcaagaaatagcaattaaataaaacaaaaccgcccctgctggtaacagggacggatcaagaatctccgaagagatccagtactttggcaaagatattgtatcatcttcggagcagttacacaatcagaacgtttgtgtggctgttatttttgtacttaaaattacatattttataaaaccgaggtgatatttatgagtagtaaagtggcatgtctttacatccgtgtctcgacagaggaccaaacagagtta

SEQ ID NO: 20520 - DNA, 260 bp, Unknown
  Description of Unknown: LeftRegion for integrase B7521 sequence
gctgggcgcttttcaattataaaggtctggcaggtttgcaactactgttaaaaattggcaataaaaacacccgcagtgctgggaacactccgggtgcggtgcaaagatatatcataccagatacaacataccgtctgcactattatattatcactgacagacgggaaataaaaggaaattgaaagaaagttggtgattttatgataccagccattgtgtatgcaagggcttctacggaccatcaagaatattccgtaaat

SEQ ID NO: 20521 - DNA, 260 bp, Unknown
  Description of Unknown: LeftRegion for integrase B7522 sequence
tttatcaattgtgatctctgaattattataataaaaaccgcccctgttggtaacagggacggatcaagaatctccgaagagatccagtactttggcaaagatattgtatcatcttcggagcagttgcacaatcagaacgtttgtgtggctgttatttttatacctaaaattacatattttataaaaccgaggtgatatttatgagcagtaaagtggcatgtctttacatccgcgtctcgacagaggaccaaacagaactt

SEQ ID NO: 20522 - DNA, 260 bp, Unknown
  Description of Unknown: LeftRegion for integrase B7523 sequence
tttctttttcattatctcccacgacctttcttttatcggaaaagctgggcgcttttcaattataaaggtctgtcaggtttgcaactactgttaaaaattggcaataaaaacacccgcagtgctgggaacactccgggtgcggtgcaaagatatatcataccagatacaacataccgtctgcatttattatattaccacctgtggacgggaaattaaaggaaattgacaagaattgtggtgatattatgagaaacaaggaa

SEQ ID NO: 20523 - DNA, 260 bp, Unknown
  Description of Unknown: LeftRegion for integrase B7524 sequence
ttggattgtaaccccataattcttgagcaaaaatcgtcccagtattggcgtactgagacgattagtagaatctccgaagagatcccgtactttggcaaagatattgtatcatcttcggagcagttacacaatcagaacatttgtgtggctgttatttttatacttaaaattacatattttataaaaccgaggtgatatttatgagtagtaaagtagcagctctctatatccgtgtctcgacagaggaccaaacagagtta

SEQ ID NO: 20524 - DNA, 260 bp, Unknown
  Description of Unknown: LeftRegion for integrase B7525 sequence
ttcattgataaatcagaaaataagagcctttacagacgacattctgaaaggttaataaaataaaatgccccggtcgtgctgggaacacttccggggtgtgcaaagatatatcataccagatacaacataccgtctgcgcttattatattatcacggcatgacgggaaataaaaggaaattgaaagaaagttggtgattttatgataccagccattgtgtatgcaagggcttctacggaccatcaagaatattccgtaaag

SEQ ID NO: 20525 - DNA, 260 bp, Unknown
  Description of Unknown: LeftRegion for integrase B7526 sequence
tgataattggcgtaatttgaataatctataaaataaaaaccggctcctgcgccaacagaaaccggtcagcatctccgaagagatacccttattagcaaagatattgtatcatcttcggagcagttgcacaatcagaacgtttgtgtggctgttatttttatacttaaaattacatattttataaaaccgaggtgatatttatgagcagtaaagtggcatgtctttacatccgcgtctcgacagaggaccaaacagagtta

SEQ ID NO: 20526 - DNA, 260 bp, Unknown; identical to SEQ ID NO: 20503
  Description of Unknown: LeftRegion for integrase B7527 sequence

SEQ ID NO: 20527 - DNA, 260 bp, Unknown
  Description of Unknown: LeftRegion for integrase B7528 sequence
ttatcaattgtgatctctgaattattataataaaaaccgcccctgttggtagcagggacggctcaagaatctccgaagagatccctttcttttggcaaagatattgtatcatcttcggagcagttacacaatcagaacgtttgtgtggctgttatttttgtgcttaaaattacatattttataaaaccgaggtgatatttatgagtagtaaagtagcagctctctatatccgtgtctcgacagaggaccaaacagagtta

SEQ ID NO: 20528 - DNA, 146 bp, Unknown
  Description of Unknown: LeftRegion for integrase B7529 sequence
aattcatctcccacctatagaggaaggagaattcttgctatatattatgttaaaattacatattttataaaaccgaggtgatatttatgagcagtaaagtggcatgtctttacatccgcgtctcgacagaggaccaaacagagtta

SEQ ID NO: 20529 - DNA, 260 bp, Unknown; identical to SEQ ID NO: 20503
  Description of Unknown: LeftRegion for integrase B7530 sequence

SEQ ID NO: 20530 - DNA, 109 bp, Unknown
  Description of Unknown: LeftRegion for integrase B7531 sequence
ctatatattatgttaaaattacatattttataaaaccgaggtgatatttatgagcagtaaagtggcatgtctttacatccgcgtctcgacagaggaccaaacagagtta

SEQ ID NO: 20531 - DNA, 260 bp, Unknown
  Description of Unknown: LeftRegion for integrase B7532 sequence
tttatcaattgtgatctctgaattattataataaaaaccgcccctgctggcaacagggacggatcaagaatctccgaagagatccagtactttagcaaggatattgtatcatcttcggagcagttgcacaatcagaacatttgtgtggctgttatttttataccataaattacatattttataaaaccgaggtgatatttatgagtagcaaggtagcggctctgtacatccgcgtcagcacagaggaccaaacagagtta

SEQ ID NO: 20532 - DNA, 260 bp, Unknown
  Description of Unknown: LeftRegion for integrase B7533 sequence
tgataattggcgtaatttgaataatctataaaataaaaaccggctcctgcgccaacagaaaccggtcagcatctccgaagagatacccttattagcaaagatattgtatcatcttcggagcagttacacaatcagaacgtttgtgtggctgttatttttgtacttaaaattacatattttataaaaccgaggtgatatttatgagtagtaaagtagcagctctctatatccgcgtctcgacagaggaccaaacagagtta

SEQ ID NO: 20533 - DNA, 260 bp, Unknown
  Description of Unknown: LeftRegion for integrase B7534 sequence
taaactttacaatctattaattcaataataaaatgcccccgcgctgacaacacagggacattaatcagaacctccgaagagatccttcttttagcaaaaaatattgtatcatcttcggagcagttacacaaccggaacgtttgtgtggctgttatttttatacttaaaattacatattttataaaaccgaggtgatatttatgagtagtaaagtagcagctctctatatccgtgtctcgacagaggaccaaacagagtta

SEQ ID NO: 20534 - DNA, 260 bp, Unknown
  Description of Unknown: LeftRegion for integrase B7535 sequence
ttatcaattgtgatctctgaattattataataaaaaccgcccctgttggtagcagggacggctcaagaatctccgaagagatccctttcttttggcagagatattgtatcatcttcggagcagttacacaatcagaacgtttgtgtggctgttatttttatacttaaaattacatattttataaaaccgaggtgatatttatgagtagtaaagtagcagctctctatatccgtgtctcgacagaggaccaaacagagtta

SEQ ID NO: 20535 - DNA, 260 bp, Unknown
  Description of Unknown: LeftRegion for integrase B7536 sequence
tctcacaactactttgaaatactttctagtgtcacttcacggtactaaaaacaatcagatatacactaattttgcaactagtatcatctgattcatcttcattacctacaccaaaaggataccccgcgaatgataaatagtcaacgaaatagaaaaatatttatattttttgtacctctattaagaaggagttaaaccacatgaaaagagtagcattgtatattcgtgtatcatctgacgagcaagccaagtttggtgat

SEQ ID NO: 20536 - DNA, 260 bp, Unknown
  Description of Unknown: LeftRegion for integrase B7537 sequence
tgtcaggtgcaagaaatagcaattaaataaaacaaaaccgcccctgctggtaacagggacggatcaagaatctccgaagagatccagtactttggcaaagatattgtatcatcttcggagcagttgcacaatcagaacatttgtgtggctgttatttttgtacttaaaattacatattttataaaatcgaggtgatatttatgagcagtaaagtggcatgtctttacatccgcgtctcgacagaggaccaaacagagtta

SEQ ID NO: 20537 - DNA, 260 bp, Unknown
  Description of Unknown: LeftRegion for integrase B7538 sequence
ttatcaattgtgatctctgaattattataataaaaaccgcccctgttggtagcagggacggctcaagaatctccgaagagatccctttcttttggcaaagatattgtatcatcttcggagcagttacacaatcagaacgtttgtgtggctgttatttttgtacgaaaaattacatattttataaaaccgaggtgatatttatgagtagtaaagtagcagctctctatatccgtgtctcgacagaggaccaaacagagtta

SEQ ID NO: 20538 - DNA, 260 bp, Unknown
  Description of Unknown: LeftRegion for integrase B7539 sequence
tttatcaattgtgatctctgaattattataacaaaaaccgcccctgttggtagcagggacggctcaagaatctccgaagagattccgtacttttgcaaagatattgtatcatcttcggagcagttacacaatcagaacatttgtgtggctgttatttttatgcttaaaattacatattttataaaaccgaggtgatatttatgagtagtaaagtagcagctctctatatccgtgtctcgacagaggaccaaacagagtta

SEQ ID NO: 20539 - DNA, 260 bp, Unknown
  Description of Unknown: LeftRegion for integrase B7540 sequence
ggggtcttttatttttttgaataatctataaaataaaaaccggctcctgcgccaacagaaaccggtcagcatctccgaagagatacccttattagcaaagatattgtatcatcttcggagcagttacacaatcagaacgtttgtgtggctgttatttttgtacttaaaattacatattttataaaaccgaggtgatatttatgagtagtaaagtagcagctctctatatccgtgtctcgacagaggaccaaacagagtta

SEQ ID NO: 20540 - DNA, 260 bp, Unknown; identical to SEQ ID NO: 20494
  Description of Unknown: LeftRegion for integrase B7541 sequence

SEQ ID NO: 20541 - DNA, 260 bp, Unknown
  Description of Unknown: LeftRegion for integrase B7542 sequence
tgagcagtctcttttctgctaattaaagtaaaccgcccttgcgctaccaacacaagggcgacaatcagaatctccgaagagatccagcactttagcaaagatattgtatcatcttcggagcagttacacaatcagaacatttgtgtggctgttatttttatacttaaaattacatattttataaaaccgaggtgatatttatgagcagtaaagtggcatgtctttacatccgcgtctcgacagaggaccaaacagagtta

SEQ ID NO: 20542 - DNA, 260 bp, Unknown
  Description of Unknown: LeftRegion for integrase B7543 sequence
aagaagcggagatgaatggtggtatacgactggaacagttacagttaaagacaaagaatattcattgggagtatatatgccagtgggtgaatatttcaactatgaatacattgcttttttcggcatttctgaaaacgaaataaaggatatattagattttacaactatatcttggcattttgacaaaaaggagaattgatatgaaaaaaaaaggaaaaagggtggcttgttacattcgtgtatcaacgcaagagcaaaag

SEQ ID NO: 20543 - DNA, 260 bp, Unknown; identical to SEQ ID NO: 20517
  Description of Unknown: LeftRegion for integrase B7544 sequence

SEQ ID NO: 20544 - DNA, 260 bp, Unknown; identical to SEQ ID NO: 20536
  Description of Unknown: LeftRegion for integrase B7545 sequence

SEQ ID NO: 20545 - DNA, 260 bp, Unknown; identical to SEQ ID NO: 20514
  Description of Unknown: LeftRegion for integrase B7546 sequence

SEQ ID NO: 20546 - DNA, 260 bp, Unknown
  Description of Unknown: LeftRegion for integrase B7547 sequence
ttctaaagaagttcaacaactagaaagcaaaaattaactatgaaaacaaaagcgatccctgcgccaacaggaaccgctttaacatagatcactcttatcaggtatactgaaagatataatccactccattccagattataccatttcagtggcacctgcacaagaggtgtattttttataccctttttggaggtactcttatgaaaaaagcagctatttatgtccgggtatctacccaggaacaggctcaagaaggtttt

SEQ ID NO: 20547 - DNA, 260 bp, Unknown; identical to SEQ ID NO: 20546
  Description of Unknown: LeftRegion for integrase B7548 sequence

SEQ ID NO: 20548 - DNA, 260 bp, Unknown; identical to SEQ ID NO: 20546
  Description of Unknown: LeftRegion for integrase B7549 sequence

SEQ ID NO: 20549 - DNA, 260 bp, Unknown
  Description of Unknown: LeftRegion for integrase B7550 sequence
aaaacttatatgtagtaaatgtggcagtaaactaaagcgcagaacatggaacagtggtaaaccttctcaaaagatagtatggcaatgtagcacgtatataaaagaaggaaaaaatgtctgtgaaggaacagttatagatgatgcgcttataacagcacttaatatagaagaagaaacagttataaaggagtgggtagtgaatggcgagaagcgttacctgtataccagcaaggcagacgatagcaactgaagggaataca

SEQ ID NO: 20550 - DNA, 260 bp, Unknown
  Description of Unknown: LeftRegion for integrase B7551 sequence
agaatacaaatcaaaataaatactcccctgcgccaacagaggagtaacaaagtgatacgccaatatcacatataaaaaaacttcgcctaaagtccttttacgtactttattttaccatataaagcacgtctaaggcaaatatataagataggacgtgtttttattatgccaatttgcataacaaagaaagggatggttgtatgagaaagaaaatacgtgtagcacaatatgagcgtgtttctcatgaagatcaaaaaaaa

SEQ ID NO: 20551 - DNA, 260 bp, Unknown
  Description of Unknown: LeftRegion for integrase B7552 sequence
ctgatttcgatgcgagcacgtatcaaaacaatatacctaatgatatagctgctggaatgaaagctaatataactttttacttctcttcaaaaggttctggtccatatgttgttacatttggagatggtatgtggaagtaataaatatctcttctctggtgagttcaagcgtgttcgattcacgctaagggcttcaatattatgaaaggagaaagtgaattggataaaaaagcagctatctatatccgtgtatccactcaa

SEQ ID NO: 20552 - DNA, 260 bp, Unknown
  Description of Unknown: LeftRegion for integrase B7553 sequence
acgactttgagaaccgcaaggagttggagggggataaggattcaactgcggcagtctaagatcgtaccaatcgaattacttagaagaaaagaagcattggaggtgagactatcaaagcggtaatctatgctcggtattcgagccacaatcaaagagaagaatccatcgaaggacaacttcgagagtgccatgagtttgccttgaaaaacggatttgtcgtggtgaatgaatatatagatcgtgcgatttcgggcaagacc

SEQ ID NO: 20553 - DNA, 260 bp, Unknown
  Description of Unknown: LeftRegion for integrase B7554 sequence
aaacgcaaataaattgaaaatgaagtctgtagcacagagtattgataatgacataaacaaataaaaaaatccctctgttccgctaagacagagggcgatagatacagcggtctaacgctataccttacttcgcaaataaagtatatcataagaccgccttatttgctatacattttttccaaataggaggtctttttttaatgcgagtaggattatatacaagggtatctacacaggaacaggctcaggaaggttattct

SEQ ID NO: 20554 - DNA, 260 bp, Unknown; identical to SEQ ID NO: 19972
  Description of Unknown: LeftRegion for integrase B7555 sequence

SEQ ID NO: 20555 - DNA, 260 bp, Unknown
  Description of Unknown: LeftRegion for integrase B7556 sequence
cattatgagattttaatatcataaataacaggcataaaggagtcgatttcgacgcctttagaaataaaaaaatccccctgtgccgctaacacagagggataaaagcagcggtcagtgaaccactacaaagaacatatttagtatatcataagaccgccttatttgctatacatttttttcaaataggaggtctttttttaatgcgagtaggattatatacaagggtatctacacaggaacaggctcaggaaggttattct

SEQ ID NO: 20556 - DNA, 260 bp, Unknown
  Description of Unknown: LeftRegion for integrase B7557 sequence
atggaaaaaacaaaaatgtgtaactttgcataaaaaccggcccctgcgccaacagagaccggctcgtacatccgaagatgacattcatttatgcaagaatattgtatcatcttcggggcagtcgttcaatcagaaactttgttcgactgttatttttgtacctaaaattacataatatctaaaaccgaggtgatgtttttatgaaaacaggtgctctatatatccgtgtcagtaccgatgatcaggcggagttgtctcct

SEQ ID NO: 20557 - DNA, 260 bp, Unknown
  Description of Unknown: LeftRegion for integrase B7558 sequence
tttcgatgcgagcacgtatcaaaacaatatacctaatgatatagctgctggaatgaaagctaatataactttttacttctcttcaaaaggttctggtccatatgttgttacatttggagatggtatgtggaagtaagtaataaatatctcttctctggtgagttcaagcgtgttcgattcacgctaagggcttcaatattatgaaaggagaaagtgaattggataaaaaagcagctatctatatccgtgtatccactcaa

SEQ ID NO: 20558 - DNA, 260 bp, Unknown
  Description of Unknown: LeftRegion for integrase B7559 sequence
aagattactattcaacagcaaccgatgtgagagataatatgtttgaattgaaaattattccttgcgaaacaaaagacgaattggataaaacagaaaaagaactaattgaacagtacgacgcatataacaaaggttataatagaacatcagggaatagttgaattaaaattatttcgacaacgaaaaaatgaggagaatcaatgcgagcaggactgcaaattcgtgtatccacacttgaacaagctatagaggggtactct

SEQ ID NO: 20559 - DNA, 260 bp, Unknown
  Description of Unknown: LeftRegion for integrase B7560 sequence
gttgataatatgaacgtaacttattcttttaacggaactgaaatttcgaagagcgagttgcagaaaatcgctatacacagcgaagctttccggcgtgttcaattaaggctgaaaagagaaagcgcaatgtcaagttgattgagattttcagcgggccgaggcaggacaacctcggcccgcctggtgcataggagattgatatggcaaagtctaaaatgaaaaaaatagttgctccagagcaactcactcaatcgatcgtt

SEQ ID NO: 20560 - DNA, 260 bp, Unknown
  Description of Unknown: LeftRegion for integrase B7561 sequence
acctggggaaaagacatggaaggttattccacattgattatgtataagtaaagaaaataaaacacccctgcggtgctgggaacaccacaagggcttgtgcaaagatatatcataccagatacaacataccatctgcattgctattatagcacatgcaggcgggaaataacaggaaatgaaaaggcaggtgctataatgatatgatgaaaaaaattgctgttctttatatgagaatgtccaccgatatgcaggaacattcc

SEQ ID NO: 20561 - DNA, 260 bp, Unknown
  Description of Unknown: LeftRegion for integrase B7562 sequence
taaacttatttgtagtaaatgtggcagtaaactaaagcacagaatatggaatagtggtaagccatctcaaaagatagtatggcaatgtagcaaatatattaaagaaggaaaagatgcctgtgaaggaacagttatagaggatgctcttattacagcacttaatataaaggaagaaacaattgtaaaggagtgtttagttgatggcaagaagtattacacatataccagcaaggcagactgtagtaacaactaataataac

SEQ ID NO: 20562 - DNA, 260 bp, Unknown
  Description of Unknown: LeftRegion for integrase B7563 sequence
ctattctttaaaaataaagaaaacttgatatttcttatattataccctaataaacagaaaaagtaaacttgcttgcataattttttcttccaaaatttaatgtctatgatcttattattgctaaatacattttgacatcgcgaacgtataataatataatccttataacgacgtttgttttataaaaaggagatgtttgtatgcttgagaaaatcttaagagtagcgttatatatacgtgtttccactcaggaacaagtt

SEQ ID NO: 20563 - DNA, 260 bp, Unknown
  Description of Unknown: LeftRegion for integrase B7564 sequence
ttacgagaaaagcagtttattatgcgagagtttcaaccgaggaagagaaacaaataaatgcattaaaaaaacagagagaagaacttgaagcattcattaattcgcatgaagattgggttttagtcgatcactattatgacgaggggaagtctggtactacacgcaatgggcgagagggatacaataggctatttgaagatatgctcgaaaataaattcgatatcatcgtcattaaggatcaaagccgcttgatgcgtaat

SEQ ID NO: 20564 - DNA, 260 bp, Unknown
  Description of Unknown: LeftRegion for integrase B7565 sequence
ttacgaaaaaagcagtttattatgcgagagtttcaaccgaggaagagaaacaaataaatgcattaaaaaaacagagagaagaacttgaagcattcattaattcgcatgaagattgggttttagtcgatcactattatgacgagggaaagtctggtactacacgcaatggacgagagggatacaataggctatttgaagatatgctcgaaaacaaattcgatatcatcgtcattaaggatcaaagccgcttgatgcgtaat

SEQ ID NO: 20565 - DNA, 260 bp, Unknown
  Description of Unknown: LeftRegion for integrase B7566 sequence
tatcactttctttgctaaaaaatgaataaggtgctactataacaatatattagggaattattcctaaactttttttcatattcgctattcatatttgaatagtaaacttgaaatcttataattataagtggcacctattttatataggtgtctttttttatgcgataaattcttaggtagcatcatcttttaaaggagtgatgtattatgaacgtagctatttacgttcgtgtcaggtgagttcctatgagcaagcaacg

SEQ ID NO: 20566 - DNA, 260 bp, Unknown
  Description of Unknown: LeftRegion for integrase B7567 sequence
ataagaaaaacgcattagaaagtgcaaaatcttatcaagaagatatgaatatgtctaaagatgcaatttacgatcaattaatttcaaattctggcgataaatttacagaagaagaagcgcaatatgcagtggatcatttagacgaataatttatgggtagcttgtctacccttattatttttttacttttttaaggagtgatgtattatgaacgtagctatttacgttcgtgtcaggtgagttcctatgagcaagcaacg

SEQ ID NO: 20567 - DNA, 260 bp, Unknown
  Description of Unknown: LeftRegion for integrase B7568 sequence
acatgatgttaaactggcggcggccagaaagccaccgccctgctaaaaaaacaagataaaaatacccctgcggtgctgggaacaccacaagggcttgtgcaaagatatatcataccagatacaacataccatctgcattgctattatagcacatgcaggcgggaaataacaggaaatgaaaaggcaggtgctataatgatatgatgaaaaaaattgctgttctttatatgagaatgtccaccgatatgcaggaacattcc

SEQ ID NO: 20568 - DNA, 260 bp, Unknown
  Description of Unknown: LeftRegion for integrase B7569 sequence
aggcagaaatacaaatccctaccgtaaaaatagactaacaaaaacttgtcgttttttcaacgaggttgttaaaaactataaaaataaattaaggagattgtacaacgaaatgccgacaattaaatttttcagaacaagttttcgttctattacaataaacaaagattgtcgatttgacgactcaacaaacgaggtgaaaaatgcgggcaggtttgcaaattcgcgtatcaactcttgaacaggctattgacggctattcg

SEQ ID NO: 20569 - DNA, 260 bp, Unknown; identical to SEQ ID NO: 20564
  Description of Unknown: LeftRegion for integrase B7570 sequence

SEQ ID NO: 20570 - DNA, 260 bp, Unknown
  Description of Unknown: LeftRegion for integrase B7571 sequence
gcgaaatcaataaacgaatttcttgctttccgcaaatataaaattttatataataaaggaaccgtatcaaaagcagacgcagacaagaaagcaatggcagaatacgatatgttcaataaaacgcaaagaataaattccgactttgacagagaagtcaaaaaattattagcaactcaaaagaacgattcaaagaggtaatcatgcgagcaggactgcaaattcgagtatccacacttgaacaagctatcgagggatactct

SEQ ID NO: 20571 - DNA, 260 bp, Unknown
  Description of Unknown: LeftRegion for integrase B7572 sequence
agcttgagggggataagggagcaactgcggcggtgtgataagctcattccattcgctttgatacatagaaagaagatattggaggtgagactatcaaagcagtaatttatgctcgttactcgagccataatcaacgagaagaatccatcgagggtcagcttcgagagtgccatgagttcgctctcaagaatgacttcatcgtggttgacgaatatatcgaccgggcaatctccggcaagactgataaccgacccagcttt

SEQ ID NO: 20572 - DNA, 260 bp, Unknown; identical to SEQ ID NO: 20560
  Description of Unknown: LeftRegion for integrase B7573 sequence

SEQ ID NO: 20573 - DNA, 260 bp, Unknown
  Description of Unknown: LeftRegion for integrase B7574 sequence
gttgataatatgaacgtaacttattcttttaacggaactgaaatttcgaagagcgagttgcagaaaatcgctatacacagcgaagctttccggcgtgttcagttaaggctgaaaagagaaagctccatggcgagttgatcgacatttgtggcgggccgaggcacaacaaccttggcccgcctgatatataggagattgacatggctaagtctaaaatgaaaaaaatagttgctccagagcatctcgcgcaatcgattgtt

SEQ ID NO: 20574 - DNA, 260 bp, Unknown
  Description of Unknown: LeftRegion for integrase B7575 sequence
acaaattattagaattacagtaaaatactaaaaaatccccggtgttaccagcaccagggaaaacgagaaaactatagggtgtttggaacacagtacaattctctccctcacaaagattattgtatcacaaaaatccggcaccgtataggtgttatttttgtacccatttttacgtacacttaagaaggaaaggtgatacaatgagcgtaaaatatgcatacggctacatccgggtatccactcatgatcaggaagagatc

SEQ ID NO: 20575 - DNA, 260 bp, Unknown
  Description of Unknown: LeftRegion for integrase B7576 sequence
cgggcctcccacacaaatatgcgcaagcattgcccctctcttaaacacaaaaggccgcccccgtgttggcgcacgggaacggccaaagaacgcgctgcacggcaaaaactgccatactttacgccctcacagcacaaagtatagcacaaaaacgccgcgcggcatagtacctttatacaatttcgcggggtgtttttattatgttgtacggaaaaccacaaaattatgcgtggtatcgcgcaagagttattttatacata

SEQ ID NO: 20576 - DNA, 260 bp, Unknown
  Description of Unknown: LeftRegion for integrase B7577 sequence
ggcgggcctcccacacaaaaacacgcacaactgccccctttacaaacagaaaaggccgcccccgtgttggcgcacggaaacggccaaagaacgcgctgcacggcttttgtgccatacttcacgccctcacagcagaaagtatagcacaaaaacgccgcgcggcatagtacctttgtacaatttcgcggggtgtttttattatgttgtacggtaaaccgcaaaattattcgtggtatcgtgcgcgggtggtgctttatatc

SEQ ID NO: 20577 - DNA, 260 bp, Unknown
  Description of Unknown: LeftRegion for integrase B7578 sequence
cgggcctcccacacaaatatgcgcaagcattgcccctctcttaaacacaaaaggccgcccccgtgttggcgcacgggaacggccaaagaacgcgctgcacggcaaaaactgccatactttacgccctcacagaacaaagtatagcacaaaaacgccgcgcggcatagtacctttatacaatttcgcggggtgtttttattatgttgtacggaaaaccacaaaattatgcgtggtatcgcgcaagagttattttatacata

SEQ ID NO: 20578 - DNA, 260 bp, Unknown
  Description of Unknown: LeftRegion for integrase B7579 sequence
ctggcctcccacacaaatatgcgcaagcgttgcccctctcttaaacacaaaaaggccgcccccgtgttggcgcacggaaacggccaaagaacgcgctgcacggcttttgtgccatacttcacgccctcacagcacaaagtatagcacaaaaacgccgcgcggcatagtacctttgtacaatttcgcggggtgtctttattatgttgtacggaaaaccacaaaattatgcgtggtatcgcgcaagagttattttatacata

SEQ ID NO: 20579 - DNA, 260 bp, Unknown
  Description of Unknown: LeftRegion for integrase B7580 sequence
ggcgggcctcccacacatatacacgcaccattaccccctataaaagcaaaagggccgcccccgtgttggcgcacgggaacggccaaagaacgcgctgcacggcaaaaactgccatacttcacgccccacagcagaaagtatagcacaaaaacgccgcgcggcatagtacctttgtacaatttcgcggggtgttttttgttatgttgtacggtaaaccgcaaaattattcgtggtatcgtgcgcgggtggttctttatatc

SEQ ID NO: 20580 - DNA, 260 bp, Unknown
  Description of Unknown: LeftRegion for integrase B7581 sequence
attatggagaagatattcctactgatgaaacaatggaagaggtaaaagaagtttatggtattcttccagtggataaattaaaaggagttatggagttagaaaaattaatagcataggaggacatatgaaatataaacaagaaataatagaacttttacacaaaataagagataaacaacttaaaagagaggtaaaagaaaatgaaaaagctgagagcgatagcttattgtagagtttctactgttactcaagaagaggga

SEQ ID NO: 20581 - DNA, 260 bp, Unknown
  Description of Unknown: LeftRegion for integrase B7582 sequence
ctcgtagcaatacggggtcttttacgttaaagaaaaaccgccccggcgctaccaacaccaggacggcttaatacatatccgaagatatgcaagtactttgatcgataatattgtatcatcttcggaacagccttacaatccagaacttttgttctgttttggctgttattattatacaattacataaaggagatgataccgtgtctgaaaaaatcaaacgctgcgctatttacattcgtgtatccacatcagagcagctc

SEQ ID NO: 20582 - DNA, 260 bp, Unknown; identical to SEQ ID NO: 20581
  Description of Unknown: LeftRegion for integrase B7583 sequence

SEQ ID NO: 20583 - DNA, 260 bp, Unknown
  Description of Unknown: LeftRegion for integrase B7584 sequence
tggcgggcctcccacacatatacacgcaccattgccccctataaaagcaaaagggccgcccccgtgttggcgcacggaaacggccaaagaacgcgctgcacggcttttgtgccatacttcacgccctcacagcagaaagtatagcacaaaaacgccgcgcggcatagtacctttgtacaatttcgcggggtgtttttattatgttgtacggtaaaccgcaaaattattcgtggtatcgcgcgcgggttgtgctttatatc

SEQ ID NO: 20584 - DNA, 260 bp, Unknown; identical to SEQ ID NO: 20575
  Description of Unknown: LeftRegion for integrase B7585 sequence

SEQ ID NO: 20585 - DNA, 260 bp, Unknown
  Description of Unknown: LeftRegion for integrase B7586 sequence
ggcgggcctcccacacatatacacgcaccattaccccctacaaaagcaaaagggccgcccccgtgttggcgcacgggaacggccaaagaacgcgctgcacggcaaaaactgccatacttcacgccccacagcacaaagtatagcacaaaaacgccgcgcggcatagtacctttgtacaatttcgcggggtgttttttattatgttgtacggtaaaccgcaaaattattcgtggtatcgtgcgcgggtggttctttatatc

SEQ ID NO: 20586 - DNA, 260 bp, Unknown
  Description of Unknown: LeftRegion for integrase B7587 sequence
tgaaaagaacgccagcgttaaaaatcaataaagaaaaagagcagtcaccctgctaaatgactgcccctttttgtttcaccgtgttgtcgtggtctcaacatgtaaaacggattgctctgttattatatcacagacctacgattttgcataggtctattttttatacccttttttattttttgagggagaaagaaggtaatatggctagtaatttctttgcaccgcagccggagctgtttggccggcgtgttgtgaaatat

SEQ ID NO: 20587 - DNA, 260 bp, Unknown
  Description of Unknown: LeftRegion for integrase B7588 sequence
ggtgccctttataatttttcccaatggccaaatcgcgcaagatgctgtttatgatattcatagtttgtttcctccttggttgtcaaaagcattctatggcagaaatcgtcacaaaacagcttttccagtttttatttatgtttttcggcgctttcaagcaaaaaacgccatatttcaaacatgtcatgcgaggtgtgatgatgtatcaagatatcacaacagtttgcggatatgtccgcgtatcgaccgaaaatcaattg

SEQ ID NO: 20588 - DNA, 260 bp, Unknown; identical to SEQ ID NO: 20585
  Description of Unknown: LeftRegion for integrase B7589 sequence

SEQ ID NO: 20589 - DNA, 260 bp, Unknown; identical to SEQ ID NO: 20585
  Description of Unknown: LeftRegion for integrase B7590 sequence

SEQ ID NO: 20590 - DNA, 260 bp, Unknown; identical to SEQ ID NO: 20575
  Description of Unknown: LeftRegion for integrase B7591 sequence

SEQ ID NO: 20591 - DNA, 260 bp, Unknown; identical to SEQ ID NO: 20585
  Description of Unknown: LeftRegion for integrase B7592 sequence

SEQ ID NO: 20592 - DNA, 260 bp, Unknown
  Description of Unknown: LeftRegion for integrase B7593 sequence
gcgggcctcccacacaaatatgcgcaagcattgcccctctcttaaacacaaaaggccgcccccgtgttggcgcacggaaacggccaaagaacgcgctgcacggcttttgtgccatacttcacgccctcacagcagaaagtatagcacaaaaacgccgcgcggcatagtacctttgtacaatttcgcggggtgtttttattatgttgtacggaaaaccacaaaattatgcgtggtatcgcgcaagagttattttatacata

SEQ ID NO: 20593 - DNA, 260 bp, Unknown
  Description of Unknown: LeftRegion for integrase B7594 sequence
ttatacaggtccggaaataatttgtcaaatcacataaatagaaaaaccgcccggtgttaccagcaccgaacggattttcatagattttctcttgccggatgctccggaaagatataatcagcctgaacaactgaattatatcatcttccaggcatctcggcaaggggtgtattttttatacctttttctggaggtgttatatgaaaaaagtcgctatttacgtccgggtctccacccaggaacaggccgttgaaggatat

SEQ ID NO: 20594 - DNA, 260 bp, Unknown
  Description of Unknown: LeftRegion for integrase B7595 sequence
tggcgggcctcccacacatatacacgcaccattaccccctacaaaagcaaaagggccgtccccgtgttggcgcacgggaacggccaaagaacgcgctgcacggcaaaaactgccatacttcacgccccacagcacaaagtatagcacaaaaacgccgcgcggcatagtacctttgtacaatttcgcggggtgtttttattatgttgtacggtaaaccgcaaaattattcgtggtatcgtgcgcgggtggtgctttatatc

SEQ ID NO: 20595 - DNA, 260 bp, Unknown
  Description of Unknown: LeftRegion for integrase B7596 sequence
cgggcctcccacacaaatatgcgcaagcattgcccctctcttaaacgcaaaaggccgcccccgtgttggcgcacgggaacggccaaagaacgcgctgcacggcaaaaactgccatactttacgccctcacagcacaaagtatagcacaaaaacgccgcgcggcatagtacctttatacaatttcgcggggtgtttttattatgttgtacggaaaaccacaaaattatgcgtggtatcgcgcaagagttattttatacata

SEQ ID NO: 20596 - DNA, 260 bp, Unknown
  Description of Unknown: LeftRegion for integrase B7597 sequence
tggcgggcctcccacacatatacacgcaccattgccccctataaaagcaaaagggccgcccccgtgttggcgcacggaaacggccaaagaacgcgctgcacggcttttgtgccatacttcacgccctcacagcagaaagtatagcacaaaaacgccgcgcggcatagtacctttgtacaatttcgcggggtgtttttattatgttgtacggtaaaccgcaaaattattcgtggtatcgcgcgcgggtggtgctttatatc

SEQ ID NO: 20597 - DNA, 260 bp, Unknown
  Description of Unknown: LeftRegion for integrase B7598 sequence
gatacttagaccattatgatggcgaagatcatgtagattatgatattgattaaaaaaagagaaatatgttctagtttgcgacaaggtacatatttctcactcataatcactattgaaaatgattactttattattatacatgataaagtctctattttcaatagtaaaaaataaattatttggaaatagaggtattttttatggttaaagaaataaataataatatgaatgattttacaaaaaaagttgaagaagtagct

SEQ ID NO: 20598 - DNA, 260 bp, Unknown
  Description of Unknown: LeftRegion for integrase B7599 sequence
ctgttcttattgtaggagtggtaaaacaattaaaaagagaatattaataaacaaaaagagaaatatgttactagtttgcgacaaggtacatatttctcactcataatcactattgaaaatgattactttattattatacatgataaagtctctattttcaatagtaaaaaataaattattgagaaatagaggtattttttatggataaaaaaataaataataatatgaatgattttacgaaaaaagttgaagaagtagct

SEQ ID NO: 20599 - DNA, 260 bp, Unknown
  Description of Unknown: LeftRegion for integrase B7600 sequence
gcgggcctcccacacaaatatgcgcaagcattgcccctctcttaaacacaaaaggccgctcccgtgttggcgcacgggaacggccaaagaacgcgctgcacggcaaaaactgccatacttcacgccccacagcacaaagtatagcacaaaaacgccgcgcggcatagtacctttatacaatttcgcggggtgtttttattatgttgtacggaaaaccgcaaaattatgcgtggtatcgcgcaagagttattctatacata

SEQ ID NO: 20600 - DNA, 260 bp, Unknown
  Description of Unknown: LeftRegion for integrase B7601 sequence
gcgggcctcccacacaaatatgcgcaagcattgcccctctcttaaacacaaaaggccgcccccgtgttggcgcacgggaacggccaaagaacgcgctgcacggcaaaaactgccatacttcacgccccacagcacaaagtatagcacaaaaacgccgcgcggcatagtacctttatacaatttcgcggggtgtttttattatgttgtacggaaaaccacaaaattatgcgtggtatcgcgcaagagttattttatacata

SEQ ID NO: 20601 - DNA, 260 bp, Unknown
  Description of Unknown: LeftRegion for integrase B7602 sequence
gatacttagaccattatgatggcgaagatcatgtagattatgatattgattaaaaaaagagaaatatgttctagtttgcgacaaggtacatatttctcactcataatcactattgaaaatgattactttattattatacatgataaagtctctattttcaatagtaaaaaataaattattgggaaatagaggtattttttatggataaaaaaataaataataatatgaatgattttacgaaaaaagttgaagaagtagct

SEQ ID NO: 20602 - DNA, 260 bp, Unknown
  Description of Unknown: LeftRegion for integrase B7603 sequence
agttgaattaaactatggaattgatattgcattagaattatatgaacaataaaaaaagacttactgctggaacagtaagccgaatgaaaaatcacaaattagtcgctaaactaaataaacaaaataaggttataatgtttatggatttttctatatcattataacaaattttcaataaaaagaaaagaggttataataaaatgaataaaataattagagttggaatatatataagagtatctactgaggaacaagccaaa

SEQ ID NO: 20603 - DNA, 260 bp, Unknown
  Description of Unknown: LeftRegion for integrase B7604 sequence
tggcgggcctcccacacatatacacgcaccattgccccctataaaagcaaaagggccgcccccgtgttggcgcacggaaacggccaaagaacgcgctgcacggcttttgtgccatacttcacgccctcacagcagaaagtatagcacaaaaacgccgcgcggcatagtacctttatacaatttcgcggggtgtttttattatgttgtacggaaaaccacaaaattatgcgtggtatcgcgcaagagttattttatacata

SEQ ID NO: 20604 - DNA, 260 bp, Unknown
  Description of Unknown: LeftRegion for integrase B7605 sequence
tgaggatttgaaaatctgtatttcagatactttataaaaaaaccgccccggcgcgccaacaccaggacgggatacatatccgaagatatgcgtatattaagtcaaaaatattgtatcatcttcggaacagccttacaatccagaacttttgttctgttttggctgttattattatacaattacataaaggagatgataccgtgtctgaaaaaatcaaacgctgcgctatttacattcgtgtatccacatcagagcagctc

SEQ ID NO: 20605 - DNA, 260 bp, Unknown; identical to SEQ ID NO: 20585
  Description of Unknown: LeftRegion for integrase B7606 sequence

SEQ ID NO: 20606 - DNA, 260 bp, Unknown
  Description of Unknown: LeftRegion for integrase B7607 sequence
gatacttagaccattatgatggcgaagatcatgtagattatgatatcgattaaaaaaagagaaatatgttctagtttgcgacaaggtacatatttctcactcataatcactattgaaaatgattactttattattatacatgataaagtctctattttcaatagtaaaaaataaattatttggaaatagaggtattttttatggttaaagaaataaataataatatgaatgattttacaaaaaaagttgaagaagtagct

SEQ ID NO: 20607 - DNA, 260 bp, Unknown
  Description of Unknown: LeftRegion for integrase B7608 sequence
ggcgggcctcccacacatatacacgcaccattgccccctataaaagcaaaaagggccgcccccgtgttggcgcacggaaacggccaaagaacgcgctgcacggcttttgtgccatacttcacgccctcacagcagaaagtatagcacaaaaacgccgcgcggcatagtacctttgtacaatttcgcggggtgtttttattatgttgtacggtaaaccgcaaaattatgcgtggtatcgtgcgcgggtggtgctttatatc

SEQ ID NO: 20608 - DNA, 260 bp, Unknown
  Description of Unknown: LeftRegion for integrase B7609 sequence
gatacttagaccattatgatggcgaagatcatgtagattatgatattgattaaaaaaagagaaatatgttctagtttgcgacaaggtacatatttctcactcataatcactattgaaaatgattactttattattatacatgataaagtctctattttcaatagtaaaaaataaattatttggaaatagaggtattttttatggttaaagaaataaataataatatgaatgattttacgaaaaaagttgaagaagtagct

SEQ ID NO: 20609 - DNA, 260 bp, Unknown
  Description of Unknown: LeftRegion for integrase B7610 sequence
tcgggcctcccacacaaatatgcgcaagcattgcccctctcttaaatacaaaaagccgcccccgtgttggcgcacgggaacggccaaagaacgcgctgcacggcaaaaactgccatacttcacgccccacagcacaaagtatagcacaaaaacgccgcgcggcatagtacctttatacaatttcgcggggtgtttttattatgttgtacggaaaaccacaaaattatgcgtggtatcgcgcaagagttattctatacata

SEQ ID NO: 20610 - DNA, 260 bp, Unknown
  Description of Unknown: LeftRegion for integrase B7611 sequence
ctggcctcccacacaaatatgcgcaagcactgcccctctcttaaacacaaaaaggccgcccccgtgttggcgcacggaaacggccaaagaacgcgctgcacggcttttgtgccatacttcacgccctcacagcacaaagtatagcacaaaaacgccgcgcggcatagtacctttgtacaatttcgcggggtgtttttattatgttgtacggaaagccacaaaattatgcgtggtatcgcgcaagagttattttatacata

SEQ ID NO: 20611 - DNA, 260 bp, Unknown
  Description of Unknown: LeftRegion for integrase B7612 sequence
ctggcgggcctcccacacatatacacgcaccattgccccctataaaagcaaaagggccgcccccgtgttggcgcacggaaacggccaaagaacgcgctgcacggcttttgtgccatacttcacgccctcacagcagaaagtatagcacaaaaacgccgcgcggcatagtaccttgtacaatttcgcggggtgtttttattatgttgtacggtaaaccgcaaaattattcgtggtatcgtgcgcgggtggtgctttatatc

SEQ ID NO: 20612 - DNA, 260 bp, Unknown
  Description of Unknown: LeftRegion for integrase B7613 sequence
tttgaaaatctgtatttcagatactttataaaaaaccgccccggcgctaccaacaccaggacggcaatagaccactgttccgaagattacagtagtacgttcaaaaaatattgtatcatcttcggaacagccttacaatccagaacttttgttctgttttggctgttattattatacaattacataaaggagatgataccgtgtctgaaaaaatcaaacgctgcgctatttacattcgtgtatccacatcagagcagctc

SEQ ID NO: 20613 - DNA, 260 bp, Unknown
  Description of Unknown: LeftRegion for integrase B7614 sequence
tacgggcctcccacacaaaaacacgcacaactgccccctttacaaacagaaaaggccgcccccgtgttggcgcacggaaacggccaaagaacgcgctgcacggcttttgtgccatacttcacgccctcacagcagaaagtatagcacaaaaacgccgcgcggcatagtacctttgtacaatttcgcggggtgtttttattatgttgtacggtaaaccgcaaaattatgcgtggtatcgcgcgcgggtggtgctttatatc

SEQ ID NO: 20614 - DNA, 260 bp, Unknown
  Description of Unknown: LeftRegion for integrase B7615 sequence
gtgccagaagataaaattaacgaaattctcggaacaaattctgatacagaataaacttaaaaaatcccccttcccgctaccaacaggaaaggagattcatatagcggtcataccgtggtataatccgccctcgacaagcagattataacacaagaccgctttatttgctatacccaaaatcaaataaaggaggtctgaatatgttaaaagcagcattatacgcccgtgtatcctctgaggaacaggcgaaacgggaaaac

SEQ ID NO: 20615 - DNA, 260 bp, Unknown
  Description of Unknown: LeftRegion for integrase B7616 sequence
gagaatacgcacgtggctttcgttccgtgcgagggacagaatattgagattgaaaatgaccggattcggctggtgattacggatgctcgccagattgacttccaaagctaccagccccacccagagggcgaatttaccgaggagcagcgcacctgccgtaactggatcttcgccaactacctgttagacgggatgccgctgtgagacgggcagccctctatatccgcgtttccacgctggaacaggcacaagagggctac

SEQ ID NO: 20616 - DNA, 260 bp, Unknown; identical to SEQ ID NO: 18298
  Description of Unknown: LeftRegion for integrase B7617 sequence

SEQ ID NO: 20617 - DNA, 260 bp, Unknown
  Description of Unknown: LeftRegion for integrase B7618 sequence
tccgcaatcctgattgtcatttccgctgtttttctggctccgccgttttccaaagtaaataagatttcaaagggtacccgggttgctgttataatcgttacatttatagcagcgttctgggtatcgctaaaatagattatatttccccggtgccgcgcatgacggtttccggggaaaattgtataaaaatggagatcgcaatggacaaggcagtatttatttatacccgcgtatcaacgcgtgagcaggcagacgagggc

SEQ ID NO: 20618 - DNA, 260 bp, Unknown; identical to SEQ ID NO: 20614
  Description of Unknown: LeftRegion for integrase B7619 sequence

SEQ ID NO: 20619 - DNA, 260 bp, Unknown; identical to SEQ ID NO: 18298
  Description of Unknown: LeftRegion for integrase B7620 sequence

SEQ ID NO: 20620 - DNA, 260 bp, Unknown; identical to SEQ ID NO: 20614
  Description of Unknown: LeftRegion for integrase B7621 sequence

SEQ ID NO: 20621 - DNA, 260 bp, Unknown
  Description of Unknown: LeftRegion for integrase B7622 sequence
ggcaatccgacctaaaacacaatacataaacagtctcaggtagtttcaattttaaagcaaaaaaatcccctctcctgcgccaacaggaaagaggattcatatagcggtcataccatggtataatccgccctcgacaagcagattataacacaagaccgctttatttgctatacctaaaatcaaataaaggaggtctgaatatgttaaaagcagcattatatgcccgcgtatcctctgaggagcaggcaaaacgggaaaac

SEQ ID NO: 20622 - DNA, 260 bp, Unknown
  Description of Unknown: LeftRegion for integrase B7623 sequence
gtttctcatgtggaaaacaacatcagcagcggagccctgaacaacagctcgttcatccaagcgaatcatggcggcatcgtcgagagctcgtcctctgctccatcacctgaagcggcagaactcctaaaaatctacgattctctcggaggccgagaccgcctgaagctcttgaatttcgcagtcgaaatggttgacggcaaatgaaacgagcagcagtttatatccgcgtatcgacacaggaacaggcgcaggagggctac

SEQ ID NO: 20623 - DNA, 260 bp, Unknown
  Description of Unknown: LeftRegion for integrase B7624 sequence
tctgcaatcctgattgtcgtttctgctgttttcatggctccgccgttttccaaagtaaataagatttcaaagggtacgcggattgctgttgtaatcgttacatttatagcggcattctgggtatcgctaaaatagattatatttccccggtgccgcgcatgacggttgccggggaaaattgtataaaaatggagatagcaatggacaaggcagtatttatttatacccgcgtgtctactcgtgagcaggcggacgaggga

SEQ ID NO: 20624 - DNA, 260 bp, Unknown
  Description of Unknown: LeftRegion for integrase B7625 sequence
gaaatggatgaaataacagaaggatctcaagagagtcttgaatattggctaggtcaataaaaaaagagccagtactgcgaatactgactcaaaatggattcttatccaatcaaccacgatttaataaggaaatcctctttaattttaacataaaaggacttccttatcaataaatttgtaaagaaaaggaagtgttaaaattgaatttagaactaaataaaataataaaagtagctttatatacaagagtatcaacaata

SEQ ID NO: 20625 - DNA, 260 bp, Unknown
  Description of Unknown: LeftRegion for integrase B7626 sequence
gaaaatacgcacgttgctttcgtaccatgtgagggtcagaatatcgagattgacaacgaccggattcggctggtaatcaccgatgctcgccagatagactttcagagctaccaaccccatccagagggcgagtttacagaggaacagcgcacctgccgtaactggatattcgccaactacctgttagacgggatgccgctgtgaaacgcgcagccctctacatccgcgtctctacattggaacaggcgcaagagggctac

SEQ ID NO: 20626 - DNA, 260 bp, Unknown
  Description of Unknown: LeftRegion for integrase B7627 sequence
gagaatacgcacgtggctttcgttccgtgcgaggggcaaaatattgagattgaaaatgaccggattcggctggtgattacggatgctcgccagattgacttccaaagctaccagccccacccggagggcgaatttaccgaggaacagcgcacctgccgtaactggatcttcgccaactacctgttagacgggatgccgctgtgagacgggcagccctctatatccgcgtttctacgctggaacaggcacaagagggctac

SEQ ID NO: 20627 - DNA, 260 bp, Unknown
  Description of Unknown: LeftRegion for integrase B7628 sequence
gagaatatgcacgtggctttcgttccgtgcgagggacagaatatcgagattgaaaacgaccggattcggctggtgattacggatgctcgccagattgacttccaaagctaccagccccacccagagggcgaatttaccgaggagcagcgcacctgccgtaactggatcttcgccaactatctgttagacgggatgccgctgtgagacgggcagccctctatatccgagtttccacgctggaacaggcacaagagggctac

SEQ ID NO: 20628 - DNA, 260 bp, Unknown; identical to SEQ ID NO: 20623
  Description of Unknown: LeftRegion for integrase B7629 sequence

SEQ ID NO: 20629 - DNA, 260 bp, Unknown
  Description of Unknown: LeftRegion for integrase B7630 sequence
ggtgatagccctaagcaggatttagaagaatattcttcttttgtaagcaataaaatagcaacctttaccaacgatattttgaatgtctaatataaaaacacccgcagtgctgggaacactccgggtgcggtgcaaagatatatcataccagatacaacataccgtctgcatttattatattaccacctgcggacgggaaattgaaggaaattgacaagaaatgtggtgatattgtgtataaaaaagaacttgccccggat

SEQ ID NO: 20630 - DNA, 260 bp, Unknown; identical to SEQ ID NO: 17770
  Description of Unknown: LeftRegion for integrase B7631 sequence

SEQ ID NO: 20631 - DNA, 260 bp, Unknown
  Description of Unknown: LeftRegion for integrase B7632 sequence
gagaatacgcacgtggctttcgttccgtgcgagggacagaatattgagattgaaaatgaccggattcggctggtgattacggatgctcgccagattgacttccaaagctaccagcctcacccagagggcgaatttaccgaggagcagcgcacctgccgtaactggatcttcgccaactacctgttagacgggatgccgctgtgagacgggcagccctctatatccgcgtttccacgctggaacaggcacaagagggctac

SEQ ID NO: 20632 - DNA, 260 bp, Unknown
  Description of Unknown: LeftRegion for integrase B7633 sequence
attgaaaaatgggtttccttcttcggctccgcgacgttctattgctgaaaaaaccgccccggtgctaccaacaccgaagcggttcaggcgcccggcagtgctaccaacaccgctgagcaatgcagttcgcaacccaccacaataggggcattctgcgccttttatgatagcagatttgccccggaaaggcaaggacaaaaatggctcaatccagatctgccactgaaaaaattctccgagtggcgctttatccgcgcgta

SEQ ID NO: 20633 - DNA, 260 bp, Unknown
  Description of Unknown: LeftRegion for integrase B7634 sequence
tctgcaatcttgattgtcgtttctgctgttttcatggctccgccgttttcaaaagtcgataagatttcaaagggcacccgggttgctgttataatcgttacatttatagcagcgttctgggtctcgataaaatagattatatttccccggtgctgtcagtaacagttgccggggaaaattgtataaaaatggagatagcaatggacaaggcagtatttatttatacccgcgtatcaacgcgtgagcaggcagatgagggg

SEQ ID NO: 20634 - DNA, 184 bp, Unknown
  Description of Unknown: LeftRegion for integrase B7635 sequence
aggaacaaacgcttaatcgcggtttacatcagcgcggcgttaatcgggtgattttcatcagacacgtttaaatacaccatctaaagcgatacaatcgcgctattagtttttatggtggtaaagaatgaaacgtgtaatcagctacatcagattcagttctgagcgacaagccaaaggcgactca

SEQ ID NO: 20635 - DNA, 260 bp, Unknown
  Description of Unknown: LeftRegion for integrase B7636 sequence
tctgcaatcctgattgtcatttccgctgtttttctggctccgccgttttccaaagtaaataagatttcaaatggtacacgggttgctgttataatcgttacatttatagcagcgttctgggtatcgctaaaatagattatatttccccggtgccgcgcatgacggtttccggggaaaattgtataaaaatggagatagcaatggacaaggcagtatttatttatacccgcgtatccacgcgtgagcaggcagacgagggc

SEQ ID NO: 20636 - DNA, 260 bp, Unknown
  Description of Unknown: LeftRegion for integrase B7637 sequence
aaaatgcaattgattttcaaaataaaaagaaaattgaatcaaaataaaataaaaaaaagactccgtgctggaacacgaagtcaaaaatgaaaaacctatttaagctaccaaacttaaaaatacaatatagataactacaatgtacaagatttttctattacattgtagcataaaatttaataaaaaggaagtgttgcaatgtgaaaaaaattgtaaaaaatattactgaaactattattagagttgttttatatataaga

SEQ ID NO: 20637 - DNA, 260 bp, Unknown
  Description of Unknown: LeftRegion for integrase B7638 sequence
gctgtcggatactgataactgattaaataataataaggggtcgatttcgaccccactaaaaaaatcccccttcccgctaccaacaggaaaggagattcatatagcggtcataccgtggtataatccgccctcgacaagcagattataacacaagaccgctttatttgctatacccaaaatcaaataaaggaggtctgaatatgttaaaagcagcattatacgcccgtgtatcctctgaggaacaggcgaaacgggaaaac

SEQ ID NO: 20638 - DNA, 260 bp, Unknown; identical to SEQ ID NO: 20632
  Description of Unknown: LeftRegion for integrase B7639 sequence

SEQ ID NO: 20639 - DNA, 260 bp, Unknown; identical to SEQ ID NO: 20626
  Description of Unknown: LeftRegion for integrase B7640 sequence

SEQ ID NO: 20640 - DNA, 260 bp, Unknown
  Description of Unknown: LeftRegion for integrase B7641 sequence
gagaatacgcacgttgctttcgtcccatgtgaggggcagattattgagattgacaacgaccggattcggctggtaatcaccgatgctcgtcagatagactttcagagctaccagccccatccagagggcgaatttacagaagaacagcgcacctgccgtaactggatattcgccaactacctgttagacgggatgccgctgtgaaacgcgcagccctctacatccgcgtctctacactggaacaggcgcaagagggctac

SEQ ID NO: 20641 - DNA, 260 bp, Unknown
  Description of Unknown: LeftRegion for integrase B7642 sequence
ttgaaaaatgggtttccttcttcggctccgcgacgttctattgctgaaaaaaccgccccggtgctaccaacaccgaagcggttcaggcgcccagcagtgctaccaacaccgctgagcaatgcagttttaccaccaaccataataggggcattctgcgccttttatgatagcagatttgccccggaaatgcaaggacaaaaatggctcaatccagatctgccactgaaaaaattctccgagtggcgctctatccgcgtgta

SEQ ID NO: 20642 - DNA, 260 bp, Unknown
  Description of Unknown: LeftRegion for integrase B7643 sequence
accgggaagaattagaggggaataaagaatatactgaggtcagcgaagataattcctatcgagcttctcaggcgtaagagagcattggaggtgatactacgaaagcggtaatctatgccagatattcaagccataaccaacgagaggaatccatagagggacagcttcgggagtgtcacgactttgctctcaaaaacggaatgacaatcattggtgagtattgtgatagagcgatctcagggaagactgataaccgtcca

SEQ ID NO: 20643 - DNA, 260 bp, Unknown; identical to SEQ ID NO: 20631
  Description of Unknown: LeftRegion for integrase B7644 sequence

SEQ ID NO: 20644 - DNA, 260 bp, Unknown
  Description of Unknown: LeftRegion for integrase B7645 sequence
gggaatgtagagaacaatataaacgggtcactgtctaacagccccttcattcaggcaaaccacggcggcgtggtgtacaacggagacagcacaatctcacccgaggctttagagctgctccgtatttatgagaacctcagcggacgcagccgtctaaagttgctcaattttgccgtcgagcttgaaggaggcaaagactgatgaaccgcgcagccctctacatccgtgtttccacgctggaacaggcgcaggagggctat

SEQ ID NO: 20645 - DNA, 260 bp, Unknown
  Description of Unknown: LeftRegion for integrase B7646 sequence
gggaatgtagagaacaatataaacgggtcactgtctaacagccccttcattcaggcaaaccacggcggcgtggtgtacaacggagacagcacaatctcacccgaggctttagagctgctccgtatttatgagaacctcagcggacgcagccgtctaaagttgctcaattttgccgtcgagcttgaaggaggcaaagactgatgaaccgcgcagccctttacatccgtgtttccacgctggaacaggcgcaggagggctac

SEQ ID NO: 20646 - DNA, 260 bp, Unknown
  Description of Unknown: LeftRegion for integrase B7647 sequence
gggaatgtagagaacaatataaacgggtcactgtctaacagccccttcattcaggcaaaccacggcggcgtggtgtacaacggagacagcacaatctcacccgaggctttagagctgctccgtatttatgagaacctcagcggacgcaaccgcctaaagttgctcaattttgccgtcgagcttgaaggaggcaaagactgatgaatcgcgcagccctctacatccgtgtttccacgctggaacaggcgcaggagggctat

SEQ ID NO: 20647 - DNA, 260 bp, Unknown
  Description of Unknown: LeftRegion for integrase B7648 sequence
agcaagttgttgttaataagcctaaaaatgtggaatatactggagagccttttgcggaatttgctgcaaaatatggaatgactgtcgaagaattagctcaaatgaataatttttccgatcctagtcaaatgatattgatgaaagggcaaactgtaactgtcaaataaataattaatttttaattattaggagttgatacaatgaaaaaagcaggcttatatattcgggtttccactccgcaacaagaaaaagaaggatac

SEQ ID NO: 20648 - DNA, 260 bp, Unknown
  Description of Unknown: LeftRegion for integrase B7649 sequence
gagaatacgcacgtggctttcgttccgtgcgaggggcaaaatattgagattgaaaatgaccggattcggctggtgattacggatgctcgccagattgacttccaaagctaccagccccacccggagggcgaatttaccgaggaacagcgcacctgccgtaactggatcttcgccaactacctgttagacgggatgccgctgtgagacgggcagccctctacatccgtgtttccacgctggaacaggcgcaggagggctat

SEQ ID NO: 20649 - DNA, 260 bp, Unknown
  Description of Unknown: LeftRegion for integrase B7650 sequence
gggaatgtagagaacaatataaacgggtcactgtctaacagccccttcattcaggcaaaccacggcggcgtggtgtacaacggagacagcacaatctcacccgaggctttagagctgctccgtatttatgagaacctcagcggacgcagccgtctaaagttgctcaattttgccgtcgagcttgaaggaggcaaagactgatgaaccgcgcagccctctacatccgtgtttccacgctggaacaggcgcaggagggctac

SEQ ID NO: 20650 - DNA, 260 bp, Unknown
  Description of Unknown: LeftRegion for integrase B7651 sequence
gggaatgtagagaacaatataaacgggtcactgtctaacagcccttttattcaggcaaaccacggcggcgtggtgtacaatggagacagcacgatctcacccgaggctttagagctgctccgtatttatgagaacctcagcggacgcagccgtctaaagttgctcaattttgccgtcgagcttgaaggaggcaaagactgatgaaccgcgcagccctctacatccgtgtttccacgctggaacaggcgcaggagggctat

SEQ ID NO: 20651 - DNA, 260 bp, Unknown; identical to SEQ ID NO: 20649
  Description of Unknown: LeftRegion for integrase B7652 sequence

SEQ ID NO: 20652 - DNA, 260 bp, Unknown
  Description of Unknown: LeftRegion for integrase B7653 sequence
gacaacacccacatcgctttcgtcccctgcgaggagcaagacatcgaagtggaaaacgacaagattcggctcgtgattactggcgctcgccagattgatttccagaattacaagccgaatccagagggcgaatatacccacgaacagcgtacctgccgaaactggatcttcgccaactatttgctggacgggatgccgctttgaaccgcgcagccctctacatccgcgtctctacgcttgaacaggcgcaggagggctat

SEQ ID NO: 20653 - DNA, 260 bp, Unknown
  Description of Unknown: LeftRegion for integrase B7654 sequence
tttgataaaagagaaagataagcaacgtataattaaaaacatagaacaactattaagcgagatacttagcgataaatatgaagccaagataactataagattctctgattgatgatgctcattgtttgatttgcatataacctctacaatacaatatagatgaggtatatataccatcaacatcacagaggagaatcatcatggcaccatataatgtattaaataaaaataagatactgagagctggtttatttgagcgt

SEQ ID NO: 20654 - DNA, 260 bp, Unknown
  Description of Unknown: LeftRegion for integrase B7655 sequence
gacaatacccacgttgccttcgtcccttgcgctggtcagaatatcgagattgagaatgaccggattcgccttgtgattactgatgctcgccaaattgatttccagagctacaagccgaatcctgcgggcgaatacacagatgagcaacgcacctgccgcaactggatattcgccaactacttattagacgggatgccgctttgaaccgcgcagccctctacatccgtgtttccacactggaacaggcgcaggagggctat

SEQ ID NO: 20655 - DNA, 260 bp, Unknown
  Description of Unknown: LeftRegion for integrase B7656 sequence
tttgataaaagagaaagataagcaacgtataattaaaaacatagaacaactattaagcgaaatacttagcgataaatatgaagccaaaataacaataagattctctgattaatgatactcattatttgatttgcatataatctctacaatacaatatagatgaggtatatataccatcaacatcatagaggagaattatcatggcaccatataatgtattgaataagaataaaatactaagagctggtttatttgagcgt

SEQ ID NO: 20656 - DNA, 260 bp, Unknown
  Description of Unknown: LeftRegion for integrase B7657 sequence
gggaatgtagaaaacaacataaacggcaatctctccaacagccccttcattcaggcaaaccacggtggagtggtctacaatggggacagcacgatctcaccagaggctttagagctgctccgcatttacgaaaatctcagcggacgcagccgcctaaagctgcttaactttgccatagagcttgaaggaggcaaagactgatgaaccgcgcagccctctacatccgtgtttccacgctggaacaggcgcaggagggctac

SEQ ID NO: 20657 - DNA, 260 bp, Unknown; identical to SEQ ID NO: 20653
  Description of Unknown: LeftRegion for integrase B7658 sequence

SEQ ID NO: 20658 - DNA, 260 bp, Unknown; identical to SEQ ID NO: 20646
  Description of Unknown: LeftRegion for integrase B7659 sequence

SEQ ID NO: 20659 - DNA, 260 bp, Unknown
  Description of Unknown: LeftRegion for integrase B7660 sequence
ccgaatccatgtagcgtacaccacgaatggattcatcgaatcccagaagtttcagtttttcactctgcactttctttctcctttcttttctgtgttttattctgtgctacgatgacataataatacagattttgtaacttgtcaataaaaaatggtaaaattatataaaaaactataaatatataattggagtgtttgtattgaaaagagtaggcatatactgcagggtatcaaccgatggacagcgagagaatacatct

SEQ ID NO: 20660 - DNA, 260 bp, Unknown
  Description of Unknown: LeftRegion for integrase B7661 sequence
gataacacgcacgtagcctttgtaccctgcgaagggcagaatatcgagatagagaatgacaagattcggcttaccatcactgacgctcgccagattgactttcagggatataagccgaatcccgtcggcgaatacacccacgagcagcgcacctgccgcaactggatattcgcgaactatcttctggacgggatgccgttgtgaaccgcgcagccctctacatccgtgtttccacgctggaacaggcgcaggagggctat

SEQ ID NO: 20661 - DNA, 260 bp, Unknown
  Description of Unknown: LeftRegion for integrase B7662 sequence
agccaaacaaaattaaagattacctaataagtaaaatgaaataaaaaaaagaaacgcctagaggtgcaactctaagcgttgaatatgaaaaacccagactactaaatcaaatgaaactaggactactaatttcaataggcttttcgtgtaatattatatcacggaaagcgggtaaaacgcaataacagggagtgatataattggaaaaaataataaaaaaaattataagagttgttttatatatccgtgtatctagtgag

SEQ ID NO: 20662 - DNA, 260 bp, Unknown
  Description of Unknown: LeftRegion for integrase B7663 sequence
gataatactcacatcgctttcgtcccctgcgaggggcaagacattgaagtggaaaacgacaagattcggctcataattactggcgctcgccagattgatttccagaattacaagccgaacccggaaggcgaatatacccacgaacagcgtacctgccgaaactggatcttcgccaactatttgctggacgggatgccgctttgaaccgcgcagccctctacatccgcgtctctacgcttgaacaggcgcaggagggctat

SEQ ID NO: 20663 - DNA, 260 bp, Unknown; identical to SEQ ID NO: 20649
  Description of Unknown: LeftRegion for integrase B7664 sequence

SEQ ID NO: 20664 - DNA, 260 bp, Unknown
  Description of Unknown: LeftRegion for integrase B7665 sequence
gggaatgtagagaacaatataaacgggtcactgtctaacagccccttcattcaggcaaaccacggcggcgtggtgtacaacggagacagcacgatctcacccgaggctttagagctgctccgtatttatgagaacctcagcggacgcaaccgcctaaagttgctcaattttgccgtcgagcttgaaggaggcaaagactgatgaaccgcgcagccctctacatccgtgtttccacgctggaacaggcgcaggagggctat

SEQ ID NO: 20665 - DNA, 260 bp, Unknown
  Description of Unknown: LeftRegion for integrase B7666 sequence
gacaacacccacgttgccttcgtaccttgcgctgggcagaatatcgagattgagaatgaccggattcgccttgtgattactgatgctcgccaaattgatttccagagctacaagccgaatcctgcgggcgaatatacggatgagcagcgcacctgccgcaactggatattcgccaactacctgttagacgggatgccgctttgaaccgcgcagccctctacatccgtgtttccacgctggaacaggcgcaggagggctat

SEQ ID NO: 20666 - DNA, 260 bp, Unknown
  Description of Unknown: LeftRegion for integrase B7667 sequence
gggaatgtagagaacaatataaacgggtcactgtctaacagccccttcattcaggcaaaccacggcggcgtggtgtacaacggagacagcacgatctcacccgaggctttagagctgctccgtatttatgagaacctcagcggacgcaaccgtctaaagttgctcaattttgccgtcgagcttgaaggaggcaaagactgatgaaccgcgcagccctctacatccgtgtttccacgctggaacaggcgcaggagggctat

SEQ ID NO: 20667 - DNA, 260 bp, Unknown
  Description of Unknown: LeftRegion for integrase B7668 sequence
gggaatgtagagaacaatataaacgggtcactgtctaacagccccttcattcaggcaaaccacggcggcgtggtgtacaacggagacagcacaatctcacccgaggctttagagctgctccgtatttatgagaacctcagcggacgcaaccgcctaaagttgctcaattttgccgtcgagcttgaaggaggcaaagactgatgaaccgcgcagccctctacatccgtgtttccacgctggaacaggcgcaggagggctat

SEQ ID NO: 20668 - DNA, 260 bp, Unknown; identical to SEQ ID NO: 20649
  Description of Unknown: LeftRegion for integrase B7669 sequence

SEQ ID NO: 20669 - DNA, 260 bp, Unknown; identical to SEQ ID NO: 20649
  Description of Unknown: LeftRegion for integrase B7670 sequence

SEQ ID NO: 20670 - DNA, 260 bp, Unknown
  Description of Unknown: LeftRegion for integrase B7671 sequence
cattgggagttaatttttctcaggtattgcaggaagcattaatagctaaaatcgaagctaaagtctaaataataaaaatcccctgtgcaaccaacacaggggaaagaaaggttatgcggtatatgaatactacgaacaacttaagtatatcatatgaccgcttatttttctatatattttaaaataaaggaggtctttgtatgccccaaaaaacactagtattcggatatgttcgtgtttcgactgaaaatcagcttgaa

SEQ ID NO: 20671 - DNA, 260 bp, Unknown
  Description of Unknown: LeftRegion for integrase B7672 sequence
gggaatgtagagaacaatataaacgggtcactgtctaacagccccttcattcaggcaaatcacggcggcgtggtgtacaacggagacagcacaatctcacccgaggctttagagctgctccgtatttatgagaacctcagcggacgcaaccgcctaaagttgctcaattttgccgtcgagcttgaaggaggcaaagactgatgaatcgcgcagccctctacatccgtgtttccacgctggaacaggcgcaggagggctat

SEQ ID NO: 20672 - DNA, 260 bp, Unknown
  Description of Unknown: LeftRegion for integrase B7673 sequence
aagtaatatgtatagaattaaaaaaaaccgcccggtgctaccaacaccgaacggctttgcatagattttctcttgccggacgcaccggaatgaataatctacctcaacaatagaattatatcatttccaacgcgtcctgacaaggggcgtattttttatacccatttttcgtatacatgtaaaaaacaggagatgatatcatgatgaaaggcgcctgctacgtccgcgtatccaccgaaaaccaattagagaactacagc

SEQ ID NO: 20673 - DNA, 260 bp, Unknown
  Description of Unknown: LeftRegion for integrase B7674 sequence
gataaccctaaacaggatttagaaaactattcttcttttgtaagtcagaaaataacagcctttacagacgacattctgaaagactaataaaacaaaatgccccggtcgtgttgggaacacttccggggcgtgcaaagatatgtcataccagatacaacaataccgtctgcaattttgattatatcaccagcaggcgggaaatgaaaggaaatgcaggtgatacaatagtgaaaaagattgatttaagcccggaacttgtc

SEQ ID NO: 20674 - DNA, 260 bp, Unknown
  Description of Unknown: LeftRegion for integrase B7675 sequence
taagtaatatgtatagaattaaaaaaaccgcccggtgctaccaacaccgaacggctttacatagattttctcttgccggacgcaccggaatgaataatctacctcaacaatagaattatatcatttccaaagcgtcctgacaaggggcgtattttttatacccatttttcgtatacatgtaaaaaacaggagatgatatcatgataaaaggcgcctgctacgtccgcgtatctaccgaaaaccaattagagaactacagc

SEQ ID NO: 20675 - DNA, 260 bp, Unknown
  Description of Unknown: LeftRegion for integrase B7676 sequence
gataaccctaaacaggatttagaaaactattcttcttttgtaagtcagaaaataacagcctttacagacgacattctgaaagactaataaaacaaaatgccccggtcgtgctgggaacacttccggggcgtgcaaagatatgtcataccagatacaacaataccgtctgcaattttgattatatcaccagcaggcgggaaatgaaaggaaatgcaggtgatacaatagtgaaaaagattgatttaagcccggaacttgtc

SEQ ID NO: 20676 - DNA, 260 bp, Unknown
  Description of Unknown: LeftRegion for integrase B7677 sequence
ccgcttgtttgtttctttgttttcatagaaatgatgggatccattgacgcgaataagcttaaaccccttggattccaaaagctgcatcatttctttgggcttcatcggcatctcttgatctccccctctctgtgtttacattgtagcacgtattatacgtattgtcaataggcttttaaaaaataaataaggaggaaacgatgaaacgcgcgaaagcatatatgcgtatgtcaacagacaagcaggaacactccatcgaa

SEQ ID NO: 20677 - DNA, 260 bp, Unknown
  Description of Unknown: LeftRegion for integrase B7678 sequence
gataaccctaaacaggatttagaaaactattcttcttttgtaagtcagaaaataacagcctttacagacgacattctgaaagactaataaaacaaaatgccccggtcgtgctgggaacacttccgaggcatgcaaagatatgtcataccagatacaacaataccgtctgcaattttgattatatcaccagcaggtgggaaatgaaaggaaatgcaggtgatacaatagtgaaaaagattgatttaagcccggaacttgtc

SEQ ID NO: 20678 - DNA, 260 bp, Unknown
  Description of Unknown: LeftRegion for integrase B7679 sequence
gataaccctaaacaggatttagaaaactattcttcttttgtaagtcagaaaataacagcctttacagacgacattctgaaagactaataaaacaaaatgccccggtcgtgctgggaacacttcctgggcgtgcaaagatatgtcataccagatacaacaataccgtctgcaattttgattatatcaccagcaggcgggaaatgaaaggaaatgcaggtgatacaatagtgaaaaagattgatttaagcccggaacttgtc

SEQ ID NO: 20679 - DNA, 260 bp, Unknown; identical to SEQ ID NO: 20675
  Description of Unknown: LeftRegion for integrase B7680 sequence

SEQ ID NO: 20680 - DNA, 260 bp, Unknown
  Description of Unknown: LeftRegion for integrase B7681 sequence
agcgtcacacgttttataaaataaaaaccgccccagtgctaccaacaccgggacggcaatacatatccgaagatatgcgattgaaatccacgaatattgtatcatcttcggagcagtcacgcaagcggaacatttgttttgcgctggctgttatttttgtgccaattttaaatatattttacaaaaggagagtgatgcaaatgccagaaaaaatactgcggtgtgccatatacatccgcgtctccacatttgagcagagc

SEQ ID NO: 20681 - DNA, 260 bp, Unknown; identical to SEQ ID NO: 20675
  Description of Unknown: LeftRegion for integrase B7682 sequence

SEQ ID NO: 20682 - DNA, 260 bp, Unknown
  Description of Unknown: LeftRegion for integrase B7683 sequence
gataaccctaaacaggatttagaaaactattcttcttttgtaagtcagaaaataacagcctttacagacgacattctgaaagactaataaaacaaaatgccccggtcgtgctgggaacacttccgaggcatgcaaagatatgtcataccagatacaacaataccgtctgcaattttgattatatcaccagcaggcgggaaatgaaaggaaatgcaggtgatacaatagtgaaaaagattgatttaagcccggaacttgtc

SEQ ID NO: 20683 - DNA, 260 bp, Unknown
  Description of Unknown: LeftRegion for integrase B7684 sequence
ctttggcacggataatctgggcgatttcgagctacaattcaaaccgcttatctcagttaacaaagctgccaagtttaaagttaatattcagtaacacaaaaaaagaacctatccactcggtcaagggataggctcttttagtaataagtttgatgagatttattaagttgtattgtcattatacaacgggaaggaacgttatgacaaattatagaaaattaagagtagcaacctataccagggtttcgactttagaacaa

SEQ ID NO: 20684 - DNA, 260 bp, Unknown; identical to SEQ ID NO: 20675
  Description of Unknown: LeftRegion for integrase B7685 sequence

SEQ ID NO: 20685 - DNA, 260 bp, Unknown
  Description of Unknown: LeftRegion for integrase B7686 sequence
agtaggcgcaagattaaatctaataattcaatatcatcgcaattttgtaatttttcaattattttttctattagtgtttttttcgacataatcaaaccccttttcttcggtaaattctactttattttacaataatagaaatgtgaaaattatcgaaatttggcgataatttaaaaaaattataaggacggtaataaaaaatgaaaggtaattatattgaaacggttgccgcttatgtaagagtgtcaactcaggagcaa

SEQ ID NO: 20686 - DNA, 260 bp, Unknown
  Description of Unknown: LeftRegion for integrase B7687 sequence
ttttggtacggacaatctgggcgattttgaattacagttcaagccgcttatttcagttaacaaggccgctaagtttaaagttaatattcagtaacacaaaaaaagaacctatccactcggtcaagggataggctcttttagtaataagtttgatgagatttattaagttgtactgtcattgtacaacggaaagggacattatgacaagttacagaaaattaagagtagcaacctataccagagtttcaactttagaacag

SEQ ID NO: 20687 - DNA, 260 bp, Unknown; identical to SEQ ID NO: 20675
  Description of Unknown: LeftRegion for integrase B7688 sequence

SEQ ID NO: 20688 - DNA, 260 bp, Unknown
  Description of Unknown: LeftRegion for integrase B7689 sequence
tgaaacaagaacaataatttatcaaaggaaagccgcccggtactaccaataccgaacggcttaatatacacccgaagatgtacagttatctatcaaatatattgtatcatcttcgaaacagccttgcaatcgaaacatatattcgatggctgttatttttatacttatttttaatataattaacgaaggagtgatataaaatgcctgaaaaaattttgagatgtgctatctatatccgtgtatctaccttcgagcaaagt

SEQ ID NO: 20689 - DNA, 260 bp, Unknown; identical to SEQ ID NO: 20675
  Description of Unknown: LeftRegion for integrase B7690 sequence

SEQ ID NO: 20690 - DNA, 260 bp, Unknown; identical to SEQ ID NO: 20675
  Description of Unknown: LeftRegion for integrase B7691 sequence

SEQ ID NO: 20691 - DNA, 260 bp, Unknown; identical to SEQ ID NO: 20675
  Description of Unknown: LeftRegion for integrase B7692 sequence

SEQ ID NO: 20692 - DNA, 260 bp, Unknown
  Description of Unknown: LeftRegion for integrase B7693 sequence
gataaccctaaacaggatttagaaaaatattcttcattgataaatcagaaaataagagcctttacagacgacattctgaaaggttaataaaataaaatgccccggtcgtgctgggaacacttccggggtgtgcaaagatatgtcataccagatacaacaataccgtctgcaattctgattatatcaccagcaggcgggaaatgaaaggaaatgcaggtgatacaatagtgaaaaagattgttttaagcccggaacttgtc

SEQ ID NO: 20693 - DNA, 260 bp, Unknown; identical to SEQ ID NO: 20675
  Description of Unknown: LeftRegion for integrase B7694 sequence

SEQ ID NO: 20694 - DNA, 260 bp, Unknown
  Description of Unknown: LeftRegion for integrase B7695 sequence
gataaccctaaacaggatttagaaaactattcttcttttgtaagtcagaaaataacagcctttacagacgacattctgaaagactaataaaacaaaatgccccggtcgtgccgggaacacttccggggcgtgcaaagatatgtcataccagatacaacaataccgtctgcaattttgattatatcaccagcaggcgggaaatgaaaggaaatgcaggtgatacaatagtgaaaaagattgatttaagcccggaacttgtc

SEQ ID NO: 20695 - DNA, 260 bp, Unknown; identical to SEQ ID NO: 20675
  Description of Unknown: LeftRegion for integrase B7696 sequence

SEQ ID NO: 20696 - DNA, 260 bp, Unknown
  Description of Unknown: LeftRegion for integrase B7697 sequence
gataaccctaaacaggatttagaaaactattcttcttttgtaagtcagaaaataacagcctttacagacgacattctgaaagactaataaaacaaaatgccccggtcgtgcttggaacacttccggggcgtgcaaagatatgtcataccagatacaacaataccgtctgcaattttgattatatcaccagcaggcgggaaatgaaaggaaatgcaggtgatacaatagtgaaaaagattgatttaagcccggaacttgtc

SEQ ID NO: 20697 - DNA, 260 bp, Unknown
  Description of Unknown: LeftRegion for integrase B7698 sequence
gataaccctaaacaggatttagaaaactattcttcttttgtaagtcagaaaataacagcctttacagacgacattctgaaagactaataaaacaaaatgccccggtcgtgctgggaacacttccggggcgtgcaaagatatgtcataccagatacaacaataccgtctgcaattttgattatatcaccagcaggcgggaaatgaaaggaaatgcaggtggtacaatagtgaaaaagattgatttaagcccggaacttgtc

SEQ ID NO: 20698 - DNA, 260 bp, Unknown; identical to SEQ ID NO: 20675
  Description of Unknown: LeftRegion for integrase B7699 sequence

SEQ ID NO: 20699 - DNA, 260 bp, Unknown; identical to SEQ ID NO: 20675
  Description of Unknown: LeftRegion for integrase B7700 sequence

SEQ ID NO: 20700 - DNA, 260 bp, Unknown
  Description of Unknown: LeftRegion for integrase B7701 sequence
aatcagaataaacaacaaaaaacgacaaaaaccgtccagtgttaccagcactgaacggcttaatatacatccgaagatgtacgacatgattgacaaatatattgtatcatcttcggacagctatcgcaatcggaacatgtattcgatggctgttatttttatacttatttttaatataattaacgaaggagtgatataaaatgcctgaaaaaattttgagatgtgctatctatatccgtgtatctaccttcgagcagagt

SEQ ID NO: 20701 - DNA, 260 bp, Unknown; identical to SEQ ID NO: 20675
  Description of Unknown: LeftRegion for integrase B7702 sequence

SEQ ID NO: 20702 - DNA, 260 bp, Unknown; identical to SEQ ID NO: 20682
  Description of Unknown: LeftRegion for integrase B7703 sequence

SEQ ID NO: 20703 - DNA, 260 bp, Unknown; identical to SEQ ID NO: 20675
  Description of Unknown: LeftRegion for integrase B7704 sequence

SEQ ID NO: 20704 - DNA, 260 bp, Unknown; identical to SEQ ID NO: 20675
  Description of Unknown: LeftRegion for integrase B7705 sequence

SEQ ID NO: 20705 - DNA, 260 bp, Unknown
  Description of Unknown: LeftRegion for integrase B7706 sequence
taatcagaataaacaacaaaaaacgacaaaaaccgtccagtgttaccagcactgaacggcttaatatacacccgaagatgtacgaaatgattgcaaatatattgtatcatcttcggacagctatcgcaatcggaacatgtattcgatggctgttatttttatactcatttttaatataattaacgaaggagtgatataaaatgcctgaaaaaattttgagatgtgctatctatatccgtgtatctaccttcgagcagagt

SEQ ID NO: 20706 - DNA, 260 bp, Unknown
  Description of Unknown: LeftRegion for integrase B7707 sequence
ttagaaaaaattttcaaaaaatttatgacttatatattgaacaaataatattatttaacatataatgtaaattatataatttaaaaaataattattataggagttaattatgaaagtaaaagtaatttttaataacgataaactagaatctgattattataaaaagaagttaatctataacataaaagaggtaaaagattatggaactggttactaaaaatagagttattatttataacagagtttctactataatgcaa

SEQ ID NO: 20707 - DNA, 260 bp, Unknown; identical to SEQ ID NO: 20682
  Description of Unknown: LeftRegion for integrase B7708 sequence

SEQ ID NO: 20708 - DNA, 260 bp, Unknown; identical to SEQ ID NO: 20675
  Description of Unknown: LeftRegion for integrase B7709 sequence

SEQ ID NO: 20709 - DNA, 260 bp, Unknown
  Description of Unknown: LeftRegion for integrase B7710 sequence
tgatggaggatgatgacgaagaataaatataaaaaccgctcctgcgccaacaggaacggcttaatatacacccgaagatgtacgaaatgattgcaaatatattgtatcatcttcgaaacagccttgcaatcgaaacatatattcgatggctgttatttttatacttatttttaatataattaacgaaggagtgatataaaatgcctgaaaaaattttgagatgtgctatctatatccgtgtatctaccttcgagcaaagt

SEQ ID NO: 20710 - DNA, 260 bp, Unknown
  Description of Unknown: LeftRegion for integrase B7711 sequence
ttcaaccacaagcatcgctggttcccaaaaaagatgcttttgtcctagaacttcaaaggctccttgcctgctaccagctggcagatcaaagagacagggaaattgtgtggtctgtgctcaacaaatatgtgccacatatcatttaaaatcaaaggacagctccatgcaggggctgtctttatgtacttgggagaaatatcatggcaagaagaaaaacagctttaaagaacgtatctgcgtccgctcgtgtaaccaaagta

SEQ ID NO: 20711 - DNA, 260 bp, Unknown; identical to SEQ ID NO: 20675
  Description of Unknown: LeftRegion for integrase B7712 sequence

SEQ ID NO: 20712 - DNA, 260 bp, Unknown
  Description of Unknown: LeftRegion for integrase B7713 sequence
aagtgaaaaagccttagaagtaacaggaatgacattggatattataaacagctaccaaaagcctaaagaagcactctgggaaatggattaaaggaggtagggaacatgattataagagataaaaaacctttaacagaaaaagaattactggaattacaaaatagtataaaaaaactatatgatatgcaagaaggaaaataatgaaggaaacaaaaaaagcaatagcttattttagagtaagtacagatatgcaaagagat

SEQ ID NO: 20713 - DNA, 260 bp, Unknown
  Description of Unknown: LeftRegion for integrase B7714 sequence
aatttgtaatcctccgcaataaaaatgaaaaaccgcccagtgttaccagcactgaacggcttaacatacatccgaagatgtacgacatgtttgcaaatatattgtatcatcttcgaaacagccttgcaatcgaaacatatattcgatggctgttatttttatacttatttttaatataattaacgaaggagtgatataaaatgcctgaaaaaattttgagatgtgctatctatatccgtgtatctaccttcgagcaaagt

SEQ ID NO: 20714 - DNA, 260 bp, Unknown; identical to SEQ ID NO: 20675
  Description of Unknown: LeftRegion for integrase B7715 sequence

SEQ ID NO: 20715 - DNA, 260 bp, Unknown
  Description of Unknown: LeftRegion for integrase B7716 sequence
acttatagcgtcacacgttttataaaataaaaaccgcccctgcgccaacagagacggtatacatatccgaagatatgcgattaaaatccaagaatattgtatcatcttcggggcagtcacgcaagcggaacatatgttttgcgctggctgttatttttgtaccaattttaaatatattttacaaaaggagagtgatgcaaatgccagaaaaaatactgcggtgtgccatatacatccgcgtctccacatttgagcagagc

SEQ ID NO: 20716 - DNA, 260 bp, Unknown
  Description of Unknown: LeftRegion for integrase B7717 sequence
agttgtaaaaagatacttataaatagaaaaaccgcccggtactggtaataccggacggcttaacatacatccgaagatgtacgacatgattgacaactatattgtatcatcttcggacagctatcgcaatcggaacatatattcgatagctgttatttttatacttatttttaatataattaacgaaggagtgatataaaatgcctgaaaaaattttgagatgtgctatctatatccgtgtatctaccttcgagcagagt

SEQ ID NO: 20717 - DNA, 260 bp, Unknown
  Description of Unknown: LeftRegion for integrase B7718 sequence
actggaaaaggacaaatatactttatgaacaagtttaaaacagcagcataataaatcaatcctcagtattaatttactggggattttttaataggaggaaaatttatgattataagagataaaaaacctttaacagaaaaagaattgctggaattacaaaatagtataaaaaaactatatgatatgcaagaaggggaacaatgaaagaaacaaaaaaggcaatagcatattttagagtaagtacagatatgcaaagagac

SEQ ID NO: 20718 - DNA, 260 bp, Unknown; identical to SEQ ID NO: 20675
  Description of Unknown: LeftRegion for integrase B7719 sequence

SEQ ID NO: 20719 - DNA, 260 bp, Unknown
  Description of Unknown: LeftRegion for integrase B7720 sequence
ctggaaaaggacaaatatactttatgaacaagtttaaaacagcagcataataaatcaatcctcagtattaatttactgggggatttttttataggaggaaaatttatgattataagagataaaaagcctttaacagaaaaagaattgcaggaaatacaaaacagtataaaaaaactatatgatatgcaggaagcagaataatgaaggaaacaaaaaaggcaatagcttattttagagtaagcacagatatgcaaagagac

SEQ ID NO: 20720 - DNA, 260 bp, Unknown
  Description of Unknown: LeftRegion for integrase B7721 sequence
aatcagaataaacaacaaaaaacgacaaaaaccgtccagtgttaccagcactgaacggcttaatatacatccgaagatgtacgacatgattgacaaatatattgtatcatcttcggacagctatcgcaatcggaacatatattcgatggctgttatttttatacttatttttaatataattaacgaaggagtgatataaaatgcctgaaaaaattttgagatgtgctatctatatccgtgtatctaccttcgagcagagt

SEQ ID NO: 20721 - DNA, 260 bp, Unknown
  Description of Unknown: LeftRegion for integrase B7722 sequence
gataaccctaaacaggatttagaaaactattcttcttttgtaagtcagaaaataacagcctttacagacgacattctaaaagactaataaaacaaaatgccccggtcgtgctgggaacacttccggggcgtgcaaagatatgtcataccagatacaacaataccgtctgcaattttgattatatcaccagcaggcgggaaatgaaaggaaatgcaggtgatacaatagtgaaaaagattgatttaagcccggaacttgtc

SEQ ID NO: 20722 - DNA, 260 bp, Unknown
  Description of Unknown: LeftRegion for integrase B7723 sequence
gacaatctgggcgatttcgaattacagttcaagccgcttatctcagttaacaaagctgccaagtttaaagtcaacattcagtaacacaaaaaagaacctatccactcggtcaagggataggctcttttaataataaaattgatgagattatatattgatatgttaagttgtattgtcattatacaacgggaaggaatattatggcaaattatagaaaattaagagtagcaacctataccagggtttcaacgctggagcag

SEQ ID NO: 20723 - DNA, 260 bp, Unknown; identical to SEQ ID NO: 20675
  Description of Unknown: LeftRegion for integrase B7724 sequence

SEQ ID NO: 20724 - DNA, 260 bp, Unknown; identical to SEQ ID NO: 20675
  Description of Unknown: LeftRegion for integrase B7725 sequence

SEQ ID NO: 20725 - DNA, 260 bp, Unknown; identical to SEQ ID NO: 20675
  Description of Unknown: LeftRegion for integrase B7726 sequence

SEQ ID NO: 20726 - DNA, 260 bp, Unknown; identical to SEQ ID NO: 20675
  Description of Unknown: LeftRegion for integrase B7727 sequence

SEQ ID NO: 20727 - DNA, 260 bp, Unknown; identical to SEQ ID NO: 20675
  Description of Unknown: LeftRegion for integrase B7728 sequence

SEQ ID NO: 20728 - DNA, 260 bp, Unknown; identical to SEQ ID NO: 20675
  Description of Unknown: LeftRegion for integrase B7729 sequence

SEQ ID NO: 20729 - DNA, 260 bp, Unknown
  Description of Unknown: LeftRegion for integrase B7730 sequence
gataaccctaaacaggatttagaaaactattcttcttttgtaagtcagaaaataacagcctttacagacgacattctgaaagactaataaaacaaaatgccccggtcgtgctgggaacacttccggggcgcgcaaagatatgtcataccagatacaacaataccgtctgcaattttgattatatcaccagcaggcgggaaatgaaaggaaatgcaggtgatacaatagtgaaaaagattgatttaagcccggaacttgtc

SEQ ID NO: 20730 - DNA, 260 bp, Unknown
  Description of Unknown: LeftRegion for integrase B7731 sequence
attatcttgctataaaatgcaatattgaaatctaaacatagaaaaagacagtccctgacaagaactgcctttccccatcatttcctatgtagcacataacttcatagaatacagattcgcaacctttattctaccacgaagttgtgctgctgcatagctttatttttttacgctttttttacggcagaaagaaggtttttatgaatagtacatacttcagaccgcaaccggaactcttcggcctgcgtgttgttaaatat

SEQ ID NO: 20731 - DNA, 260 bp, Unknown
  Description of Unknown: LeftRegion for integrase B7732 sequence
gatctgctgaaataataaaaaaccgcccctgcgccaacaggaacggttgatgcatatccgaagatatacaaacgagctaccaactcacaaatattgtatcatcttcgggcagccactgcaagcggaacactcgttcctcgctggctgtattttttatacccatttttgtgcgacgtcgcacatatacttaggaaggtgatatgatgacgaacaaaattatccgctgcgctctctatatccgtgtcagcaccgctgagcag

SEQ ID NO: 20732 - DNA, 260 bp, Unknown
  Description of Unknown: LeftRegion for integrase B7733 sequence
actttggtattcgacgttatcgaaattttaaaaaataaaaaagacacccggttttccgaatgcctttcattgctacctatgcagcacacgccgcatagaatagtccatcgcaacttctattctatcacaaaaagcgtgctgctgcatagctttattttttatactcttttttgacattttgatagaaagaaggttttattatgagtagttcatatttccgtccacagccggaactgtacggcttgcgtgtggtaaaatac

SEQ ID NO: 20733 - DNA, 260 bp, Unknown
  Description of Unknown: LeftRegion for integrase B7734 sequence
aaaaggaatagtaacagcatatattgatccctatgaaccttttgctgtatatattgatggtaaagcaagaatacagaaaacaggtccagcaattttaataataaatcaagattaggaggaggtagggaagatgactaataagaaagtgattgttaacataataaaagaaataagattaaaacagttagcgaggttaaaaaatgaagaaacaattgaaagctttgatatatgctagagtaagtactgtaatgcaagaagaa

SEQ ID NO: 20734 - DNA, 260 bp, Unknown
  Description of Unknown: LeftRegion for integrase B7735 sequence
tgaataaatatgatgttgaaaaaagactatgcgatgaactaaatatcgaatatataaatttaaaccttcgcactggacctagctatatatttaccgaagaagaatatcagaaattgaaatccgactacgccaaattgtttttacagttagaaaatattgatgaaaacaactagtatttatattgaaaggagcaattttatatgaaacgtgcagcattgtatatacgtgtatccacaatggaacaagccaaggaaggatac

SEQ ID NO: 20735 - DNA, 182 bp, Unknown
  Description of Unknown: LeftRegion for integrase B7736 sequence
accaactcacgaatattgtatcatcttcgggcagccactgcaagcggaacactcgttcctcgctggctgtattttttatacccatttttgtgcgacgtcgcacatatacttaggaaggtgatatgatgacgaacaaaattatccgctgcgctctctacatccgtgtcagcaccgctgagcag

SEQ ID NO: 20736 - DNA, 260 bp, Unknown
  Description of Unknown: LeftRegion for integrase B7737 sequence
tattatcttgctataaaatgcaatattgaaatctaaacatagaaaaagacagtccctgacaagaactgcctttccccatcatttcctatgtagcacataacttcatagaatacagattcgcaacctttattctaccacgaagttgtgctgctgcatagctttatttttttacgcttttttacggcagaaagaaggtttttatgaatagtacatacttcagaccgcaaccggaactcttcggcctgcgtgttgttaaatat

SEQ ID NO: 20737 - DNA, 260 bp, Unknown
  Description of Unknown: LeftRegion for integrase B7738 sequence
tattatcttgctataaaatgcaatattgaaatctaaacatagaaaaagacagtccctgacaagaactgcctttccccatcgtttcctatgcagtacataacttcatagaatacagattcgcaacctttattctaccacgaagttgtgctgctgcatagctttatttttttacgcttttttacggcagaaagaaggtttttatgaatagtacatacttcagaccgcaaccggaactcttcggcctgcgtgttgttaaatat

SEQ ID NO: 20738 - DNA, 260 bp, Unknown
  Description of Unknown: LeftRegion for integrase B7739 sequence
ggctcaggaggagtaaatatgatagtagaaatttacaagggaatagacagtgaaaagccagttgatattataattgttttaggataggaggtaagaaaatgattataagaagtaaagaagtattgaatgataaaactttaaaggagattcaagataatataaagaaattatatgataaacaaaaaggagaataactttagatgagagaggtcaagaaagcaatagcttattttagagtaagtacagatatgcaaaaagag

SEQ ID NO: 20739 - DNA, 260 bp, Unknown
  Description of Unknown: LeftRegion for integrase B7740 sequence
aaagatttaaatattaaaaaaaccgcccctgcgccaacaggaacggttgatacatatccgaagatatgcaattgagctaccaactcacaaatattgtatcatcttcgggcagccactgcaagcggaacactcgttcctcgctggctgtattttttatacccatttttgtgcgacgtcgcacatatacttaggaaggtgatatgatgacgaacaaaattatccgctgcgctctctatatccgtgtcagcaccgctgagcag

SEQ ID NO: 20740 - DNA, 260 bp, Unknown
  Description of Unknown: LeftRegion for integrase B7741 sequence
atacgccgctcagcttgcggaatcaataaaagaaaccgcccctgcgccaacaggaacggtttactgaatactatacagtgccaagacacgtacaatactccctgaacaagaatattgtatcacatttccttggcacctgtacaggtgtattttttatacccatttttgtgcgacgtcgcacatatacttaggaaggtgatatgatgacgaacaaaattatccgctgcgctctctatatccgtgtcagcaccgctgagcag

SEQ ID NO: 20741 - DNA, 260 bp, Unknown
  Description of Unknown: LeftRegion for integrase B7742 sequence
attatcttgctataaaatgcaatattgaaatctaagcatagaaaaagacagtccctgacaagaactgcctttccccatcgtttcctatgtagcacataacttcatagaatacagattcgcaacctttattctaccacgaagttgtgctgctgcatagctttatttttttacgctttttttacggcagaaagaaggtttttatgaatagtacatacttcagaccgcaaccggaactcttcggcctgcgtgttgttaaatat

SEQ ID NO: 20742 - DNA, 260 bp, Unknown
  Description of Unknown: LeftRegion for integrase B7743 sequence
agcattagggattccgtcttcccttaataaattcaagtaaaataaaaacggccatctcgccaaagacagccgtttccactgtgtcctatgcagcacataacttcatagaatactgattcgcaacctttattctaccacgaagttgtgctgctgcatagctttatttttttacgcttttttacggcagaaagaaggtttttatgaatagtacatacttcagaccgcaaccggaactcttcggcctgcgtgttgttaaatat

SEQ ID NO: 20743 - DNA, 260 bp, Unknown
  Description of Unknown: LeftRegion for integrase B7744 sequence
tgaataaatatgatgttgaaaaaagactatgcgatgaactaaatatcgaatatataaatttaaaccttcgcactggacctagctatatatttaccgaagaagaatatcaggaattgaaatccgactacgccaaattgtttttacagttagaaaatattgatgaaaacaactagtatttatattgaaaggagcaattttatatgaaacgtgcagcattgtatatacgtgtatccacaatggaacaagccaaggaaggatac

SEQ ID NO: 20744 - DNA, 260 bp, Unknown
  Description of Unknown: LeftRegion for integrase B7745 sequence
ccaacaggaacggttacgcccagtccgcacagcagacaatggacgatttaactctaacatctccggagatgctacagctttacaccaaagatattgtatcatcttcgggcagccactgcaagcggaacactcgttcctcgctggctgtattttttatacccatttttgtgcgacatcgcacatatacttaggaaggtgatatgatgacgaacaaaattatccgctgcgctctctatatccgtgtcagcaccgctgagcag

SEQ ID NO: 20745 - DNA, 260 bp, Unknown
  Description of Unknown: LeftRegion for integrase B7746 sequence
attttcttgctcaaaaatgcaatatagaaatctaagcatagaaaaagacagtccctgacaagaactgcctttccccatcgtttcctatgcagtacataacttcatagaatacagattcgcaacctttattctaccacgaagttgtgctgctgcatagctttatttttttacgctttttttacggcagaaagaaggtttttatgaatagtacatacttcagaccgcaaccggaactcttcggcctgcgtgttgttaaatat

SEQ ID NO: 20746 - DNA, 260 bp, Unknown
  Description of Unknown: LeftRegion for integrase B7747 sequence
ttgatatcaacggaatggtaaagaaaaaccgccccagtgctaccaacactgagacggtctacatacccgaagatatgcgattaaaatccaagaatattgtatcatcttcggagcagtcatgcaagcggaacgtttgttttgcgctggctgttatttttgtgccaattttaaatatattttacaaaaggagagtgatgcaaatgccagaaaaaatactgcggtgtgccatatacatccgcgtctccacatttgagcagagc

SEQ ID NO: 20747 - DNA, 260 bp, Unknown
  Description of Unknown: LeftRegion for integrase B7748 sequence
ttatcttgctataaaatgcaatattgaaatctaaacatagaaaaagacagtccctgacaagaactgcctttccccatcatttcctatgtagcacataacttcatagaatacagattcgcaacctttattctaccacgaagttgtgctgctgcatagctttattttttttacgctttttttacggcagaaagaaggtttttatgaatagtacatacttcagaccgcaaccggaactcttcggcctgcgtgttgttaaatat

SEQ ID NO: 20748 - DNA, 260 bp, Unknown
  Description of Unknown: LeftRegion for integrase B7749 sequence
attatcttgccataaaatgcaatattgaaatctaaacatagaaaaagacagtccctgacaagaactgcctttccccatcgtttcctatgcagcgcattacttcatagaatactgattcgcaacctttattctaccacgaagttgtgctgctgcatagctttatttttttacgcttttttacagtagaaagaaggttttttatgaacagtacatacttcagaccgcaaccggaactcttcggcctgcgtgttgttaaatat

SEQ ID NO: 20749 - DNA, 260 bp, Unknown
  Description of Unknown: LeftRegion for integrase B7750 sequence
tcaaaggacggcatttgaatgaataagaaaagtaaataaaaaagagcagcctccacgccaatgaaaaccgctctttgataacatatatctatcgcacaagtacgattgataaaatgtcacccgcaagtctcattttaccataaaaccgtgcttgtgcataggttttatttttttacccttttttgattggagttgataaaatgagacgcaaaacaaccgctcctgtcgagaaaatcctgctccgtgtggcaatctatatc

SEQ ID NO: 20750 - DNA, 260 bp, Unknown; identical to SEQ ID NO: 20748
  Description of Unknown: LeftRegion for integrase B7751 sequence

SEQ ID NO: 20751 - DNA, 260 bp, Unknown
  Description of Unknown: LeftRegion for integrase B7752 sequence
tgaataaatatgatgttgaaaaaagactatgcgatgaactaaatatcgaatatataaatttaaaccttcgcactggacctagctatatatttaccgaagaagaatatcaggagttgaaagccgactacgccaaattgtttttacagttagaaaatattgatgaaaacaactagtatttatattgaaaggagcaattttatatgaaacgtgcagcattgtatatacgtgtatccacaatggaacaagccaaggaaggatac

SEQ ID NO: 20752 - DNA, 260 bp, Unknown
  Description of Unknown: LeftRegion for integrase B7753 sequence
attcattaaattcttttggataataaaataaaaaccgcccctgcgccaacaggaacggtctacatatccgaagatatgcgattgaaatccaagaatattgtatcatcttcggagcagtcatgcaagcggaacgtttgttttgcgctggctgttatttttatacccatttttaaatactatttacaagggagtgatgcaaaatgcaagagaaaatactaagatgcgccatctatatccgtgtctcaacgtttgagcaaagt

SEQ ID NO: 20753 - DNA, 260 bp, Unknown
  Description of Unknown: LeftRegion for integrase B7754 sequence
attatcttgctataaaatgcaatattgaaatctaaacatagaaaaagacagtccctgacaagaactgcctttccccatcgtttcctatgtagcacataacttcatagaatacagattcgcaacctttattctaccacgaagttgtgctgctgcatagctttatttttttacgctttttttacggcagaaagaaggtttttatgaatagtacatacttcagaccgcaaccggaactcttcggcctgcgtgttgttaaatat

SEQ ID NO: 20754 - DNA, 260 bp, Unknown
  Description of Unknown: LeftRegion for integrase B7755 sequence
gcattagggattccgtcttcccttaataaattcaagtaaaataaaaacggccatctcgcccaagacagccgtttccactgtgtcctatgcagcacataacttcatagaatactgattcgcaacctttattctaccacgaagttgtgctgctgcatagctttatttttttacgctttttttacggcagaaagaaggtttttatgaatagtacatacttcagaccgcaaccggaactcttcggcctgcgtgttgttaaatat

SEQ ID NO: 20755 - DNA, 260 bp, Unknown
  Description of Unknown: LeftRegion for integrase B7756 sequence
gccacccgactggataatttacaaaaaaaaccgtcccggcggcaaccggaacggctcaagtaacattccgaagaatgatacccttattccttaaacattgtatcatcttcggacagcctacgcaagcggaacactcgttctccacaggctgttatttttgtacccttttttacataatatgaaccaaaggagctgatacaatgaagtcaaaaactctccggtgcgcgatctatatccgagtatctacaacagaacagatg

SEQ ID NO: 20756 - DNA, 260 bp, Unknown
  Description of Unknown: LeftRegion for integrase B7757 sequence
ggcatttgccacccaccacaataaaataaaaaccgcccctgcgccaacagagacggtctacatacccgaagatatgcgattaaaatccatgaatattgtatcatcttcggagcagctacgcaagcggaacatttgttttgcgctggctgttatttttgtatcaattttaaatatattttataaaaggagagtgatacaagatgcaagagaaaatattgagatgtgccatctatatccgcgtctccacatttgagcagagc

SEQ ID NO: 20757 - DNA, 260 bp, Unknown
  Description of Unknown: LeftRegion for integrase B7758 sequence
caaatgtacccaaaaagtcaaccgtccgatgcgccaacaccggacggccacaggagtatatcccgaaggacatacaatagtttatcaccagaaatattgtatcatcttcgggcagccggcacaatccagaacatgagttctcagtctggctgttatttttgtatctatttttcatacaattacaaaagggagatgatatcatgtctgaaaagctcaagcgctgcgctctctacataagagtctccacagcggagcagtgt

SEQ ID NO: 20758 - DNA, 260 bp, Unknown
  Description of Unknown: LeftRegion for integrase B7759 sequence
tattatcttgctataaaatgcaatattgaaatctaaacatagaaaaagacagtccctgacaagaactgcctttccccatcatttcctatgtagcacataacttcatagaatacagattcgcaacctttattctaccacgaagttgtgctgctgcatagctttatttttttacgcttttttacagcagaaagaaggtttttatgaatagtacatacttcagaccgcaaccggaactcttcggcctgcgtgttgttaaatat

SEQ ID NO: 20759 - DNA, 260 bp, Unknown
  Description of Unknown: LeftRegion for integrase B7760 sequence
tattatcttgctataaaatgcaatattgaaatctaagcatagaaaaagacagtccctgacaagaactgcctttccccatcgtttcctatgcagcacataacttcatagaatactgattcgcaacctttattctaccacgaagttgtgctgctgcatagctttattttttttcgcttttttacggcagaaagaaggtttttatgaatagtacatacttcagaccgcaaccggaactcttcggcctgcgtgttgttaaatat

SEQ ID NO: 20760 - DNA, 260 bp, Unknown
  Description of Unknown: LeftRegion for integrase B7761 sequence
tgtatggaaaatgaaatagataatttatcggtgaagtctttataggaattgtaataaaattcatataatattttttaataaatattagttgcaaaaagttttaatgagcgttacaataagggtgaggtgaagatatgaacggtgaaatttatgcaagatattcaatctaaaatcagcgataagagtctattaacgataagttgagaaaatgtactgcttttgcactgcataacgatattcaaatagtcggtgaatatatc

SEQ ID NO: 20761 - DNA, 260 bp, Unknown
  Description of Unknown: LeftRegion for integrase B7762 sequence
ggcttaggaggaataaatatgatagtagaaatttacaagggaatagacagtgaaaagccagttgatattataattgttttaggataggaggtaagaagatgattataagaagtaaagaagtattgaatgataaaactttaaaggagattcaagataatataaagaaattatatgataaacaaaaaggagaataactttagatgagagaggtcaagaaagcaatagcttattttagagtaagtacagatatgcaaaaagag

SEQ ID NO: 20762 - DNA, 260 bp, Unknown; identical to SEQ ID NO: 20748
  Description of Unknown: LeftRegion for integrase B7763 sequence

SEQ ID NO: 20763 - DNA, 260 bp, Unknown
  Description of Unknown: LeftRegion for integrase B7764 sequence
gcattagggattccgtcttcccttaataaattcaagtaaaataaaaacggccatctcgccaaagacagccgtttccactgtgtcctatgcagcacataacttcatagaatactgattcgcaacctttattctaccacgaagttgtgctgctgcatagctttatttttttacgctttttttacggcagaaagaaggtttttatgaatagtacatacttcagaccgcaaccggaactcttcggcctgcgtgttgttaaatat

SEQ ID NO: 20764 - DNA, 260 bp, Unknown
  Description of Unknown: LeftRegion for integrase B7765 sequence
tattatcttgctataaaatgcaatattgaaatctaagcatagaaaaagacagtccctgacaagaactgcctttccccatcgtttcctatgtagcacataacttcatagaatacagattcgcaacctttattctaccacgaagttgtgctgctgcatagctttatttttttacgcttttttacggcagaaagaaggtttttatgaatagtacatacttcagaccgcaaccggaactcttcggcctgcgtgttgttaaatat

SEQ ID NO: 20765 - DNA, 260 bp, Unknown
  Description of Unknown: LeftRegion for integrase B7766 sequence
tgcggcatttgccacccaccacaataaaataaaaaccgcccctgcgccaacagagacggtatacatacccgaagatatgcgattaaaatccatgaatattgtatcatcttcggaaacagcttgcaagcggaacgtttgttttgcgcggctgttatttttatacctatttttaaatactatttacaaaggagtgatacaagatgcaagagaaaatattgagatgtgccatctatatccgcgtctccacatttgagcagagc

SEQ ID NO: 20766 - DNA, 260 bp, Unknown
  Description of Unknown: LeftRegion for integrase B7767 sequence
gaaccgctcctgcgccaacaggaacggcaaacaattacacatatccgaagatatgcaatgaggcaaacagattgcctactacctaatcaacaaaaatattgtatcatcttcgggcagcctacgcaagcggaacactcgttcttgctggctgttatttttatacccttttttacataatatgaaccaaaggagctgatacaatgaagtcaaaaactctccggtgcgcgatctatatccgagtgtctacaacagaacagatg

SEQ ID NO: 20767 - DNA, 260 bp, Unknown
  Description of Unknown: LeftRegion for integrase B7768 sequence
gcattagggattccgtcttcccttaataaattcaagtaaaataaaaacggccatctcgcccaagacagccgtttccactgtgtcctatgcagcacataacttcatagaatactgattcacaacctttattctaccacgaagttgtgctgctgcatagctttatttttttacgctttttttacggcagaaagaaggtttttatgaatagtacatacttcagaccgcaaccggaactcttcggcctgcgtgttgttaaatat

SEQ ID NO: 20768 - DNA, 260 bp, Unknown
  Description of Unknown: LeftRegion for integrase B7769 sequence
agcattagggattccgtcttcccttaataaattcaagtaaaataaaaacggccatctcgcccaagacagccgtttccactgtgtcctatgcagcacataacttcatagaatactgattcgcaacctttattctaccacgaagttgtgctgctgcatagctttatttttttacgcttttttacggcagaaagaaggtttttatgaatagtacatacttcagaccgcaaccggaactcttcggcctgcgtgttgttaaatat

SEQ ID NO: 20769 - DNA, 260 bp, Unknown
  Description of Unknown: LeftRegion for integrase B7770 sequence
tgaataaatatgatgttgaaaaaagactatgcgatgaactaaatatcgaatatataaatttaaaccttcgcactggacctagctatatatttaccgaagaagaatatcaggagttaaaatccgactacgccaaattgtttttacagttagaaaatattgatgaaaacaactagtatttattttgaaaggagcaattttatatgaaacgtgcagcattgtatatacgtgtatccacaatggaacaagccaaggaaggatac

SEQ ID NO: 20770 - DNA, 260 bp, Unknown
  Description of Unknown: LeftRegion for integrase B7771 sequence
atggaagaaaacctgctgaccccaaaggaatacaggcaaatcgaaggaattctggggcgaaaattctcgccggtatgggcgggtttacccgatacaataaaggataaatctgcgcgacagcccttgataatccgtccatatgacggtaatatgcatcacgatccgatggattgatacaatgtcagaagggacggattgatatgaacgagaagacaatgacgcttacccgcatggaagcaccggcgcagctgcctgtgcga

SEQ ID NO: 20771 - DNA, 260 bp, Unknown; identical to SEQ ID NO: 20730
  Description of Unknown: LeftRegion for integrase B7772 sequence

SEQ ID NO: 20772 - DNA, 260 bp, Unknown; identical to SEQ ID NO: 20736
  Description of Unknown: LeftRegion for integrase B7773 sequence

SEQ ID NO: 20773 - DNA, 260 bp, Unknown; identical to SEQ ID NO: 20730
  Description of Unknown: LeftRegion for integrase B7774 sequence

SEQ ID NO: 20774 - DNA, 260 bp, Unknown
  Description of Unknown: LeftRegion for integrase B7775 sequence
attatcttgccataaaatgcaatattgaaatctaaacatagaaaaagacagtccctgacaagaactgcctttccccatcgtttcctatgcagcgcattacttcatagaatactgattcgcaacctttattctaccacgaagttgtgttgctgcatagctttatttttttacgcttttttacagtagaaagaaggttttttatgaacagtacatacttcagaccgcaaccggaactcttcggcctgcgtgttgttaaatat

SEQ ID NO: 20775 - DNA, 260 bp, Unknown
  Description of Unknown: LeftRegion for integrase B7776 sequence
ggcataaagaaaacacagaagaaccaagagttgctttgagaaggcatactacaataatgaaaggtacaacagaacctttgtggatatttgaaataggagaataacatatttaataaaggaggtaggaaagatgattaataagaaagcgattgttaatataataaaagaaataagactaaaacagctagcgaggttaaaaaatgaagaaacaattgaaagctctgatatatgctagagtaagtactgtaatgcaagaagaa

SEQ ID NO: 20776 - DNA, 260 bp, Unknown
  Description of Unknown: LeftRegion for integrase B7777 sequence
ggtgtcttttgctatatacacaaataaaccgccccagtgctaccaacactgagacggtctacatatccgaagatatgctattgaaatccacgaatattgtatcatcttcggagcagtcatgcaagcggaacatcagttcgcacgttggctgttatttttatactcatttttaaatactatttacaagggagtgatgcaaaatgcaagagaaaatactaagatgcgccatctatatccgcgtctccacatttgagcagagc

SEQ ID NO: 20777 - DNA, 260 bp, Unknown
  Description of Unknown: LeftRegion for integrase B7778 sequence
attatcttgccataaaatgcaatattgaaatctaaacatagaaaaagacagtccctgacaagaactgcctttccccatcgtttcctatgcagcacattacttcatagaatactgattcgcaacctttattctaccacgaagttgtgctgctgcatagctttatttttttacgcttttttacagtagaaagaaggttttttatgaatagtacatacttcagaccgcaaccggaactctttggcctgcgtgtctgcaaatat

SEQ ID NO: 20778 - DNA, 260 bp, Unknown
  Description of Unknown: LeftRegion for integrase B7779 sequence
tgaataaatatgatgttgaaaaaagactatgcgatgaactaaatatcgaatatataaatttaaaccttcgcactggacctagctatatatttaccgaacaagaatatcaggagttgaaatccgactacgccaaattgtttttacagttagaaaatattgatgaaaacaactagtgtttatattgaaaggagcaattttatatgaaacgtgcagcattgtatatacgtgtatccacaatggaacaagccaaggaaggatac

SEQ ID NO: 20779 - DNA, 260 bp, Unknown
  Description of Unknown: LeftRegion for integrase B7780 sequence
tattatcttgctataaaatgcaatgttgaaatctaaacatagaaaaagacagtccctgacaagaactgcctttccccatcatttcctatgtagcacataacttcatagaatacagattcgcaacctttattctaccacgaagttgtgctgctgcatagctttatttttttacgcttttttacggcagaaagaaggtttttatgaatagtacatacttcagaccgcaaccggaactcttcggcctgcgtgttgttaaatat

SEQ ID NO: 20780 - DNA, 260 bp, Unknown
  Description of Unknown: LeftRegion for integrase B7781 sequence
accgggaagaattagagggggataaagaaagtcctgctcacggagaagattgcccccataaaattgctcaagcgtaaaaaggtgttggaggtgatactacgaaagcggtaatttatgccagatattcaagtcatagtcagcgtgaggagtccatcgagggacagcttcgtgagtgtcacgacttcgcactgaaaaacggaatgacgatcatcggtgaatactgcgacagagctatctcaggaaaaaccgataaccgtcca

SEQ ID NO: 20781 - DNA, 260 bp, Unknown
  Description of Unknown: LeftRegion for integrase B7782 sequence
atggtttagattaaataaaaaaccgcccctgcgccaacaggaacggttgatgcatatccgaagatatacaaacgagctaccaactcacgaatattgtatcatcttcgggcagccactgcaagcggaacactcgttcctcgctggctgtattttttatacccatttttgtgcgacgtcgcacatatacttaggaaggtgatatgatgacgaacaaaattatccgctgcgctctctacatccgtgtcagcaccgctgagcag

SEQ ID NO: 20782 - DNA, 260 bp, Unknown; identical to SEQ ID NO: 20742
  Description of Unknown: LeftRegion for integrase B7783 sequence

SEQ ID NO: 20783 - DNA, 260 bp, Unknown; identical to SEQ ID NO: 20730
  Description of Unknown: LeftRegion for integrase B7784 sequence

SEQ ID NO: 20784 - DNA, 260 bp, Unknown; identical to SEQ ID NO: 20755
  Description of Unknown: LeftRegion for integrase B7785 sequence

SEQ ID NO: 20785 - DNA, 260 bp, Unknown
  Description of Unknown: LeftRegion for integrase B7786 sequence
tattttcttgctcaaaaatgcaatatagaaatctaaacatagaaaaagacagtccctgacaagaactgccttcccccatcgtttcctatgcagcacataactccatagaatactgattcgcaacctttattctaccacgaagttgtgctgctgcatagctttatttttttacgcttttttacggcagaaagaaggtttttatgaatagtacatacttcagaccgcaaccggaactcttcggcctgcgtgttgttaaatat

SEQ ID NO: 20786 - DNA, 260 bp, Unknown; identical to SEQ ID NO: 20768
  Description of Unknown: LeftRegion for integrase B7787 sequence

SEQ ID NO: 20787 - DNA, 260 bp, Unknown
  Description of Unknown: LeftRegion for integrase B7788 sequence
attcgttgaattctttagggcaataaaataaaaaccgcccctgcgccaacagagacggtatacatatccgaagatatgcgattgaaatccacgaatattgtatcatcttcggggcagtcacgcaagcggaacatatgttttgtgctggctgttatttttgtaccaattttaaatatattttacaaaggagagtgatgcaaatgccagaaaaaatactgcggtgtgccatatatatccgcgtctccacatttgagcagagc

SEQ ID NO: 20788 - DNA, 260 bp, Unknown; identical to SEQ ID NO: 20748
  Description of Unknown: LeftRegion for integrase B7789 sequence

SEQ ID NO: 20789 - DNA, 260 bp, Unknown
  Description of Unknown: LeftRegion for integrase B7790 sequence
tcccttaattctttaggacaataaaataaaaaccgcccctgcgccaacagagacggtctacatatccgaagatatgcacttgaaatccaagagtattgtatcatcttcggagcagtcatgcaagcggaacgtttgttttgcgctggctgttatttttgcaccaattttaaatatattttacaaaaggagagtgatacggaatgccagaaaaaatactacggtgcgccatatatatccgagtatccacatttgagcagagt

SEQ ID NO: 20790 - DNA, 260 bp, Unknown
  Description of Unknown: LeftRegion for integrase B7791 sequence
attatcttgctataaaatgcaatattgaaatctaaacatagaaaaagacagtccctgacaagaactgcctttccccatcatttcctatgtagcacataacttcatagaatactgattcgcaacctttattctaccacgaagttgtgctgctgcatagctttatttttttacgctttttttacggcagaaagaaggtttttatgaatagtacatacttcagaccgcaaccggaactcttcggcctgcgtgttgttaaatat

SEQ ID NO: 20791 - DNA, 260 bp, Unknown
  Description of Unknown: LeftRegion for integrase B7792 sequence
tgtggcatttgccacccaccacaataaaataaaaaccgcccctgcgccaacagagacggtctacatacccgaagatatgcgattaaaatccatgaatattgtatcatcttcggaaacagcttgcaagcggaacgtttgttttgcgcggctgttatttttatacctatttttaaatactatttacaaaggagtgatacaagatgcaagagaaaatattgagatgcgccatctatatccgcgtctccacatttgagcagagc

SEQ ID NO: 20792 - DNA, 260 bp, Unknown; identical to SEQ ID NO: 20675
  Description of Unknown: LeftRegion for integrase B7793 sequence

SEQ ID NO: 20793 - DNA, 260 bp, Unknown; identical to SEQ ID NO: 20761
  Description of Unknown: LeftRegion for integrase B7794 sequence

SEQ ID NO: 20794 - DNA, 260 bp, Unknown
  Description of Unknown: LeftRegion for integrase B7795 sequence
attctttaggacaataaaacaaaaaaccgccccggtgctaccaacactgagacggtaatacatatccgaagatatgctattgaaatccacgaatattgtatcatcttcggagcagtcacgcaagcgaaacatcagttcgaacgctggctgttatttttgtaccaattttaaatatattttacaaaaggagagtgatgcaaatgccagaaaaaatactgcggtgtgccatatacatccgcgtctccacatttgagcagagc

SEQ ID NO: 20795 - DNA, 260 bp, Unknown; identical to SEQ ID NO: 20754
  Description of Unknown: LeftRegion for integrase B7796 sequence

SEQ ID NO: 20796 - DNA, 260 bp, Unknown
  Description of Unknown: LeftRegion for integrase B7797 sequence
ttctttaggacaataaaacaaaaaaccgtcccagtgctaccaacaccgggacggcaatacatatccgaagatatgcgatcaaaatccaagaatattgtatcatcttcggaaacagcttgcaagcggaacatttgttcatgtgctggctgttatttttgtaccaattttaaatatattttacaaaaggagagtgatacggaatgccagaaaaaatactacggtgcgccatatatatccgagtatccacatttgagcagagt

SEQ ID NO: 20797 - DNA, 260 bp, Unknown
  Description of Unknown: LeftRegion for integrase B7798 sequence
actgaaataataaaaaagaaaaccgcccctgcgccaacaggaacggttgatgcatatccgaagatatacaaacgagctaccaactcacgaatattgtatcatcttcgggcagccactgcaagcggaacactcgttcctcgctggctgtattttttatacccatttttgtgcgacgtcgcacatatacttaggaaggtgatatgatgacgaacaaaattgtccgctgcgctctctacatccgtgtcagcaccgctgagcag

SEQ ID NO: 20798 - DNA, 260 bp, Unknown
  Description of Unknown: LeftRegion for integrase B7799 sequence
gccacccgactggataatttacaaaaaaaaccgtcccggcggcaaccggaacggctcaagtaacattccgaagaatgatacccttattccttaaacattgtatcatcttcggacagcctacgcaagcggaacactcgttctccgccggctgttatttttatacctttttttacataatatgaaccaaaggagctgatacaatgaaatcaaaaactctccggtgcgcgatctatatccgagtatctacgacagaacagatg

SEQ ID NO: 20799 - DNA, 260 bp, Unknown; identical to SEQ ID NO: 20766
  Description of Unknown: LeftRegion for integrase B7800 sequence

SEQ ID NO: 20800 - DNA, 260 bp, Unknown; identical to SEQ ID NO: 20768
  Description of Unknown: LeftRegion for integrase B7801 sequence

SEQ ID NO: 20801 - DNA, 260 bp, Unknown; identical to SEQ ID NO: 20742
  Description of Unknown: LeftRegion for integrase B7802 sequence

SEQ ID NO: 20802 - DNA, 260 bp, Unknown
  Description of Unknown: LeftRegion for integrase B7803 sequence
agcgtcacacgttttataaaataaaaaccgccccagtgctaccaacaccgggacggcaatacatatccgaagatatgcgattgaaatccaagaatattgtatcatcttcggagcagtcatgcaagcggaacatcagttcgcacgttggctgttatttttatactcatttttaaatactatttacaagggagtgatgcaaaatgcaagagaaaatactaagatgcgccatctatatccgtgtctcaacgtttgagcaaagt

SEQ ID NO: 20803 - DNA, 260 bp, Unknown
  Description of Unknown: LeftRegion for integrase B7804 sequence
cagcaagatttaactattcaataaaaataaaaaccgcccctgcgccaacagagacggtctacacatccgaagatatgcgattaaaatccaagaatattgtatcatcttcggagcagtcatgcaagcggaacatcagttcgcacgttggctgttatttttatactcatttttaaatactatttacaagggagtgatgcaaaatgcaagagaaaatactaagatgcgccatctatatccgtgtctcaacgtttgagcaaagt

SEQ ID NO: 20804 - DNA, 260 bp, Unknown
  Description of Unknown: LeftRegion for integrase B7805 sequence
tttaggacaataaaacaaaataaaaaaccgccccagtgctaccaacacagagacggtctacatacccgaagatatgcgattaaaatccatgaatattgtatcatcttcggagcagtcacgcaagcggaacgtttgttttgcgctggctgttatttttataccaattttaaatatattttacaaaaggagagtgatacggaatgccagaaaaaatactacggtgcgccatatatatccgagtatccacatttgagcagagt

SEQ ID NO: 20805 - DNA, 260 bp, Unknown; identical to SEQ ID NO: 20748
  Description of Unknown: LeftRegion for integrase B7806 sequence

SEQ ID NO: 20806 - DNA, 260 bp, Unknown
  Description of Unknown: LeftRegion for integrase B7807 sequence
ctcgattctttaggataataaaacaaaaaccgccccagtgttaccagcactgagacggtctacatacccgaagatatgcgattaaaatccatgaatattgtatcatcttcggaaacagcttgcaagcggaacgtttgttttgcgctggctgttatttttatacctatttttaaatactatttacaaaggagtgatacaagatgcaagagaaaatattgagatgtgccatctatatccgcgtctccacatttgagcagagc

SEQ ID NO: 20807 - DNA, 260 bp, Unknown
  Description of Unknown: LeftRegion for integrase B7808 sequence
agacacgctaccaacgagccttgcacccgtaatcaatacgggtatctcaccataagactatcgctccgaagaatgcaatagtaagctcaagaatattgtatcatcttcggagcagctacgcaagcggaacgtttgttttgcgctggctgttatttttgtaccaattttaaatatattttacaaaaggagagtgatacggaatgccagaaaaaatactacggtgcgccatatatatccgagtatccacatttgagcagagt

SEQ ID NO: 20808 - DNA, 260 bp, Unknown
  Description of Unknown: LeftRegion for integrase B7809 sequence
tattttcttgctcaaaaatgcaatatagaaatctaagcatagaaaaagacagtccctgacaagaactgcctttccccatcgtttcctatgcagtacataacttcatagaatacagattcgcaacctttattctaccacgaagttgtgctgctgcatagctttatttttttacgcttttttacggcagaaagaaggtttttatgaatagtacatacttcagaccgcaaccggaactcttcggcctgcgtgttgttaaatat

SEQ ID NO: 20809 - DNA, 260 bp, Unknown; identical to SEQ ID NO: 20754
  Description of Unknown: LeftRegion for integrase B7810 sequence

SEQ ID NO: 20810 - DNA, 260 bp, Unknown; identical to SEQ ID NO: 19979
  Description of Unknown: LeftRegion for integrase B7811 sequence

SEQ ID NO: 20811 - DNA, 260 bp, Unknown
  Description of Unknown: LeftRegion for integrase B7812 sequence
tgccacccgactggataatttacaaaaaaaccgtcccggcggcaaccggaacggctcaagtaacattccgaagaatgatacccttattccttaaacattgtatcatcttcggacagcctacgcaagcggaacactcgttctccacaggctgttatttttgtacccttttttacataatatgaaccaaaggagctgatacaatgaagtcaaaaactctccggtgcgcgatctatatccgagtatctacaacagaacagatg

SEQ ID NO: 20812 - DNA, 260 bp, Unknown; identical to SEQ ID NO: 20747
  Description of Unknown: LeftRegion for integrase B7813 sequence

SEQ ID NO: 20813 - DNA, 260 bp, Unknown
  Description of Unknown: LeftRegion for integrase B7814 sequence
aactgcaaaataataaaagaaaccgcccctgcgccaacaggaacggttgatacatatccgaagatatgcaattgagctaccaactcacaaatattgtatcatcttcgggcagccactgcaagcggaacactcgttcctcgctggctgtattttttatacccatttttgtgcgacgtcgcacatatacttaggaaggtgatatgatgacgaacaaaattatccgctgcgctctctacatccgtgtcagcaccgctgagcag

SEQ ID NO: 20814 - DNA, 260 bp, Unknown; identical to SEQ ID NO: 20763
  Description of Unknown: LeftRegion for integrase B7815 sequence

SEQ ID NO: 20815 - DNA, 260 bp, Unknown; identical to SEQ ID NO: 20808
  Description of Unknown: LeftRegion for integrase B7816 sequence

SEQ ID NO: 20816 - DNA, 260 bp, Unknown; identical to SEQ ID NO: 20763
  Description of Unknown: LeftRegion for integrase B7817 sequence

SEQ ID NO: 20817 - DNA, 260 bp, Unknown
  Description of Unknown: LeftRegion for integrase B7818 sequence
ctctcgattctttaggacaataaaataaaaaaccgcccctgcgccaacagagacggtatacatatccgaagatatgctattgaaatccacgaatattgtatcatcttcggaaacagcttgcaagcggaacatatgttttgcgctggctgttatttttataccaattttaaatatattttataaaaggagagtgatacggaatgccagaaaaaatactacggtgtgccatatatatccgcgtatctacgtttgagcagagc

SEQ ID NO: 20818 - DNA, 260 bp, Unknown
  Description of Unknown: LeftRegion for integrase B7819 sequence
attatcttgccataaaatgcaatattgaaatctaaacatagaaaaagacagtccctgacaagaactgcctttccccatcgtttcctatgcagcgcattacttcatagaatactgattcacaacctttattctaccacgaagttgtgctgctgcatagctttatttttttacgcttttttacagtagaaagaaggttttttatgaacagtacatacttcagaccgcaaccggaactcttcggcctgcgtgttgttaaatat

SEQ ID NO: 20819 - DNA, 260 bp, Unknown; identical to SEQ ID NO: 20808
  Description of Unknown: LeftRegion for integrase B7820 sequence

SEQ ID NO: 20820 - DNA, 260 bp, Unknown
  Description of Unknown: LeftRegion for integrase B7821 sequence
tattatcttgctataaaatgcaatattgacatctaaacatagaaaaagacagtccctgacaagaactgcctttccccatcgtttcctatgcagtacataacttcatagaatacagattcgcaacctttattctaccacgaagttgtgctgctgcatagctttatttttttacgcttttttacggcagaaagaaggtttttatgaatagtacatacttcagaccgcagcctgaactctttggcctgcgtgtctgcaaatat

SEQ ID NO: 20821 - DNA, 260 bp, Unknown
  Description of Unknown: LeftRegion for integrase B7822 sequence
caagaagtgttatagataatagtttattgtagcaaaagaaaaacgcccggtttcccgaacgtttctcctttacctgctatgcagcacacgccgcatagaatagtccatcgcaacttctattctatcacaaaaagcgtgctgctgcatagctttattttttatactcttttttaacattttgatagaaagaaggttctattatgaatagttcatatttccgttcacagccggaactgtacggcttgcgtgtagcaaaatac

SEQ ID NO: 20822 - DNA, 260 bp, Unknown; identical to SEQ ID NO: 20736
  Description of Unknown: LeftRegion for integrase B7823 sequence

SEQ ID NO: 20823 - DNA, 260 bp, Unknown; identical to SEQ ID NO: 20736
  Description of Unknown: LeftRegion for integrase B7824 sequence

SEQ ID NO: 20824 - DNA, 260 bp, Unknown; identical to SEQ ID NO: 20736
  Description of Unknown: LeftRegion for integrase B7825 sequence

SEQ ID NO: 20825 - DNA, 260 bp, Unknown
  Description of Unknown: LeftRegion for integrase B7826 sequence
aatactcgatttattataaaatgtaagaaccgctccggcggcaaccggaacggctcaagtaacattccgaagaatgataccacgattcacaaaattattgtatcatcttcgggcagcctacgcaagcggaacactcgttctccgccggctgttatttttatacctttttttacataatatgaaccaaaggagctgatacaatgaaatcaaaaactctccggtgcgcgatctatatccgagtatctacgacagaacagatg

SEQ ID NO: 20826 - DNA, 260 bp, Unknown; identical to SEQ ID NO: 20736
  Description of Unknown: LeftRegion for integrase B7827 sequence

SEQ ID NO: 20827 - DNA, 260 bp, Unknown
  Description of Unknown: LeftRegion for integrase B7828 sequence
tttatattatttcgaacaccgtgattaatgcaaaaaagaaaaacgcccggtttcccaagcgtttctccttgacctgctatgcagcacacgccgcatagaatagtccatcgcaacttctattctatcacaaaaagcgtgctgctgcatagctttattttttatactcttttttaacattttgatagaaagaaggttttattatgagtagttcatatttccgtccacagccagaactgtacggcttgcgtgtagtaaaatac

SEQ ID NO: 20828 - DNA, 260 bp, Unknown; identical to SEQ ID NO: 20768
  Description of Unknown: LeftRegion for integrase B7829 sequence

SEQ ID NO: 20829 - DNA, 260 bp, Unknown; identical to SEQ ID NO: 20768
  Description of Unknown: LeftRegion for integrase B7830 sequence

SEQ ID NO: 20830 - DNA, 260 bp, Unknown
  Description of Unknown: LeftRegion for integrase B7831 sequence
ggcttaggaggaataaatatgatagtagaaatttacaagggaatagacagtgaaaagccagttgatattataattgttttaggataggaggtaagaaaatgattataagaagtaaagaagtattgaatgataaaactttaaaggagattcaagataatataaagaaattatatgataaacaaaaaggagaataactttagatgagagaggtcaagaaagcaatagcttattttagagtaagtacagatatgcaaaaagag

SEQ ID NO: 20831 - DNA, 260 bp, Unknown
  Description of Unknown: LeftRegion for integrase B7832 sequence
aaaagaaccgctcctgcgccaacaggaacggtcataggacgaaacatacgccaatatgtttctattaagttctccgaagagatacccaattccaaataatattgtatcatctccggagcagccatgcaagagaacaaaagttctcaggctgttatttttatactcatttttacgtatattgaagagaaaggtgatataatatgccaagtaaaattgaacgctgcgccatttacatccgtgtgtctaccgctgaacagatg

SEQ ID NO: 20832 - DNA, 260 bp, Unknown
  Description of Unknown: LeftRegion for integrase B7833 sequence
tattgatttaaaagaattgtaacattaaaacaaaagccccggtgctaccaacaccaggactctttgataagtactatacagtgctgaagcacgtacaataatcatcggcaatgatattgtaccacaaatttccagcacctgtataggtgttatttttgtacccatttttgcgtaacataaaaaaggaaaggtgatatgatatgacgactaaagttgaacgctgtgcaatctatatccgtgtatccactaccgagcaaatg

SEQ ID NO: 20833 - DNA, 260 bp, Unknown
  Description of Unknown: LeftRegion for integrase B7834 sequence
tgtaggatgcacatatctcgtcaaaatatgaaaaaggacagccgcgtcaacgactgccccttctcatgtgtctatgctccacagctttacgccaagaacagacacggatcacaccctctattctagcataaagctgtgttgctgcatagctttattttttatacccttttcagggttctgtgttagaaagaaggttttttatgaatacatattttcatccgcagccggaactgtacggcctgcgtgtagttaaatacata

SEQ ID NO: 20834 - DNA, 260 bp, Unknown
  Description of Unknown: LeftRegion for integrase B7835 sequence
aagtatctgcaatagatctgaaatagcaaaaagccccaggagctaccaactcccagagcttttcacatagatttctcttgccggacgcaccggaagatacaatcattctcgcaaattgattatatcatttccaaagcgtcctgacaaggggcgtattttttatacccaaaattaatacacttaaccaaggagatgatattatgacaaagccccagaccgcccttctgcgtgtagcgctctacatccgtgtatcctcagac

SEQ ID NO: 20835 - DNA, 260 bp, Unknown
  Description of Unknown: LeftRegion for integrase B7836 sequence
aaaccgctcctgcgccaacaggaacggtcgagcgatggaaacatacgccaatatgtttctctattaagtactccgaagagatacccaatctccaaataatattgtatcatcttcggagcagccacgcaagagaacaaaagttctcaggctgttatttttatactcatttttacgtatattgaagagaaaggtgatataatatgccaagtaaaattgaacgctgcgccatttacatccgtgtgtctaccgctgaacagatg

SEQ ID NO: 20836 - DNA, 260 bp, Unknown
  Description of Unknown: LeftRegion for integrase B7837 sequence
ttaaggaacgtcatttgaacgaatagaaatgtaaataaaaaaaagagcagcctccacgccaatggaaaccgctctttgacaacatatacctccgtataagcacggcgataaaatgtcaccccgcaagtctcattttatcataaaaccgtgcttgtgcataggttttatttttatacctttttttgaatggagttgataaaatgcgacgtaaaacaaccgctcatgttgagaaaatcctgctccgtgtggcaatctatatc

SEQ ID NO: 20837 - DNA, 260 bp, Unknown
  Description of Unknown: LeftRegion for integrase B7838 sequence
tcaaggaacgtcatttgaacgaatagaaatgtaaataaaaaaagagcagcctccacgccaatggaaaccgctctttagataacatatacctccgtataggcacggcgataaaatgtcaccccgcaagtctcattttatcataaaaccgtgcttgtgcataggttttatttttatacctttttttgaatggagttgataaaatgcgacgtaaaacaaccgctcctgttgagaaaatcctgctccgtgtggcaatttatatc

SEQ ID NO: 20838 - DNA, 260 bp, Unknown
  Description of Unknown: LeftRegion for integrase B7839 sequence
aaaaccgctcctgcgccaacaggaacggtcgagcgatgaaacatacaccaatatgtttctctattaagtactccgaagagatacccaatttccaaataatattgtatcatcttcggagcagccgcgcaagagaacaaaagttctctggctgttatttttatactcatttttacgtatattgaagagaaaggtgatataatatgccaagtaaaattgaacgctgcgccatttacatccgtgtgtctaccgctgaacagatg

SEQ ID NO: 20839 - DNA, 260 bp, Unknown
  Description of Unknown: LeftRegion for integrase B7840 sequence
aaagaaccgctcctgcgccaacaggaacggtcaagcgatgaaacatacgccaatatgtttctaattaagttctccgaagagatactcaaactgcaaatatattgtatcatcttcggacagccatcgcaagagaacaaaagttctcaggctgttatttttatactcatttttacgtatattgaagagaaaggtgatataatatgccaagtaaaattgaacgctgcgccatttacatccgtgtgtctaccgctgaacagatg

SEQ ID NO: 20840 - DNA, 260 bp, Unknown
  Description of Unknown: LeftRegion for integrase B7841 sequence
caagaaccgcccctgcgccaacaggaacggctctgggatatatccgaagatatacacctaatcaacgaaaatattgtatcatcttcggaacagtcacgcaagccggaacactcgttccatgctggctgttatttttgtatcctcgtccctatgcatgtgccgaggattgaaacatacaaatgaataaaggagatgataacatgtcggaaaagatcaaacgctgtgcgatctatatccgtgtctcaacttcagagcagatg

SEQ ID NO: 20841 - DNA, 260 bp, Unknown
  Description of Unknown: LeftRegion for integrase B7842 sequence
gtaggatgcacatatctcgtcaaaaatatgaaaaaggacagccgcgtcaacgactgccccttctcatgtgtctatgctccgcagctttacgccaagaacagacacggatcacaccctctattctagcataaagctgtgttgctgcatagctttattttttatacccttttcagggttctatgtcagaaagaaggttttttatgaatacatattttcatccgcagccggaactgtacggcctgcgtgtagttaaatacata

SEQ ID NO: 20842 - DNA, 260 bp, Unknown
  Description of Unknown: LeftRegion for integrase B7843 sequence
taaataaaagaaccgctcctgcgccaacaggaacggtcgagcgatgaaacatactctgtttctattaagttctccgaagagatacccaattccaaataatattgtatcatctccggagcagccacgcaagagaacaaaagttctctggctgttatttttatactcatttttacgtatattgaagagaaaggtgatataatatgccaagtaaaattgaacgctgcgccatttacatccgtgtgtccaccgctgaacagatg

SEQ ID NO: 20843 - DNA, 260 bp, Unknown
  Description of Unknown: LeftRegion for integrase B7844 sequence
ccattgcgtcatcctcctagttttgattatgtacacgcttcaggcactctatacaaataaaaaaggaagccgtgaccagcgacttcccttgcgaaacattgaaacaaaatatatcgcggaagaccgcccacgatgatattatgtccttttacattctatcatatcaagccttctttcgctaccagaaagaaggtttttatatgtctttttttactccaaacccacaacttttcgggcttcgtgtagttaaatatatcaga

SEQ ID NO: 20844 - DNA, 260 bp, Unknown
  Description of Unknown: LeftRegion for integrase B7845 sequence
actgtttaagaattaatggtttagattaaataaaaaatccccggtgttaccagcaccggggcatgagaaaactatacggtaccgaagcacgtacaatacccccacaaccaaggatattgtaccacaaatttccagcaccgtataggtgttatttttatacccatttttgcgtaacataaaaaaaggaaaggtgatatgatatgacgactaaagttgaacgctgtgcaatctatatccgcgtatccactactgagcaaatg

SEQ ID NO: 20845 - DNA, 260 bp, Unknown
  Description of Unknown: LeftRegion for integrase B7846 sequence
tcaaaaagaagtcaaagatttaagaaaatatctagctgaactggaaaaagaaataaacttaaaaaatgaacaagaaataaataaagataacttagaattatttgataaataaggaggatgttatgaaaaaagaaaatatcaaagctgccatattaaaaattaaggaattaaaagcaaaatgtaaaaaaggagcttaataaatgaaagttgttacataccttagagtttctacagaaatgcaaaaagatagaggttctctt

SEQ ID NO: 20846 - DNA, 260 bp, Unknown
  Description of Unknown: LeftRegion for integrase B7847 sequence
cccgcactgatttgatgtcgttatcgaatttttgcaataaaaaaagagcagcctccacgccaatggaaaccgctctttgacaacatatacctccgtataagcacggcgataaaatgtcacccgcaagtctcattttatcataaaaccgtgcttatgcataggttttatttttatacctttttttgaatggagttgataaaatgcgacgcaaaacaaccgctcctgttgagaaaatcctgctccgtgtggcaatctatatc

SEQ ID NO: 20847 - DNA, 260 bp, Unknown
  Description of Unknown: LeftRegion for integrase B7848 sequence
caaggaacgtcatttgaacgaatagaaatgtaaataaaaaaagagcagcctccacgccaatggaaaccgctctttagataacatatacctccgtataggcacggcgataaaatgtcaccccgcaagtctcattttatcataaaaccgtgcttgtgcataggttttatttttataccttttttttgaatggagttgataaaatgcgacgtaaaacaaccgctcctgttgagaaaatcctgctccgtgtggcaatctatatc

SEQ ID NO: 20848 - DNA, 260 bp, Unknown
  Description of Unknown: LeftRegion for integrase B7849 sequence
tatataaacattttttcaaaataaaaccgctcctgcgccaacaggaacggctcaagactaatgccccgaaggatacaccagtacgttcaaaatatagtgtatcatcttcgggcagccaccgcaagcagaactcatgttcttctgctggctgttatttttatactcatttttacgtatattgaagagaaaggtgatataatatgccaagtaaaattgaacgctgcgccatttacatccgtgtgtctaccgctgaacaaatg

SEQ ID NO: 20849 - DNA, 260 bp, Unknown
  Description of Unknown: LeftRegion for integrase B7850 sequence
atgaggatgatgaataaatgtaattaataaaaatccccggtgttaccagcaccagggacaatgagaaaactataaggtgtttggaacacaatacaattctctccctcacaaagattattgtatcacaaaaatccggcaccgtataggtgttatttttgtacccatttttacgtacactaaaggaggaaaggtgatataatatggcaaccaaaattgaacgctgcgcaatctatatccgcgtatctactacagaacagatg

SEQ ID NO: 20850 - DNA, 260 bp, Unknown
  Description of Unknown: LeftRegion for integrase B7851 sequence
tcgtcaaggaacgtcatttgaacgaatagaaatgtaaataaaaaaagagcagcctccacgccaatggaaaccgctctttgacaacatatacctccgtataagcacggcgataaaatgtcacccgcaagtctcattttatcataaaaccgtgcttatgcataggttttatttttataccttttttgaatggagttgataaaatgcgacgcaaaacaaccgctcctattgagaaaatcctgctccgtgtggcaatctatatc

SEQ ID NO: 20851 - DNA, 260 bp, Unknown
  Description of Unknown: LeftRegion for integrase B7852 sequence
ttcacactgatttgatgtcgttatcgaatttttgtaataaaaaagagcagcctccacgccaatggaaaccgctctttgataacatatatctatcgtacaagcacgattgataaaatgtcacccgcaagtctcattttatcataaaaccgtgcttgtgcataggttttatttttataccttttttgaatggagttgataaaatgcgacgtaaaacaaccgctcctgtcgagaaaatcctgctccgtgtggcaatctatatc

SEQ ID NO: 20852 - DNA, 260 bp, Unknown
  Description of Unknown: LeftRegion for integrase B7853 sequence
gtcaaggaacgtcatttgaacgaatagaaatgtaaataaaaaagagcagcctccacgccaatggaaactgctctttagataacatatacctccgtataagcacggcgataaaatgtcaccccgcaagtctcattttatcataaaaccgtgcttatgcataggttttatttttataccttttttggaatggagttgataaaatgcgacgtaaaacaaccgctcctgttgagaaaatcctgctccgtgtggcaatctatatc

SEQ ID NO: 20853 - DNA, 260 bp, Unknown; identical to SEQ ID NO: 20843
  Description of Unknown: LeftRegion for integrase B7854 sequence

SEQ ID NO: 20854 - DNA, 260 bp, Unknown
  Description of Unknown: LeftRegion for integrase B7855 sequence
aaagaaccgcccctgcgccaacaggaacggctctggaatatatccgaagatatacacctaatcaacgaaaatattgtatcatcttcggaacagtcacgcaagccggaacactcgttccatgctggctgttatttttgtatcctcgtccctatgcatggggcgaggattgaaacatacaaatgaataaaggagatgataacatgtcggaaaagatcaaacgctgtgcgatctatatccgtgtctcaacttcagagcagatg

SEQ ID NO: 20855 - DNA, 260 bp, Unknown; identical to SEQ ID NO: 20843
  Description of Unknown: LeftRegion for integrase B7856 sequence

SEQ ID NO: 20856 - DNA, 260 bp, Unknown
  Description of Unknown: LeftRegion for integrase B7857 sequence
acaaagaatcgaactaagtcatgatgtaataaaaagatcccggtgctaccaacaccgagatctttcgataaatactatactgtgcagggcacgtacaatactccatcagcaagaatattgtatcacaaaaatccggcaccgtataggtgttatttttgtacccatttttgcgtaacataaaaaaggaaaggtgatatgatatgacgactaaagttgaacgctgcgccatctatatccgtgtgtctactaccgaacaaatg

SEQ ID NO: 20857 - DNA, 260 bp, Unknown
  Description of Unknown: LeftRegion for integrase B7858 sequence
ccgcactgatttgatgtcgttatcgaatttttgtaataaaaaaagagcagcctccacgccaatggaaaccgctctttgacaacacatatctatcgtacaagcacgattgataaaatgtcacccgcaagtctcattttatcataaaaccgtgcttgtgcataggttttatttttataccttttttgaatggagttgataaaatgcgacgtaaaacaaccgctcctgttgagaaaatcctgctccgtgtggcaatctatatc

SEQ ID NO: 20858 - DNA, 260 bp, Unknown
  Description of Unknown: LeftRegion for integrase B7859 sequence
cgcactgatttgatgtcgttatcgaatttttgcaataaaaaaagagcagcctccacgccaatggaaaccgctctttagataacatatacctccgtataagcacggtgataaaatgtcaccccacaagtctcattttatcataaaaccgtgcttgtgcataggttttatttttatacatttttttgaatggagttgataaaatgcgacgtaaaacaaccgctcctgttgagaaaatcctgctccgtgtggcaatctatatc

SEQ ID NO: 20859 - DNA, 260 bp, Unknown
  Description of Unknown: LeftRegion for integrase B7860 sequence
aaaccgctcctgcgccaacaggaacggtcgagcgatggaaacatacgccaatatgtttctctattaagtactccgaagagatacccaatttccaaataatattgtatcatcttcggaacagccacgcaagagaacaaaagttctcaggctgttatttttatactcatttttacgtatattgaagagaaaggtgatataatatgccgagtaaaattgaacgctgcgccatttacatccgtgtgtctaccgctgaacagatg

SEQ ID NO: 20860 - DNA, 260 bp, Unknown
  Description of Unknown: LeftRegion for integrase B7861 sequence
aagttaaagaaaaataatttgaaataaaataaaaagccccggtgctaccaacaccaggactctttgataagtactatacaatgctgaagcacgtacaataatcatcggcaatgatattgtaccacaaatttccagcacctgtataggtgttatttttgtacccatttttgcgtaacataaaaaaggaaaggtgatatgatatgacaactaaagttgaacgctgtgcaatctatatccgtgtatccactaccgagcaaatg

SEQ ID NO: 20861 - DNA, 260 bp, Unknown
  Description of Unknown: LeftRegion for integrase B7862 sequence
tataaatataaccttataagaaaaaaaatcgccaccccgttggctcagggtggctcgcatatccgaagatatactaatatctgattgaacttcattgtatcatcttcggagcagtcttgcaagcggaacatacgttccttgctggctgttatttttgtactcatttttgcgtaacattaaagaaggaaaggtgatatgatatgacgactaaaattgaacgctgcgccatctatatccgtgtgtctactaccgaacaaatg

SEQ ID NO: 20862 - DNA, 260 bp, Unknown
  Description of Unknown: LeftRegion for integrase B7863 sequence
agcaccttttgttttacataaaaaataaccgccccagtgttgacgcaccgagacggtaagaaatctccgaagagatacctatatttggcagatatattgtatcaccttcggagcagctacgcaagcggaacactcgttccatgctggctgttatttttgtacccatttttacataccatacaaaaggaaggtgatgctgcatgtcagaaaaaataaaacgctgcgcaatctatatccgtgtcagcacatcagagcaaatg

SEQ ID NO: 20863 - DNA, 260 bp, Unknown
  Description of Unknown: LeftRegion for integrase B7864 sequence
caacaccgagacggtaacgcgccctctccgcacagcagagataggacgacttaaccataacacctccggagatgctacagcgtttcaaccaaaaatattgtatcaccttcggagcagctacgcaagcggaacactcgttccatgctggctgttatttttatacccacttttacataatattcaagggaaggtgatacagcatgtcagaaaaaataaaacgctgcgcaatctatatccgtgtcagcacatcagagcaaatg

SEQ ID NO: 20864 - DNA, 260 bp, Unknown
  Description of Unknown: LeftRegion for integrase B7865 sequence
actttttaaattaaattcaaaagaaccgctcctgctaccaacaggaacggctcaagactaatgccccgaaggatacaccagtacgttcaaaatatagtgtatcatcttcgggcagccaccgcaagcagaactcatgttcttctgctggctgttatttttatactcatttttacgtatattgaagagaaaggtgatataatatgccaagtaaaattgaacgctgcgccatttacatccgtgtgtctaccgctgaacagatg

SEQ ID NO: 20865 - DNA, 260 bp, Unknown
  Description of Unknown: LeftRegion for integrase B7866 sequence
ttgatcagacagaataatataaataaaagaaccgctcctgcgccaacaggaacggctcaagactaatgccccgaaggatacaccagtacgttcaaaatatagtgtatcatcttcggagcagccgcgcaagagaacaaaagttctctggctgttatttttatactcatttttacgtatattgaagagaaaggtgatataatatgccaagtaaaattgaacgctgcgccatttacatccgtgtgtctaccgctgaacagatg

SEQ ID NO: 20866 - DNA, 260 bp, Unknown
  Description of Unknown: LeftRegion for integrase B7867 sequence
taaaaaaccgctcctgcgccaacaggaacggtcgagcgatgaaacatacgccaatatgtttctactaagttctccgaagagatacccaatttgcaaatatattgtatcatcttcgggcagccaccgcaagagaacaaaagttctcaggctgttatttttatactcatttttacgtatattgaagagaaaggtgatataatatgccaagtaaaattgaacgctgcgccatttacatccgtgtgtctaccgctgaacaaatg

SEQ ID NO: 20867 - DNA, 260 bp, Unknown
  Description of Unknown: LeftRegion for integrase B7868 sequence
aaaagaaccgctcctgcgccaacaggaacggtcgagcgatgaaacatacgccaatatgtttctattaagttctccgaagagatacccaattccaaataatattgtatcatctccggagcagccacgcaagagaacaaaagttctcgggctgttatttttatactcatttttacgtatattgaagagaaaggtgatataatatgccaagtaaaattgaacgctgcgccatttacatccgtgtgtctaccgctgaacagatg

SEQ ID NO: 20868 - DNA, 260 bp, Unknown
  Description of Unknown: LeftRegion for integrase B7869 sequence
ccattgcgtcatcctcctagttttgattgtgtacacgcttcaggcactctatacaaataaaaaaggaagccgtgaccagcgacttcccttgtgaaacattaaaacaaaatatatcgcggaagaccgcccacgatgatattatgtccttttacattctatcatatcaagtcttctttcgctaccagaaagaaggtttttatatgtctttttttactccaaacccacaacttttcgggcttcgtgtagttaaatatatcaga

SEQ ID NO: 20869 - DNA, 260 bp, Unknown
  Description of Unknown: LeftRegion for integrase B7870 sequence
gactgatctattttatcgttaaagttattttatggtaaaaaagacgatccccactgcaatgggaaccgccttttgaaccttcattcatacttttgcaaaaagcatggtagaatgtcctcacaataatcattctatcataaaaccgtgctttttgcattggttttattttttataccattttttagattggagttgatagaatgaaacgacaaacagctaaactaaatgataaactgctgctccgggtagctatttacatc

SEQ ID NO: 20870 - DNA, 260 bp, Unknown
  Description of Unknown: LeftRegion for integrase B7871 sequence
ataaaaccgctcctgcgccaacaggaacggtcataggacgaaacatacgccaatatgtttctattaagttctccgaagagataccttaactccaaacaacattgtatcatcttcgggcagccaccgcaagagaacaaaagttctcaggctgttatttttatactcatttttacgtatattgaagagaaaggtgatataatatgccaagtaaaattgaacgctgcgccatttacatccgtgtgtctaccgctgaacagatg

SEQ ID NO: 20871 - DNA, 260 bp, Unknown
  Description of Unknown: LeftRegion for integrase B7872 sequence
tattgatttaaaagaattgtaacattaaaacaaaagccccggtgctaccaacaccaggactctttgataagtactatacagtgctgaagcacgtacaataatcatcggcaatgatattgtaccacaaatttccagcacctgtataggtgttatttttgtacccatttttgcgtaacataaaaaaggaaaggtgatatgatatgacgactaaagttgaacgctgtgcaatctatatccgtgtatctaccacagaacagatg

SEQ ID NO: 20872 - DNA, 260 bp, Unknown
  Description of Unknown: LeftRegion for integrase B7873 sequence
agaaaaccgctcctgcgccaacaggaacggtcgagcgatgaaacatacgccaatatgtttctctattaagtactccgaagagatacccaaatgcaataatattgtatcatttccggagcagccacgcaagagaacaaaagttctcaggctgttatttttatactcatttttacgtatattgaagagaaaggtgatataatatgccaagtaaaattgaacgctgcgccatttacatccgtgtgtccaccgctgaacagatg

SEQ ID NO: 20873 - DNA, 260 bp, Unknown
  Description of Unknown: LeftRegion for integrase B7874 sequence
tgccatgttagtatcttcatgttggtattatgtgcatatggtggcatttttattaatttttattattttgtagcattaaaaaaggggctgccctgcaagcaaccccaatcagcttatttaagaagaccgattcctgtataaactgtatttctattttatcataatatcggtacttctgcaatatgaagggagtattttttatgtcttattttaatttcaaccccgatttagtaggtgtacgcgttgttaaatacattcga

SEQ ID NO: 20874 - DNA, 260 bp, Unknown
  Description of Unknown: LeftRegion for integrase B7875 sequence
tatataaacattttttcaaaataaaaccgctcctgcgccaacaggaacagctcaagactaatgccccgaaggatacaccagtacgttcaaaatatagtgtatcatcttcgggcagccaccgcaagcagaactcatgttcttctgctggctgttatttttatactcatttttacgtatattgaagagaaaggtgatataatatgccaagtaaaattgaacgctgcgccatttacatccgtgtgtctactgcagaacagatg

SEQ ID NO: 20875 - DNA, 260 bp, Unknown
  Description of Unknown: LeftRegion for integrase B7876 sequence
gtaggatgcacatatctcgtcaaaatatgaaaaaggacagccgcgtcaacgactgccccttctcatgtgtctatgctccacagctttatgctcagaacagacacggatcacaccctctattctagcataaagttgtgttgctgcatagctttattttttataccctttttcagggttctatgttagaaagaaggttttttatgaatacatattttcatccgcagccggaactgtacggcctgcgtgtagttaaatacata

SEQ ID NO: 20876 - DNA, 260 bp, Unknown
  Description of Unknown: LeftRegion for integrase B7877 sequence
cggaagcaccttttgttttacataaaaaataaccgccccagtgttgacgcaccgagacggtaagaaatctccgaagagatacctatatttggcagatatattgtatcatcttcggagcagccttgcaagagaacgaaagttcgctggctgttatttttgtacctaattttacataccatacaaaaggaaggtgatacatcatgtcagaaaaaataaaacgctgcgcaatctatatccgtgtcagcacatcagagcaaatg

SEQ ID NO: 20877 - DNA, 260 bp, Unknown
  Description of Unknown: LeftRegion for integrase B7878 sequence
atttttcagatttatttgaatagacgaaaaaagccctaggagctaccaactcccagagcttttcacatagattctcttgccggatcattccggaaagatatgtctttctcgcaaattgattatatcatttccagaatgtcctgacaagaggtgtattttttatacgcaaaattaatacactagaccaaggagatgatattatggcaaaaactcagaccgcccttcagcgcgtagccctctacatccgtgtatcctccgat

SEQ ID NO: 20878 - DNA, 260 bp, Unknown
  Description of Unknown: LeftRegion for integrase B7879 sequence
tgaacaagcacttaaagaaagccaaaaagtttggaacaatcctaacgcacatgtaggtggtccacgttgggttggaaaaaacgaaggatatgaaagttgggctaaaagacaacaagaatttcaaaacttaatagctgaataattatatgggtagcaagcctacccttattattttttactttttttgaggaagtggaagaatgaaagtagcaatttatacgagagtaagtactgcagaacaaaatttaaacggattttca

SEQ ID NO: 20879 - DNA, 260 bp, Unknown
  Description of Unknown: LeftRegion for integrase B7880 sequence
gcactgatttgatgtcgttatcgaatttttgtaataaaaaaaagagcagcctccacgccaatggaaaccgctctttagataacatatacctccgtataagcacggtgataaaatgtcaccccacaagtctcattttatcataaaaccgtgcttgtgcataggttttatttttatacatttttttgaatggagttgataaaatgcgacgtaaaacaaccgctcctgttgagaaaatcctgctccgtgtggcaatctatatc

SEQ ID NO: 20880 - DNA, 260 bp, Unknown
  Description of Unknown: LeftRegion for integrase B7881 sequence
gaaccgctcctgcgccaacaggaacggtcgagcgatggaaacatacgccaatatgtttctctattaagtactccgaagagatacccaatttccaaataatattgtatcatcttcggaacagccacgcaagagaacaaaagttctctggctgttatttttatactcatttttacgtatattgaagagaaaggtgatataatatgccaagtaaaattgaacgctgcgccatttacatccgtgtgtctaccgctgaacagatg

SEQ ID NO: 20881 - DNA, 260 bp, Unknown
  Description of Unknown: LeftRegion for integrase B7882 sequence
tcaaggaacgtcatttgaacgaatagaaatgtaaataaaaaaagagcagcctccacgccaatggaaaccgctctttagataacatatacctccgtataggcacggcgataaaatgtcaccccgcaagtctcattttatcataaaaccgtgcttgtgcataggttttatttttatacctttttttgaatggagttgataaaatgcgacgtaaaacaaccgctcctgttgagaaaatcctgctccgtgtggcaatctatatc

SEQ ID NO: 20882 - DNA, 260 bp, Unknown
  Description of Unknown: LeftRegion for integrase B7883 sequence
aaagaaccgctcctgcgccaacaggaacggtcgagcgatgaaacatacgccaatatgtttctaattaagttctccgaagagatactcaaactgcaaatatattgtatcatcttcggacagcaatcgcaagagaacaaaagttctcaggctgttatttttatactcatttttacgtatattgaagagaaaggtgatataatatgccaagtaaaattgaacgctgcgccatttacatccgtgtgtctaccgctgaacagatg

SEQ ID NO: 20883 - DNA, 260 bp, Unknown
  Description of Unknown: LeftRegion for integrase B7884 sequence
tccattgcgtcatcctcctagttttgattatgtacacgcttcaggcactctatacaaataaaaaaggaagccgtgaccagcgacttcccttgcaaaatgttaaacaaaatatatcgcggaagaccgcccacgatgatattatgtccttttacattctatcatatcaagccttctttcgctaccagaaagaaggtttttatatgtctttttttactccaaacccacaacttttcgggcttcgtgtagttaaatatatcaga

SEQ ID NO: 20884 - DNA, 260 bp, Unknown; identical to SEQ ID NO: 20843
  Description of Unknown: LeftRegion for integrase B7885 sequence

SEQ ID NO: 20885 - DNA, 260 bp, Unknown
  Description of Unknown: LeftRegion for integrase B7886 sequence
tatataaacattttttcaaaataaaaccgctcctgcgccaacaggaacggctcaagactaatgccccgaaggatacaccagtacgttcaaaatatagtgtatcatcttcgggcagccaccgcaagcagaactcatgttcttctgctggctgttatttttatactcatttttacgtatattgaagagaaaggtgatataatatgccaagtaaaattgaacgctgcgccatttacatccgtgtgtctactgcagaacagatg

SEQ ID NO: 20886 - DNA, 260 bp, Unknown
  Description of Unknown: LeftRegion for integrase B7887 sequence
aactgtttaagaatcaatggcttagattaatataaaaatccccggtgttatcagcaccggggaatgagaaaactatacggtgccgaagcacgtacaataccctcacaaccaaggatattgtaccacaaatttccagcaccgtataggtgttatttttatacccatttttgcgtaacataaaaaaggaaaggtgatatgatatgacgactaaagttgaacgctgcgccatctatatccgtgtgtctactaccgaacaaatg

SEQ ID NO: 20887 - DNA, 260 bp, Unknown
  Description of Unknown: LeftRegion for integrase B7888 sequence
agaaaaccgctcctgcgccaacaggaacggtcgagcgatgaaacatacgccaatatgtttctctattaagtactccgaagagatacccaaatgcaataatattgtatcatctccggagcagccacgcaagagaacaaaagttctcaggctgttatttttatactcatttttacgtatattgaagagaaaggtgatataatatgccaagtaaaattgaacgctgcgccatttacatccgtgtgtccaccgctgaacagatg

SEQ ID NO: 20888 - DNA, 260 bp, Unknown
  Description of Unknown: LeftRegion for integrase B7889 sequence
gtcaaagaacgtcatttgaacgaatagaaatgtaaataaaaaagagcagcctccacgccaatggaaaccgctctttagataacatatacctccgtataagcacggcgataaaatgtcaccccgcaagtctcattttatcataaaaccgtgcttgtgcataggttttatttttatacctttttttgaatggagttgataaaatgcgacgtaaaacaaccgctcctgttgagaaaatcctgctccgtgtggcaatctatatc

SEQ ID NO: 20889 - DNA, 260 bp, Unknown
  Description of Unknown: LeftRegion for integrase B7890 sequence
tataaaagctttaaattctatatttggttttgtcaaattatgtgaaatgaaaaatatagactcaagaaatttataccaattttaattaaatataaggaggtaaactatgattaataatataataagaaaagctgatgcaactttagaagatcaagaaaaaatccttagtttgcttcttagtatggcaaatgaggaaataaatgaataatgtagctatttattgcagagaaagtacagagaagcaaaatattgacacactt

SEQ ID NO: 20890 - DNA, 260 bp, Unknown
  Description of Unknown: LeftRegion for integrase B7891 sequence
tcccgcactgatttgatgtcgttatcgaatttttgcaataaaaaaagagcagcctccacgccaatggaaaccgctctttgacaacatatacctccgtataagcacggcgataaaatgtcacccgcaagtctcattttatcataaaaccgtgcttgtgcataggttttatttttataccttttttgaatggagttgataaaatgcgacgtaaaacaaccgctcctgttgagaaaatcctgctccgtgtggcaatttatatc

SEQ ID NO: 20891 - DNA, 260 bp, Unknown
  Description of Unknown: LeftRegion for integrase B7892 sequence
aacaccgagacgccatcgtgactcggactttcgctatattgcaataacctacttcacgataatattttacatccgaagatgctcttttattttgcacatatattgtaacatcttcggatacacccgtcaacggaacatattttcgttgggtgttatttttatacatttttttaatataatttacaaaggggatagatactatggctaacaaaatactaagatgtgctatttatatacgcgtgtctactttcgagcaaagt

SEQ ID NO: 20892 - DNA, 260 bp, Unknown; identical to SEQ ID NO: 20888
  Description of Unknown: LeftRegion for integrase B7893 sequence

SEQ ID NO: 20893 - DNA, 260 bp, Unknown
  Description of Unknown: LeftRegion for integrase B7894 sequence
tatggatttgcaataataattttgaaaacaaaaccgcccggtacgccaataccgaacggtcttacatacatccgaagatgtatatccatattgcagatatattgtatcatctttggacagctattacaatcggaacatattttcgatagctgttatttttatacccttttttaatatattttaacaaggagatggttgttatgactaataagcttttaagatgtgctatttatatacgtgtatctacttttgagcaaagc

SEQ ID NO: 20894 - DNA, 260 bp, Unknown
  Description of Unknown: LeftRegion for integrase B7895 sequence
aagttaaagaaaaataatttgaaataaaataaaaagccccggtgctaccaacaccaggactctttgataagtactatacagtgctgaagcacgtacaataatcatcggcaatgatattgtaccacaaatttccagcacctgtataggtgttatttttgtacccatttttgcgtaacataaaaaaggaaaggtgatatgatatgacgactaaagttgaacgctgtgcaatctatatccgtgtatccactaccgagcaaatg

SEQ ID NO: 20895 - DNA, 260 bp, Unknown
  Description of Unknown: LeftRegion for integrase B7896 sequence
gactgatctattttatcgttaaagttattttatggtaaaaaagacgatccccactgcaatgggaaccgccttttgaaccttcattcatacttttgcaaaaagcatggtagaatgtcctcacaataatcattctatcataaaaccgtgctttttgcattggttttattttttataccattttttagattggagttgatagaatgaaacgacaaacagctaaactaaatgataaactgctgctccgggttgctatttacatt

SEQ ID NO: 20896 - DNA, 260 bp, Unknown
  Description of Unknown: LeftRegion for integrase B7897 sequence
actttttaaattaaattcaaaagaaccgctcctgctaccaacaggaacggctcaagactaatgccccgaaggatacaccagtacgttcaaaatatagtgtatcatcttcgggcagccaccgcaagcagaactcatgttcttctgctggctgttatttttatactcatttttacgtatattgaagagaaaggtgatataatatgccgagtaaaattgaacgctgcgccatttacatccgtgtgtctaccgctgaacagatg

SEQ ID NO: 20897 - DNA, 260 bp, Unknown
  Description of Unknown: LeftRegion for integrase B7898 sequence
gtacaaggctggtaaataaataaaaaccgctcctgcgccaacaggaacggctcaagactaatgccccgaaggatacaccagtacgttcaaaatatagtgtatcatcttcgggcagccaccgcaagcagaactcatgttcttctgctggctgttatttttatactcatttttacgtacattgaagagaaaggtgatataatatgccaagtaaaattgaacgctgcgccatttacatccgtgtgtctaccgctgaacagatg

SEQ ID NO: 20898 - DNA, 260 bp, Unknown
  Description of Unknown: LeftRegion for integrase B7899 sequence
cccgcactgatttgatgtcgttatcgaatttttgcaataaaaaagagcagcctccacgccaatggaaaccgctctttagataacatatacctccgtataggcacggcgataaaatgtcaccccgcaagtctcattttatcataaaaccgtgcttgtgcataggttttatttttataccttttttgaatggagttgataaaatgcgacgtaaaacaaccgctcctgttgagaaaatcctgctccgtgtggcaatctatatc

SEQ ID NO: 20899 - DNA, 260 bp, Unknown
  Description of Unknown: LeftRegion for integrase B7900 sequence
cattgcgtcatcctcctagttttgattatgtacacgcttcaggcactctatacaaataaaaaaaggaagccgtgaccagcgacttcccttgcgaaacattgaaacaaaatatatcgcggaagaccgcccacgatgatattatgtccttttacattctatcatatcaagccttctttcgctaccagaaagaaggtttttatatgtctttttttactccaaacccacaacttttcgggcttcgtgtagttaaatatatcaga

SEQ ID NO: 20900 - DNA, 260 bp, Unknown
  Description of Unknown: LeftRegion for integrase B7901 sequence
cgtcaagaaacgtcatttgaacgaatagaaatgtaaataaaaaaagagcagcctccacgccaatggaaaccgctctttgacaacatatacctccgtataagcacggcgataaaatgtcacccgcaagtctcattttatcataaaaccgtgcttatgcataggttttatttttatacctttttttgaatggagttgataaaatgcgacgcaaaacaacctctcctgttgagaaaatcctgctccgtgtggcaatctatatc

SEQ ID NO: 20901 - DNA, 260 bp, Unknown
  Description of Unknown: LeftRegion for integrase B7902 sequence
aaaaccgctcctgctaccaacaggaacggtcataggacgaaacatacgccaatatgtttctaattaagttctccgaagagatactcaaactgcaaataatattgtatcatctccggagcagccacgcaagagaacaaaagttctctggctgttatttttatactcatttttacgtatattgaagagaaaggtgatatgatatgccaagtaaaattgaacgctgcgccatttacatccgtgtgtctactgcagaacagatg

SEQ ID NO: 20902 - DNA, 260 bp, Unknown
  Description of Unknown: LeftRegion for integrase B7903 sequence
ccattgcgtcatcctcctagttttgattatgtacacgcttcaggcactctatacaaataaaaaaaggaagccgtgaccagcgacttcccttgcaaaatgttaaacaaaatatatcgcggaagaccgcccacgatgatattatgtccttttacattctatcatatcaagccttctttcgctaccagaaagaaggtttttatatgtctttttttactccaaacccacaacttttcgggcttcgtgtagttaaatatatcaga

SEQ ID NO: 20903 - DNA, 260 bp, Unknown
  Description of Unknown: LeftRegion for integrase B7904 sequence
gtaggatgcacatatctcgtcaaaaatatgaaaaaggacagccgcgtcaacgactgccccttctcatgtgtctatgctccacagctttacgccaagaacagacacggatcacaccctctattctagcataaagctgtgttgctgcatagctttattttttatacccttttcagggttctatgttagaaagaaggttttttatgaatacatattttcattcgcagccggaactgtacggcctgcgtgtagttaaatacata

SEQ ID NO: 20904 - DNA, 260 bp, Unknown
  Description of Unknown: LeftRegion for integrase B7905 sequence
ccattgcgtcatcctcctagtttagattatgtacacgcttcaggcactctattcaaataaaaaaggaagccgtgaccagcgacttcccttgtgaaacattaaaacaaaatatatcgcggaagaccgcccacgatgatattatgtccttttacattctatcatatcaagccttctttcgctaccagaaagaaggtttttatatgtctttttttactccaaacccacaacttttcgggcttcgtgtagttaaatatatcaga

SEQ ID NO: 20905 - DNA, 260 bp, Unknown
  Description of Unknown: LeftRegion for integrase B7906 sequence
ccgcatcgtatgaaatcaaagaaaaatagacattaaaaaagacgacctccactgcaatggaaatcgccttttaaagaatcattctcacctcgcaaaatgcacggtgataaaatgaaccctcacaagcctcattttatcataaaaccgtgcttttgcataggttttatttttatacctttttacagattggagttgataaaatgagacggaaaactgctgccaccgttgaaaaaatcctcctccgtgttgcaatttatatt

SEQ ID NO: 20906 - DNA, 260 bp, Unknown
  Description of Unknown: LeftRegion for integrase B7907 sequence
aaagaaccgctcctgcgccaacaggaacggtcgagcgatgaaacatacaccaatatgtttctctattaagtactccgaagagatacccaaatgcaataatattgtatcatctccggagcagccacgcaagagaacaaaagttctcgggctgttatttttatactcatttttacgtatattgaagagaaaggtgatataatatgccaagtaaaattgaacgctgcgccatttacatccgtgtgtctaccgctgaacagatg

SEQ ID NO: 20907 - DNA, 260 bp, Unknown
  Description of Unknown: LeftRegion for integrase B7908 sequence
gtttcagcaattcatcaatgctaatcatttcacatcctcctttttggggtctcactgcccgcacatatatattatcactttttctgtgtttttgcaaggtactttctgtatttcttctgtaaaaatgcaataatcttttaaatggccttgtggtgcgggttttcgtataattgaaggactattagggaggatgatggagattgaaaaaggtagcgttatatgtccgtgtctcaacagccaggcaggaccaggagggatac

SEQ ID NO: 20908 - DNA, 260 bp, Unknown
  Description of Unknown: LeftRegion for integrase B7909 sequence
atgtaatccaccacaataaaataaaaattccccggtgtctaccaaacaccagggaaaatcccgagtaatatatacggcgaaggattcgctcgatacagtactccctcaacaagaatattgtatcacaaaaatccagcaccgtataggtgttatttttgtacccatttttgcgtaacataaaaaaggaaaggtgatatgatatgacgactaaagttgaacgctgtgcaatctatatccgtgtatccactaccgagcaaatg

SEQ ID NO: 20909 - DNA, 260 bp, Unknown; identical to SEQ ID NO: 20885
  Description of Unknown: LeftRegion for integrase B7910 sequence

SEQ ID NO: 20910 - DNA, 260 bp, Unknown
  Description of Unknown: LeftRegion for integrase B7911 sequence
tatataaacattttttcaaaacaaaaccgctcctgcgccaacaggaacggctcaagactaatgccccgaaggatacaccagtacgttcaaaatatagtgtatcatcttcgggcagccaccgcaagcagaactcatgttcttctgctggctgttatttttatactcatttttacgtatattgaagagaaaggtgatataatatgccaagtaaaattgaacgctgcgccatttacatccgtgtgtctactgcagaacagatg

SEQ ID NO: 20911 - DNA, 260 bp, Unknown; identical to SEQ ID NO: 20883
  Description of Unknown: LeftRegion for integrase B7912 sequence

SEQ ID NO: 20912 - DNA, 260 bp, Unknown
  Description of Unknown: LeftRegion for integrase B7913 sequence
tatataaacattttttcaaaataaaaccgctcctgcgccaacaggaacggctcaagactaatgccccgaaggatacaccagtacgttcaaaatatagtgtatcatcttcgggcagccaccgcaagcagaactcatgttcttctgctggctgttatttttatactcatttttacgtatattgaagagaaaggtgatataatatgccaagtaaaattgaacgctgtgccatttacatccgtgtgtctaccgctgaacagatg

SEQ ID NO: 20913 - DNA, 260 bp, Unknown
  Description of Unknown: LeftRegion for integrase B7914 sequence
cagatttactgaaataaaaaagaaaaccgctcctgcgccaacaggaacggctcaagactaatgccccgaaggatacaccagtacgttcaaaatatagtgtatcatcttcgagcagccaccgcaagcagaactcatgttcttctgctggctgttatttttatactcatttttacgtacattgaagagaaaggtgatataatatgccaagtaaaattgaacgctgcgccatttacatccgtgtgtctaccgctgaacagatg

SEQ ID NO: 20914 - DNA, 260 bp, Unknown
  Description of Unknown: LeftRegion for integrase B7915 sequence
gatattacatataattctttcgatgaataaaaaagaaaagagggcagccctcgcaaggctgtccccttctcgcactatctatgcagccacggcttacgtgaatacaaagaatagcagcttcgcaacctctattctatcacaaagccgtgctgctgcatagctttattttttatacatttttttagaatgggggcgaatttatggcattttatacacagtcctgtccggaactgtacggaatgcgcgttgcgaaatacatc

SEQ ID NO: 20915 - DNA, 260 bp, Unknown
  Description of Unknown: LeftRegion for integrase B7916 sequence
ccgcatcgtatgaaatcaaagaaaaatagacattaaaaaagacgacctccactgcaatggaaatcgccttttaaagaatcattctcacctcgcaaaatgcacggtgataaaatgaaccctcacaagcctcattttatcataaaaccgtgcttttgcataggttttatttttatacctttttacagattggagttgataaaatgaggcgaaaagctgctgcaatcgtcgaaaaaatcctcctccgtgtcgcaatttatatc

SEQ ID NO: 20916 - DNA, 260 bp, Unknown
  Description of Unknown: LeftRegion for integrase B7917 sequence
ccattgcgtcatcctcctagttttgattatgtacacgcttcaggcactctattcaaataaaaaaggaagccgtgaccagcgacttcccttgtgaaacattaaaacaaaatatatcgcggaagaccgcccacgatgatattatgtccttttacattctatcatatcaagccttctttcgctactagaaagaaggtttttatatgtctttttttactccaaacccacaacttttcgggcttcgtgtagttaaatatatcaga

SEQ ID NO: 20917 - DNA, 260 bp, Unknown
  Description of Unknown: LeftRegion for integrase B7918 sequence
aatttatctaaataaacttatacgaataaaaagccccaggagctaccaactcccagagcttttcacatagattttctcttgccggacgcaccggaagatatatctttctcgcaaattgattatatcatttctggagcgtcctgacaagaggtgtattttttatacgcaaaattaatacactagaccaaggagatgatattatggcaaaaactcagaccgcccttcagcgcgtagccctctacatccgtgtatcctcagac

SEQ ID NO: 20918 - DNA, 260 bp, Unknown
  Description of Unknown: LeftRegion for integrase B7919 sequence
ttcggtctggctgttcaggttctttttttcgcttgtaactgctgccatgttatttcctcccttcgttctgtgatgtttatatgatcccttgcgaaacattgaaacaaaatatatcgcggaagaccgcccacgatgatattatgtccttttacattctatcatatcaagccttctttcgctaccagaaagaaggtttttatatgtctttttttactccaaacccacaacttttcgggcttcgtgtagttaaatatatcaga

SEQ ID NO: 20919 - DNA, 260 bp, Unknown; identical to SEQ ID NO: 20885
  Description of Unknown: LeftRegion for integrase B7920 sequence

SEQ ID NO: 20920 - DNA, 260 bp, Unknown
  Description of Unknown: LeftRegion for integrase B7921 sequence
tccattgcgtcatcctcctagttttgattatgtacacgcttcaggcactctatacaaataaaaaaggaagccgtgaccagcgacttcccttgcaaaatgttaaacaaaatatatcgcggaagaccgcccacgatgatattatgtccttttacattctatcatatcaagccttcttccgctactagaaagaaggtttttatatgtctttttttactccaaacccacaacttttcgggcttcgtgtagttaaatatatcaga

SEQ ID NO: 20921 - DNA, 260 bp, Unknown
  Description of Unknown: LeftRegion for integrase B7922 sequence
gtcaaggaacgtcatttgaacgaatagaaatgtaaataaaaaaagagcagcctccacgccaatgggaaccgctctttgacaacatatacctccgtataagcacggcgataaaatgtcaccccgcaagtctcattttatcataaaaccgtgcttgtgcataggttttatttttatacctttttttgaatggagttgataaaatgcgacgtaaaacaaccgctcctgttgagaaaatcctgctccgtgtggcaatctatatc

SEQ ID NO: 20922 - DNA, 260 bp, Unknown
  Description of Unknown: LeftRegion for integrase B7923 sequence
cgtcaaggaacgtcatttgaacgaatagaaatgtaaataaaaaaagagcagcctccacgccaatggaaaccgctctttgacaacatatacctccgtataagcacggcgataaaatgtcacccgcaagtctcattttatcataaaaccgtgcttatgcataggttttatttttatacctttttttgaatggagttgataaaatgcgacgcaaaacaaccgctcctgtcgagaaaatcctgctccgtgtggcaatctatatc

SEQ ID NO: 20923 - DNA, 260 bp, Unknown
  Description of Unknown: LeftRegion for integrase B7924 sequence
tgtaggatgcacatatcttgtcaaaatatgaaaaaggacagccgcgtcaacgactgccccttctcatgtgtctatgctccacagctttacgctcagaacagacacggatcgcaccctctattctagcataaagctgtgttgctgcatagctttattttttatacccttttcagggttctatgttagaaagaaggttttttatgaatacatattttcatccgcagccggaactgtacggcctacgcgtagttaaatacata

SEQ ID NO: 20924 - DNA, 260 bp, Unknown
  Description of Unknown: LeftRegion for integrase B7925 sequence
aaaccgctcctgcgccaacaggaacggtcgagcgatggaaacatacgccaatatgtttctctattaagtactccgaagagatacccaatctccaaataatattgtatcatcttcggagcagccacgcaagagaacaaaagttctcaggctgttatttttatactcatttttacgtatattgaagagaaaggtgatataatatgccaagtaaaattgaacgctgtgccatttacatccgtgtgtccaccgctgaacagatg

SEQ ID NO: 20925 - DNA, 260 bp, Unknown
  Description of Unknown: LeftRegion for integrase B7926 sequence
aaagaaccgctcctgcgccaacaggaacggtcataggaagaaacatactccaatatgtttctattaagttctccgaagagataccttaactccaaacaacattgtatcatcttcggacagccatcgcaagagaacaaaagttctcaggctgttatttttatactcatttttacgtatattgaagagaaaggtgatataatatgccaagtaaaattgaacgctgcgccatttacatccgtgtgtctaccgctgaacagatg

SEQ ID NO: 20926 - DNA, 260 bp, Unknown
  Description of Unknown: LeftRegion for integrase B7927 sequence
gcgagtacaaaataaaaaaccgcccctgcgccaacaggaacggttgatacatatccgaagatatgcaactgagctaccaactcataagtattgtatcatcttcgggcagccactgcaagcggaacactcgttcctcgctggctgtattttttatacccatttttgtgcgacatcgcacatatacttaggaaggtgatattatgacgaacaaatttacccgctgcgctctctatatccgtgtcagcaccgctgagcagtgt

SEQ ID NO: 20927 - DNA, 260 bp, Unknown
  Description of Unknown: LeftRegion for integrase B7928 sequence
tccattgcgtcatcctcctagtttagattatgtacacgcttcaggcactctattcaaataaaaaaggaagccgtgaccagcgacttcccttgcaaaatgttaaacaaaatatatcgcggaagaccgcccacgatgatattatgtccttttacattctatcatatcaagccttctttcgctaccagaaagaaggtttttatatgtctttttttactccaaacccacaacttttcgggcttcgtgtagttaaatatatcaga

SEQ ID NO: 20928 - DNA, 260 bp, Unknown
  Description of Unknown: LeftRegion for integrase B7929 sequence
ataaaaccgctcctgcgccaacaggaacggtcataggacgaaacatacgccaatatgtttctttcagtactccgaagagatacactgatttccgaataatattgtatcatctccggagcagccacgcaagagaacaaaagttctcgggctgttatttttgtacttatttttacgtatattgaagagaaaggtgatataatatgccaagtaaaattgaacgctgcgccatttacatccgtgtgtccaccgctgaacagatg

SEQ ID NO: 20929 - DNA, 260 bp, Unknown
  Description of Unknown: LeftRegion for integrase B7930 sequence
cccgcactgatttgatgtcgttatcgaatttttgcaataaaaaaagagcagcctccacgccaatggaaaccgctctttgacaacatatacctccgtataagcacggcgataaaatgtcacccgcaagtctcattttatcataaaaccgtgcttgtgcataggttttatttttatacctttttttgaatggagttgataaaatgcgacgtaaaacaaccgctcctgttgagaaaatcctgctccgtgtggcaatttatatc

SEQ ID NO: 20930 - DNA, 260 bp, Unknown
  Description of Unknown: LeftRegion for integrase B7931 sequence
cagacagaataatataaataaaagaaccgctcctgcgccaacaggaacggctcaagactaatgccccgaaggatacaccagtacgttcaaaatatagtgtatcatcttcgggcagccaccgcaagcagaactcatgttcttctgctggctgttatttttatactcatttttacgtatattgaagagaaaggtgatataatatgccaagtaaaattgaacgctgcgccatttacatccgtgtgtctaccgctgaacagatg

SEQ ID NO: 20931 - DNA, 260 bp, Unknown; identical to SEQ ID NO: 20883
  Description of Unknown: LeftRegion for integrase B7932 sequence

SEQ ID NO: 20932 - DNA, 260 bp, Unknown; identical to SEQ ID NO: 20929
  Description of Unknown: LeftRegion for integrase B7933 sequence

SEQ ID NO: 20933 - DNA, 260 bp, Unknown
  Description of Unknown: LeftRegion for integrase B7934 sequence
cagatttactgaaataaaaaagaaaaccgctcctgcgccaacaggaacggctcaagactaatgccccgaaggatacaccagtacgttcaaaatatagtgtatcatcttcgggcagccaccgcaagcagaactcatgttcttctgctggctgttatttttatactcatttttacgtatattgaagagaaaggtgatataatatgccaagtaaaattgaacgctgcgccatttacatccgtgtgtctaccgctgaacaaatg

SEQ ID NO: 20934 - DNA, 260 bp, Unknown; identical to SEQ ID NO: 20883
  Description of Unknown: LeftRegion for integrase B7935 sequence

SEQ ID NO: 20935 - DNA, 260 bp, Unknown; identical to SEQ ID NO: 20894
  Description of Unknown: LeftRegion for integrase B7936 sequence

SEQ ID NO: 20936 - DNA, 260 bp, Unknown
  Description of Unknown: LeftRegion for integrase B7937 sequence
gcactgatttgatgtcgttatcgaatttttgcaataaaaaaaagagcagcctccacgccaatggaaaccgctctttgacaacatatatctatcgtacaagcacgattgataaaatgtcacccgcaagtctcattttatcataaaaccgtgcttgtgcataggttttatttttatacctttttttgaatggagttgataaaatgcgacgtaaaacaaccgctcctgttgagaaaatcctgctccgtgtggcaatctatatc

SEQ ID NO: 20937 - DNA, 260 bp, Unknown
  Description of Unknown: LeftRegion for integrase B7938 sequence
gtcaaggaacgtcatttgaacgaatagaaatgtaaataaaaaaagagcagcctccacgccaatggaaaccgctctttagataacatatacctccgtataggcacggcgataaaatgtcaccccgcaagtctcattttatcataaaaccgtgcttgtgcataggttttatttttataccttttttgaatggagttgataaaatgcgacgtaaaacaaccgctcctgttgagaaaatcctgctccgtgtggcaatctatatc

SEQ ID NO: 20938 - DNA, 260 bp, Unknown
  Description of Unknown: LeftRegion for integrase B7939 sequence
agaaatggaaaataatccggacaaaaaccaacatgctggaggtggtccaggaatgtcgttaacacaccctaatcaatcatatgatagttttagaaaagaagtaggaaaagcaagaagtgaagcaatagttgttcaacaataaaatttcgggtagcccgcctacccttattatttttttgccaattttgaggagggagcacatgaaagtagcaatttacactagagtttcaagcgctgaacaggcaaatgaagggtattct

SEQ ID NO: 20939 - DNA, 260 bp, Unknown
  Description of Unknown: LeftRegion for integrase B7940 sequence
cagatttactgaaataaaaaagaaaaccgctcctgcgccaacaggaacggctcaagactaatgccccgaaggatacaccagtacgttcaaaatatagtgtatcatcttcgggcagccaccgcaagcagaactcatgttcttctgctggctgttatttttatactcatttttacgtatattgaagagaaaggtgatataatatgccaagtaaaattgaacgctgcgccatttacatccgtgtgtctaccgctgaacagatg

SEQ ID NO: 20940 - DNA, 260 bp, Unknown
  Description of Unknown: LeftRegion for integrase B7941 sequence
cgcactgatttgatgtcgttatcgaatttttgtaataaaaaaagagcagcctccacgccaatggaaaccgctctttgataacatatatctatcgcacaagcacgattgataaaatgtcacccgcaagtctcattttatcataaaaccgtgcttgtgcataggttttatttttatacctttttttgaatggagttgataaaatgcgacgtaaaacaaccgctcctgtcgagaaaatcctgctccgtgtggcaatctatatc

SEQ ID NO: 20941 - DNA, 260 bp, Unknown
  Description of Unknown: LeftRegion for integrase B7942 sequence
tagaaaaagagcaaaagaaaaaattagacaaataaaaaaccgcccctgctgccaacagagacggcttaatgaatactatacagtgccaaggcacgtacaataatccctagacaagaatattgtaccacaattttccagcatctgtatagatgttatttttgtacccttttttgcgtacattttaggaaaggtgatataatatgacagacaaaattgaacgctgtgcaatctatatccgtgtatctactaccgaacaaatg

SEQ ID NO: 20942 - DNA, 260 bp, Unknown
  Description of Unknown: LeftRegion for integrase B7943 sequence
gtaggatgcacatatctcgtcaaaaatatgaaaaaggacagtcgcgtcaacgactgccccctctcatgtgtctatgctccacagctttacgccaagaacagacacggatcacaccctctattctagcataaagctgtgttgctgcatagctttattttttatacccttttcagggttctatgttagaaagaaggttttttatgaatacatattttcatccgcagccggaactgtacggcctgcgtgtagttaaatacata

SEQ ID NO: 20943 - DNA, 260 bp, Unknown
  Description of Unknown: LeftRegion for integrase B7944 sequence
gtattacagatttactgaagtaaataaagaaccgctcctgcaccaacaggaacggctcaagactaatgccccgaaggatacaccagtacgttcaaaatatagtgtatcatcttcggagcagccgcgcaagagaacaaaagttctctggctgttatttttatactcatttttacgtatattgaagagaaaggtgatataatatgccaagtaaaattgaacgctgcgccatttacatccgtgtgtctactgctgaacagatg

SEQ ID NO: 20944 - DNA, 260 bp, Unknown
  Description of Unknown: LeftRegion for integrase B7945 sequence
atccaaaaagaacagagaaatttagagaaaaaataaaaagtcgctcctgcgtcaacaggaacgacctagtgaatactatacagtgccaaaacacgtataataccctcacaaccaaggatattgtaccacaaatttccggcaccgtataggtgttatttttgtactcatttttgtatatattttgggaaaggtgatatgatatgccaaacaaaattgaacgctgcgccatctacattcgtgtatccactaccgaacagatg

SEQ ID NO: 20945 - DNA, 260 bp, Unknown
  Description of Unknown: LeftRegion for integrase B7946 sequence
ctgaagtctttgcatgagccaaaataaaaggcgtctcctgccgcaaacagaaaacgccttgcgatgtctctgtctcgtaacttctgcaaaaggcacggacagaacgatcctacaagcatcattctaccataaaaccgtgttttttgcataggttttattttttataccctttttcgggtatttatggaagaaggtgcaatatgaatacatattttcatccgcagccggaactgtacggcttgcgtgtagttaaatacata

SEQ ID NO: 20946 - DNA, 260 bp, Unknown
  Description of Unknown: LeftRegion for integrase B7947 sequence
aaagaaccgctcctgcgccaacaggaacggtcataggacgaaacatacgccaatatgtttctttcagtactccgaagagatatactgatttccgaataatattgtatcatctccggagcaaccacgcaagagaacaaaagttctcgggctgttatttttgtacttatttttacgtatattgaagagaaaggtgatataatatgccaagtaaaattgaacgctgcgccatttacatccgtgtgtctaccgctgaacagatg

SEQ ID NO: 20947 - DNA, 260 bp, Unknown; identical to SEQ ID NO: 20843
  Description of Unknown: LeftRegion for integrase B7948 sequence

SEQ ID NO: 20948 - DNA, 260 bp, Unknown
  Description of Unknown: LeftRegion for integrase B7949 sequence
taggatgcacatatctcgtcaaaatatgaaaaaggacagccgcgtcaacgactgccccttctcatgtgtctatgctccacagtttttacgctcagaacagacacggatcgcaccctctattctagcataaagctgtgttgctgcatagctttattttttatacccttttcagggttctatgttagaaagaaggtttttttatgaatacatattttcatccgcagccggaacttttcggtctgcgtgtagttaaatacata

SEQ ID NO: 20949 - DNA, 260 bp, Unknown
  Description of Unknown: LeftRegion for integrase B7950 sequence
tattttcttgctcaaaaatgcaatatagaaatctaaacatagaaaaagacagtccctgacaagaactgcctttccccatcgtactctatgcagcacacggcttcaaagaatacagcttcgcaacctttattctaccacgaagctgtgttgttgcatagctttattttttacgcttttttatggcagaaagaaggttaatcatgagtacatactttcatccgcagccggaactcttcggcctgcgtgtcgttaaatatata

SEQ ID NO: 20950 - DNA, 260 bp, Unknown; identical to SEQ ID NO: 20868
  Description of Unknown: LeftRegion for integrase B7951 sequence

SEQ ID NO: 20951 - DNA, 260 bp, Unknown
  Description of Unknown: LeftRegion for integrase B7952 sequence
aattggaaatctaaaaactaataaagtaaaaagccccaggagctaccaactccaagagcttttcacatagattctcttgccggatcattccggaaagatatgtctttctcgcaaattgattatatcatttccagaatgtcttgacaagaggtgtattttttatacgccaaattaatacactagaccaaggagatgatatcatggcacaaccacagaccgcccttcagcgcgtagccctctacatccgtgtatcctcagat

SEQ ID NO: 20952 - DNA, 260 bp, Unknown; identical to SEQ ID NO: 20843
  Description of Unknown: LeftRegion for integrase B7953 sequence

SEQ ID NO: 20953 - DNA, 260 bp, Unknown
  Description of Unknown: LeftRegion for integrase B7954 sequence
attcaaaatcttgaataattaataaaataaaaaccgcccggtacgccaataccgaacggtcttgcatacatccgaagatgcatatccatattgcagatatattgtatcatctttggacagctattacaatcggaacatattttcgatagctgttatttttatacccttttttaatatattttaacaaggagatggttgttatgactaataagcttttaagatgtgctatttatatacgtgtatctacttttgagcaaagc

SEQ ID NO: 20954 - DNA, 260 bp, Unknown
  Description of Unknown: LeftRegion for integrase B7955 sequence
tccattgcgtcatcctcctagttttgattatgtacacgcttcaggcactctatacaaataaaaaaggaagccgtgaccagcgacttcccttgcgaaatgttaaacaaaatatatcgcggaagaccgcccacgatgatattatgtccttttacattctatcatatcaagccttctttcgctaccagaaagaaggtttttatatgtctttttttactccaaacccacaacttttcgggcttcgtgtagttaaatatatcaga

SEQ ID NO: 20955 - DNA, 260 bp, Unknown
  Description of Unknown: LeftRegion for integrase B7956 sequence
tgaacaggcacgtaaagatagcgagaaagtttggaacgatccaaatgcccatgtaggtggcccacgttgggttggtaaaaacgaaggatatgaaagttgggcaaaaagacaacaagaagttcaaaatacaacagctgaataattatatgggtagcaagcctacccttattattttttactttttttgaggaagtggaagaatgaaagtagcaatttatacgagagtaagtactgcagaacaaaatttaaacggattttca

SEQ ID NO: 20956 - DNA, 260 bp, Unknown
  Description of Unknown: LeftRegion for integrase B7957 sequence
actgtttaagaatcaatggcttagattaatataaaaatccccggtgttatcagcaccggggcacgagaaaactatacggtgccgaagcacgtacaataccctcacaaccaaggctattgtaccacaaatttccagcaccgtataggtgttatttttgtacccatttttgcgtaacattaaagatggaaaggtgatatgatatgacgactaaaattgaacgctgcgccatctatatccgtgtgtctactaccgaacaaatg

SEQ ID NO: 20957 - DNA, 260 bp, Unknown; identical to SEQ ID NO: 20832
  Description of Unknown: LeftRegion for integrase B7958 sequence

SEQ ID NO: 20958 - DNA, 260 bp, Unknown
  Description of Unknown: LeftRegion for integrase B7959 sequence
aaaaaaccgctcctgcgccaacaggaacggtcgagcgatgaaacatactccaatatgtttctgttaagttctccgaagagataccttaactccaaacaacattgtatcatcttcggacagccatcgcaagagaacaaaagttctcaggctgttatttttatactcatttttacgtatattgaagagaaaggtgatataatatgccaagtaaaattgaacgctgcgccatttacatccgtgtgtctaccgctgaacaaatg

SEQ ID NO: 20959 - DNA, 260 bp, Unknown; identical to SEQ ID NO: 20883
  Description of Unknown: LeftRegion for integrase B7960 sequence

SEQ ID NO: 20960 - DNA, 260 bp, Unknown
  Description of Unknown: LeftRegion for integrase B7961 sequence
attgatttaaaagaattgtaacattaaaacaaaagccccggtgctaccaacaccaggactctttgataagtactatacagtgctgaagcacgtacaataatcatcggcaatgatattgtaccacaaatttccagcacctgtataggtgttatttttgtacccatttttgcgtaacataaaaaaaggaaaggtgatatgatatgacgactaaaattgaacgctgtgcaatctatatccgtgtatccactaccgagcaaatg

SEQ ID NO: 20961 - DNA, 260 bp, Unknown; identical to SEQ ID NO: 20885
  Description of Unknown: LeftRegion for integrase B7962 sequence

SEQ ID NO: 20962 - DNA, 260 bp, Unknown
  Description of Unknown: LeftRegion for integrase B7963 sequence
ctgccatgttagtatcttcatgttggtattatgtgcatatggtggcatttttattaatttttattattttgtagcattaaaaaaggggctgccctgcaagcaaccccaatcagttcatttagaagaccgattctgtataaactgtatttctattttatcataaagtcggtacttctgcaatatggaagggagtattttttatgtcttattttaattttaaccccgatttagtaggtgtacgcgttgttaaatacattcga

SEQ ID NO: 20963 - DNA, 260 bp, Unknown
  Description of Unknown: LeftRegion for integrase B7964 sequence
ctgaagtctttgcatgagccaaaataaaaggcgtctcctgccgcaaacagaaaacgccttgcgatgtctctgtctcgtaacttctgcaaaaggcacggacagaacgatcctacaagcatcattctaccataaaaccgtgttttttgcataggttttattttttataccctttttcgggtatttatgtaagaaggtgcaatatgaatacatattttcatccgcagccggaactgtacggcttgcgtgtagttaaatacata

SEQ ID NO: 20964 - DNA, 260 bp, Unknown; identical to SEQ ID NO: 20864
  Description of Unknown: LeftRegion for integrase B7965 sequence

SEQ ID NO: 20965 - DNA, 260 bp, Unknown; identical to SEQ ID NO: 20902
  Description of Unknown: LeftRegion for integrase B7966 sequence

SEQ ID NO: 20966 - DNA, 260 bp, Unknown
  Description of Unknown: LeftRegion for integrase B7967 sequence
aaagagcttgcagaacaaagcggtataaactattctcaactgttggagtgtgctcttttagattatctcggacaacagcgcaaataagtttgagtttgagtttgagagccttgttattttactcttaaaccacaaaaagggggtgatgccttatgtcgagtattagagcagctatctatactcgcgtctaagtcagcacgatggaacaagcgaccgacggatattccataggcgagcaaaaggataaattactgcactac

SEQ ID NO: 20967 - DNA, 260 bp, Unknown
  Description of Unknown: LeftRegion for integrase B7968 sequence
gactgatctattttattgttaaagttattttatggtaaaaaagacgatccccactgcaatgggaaccgccttttgaaccttcattcatgcttttgcaaaaagcatggtagaatgtcctcacaataatcattctatcataaaaccgtgctttttgcattggttttattttttataccattttttagattggagttgatagaatgaaacgacaaacagctaaacaaaatgataaactgctgctccgggtggctatttacatt

SEQ ID NO: 20968 - DNA, 260 bp, Unknown
  Description of Unknown: LeftRegion for integrase B7969 sequence
aaaaaaccgctcctgcgccaacaggaacggtcgagcgatgaaacatacgccaatatgtttctctattaagtactccgaagagatacccaaatgcaataatattgtatcatctccggagcagccacgcaagagaacaaaagttctcaggctgttatttttatactcatttttacgtatattgaagagaaaggtgatataatatgccaagtaaaattgaacgctgcgccatttacatccgtgtgtctaccgctgaacagatg

SEQ ID NO: 20969 - DNA, 260 bp, Unknown
  Description of Unknown: LeftRegion for integrase B7970 sequence
attgctaatcttgattaactaaataaaaaccgcccggtgctaccaacaccgaacggctttcacatagattttctcttaccagatcgctctgatagatatactctatctcaacaatagaattatatcatttccagaatgtcctgacaagaggtgtattttttataccccaaattaatacactagaccaaggagatgatattatggcaaaacctcagaccgcccttcagcgcgtagccctctacatccgtgtatcctcagac

SEQ ID NO: 20970 - DNA, 260 bp, Unknown
  Description of Unknown: LeftRegion for integrase B7971 sequence
aaataatcaaccttcaaatactcaagaaacaccgcctacaactcacgatgaatcacaaatggaacaagtaccacaagaccattctggtggccacccatcaattttcggaacagatacgccaccaaaaaataattaaataaatttatatgggtagcatgcctacccttattattttttactttttttgaggaagtggaagaatgaaagtagcaatttatacgagagtaagtactgcagaacaaaatttaaacggattttca

SEQ ID NO: 20971 - DNA, 260 bp, Unknown; identical to SEQ ID NO: 20843
  Description of Unknown: LeftRegion for integrase B7972 sequence

SEQ ID NO: 20972 - DNA, 260 bp, Unknown
  Description of Unknown: LeftRegion for integrase B7973 sequence
tataaaagctttaaatgctatattcggttttgttaaattttcagaaaagaaaaatatagattcaaaaaatttatgccaattttagttaaaatatagggaggaaactatgagtaataatataataagaaaagctgatgtaactttagaagaacaaaaaaaaatccttagtttgcttcttagcatggcaaatgaggaaataagtgaataatgtagctatttattgtagagaaagcacagagaagcaaaatattgatacgctt

SEQ ID NO: 20973 - DNA, 260 bp, Unknown
  Description of Unknown: LeftRegion for integrase B7974 sequence
ccgcactgatttgatgtcgttatcgaatttttgtaataaaaaaagagcagcctccacgccaatggaaaccgctctttgataacatatatctatcgcacaagcacgattgataaaatgtcacccgcaagtctcattttatcataaaaccgtgcttgtgcataggttttatttttataccttttttgaatggagttgataaaatgcgacgtaaaacaaccgctcctgtcgagaaaatcctgctccgtgtggcaatctatatc

SEQ ID NO: 20974 - DNA, 260 bp, Unknown
  Description of Unknown: LeftRegion for integrase B7975 sequence
accataaccaaaacatttgttgatagtgagggacttcccattctttaatgtaaaaacgccccactgcttaaaacagtagggcgatgatatatacaaaaccgagaggccttatatacatccttagacaagattattatatcagacctcccggtaaaactcaataccgggtatttttatacctttttttaggaggaactgatatgaaacatgttggactttatatccgcgtcagcacagaggaacagactgaaaactattcg

SEQ ID NO: 20975 - DNA, 260 bp, Unknown
  Description of Unknown: LeftRegion for integrase B7976 sequence
tagaaaaagagcaaaagaaaaaattagacaaataaaaaaccgcccctgctaccaacagagacggcttaatgaatactatacagtgccaaggcacgtacaataatccctagacaagaatattgtaccacaattttccagcatctgtatagatgttatttttgtacccttttttgcgtacattttaggaaaggtgatataatatgacaaacaaaattgaacgctgtgcaatctatatccgtgtatctactaccgaacaaatg

SEQ ID NO: 20976 - DNA, 260 bp, Unknown; identical to SEQ ID NO: 20912
  Description of Unknown: LeftRegion for integrase B7977 sequence

SEQ ID NO: 20977 - DNA, 260 bp, Unknown
  Description of Unknown: LeftRegion for integrase B7978 sequence
cggacgacttcggttgtccgctttttattttgcatataaaaaggcgaccactgcgccaacagtgaccgccctgtgagattcactcacctccgtaaaagcacggtgataaaatgaaaccctcgacaagtctcattttatcacgaaaccgtgcttttgcataggttttatttttttacctttttatgattggagttgatgaaatgagacgaaaaaacgctcctcgtcttgaaaaaatcctcctccgtgtcgcaatttatatc

SEQ ID NO: 20978 - DNA, 260 bp, Unknown
  Description of Unknown: LeftRegion for integrase B7979 sequence
aaaaccgctcctgcgccaacaggaacggtcgagcgatgaaacatacaccaatatgtttctctattaagtactccgaagagatacccaattttcaaataatattgtatcatcttcggacagccatcgcaagagaacaaaagttctctggctgttatttttatactcatttttacgtatattgaagagaaaggtgatataatatgccaagtaaaattgaacgctgcgccatttacatccgtgtgtctaccgctgaacagatg

SEQ ID NO: 20979 - DNA, 260 bp, Unknown
  Description of Unknown: LeftRegion for integrase B7980 sequence
ataccggctttccgaaaaaatgcggcaaaatctaactcaataaaaaaaccgcccccggtgctaccaacaccaaggacggcaaaccgtcaaccgctcgtgggagctgccaacgtactctataaaagcaatcatattgtaccgcaggcagcccatattgtcaagagggctgcttttttgcgcccatttttaggaggtacgatatgaatgtcttttgctatgtccgggtttctacggagaatcagctggaaaattacagcatt

SEQ ID NO: 20980 - DNA, 260 bp, Unknown
  Description of Unknown: LeftRegion for integrase B7981 sequence
aataaaaccgctcctgcgccaacaggaacggtcgagcgatgaaacatacgccaatatgtttctattaagttctccgaagagatacctaaatgcaaattatattgtatcatcttcggagcagccacgcaagagaacaaaagttctcgggctgttatttttatactcatttttacgtatattgaagagaaaggtgatataatatgccaagtaaaattgaacgctgcgccatttacatccgtgtgtctaccgctgaacagatg

SEQ ID NO: 20981 - DNA, 260 bp, Unknown; identical to SEQ ID NO: 20864
  Description of Unknown: LeftRegion for integrase B7982 sequence

SEQ ID NO: 20982 - DNA, 260 bp, Unknown
  Description of Unknown: LeftRegion for integrase B7983 sequence
agaaaaccgctcctgcgccaacaggaacggtcgagcgatgaaacatacgccaatatgtttctctattaagtactccgaagagatacccaaatgcaataatattgtatcatctccggagcagccacgcaagagaacaaaagttctcaggctgttatttttatactcatttttacgtatattgaagagaaaggtgatataatatgccaagtaaaattaaacgctgcgccatttacatccgtgtgtctaccgctgaacagatg

SEQ ID NO: 20983 - DNA, 260 bp, Unknown
  Description of Unknown: LeftRegion for integrase B7984 sequence
caatcaagaaaaataacgaataaaaattccccggtgtctaccaaacaccagggaaaatcccgagtaatatatacggcgaaggattcgctcgatacagtactctcctcacaaagattattgtatcacaaaaatccggcaccgtataggtgttatttttgtacccatttttgcgtaacataaaaaaggaaaggtgatatgatatgacaactaaagttgaacgctgtgcaatctatatccgtgtatccactaccgaacaaatg

SEQ ID NO: 20984 - DNA, 260 bp, Unknown
  Description of Unknown: LeftRegion for integrase B7985 sequence
tttaaatactatattcggttttgttaaattttcagaaaagaaaaatatagattcaaaaaatttatgccaattttaattaaactataaattaataaggagaccaactatgagtaataatataataagaaaagctgatgcaactttagaagatcaagaaaaaatccttagtttgcttcttagtatggcaaatgaggaaataagtgaataatgtagctatttattgtagagaaagtacagagaagcaaaatatcgatacactt

SEQ ID NO: 20985 - DNA, 260 bp, Unknown; identical to SEQ ID NO: 20879
  Description of Unknown: LeftRegion for integrase B7986 sequence

SEQ ID NO: 20986 - DNA, 260 bp, Unknown
  Description of Unknown: LeftRegion for integrase B7987 sequence
cggtgttaccagcaccgagcagtcctacgtcctctccgctcagcggagataggacgatttcagtataacatccctgggaatgctacaacattaaaccaaaaatattgtatcatttccgggaacagcttgcaagaggtcaaatcctctggctgttatttttatgcccttttttactgtttaagggagaatggagtgacacaatgagaagaaaaacaactgctgccaatcaaaaaatcttacttcgcgccgctatttacatc

SEQ ID NO: 20987 - DNA, 260 bp, Unknown; identical to SEQ ID NO: 20843
  Description of Unknown: LeftRegion for integrase B7988 sequence

SEQ ID NO: 20988 - DNA, 260 bp, Unknown
  Description of Unknown: LeftRegion for integrase B7989 sequence
acggctctggaatacctccgaagagatacattagcagacaaaagccgtctactaaaaccatatctttcgaaaaatattgtatcatcttcggtcagctatcgcaatcagaacatttgtttttgatagctgttatttttgtatcctcgtccctatgcatggggcgcggattgaaacatacaaatgaataaggagatgataacatgtcggaaaagatcaaacgctgcgcgatctatatccgtgtctcaacttcggaacagatg

SEQ ID NO: 20989 - DNA, 260 bp, Unknown
  Description of Unknown: LeftRegion for integrase B7990 sequence
cattgcgtcatcctcctagttttgattatgtacacgcttcaggcactctatacaaataaaaaaaggaagccgtgaccagcgacttcctttgcgaaacattgaaacaaaatatatcgcggaagaccgcccacgatgatattatgtccttttacattctatcatatcaagccttctttcgctaccagaaagaaggtttttatatgtctttttttactccaaacccacaacttttcgggcttcgtgtagttaaatatatcaga

SEQ ID NO: 20990 - DNA, 260 bp, Unknown
  Description of Unknown: LeftRegion for integrase B7991 sequence
tataaaagctttaaatgctatattcggttttgttaaattttcagaaaagaaaaatatagattcaaaaaatttatgccaattttagttaaaatacagggaggaaactatgagtaataatataataagaaaagctgatgcaactttagaagaacaaaaaaaaatccttagtttgcttcttagcatggcaaatgaggaaataagtgaataatgtagctatttattgtagagaaagcacagagaaacaaaatattgatacgctt

SEQ ID NO: 20991 - DNA, 260 bp, Unknown
  Description of Unknown: LeftRegion for integrase B7992 sequence
aaaaaaccgctcctgcgccaacaggaacggtcataggatgaaacatacgccaatatgtttctttcagtactccgaagagatacactgatttccaacaaatattgtatcatctccggagcagccgcgcaagagaacaaaagttctcgggctgttatttttatactcatttttacgtatattgaagagaaaggtgatataatatgccaagtaaaattgaacgctgtgccatttacatccgtgtgtctaccgctgaacagatg

SEQ ID NO: 20992 - DNA, 260 bp, Unknown
  Description of Unknown: LeftRegion for integrase B7993 sequence
ttttctcatttttataaattagtttacgaaaaatcgaacactagggatggtgttctaaagccttgtaggataaaaaatgctagtgaaaagtatggacacttaatatccagaggtatgctcttaccctcaacagtcatgaattgttattttaagtatagcatacctctttttaaaaagtcaatgaaatggaggaaaaatagatgaaacgtgttgctttatatatgagagtttctactcaagagcaggcagaaaatggaaac

SEQ ID NO: 20993 - DNA, 260 bp, Unknown
  Description of Unknown: LeftRegion for integrase B7994 sequence
gtaggatgcacatatctcgtcaaaaatatgaaaaaggacagccgcgtcaacgactgccccttctcatgtgtctatgctccacagctttacgccaagaacagacacggatcacaccctctattctagcataaagctgtgttgctgcatagctttattttttatacccttttcagggttctatgttagaaagaaggttttttatgaatacatattttcatccgcagccggaactgtacggcctgcgtgtagttaaatacata

SEQ ID NO: 20994 - DNA, 260 bp, Unknown
  Description of Unknown: LeftRegion for integrase B7995 sequence
tagtaataaataatccaataataaaaaaatccccggtgttaccaaacaccagggaaaatcccgagtaatatatacggcgaaggattcgctcgatacagtactccctcaacaagaatattgtatcacaaaaatccggcaccgtataggtgttatttttgtacccatttttgcgtaacataaaaaaggaaaggtgatatgatatgacgactaaagttgaacgctgtgcaatctatatccgtgtatccactaccgagcaaatg

SEQ ID NO: 20995 - DNA, 260 bp, Unknown
  Description of Unknown: LeftRegion for integrase B7996 sequence
cgcactgatttgatgtcgttatcgaatttttgtaataaaaaaaagagcagcctccacgccaatggaaaccgctctttgataacatatatctatcgtacaagcacgattgataaaatgtcacccgcaagtctcattttatcataaaaccgtgcttgtgcataggttttatttttataccttttttgaatggagttgataaaatgcgacgtaaaacaaccgctcctgtcgagaaaatcctgctccgtgtggcaatctatatc

SEQ ID NO: 20996 - DNA, 260 bp, Unknown
  Description of Unknown: LeftRegion for integrase B7997 sequence
ctgaagtctttgcatgagccaaaataaaaggcgtctcctgccgcaaacagaaaacgccttgcgatgtctctgtctcgtaacttctgcaaaaggcacggacagaacgatcctacaagcatcattctaccataaaaccgtgttttttgcataggatttattttttataccctttttcgggtatttatgtaagaaggtgcaatatgaatacatattttcatccgcagccggaactgtacggcttgcgtgtagttaaatacata

SEQ ID NO: 20997 - DNA, 260 bp, Unknown
  Description of Unknown: LeftRegion for integrase B7998 sequence
aactgtttaagaattaatggtttagattaaataaaaaatccccggtgttaccagcaccggggcatgagaaaactatacggtaccgaagcacgtacaatacccccacaaccaaggatattgtaccacaaatttccagcaccgtataggtgttatttttatacccatttttgcgtaacataaaaaaggaaaggtgatatgatatgacgactaaagttgaacgctgtgcaatctatatccgcgtatccactactgagcaaatg

SEQ ID NO: 20998 - DNA, 260 bp, Unknown
  Description of Unknown: LeftRegion for integrase B7999 sequence
gtcaaagaacgtcatttgaacgaatagaaatgtaaataaaaaagagcagcctccacgccaatggaaaccgctctttagataacatatacctccgtataggcacggcgataaaatgtcaccccgcaagtctcattttatcataaaaccgtgcttgtgcataggttttatttttatacctttttttgaatggagttgataaaatgcgacgtaaaacaaccgctcctgttgagaaaatcctgctccgtgtggcaatctacatc

SEQ ID NO: 20999 - DNA, 260 bp, Unknown
  Description of Unknown: LeftRegion for integrase B8000 sequence
cgcactgatttgatgtcgttatcgaatttttgtaataaaaaaagagcagcctccacgccaatggaaaccgctctttagataacatatacctccgtataagcacggtgataaaatgtcaccccacaagtctcattttatcataaaaccgtgcttgtgcataggttttatttttatacctttttttgaatggagttgataaaatgcgacgtaaaacaaccgctcctgttgagaaaatcctgctccgtgtggcaatctatatc

SEQ ID NO: 21000 - DNA, 260 bp, Unknown
  Description of Unknown: LeftRegion for integrase B8001 sequence
aaaaaaccgctcctgcgccaacaggaacggtcataggacgaaacatacgccaatatgtttctttcagtactccgaagagatacactgatttccgaataatattgtatcatctccggagcagccacgcaagagaacaaaagttctcgggctgttatttttatactcatttttacgtatattgaagagaaaggtgatataatatgccaagtaaaattgaacgctgcgccatttacatccgtgtgtctaccgctgaacagatg

SEQ ID NO: 21001 - DNA, 260 bp, Unknown; identical to SEQ ID NO: 20993
  Description of Unknown: LeftRegion for integrase B8002 sequence

SEQ ID NO: 21002 - DNA, 260 bp, Unknown
  Description of Unknown: LeftRegion for integrase B8003 sequence
aaaagaaccgctcctgcgccaacaggaacggtcgagcgatgaaacatactccaatatgtttctattaagttctccgaagagatacccaattccaaataatattgtatcatctccggagcagccgcgcaagagaacaaaagttctctggctgttatttttatactcatttttacgtatattgaagagaaaggtgatataatatgccaagtaaaattgaacgctgcgccatttacatccgtgtgtctaccgctgaacagatg

SEQ ID NO: 21003 - DNA, 260 bp, Unknown
  Description of Unknown: LeftRegion for integrase B8004 sequence
tattgatttaaaagaattgtaacattaaaacaaaagccccggtgctaccaacaccaggactctttgataagtattatacagtgctgaagcacgtacaataatcatcggcaatgatattgtaccacaaatttccagcacctgtataggtgttatttttgtacccatttttgcgtaacataaaaaaggaaaggtgatatgatatgacgactaaagttgaacgctgtgcaatctatatccgtgtatccactaccgagcaaatg

SEQ ID NO: 21004 - DNA, 260 bp, Unknown
  Description of Unknown: LeftRegion for integrase B8005 sequence
tagaaaaagagcaaaagaaaaaattagacaaataaaaaaccgcccctgctaccaacagagacggcttaatgaatactatacagtgccaaggcacgtacaataatccctagacaagaatattgtaccacaattttccagcatctgtatagatgttatttttgcacccttttttgcgtacattttaggaaaggtgatataatatgacagacaaaattgaacgctgtgcaatctatatccgtgtatctactaccgaacaaatg

SEQ ID NO: 21005 - DNA, 260 bp, Unknown
  Description of Unknown: LeftRegion for integrase B8006 sequence
ataaaaccgctcctgcgccaacaggaacggtcataggacgaaacatacgccaatatgtttctttcagtactccgaagagatacactgatttccgaataatattgtatcatctccggagcagccacgcaagagaacaaaagttctcgggctgttatttttatactcatttttacgtatattgaagagaaaggtgatataatatgccaagtaaaattgaacgctgcgccatttacatccgtgtgtctaccgctgaacagatg

SEQ ID NO: 21006 - DNA, 260 bp, Unknown
  Description of Unknown: LeftRegion for integrase B8007 sequence
atatgtactacgttaaagtctttgcatgaacaaaaataagacgatccccactgcaatgggaaccgccttttgaaccttcattcacgcttttgcaaaaagcatgatagaatgatccttaccaattaccattctatcataaaaccatgctttttgcattggttttattttttataccattttttcagattggagttgatagaatgaaacgacaaacagctaaactaaatgataaactgctgctccgtgtggctatttatatt

SEQ ID NO: 21007 - DNA, 260 bp, Unknown
  Description of Unknown: LeftRegion for integrase B8008 sequence
tcgcacaataacagtagttacaaataaaaacgccccagtgttaccagcactggggcattgagaaaactatactttgcaaggaacttgcggtataatcctctccctcacagagactattatatcacaaattcctggcaccgtgtaggtgttatttttgtacccatttttgcgtaacattaaagaaggaaaggtgatatgatatgacgactaaagttgaacgctgtgcaatctatatccgtgtatccactaccgagcaaatg

SEQ ID NO: 21008 - DNA, 260 bp, Unknown; identical to SEQ ID NO: 20885
  Description of Unknown: LeftRegion for integrase B8009 sequence

SEQ ID NO: 21009 - DNA, 260 bp, Unknown
  Description of Unknown: LeftRegion for integrase B8010 sequence
tcaaaggacggcatttgaatgaataagaaaagtaaataaaaaagagcagcctccacgccaatggaaaccgctctttgataacatatatctatcgcacaagtacgattgataaaatgtcacccgcaagtctcattttaccataaaaccgtgcttgtgcataggttttatttttttacccttttttgattggagttgataaaatgagacgcaaaacaaccgctcctgtcgagaaaatcctgctccgtgtggcaatctatatc

SEQ ID NO: 21010 - DNA, 260 bp, Unknown
  Description of Unknown: LeftRegion for integrase B8011 sequence
gcaaaaccgctcctgcgccaacaggaacggtcgagcgatgaaacatacgccaatatgtttctaattaagttctccgaagagatactcaaactgcaaatatattgtatcatcttcggacagccatcgcaagagaacaaaagttctcaggctgttatttttatactcatttttacgtatattgaagagaaaggtgatataatatgccaagtaaaattgaacgctgtgccatttacatccgtgtgtctaccgctgaacagatg

SEQ ID NO: 21011 - DNA, 260 bp, Unknown
  Description of Unknown: LeftRegion for integrase B8012 sequence
aaaaaaaccgctcctgcgccaacaggaacggtcgagcgatgaaacatacaccaatatgtttctcattaagttctccgaagagatacccaaatgcaataatattgtatcatctccggagcagccacgcaagagaacaaaagttctcgggctgttatttttatactcatttttacgtatattgaagagaaaggtgatataatatgccaagtaaaattgaacgctgcgccatttacatccgtgtgtctaccgctgaacagatg

SEQ ID NO: 21012 - DNA, 260 bp, Unknown; identical to SEQ ID NO: 20889
  Description of Unknown: LeftRegion for integrase B8013 sequence

SEQ ID NO: 21013 - DNA, 260 bp, Unknown; identical to SEQ ID NO: 21002
  Description of Unknown: LeftRegion for integrase B8014 sequence

SEQ ID NO: 21014 - DNA, 260 bp, Unknown; identical to SEQ ID NO: 20883
  Description of Unknown: LeftRegion for integrase B8015 sequence

SEQ ID NO: 21015 - DNA, 260 bp, Unknown
  Description of Unknown: LeftRegion for integrase B8016 sequence
aataatcaaccttcaaatactcaagaaacaccacctacaactcacgatgaatcacaaatggaacaagtaccacaagaccattctggtggtcacccatcaattttcggaacagatacgccaccaaaaaataattaaataaatttatatgggtagcatgcctacccttattattttttttacttttttgaggaagtggaagaatgaaagtagcaatttatacgagagtaagtactgcagaacaaaatttaaacggattttca

SEQ ID NO: 21016 - DNA, 260 bp, Unknown
  Description of Unknown: LeftRegion for integrase B8017 sequence
acaaaaccgctcctgcgccaacaggaacggtcataggacgaaacatacgccaatatgtttctttcagtactccgaagagatacactgatttccgaataatattgtatcatctccggagcagccacgcaagagaacaaaagttctcaggctgttatttttatgctcatttttacgtatattgaagagaaaggtgatataatatgccaagtaaaattgaacgctgcgccatttacatccgtgtgtctaccgctgaacagatg

SEQ ID NO: 21017 - DNA, 260 bp, Unknown; identical to SEQ ID NO: 20883
  Description of Unknown: LeftRegion for integrase B8018 sequence

SEQ ID NO: 21018 - DNA, 260 bp, Unknown
  Description of Unknown: LeftRegion for integrase B8019 sequence
attcgcagcgacgtcgcttatgattgtgatatggatggcgaaaagattgtagaaaacaaccctcttagatatagaacaaaggaaaaaagcgcagggtcgcaggttacgcgagggtatcgaccgacagcgacgagcagctgacctcgtatgaggcacaggtcgattactacactaactatatcagcaggaaccccgactggatgttcgctggcgtctataccgacgaaggcatctccggcctcaacacccggcacagggag

SEQ ID NO: 21019 - DNA, 260 bp, Unknown; identical to SEQ ID NO: 20859
  Description of Unknown: LeftRegion for integrase B8020 sequence

SEQ ID NO: 21020 - DNA, 260 bp, Unknown
  Description of Unknown: LeftRegion for integrase B8021 sequence
atccagtactaaacgtggtcctctaatacccccattttttatttctaatttcatcggttctttcatttttcacctcctccacagctttatgctcagaacagacacggatcacaccatctattctagcataaagttgtgttgctgcatagctttattttttatacccttttcagggttctatgttagaaagaaggttttttatgaatacatattttcatccgcagccggaactgtacggcctgcgtgtagttaaatacata

SEQ ID NO: 21021 - DNA, 260 bp, Unknown
  Description of Unknown: LeftRegion for integrase B8022 sequence
gcggaaacgtcagctgaagttgaataatttataataaaacaaaaagagcagccatctggtaaatggctgcccctctgttgcattctatgcagcacgcaagctacaaagaatagacaattcgcaccttctattctaccacaaagctgtgctgctgcatagctttatttttatacaattttttaagagaaagaaggtattttatgagttatatagagaatgaaagtctatgtggactccgtgttgtgaagtatattcgatgc

SEQ ID NO: 21022 - DNA, 260 bp, Unknown; identical to SEQ ID NO: 20843
  Description of Unknown: LeftRegion for integrase B8023 sequence

SEQ ID NO: 21023 - DNA, 260 bp, Unknown
  Description of Unknown: LeftRegion for integrase B8024 sequence
tcgcacaataacagtagttacaaataaaaacgccccagtgttaccagcactggggcattgagaaaactatactttgcaaggaacttgcggtataatcctctccctcacagagactattatatcacaaattcctggcaccgtgtaggtgttatttttgtacccatttttgcgtaacattaaagaaggaaaggtgatatgatatgacgactaaaattgaacgctgcgccatctatatccgtgtgtctactaccgaacaaatg

SEQ ID NO: 21024 - DNA, 260 bp, Unknown; identical to SEQ ID NO: 20846
  Description of Unknown: LeftRegion for integrase B8025 sequence

SEQ ID NO: 21025 - DNA, 260 bp, Unknown; identical to SEQ ID NO: 20912
  Description of Unknown: LeftRegion for integrase B8026 sequence

SEQ ID NO: 21026 - DNA, 260 bp, Unknown; identical to SEQ ID NO: 20843
  Description of Unknown: LeftRegion for integrase B8027 sequence

SEQ ID NO: 21027 - DNA, 260 bp, Unknown; identical to SEQ ID NO: 20881
  Description of Unknown: LeftRegion for integrase B8028 sequence

SEQ ID NO: 21028 - DNA, 260 bp, Unknown
  Description of Unknown: LeftRegion for integrase B8029 sequence
ctaaagcaaaaaaagaaccgcccctgttggcgcaaggacggatcttcataggcaataccgaagatggtatcaaccaaacttttgacttacatattgtatcatcttcaggcagctatcgcaagcggaacacacgttctatgccagctgttatttttatacccatttttgtgcgatgtcgcacatatacttaggaaggtgatatgatgaaattgcaacgatgtgcaatctacatccgtgtatcaactacagaacagatgatg

SEQ ID NO: 21029 - DNA, 260 bp, Unknown
  Description of Unknown: LeftRegion for integrase B8030 sequence
ctgccatgttagtatcttcatgttggtattgtgtgcatatggtggcatttttattaatttttattattttgtagcattaaaaaaggggctgccctgcaagcaaccccaatcagttcatttagaagaccgattctgtataaactgtatttctattttatcataaagtcggtacttctgcaatatggaagggagtattttttatgtcttattttaatttcaaccccgatttagtaggtgtacgcgttgttaaatacattcga

SEQ ID NO: 21030 - DNA, 260 bp, Unknown; identical to SEQ ID NO: 20843
  Description of Unknown: LeftRegion for integrase B8031 sequence

SEQ ID NO: 21031 - DNA, 260 bp, Unknown; identical to SEQ ID NO: 20843
  Description of Unknown: LeftRegion for integrase B8032 sequence

SEQ ID NO: 21032 - DNA, 260 bp, Unknown
  Description of Unknown: LeftRegion for integrase B8033 sequence
tctccatttttcagtccctcctgtggcatactctctatagtttgccactttcaggaaatgaataaagggcagccataaagactgccctctttgtacccgcacagcagtgtgctgcgatagatacggttcgcatccttaattctatcatattcacctgctgctgcatagtatttttgctattagaaagtaggtgtttttttatgctgtattcacagtctattcccgaattgtacgggatgcgtgtgtgtaaatatatccga

SEQ ID NO: 21033 - DNA, 260 bp, Unknown
  Description of Unknown: LeftRegion for integrase B8034 sequence
actaaagcaaaaaagaaccgcccctgttggcgcaaggacggatcttcataggcaataccgaagatggtatcaaccaaacttttgacttacatattgtatcatcttcaggcagctatcgcaagcggaacacacgttctatgccagctgttatttttatacccatttttgtgcgatgtcgcacatatacttaggaaggtgatatgatgaaattgcaacgatgtgcaatctacatccgtgtatcaactacagaacagatgatg

SEQ ID NO: 21034 - DNA, 260 bp, Unknown; identical to SEQ ID NO: 20883
  Description of Unknown: LeftRegion for integrase B8035 sequence

SEQ ID NO: 21035 - DNA, 260 bp, Unknown
  Description of Unknown: LeftRegion for integrase B8036 sequence
actaaagcaaaaaagaaccgcccctgttggcgcaaggacggatcttcataggcaataccgaagatggtatcaaccaaacttttgacttacatattgtatcatcttcaggcagctatcgcaagcggaacacacgttctatgccagctgttatttttatacccatttttgtgcgatgtcgcacatatacttaggaaggtgatatgatgaaatttcaacgatgtgcaatctacatccgtgtatcaactacagaacagatgatg

SEQ ID NO: 21036 - DNA, 260 bp, Unknown
  Description of Unknown: LeftRegion for integrase B8037 sequence
tgaaactgtaggctattattaaccaaaataaaaagacgatccccactgcaatgggaaccgcctttcgaaccttcattcatacttttgcaaaaagcatacgcatgatagaatgatccttaccagttaccattctatcataaaaccgtgctttttgcattggttttattttttataccattttttagattggagttgatagaatgaaacgacaaacagctaaactaaatgataaactgctgctccgggttgctatttacatc

SEQ ID NO: 21037 - DNA, 260 bp, Unknown
  Description of Unknown: LeftRegion for integrase B8038 sequence
gactgatctattttatcgttaaagttattttatggtaaaaaagacgatccccactgcaatgggaaccgccttttgaaccttcattcatacttttgcaaaaagcatggtagaatgtcctcacaataatcattctatcataaaaccgtgctttttgcattggttttattttttataccattttttagattggagttgatagaatgaaacgacaaacagctaaactaaatgataaactgctgctccgtgtggctatttacatc

SEQ ID NO: 21038 - DNA, 260 bp, Unknown; identical to SEQ ID NO: 20883
  Description of Unknown: LeftRegion for integrase B8039 sequence

SEQ ID NO: 21039 - DNA, 260 bp, Unknown
  Description of Unknown: LeftRegion for integrase B8040 sequence
attgtgaacgatgcacggaatgagtatctagccgccgctggtttcacggatgaagaaattgctgcgcggattgacatcggatgaaatataaaaagtgccccagggtgccggaacaccctggggctttgcataaacaactataaccacgctaatggagcatttatgctctcctattatagcgaactagggagagattgtcaatgaaagcagaaatagaccgcattatcagagttgcgctatatatccgcgtatctaccgag

SEQ ID NO: 21040 - DNA, 260 bp, Unknown
  Description of Unknown: LeftRegion for integrase B8041 sequence
ccattgcgtcatcctcctagtttagattatgtacacgcttcaggcactctatacaaataaaaaaggaagccgtgaccagcgacttcccttgcgaaacattgaaacaaaatatatcgcggaagaccgcccacgatgatattatgtccttttacattctatcatatcaagccttctttcgctaccagaaagaaggtttttatatgtctttttttactccaaacccacaacttttcgggcttcgtgtagttaaatatatcaga

SEQ ID NO: 21041 - DNA, 260 bp, Unknown
  Description of Unknown: LeftRegion for integrase B8042 sequence
aatatgaacaagaaccacttccagaagatgatgtgacagcttttcttcgcgaacgtggttttgtagaatagtatttaaaaatcccgacggtgcggggacactgccgggatttgtgcaacgtttgtgtaatcataccagatacaacataccgtctgcattgttattgtagcatatgcagacaggaaaagaaaggaaataacatgataaaaaaggaactttcttctgccggtccgcttcgtgttgcgctttatatccgcgtt

SEQ ID NO: 21042 - DNA, 260 bp, Unknown
  Description of Unknown: LeftRegion for integrase B8043 sequence
ctcccttctaccgcctaagcggttttctcgcgcaaggacggatcttcataggcaataccgaagatggtatcaaccaaacttttgacttacatattgtatcatcttcaggcagctatcgcaagcggaacacacgttctatgccagctgttatttttatacccatttttgtgcgatgtcgcacatatacttaggaaggtgatatgatgaaattgcaacgatgtgcaatctacatccgtgtatcaactacagaacagatgatg

SEQ ID NO: 21043 - DNA, 260 bp, Unknown
  Description of Unknown: LeftRegion for integrase B8044 sequence
acttccagcattgcgtgtcgtccccctatttagatgatttgcacgctttacccattttattcatactacacgaaaaaagaaagccgccgaagcgactttcaaaaaagttttatctgtaatcgaggtatcacagaataaacccaagcacgttttattctatcatattggtacttcttttactagaagaaagaaggtttattatgtcttattcacgttttaattcgcatcttgtcggtatgcgtgttgcaaaatacataaga

SEQ ID NO: 21044 - DNA, 260 bp, Unknown
  Description of Unknown: LeftRegion for integrase B8045 sequence
ttttataaaggaatataagcaataaaaaaaccgctcccaccgactgcaatcggtagaagcggaaaccattacaacgggtgcaatgatacatttcaaatgcaaaaatattgtatcatacccttgtaaatttttcaagtgaagtttacaagggatttttgcacccctttttagaatataaatattaaaaaaggagtgtttttatgaaaaaagttgcgtgttatgtaagagtttcaacagaaaatcagattgaaaattatagc

SEQ ID NO: 21045 - DNA, 260 bp, Unknown
  Description of Unknown: LeftRegion for integrase B8046 sequence
gataaccttcgagctctcagaaaccggcatgaaagcgggacggcacacaatatccgccgtgcagtatgacacagacgaccccagcggcaaaattgtgacgtacaagtcggcggtatatgaggcaaaagacatgtagccaataaaacaaaacccgccccggtgctgctaacaccggggcggtaataataggaggtgtagatatgccggatatgaaggggaaacgcatacttttatatgtgcgggtgtctaccgaggagcag

SEQ ID NO: 21046 - DNA, 260 bp, Unknown
  Description of Unknown: LeftRegion for integrase B8047 sequence
tccattgcgtcatcctcctagtttagattatgcacacgcttcaggcactctattcaaataaaaaggaagccgtgaccagcgacttcccttgcgaaacattgaaacaaaatatatcgcggaagaccgcccacgatgatattatgtccttttacattctatcatattaagccttctttcgctaccagaaagaaggtttttatatgtctttttttactccaaacccacaacttttcgggcttcgtgtagttaaatatatcaga

SEQ ID NO: 21047 - DNA, 260 bp, Unknown
  Description of Unknown: LeftRegion for integrase B8048 sequence
gactgatctattttatcgttaaagttattttatggtaaaaaagacgatccccactgcaatgggaaccgccttttgaaccttcattcatacttttgcaaaaagcatggtagaatgtcctcacaacaatcattctatcataaaaccgtgctttttgcattggttttattttttataccattttttagattggagttgatagaatgaaacgacaaacagctaaactaaatgataaactgctgctccgtgtggctatttacatc

SEQ ID NO: 21048 - DNA, 260 bp, Unknown
  Description of Unknown: LeftRegion for integrase B8049 sequence
gccatgttagtatcttcatgttggtattatgtgcatatggtggcatttttattaatttttattattttgtagcattaaaaaaggggctgccctgcaagcaaccccaatcagcttatttaagaagaccgattcctgtataaactgtatttctattttatcataaagtcggtacttctgcaatatggaagggagtattttttatgtcttattttaatttcaaccccgatttagtaggtgtacgcgttgttaaatacattcga

SEQ ID NO: 21049 - DNA, 260 bp, Unknown
  Description of Unknown: LeftRegion for integrase B8050 sequence
aatatgaacaagaaccacttccagaagatgatgtgacagcttttcttcgcgaacgtggttttgtagaatagtattttaaaatcccgacggtgcggggacactgccgggatttgtgcaacgtttgtgtaatcataccagatacaacataccgtctgcattgttattgtagcatatgcagacaggaaaaggaaggaaataacatgataaaaaaggaactttcttctgccggtccgcttcgtgttgcgctttatatccgcgtt

SEQ ID NO: 21050 - DNA, 260 bp, Unknown
  Description of Unknown: LeftRegion for integrase B8051 sequence
acctccctgtttcatctgttgcaaataagtaatctaatgttttgtctgggaatgcttttcgcttgatttctacacattcttttgacttacatattgtatcatcttcaggcagctatcgcaagcggaacacacgttctatgccagctgttatttttatacccatttttgtgcgatgtcgcacatatacttaggaaggtgatatgatgaaattgcaacgatgtgcaatctacatccgtgtatcaactacagaacagatgatg

SEQ ID NO: 21051 - DNA, 260 bp, Unknown
  Description of Unknown: LeftRegion for integrase B8052 sequence
tgaaactgtaggctattattaaccaaaataaaaagacgatccccactgcaatgggaaccgcctttcgaaccttcattcacacttttgcaaaaagcatacgcatgatagaatgatccttaccagttaccattctatcataaaaccgtgctttttgcattggttttattttttataccattttttagattggagttgatagaatgaaacgacaaacagctaaactaaatgataaactgctgctccgtgtggctatttacatc

SEQ ID NO: 21052 - DNA, 260 bp, Unknown
  Description of Unknown: LeftRegion for integrase B8053 sequence
tccattgcgtcatcctcctagttttgattatgtacacgcttcaggcactctatacaaataaaaaaggaagccgtgaccagcgacttcccttgcaaaatgttaaacaaaatatatcgcggaagaccgcccacgatgatattatgtccttttacattctatcatatcaagccttctttcgctaccagaaagaaggtttttatatgtctttttttactccaaacccacaacttttcgggcttcgtgttgcaaaatatatccgt

SEQ ID NO: 21053 - DNA, 260 bp, Unknown; identical to SEQ ID NO: 20883
  Description of Unknown: LeftRegion for integrase B8054 sequence

SEQ ID NO: 21054 - DNA, 260 bp, Unknown
  Description of Unknown: LeftRegion for integrase B8055 sequence
tccattgcgtcatcctcctagttttgattatgtacacgcttcaggcactctatacaaataaaaaaggaagccgtgaccagcgacttcccttgcaaaatgttaaacaaaatatatcgcggaagaccgcccacgatgatattatgtccttttacattctatcatatcaagccttctttcgctactagaaagaaggtttttatatgtctttttttactccaaacccacaacttttcgggcttcgtgttgcaaaatatatccgt

SEQ ID NO: 21055 - DNA, 260 bp, Unknown
  Description of Unknown: LeftRegion for integrase B8056 sequence
ctaaagcaaaaaaagaaccgcccctgttggcgcaaggacggatcttcataggcaataccgaagatggtatcaaccaaacttttgacttacatattgtatcatcttcaggcagctatcgcaagcggaacacacgttctatgccagctgttatttttatacccatttttgtgcgatgtcgcacatatacttaggaaggtgatatgatgaaatttcaacgatgtgcaatctacatccgtgtatcaactacagaacagatgatg

SEQ ID NO: 21056 - DNA, 260 bp, Unknown; identical to SEQ ID NO: 20883
  Description of Unknown: LeftRegion for integrase B8057 sequence

SEQ ID NO: 21057 - DNA, 260 bp, Unknown
  Description of Unknown: LeftRegion for integrase B8058 sequence
aatccggggaaattacatacaactcctttgatgaataaaaagaaaaaggggacagcccttccaagactgtccctttctctcactatctatgcagccacggctacacagaatagcagcttcgcaacctctattctaccacaaaagccgtgctgctgcatagctttattttttatacacttttttagaatgggggcgaatttatgttttatacacagtcctgtccggaactgaacggaatgcgtgttgcaaaatatatccgt

SEQ ID NO: 21058 - DNA, 260 bp, Unknown
  Description of Unknown: LeftRegion for integrase B8059 sequence
gccatgttagtatcttcatgttggtattatgtgcatatggtggcatttttattaatttttattattttgtagcattaaaaaaggggctgccctgcaagcaaccccaatcagcttatttaagaagaccgattcctgtataaactgtatttctattttatcatatcttcggtacttctgcaagttagagaggagtattttttatgtcttattttaatttcaaccccgatttagtaggtgtacgcgttgttaaatacattcga

SEQ ID NO: 21059 - DNA, 260 bp, Unknown; identical to SEQ ID NO: 21047
  Description of Unknown: LeftRegion for integrase B8060 sequence

SEQ ID NO: 21060 - DNA, 260 bp, Unknown
  Description of Unknown: LeftRegion for integrase B8061 sequence
ccattgcgtcatcctcctagttttgattatgtatacgcttcaggcactctattcaaataaaaaaggaagccgtgaccagcgacttcccttgtgaaacattaaaacaaaatatatcgcggaagaccgcccacgatgatattatgtccttttacattctatcatatcaagccttctttcgctaccagaaagaaggtttttatatgtctttttttactccaaacccacaacttttcgggcttcgtgttgcaaaatatatccgt

SEQ ID NO: 21061 - DNA, 260 bp, Unknown; identical to SEQ ID NO: 20843
  Description of Unknown: LeftRegion for integrase B8062 sequence

SEQ ID NO: 21062 - DNA, 260 bp, Unknown
  Description of Unknown: LeftRegion for integrase B8063 sequence
agtggtcaaacagccgtaattcttataaatggtgatgaagccacagtaaaaaaagttattaaaaccgttgatggaatagaattacatgcaatgaatccttattaccctgttaaaaaatttacttttcaagagatgaaaactatacctgtaaaaattataggtagagtaaaggaagcaaaaataaaaggagcttttgaataatggaaaataaaacaaatgtcgaagaagtagctttgtatgttcgtgttagtacagatgaa

SEQ ID NO: 21063 - DNA, 260 bp, Unknown; identical to SEQ ID NO: 20883
  Description of Unknown: LeftRegion for integrase B8064 sequence

SEQ ID NO: 21064 - DNA, 260 bp, Unknown
  Description of Unknown: LeftRegion for integrase B8065 sequence
ccattgcgtcatcctcctagttttgattatgtacacgcttcaggcactctattcaaataaaaaaggaagccgtgaccagcgacttcccttgtgaaacattaaaacaaaatatatcgcggaagaccgcccacgatgatattatgtccttttacattctatcatatcaagccttctttcgctaccagaaagaaggtttttatatgtctttttttactccaaacccacaacttttcgggcttcgtgtagttaaatatatcaga

SEQ ID NO: 21065 - DNA, 260 bp, Unknown
  Description of Unknown: LeftRegion for integrase B8066 sequence
aatcaaccttttttgatatggttaatcaataaatcttaatacacaggaaaagccgcccggcagataatcgggcggcttttcctcaaggagtcggttcatcaatggaaagaaaaccgtgaaaaagaagttccatctatattgtatcacgcctgcacagtatgtacagggcaactttaaaaaaataaggggaaaactatatcatgtcaaatacgcctaaaaccattacccgggccgcgctatatatccgcgtcagcaccgaa

SEQ ID NO: 21066 - DNA, 260 bp, Unknown
  Description of Unknown: LeftRegion for integrase B8067 sequence
aatcaaccttttttgatatggttaatcaataaatcttaatacacaggaaaagccgcccggcagataatcgggcggcttttcctcaaggagtcggttcatcaatggaaagaaaaccgtgaaaaagaagttccatctatattgtatcacgcctgcacagtatgtacagggcaactttaaaaaaataaggggaaaactatatcatgtcaaatacacctgaaaccattacccgggccgcgctatatatccgcgtcagcaccgaa

SEQ ID NO: 21067 - DNA, 260 bp, Unknown
  Description of Unknown: LeftRegion for integrase B8068 sequence
tttccattgtgatttcctcctgataatataatgcacatgcttcaggcacttgatacaaataaaaaggaagccgtgaccagcgacttcccttgcaaaatgttaaacaaaatatatcgcggaagaccgcccacgatgatattatgtccttttacattctatcatatcaagccttctttcgctactagaaagaaggtttttatatgtctttttttactccaaacccacaacttttcgggcttcgtgtagttaaatatatcaga

SEQ ID NO: 21068 - DNA, 260 bp, Unknown
  Description of Unknown: LeftRegion for integrase B8069 sequence
tcttaaaaaggatgcatgaagataagctgttaaccgaggaagaatgggaaaaaatccgggttttgaatgtcaagaccttttcccccgaactggcaaaagtatatctgtaataacactggatatataagggactatgtggtagtgtatgttgctgacagggagtgcaaccccttgaaaatactaggaaaggagaaaaaagcatggcaaaaaaagtaactgtcataaaggcagcaaaagagcagaaacatacacaggaagaa

SEQ ID NO: 21069 - DNA, 260 bp, Unknown
  Description of Unknown: LeftRegion for integrase B8070 sequence
gactgatctattttatcgttaaagttattttatggtaaaaaagacgatccccactgcaatgggaaccgccttttgaaccttcattcatacttttgcaaaaagcatggtagaatgtcctcacaataatcattctatcataaaaccgtgctttttgcattggttttattttttataccattttttagattggagttgatagaatgaaacgacaaactgctaaactaaatgataaactgctgctccgggttgctatttacatc

SEQ ID NO: 21070 - DNA, 260 bp, Unknown; identical to SEQ ID NO: 21064
  Description of Unknown: LeftRegion for integrase B8071 sequence

SEQ ID NO: 21071 - DNA, 260 bp, Unknown
  Description of Unknown: LeftRegion for integrase B8072 sequence
gactgatctattttatcgttaaagttattttatggtaaaaaagacgatccccactgcaatgggaaccgccttttgaaccttcattcatacttttgcaaaaagcatggtagaatgtcctcacaacaatcattctatcataaaaccgtgctttttgcattggttttattttttataccattttttagattggagttgatagaatgaaacgacaaacagctaaactaaatgataaactgctgctccgggttgctatttacatc

SEQ ID NO: 21072 - DNA, 260 bp, Unknown
  Description of Unknown: LeftRegion for integrase B8073 sequence
gttgctcatgaaggtggttccattgccggtaacgccagaaaagagctagaaggtaaactgggaaggagtgtaatatctccactcaatgccaatgacgcacctcttcttgatgattcagacaagtaaaatctgccccggtaataaccggggcatgactaaaagtaatccgcatttttgtttcctgtgactaataattatatatgggtgatgatatgaaagaaaaaataccgcgctgtgcaatctatgaccgcgtatcaact

SEQ ID NO: 21073 - DNA, 260 bp, Unknown
  Description of Unknown: LeftRegion for integrase B8074 sequence
atatcgctcaaaaatgtaatcaataaaaaaccgctcccaccgacggcaatcggcgagagcggaaaccattacaacgggtgcaatgatacatttcaaatgcaaaaatattgtatcatacccttgtaaatttttcaagtgaagtttacaagggatttttgcacccttttttagaatataaatattaaaaaaggagtgtttttatgaaaaaagttgcgtgttatgtaagagtttcaacagaaaatcagattgaaaattatagc

SEQ ID NO: 21074 - DNA, 260 bp, Unknown; identical to SEQ ID NO: 21071
  Description of Unknown: LeftRegion for integrase B8075 sequence

SEQ ID NO: 21075 - DNA, 260 bp, Unknown
  Description of Unknown: LeftRegion for integrase B8076 sequence
ccatagagccttcctcctgttttattatgcgcagatgcaggctccgtatacaaaataaaaaggcaagccgcgaccaacggcttgcccccatgtgtgaaatgaacaaaatataccgcggaagaccgcccacgatgatataatgtccttttacattctatcatatctggctttctttcgctataagaaagaagggtttttatatgtctttttttaccccgaatcccgccctttttgggcttcgtgtggtcaagtacattcga

SEQ ID NO: 21076 - DNA, 260 bp, Unknown
  Description of Unknown: LeftRegion for integrase B8077 sequence
ctttggaggttcttatggatcatggcctgaatctcgtcaacgttgtgatttacgcccggtattcatccgtcggccagaacgatcaatccatcgacggccagcttgccaaatgccgcgagtacgcgcagcagcgcggtttccgcgtcgtaggtgagtattgtgatcgttcgctggcctgctgatttgccgaaacgcgcccggtgttccagcggctcggttcggatagctccaaacatgcgtttgagtatgtgcttgtctgg

SEQ ID NO: 21077 - DNA, 260 bp, Unknown
  Description of Unknown: LeftRegion for integrase B8078 sequence
ttccatagagccttcctcctgttttattatgcgcagatgcaggctccgtatacaaaataaaaaggcaagccgcgaccaacggcttgcccccatgtgtgaaatgaacaaaatataccgcggaagaccgccacgatgatataatgtccttttacattctatcatatcgggctttctttcgctataagaaagagggtttttatatgtctttttttaccccgaatcccgccctttttgggcttcgtgtggtcaagtacattcga

SEQ ID NO: 21078 - DNA, 260 bp, Unknown; identical to SEQ ID NO: 21064
  Description of Unknown: LeftRegion for integrase B8079 sequence

SEQ ID NO: 21079 - DNA, 260 bp, Unknown
  Description of Unknown: LeftRegion for integrase B8080 sequence
gatcttctttaataacttattgtttatataataaaaaccgcccctgcgccaacaggaacggtcttatagatactattgcaggacatgcccgaaataatatcaggtcacctaaacctacgcatattatatcattcggcaccgcattctgcaatgggtgttctttttatgcttaaaaatactttaaggaaggaaatgataatatgcgtaaggatgttaaacgagtagctatttacatacgtgtttcaacgtatgagcaggcg

SEQ ID NO: 21080 - DNA, 260 bp, Unknown
  Description of Unknown: LeftRegion for integrase B8081 sequence
aaaattgtttttacaactctttacatagaaaaaccgccccgatgttggcgcatcaagacggtttccaagatgatctatacaggcctggaagccggtataatcttccctcgacaagaagagtataccacaattctccatggtctgtacaggtgctatttttgcactcttttttatacacttttacatggaggatgatatttatgaacaaaattcttcgcgctgcaagttatatccgtgtaagtacctctgaacaggcactc

SEQ ID NO: 21081 - DNA, 260 bp, Unknown
  Description of Unknown: LeftRegion for integrase B8082 sequence
ttattccaattacttcaaaataattaaaaaccgcccctgtgccaacaggaacggcttaatgaatactatacagtgccaaggcacgtacaatactccctgaacaagaatattgtatcacatttccttggcacctgtacaggtgtattttttatatccatttttgtgcgacatcgcacatatatttcaaggaaggtgattgcatgaaattagaacgctgtgctatttatatccgagtatctaccgcagagcagatgatgcat

SEQ ID NO: 21082 - DNA, 260 bp, Unknown
  Description of Unknown: LeftRegion for integrase B8083 sequence
aaaaaatatgggcctattttcggatctctatactgctgagtgggtggtacccatgagtaattcacacatgaaaatcttcaacaaagtatagtatttatgtccgcaatatttctctttatgagtagcttgaaatggcttgatgctgtgcttaattagagttaatatgtatacaatatgttaacagagacgaggtgagaagcatggagcgaatagttaggaaattggataaaaaaatactagcttttgctcaaagaaaacgt

SEQ ID NO: 21083 - DNA, 260 bp, Unknown
  Description of Unknown: LeftRegion for integrase B8084 sequence
caataatgaatatagctaagaatactttgtctgttattgaatacagccattttataatggatttatgttagaaataaaaatcccggcggtgcggggacactgccgggatttctgcaacgttttgtataatcataccagatacaacataccgtctgcattgttattgtagcatatgcagacaggaaaagaaaggaaatagcatgataaaaaaagaactttctacgggtccgcttcgtgttgcactttacatacgtgtttcc

SEQ ID NO: 21084 - DNA, 260 bp, Unknown
  Description of Unknown: LeftRegion for integrase B8085 sequence
accctatgaacgttttgaagtacgaattgacaaaggtataactataagtggtataggtccagcaattttaatagtaaatcaagattaataggaggaaataaaaatggttaaaattataaacgcagataaaacagacgaaaaattaatagaaatgttacaaaatgaaattatcaatctagcaagcaagaaaggattattagatgagtaagctaaaagccattgcatattatagggtatctacagaaatgcaggaggaaaaa

SEQ ID NO: 21085 - DNA, 260 bp, Unknown
  Description of Unknown: LeftRegion for integrase B8086 sequence
ggcgaataaaaaaagaaatcgccaccccgttggctcagggtggctcgcatatccgaagatatactatatctgattgttcaagtcatattgtatcatcttcgggcagctatcgcaagcggaacatctgttctttgctggctgttatttttgtactcatttttagtgcgacgtcgcacatatatactaaggaaggtgatcacatgaaattagaacgctgtgctatctatatccgagtatctactgcagagcagatgatgcac

SEQ ID NO: 21086 - DNA, 260 bp, Unknown
  Description of Unknown: LeftRegion for integrase B8087 sequence
agtatatattgatggtaaagttaggatacaagaaacaggttcagcaattttaatagtaaatcaagattaaaagaagatattaatgtaataggaggaaataaaaatggttaaaattataaatgcagataaaacagacgaaaaattaatagaaatgttacaaaatgaaattataaatctagcaagcaagaaaggattattagatgagtaagcttaaagccattgcttattatagagtatctacagaaatgcaggaagaaaaa

SEQ ID NO: 21087 - DNA, 260 bp, Unknown
  Description of Unknown: LeftRegion for integrase B8088 sequence
tggcgaataaaaaagaaatcgccacccagttggcaaagggtggctcgcatatccgaagatatactatatctgattgttcaagtcatattgtatcatcttcgggcagctatcgcaagcggaacatttgttccttgctggctgttatttttgtactcatttttagtgcgacgtcgcacatatatactaaggaaggtgatcacatgaaattagaacgctgtgctatctatatccgagtatctactgctgagcagatgatgcac

SEQ ID NO: 21088 - DNA, 260 bp, Unknown
  Description of Unknown: LeftRegion for integrase B8089 sequence
aaatacgaggtcttttgcattataatcaaaaccgcccctgtgccaacaggaacggcttaatgaatactatacagtgccgaggcacgtacaatactccctgaacaagaatattgtatcacatttccttggcacctgtacaggtgtattttttatacacaaatttgtgcgacgtcgcacatatacttaaggaaggtgatcgcatgaaattagaacgctgtgctatctatatccgagtatctaccgcagagcagatgatgcac

SEQ ID NO: 21089 - DNA, 260 bp, Unknown
  Description of Unknown: LeftRegion for integrase B8090 sequence
atgggcagtactctcaaattatattttataaaataaaaccgcccctgcgccaacaggaacggtcttatggatactattgcaggacatgcccgaaataatatcaggtctcccaaacctacgcatattatatcattcggcaccacattctgcaatgggtgttctttttatactcaaaaatactttaagagaggaatgataatatgcgtaaagatgttaaacgagtagctatttacatacgtgtttcaacgtatgagcaggca

SEQ ID NO: 21090 - DNA, 260 bp, Unknown
  Description of Unknown: LeftRegion for integrase B8091 sequence
tgcgagacacagcttataaaaatctccaccagtaaatataattgcatatatgataacaaaaaaccgccccctgcgccaacaggagacggcccgaatgtaacagcctgcggggtacgcagacaatcacactacacaatgtgattatagcacctctcaggcctgtttgccaaatgtaaattaactgaaagaggtgttttattatgaaaaaagcagcactttatattcgtgtttccacggatgaacaggccaagcatggtttt

SEQ ID NO: 21091 - DNA, 260 bp, Unknown
  Description of Unknown: LeftRegion for integrase B8092 sequence
tctggaaattatgattattatttatcttcattagaaacttcgattgcaaagtattattacataaatgcagaaaaacgctaaaaaataaatgtccgccccggtttctcgggacggactgcaaacggccaacaccacttgaactatttgctattttattatagcgcataaagtgggactattcaagaaaggattttcagcttatgaaaaaaatcgaatcttctaacagccctcttcgcgtagccctatacatccgtgtatct

SEQ ID NO: 21092 - DNA, 260 bp, Unknown
  Description of Unknown: LeftRegion for integrase B8093 sequence
aataatggatatagcaaagaacagtttacctgcaattgaatacagcaatttcatattgtctatatgttagaaaataaaaatcccggcggtgcggggacactgccgggatttctgcaacgttttgtataatcataccagatacaacataccgtctgcattgttattgtagcatatgcagacaggaaaagaaaggaaatagcatgataaaaaaagaactttctacgggtccgcttcgtgttgcgctttacatacgtgtttcc

SEQ ID NO: 21093 - DNA, 260 bp, Unknown
  Description of Unknown: LeftRegion for integrase B8094 sequence
tctagaagatggaattagacaacttgacgataatggtgatatttattaaaaaaagagaattatgttccaaagtttgcgacacggtacataattctcacaaaataaacactattgaaagtggttaccttattattatatattaagtagccttcattttcaatagtttgttaaacaaatttattaaactggaggtattttttatgaaatatgttgcatgttactgtagagtttcacatgaggaacaggtaaaatacggctat

SEQ ID NO: 21094 - DNA, 260 bp, Unknown
  Description of Unknown: LeftRegion for integrase B8095 sequence
catgaaaaaatctgttatgatctacgatctggagcatgaagacaatactggacagttttcatttgatgatatccttcaggctaatatttatgaagatttgaagatcaaaatttccgatcttctgtaatgcaaaatacgcccctaaatcaaaaggggcgtattttgtaccactcatcagtacttaaggaaggaatgacacaatggataagaaaaaaatgcgttgcgcaatttatatccgcgtatccactacagaacaggcc

SEQ ID NO: 21095 - DNA, 260 bp, Unknown
  Description of Unknown: LeftRegion for integrase B8096 sequence
tctggaaattatgattattatttatcttcattagaaacttcgattgcaaagtattattacataaatgcagaaaaacgctaaaaaataaatgtccgccccggtttctcgggacggactgcaaacggccaacaccacttgaactatttgctatttcattatagcgcataaagtgggactattcaagaaaggattttcagcttatgaaaaaaatcgaatcttctaacagccctcttcgcgtagccctatacatccgtgtatct

SEQ ID NO: 21096 - DNA, 260 bp, Unknown
  Description of Unknown: LeftRegion for integrase B8097 sequence
atttttacgatttataataaagcagtttaaaataaaaggcccctgctacaaacagagaccttctttgaaaactatacagatccagcggatcgtgtagaatcttccctcgacaagaagattatatcacaatcctccggcgcctgtataggtgctatttttgtactcttttttatacaattttacatggaggatgatattttatgagcaaaattcttcgcgccgcaagctacatccgtgtcagtaccgccgaacaggccctt

SEQ ID NO: 21097 - DNA, 260 bp, Unknown
  Description of Unknown: LeftRegion for integrase B8098 sequence
ctgaactttatggaaacataaagaaatcacagataaaaagtcgttgtgataacaaatatggtatagaaactcgctatggtaaatacgttattcaatttgagccatcacgagtgtttgaatataaagatattgattaagaagaaatagatttgggtagtccacctacccttattattttttactttttttgaggtgatttaatgaacgtagcaatatattgccgtgtcagtacactagagcaaaaagaacatggctattct

SEQ ID NO: 21098 - DNA, 260 bp, Unknown
  Description of Unknown: LeftRegion for integrase B8099 sequence
ttgaagaaatcaaagcgtttgttgaaagtcgtatgtaatattgcgcgggcgcaaataaaaaagctgcccccacgccaatgggaacagctcctcactatacctgtgatttatgatatagccaattctgaacaaattgattatatcataaatctcctgcaccgtataggtgtattttttataccctttttaggagaattattatgataaacaatgaaaatgaattgaaaccaaaactcatccgtgtagctttgtatatccgt

SEQ ID NO: 21099 - DNA, 260 bp, Unknown
  Description of Unknown: LeftRegion for integrase B8100 sequence
accaaaaaagaaccgcccctgttggcgcaaggacggatcttcataggcaataccgaagatggtatcaaccaaacttttgacttacatattgtatcatcttcggacagctatcgcaagtggaacacacgttctatgctagctgttatttttatacccatttttgtgcgacatcgcacatatatactaaggaaggtgatcacatgaaattagaacgctgtgctatctatatccgagtatctactgcagagcagatgatgcac

SEQ ID NO: 21100 - DNA, 260 bp, Unknown; identical to SEQ ID NO: 21091
  Description of Unknown: LeftRegion for integrase B8101 sequence

SEQ ID NO: 21101 - DNA, 260 bp, Unknown
  Description of Unknown: LeftRegion for integrase B8102 sequence
atgactttgagaaccgagaggagttagagggggataaagacaatactgcggcagtctaaggttattcctatagaactgctgagacgtaagaagctattggaggtgagattacgaaagcggtaatttacgctcgatattcgagccacagtcagagagaagaatccatcgaaggtcagctccgtgagtgtcacgacttcgccttgaagaatgggttcacgatcataaatgagtattgcgacagagcgatttcgggtaagacc

SEQ ID NO: 21102 - DNA, 260 bp, Unknown
  Description of Unknown: LeftRegion for integrase B8103 sequence
gaacaacaaaatttaaaagaataaataaaaaccgctcctgctaccaacaggaacggcttaatgaatactatacagtgccgaggcacgtacaatactccctgaacaagaatattgtatcacatttccttggcacctgtacaggtgtatttttgtacgcaaatttgtgcgacgtcgcacatatacttaaggaaggtgatcacatgaaattagaacgctgtgctatctatatccgagtatctactgcagagcagatgatgcac

SEQ ID NO: 21103 - DNA, 260 bp, Unknown
  Description of Unknown: LeftRegion for integrase B8104 sequence
gaacggagaatggaaacggcaagagacaggcgtctgcctatgcccggatcgattctcgccaaaaattacaacggaagaaaaatcgccgtcagggtattggaaaagggattcgagttcgacaacgaacattactcttcgttgtccggcattgcgcggaagattacgggaacgaactggaacggattcaaatttttcgaactatgaaaaatcaaatagtgcaaaagaaaataaggtgcgccatatacacgcgtaaatcggta

SEQ ID NO: 21104 - DNA, 260 bp, Unknown
  Description of Unknown: LeftRegion for integrase B8105 sequence
cgggctttccataaaacatatcgagaagaatctaataaataataaaattaaaaaccgcccctgctggcaacaggaacggctttcatgtgttttgcagttgtaagtaaacatactatacacacctcatacatatatagtatagcatatttacttacacctgcaaaggtgtattttttatacctttttttaaggagaaaactatgattgagagatgtgcgatttatataagagtctccactgcagagcagtccatgaaagga

SEQ ID NO: 21105 - DNA, 260 bp, Unknown
  Description of Unknown: LeftRegion for integrase B8106 sequence
cacttatgcaaaaaatgggatttaactaataaactgaaaaaccgcccggctggcaccggacggaattccattagactatttgctcattccgaaatgaaaagaacgatataatccaaagtcgcatttagattatatcacacttcttttctttttgaaactatgaggggtgtatttttatacccatttagggagaaaaagaaatgaaaagaaaactaaataatgataaaactatcttaagggtcgcaatttatgtccgtgtg

SEQ ID NO: 21106 - DNA, 260 bp, Unknown
  Description of Unknown: LeftRegion for integrase B8107 sequence
tactcaattaaaacaaaattttgtgtttattgcccaaaaagatgaacttattaaacagaatgataaaatcattaaacagaatgatgaaattatcaaattgttaaaacaaattgcagataataaccaatctatttgataaataaattttcgggtagctcgcctacccttattatttttttgactttttaggagatgaaacaatgaaagtagcgatttacactagggtttcgagcgctgaacaagcgaacgaaggatattca

SEQ ID NO: 21107 - DNA, 260 bp, Unknown
  Description of Unknown: LeftRegion for integrase B8108 sequence
ttcaaggctatggattactatgacacacatagcataaattaaaacagccgcttccaacatggtcgaaattgactggtttggaagcggctattttatcaattcgttgacttcacccaaacaaaggctatactgtagtcaaagaatacgtcgatgaagcgaaaagcgggcgcagtaccttaacgcgtgacgcatacaatcagatgatggctgatgctatggagaacaaattcgacgttattatcttccataaaatcgaccgc

SEQ ID NO: 21108 - DNA, 260 bp, Unknown
  Description of Unknown: LeftRegion for integrase B8109 sequence
ctccagttacactaaaagctactcaaggtgtaaatggtaaaaaattaggcgaaaagaattttgaagtaaaataaaataaaaaaagcccccacaaatttatggaagctaatttataagtgtatgatatacactattctcacaaaataattatatcatacatttattattagcacaacttttagaaaggaagtgctatttttatggataatataaaaagagctgcattgtatataagagtttcaacagacgaacaagctcga

SEQ ID NO: 21109 - DNA, 260 bp, Unknown
  Description of Unknown: LeftRegion for integrase B8110 sequence
gtgctttttaattttatataaaaagaaaccgcccggtgctaccaacaccgaacggcttcacatagattttctcttacaggctgccctgaaagatataaatcagacttagaacacctgaattatatcatctccagagcgtcctggcaaggggcgttatttttatacccattttcacgtaaactactagaggagatgatttcatgaagcagtctacttttccatccatccccctgcgcgctggtatttacatccgcgtcagc

SEQ ID NO: 21110 - DNA, 260 bp, Unknown
  Description of Unknown: LeftRegion for integrase B8111 sequence
tgatcacccagcaaactaaataacaagtttaaaatcctcagtattaatttactggggatttttattttaataaacattaggaggaattaaaatgtcaggtattgttattagaaaaagcattagtaaagaagaagaaaataaaattcttagtctacttttaaaaaaagctaaggaagaactaggggaataggaggaatcgtatggataaggttgctatatattgtcgtgaaagtacagagcgtcaagatatttcaacattg

SEQ ID NO: 21111 - DNA, 260 bp, Unknown
  Description of Unknown: LeftRegion for integrase B8112 sequence
gagaaataaaaaaagataaccccaggcacataggaatgctcagtgcttctgcacctaccccattttgggacccagcgttaatccttctcgagttatcttgactttattatatgacattataggtagtaattcaagaattataattttagggtagcccacctacccttattatttttttaccttttttaggagatgaaacaatgaaagtagcgatttacacaagagtaagtacattagagcaaagagaaaaaggccattct

SEQ ID NO: 21112 - DNA, 260 bp, Unknown
  Description of Unknown: LeftRegion for integrase B8113 sequence
acttatgcaaaaaatgggattgaactaataaactgaaaaaccgcccggctggcaccggacggaattccattagactatttgctcattccgaaatgaaaagaacgatataatccaaagtcgcatttcgattatatcacacttcttttcttttcgaaactatgaggggtgtattttttatacccatttagggagaaaaagaaatgaaaagaaaactaaataatgataaaactatcttaagagtcgcaatttatgtccgtgtg

SEQ ID NO: 21113 - DNA, 260 bp, Unknown; identical to SEQ ID NO: 21105
  Description of Unknown: LeftRegion for integrase B8114 sequence

SEQ ID NO: 21114 - DNA, 260 bp, Unknown
  Description of Unknown: LeftRegion for integrase B8115 sequence
aaattattaaaatgtaaaatgcaaaaaccgcccggtgctaccaacaccgaacggctttacatagattttctcttaccagattgctctgaaagatataaatcagacttagaacacctgaattatatcatctccagagcgtcctggcaaggggcgttatttttatacccattttcacgtaaactactagaggagatgatttcatgaagcagtctacttttccatccatccccctgcgcgctggtatttacatccgcgtcagc

SEQ ID NO: 21115 - DNA, 260 bp, Unknown
  Description of Unknown: LeftRegion for integrase B8116 sequence
cacctgctgaacaatatcgtagatcaaaagctattttagaggatataaaaaagcattcaaattaaaaaaacgccgccctctgcgcgcggatgcagagggcggtgtttccggtctttgtttttaaggatttttaagaaccttatatagtatgatagcacactcttttcagtttgtcactttaaatttgggggaaatgagctatgacaaaaatatccactgatgtgcagcgtgttgcgctgtatattcgcgtcagtaccgaa

SEQ ID NO: 21116 - DNA, 260 bp, Unknown
  Description of Unknown: LeftRegion for integrase B8117 sequence
gacaatatcttaaaaataaaagcccctgtgcgggaacacagagacttttacataattcttacccttccaggctttcagtaccaggaatgatagaacgtggaaatatgcactgctattatatcatttcaaaggcgctctggcaaggggcgtattttttgtactcttttttaatatgttgtagaacaggaagggatgatattatggcaaagcagcttatacgcgtggcattgtatacacgtgtttcttcagatgagcaagta

SEQ ID NO: 21117 - DNA, 260 bp, Unknown; identical to SEQ ID NO: 21112
  Description of Unknown: LeftRegion for integrase B8118 sequence

SEQ ID NO: 21118 - DNA, 260 bp, Unknown
  Description of Unknown: LeftRegion for integrase B8119 sequence
aagcaagtttctgtctaaaatagcaaaaccgcccggtgctaccaacaccgaacggcttcacatagattttctcttacaggctgccctgaaagatataaatcagacttcgaacacctgaattatatcatctccagagcgtcctggcaaggggcgttatttttatacccattttcacgtaaactactagaggagatgatttcatgaagcagtctacttttccatccatccccctgcgcgctggtatttacatccgcgtcagc

SEQ ID NO: 21119 - DNA, 260 bp, Unknown
  Description of Unknown: LeftRegion for integrase B8120 sequence
tccgaagctattttatgattctggcaaataatttttaataaacaaaaaccgcccctgctggcaacaggaacggctttcatgtgttttgcagttgtaagtaaacatactatacacacttcatacatatatagtatagcatatttacttacacctgcaaaggtgtttttttatactttttttaagtttttaaggagaaaactatgattgagagatgtgcaatttatataagagtctccactgcagagcagtccatgaaagga

SEQ ID NO: 21120 - DNA, 260 bp, Unknown
  Description of Unknown: LeftRegion for integrase B8121 sequence
attcattaccagatagaatggctgataaaatggatgctaaaataagtaagtttgaagctagacaaacaaaatggtttgttggagttggagtaggactaataggtgttttattaaaagttttcggtattatttaaattcaatattttctagggtagcacgcctacccttattattttttactttttttaggagatgaaacaatgaaagttgctatttacactagagtttcgagcgctgaacaagcgaacgaaggatattca

SEQ ID NO: 21121 - DNA, 260 bp, Unknown; identical to SEQ ID NO: 21120
  Description of Unknown: LeftRegion for integrase B8122 sequence

SEQ ID NO: 21122 - DNA, 260 bp, Unknown; identical to SEQ ID NO: 21105
  Description of Unknown: LeftRegion for integrase B8123 sequence

SEQ ID NO: 21123 - DNA, 260 bp, Unknown
  Description of Unknown: LeftRegion for integrase B8124 sequence
ttacaaaaaacgggaaggaaattcatgatccaatcttatcaaatccgtcttatcttatctttattcaaaaaaaaagaaaacaactcaatgacatttcgacaaaaaatgcagataaatgaatatagttgaaagcaataaatagacatgatataataggtgtgctgaaacaaagtatacctattattttttatgaggaatttatggagaaaaacaagcatataaataaaattgcagcaatttatattagagtttcaacagac

SEQ ID NO: 21124 - DNA, 260 bp, Unknown; identical to SEQ ID NO: 21112
  Description of Unknown: LeftRegion for integrase B8125 sequence

SEQ ID NO: 21125 - DNA, 260 bp, Unknown
  Description of Unknown: LeftRegion for integrase B8126 sequence
acttatgcaaaaaataggaatgaactgataaattgaaaaaccgcccggctggcaccggacggaatttcattagactatttgctcattccgaaatgaaaagaacgatataatccaaagtcgcatttagattatatcacacttcttttctttttgaaactatgaggggtgtattttttatacccatttagggagaaaaagaaatgaaaagaaaactaaataatgataaaaccatcttaagagtcgcaatttatgtccgggtg

SEQ ID NO: 21126 - DNA, 260 bp, Unknown
  Description of Unknown: LeftRegion for integrase B8127 sequence
attatatatttttgtcaaattttaaaaattaaagttcctcagtattaatttactggggatttttatttgtaaaatattaggaggaattaaaatgtcaggtgttgttattagaaaaagtattagtaaagaagaagaaaataaaattcttagtctacttttaaaaaaagctaaggaagaactaggggaataggaggaatcgtatggataaggttgctatatattgtcgtgaaagtacagaacgtcaagatatttcaacattg

SEQ ID NO: 21127 - DNA, 260 bp, Unknown; identical to SEQ ID NO: 21105
  Description of Unknown: LeftRegion for integrase B8128 sequence

SEQ ID NO: 21128 - DNA, 260 bp, Unknown
  Description of Unknown: LeftRegion for integrase B8129 sequence
caagataaaatatattttatcatcaaataacgaaaaaccgtcccggcggcaaccggaacggcttttacatagattttctgtacaggctgtaagggccaatacgatatagcttagacacctacattgtatcacacctcactgcacctgtacaggtgtatttatacccatttttaataatctgtactaaaggagttgatataatgaataaaagtgacctatcgtcggatgcatctttaagagctgccatctatatccgcgta

SEQ ID NO: 21129 - DNA, 260 bp, Unknown
  Description of Unknown: LeftRegion for integrase B8130 sequence
tccataaaacatatcgagaagaatcaaataaataataaaattaaaaaccgcccctgctggcaacaggaacggctttcatgtgttttgcagttgtaagtaaacatactatacacacttcatacatatatagtatagcatatttacttacacctgcaaaggtgtattttttataccttttttaagtttttaaggagaaaactatgattgagagatgtgcgatttatataagagtctccactgcagagcagtccatgaaagga

SEQ ID NO: 21130 - DNA, 260 bp, Unknown
  Description of Unknown: LeftRegion for integrase B8131 sequence
ccgaagctattttatgattctggcaaataatttttaataaacaaaaaccgcccctgctggcaacaggaacggctttcatgtgttttgcagttgtaagtaaacatactatacacacttcatacatatatagtatagcatatttacttacacctgcaaaggtgttttttttatactttttttaagtttttaaggagaaaactatgattgagagatgtgcaatttatataagagtctccactgcagagcagtccatgaaagga

SEQ ID NO: 21131 - DNA, 260 bp, Unknown
  Description of Unknown: LeftRegion for integrase B8132 sequence
ccgcgcgagttcgatttcgcgccgggcacgatcctgctgcgcgaatggggcgagcgcgaacatcgggtgacagtcaccgccgaggggctgtttgagtaccaggggcgcaacttcaagagcctgacggcggtggcccgccacatcacgggcgcgcactggtcggggccgctgttctttggcctgagcaagggaggtgcgcgatgagcgagattgccagcaccaaggcccgcaagcgctgcgccgtctactgccgggtgtcc

SEQ ID NO: 21132 - DNA, 260 bp, Unknown
  Description of Unknown: LeftRegion for integrase B8133 sequence
gatttataccgacaacggagatattcaacaaatacaataaagtaaaaaccgccaactactgcaatagctgacggtttcctaattccttttgttagacaaaggaactgatttaaacgcacctgtattatagcagattttctatcgtctttcaaagggtttttattttttatacccattttctaagaaaggcggtttgctatatgtctaccacgcatttttactcacattacccaaccatagaatataaaacctgtgcttta

SEQ ID NO: 21133 - DNA, 260 bp, Unknown
  Description of Unknown: LeftRegion for integrase B8134 sequence
tagcatggagggttatagtaccttgattatatataaataaaataaaaaccgccaactactgcaatagctgacggtttcctaattccttttgttagacaaaggaactgatttaaacgcacctgtattatagcagattttctattgtctttcaaagggtttttattttttatacccattttctaagaaaggcggtttgctatatgtctaccacgcatttttactcacattacccaaccatagaatataaaacctgtgcttta

SEQ ID NO: 21134 - DNA, 260 bp, Unknown
  Description of Unknown: LeftRegion for integrase B8135 sequence
atacggggtcttttacgttataataacattaaaaaccgcccctgcgccaacaggaacggttgaggagatatccgaagatatactctgtaaaattagcaaatacattgtatcatcttcggaacagtttaacaatcagaacgtttgttctgttgttggctgttatttttatacccatttttaaaaatacggaggtgcaacatatgaataatttagcaagaaacctagaaaccatgcccttgagagtggctttatacatccgc

SEQ ID NO: 21135 - DNA, 260 bp, Unknown
  Description of Unknown: LeftRegion for integrase B8136 sequence
gatttataccgacaacggagatattcaacaaatacaataaagtaaaaaccgccaactactgcaatagctgacggtttcctaattccttttgttagacaaaggaactgatttaaacgcacctgcattatagcaggttttctattgtctttcaaatggtttttattttttatacccattttctaagaaaggcggtttgctatatgtctaccacgcatttttactcacattacccaaccatagaatataaaacctgtgcttta

SEQ ID NO: 21136 - DNA, 260 bp, Unknown
  Description of Unknown: LeftRegion for integrase B8137 sequence
caaatccagcttttggattatgaaatagttagggccattcagcacttcaatgctgaacggcctttccatagatttctctttttcaagaaacggaagatataatctgtctcgcaaacaaattatatcatttctgttgcgtccttggcaaggggcgtattaattttactcttttttcatatgtttagataggagatgattgaatgaaaaataacttattaagggtagcgctttacatccgtgtatcctcagaagaacaggca

SEQ ID NO: 21137 - DNA, 260 bp, Unknown
  Description of Unknown: LeftRegion for integrase B8138 sequence
tagcatggagggttatagtaccttgattatatataaataaaataaaaaccgccaactactgcaatagctgacggtttcctaattccttttgttagacaaaggaactgatttaaacgcacctgtattatagcagattttctatcgtctttcaaagggtttttattttttatacccattttctaagaaaggcggtttgctatatgtctaccacgcatttttactcacattacccaaccatagaatataaaacctgtgcttta

SEQ ID NO: 21138 - DNA, 260 bp, Unknown
  Description of Unknown: LeftRegion for integrase B8139 sequence
aatttataccgacaacggagatattcaacagatacaataaaacaaaaaccgccaactactgcaatagctgacggtttcctaattccttttgttagacaaaggaactgatttaaacgcacctgtattatagcagattttctattgtctttcaaagggtttttattttttatacccattttctaagaaaggcggtttgctatatgtctaccacgcatttttactcacattacccaaccatagaatataaaacctgtgcttta

SEQ ID NO: 21139 - DNA, 260 bp, Unknown
  Description of Unknown: LeftRegion for integrase B8140 sequence
agcatggagggttatagtaccttgattatatataaataaaacaaaaaccgccaactactgcaaatagctgacggtttcctaattccttttgttagacaaaggaactgatttaaacgcacctgtattatagcagattttctatcgtctttcaaagggtttttattttttatacccattttctaagaaaggcggtttgctatatgtctaccacgcatttttactcacattacccaaccatagaatataaaacctgtgcttta

SEQ ID NO: 21140 - DNA, 260 bp, Unknown
  Description of Unknown: LeftRegion for integrase B8141 sequence
tatgacagttgtatgcaacgtcataatttgcggcagattcttccgtactaagcaaataaaaagctgcccccgcgccaacgggaacagctcctcactatacctgtgatttatgatatagccaattctgaacaaattgattatatcataaatctcctgcaccgtataggtgtattttttataccctttttaggagaattattatgataaacaatgaattgaaaccaaaactcatccgtgtagctctgtatatccgcgtctcc

SEQ ID NO: 21141 - DNA, 260 bp, Unknown
  Description of Unknown: LeftRegion for integrase B8142 sequence
tggacgttttcttaaacctaatgaagtagttcaccatatcaatggcaacaaacaagataatcgcattgaaaatttgagactttttacaaatagcgaacatgttgctttccatgcaatgcagaaaaggcaggtgatgcataatgacgagtataaacaaaacaattagagctgcaatttatactcgtgtttaggtaagcacgatggagcaggtgactgccggatactctctcgaggcgcaacaggaaaaactgaatggctac

SEQ ID NO: 21142 - DNA, 260 bp, Unknown
  Description of Unknown: LeftRegion for integrase B8143 sequence
gatttataccgacaacggagatattcaacaaatacaataaagtaaaaaccgccaactactgcaatagctgacggtttcctaattccttttgttagacaaaggaactgatttaaacgcacctgcattatagcagattttctattgtctttcaaatggtttttattttttatacccattttctaagaaaggcggtttgctatatgtctaccacgcatttttactcacattacccaaccatagaatataaaacctgtgcttta

SEQ ID NO: 21143 - DNA, 260 bp, Unknown
  Description of Unknown: LeftRegion for integrase B8144 sequence
aactgtaacaatatttagtaaatggcgaaagccgtccagtgcttccaacacagaacggctttcacgtagattctcttaccgagcttccctgattgatataatctgtctcgcaagcaaattatatcatttctgatgcgtccttggcaaggggcgtattaattttactctttttttcatatgtttagataggagatgattaaatgaaaaataatttattaagggtagcgctttacatccgtgtatcctcagaagaacaggcg

SEQ ID NO: 21144 - DNA, 260 bp, Unknown
  Description of Unknown: LeftRegion for integrase B8145 sequence
tagtatggagggttatagtaccttgattatatataaataaaacaaaaaccgccaactactgcaatagctgacggtttcctaattccttttgttagacaaaggaactgatttaaacgcacctgtattatagcagattttctattgtctttcaaagggtttttattttttatacccattttctaagaaaggcggtttgctatatgtctaccacacatttttactcacattacccaaccatagaatataaaacctgtgcttta

SEQ ID NO: 21145 - DNA, 260 bp, Unknown
  Description of Unknown: LeftRegion for integrase B8146 sequence
aattggaaggggataaggattcaactgcggcggtgtaaggttatcccaatagagttgattagaagaatgaaaatattggaggtgagattatcaaggcggtaatttatgctcgatactcaagccataaccagcgtgaagaatccattgagggtcaacttcgagagtgccacgactacgctataaagaatggaattgtcattgtggacgagtacattgacagagcaatctcgggcaagaccgataatcgcccaaactttcag

SEQ ID NO: 21146 - DNA, 260 bp, Unknown
  Description of Unknown: LeftRegion for integrase B8147 sequence
tagcatggagggctatagtaccttgattatatataaataaaacaaaaaccgccaactactgcaatagctgacggtttcctaattccttttgttagacaaaggaactgatttaaacgcacctgtattatagcagattttctatcgtctttcaaagggtttttattttttgtacccattttctaagaaaggcggtttgctatatgtctaccacgcatttttactcacattacccaaccatagaatataaaacctgtgcttta

SEQ ID NO: 21147 - DNA, 260 bp, Unknown; identical to SEQ ID NO: 21132
  Description of Unknown: LeftRegion for integrase B8148 sequence

SEQ ID NO: 21148 - DNA, 260 bp, Unknown
  Description of Unknown: LeftRegion for integrase B8149 sequence
tttataccgataacggagatattcaacagatacaataaaaacggaaaccgccaactactgtaatagctgacggtttcctaattccttttgttagacaaaggaactgatttaaacgcacctgtattatagcagattttctattgtctttcaaagggtttttattttttatacccatttttctaagaaaggcggtttgctatatgtctaccacacatttttactcacattacccaaccatagaatataaaacctgtgcttta

SEQ ID NO: 21149 - DNA, 260 bp, Unknown
  Description of Unknown: LeftRegion for integrase B8150 sequence
ggcggcacacagaaaatcatcaaaggagaagattaagtgatggagaaagaaaccgcagaaatgaaataccgcatcggtgagctgattttttatctatacgcggagaaaggcataatcacaccgtcagaatatgaggaattgcgtaacaagctaatagacacctatcacccggtggttggtgaactggagaggaatatgtcatgggaaataagaaagtcactaaaatagacgccacaataaaaatagcctcctttgacgga

SEQ ID NO: 21150 - DNA, 260 bp, Unknown
  Description of Unknown: LeftRegion for integrase B8151 sequence
caattctgcacaagatgctttgcgaaatattttaaaataaacaaaaaccgccaactactgtaatagctgacggtttcctaattccttttgttagacaaaggaactgatttaaacgcactcgtattatagcagattttctattgtctttcaaatggtttttattttttatacctatttttctaagaaaggcgatttgctatatgtctaccacacatttttactcacattacccaaccatagaatataaaacctgtgcttta

SEQ ID NO: 21151 - DNA, 196 bp, Unknown
  Description of Unknown: LeftRegion for integrase B8152 sequence
gttgtcagcagcccgtttcacggtctgcgtgtagttccttgtaaactgacctaaagcgaatgatatagccgtaattgatacctatatcgaccgcgctatcagcggcaagacggacaaccgccccgcctttcaaaagatgatagaggacagcgcaaagcgtcagtttcaagccgtcattgtgtaccgcctcgaccgc

SEQ ID NO: 21152 - DNA, 260 bp, Unknown
  Description of Unknown: LeftRegion for integrase B8153 sequence
tttataccgacaacggagatattcaacagatacaataaaaacaaaaaccgccaactactgcaatagctgacggtttcctaattccttttgttagacaaaggaactgatttaaacgcacctgtattatagcagattttctattgtctttcaaagggtttttattttttatacctatttttctaagaaaggcggtttgctatatgtctaccacgcatttttactcacattacccaaccatagaatataaaacctgtgcttta

SEQ ID NO: 21153 - DNA, 260 bp, Unknown; identical to SEQ ID NO: 21137
  Description of Unknown: LeftRegion for integrase B8154 sequence

SEQ ID NO: 21154 - DNA, 260 bp, Unknown
  Description of Unknown: LeftRegion for integrase B8155 sequence
atttataccgataacggagatattcaacagatacaataaaaacagaaaccgccaactactgtaatagctgacggtttcctaattccttttgttagacaaaggaactgatttaaacgcacctgtattatagcagattttctattgtctttcaaagggtttttatttttatacctatttttctaagaaaggcggtttgctatatgtctactacacatttttactcacattacccaaccatagaatataaaacctgtgcttta

SEQ ID NO: 21155 - DNA, 260 bp, Unknown
  Description of Unknown: LeftRegion for integrase B8156 sequence
cgacaataacgacttttatttttaaggcattattataaagcaaaaaccgccaactactgcaaatagctgacggtttcctaattccttttgttagacaaaggaactgatttaaacgcacctgtattatagcagattttctattgtctttcaaagggtttttattttttatacctatttttctaagaaaggcggtttgctatatgtctaccacacatttttactcacattacccaaccatagaatataaaacctgtgcttta

SEQ ID NO: 21156 - DNA, 260 bp, Unknown; identical to SEQ ID NO: 21142
  Description of Unknown: LeftRegion for integrase B8157 sequence

SEQ ID NO: 21157 - DNA, 260 bp, Unknown; identical to SEQ ID NO: 21133
  Description of Unknown: LeftRegion for integrase B8158 sequence

SEQ ID NO: 21158 - DNA, 260 bp, Unknown
  Description of Unknown: LeftRegion for integrase B8159 sequence
gcttagatacgagttaagcaatcataacaaataaaataaaataaaaaccgccaactactgcaatagctgacggtttcctaattccttttgttagacaaaggaactgatttaaacgcacctgtattatagcagattttctattgtctttcaaatggtttttattttttatacctatttttctaagaaaggcggtttgctatatgtctaccacacatttttactcacattacccaaccatagaatataaaacctgtgcttta

SEQ ID NO: 21159 - DNA, 260 bp, Unknown
  Description of Unknown: LeftRegion for integrase B8160 sequence
cgacaataacgacttttatttttaaggcattattataaagcaaaaaccgccaactactgcaaatagctgacggtttcctaattccttttgttagacaaaggaactgatttaaacgcacctgtattatagcagattttctattgtctttcaaagggtttttattttttatacctatttttctaagaaaggcggtttgctatatgtctaccacgcatttttactcacattacccaaccatagaatataaaacctgtgcttta

SEQ ID NO: 21160 - DNA, 260 bp, Unknown
  Description of Unknown: LeftRegion for integrase B8161 sequence
tagcacggagggttatagtaccttgattatatataaataaaataaaaaccgccaactactgcaatagctgacggtttcctaattccttttgttagacaaaggaactgatttaaacgcacctgtattatagcagattttctattgtctttcaaagggtttttattttttatacccattttctaagaaaggcggtttgctatatgtctaccacgcatttttactcacattacccaaccatagaatataaaacctgtgcttta

SEQ ID NO: 21161 - DNA, 260 bp, Unknown; identical to SEQ ID NO: 21139
  Description of Unknown: LeftRegion for integrase B8162 sequence

SEQ ID NO: 21162 - DNA, 260 bp, Unknown
  Description of Unknown: LeftRegion for integrase B8163 sequence
gaaatcatcagtcttttaaaacaaattgcagagaaataattgcgcgggcgcaaatgaaaaaagctgctcccgcgccaacgggaacagcttctcactataccagtgatttatgatatagccaattctgaacaaattgattatatcataaatctcctgcaccgtataggtgtattttttataccctttttaggagaattattatgataaacaatgaattgaaaccaaaactcatccgtgtagctttgtatatacgtgtttcc

SEQ ID NO: 21163 - DNA, 260 bp, Unknown
  Description of Unknown: LeftRegion for integrase B8164 sequence
tagcatggagggttatagtaccttgattatatataaataaaacaaaaaccgccaactactgcaatagctgacggtttcctaattccttttgttagacaaaggaactgatttaaacgcacctgtattatagcagattttctatcgtctttcaaagggtttttattttttatacccattttctaagaaaggcggtttgctatatgtctaccacgcatttttactcacattacccaaccatagaatataaaacctgtgcttta

SEQ ID NO: 21164 - DNA, 260 bp, Unknown
  Description of Unknown: LeftRegion for integrase B8165 sequence
tagcatggagggttatagtaccttgattatatataaataaaacaaaaaccgccaactactgcaatagctgacggtttcctaattccttttgttaggcaaaggaactgatttaaacgcacctgtattatagcagattttctatcgtctttcaaagggtttttattttttgtacccattttctaagaaaggcggtttgctatatgtctaccacgcatttttactcacattacccaaccatagaatataaaacctgtgcttta

SEQ ID NO: 21165 - DNA, 260 bp, Unknown
  Description of Unknown: LeftRegion for integrase B8166 sequence
aaattacaaaaaatggaaaaattatgacagagccgacattatcaaaccgcgattatcttaatttcatgcgaaaaaagagaaagcagatcaatgagttttcgacaaaaatttccaaagccgagggtagttgaaaaacacaaaaatgcatgttaaaataggcacatcaaaccgatgtgtctattttattttagggggcagagatgagcaaaaaaaaattaaaaacagccgcaatttatgtccgtgtttcgacagatgcacag

SEQ ID NO: 21166 - DNA, 260 bp, Unknown
  Description of Unknown: LeftRegion for integrase B8167 sequence
aaattctttattttttataattgtcaaacaattcatactttatttacaacttttgtatatattgtcaaataatgtaatattaattgacatatgttttagatgtacataccaattaagcaaggaaacgtaccaattaagcaataatatagcattttagtagaaaataagtttgttacattttacagaaagaaggcagcactatgtacaacaacacaccaaacaaaataattagagtagccacatatttacgtgtttcaagc

SEQ ID NO: 21167 - DNA, 260 bp, Unknown
  Description of Unknown: LeftRegion for integrase B8168 sequence
atttataccgacaacggagatattcaacagatacaataaaacaaaaaccgccaactactgcaatagctgacggtttcctaattccttttgttagacaaaggaactgatttaaacgcacctgtattatagcagattttctattgtctttcaaagggtttttattttttatacctatttttctaagaaaggcggtttgctatatgtctaccacacatttttactcacattacccaaccatagaatataaaacctgtgcttta

SEQ ID NO: 21168 - DNA, 260 bp, Unknown
  Description of Unknown: LeftRegion for integrase B8169 sequence
gtatggagggatatagtacctttattatgtataaataaaacaaaaaccgccaactactgcaaatagctgacggtttcctaattccttttgttagacaaaggaactgatttaaacgcacctgtattatagcagattttctattgtctttcaaagggtttttattttttatacccatttttctaagaaaggcggtttgctatatgtctaccacacatttttactcacattacccaaccatagaatataaaacctgtgcttta

SEQ ID NO: 21169 - DNA, 260 bp, Unknown
  Description of Unknown: LeftRegion for integrase B8170 sequence
agcatggagggttatagtaccttgattatatataaataaaacaaaaaccgccaactactgcaaatagctgacggtttcctaattccttttgttagacaaaggaactgatttaaacgcacctgtattatagcagattttctatcgtctttcaaagggtttttattttttatacccattttctaagaaaggcggtttgctatatgtctaccacgcacttttactcacattacccaaccatagaatataaaacctgtgcttta

SEQ ID NO: 21170 - DNA, 260 bp, Unknown
  Description of Unknown: LeftRegion for integrase B8171 sequence
gatttataccgacaacggagatattcaacaaatacaataaagtaaaaaccgccaactactgcaatagctgacggtttcctaattccttttgttagacaaaggaactgatttaaacgcacctgtattatagcagattttctattgtctttcaaagggtttttattttttatacccattttctaagaaaggcggtttgctatatgtctaccacacatttttactcacattacccaaccatagaatataaagcctgtgcttta

SEQ ID NO: 21171 - DNA, 260 bp, Unknown
  Description of Unknown: LeftRegion for integrase B8172 sequence
tgatttataccgacaacggagatattcaacaaatacaataaaacaaaaccgccaactactgcaatagctgacggtttcctaattccttttgttagacaaaggaactgatttaaacgcacctgtattatagcagattttctatcgtctttcaaagggtttttattttttatacccattttctaagaaaggcggtttgctatatgtctaccacacatttttactcacattacccaaccatagaatataaaacctgtgcttta

SEQ ID NO: 21172 - DNA, 260 bp, Unknown
  Description of Unknown: LeftRegion for integrase B8173 sequence
cgacaataacgacttttatttttaaggcattattataaagcaaaaaccgccaactactgcaaatagctgacggtttcctaattccttttgctagacaaaggaactgatttaaacgcacctgtattatagcagattttctattgtctttcaaagggtttttattttttatacctatttttctaagaagggcggtttgctatatgtctaccacacatttttactcacattacccaaccatagaatataaaacctgtgcttta

SEQ ID NO: 21173 - DNA, 260 bp, Unknown; identical to SEQ ID NO: 21142
  Description of Unknown: LeftRegion for integrase B8174 sequence

SEQ ID NO: 21174 - DNA, 260 bp, Unknown
  Description of Unknown: LeftRegion for integrase B8175 sequence
aagaagcagattatgctatcgcaaaccttgactaactaaataaagaaccgcccagtgttggcgcaccagacggtttaatatatatccgaagatatatcaaaaataccatttatattgtatcatcttcggagcagccttgcaagggataatctccctggctgttatttttatacccattttaagaatacggaggtgtatttatgaataatttagcccgaaacctagaatctatgccctttagagttgctttgtatatccgt

SEQ ID NO: 21175 - DNA, 260 bp, Unknown; identical to SEQ ID NO: 21139
  Description of Unknown: LeftRegion for integrase B8176 sequence

SEQ ID NO: 21176 - DNA, 260 bp, Unknown
  Description of Unknown: LeftRegion for integrase B8177 sequence
tgaaatgtaatgctttgtaaattactaaaagccattcagtgttttcacaccaaacggctttcaaatagatttttctcttgctggtcgttccagaagatataatccgtctcgcaaacaaattatatcatttctgatgcgtccttggcaaggggcgtattaattttactcttttttcatatattcagataggagatgattgaatgaaaaataacttattaagggtagcgctttacatccgtgtatcctcagaagaacaggca

SEQ ID NO: 21177 - DNA, 260 bp, Unknown
  Description of Unknown: LeftRegion for integrase B8178 sequence
tttacgcgtgttccggttgctcgcgagtataacgaaacactagaaattctgaaatctgaaaatgctatgtaaaaagaaaagtcccagcagtgcagggaacactgccgggactttgtgcaactattgttaatcataccagatacaacatatcgtctgccgcttgattatatcatatgcaggcagaaaaagaaaggaaaattatggcaaaaaaatctttttctatcattgatggcgcttcttgtcgtgtagctctgtatatc

SEQ ID NO: 21178 - DNA, 260 bp, Unknown
  Description of Unknown: LeftRegion for integrase B8179 sequence
tttataccgataacggagatattcaacagatacaataaaaacagaaaccgccaactactgtaatagctgacggtttcctaattccttttgttagacaaaggaactgatttaaacgcacctgtattatagcagattttctatcgtctttcaaagggtttttattttttatacctatttttctaagaaaggcggtttgctatatgtctaccacgcatttttactcacattacccaaccatagaatataaaacctgtgcttta

SEQ ID NO: 21179 - DNA, 260 bp, Unknown
  Description of Unknown: LeftRegion for integrase B8180 sequence
aactgtaacaatatttagtaaatggcgaaagccgtccagtgcttccaacacagaacggctttcacgtagattctcttaccgagcttccttgattgatataatctgtctcgcaagcaaattatatcatttctgatgcgtccttggcaaggggcgtattaattttactctttttttcatatgtttagataggagatgattaaatgaaaaataatttattaagggtagcgctttacatccgtgtatcctcagaagaacaggcg

SEQ ID NO: 21180 - DNA, 260 bp, Unknown
  Description of Unknown: LeftRegion for integrase B8181 sequence
tttataccgataacggagatattcaacagatacaataaaaacagaaaccgccaactactgtaatagctgacggtttcctaattccttttgttagacaaaggaactgatttaaacgcacctgtattatagcagattttctattgtctttcaaagggtttttattttttatacccatttttctaagaaaggcggtttgctatatgtctaccacacatttttactcacattacccgaccatagaatataaaacctgtgcttta

SEQ ID NO: 21181 - DNA, 260 bp, Unknown; identical to SEQ ID NO: 19972
  Description of Unknown: LeftRegion for integrase B8182 sequence

SEQ ID NO: 21182 - DNA, 260 bp, Unknown; identical to SEQ ID NO: 19897
  Description of Unknown: LeftRegion for integrase B8183 sequence

SEQ ID NO: 21183 - DNA, 260 bp, Unknown
  Description of Unknown: LeftRegion for integrase B8184 sequence
aaacaactactcacaatgagtcacaaatggaggaagtaccgcaaaataatcaaaatcaacgtgtagatcgtagaagttttaacgaaccattgccacgttcaactacaaatggagtggcaaatgaggcgtgggacggaaaaatataatatttcatgggtagctcgcctacccttattatttttttacttttttaaggggtgatgaattatgaacgtagctatttacgttcgtgtcaggtcagtacattagaacaaaaagag

SEQ ID NO: 21184 - DNA, 260 bp, Unknown
  Description of Unknown: LeftRegion for integrase B8185 sequence
ggaaatactaataaagaacaaacgcaacaatctgcacctagagaacatagtggcggacacccttctgctttcggtggcggagatgttcctgtaggtactgaaaaagttgatgatcaaggagaaagttatatagacgcaacaggtgaataaaaacgggtagcttgcctacccttattatttttttacttttttaaggggtgatgaattatgaacgtagctatttacgttcgtgtcaggtcagtacattagagcaaaaagaa

SEQ ID NO: 21185 - DNA, 260 bp, Unknown
  Description of Unknown: LeftRegion for integrase B8186 sequence
aaggcgctttggcgctgaagatggtgatccagtgtaagccgccggaggaaacaattctctataaagaataacctgcaaccaagtaaaaaaccgccccggtgctggaacaccgaagcggttcaaagggtagtaagttttcgacggcctactaccctttcattataacgtataaaagtgaataatggaaggagattttcaaaatgtccgaactacaaggaaagcgcatcctcacctacctgcgcgtctccacggaggagcag

SEQ ID NO: 21186 - DNA, 260 bp, Unknown
  Description of Unknown: LeftRegion for integrase B8187 sequence
aaaatggcccgcaagcacgggctcgacttcatccttgaccccatgaagcagcacatcaagcccaagctatcagaacatatagacggaatcgagacctacacagacgaactctatgctgccgaagatatcgctgcccctgcaccccgcgacggcaatgtgtgacccgtgcccgattcgggcacaggggaaggaggaacaccatgaagaaagatacccctgtgggtgagagcctacccctgcgggcggctctatacccccgc

SEQ ID NO: 21187 - DNA, 260 bp, Unknown
  Description of Unknown: LeftRegion for integrase B8188 sequence
accgggcaaaactgcgtatactgatacggtcatgttcgattccgagatacatgatgactatcatataagcagttatgacagtatatcttttaaattagacatgtgtcctacaacgacttatgacaacatctactcaggcgagatcactttaactaaatagcaacaacgacaacaacaaaacaacgggaggaaaattgaatatgaaaaggatattacgggctgcgctgtatatccgcgtatcgacagaagagcaggctaaa

SEQ ID NO: 21188 - DNA, 260 bp, Unknown
  Description of Unknown: LeftRegion for integrase B8189 sequence
ttaattatcgatatttactatatatatttccattgataaatattggttatttcttatattgggcttcacaaggaatacaagcccactcgttcgtattcaattaaaaacacgccctcccctcacagaatggcgtgctaagcaataaacaataaggcttatttgctatgcctattttaacaattaataggatgtgattcaatatgaaaaaagccggtatttatattcgagtttcaacaccggaacaagaaaaaaacggatac

SEQ ID NO: 21189 - DNA, 260 bp, Unknown
  Description of Unknown: LeftRegion for integrase B8190 sequence
acgactttgagaaccgcaaggagttggagggggataaggattcaactgcggcagtctaagatcgtaccaatcgaattacttagaagaaaagaagcattggaggtgagactatcaaagcggtaatctatgctcgctattcgagccataaccaaagagaggaatccattgagggacagcttcgagagtgccatgagtttgccttgaaaaacggctttgtcgtggtgaatgaatatatagatcgtgcgatttcgggcaagacc

SEQ ID NO: 21190 - DNA, 260 bp, Unknown
  Description of Unknown: LeftRegion for integrase B8191 sequence
gagattatgaacaggcacgtaaagatagcgagaaagtttggaacgatcctaacgctcatgtaggaggtccacgttgggttggcaaaaacgaaggatatgagagttgggcaaaaagacaacaagaagttcaaaactcaatagctgaatagttgtatgggtacattagtacccttattattttttacttttttagggaggtgatgaattatgaacgtaggtatttacgttcgtgtcaggtcagtacattagaacaaaaagaa

SEQ ID NO: 21191 - DNA, 260 bp, Unknown
  Description of Unknown: LeftRegion for integrase B8192 sequence
gaaacactaataaagaacaaacacaacaatctgcgcctagagaacatagtggtggacacccttctgctttcggtggtggcaatgttcctgtaggtacagaaaaagttgataatcaaggagaaagttatatagacgcaacaggtgaataaaaaacgggtagcttgcctacccttattatttttttacttttttaaggggtgatgaattatgaacgtagctatttacgttcgtgtcaggtcagtacattagaacaaaaagaa

SEQ ID NO: 21192 - DNA, 260 bp, Unknown
  Description of Unknown: LeftRegion for integrase B8193 sequence
aaaatggcccgcaagcacgggctcgacttcatccttgaccccatgaagcagcacatcaagcccaagctatcagaacatatagacggaatcgagacctacacagacgaactctatgctgccgaagatatcgctgcccctgcaccccgcgatggcaatgtgtgacccgtgcccgattcgggcacgggggaaggaggaacaccatgaagaaagatacccctgtgggtgagagcctacccctacgggcggctctatacccccgc

SEQ ID NO: 21193 - DNA, 260 bp, Unknown
  Description of Unknown: LeftRegion for integrase B8194 sequence
gaagcaattcgtgaccagctcgtttctgattatggagaacagtttaccaaagaagaagctgactatgcaatagaacatcttgaataatatattattgtattccagaaaattatccccgccccggtgtcaaccggggcggagttataactgtgccagacatttttatccatgaggattaatattatactataggtgataatatgaaagataagataatacgctgtgcaatctatgaccgcgtctcgacagagggtcaggtg

SEQ ID NO: 21194 - DNA, 260 bp, Unknown
  Description of Unknown: LeftRegion for integrase B8195 sequence
ggacttgacccaaacttcgtacgacataatgacaacatggtaaaagaatggcaaaatcaaatgcgagaacacaacgaaaactttaatcctgaatctggtggagatttgtataacgtcgaaaccggtaactacgttgatgatgaataaaattatggggtagtccacctacccttattatttttttacttttttaaggggtgatgaattatgaacgtagctatttacgttcgtgtcaggtcagtacattagaacaaaaagaa

SEQ ID NO: 21195 - DNA, 260 bp, Unknown
  Description of Unknown: LeftRegion for integrase B8196 sequence
gcaaaactgcgtatactgatacggtcatgttcgattccgagatacatgatgactatcatataagcagttacgacagtatatcttttaaattagacatgtgtcctacaacgacttatgacaatatctactcaaatgagatcactttaactaaataacaacaacgacaacaaagcaacaaaacaacgggaggaaaattgaatatgaaaaggatattacgggctgcgctgtatatccgcgtatcgacggaagagcaggctaaa

SEQ ID NO: 21196 - DNA, 260 bp, Unknown
  Description of Unknown: LeftRegion for integrase B8197 sequence
gtttacgatcgttttagaacataaaaagaacacgatctgcagaccgtgttcaaaaaagcataaatatttatataaaaagtccccgccgtgctgcaacacggtcggggcaaactagcgcaagtgaaatcagatacaaaccccactgcattttttattttagcataaaacagtgggaaataaaaggaaattaggtggttcaaatgaaaaaagctaaatctgaaacaactcttgtccgtgcagcgttatatatacgtgtgtcc

SEQ ID NO: 21197 - DNA, 260 bp, Unknown
  Description of Unknown: LeftRegion for integrase B8198 sequence
gcaaaactgcgtatactgatacggtcatgttcgattctgagatacatgatgactatcatataagcagttatgacagtatatcttttaaattagacatgtgtcctacaacgacttatgacaacatctactcaggcgagatcgctttaactaaataacaacaacgacaacaaagcaacaaaacaacgggaggaaaattgaatatgaaaaggatattacgggctgcgctgtatatccgcgtatcgacagaagagcaggctaaa

SEQ ID NO: 21198 - DNA, 260 bp, Unknown
  Description of Unknown: LeftRegion for integrase B8199 sequence
atgcagctcctacaattgttcccttcgttcagacggccggcgttggaattttcaagaagctgcagataaagctttctgacctacttatataagttgcaccggtgcaatttcatagtggccgccctgactccagtcggggcggctctaaaataaattgcatttatatcccaccagaataataattatatataggtgataacatgaaagaaaaaataatacgttgcgcaatctatgaccgtgtatcaacggacgggcaggtc

SEQ ID NO: 21199 - DNA, 260 bp, Unknown
  Description of Unknown: LeftRegion for integrase B8200 sequence
aaacaactactcacaatgagtcacaaatggagggagtaccgcaaaataatcaaaatcaacgtgtagatcgtagaagttttaacgaaccattgccacgttcaactacaaatggagtggcaaatgaggcgtgggacggaaaaatataatatttcatgggtagctcgcctacccttattatttttttacttttttaaggggtgatgaattatgaacgtagctatttacgttcgtgtcaggtcagtacattagaacaaaaagaa

SEQ ID NO: 21200 - DNA, 260 bp, Unknown
  Description of Unknown: LeftRegion for integrase B8201 sequence
gtttatgatcgttttagaacataaaaagaacacgatctgcagaccgtgttcaaaaaagcataaatatttatataaaaagtccccgccgtgctgcaacacggtcggggcaaactagcgcaagtgaaatcagatacaaaccccactgcattttttattttagcataaaacagtgggaaataaaaggaaattaggtggttcaaatgaaaaaagctaaatctgaaacaactcttgtccgtgcagcgttatatatacgtgtgtcc

SEQ ID NO: 21201 - DNA, 260 bp, Unknown
  Description of Unknown: LeftRegion for integrase B8202 sequence
gacttgacccaaacttcgtacgacataatgacaacatggtaaaagaatggcaaaatcaaatgcgagaacacaacgaaaactttaatcctgaatctggtggagatttgtataacgtcgaaaccggtaactacgttgatgatgaataaaattatgggggtagtccacctacccttattatttttttacttttttaaggggtgatgaattatgaacgtagctatttacgttcgtgtcaggtcagtacattagaacaaaaagaa

SEQ ID NO: 21202 - DNA, 260 bp, Unknown
  Description of Unknown: LeftRegion for integrase B8203 sequence
aactgcgtatactgatacggtcatgttcgattccgagatacatgatgactatcatataagcagttatgacagtatatcttttaaattagatatgtgtcctacaacgacttatgacaatatctattcaaatgagatcactttaactaaataataataacaacgacaacgacaacaacaaaacaacgggaggaaaattgaatatgaaaaggatattacgggctgcgctgtatatccgcgtatcgacggaagagcaggctaaa

SEQ ID NO: 21203 - DNA, 260 bp, Unknown
  Description of Unknown: LeftRegion for integrase B8204 sequence
aactgcgtatactgatacggtcatgttcgattccgagatacatgatgactatcatataagcagttatgacagtatatcttttaaattagatatgtgtcctacaacgacttatgacaatatctattcaaatgagatcactttaactaaataataataacaacgacaacgacaacaacaaaacaacgggaggaaaattgaatatgaaaaggatattacgggctgcgctgtatatccgcgtatcgacagaagagcaggctaaa

SEQ ID NO: 21204 - DNA, 260 bp, Unknown
  Description of Unknown: LeftRegion for integrase B8205 sequence
gggcaaggtagtatataccgatgacactatatatgacgatatgctgcatgatgattatcatatcggcagctatgacagtgtgacatttaagttagacatgtaccctatgacatcctatgacagcatctactcaggtgagatcactttaactaaataacgacaacaacgacaacaacaaaacaacgggaggaaaattgaatatgaaaaggatattacgggctgcgctgtatatccgcgtatcgacagaagagcaggctaaa

SEQ ID NO: 21205 - DNA, 260 bp, Unknown
  Description of Unknown: LeftRegion for integrase B8206 sequence
attaaaaataggctattacaagtaaaaaccgcccggtgcttccaacaccgaacagccaaacatatacccgaagatatacactatactaacaaaaatattgtatcatcttcggagcagccttgcaagcggaacaccagttcctcgctggctgttatttttatacccatttttacgtatagaattaagaaggagatggtacaatgaacaaagttatccgctgtgcctgctacgtccgggtttccacagacaaccagctagaa

SEQ ID NO: 21206 - DNA, 260 bp, Unknown; identical to SEQ ID NO: 21193
  Description of Unknown: LeftRegion for integrase B8207 sequence

SEQ ID NO: 21207 - DNA, 260 bp, Unknown
  Description of Unknown: LeftRegion for integrase B8208 sequence
ctgggttatatagcgtatgctctggatattggcaccgccgacgacgtcgtcagtgcggacggcggcgaattgggcgggtggtatatttggagctcggacatacagggcgggggaacagctatgcacttcattttctccgataagcgctaagagtcgatgtgtgacccgtgcccgattcgggcaccgaaaggaggaacaccatgaagaaagatacccctgcgggtgagagcttgcccttgcgggcagctctgtacccccgc

SEQ ID NO: 21208 - DNA, 260 bp, Unknown
  Description of Unknown: LeftRegion for integrase B8209 sequence
gattatgaacaggcacgtaaagatagtgagaaagtttggaacgatccaaatgcccatgtaggaggtccacgttgggttggcaaaaacgaaggatatgaaagttgggctaaacgacaacaagaagtacaaaatacaccagcacaataattttacgggtagcttgcctacccttattatttttttatcttttttaaggggtgatgaattatgaacgtagctatttacgttcgtgtcaggtcagtacattagaacaaaaagaa

SEQ ID NO: 21209 - DNA, 260 bp, Unknown
  Description of Unknown: LeftRegion for integrase B8210 sequence
catataaaaaaatgaaggaacaaagaattaaagatatagcaaatgaatacaaaaacaggattccacagaaactttatgacgctctttatgcatatgagattgaaataactgattaacttcaagttgttgacaaccacatataacggagttaaaatgtagttgtcctagaatcaggaacaacatagaggaggccatcatgaatgaagatattaagagctggtttatttagtcgcgtctcaacggaagaccagaagcgccac

SEQ ID NO: 21210 - DNA, 260 bp, Unknown
  Description of Unknown: LeftRegion for integrase B8211 sequence
taaagttaatggaagaaaagaattttttaaagttaatatcgatgaaattaaggataaaattttatcagaacacaataatacagtccaatttacagacgaaccaaaagctgtacaatacagagaaactttaaggttaacttcacaataaaattatgggtagcatgtctacccttattatttttttacttttttagggagtgatgaattatgaacgtagctatttacgttcgtgtcaggtcagtacgctagagcaaaaagaa

SEQ ID NO: 21211 - DNA, 260 bp, Unknown
  Description of Unknown: LeftRegion for integrase B8212 sequence
ttatgatcgttttagaacataaaaagaacacgatctgcagaccgtgttcaaaaaaaagcataaatatttatataaaaagtccccgccgtgctgcaacacggtcggggcaaactagcgcaagtgaaatcagatacaaaccccactgcattttttattttagcataaaacagtgggaaataaaaggaaattaggtggatcaaatgaaaaaagctaaatctgaaacaactcttgtccgtgcagcgttatatatacgtgtgtcc

SEQ ID NO: 21212 - DNA, 260 bp, Unknown
  Description of Unknown: LeftRegion for integrase B8213 sequence
ggaaatactaataaagaacaaacgcaacaatctgcacctagagaacatagtggcggacacccttctgctttcggtggcggagatgttcctgtaggtactgaaaaagttgatgatcaaggagaaagttatatagacgcaacaggtgaataaaaacgggtagcttgcctacccttattatttttttacttttttaaggggtgatgaattatgaacgtagctatttacgttcgtgtcaggtcagtacattagaacaaaaagaa

SEQ ID NO: 21213 - DNA, 260 bp, Unknown
  Description of Unknown: LeftRegion for integrase B8214 sequence
agattatgaacaagcacgtaaagaaagcgaaaaggtttgggacaatccaaacgcacatgtaggtggtccatattgggtaggaaaaaatgaaggttatgaaagttgggctaaacgacaacaagaagtacaaaatacaccagcagaataattttatgggtagcacgcctacccttattattttttactttttttagggagtgatgaattatgaacgtagctatttacgttcgtgtcaggtcagtacattagaacaaaaagag

SEQ ID NO: 21214 - DNA, 260 bp, Unknown
  Description of Unknown: LeftRegion for integrase B8215 sequence
gaaatactaataaagaacaaactcaacaatctgcacctagagaacatagtggcggacacccttctgctttcggtggcggagatgttcctgtaggtactgaaaaagttgatgatcaaggagaaagttatatagacgcaacaggtgaataaaaaatgggtagcatgcctacccttattatttttttacttttttaaggggtgatgaattatgaacgtagctatttacgttcgtgtcaggtcagtacattagaacaaaaagaa

SEQ ID NO: 21215 - DNA, 260 bp, Unknown; identical to SEQ ID NO: 21195
  Description of Unknown: LeftRegion for integrase B8216 sequence

SEQ ID NO: 21216 - DNA, 260 bp, Unknown
  Description of Unknown: LeftRegion for integrase B8217 sequence
acttacagaaaacattcaaaataatccggataaatatcaacatataggtggtgggcctggtatgtcattatctagtcctaaccaatcgtatgatagtttcaaacaagacgtaactaaagcaagaaatgagtcacaatcattacaacaataatttatgggtacctagtacccttattatttttttatctttttagggagtgatgaattatgaacgtagctatttacgttcgtgtcaggtcagtacattagaacaaaaagag

SEQ ID NO: 21217 - DNA, 260 bp, Unknown
  Description of Unknown: LeftRegion for integrase B8218 sequence
aagtatgccatttcggattcgcttaatttttcaatcaattctagcaattcttgtctcatacgacaaatacctcctaatgttatgagaacattatagaaagggtatgcaagttaaagcaacggtaaatccttctaattaaggaggtgatgcttgacaaatatagcaactagcgctagtacatcaaagaaggagattgggatatgacttttttagtagagaatccgtatgacagagtgctgagagcagcgttgtacgaacgt

SEQ ID NO: 21218 - DNA, 260 bp, Unknown
  Description of Unknown: LeftRegion for integrase B8219 sequence
ggtctgataacctctgttgcaccgggcaaaactgcgtatactgatacggtcatgttcgattccgagatacatgatgactatcatataagcagttacgacagtatatcttttaaattagacatgtgtcctacaacgacttatgacaatatctactcaaatgagatcactttaactaaataacaacgggaggaaaattgaatatgaaaaggatattacgggctgcgctgtatatccgcgtatcgacagaagagcaggctaaa

SEQ ID NO: 21219 - DNA, 260 bp, Unknown; identical to SEQ ID NO: 21194
  Description of Unknown: LeftRegion for integrase B8220 sequence

SEQ ID NO: 21220 - DNA, 260 bp, Unknown
  Description of Unknown: LeftRegion for integrase B8221 sequence
gaggcaattcgtgatcagcttgtctctgattatggagaacagtttacccaagaagaagctgactatgcaatagaacatcttgaataatatattattgtattccagaaaattatccccgccccggtgtcaaccggggcggagttataactgtgccagacatttttatccacgaggattaatattatactataggtgataatatgaaagaaaagataatacgctgtgccatctatgaccgagtctcaacggatgggcaggtg

SEQ ID NO: 21221 - DNA, 260 bp, Unknown
  Description of Unknown: LeftRegion for integrase B8222 sequence
aaacaactactcacaatgagtcacaaatggagaaagtaccgcaaaataatcaaaatcaaggtgtagatcgtagaagttttaaagaaccattaccacgttcaactacaaatggagtggcaaatgaggcgtgggacggaaaaatataataattcatgggtagcttgcctacccttattatttttttacttttttaaggggtgatgaattatgaacgtagctatttacgttcgtgtcaggtcagtacattagaacaaaaagaa

SEQ ID NO: 21222 - DNA, 260 bp, Unknown
  Description of Unknown: LeftRegion for integrase B8223 sequence
agtttatgatcgttttagaacataaaaagaacacgatctgcagaccgtgttcaaaaatcataaatatttatataaaaagtccccgccgtgctgcaacacggtcggggcaaactagcgcaagtgaaatcagatacaaaccccactgcattttttattttagcataaaacagtgggaaataaaaggaaattaggtggttcaaatgaaaaaagctaaatctgaaacaactcttgtccgtgcagcgttatatatacgtgtgtcc

SEQ ID NO: 21223 - DNA, 260 bp, Unknown
  Description of Unknown: LeftRegion for integrase B8224 sequence
ttgaataaggtgctattataccaatatataagggtttaacccctaaacattattgatattcgctattcatctacgaatagtaaaccgtgtaatcttataattataagtggcacctattttatataggtgtctttttttatgcaattcagggtacaccaccgtacccttattatttttaccttttttgaggaggaatgttaatgaaagtcgcaatatacacaagagtaagtacgttagagcaagcaaacgaaggttattct

SEQ ID NO: 21224 - DNA, 260 bp, Unknown
  Description of Unknown: LeftRegion for integrase B8225 sequence
cctattgaaaatttacaaattaaaactaatgaaatatttaatgtataaattaatgttaaaacattgaaataattaatccgatttattaaaagaatgtctgaaaaattgtattaaaacattaacaatataaatatttataggtgttctattttgggacaccttttataaatgattaaaaaatatagataaggagatgacaaatgttaagagtagcattatatataagagtaagtacagatgagcaagccctacatggagat

SEQ ID NO: 21225 - DNA, 260 bp, Unknown; identical to SEQ ID NO: 21190
  Description of Unknown: LeftRegion for integrase B8226 sequence

SEQ ID NO: 21226 - DNA, 260 bp, Unknown
  Description of Unknown: LeftRegion for integrase B8227 sequence
gccgggcaaggtagtatataccgatgatacgatatatgacgatatgctgcatgatgattatcatatcggcagctatgacagtgtgacatttaagttagacatgtaccctatgacatcctatgacagcatctactcaggtgagatcactttaactaaataacaacaacgacaacaacaaaacaacgggaggaaaattgaatatgaaaaggatattacgggctgcgctgtatatccgagtgtccacggaagaacaggctaaa

SEQ ID NO: 21227 - DNA, 260 bp, Unknown
  Description of Unknown: LeftRegion for integrase B8228 sequence
ccatgtatgaagaattgcaagaaaaatacaaccagcttgaaagtgaatataacgccttgaaagcagaaaaataataaaaatcccggcggtgcggggacactgccgggatttctgcaacgttttgtataatcataccagatacaacataccgtctgcattgttattgtagcatatgcagacaggaaaagaaaggaaatagcatgataaaaaaagaactttcttctgccggtccgcttcgtgttgcgctttatatccgtgtt

SEQ ID NO: 21228 - DNA, 260 bp, Unknown
  Description of Unknown: LeftRegion for integrase B8229 sequence
gccgggcaaggtagtatataccgatgatacgatatatgacgatatgctgcatgatgattatcatatcggcagctatgacagtgtgacatttaagttagacatgtaccctatgacatcctatgacagcatctactcaggtgagatcactttaactaaatagcaacaacgacaacaacaaaacaacgggaggaaaattgaatatgaaaaggatattacgggccgcgctgtatatccgagtgtccacggaagaacaggctaaa

SEQ ID NO: 21229 - DNA, 260 bp, Unknown
  Description of Unknown: LeftRegion for integrase B8230 sequence
gaaaacactaataaagaacaaacacaacaatctgcacctagagaacatagtggcggacacccttctgctttcggtggtggcgatgttcctgtaggtacagaaaaggttgataatcaaggagaaagttatatagacgcaacaggtgaataaaaacgggtagcttgcctacccttattatttttttacttttttaaggggtgatgaattatgaacgtagctatttacgttcgtgtcaggttagtacattagaacaaaaagaa

SEQ ID NO: 21230 - DNA, 260 bp, Unknown
  Description of Unknown: LeftRegion for integrase B8231 sequence
tgacaccttcacaaatagatgaatggaacaaaacaaaaccaactactcacgatgaatcacaaatggaacaagtaccacaagaccattctggtggccacccctcaattttcggaacagatacgccaccaaaaaataattaaataaatttatatgggtagcatgtctacccatattaatttttttacttttttagggaggtgatgaattatgaacgtagctatttacgttcgtgtcaggtcagtacattagaacaaaaagaa

SEQ ID NO: 21231 - DNA, 260 bp, Unknown
  Description of Unknown: LeftRegion for integrase B8232 sequence
ccatgtatgaagaattgcaagaaaaatacaatcagcttgaaagcgaatataatgctttgaaatcagaaaaataataaaaatcccggcggtgcggggacactgccgggatttctgcaacgttttgtataatcataccagatacaacataccgtctgcattgtcattgtaacatatgcaggcaggaaaagaaaggaaatagcatgataaaaaaagaactttctacgggtccgcttcgtgttgcgctttatatccgtgtttcc

SEQ ID NO: 21232 - DNA, 260 bp, Unknown
  Description of Unknown: LeftRegion for integrase B8233 sequence
actctttaaacttccataaaatgtaaaaccgcccggtgctggtaacaccgaacggctttacatagattttctcttgccggatgcccggaagatataaatcagactttgaacacctgaattatatcatctccgaagcgtcctggcaaggggtgttctttttgtacctatttcttcgtacactatcacaaggagatgattctatgttgaaaacaccacctgcctgccgcgctggtatctatatccgtgtcagcactgaagag

SEQ ID NO: 21233 - DNA, 260 bp, Unknown
  Description of Unknown: LeftRegion for integrase B8234 sequence
ccatgtatgaagaattgcaagaaaaatacaatcagcttgaaagtgaatataatgctttgaaatcagagaaataataaaaatcccggcggtgcggggacactgccgggatttctgcaacgttttgtataatcataccagatacaacataccgtctgcattgttattgtagcatatgcagacaggaaaagaaaggaaatagcatgataaaaaaagaactttctacgggtccgcttcgtgttgcactttatatccgtgtttcc

SEQ ID NO: 21234 - DNA, 260 bp, Unknown
  Description of Unknown: LeftRegion for integrase B8235 sequence
gaaatgacaatatcgtaaaaataaaagcccctgtgcgggaacacagagacttttacataattcttacccttccaggctttcagtaccaggaatgatagaacgtggaaatatgcactgctattatatcatttcttggacgcgctggcaaggggcgtattttttgtacccaaaaatcatactttatctaagaggtgatattaatgatcaaaggtgcttgctatgtccgcgtttccaccgataaccagttggagaactacagc

SEQ ID NO: 21235 - DNA, 260 bp, Unknown
  Description of Unknown: LeftRegion for integrase B8236 sequence
attggcaaactggagggcttaaatggtaaagataactgttgatggtaaagaagtaaaagcagaagatataaaactttctgctgatgttgtgaaagtcatatcatcatgccttgattgacattatagcaaaaagaggttagaatgtgtcgtaaagtgcgataaatgcggcacattctttttatataaagggggattaagcgatggaatgtgttgcgtatatgagagtatcaacagaaaagcaggcagaagagggcaatggt

SEQ ID NO: 21236 - DNA, 260 bp, Unknown
  Description of Unknown: LeftRegion for integrase B8237 sequence
ttgaaaaattggaggttttgaaatgattaaaataacaataaatggaaacgagataaaagcagaggatgtaactttatctgccgatattgtaaaaatcataacatcatgccttgattgacattgtgttttaaaaaggttagaatgtgtcgtaagtacgataaatgcggcacattctttttatataaaaggaggatttgaagatggaatgtgttgcgtacatgagagtatcgacagaaaaacaagcagaagatggaaacggg

SEQ ID NO: 21237 - DNA, 260 bp, Unknown
  Description of Unknown: LeftRegion for integrase B8238 sequence
tttgtcaaataatagtataaaatgcaaaaccgcccggtgttaccagcaccgaacggctttacatagattttctcttgccggatgctccggaaagatataatcagcttgaacacctgaattatatcatctccgaagcgtcctggcaaggggcgttctttttgtacctattttttcgtacattatcataaggagatgattctatgttgaaaacaccacctgcctgccgcgctggtatctatatccgtgtcagcactgaagag

SEQ ID NO: 21238 - DNA, 260 bp, Unknown
  Description of Unknown: LeftRegion for integrase B8239 sequence
ttgaaaaattggaggttttgaaatgattaaaataacaataaatggaaacgagataaaagcagaggatgtaactttatctgccgatattgtaaaaatcataacatcatgccttgattgacattatattttaaaaaggttagaatgtgtcgtaagtacgataaatgcggcacattctttttatataaaaggaggatttgaagatggaatgtgttgcgtacatgagagtatcaacagaaaaacaagcagaagatggaaacggg

SEQ ID NO: 21239 - DNA, 260 bp, Unknown
  Description of Unknown: LeftRegion for integrase B8240 sequence
cttcagatgatatagcaagaaaaggagaacaaattaaaataaatattgatttaactaaataaaataaaaaacaaaaaagcccccacaattattttatggaagctaatttataagtgtatgatatacactattctgacaaaataattatatcatacatttattattagcacaacttttagtagaaaggaagtgctatttttatggataatataaaaagagctggactatatatccgtgtttctcacgaagagcaagtcaaa

SEQ ID NO: 21240 - DNA, 260 bp, Unknown
  Description of Unknown: LeftRegion for integrase B8241 sequence
acctgtgcagcttccataaatagcaaaaccgcccggtgttaccagcaccgaacggctttacatagattttctcttgccggatgcccggaagatataaatcagactttgaacacctgaattatatcatctccgaagcgtcctggcaaggggtgttctttttgtacctatttcttcgtacactatcacaaggagatgattctatgttgaaaacaccacctgcctgccgcgctggtatatatatccgtgtcagcactgaagag

SEQ ID NO: 21241 - DNA, 260 bp, Unknown; identical to SEQ ID NO: 21236
  Description of Unknown: LeftRegion for integrase B8242 sequence

SEQ ID NO: 21242 - DNA, 260 bp, Unknown
  Description of Unknown: LeftRegion for integrase B8243 sequence
aataatggatatagcaaagaacagtttgcctgcaattgaatacagcaatttcatattgtctatatgttagaaaataaaaatcccggcggtgcggggacactgccgggatttctgcaacgttttgtataatcataccagatacaacataccgtctgcattgttattgtagcatatgcagacaggaaaagaaaggaaatagcatgataaaaaaagaactttctacgggtccgcttcgtgttgcactttacatacgtgtttcc

SEQ ID NO: 21243 - DNA, 260 bp, Unknown
  Description of Unknown: LeftRegion for integrase B8244 sequence
aataatggatatagcaaagaacagtttacctgcaattgaatacagcaatttcatattgtctatatgttagaaaataaaaatcccggcggtgcggggacactgccgggatttctgcaacgttttgtataatcataccagatacaacataccgtctgcattgttattgtagcatatgcagacaggaaaagaaaggaaatagcatgataaaaaaagaactttctacgggtccgcttcgtgttgcactttacatccgtgtttcc

SEQ ID NO: 21244 - DNA, 260 bp, Unknown; identical to SEQ ID NO: 21236
  Description of Unknown: LeftRegion for integrase B8245 sequence

SEQ ID NO: 21245 - DNA, 260 bp, Unknown
  Description of Unknown: LeftRegion for integrase B8246 sequence
ttgaaaaattggaggttttgaaatgattaaaataacaataaatggaaacgagataaaagcagaggatgtaactttatctgccgatattgtaaaaatcataacattatgccttgattgacattatattttaaaaaggttagaatgtgtcgtaagtacgataaatgcggcacattctttttatataaaaggaggatttgaagatggaatgtgttgcgtatatgagagtatcaacagaaaagcaggcagaagatggaaacggg

SEQ ID NO: 21246 - DNA, 260 bp, Unknown
  Description of Unknown: LeftRegion for integrase B8247 sequence
gttgtagatgttggttttaaatagcaaaaccgcccggtgttaccagcaccgaacggctttacatagattttctcttgccggatgcccggaaagatataaatcagcttgaacacctgaattatatcatctccaaagcgtcctggcaaggggcgttctttttgtacctattttttcgtacattatcataaggagatgatcatatgttgaaaacaccacctgcctgccgcgccggtatctatatccgtgtcagcactgaagag

SEQ ID NO: 21247 - DNA, 260 bp, Unknown
  Description of Unknown: LeftRegion for integrase B8248 sequence
tttatgatcgttttagaacataaaaagaacacgatctgcagaccgtgttcaaaaaaagcataaatatttatataaaaagtccccgccgtgctgcaacacggtcggggcaaactagcgcaagtgaaatcagatacaaaccccactgcattttttattttatcataaaacagtgggaaataaaaggaaattaggtggttcaaatgaaaaaagctaaatctgaaacaactcttgtccgtgcagcgttatatatacgtgtgtcc

SEQ ID NO: 21248 - DNA, 260 bp, Unknown; identical to SEQ ID NO: 21242
  Description of Unknown: LeftRegion for integrase B8249 sequence

SEQ ID NO: 21249 - DNA, 260 bp, Unknown
  Description of Unknown: LeftRegion for integrase B8250 sequence
catcaagaaaattaatcataaagaatttggaaactctgagatagaagtatatgcaataaaattaaaataaaaaggagaaaaatatgtcaaataactgtgtaataataagaaataaaaatattaatgaaaatgaaaaaaattatatcttaactttactattggatgaagcaaaaaaagaaaattttgattaggtgaattctatgaataaaataactgctatttattgcagagaatctacagaaaaacaaaatataagtaca

SEQ ID NO: 21250 - DNA, 260 bp, Unknown
  Description of Unknown: LeftRegion for integrase B8251 sequence
atatttcaaaaaattgtattgtaaagaatgtggtagccgcttagttcgttacattgaaagcagacaacatgtcaaatggatatgcaatggaaacaagcggaaaggaacagggttttgtaaaggcgttagagtgctggattcgactgtccggggctgggaaattgacacagatgttttagttgaaggaaaggttggtaaagatggcgaaaaaagttacagttatacctgcaaaacaggtcagagcaaatagtacaaaagca

SEQ ID NO: 21251 - DNA, 260 bp, Unknown
  Description of Unknown: LeftRegion for integrase B8252 sequence
agtttatgatcgttttagagcataaaaagaacacgatctgcagaccgtgttcaaaaatcataaatatttatataaaaagtccccgccgtgctgcaacacggtcggggcaaactagcgcaagtgaaatcagatacaaaccccactgcattttttattttagcataaaatagtgggaaataaaaggaaattaggtggttcaaatgaaaaaagctaaatctgaaacaactcttgtccgtgcagcgttatatatacgtgtgtcc

SEQ ID NO: 21252 - DNA, 260 bp, Unknown
  Description of Unknown: LeftRegion for integrase B8253 sequence
ctctttaaactcccataaatagcaaaaccgcccggtgctggtaacaccgaacggctttacatagattttctcttgccggatgctccggaagatataaatcagacttagaacacctgaattatatcatctccgaagcgtcctggcaaggggtgttctttttgtacctatttcttcgtacactatcacaaggagatgattctatgttgaaaacaccacctgcctgccgcgctggtatctatatccgtgtcagcactgaagag

SEQ ID NO: 21253 - DNA, 260 bp, Unknown
  Description of Unknown: LeftRegion for integrase B8254 sequence
accggtgcaactctcataaatagcaaaaaccgcccggtgttggcgcaccgaacggctttacatagattttctcttgccggatgcccggaagatataaatcagactttgaacacctgaattatatcatctccgaagcgtcctggcaaggggtgttctttttgtacctatttcttcgtacactatcacaaggagatgattctatgttgaaaacaccacctgcctgccgcgctggtatctatatccgtgtcagcactgaagaa

SEQ ID NO: 21254 - DNA, 260 bp, Unknown
  Description of Unknown: LeftRegion for integrase B8255 sequence
ttttgtttattttctataaaaatgcaaaaccgcccggtgttaccagcaccgaacggctttacatagattttctcttgccgaatgctccggaagatataatcaatcttgaacacctgaattatatcatctccgaagcgtcctggcaaggggtgttctttttgtacctatttcttcgtacactatcacaaggagatgattctatgttgaaaacaccacctgcctgccgcgccggtatctatatccgtgtcagcactgaagag

SEQ ID NO: 21255 - DNA, 260 bp, Unknown; identical to SEQ ID NO: 21238
  Description of Unknown: LeftRegion for integrase B8256 sequence

SEQ ID NO: 21256 - DNA, 260 bp, Unknown
  Description of Unknown: LeftRegion for integrase B8257 sequence
tttaagtttttaattattgcgattaattcatttcttaattcttctaacatagtaagatactcctttcttttaggtttatctttaatatatgtatcagtgatttaagtatttcacttttttagaaaaattttaaatattttatatttgtattataacatagaacgtgtgttcgttcaatatttaaaaaggaggattaaaatatgaaaataggaatttacacaagagtatcaacggaagagcaagctgttcatggtgtgtct

SEQ ID NO: 21257 - DNA, 260 bp, Unknown; identical to SEQ ID NO: 20944
  Description of Unknown: LeftRegion for integrase B8258 sequence

SEQ ID NO: 21258 - DNA, 260 bp, Unknown; identical to SEQ ID NO: 21236
  Description of Unknown: LeftRegion for integrase B8259 sequence

SEQ ID NO: 21259 - DNA, 260 bp, Unknown
  Description of Unknown: LeftRegion for integrase B8260 sequence
acgcaagcataaagaatcctggcttgtcggatatgctcaaatctgtagaacgtggagaagttgacttgctcttaaccagtggcggtgtagatcgtttcgtgcgttctaaagatgagtatgaacagctccttgaaatattagaggctcataactgtaatttagaaattgtaaaattgaaaaaagaataggtgtgatgtcttatgaagaaaaaagaaattatttccggtccactccgtgttgctttatacattcgagtttcc

SEQ ID NO: 21260 - DNA, 260 bp, Unknown
  Description of Unknown: LeftRegion for integrase B8261 sequence
tttatgatcgttttaggacataaaaagaacacgatctgcagaccgtgttcaaaaaaagcataaatatttatataaaaagtccccgccgtgctgcaacacggtcggggcaaactagcgcaagtgaaatcagatacaaaccccactgcattttttattttagcataaaacagtgggaaataaaaggaaattaggtggttcaaatgaaaaaagctaaatctgaaacaactcttgtccgtgcagcgttatatatacgtgtgtcc

SEQ ID NO: 21261 - DNA, 260 bp, Unknown
  Description of Unknown: LeftRegion for integrase B8262 sequence
tgggcgcttttcaattataaaggtctggcaggttcacaactactgttaaaaattggcaataaaaacacccgcagtgctgggaacactccgggtgcggtgcaaagatatatcataccagatacaacataccgtctgcacttattatattatcacggcatgacgggaaattaaaggaaattgacaagaattgtggtgatattatgagaaacaaggaaattgccccggcgcttgtccgggttgctctatatataagggtttcc

SEQ ID NO: 21262 - DNA, 260 bp, Unknown
  Description of Unknown: LeftRegion for integrase B8263 sequence
aaaattattggtaaagttgttgaagccagaaaaagaaatcaatttaaataaaaaagagaaaatgctactgtttggcgacacggcattttctcaaaccataaaaattccttgaaataaggtctctttatgttattattatagcatattttaaaaccttttttcaagcaatttaataaaattttagaaagaaggtttttattatgaaatatgtagcttgttattgccgtgtaagcacagatgaacaggcaaaatttggtttt

SEQ ID NO: 21263 - DNA, 260 bp, Unknown
  Description of Unknown: LeftRegion for integrase B8264 sequence
tgggcgcttttcaattataaaggtctggcaggttcacaactactggtaaaaaatggcaataaaaacacccgcagtgctgggaacactccgggtgtggtgcaaagatatatcataccagatacaacataccgtctgcacttattatattatcacggcatgacgggaaataaaaggaaattgacaagaattgtggtgatattatgagaaacaaggaaattgccccggcgcttgtccgggttgctctatatataagggtttcc

SEQ ID NO: 21264 - DNA, 260 bp, Unknown; identical to SEQ ID NO: 21261
  Description of Unknown: LeftRegion for integrase B8265 sequence

SEQ ID NO: 21265 - DNA, 260 bp, Unknown; identical to SEQ ID NO: 21261
  Description of Unknown: LeftRegion for integrase B8266 sequence

SEQ ID NO: 21266 - DNA, 260 bp, Unknown
  Description of Unknown: LeftRegion for integrase B8267 sequence
tcttcttttgtaagtaataaaataacagcctttaccaatgacattttgaatggctaatataaaaacacccgcagtgctgggaacactccgggtgcggtgcaaagatatatcataccagatacaacataccgtctgcacttattatattatcacggcatgacgggaaattaaaggaaattgacaagaattgtggtgatattatgagaaacaaggaaattgccccggcgcttgtccgggttgctctatatataagggtttcc

SEQ ID NO: 21267 - DNA, 260 bp, Unknown
  Description of Unknown: LeftRegion for integrase B8268 sequence
tcttcttttgtaagcaataaaatagcaacctttaccaacgatattttgaatatctaatataaaaacacccgcagtgctgggaacactccgggtgcggtgcaaagatatatcataccagatacaacataccgtctgcatttattatattaccacctgcggacgggaaattaaaggaaattgacaagaaatgtggtgatattgtgtataaaaaagaacttgccccggatttagtccgggttgctttatatatccgtgtttct

SEQ ID NO: 21268 - DNA, 260 bp, Unknown
  Description of Unknown: LeftRegion for integrase B8269 sequence
tcttcttttgtaagcaataaaatagcaacctttaccaacgatattttgaatgtctaatataaaaacacccgcagtgctgggaacactccgggtgcggtgcaaagatatatcataccagatacaacataccgtctgcatttattatattaccacctgcggacgggaaattaaaggaaattgacaagaaatgtggtgatattgtgtataaaaaagaacttgccccggatttagtccgggttgctttatatatccgtgtttct

SEQ ID NO: 21269 - DNA, 260 bp, Unknown
  Description of Unknown: LeftRegion for integrase B8270 sequence
gggcgcttttcaattataaaggtctggcaggttcacaactactgttaaaaattggcaaataaaaacacccgcagtgctgggaacactccgggtgcggtgcaaagatatatcataccagatacaacataccgtctgcacttattatattatcacggcatgacgggaaattaaaggaaattgacaagaattgtggtgatattatgagaaacaaggaaattgccccggcgcttgtccgggttgctctatatataagggtttcc

SEQ ID NO: 21270 - DNA, 260 bp, Unknown
  Description of Unknown: LeftRegion for integrase B8271 sequence
cttcttttgtaagcaataaaataacaacctttaccaacgatattttgaatgtctaatataaaaaacacccgcagtgctgggaacactccgggtgcggtgcaaagatatatcataccagatacaacataccgtctgcatttattatattatcacggcatgacgggaaataaaaggaaattgacaagaattgtggtgatattatgagaaacaaggaaattgccccggcgcttgtccgggttgctctatatataagggtttcc

SEQ ID NO: 21271 - DNA, 260 bp, Unknown
  Description of Unknown: LeftRegion for integrase B8272 sequence
ctggagcggtagggaatctccgaagagatacctgtctttagcaggaatattgtatcaccttcggagcagccatgcaagcggaacctttgtttgcgctggctgtattttttgtacccatttttgccggttgcgccggcgcaaattacaaaataggagcgttttgttgacttcaacataatgttacaggaggatgatactttatgaaaaaagaacaacccaatgtacttcacacagcaatttacattcgtgtttccactgat

SEQ ID NO: 21272 - DNA, 260 bp, Unknown; identical to SEQ ID NO: 21268
  Description of Unknown: LeftRegion for integrase B8273 sequence

SEQ ID NO: 21273 - DNA, 260 bp, Unknown
  Description of Unknown: LeftRegion for integrase B8274 sequence
tgggcgcttttcaattataaaggtctggcaggttcacaactactgttaaaaattggcaataaaaacacccgcagtgctgggaacactccgggtgcggtgcaaagatatatcataccagatacaacataccgtctgcatttattacattatcacggcatgacgggaaataaaaggaaattgacaagaattgtggtgatattatgagaaacaaggaaattgccccggcgcttgtccgggttgctctatatataagggtttcc

SEQ ID NO: 21274 - DNA, 260 bp, Unknown
  Description of Unknown: LeftRegion for integrase B8275 sequence
tgggcgcttttcaattataaaggtctggcaggttcacaactactgttaaaaattggcaataaaaacacccgcagtgctgggaacactccgggtgcggtgcaaagatatatcataccagatacaacataccgtctgcacttattatattatcacggcatgacgggaaattaaaggaaattgacaagaattgtggtgatattatgaggaacaaggaaattgccccggcgcttgtccgggttgctctatatataagggtttcc

SEQ ID NO: 21275 - DNA, 260 bp, Unknown
  Description of Unknown: LeftRegion for integrase B8276 sequence
tcttcttttgtaagtaataaaataacagcctttaccaatgacattttgaatggctaatataaaaacacccgcagtgctgggaacactccgggtgcggtgcaaagatatatcataccagatacaacataccgtctgcacttattatattatcacggcatgacgggaaataaaaggaaattgacaagaattgtggtgatattatgagaaacaaggaaattgccccggcgcttgtccgggttgctctatatataagggtttcc

SEQ ID NO: 21276 - DNA, 260 bp, Unknown
  Description of Unknown: LeftRegion for integrase B8277 sequence
tgggcgcttttcaattataaaggtctggcaggctcacaactactggtaaaaaatggcaataaaaacacccgcagtgctgggaacactccgggtgcggtgcaaagatatatcataccagatacaacataccgtctgcacttattatattatcacggcatgacgggaaataaaaggaaattgacaagaattgtggtgatattatgaaaagaaaagaagttgcggcagggcttgtccgtgtcgctttatatattcgtgtttcc

SEQ ID NO: 21277 - DNA, 260 bp, Unknown; identical to SEQ ID NO: 21266
  Description of Unknown: LeftRegion for integrase B8278 sequence

SEQ ID NO: 21278 - DNA, 260 bp, Unknown; identical to SEQ ID NO: 21269
  Description of Unknown: LeftRegion for integrase B8279 sequence

SEQ ID NO: 21279 - DNA, 260 bp, Unknown; identical to SEQ ID NO: 21261
  Description of Unknown: LeftRegion for integrase B8280 sequence

SEQ ID NO: 21280 - DNA, 260 bp, Unknown
  Description of Unknown: LeftRegion for integrase B8281 sequence
tgggcgcttttcaattataaaggtctggcaggttcacaactactgttaaaaattggcaataaaaacacccgcagtgctgggaacactccgggtgcggtgcaaagatatatcataccagatacaacataccgtctgcatttattatattatcacggcatgacgggaaattaaaggaaattggcaagaattgtggtgatattatgagaaacaaggaaattgccccggcgcttgtccgggttgctctatatataagggtttcc

SEQ ID NO: 21281 - DNA, 260 bp, Unknown
  Description of Unknown: LeftRegion for integrase B8282 sequence
tgggcgcttttcaattataaaggtctggcaggttcacaactactgttaaaaattggcaataaaaacacccgcagtgctgggagcactccgggtgcggtgcaaagatatatcataccagatacaacataccgtctgcacttattatattatcacggcatgacgggaaattaaaggaaattgacaagaattgtggtgatattatgagaaataaggaaattgccccggcgcttgtccgggttgctctatatataagggtttcc

SEQ ID NO: 21282 - DNA, 260 bp, Unknown
  Description of Unknown: LeftRegion for integrase B8283 sequence
gcacttgatgttattacacataataaataaaataaaaaaaccgcccctgtgctaccaacactgagacggcctatacatccggagatgcatacatattttacgtacaagaatattgtatcatcttcgggcagccatggcaagtggaatctctatattcctctggctgttatttttatacccatttttaaggagatgatcatatgagaaaccaaaacacttccgaagttccaatacgggcagctctttatgcccgtgtttcc

SEQ ID NO: 21283 - DNA, 260 bp, Unknown
  Description of Unknown: LeftRegion for integrase B8284 sequence
tcttcttttgtaagcaataaaataacaacctttaccaacgatattttgaatgtctaatataaaaacacccgcagtgctgggaacactccgggtgcggtgcaaagatatatcataccagatacaacataccgtctgcatttattatattaccacctgtggacgggaaataaaaggaaattgacaagaattgtggtgatattatgagaaacaaggaaattgccccggcgcttgtccgggttgctctatatataagggtttcc

SEQ ID NO: 21284 - DNA, 260 bp, Unknown
  Description of Unknown: LeftRegion for integrase B8285 sequence
tcttcctttgtaagcaataaaataacaacctttaccaacgatattttgaatgtctaatataaaaacacccgcagtgctgggaacactccgggtgcggtgcaaagatatatcataccagatacaacataccgtctgcacttattatattatcacggcatgacgggaaataaaaggaaattgacaagaattgtggtgatattatgagaaacaaggaaattgccccggcgcttgtccgggttgctctatatataagggtttcc

SEQ ID NO: 21285 - DNA, 260 bp, Unknown
  Description of Unknown: LeftRegion for integrase B8286 sequence
tcttcttttgtaagcaataaaatagcaacctttaccaacgatattttgaatgtctaatataaaaacacccgcagtgctgggaacactccgggtgcggtgcaaagatatatcataccagatacaacataccgtctgcacttattatattatcacggcatgacgggaaattaaaggaaattgacaagaattgtggtgatattatgagaaacaaggaaattgccccggcgcttgtccgggttgctctatatataagggtttcc

SEQ ID NO: 21286 - DNA, 260 bp, Unknown
  Description of Unknown: LeftRegion for integrase B8287 sequence
tgggcgcttttcaattataaaggtctggcaggcttgcaactactggtaaaaaatggcaataaaaacacccgcagtgctgggaacactccgggtgcggtgcaaagatatatcataccagatacaacataccgtctgcatttattatattatcacggcatgacgggaaattaaaggaaattgacaagaattgtggtgatattatgagaaacaaggaaattgccccggcgcttgtccgggttgctctatatataagggtttcc

SEQ ID NO: 21287 - DNA, 260 bp, Unknown
  Description of Unknown: LeftRegion for integrase B8288 sequence
gcacttgatgttattacacataataaataaaataaaaaaaccgcccctgtgctaccaacactgagacggcctatacatccggagatgcatacatattttacgtacaagaatattgtatcatcttcgggcagccatggcaagtggaatctctgtattcctctggctgttatttttatacccatttttaaggagatgatcatatgagaaaccaaaacacttccgaagttccaatacgggcagctctttatgtccgtgtttcc

SEQ ID NO: 21288 - DNA, 260 bp, Unknown
  Description of Unknown: LeftRegion for integrase B8289 sequence
gcacttgatgttattacacataataaataaaataaaaaaaccgcccctgtgctaccaacactgagacggccaatacatccggagatgcatacatattttacgtacaagaatattgtatcatcttcgggcagccatggcaagtggaatctctatattcctctggctgttatttttatacccatttttaaggagatgatcatatgagaaaccaaaacacttccgaagttccaatacgggcagctctttatgtccgtgtttcc

SEQ ID NO: 21289 - DNA, 260 bp, Unknown
  Description of Unknown: LeftRegion for integrase B8290 sequence
tgggcgcttttcaattataaaggtctggcaggtttgcaactactgttaaaaattggcaataaaaacacccgcagtgctgggaacactccgggtgcggtgcaaagatatatcataccagatacaacataccgtctgcacttattatattatcacggcatgacgggaaattaaaggaaattgacaagaattgtggtgatattatgagaaacaaggaaattgccccggcacttgtccgggttgctctatatataagggtttcc

SEQ ID NO: 21290 - DNA, 260 bp, Unknown; identical to SEQ ID NO: 21261
  Description of Unknown: LeftRegion for integrase B8291 sequence

SEQ ID NO: 21291 - DNA, 260 bp, Unknown
  Description of Unknown: LeftRegion for integrase B8292 sequence
tgggcgcttttcaattataaaggtctggcaggttcacaactactgttaaaaattggcaataaaaacacccgcagtgctgggaacactccgggtgcggtgcaaagatatatcataccagatacaacataccgtctgcacttattatattatcacggcatgacgggaaattaaaggaaattgacaagaattgtggtgatattatgagaaacaaggaaattgccccggtgcttgtccgggttgctctatatataagggtttcc

SEQ ID NO: 21292 - DNA, 260 bp, Unknown
  Description of Unknown: LeftRegion for integrase B8293 sequence
tgggcgcttttcaattataaaggtctggcaggcttgcaactactgttaaaaattggcaataaaaacacccgcagtgctgggaacactccgggtgcggtgcaaagatatatcataccagatacaacataccgtctgcacttattatattatcacggcatgacgggaaattaaaggaaattgacaagaattgtggtgatattatgagaaacaaggaaattgccccggcgcttgtccgggttgctctatatataagggtttcc

SEQ ID NO: 21293 - DNA, 260 bp, Unknown; identical to SEQ ID NO: 21261
  Description of Unknown: LeftRegion for integrase B8294 sequence

SEQ ID NO: 21294 - DNA, 260 bp, Unknown; identical to SEQ ID NO: 21261
  Description of Unknown: LeftRegion for integrase B8295 sequence

SEQ ID NO: 21295 - DNA, 260 bp, Unknown
  Description of Unknown: LeftRegion for integrase B8296 sequence
tgggcgcttttcaattataaaggtctggcaggcttgcaactactggtaaaaaatggcaataaaaacacccgcagtgctgggaacactccgggtgtggtgcaaagatatatcataccagatacaacataccgtctgcacttattatattatcacggcatgacgggaaataaaaggaaattgacaagaattgtggtgatattatgagaaacaaggaaattgccccggcgcttgtccgggttgctctatatataagggtttcc

SEQ ID NO: 21296 - DNA, 260 bp, Unknown; identical to SEQ ID NO: 21268
  Description of Unknown: LeftRegion for integrase B8297 sequence

SEQ ID NO: 21297 - DNA, 260 bp, Unknown
  Description of Unknown: LeftRegion for integrase B8298 sequence
tgggcgcttttcaattataaaggtctggcaggcttgcaactactgttaaaaattggcaataaaaacacccgcagtgctgggaacactccgggtgcggtgcaaagatatatcataccagatacaacataccgtctgcatttattatattatcacggcatgacgggaaattaaaggaaattgacaagaattgtggtgatattatgagaaacaaggaaattgccccggcgcttgtccgggttgctctatatataagggtttcc

SEQ ID NO: 21298 - DNA, 260 bp, Unknown
  Description of Unknown: LeftRegion for integrase B8299 sequence
tgggcgcttttcaattataaaggtctggcaggcttgcaactactgttaaaaattggcaataaaaacacccgcagtgctgggaacactccgggtgcggtgcaaagatatatcataccagatacaacataccgtctgcatttattatattatcacggcatgacgggaaataaaaggaagttgacaagaattgtggtgatattatgagaaacaaggaaattgccccggcgcttgtccgggttgctctatatataagggtttcc

SEQ ID NO: 21299 - DNA, 260 bp, Unknown; identical to SEQ ID NO: 21261
  Description of Unknown: LeftRegion for integrase B8300 sequence

SEQ ID NO: 21300 - DNA, 260 bp, Unknown
  Description of Unknown: LeftRegion for integrase B8301 sequence
tgggcgcttttcaattataaaggtctggcaggtttgcaactactgttaaaaattggcaataaaaacacccgcagtgctgggaacactccgggtgcggtgcaaagatatatcataccagatacaacataccgtctgcatttattatattatcacggcatgacgggaaataaaaggaaattgacaagaattgtggtgatattatgagaaacaaggaaattgccccggcgcttgtccgggttgctctatatataagggtttcc

SEQ ID NO: 21301 - DNA, 260 bp, Unknown
  Description of Unknown: LeftRegion for integrase B8302 sequence
tcttcttttgtaagcaataaaataacaacctttaccaacgatattttgaatgtctaatataaaaacacccgcagtgctgggaacactccgggtgcggtgcaaagatatatcataccagatacaacataccgtctgcatttattatattaccacctgcggacgggaaattaaaggaaattgacaagaaatgtggtgatattgtgtataaaaaagaacttgccccagatttagtccgggttgctttatatatccgtgtttct

SEQ ID NO: 21302 - DNA, 260 bp, Unknown; identical to SEQ ID NO: 21268
  Description of Unknown: LeftRegion for integrase B8303 sequence

SEQ ID NO: 21303 - DNA, 260 bp, Unknown
  Description of Unknown: LeftRegion for integrase B8304 sequence
tgggcgcttttcaattataaaggtctggcaggttcacaactactgttaaaaattggcaataaaaacacccgcagtgctgggaacactccgggtgcggtgcaaagatatatcataccagatacaacataccgtctgcacttattatattatcacggcatgacgggaaataaaaggaaattgacaagaattgtggtgatattatgagaaacaaggaaattgccccggcgcttgtccgggttgctctatatataagggtttcc

SEQ ID NO: 21304 - DNA, 260 bp, Unknown
  Description of Unknown: LeftRegion for integrase B8305 sequence
tgggcgcttttcaattataaaggtctggcaggttcacaactactgttaaaaattggcaataaaaacacccgcagtgctgggaacactccgggtgcggtgcaaagatatatcataccagatacaacataccgtctgcacttattatattatcacggcatgacgggaaattaaaggaaattgacaagaattgtggtgatattatgagaaacaaggaaattgtcccggcgcttgtccgggttgctctatatataagggtttcc

SEQ ID NO: 21305 - DNA, 260 bp, Unknown; identical to SEQ ID NO: 21261
  Description of Unknown: LeftRegion for integrase B8306 sequence

SEQ ID NO: 21306 - DNA, 260 bp, Unknown
  Description of Unknown: LeftRegion for integrase B8307 sequence
gggcgcttttcaattataaaggtctggcaggtttgcaactactgttaaaaattggcaaataaaaacacccgcagtgctgggaacactccgggtgcggtgcaaagatatatcataccagatacaacataccgtctgcatttattatattaccacctgcggacgggaaattaaaggaaattgacaagaattgtggtgatattatgagaaacaaggaaattgccccggcgcttgtccgggttgctctatatataagggtttcc

SEQ ID NO: 21307 - DNA, 260 bp, Unknown
  Description of Unknown: LeftRegion for integrase B8308 sequence
tcttcttttgtaagcaataaaatagcaacctttaccaacgatattttgaatgtctaatataaaaacacccgcagtgctgggaacactccgggtgcggtgcaaagatatatcgtaccagatacaacataccgtctgcatttattatattaccacctgctgacgggaaattaaaggaaattgacaagaaatgtggtgatattgtgtataaaaaagaacttgccccggatttagtccgggttgctttatatatccgtgtttct

SEQ ID NO: 21308 - DNA, 260 bp, Unknown
  Description of Unknown: LeftRegion for integrase B8309 sequence
tatgcgattgctcatttgaatgattaatcaaaataaaaccgcccctgcgctaccaacacagagacggcctatacatccgaggatgcatgcatatattttacgtgcaagaatattgtatcatctttggacagccacggcaagtggaatctctgtatttctctggctgttatttttatacccatttttaaggagatgatcatatgagaaaccaaaacacttccgaaactccggtaagggcagctctttatgtccgtgtttcc

SEQ ID NO: 21309 - DNA, 260 bp, Unknown
  Description of Unknown: LeftRegion for integrase B8310 sequence
tgggcgcttttcaattataaaggtctggcaggttcacaactactgttaaaaattggcaataaaaacacccgcagtgctgggaacactccgggttcggtgcaaagatatatcataccagatacaacataccgtctgcacttattatattatcacggcatgacgggaaattaaaggaaattgacaagaattgtggtgatattatgagaaacaaggaaattgccccggcgcttgtccgggttgctctatatataagggtttcc

SEQ ID NO: 21310 - DNA, 260 bp, Unknown
  Description of Unknown: LeftRegion for integrase B8311 sequence
tcttcttttgtaagcaataaaatagcaacctttaccaacgatattttgaatgtctaatataaaaacacccgcagtgctgggaacactccgggtgtggtgcaaagatatatcataccagatacaacataccgtctgcatttattatattaccacctgcggacgggaaattaaaggaaattgacaagaaatgtggtgatattgtgtataaaaaagaacttgccccggatttagtccgggttgctttatatatccgtgtttct

SEQ ID NO: 21311 - DNA, 260 bp, Unknown
  Description of Unknown: LeftRegion for integrase B8312 sequence
accaccaaataaaagcaactgattttcatttaaaacaaaaccgcccctgcgctaccaacacagagacggcctatacatccgaggatgcatacatattttacatgcaaaaatattgtatcatcttcgggcagccatggcaagtggaatctctatattcctctggctgttatttttatacccatttttaaggagatgattatatgagaaagcaaaataattctgaagctccggtaagggcagctctttatgtccgtgtttcc

SEQ ID NO: 21312 - DNA, 260 bp, Unknown
  Description of Unknown: LeftRegion for integrase B8313 sequence
aaaagaaactatgtcgtcaagacagatgggatgtcaaaaaaggcatcgcggcaaagacttataagatcgacaaacaggttgctgagaattttaagcaggcgtgtaagcaagtaggtgtgggaatgggaccacagctcacggcgatgatgcaagaatttattcggacagtgtcagagtctgacacgaaggaggaataatgcatggagaaaaaaatcagatgtgctatatatgacagggtatcgcacgagcttcaggttgaa

SEQ ID NO: 21313 - DNA, 260 bp, Unknown; identical to SEQ ID NO: 21268
  Description of Unknown: LeftRegion for integrase B8314 sequence

SEQ ID NO: 21314 - DNA, 260 bp, Unknown
  Description of Unknown: LeftRegion for integrase B8315 sequence
tgggcgcttttcaattataaaggtctggcaggcttgcaactactgttaaaaattggcaataaaaacacccgcagtgctgggaacactccgggtgcggtgcaaagatatatcataccagatacaacataccgtctgcacttattatattatcacggcatgacgggaaattaaaggaaattgacaagaattgtggtgatattatgagaaacaaggaaattgccccggcacttgtccgggttgctctatatataagggtttcc

SEQ ID NO: 21315 - DNA, 260 bp, Unknown; identical to SEQ ID NO: 21303
  Description of Unknown: LeftRegion for integrase B8316 sequence

SEQ ID NO: 21316 - DNA, 260 bp, Unknown
  Description of Unknown: LeftRegion for integrase B8317 sequence
gggcgcttttcaattataaaggtctggcaggtttgcaactactgttaaaaattggcaaataaaaacacccgcagtgctgggaacactccgggtgcggtgcaaagatatatcataccagatacaacataccgtctgcacttattatattatcacggcatgacgggaaattaaaggaaattgacaagaattgtggtgatattatgagaaacaaggaaattgccccggcgcttgtccgggttgctttatatataagggtttcc

SEQ ID NO: 21317 - DNA, 260 bp, Unknown; identical to SEQ ID NO: 21268
  Description of Unknown: LeftRegion for integrase B8318 sequence

SEQ ID NO: 21318 - DNA, 260 bp, Unknown
  Description of Unknown: LeftRegion for integrase B8319 sequence
tgggcgcttttcaattataaaggtctggcaggcttgcaactactgttaaaaattggcagtaaaaacacccgcagtgctgggaacactccgggtgcggtgcaaagatatatcataccagatacaacataccgtctgcatttattatattatcacggcatgacgggaaattaaaggaaattgacaagaattgtggtgatattatgagaaacaaggaaattgccccggcgcttgtccgggttgctctatatataagggtttcc

SEQ ID NO: 21319 - DNA, 260 bp, Unknown
  Description of Unknown: LeftRegion for integrase B8320 sequence
tgggcgcttttcaattataaaggtctggcaggtttgcaactactgttaaaaattggcaataaaaacacccgcagtgctgggaacactccgggtgcggtgcaaagatatatcataccagatacaacataccgtctgcatttattatattaccacctgcggacgggaaattaaaggaaattgacaagaattgtggtgatattatgagaaacaaggaaattgccccggcgcttgtccgggttgctctatatataagggtttcc

SEQ ID NO: 21320 - DNA, 260 bp, Unknown
  Description of Unknown: LeftRegion for integrase B8321 sequence
tcattgataaatcagaaaataagagcctttacagacgacattctgaaaggttaataaaataaaatgccccggttgtgctgggaacacttccggggtgtgcaaagatatatcataccagatacaacataccgtctgcacttattatattatcacggcatgacgggaaataaaaggaaattgacaagaattgtggtgatattatgagaaacaaggaaattgccccggcgcttgtccgggttgctctatatataagggtttcc

SEQ ID NO: 21321 - DNA, 260 bp, Unknown
  Description of Unknown: LeftRegion for integrase B8322 sequence
tgggcgcttttcaattataaaggtctggcaggcttgcaactactgttaaaaattggcaataaaaacacccgcagtgctgggaacactccgggtgcggtgcaaagatatatcataccagatacaacataccgtctgcatttattatattatcacggcatgacgggaaataaaaggaaattgacaagaattgtggtgatattatgagaaacaaggaaattgccccggcgcttgtccgggttgctctatatataagggtttcc

SEQ ID NO: 21322 - DNA, 260 bp, Unknown; identical to SEQ ID NO: 21261
  Description of Unknown: LeftRegion for integrase B8323 sequence

SEQ ID NO: 21323 - DNA, 260 bp, Unknown
  Description of Unknown: LeftRegion for integrase B8324 sequence
tcttcttttgtaagtaataaaataacagcctttaccaatgacattttgaatggctaatataaaaacacccgcagtgctgggaacactccgggtgcggtgcaaagatatatcataccagatacaacataccgtctgcatttattatattaccacctgcggacgggaaataaaaggaaattgacaagaattgtggtgatattatgagaaacaaggaaattgccccggcgcttgtccgggttgctctatatataagggtttcc

SEQ ID NO: 21324 - DNA, 260 bp, Unknown; identical to SEQ ID NO: 21261
  Description of Unknown: LeftRegion for integrase B8325 sequence

SEQ ID NO: 21325 - DNA, 260 bp, Unknown
  Description of Unknown: LeftRegion for integrase B8326 sequence
tgggcgcttttcaattataaaggtctggcaggttcacaactactgttaaaaatcggcaataaaaacacccgcagtgctgggaacactccgggtgcggtgcaaagatatatcataccagatacaacataccgtctgcatttattatattatcacggcatgacgggaaataaaaggaaattgacaagaattgtggtgatattatgagaaacaaggaaattgccccggcgcttgtccgggttgctctatatataagggtttcc

SEQ ID NO: 21326 - DNA, 260 bp, Unknown
  Description of Unknown: LeftRegion for integrase B8327 sequence
tgggcgcttttcaattataaaggtctggcaggttcacaactactgttaaaaattggcaataaaaacacccgcagtgctgggaacactccgggtgcggtgcaaagatatatcataccagatacaacataccgtctgcacttattatattatcacggcatgacgggaaattaaaggaaattgacaagaattgtggtgatattatgagaaacaaggaaattgccccggcacttgtccgggttgctctatatataagggtttcc

SEQ ID NO: 21327 - DNA, 260 bp, Unknown; identical to SEQ ID NO: 21285
  Description of Unknown: LeftRegion for integrase B8328 sequence

SEQ ID NO: 21328 - DNA, 260 bp, Unknown
  Description of Unknown: LeftRegion for integrase B8329 sequence
tgggcgcttttcaattataaaggtctggcaggcttgcaactactgttaaaaatcggcaataaaaacacccgcagtgctgggaacactccgggtgcggtgcaaagatatatcataccagatgcaacataccgtctgcatttattatattatcacggcatgacgggaaataaaaggaaattgacaagaattgtggtgatattatgagaaacaaggaaattgccccggcgcttgtccgggttgctctatatataagggtttcc

SEQ ID NO: 21329 - DNA, 260 bp, Unknown
  Description of Unknown: LeftRegion for integrase B8330 sequence
aatgtcaacaattctatatatattttatgcaaaaaaaaataaaaatatacaaaaaagaattagaaagtgtttgagttttcgcacagcacaaccacttatctaattccgacaaaccactattgaaagtgattatattattattatacacaataatacctacattttcaatagtgaaaattgaaaattggaggtattttattatgaaaaatgcagcttgttattgtagagtaagtacagatgagcaagtaaaatttgggttt

SEQ ID NO: 21330 - DNA, 260 bp, Unknown
  Description of Unknown: LeftRegion for integrase B8331 sequence
tcttcttttgtaagcaataaaatagcaacctttaccaacgatattttgaatgtctaatataaaaacacccgcagtgctgggaacactccgggtgcggtgcaaagatatatcataccagatacaacataccgtctgcatttattatattaccacctgctgacgggaaattaaaggaaattgacaagaaatgtggtgatattgtgtataaaaaagaacttgccccggatttagtccgggttgctttatatatccgtgtttct

SEQ ID NO: 21331 - DNA, 260 bp, Unknown
  Description of Unknown: LeftRegion for integrase B8332 sequence
aaaattattggtaaagttgttgaagccagaaaaagaaatcaatttaaataaaaaagagaaaatgctactgtttggcgacacggcattttctcaaaccataaaaattccttgaaacaaggtctctttatgttattattatagcatattttaaaaccttttttcaagcaatttaataaaattttagaaagaaggtttttattatgaaatatgtagcttgttattgccgtgtaagcacagatgaacaggcaaaatttggtttt

SEQ ID NO: 21332 - DNA, 260 bp, Unknown; identical to SEQ ID NO: 21268
  Description of Unknown: LeftRegion for integrase B8333 sequence

SEQ ID NO: 21333 - DNA, 260 bp, Unknown
  Description of Unknown: LeftRegion for integrase B8334 sequence
tgggcgcttttcaattataaaggtctggcaggttcacaactactggtaaaaaatggcaataaaaacacccgcagtgctgggaacactccgggtgcggtgcaaagatatatcataccagatacaacataccgtctgcacttattatattatcacggcatgacgggaaataaaaggaaattgacaagaattgtggtgatattatgagaaacaaggaaattgccccggcgcttgtccgggttgctctatatataagggtttcc

SEQ ID NO: 21334 - DNA, 260 bp, Unknown
  Description of Unknown: LeftRegion for integrase B8335 sequence
tattctgctttcgtaagtaagaaataatagcctttactaacggcattttgaatagttaataaaaacacccgcagtgctgggaacactccgggtgcggtgcaaagatatatcataccagatacaacataccgtctgcatttattatattatcacggcatgacgggaaacaaaaggaaattgacaagaattgtggtgatattatgagaaacaaggaaattgccccggcgcttgtccgggttgccttatatataagggtttcc

SEQ ID NO: 21335 - DNA, 260 bp, Unknown; identical to SEQ ID NO: 21261
  Description of Unknown: LeftRegion for integrase B8336 sequence

SEQ ID NO: 21336 - DNA, 260 bp, Unknown; identical to SEQ ID NO: 21285
  Description of Unknown: LeftRegion for integrase B8337 sequence

SEQ ID NO: 21337 - DNA, 260 bp, Unknown
  Description of Unknown: LeftRegion for integrase B8338 sequence
tgggcgcttttcaattataaaggtctggcaggttcacaactactgttaaaaattggcaataaaaacacccgcagtgctgggaacactccgggtgcggtgcaaagatatatcataccagatacaacataccgtctgcatttattatattatcacggcatgacgggaaataaaaggaaattgacaagaattgtggtgatattatgagaaacaaggaaattgccccggcgcttgtccgggttgctctatatataagggtttcc

SEQ ID NO: 21338 - DNA, 260 bp, Unknown; identical to SEQ ID NO: 21266
  Description of Unknown: LeftRegion for integrase B8339 sequence

SEQ ID NO: 21339 - DNA, 260 bp, Unknown
  Description of Unknown: LeftRegion for integrase B8340 sequence
tgggcgcttttcaattataaaggtcttgcaggttcacaactactgttaaaaattggcaataaaaacacccgcagtgctgggaacactccgggtgcggtgcaaagatatatcataccagatacaacataccgtctgcacttattatattatcacggcatgacgggaaattaaaggaaattgacaagaattgtggtgatattatgagaaacaaggaaattgccccggcgcttgtccgggttgctctatatataagggtttcc

SEQ ID NO: 21340 - DNA, 260 bp, Unknown; identical to SEQ ID NO: 21261
  Description of Unknown: LeftRegion for integrase B8341 sequence

SEQ ID NO: 21341 - DNA, 260 bp, Unknown
  Description of Unknown: LeftRegion for integrase B8342 sequence
tgggcgcttttcaattataaaggtctggcaggttcacaactactgttaaaaattggcaataaaaacacccgcagtgctgggaacactccgggtgcggtgcaaagatatatcataccagatacaacataccgtctgcacttattatattatcacggcatgacgggaaattaaaggaaattgacaagaattgtggtgatattatgagaaacaatgaaattgtcccggcgcttgtccgggttgctctatatataagggtttcc

SEQ ID NO: 21342 - DNA, 260 bp, Unknown
  Description of Unknown: LeftRegion for integrase B8343 sequence
tcttcttttgtaagcaataaaatagcaacctttaccaacgatattttgaatgtctaatataaaaacacccgcagtgctgggaacactccgggtgcggtgcaaagatatatcataccagatacaacataccgtctgcacttattatattatcacggcatgacgggaaataaaaggaaattgacaagaattgtggtgatattatgagaaacaaggaaattgccccggcgcttgtccgggttgccttatatataagggtttcc

SEQ ID NO: 21343 - DNA, 260 bp, Unknown; identical to SEQ ID NO: 21261
  Description of Unknown: LeftRegion for integrase B8344 sequence

SEQ ID NO: 21344 - DNA, 260 bp, Unknown
  Description of Unknown: LeftRegion for integrase B8345 sequence
tgggcgcttttcaattataaaggtctggcaggttcacaactactggtaaaaaatggcaataaaaacacccgcagtgctgggaacactccgggtgcggtgcaaagatatatcataccagatacaacataccgtctgcactcattatattatcacggcatgacgggaaattaaaggaaattgacaagaattgtggtgatattatgagaaacaaggaaattgccccggcgcttgtccgggttgctctatatataagggtttcc

SEQ ID NO: 21345 - DNA, 260 bp, Unknown
  Description of Unknown: LeftRegion for integrase B8346 sequence
gcacttgatgttattacacataataaataaaataaaaaaaccgcccctgtgctaccaacactgagacggcctatacatccggagatgcatacatattttacgtacaagaatattgtatcatcttcgggcagccatggcaagtggaatctctatattcctctggctgttatttttatacccatttttaaggagatgatcatatgagaaaccaaaacacttccgaagttccaatacgggcagctctttatgtccgtgtttcc

SEQ ID NO: 21346 - DNA, 260 bp, Unknown; identical to SEQ ID NO: 21261
  Description of Unknown: LeftRegion for integrase B8347 sequence

SEQ ID NO: 21347 - DNA, 260 bp, Unknown; identical to SEQ ID NO: 21261
  Description of Unknown: LeftRegion for integrase B8348 sequence

SEQ ID NO: 21348 - DNA, 260 bp, Unknown
  Description of Unknown: LeftRegion for integrase B8349 sequence
ctgggcgcttttcaattataaaggtctggcaggcttgcaactactgttaaaattggcaataaaaacacccgcagtgctgggaacactccgggtgcggtgcaaagatatatcataccagatacaacataccgtctgcacttattatattatcatggcatgacgggaaataaaaggaaattgacaagaattgtggtgatattatgagaaacaaggaaattgccccggcgcttgtccgggttgctctatatataagggtttcc

SEQ ID NO: 21349 - DNA, 260 bp, Unknown
  Description of Unknown: LeftRegion for integrase B8350 sequence
tcttcttttgtaagtaataaaataacagcctttaccaatgacattttgaatggctaatataaaaacacccgcagtgctggtaacactccgggtgcggtgcaaagatatatcataccagatacaacataccgtctgcacttattatattatcacggcatgacgggaaattaaaggaaattgacaagaattgtggtgatattatgagaaacaaggaaattgccccggcgcttgtccgggttgctctatatataagggtttcc

SEQ ID NO: 21350 - DNA, 260 bp, Unknown; identical to SEQ ID NO: 21337
  Description of Unknown: LeftRegion for integrase B8351 sequence

SEQ ID NO: 21351 - DNA, 260 bp, Unknown
  Description of Unknown: LeftRegion for integrase B8352 sequence
gggcgcttttcaattataaaggtctggcaggtttgcaactactgttaaaaattggcaaataaaaacacccgcagtgctgggaacactccgggtgcggtgcaaagatatatcataccagatacaacataccgtctgcacttattatattatcacggcatgacgggaaattaaaggaaattgacaagaattgtggtgatattatgagaagcaaggaaattgccccggcgcttgtccgggttgctctatatataagggtttcc

SEQ ID NO: 21352 - DNA, 260 bp, Unknown
  Description of Unknown: LeftRegion for integrase B8353 sequence
gggcgcttttcaattataaaggtctggcaggtttgcaactactgttaaaaattggcaaataaaaacacccgcagtgctgggaacactccgggtgcggtgcaaagatatatcataccagatacaacataccgtctgcacttattatattatcacggcatgacgggaaattaaaggaaattgacaagaattgtggtgatattatgagaaacaaggaaattgccccggcgcttgtccgggttgctctatatataagggtttcc

SEQ ID NO: 21353 - DNA, 260 bp, Unknown
  Description of Unknown: LeftRegion for integrase B8354 sequence
tattctgctttcgtaagtaagaaataatagcctttactaatggcattttgaatagttaataaaaacacccgcagtgctgggaacactccgggtgcggtgcaaagatatatcataccagatacaacataccgtctgcatttattatattatcacggcatgacgggaaataaaaggaaattgacaagaattgtggtgatattatgagaaacaaggaaattgccccggcgcttgtccgggttgccttatatataagggtttcc

SEQ ID NO: 21354 - DNA, 260 bp, Unknown; identical to SEQ ID NO: 21261
  Description of Unknown: LeftRegion for integrase B8355 sequence

SEQ ID NO: 21355 - DNA, 260 bp, Unknown; identical to SEQ ID NO: 21261
  Description of Unknown: LeftRegion for integrase B8356 sequence

SEQ ID NO: 21356 - DNA, 260 bp, Unknown; identical to SEQ ID NO: 21352
  Description of Unknown: LeftRegion for integrase B8357 sequence

SEQ ID NO: 21357 - DNA, 260 bp, Unknown
  Description of Unknown: LeftRegion for integrase B8358 sequence
tgggcgcttttcaattataaaggtctggcaggttcacaactactgttaaaaattggcaataaaaacacccgcagtgctgggaacactccgggtgcggtgcaaagatatatcataccagatacaacataccgtctgcacttattatattatcacggcatgacgggaaattaaaggaaattgacaagaattgtggtgatattatgagaaataaggaaattgccccggcgcttgtccgggttgctctatatataagggtttcc

SEQ ID NO: 21358 - DNA, 260 bp, Unknown; identical to SEQ ID NO: 21261
  Description of Unknown: LeftRegion for integrase B8359 sequence

SEQ ID NO: 21359 - DNA, 260 bp, Unknown
  Description of Unknown: LeftRegion for integrase B8360 sequence
tgggcgcttttcaattataaaggtctggcaggtttgcaactactgttaaaaattggcaataaaaacacccgcagtgctgggaacactccgggtgcggtgcaaagatatatcataccagatacaacataccgtctgcatttattatattaccacctgcggacgggaaattaaaggaaattgacaagaattgtggtgatattatgagaaacaaggaaattgccccggcgcttgtccgggttgctttatatataagggtttcc

SEQ ID NO: 21360 - DNA, 260 bp, Unknown; identical to SEQ ID NO: 21316
  Description of Unknown: LeftRegion for integrase B8361 sequence

SEQ ID NO: 21361 - DNA, 260 bp, Unknown; identical to SEQ ID NO: 21268
  Description of Unknown: LeftRegion for integrase B8362 sequence

SEQ ID NO: 21362 - DNA, 260 bp, Unknown; identical to SEQ ID NO: 21337
  Description of Unknown: LeftRegion for integrase B8363 sequence

SEQ ID NO: 21363 - DNA, 260 bp, Unknown
  Description of Unknown: LeftRegion for integrase B8364 sequence
agaaagctgaaaaacttattcttgaaggtcaagatcttttaattatgaatgagagtttgtttttagacactataaactctcaaaattaattgaaaaataaataaaaaaaatagaggacgtgacgagcacatcccctaataaagtggtataaacacttttcccttacaggtgtattataccacaaaatggaggtataaaacatgaaaagagcagtcgcttatggcagatactcgacagatatgcaaagagaagaaagcatt

SEQ ID NO: 21364 - DNA, 260 bp, Unknown; identical to SEQ ID NO: 21323
  Description of Unknown: LeftRegion for integrase B8365 sequence

SEQ ID NO: 21365 - DNA, 260 bp, Unknown; identical to SEQ ID NO: 21292
  Description of Unknown: LeftRegion for integrase B8366 sequence

SEQ ID NO: 21366 - DNA, 260 bp, Unknown; identical to SEQ ID NO: 21269
  Description of Unknown: LeftRegion for integrase B8367 sequence

SEQ ID NO: 21367 - DNA, 260 bp, Unknown
  Description of Unknown: LeftRegion for integrase B8368 sequence
cacttgatgttattacacataataaataaaataaaaaaaaccgcccctgtgctaccaacactgagacggcctatacatccggagatgcatacatattttacgtacaagaatattgtatcatcttcgggcagccatggcaagtggaatctctatattcctctggctgttatttttatacccatttttaaggagatgatcatatgagaaaccaaaacacttccgaagttccaatacgggcagctctttatgtccgtgtttcc

SEQ ID NO: 21368 - DNA, 260 bp, Unknown
  Description of Unknown: LeftRegion for integrase B8369 sequence
tgggcgcttttcaattataaaggtctggcaggttcacaactactgttaaaaattggcaataaaaacacccgcagtgctgggaacactccgggtgtggtgcaaagatatatcataccagatacaacataccgtctgcacttattatattatcacggcatgacgggaaataaaaggaaattaacaagaattgtggtgatattatgagaaacagggaaattgccccggcgcttgtccgggttgctctatatataagggtttcc

SEQ ID NO: 21369 - DNA, 260 bp, Unknown
  Description of Unknown: LeftRegion for integrase B8370 sequence
gggcgcttttcaattataaaggtctggcaggttcacaactactgttaaaaattggcaaataaaaacacccgcagtgctgggaacactccgggtgcggtgcaaagatatatcataccagatacaacataccgtctgcacttattatattatcacggcatgacgggaaattaaaggaaattgacaagaattgtggtgatattatgagaaacaaggaaattgccccggcgcttgtccgggttgctttatatataagggtttcc

SEQ ID NO: 21370 - DNA, 260 bp, Unknown; identical to SEQ ID NO: 21261
  Description of Unknown: LeftRegion for integrase B8371 sequence

SEQ ID NO: 21371 - DNA, 260 bp, Unknown; identical to SEQ ID NO: 21316
  Description of Unknown: LeftRegion for integrase B8372 sequence

SEQ ID NO: 21372 - DNA, 260 bp, Unknown
  Description of Unknown: LeftRegion for integrase B8373 sequence
tgggcgcttttcaattataaaggtctggcaggttcacaactactgttaaaaattggcaataaaaacacccgcagtgctgggaacactccgggtgcggtgcaaagatatatcataccagatacaacataccgtctgcatttattatattatcacggcatgacgggaaattaaaggaaattgacaagaattgtggtgatattatgagaaacaaggaaattgccccggcgcttgtccgggttgctctatatataagggtttcc

SEQ ID NO: 21373 - DNA, 260 bp, Unknown
  Description of Unknown: LeftRegion for integrase B8374 sequence
tcttcttttgtaagtaataaaataacagcttttaccaatgacattttgaatggctaatataaaaacacccgcagtgctgggaacactccgggtgcggtgcaaagatatatcataccagatacaacataccgtctgcatttattatattaccacctgcggacgggaaataaaaggaaattgacaagaattgtggtgatattatgagaaacaaggaaattgccccggcgcttgtccgggttgctctatatataagggtttcc

SEQ ID NO: 21374 - DNA, 260 bp, Unknown; identical to SEQ ID NO: 21261
  Description of Unknown: LeftRegion for integrase B8375 sequence

SEQ ID NO: 21375 - DNA, 260 bp, Unknown; identical to SEQ ID NO: 21261
  Description of Unknown: LeftRegion for integrase B8376 sequence

SEQ ID NO: 21376 - DNA, 260 bp, Unknown
  Description of Unknown: LeftRegion for integrase B8377 sequence
gttgagccagacgtggaaagcagcactgagaactaattgtttttataaaaaagaaaaagcccgctttcgcggactccttctcccaccacctatgcggcggctttgtataactttgattagcgttaatgattataccacaaaaagccgcatttgcataggcttttctttttatactcttttttaattttgaggtgtaatctatggataaaaataaaaaaattactgtaccaggattgctgcggactgctatctatatccgc

SEQ ID NO: 21377 - DNA, 260 bp, Unknown; identical to SEQ ID NO: 21320
  Description of Unknown: LeftRegion for integrase B8378 sequence

SEQ ID NO: 21378 - DNA, 260 bp, Unknown; identical to SEQ ID NO: 21268
  Description of Unknown: LeftRegion for integrase B8379 sequence

SEQ ID NO: 21379 - DNA, 260 bp, Unknown; identical to SEQ ID NO: 21337
  Description of Unknown: LeftRegion for integrase B8380 sequence

SEQ ID NO: 21380 - DNA, 260 bp, Unknown
  Description of Unknown: LeftRegion for integrase B8381 sequence
tcttcttttgtaagtaataaaataacagcctttaccaatgacattttgaatggctaatataaaaacacccgcagtgccgggaacactccgggtgcggtgcaaagatatatcataccagatacaacataccgtctgcacttattatattatcacggcatgacgggaaataaaaggaaattgacaagaattgtggtgatattatgagaaacaaggaaattgccccggcgcttgtccgggttgctctatatataagggtttcc

SEQ ID NO: 21381 - DNA, 260 bp, Unknown; identical to SEQ ID NO: 21261
  Description of Unknown: LeftRegion for integrase B8382 sequence

SEQ ID NO: 21382 - DNA, 260 bp, Unknown
  Description of Unknown: LeftRegion for integrase B8383 sequence
tgggcgcttttcaattataaaggtctggcaggttcacaactactgttaaaaattggcaataaaaacacccgcagtgctgggaacactccgggtgcggtgcaaagatatatcataccagatacaacataccgtctgcatttattatattatcacggcatgacgggaaataaaaggaaattgacaagaattgtggtgatattatgagaaacaaggaaattgccccggcgcttgtccgggttgccttatatataagggtttcc

SEQ ID NO: 21383 - DNA, 260 bp, Unknown; identical to SEQ ID NO: 21321
  Description of Unknown: LeftRegion for integrase B8384 sequence

SEQ ID NO: 21384 - DNA, 260 bp, Unknown; identical to SEQ ID NO: 21268
  Description of Unknown: LeftRegion for integrase B8385 sequence

SEQ ID NO: 21385 - DNA, 260 bp, Unknown
  Description of Unknown: LeftRegion for integrase B8386 sequence
aaattgaggtggaaagaaatggtaaagattactattgacggtaaagatgttaagccggcggatgttgttcttcccgaacagattttgaaaatcatcgcggaagcagtcggcggttgacaaaaccgtaacttaagtgtagaatgtgccgtaaatgcgataaatgcggcacattctttatttcagaaaggagattataaactatggaatgtgttgcttatataagagtttcgacagaaagacaagcggaggaaggttacgga

SEQ ID NO: 21386 - DNA, 260 bp, Unknown
  Description of Unknown: LeftRegion for integrase B8387 sequence
taagaatgaagatgaagaatcaaatgataaaattgaattacttattaataaaattgatcaattagaaagtacgattgaacaactaaaagaggaaataaaaaaataacgcaccccccgaccaagaagttgtgcgttaaaaatagaaccaaaataggcttattttgttacgcctattttaccaaaaataatgaggtgaaacaatggcaaatgaaataaaacaagtagcgttatacatacgtgtgtctacagatcaacaagct

SEQ ID NO: 21387 - DNA, 260 bp, Unknown
  Description of Unknown: LeftRegion for integrase B8388 sequence
ctgatttcccgaaacttaaagaacttctaaaaaagaataaaacagaaattgactataaaaaatctgaaattcttgcttgattaactcttttcgaccaaaattcacaaatgttttttggttgaaaaacaaatttgaaatatggtataatgtagtaaagtttctttgctacattatctttttttaaagagaaggggataacaatgacaaaagataatagaaaaacagctttatatattcgtgtttctacagattttcaagct

SEQ ID NO: 21388 - DNA, 260 bp, Unknown
  Description of Unknown: LeftRegion for integrase B8389 sequence
ataaaattgaggtagaaagaaatggtaaagattactattgacggtaaagatgtcaagccggcggatgttgttcttcccgaacagattttgaaaatcatcgcggaagctgtcggcggttgacaaaaccgtaacttaagtgtagaatgtgccgtaaatgcgataaatgcggcacattctttttagaaaggagattataaactatggaatgtgttgcttatataagagtttctacagaaagacaagcggaggaaggctacggg

SEQ ID NO: 21389 - DNA, 260 bp, Unknown
  Description of Unknown: LeftRegion for integrase B8390 sequence
taagaatgaagaagatgaatcaaatgataaaattgaattacttattaataaaattgatcaattagaaagtacgattgaacaactaaaagaggaaataaaaaaataacgcaccctccgaccaagaagttgtgcgttaaaaatagaaccaaaataggcttattttgttacgcctattttaccaaaaataatgaggtgaaacaatggcaaatgaaataaaacaagtagcgttatacatacgtgtgtctacagatcaacaagct

SEQ ID NO: 21390 - DNA, 260 bp, Unknown
  Description of Unknown: LeftRegion for integrase B8391 sequence
ctgatttcccaaaacttaaagagcttctaaaaaagaataaaacagaaattgactataaaaaatctgaaattcttgcttgattaactcttttcgaccaaaattcacaaatgttttttggttgaaaaacaaatttgaaatatggtataatgtagtaaagtttctttgctacattttctttttttaaagagaaggggataacaatgacaaaagataatagaaaaacagctttatatattcgtgtttctacagattttcaagct

SEQ ID NO: 21391 - DNA, 260 bp, Unknown
  Description of Unknown: LeftRegion for integrase B8392 sequence
gaaaattaagaagttggaggcgttttgatggttaaagtaacaatgggaggtcaggagatcaacatagaagacgttcaactttcagacgaagttctggaaatgattgctgagtgttgtaattgaccaaaatattaaatgatgatagaatgtgccgtatgtatgataaacacggcacattcttctataaagggggtaattgagtgaaagaatgtgttgcgtatataagagtttctacggaaaagcaagccgaagaaggacac

SEQ ID NO: 21392 - DNA, 260 bp, Unknown
  Description of Unknown: LeftRegion for integrase B8393 sequence
atgctcaaacaaaagcaacagcaaaatatcaacagaaagtcggacttgtctctaagtcttataagctgagaaaggaaatcgtagatgcttatgctgccgcctgtaaaaaggcgggtgtaagctgtgcaggccagctcacaataatgatgcaagaatttatccggacagtgtcagactctgacacaaaggagggataatgcatggagaaaaaaatcagatgtgctatatatgacagggtatcgcacgagctgcaggtcgaa

SEQ ID NO: 21393 - DNA, 260 bp, Unknown
  Description of Unknown: LeftRegion for integrase B8394 sequence
ggacttgaacattttgttaacatcaacaaaatgatagaaaaagccccagtgctaccaacaccggggcaatcccagaaaactatgcagaccggatggccagtataatcttctcacgcaaaagaaattataccacaaacctccggcatctgcataggtgtattttttatacctttttttaatagaatgaactggaggttaccatgacaaaaacttcgaaaagaatccgctgcgctatttatgaccgggtaagtacagacatg

SEQ ID NO: 21394 - DNA, 260 bp, Unknown; identical to SEQ ID NO: 21388
  Description of Unknown: LeftRegion for integrase B8395 sequence

SEQ ID NO: 21395 - DNA, 260 bp, Unknown
  Description of Unknown: LeftRegion for integrase B8396 sequence
ctgatttcccaaaacttaaagagcttctaaaaaagaataaaacagaaattggctataaaaaatctgaaattcttgcttgattaactcttttcgaccaaaattcacaaatgttttttggttgaaaaataaatttgaaatatggtataatgtagtaaagtttctttgctacattttctttttttaaagagaaggagacaacaatgacaaaagataataggaaaacagctttatatattcgtgtttctacagattttcaagcc

SEQ ID NO: 21396 - DNA, 260 bp, Unknown
  Description of Unknown: LeftRegion for integrase B8397 sequence
atttgacactaaactattaagtgaaggaaataaaaaggaaaatactagaaaaaattaaaataaaaaatagataatgtatccctcgccaaagttttacattatctattctcaaacactacttgtataagcagtttttattattatattacataataccttcttatacaagtaccgaatatttgtttaaggaggttttttatatgaaaactgttgcttgttattgtagagttagtacagaagaacaagtaaaatatggcttt

SEQ ID NO: 21397 - DNA, 260 bp, Unknown
  Description of Unknown: LeftRegion for integrase B8398 sequence
agcttgagggggataaaggagcaactgcggcggtgtgataagctcattccattcgctttgatacatagaaagaagatattggaggtgagactatcaaagcggtaatctatgctcgttattcgagccataaccaacgagaagaatccatcgagggtcagcttcgagagtgccatgagttcgctctcaagaatgacttcatcgtggttgacgaatatatcgaccgggcgatctccggcaagactgataatcgccccagcttc

SEQ ID NO: 21398 - DNA, 260 bp, Unknown
  Description of Unknown: LeftRegion for integrase B8399 sequence
aaaagacgaatcgaaatatactgttctttatttatatagcccattagataatacaaaaactatggaaataccattaaagagcgatcaataatctataaaaaaataacgcaccctccgaccaagaagttgtgcgttaaaaatagaaccaaaataggcttattttgttacgcctattttaccaaaaataatgaggtgaaacaatggcaaatgaaataaaacaagtagcgttatacatacgtgtgtctacagatcaacaagct

SEQ ID NO: 21399 - DNA, 260 bp, Unknown
  Description of Unknown: LeftRegion for integrase B8400 sequence
ctgatttcccaaaacttaaagagcttctaaaaaagaataaaacagaaattgactataaaaaatctgaaattcttgcttgattaactcttttcgaccaaaattcacaaatgttttttggttgaaaaataaatttgaaatatggtataatgtagtaaagcttctttgctacattttctttttttaaagagaaggagacaacaatgacaaaagataataggaaaacagctttatatattcgtgtttctacagattttcaagcc

SEQ ID NO: 21400 - DNA, 260 bp, Unknown
  Description of Unknown: LeftRegion for integrase B8401 sequence
aaattgaggtagaaagaaatggtaaagattactattgacggtaaagacgttaagccggcagatgttgttcttcccgaacagattttgaaaatcatcgcggaagctgtcggcggttgacaaaaccgtaacttaagtgtagaatgtgccgtaaatgcgataaatgcggcacattctttatttcagaaaggagattataaactatggaatgtgttgcttatataagagtttcaacagaaagacaagcggaggaaggctacgga

SEQ ID NO: 21401 - DNA, 260 bp, Unknown
  Description of Unknown: LeftRegion for integrase B8402 sequence
gggcttgaacattttgttaacatcaacaaaatgatagaaaaagccccagtgctaccaacaccggggcaatcccagaaaactacgcagaccggatggccagtataatcttctcacgcaaaagaaattataccacaaacctccggcatctgcataggtgtattttttatacccttttttaatagaatgaactggaggttaccatgacaaaaacttcgaaaagaatccgctgcgctatttatgaccgggtaagtacagacatg

SEQ ID NO: 21402 - DNA, 260 bp, Unknown
  Description of Unknown: LeftRegion for integrase B8403 sequence
ctaccaacaccgagacggtaacgcgccctctccgcacagcagagataggacgacttaactataacacctccggagatgctacagcatttcgaccaaaaatattgtatcatcttcggagcagccttgcaagagaacgaaagttcgctggctgttatttttatacccacttttacataatattcaagggaaggtgatgctgcatgaaaaaaatccgatgtgcaatctatgatagagtatccacagagatacaagccacttcc

SEQ ID NO: 21403 - DNA, 260 bp, Unknown; identical to SEQ ID NO: 21402
  Description of Unknown: LeftRegion for integrase B8404 sequence

SEQ ID NO: 21404 - DNA, 260 bp, Unknown; identical to SEQ ID NO: 21389
  Description of Unknown: LeftRegion for integrase B8405 sequence

SEQ ID NO: 21405 - DNA, 260 bp, Unknown
  Description of Unknown: LeftRegion for integrase B8406 sequence
attagaaaaagaaaagaaaaaaagattaaaacttaaggaaaataatagaaaaaaattaaaataaaaaatagataatgtatccctcgccaaagttttacattatctattctcaaacactacttgtataagcagtttttattattatattacataataccttcttatacaagtaccgaatatttgtttaaggaggtttttgtatgaaaactgtagcttgttattgtcgtgtcagtacagaagagcaagtaaaatatggcttt

SEQ ID NO: 21406 - DNA, 260 bp, Unknown
  Description of Unknown: LeftRegion for integrase B8407 sequence
taataaattgaatgaagcaagcaagtgtacttttactgttaaaatgtaaaaaaagagaattatgttcctatttggcgatacgacacataattctctatatcaaagaaccttgaaagaaggtctttatgttacatattataacataatataaagccttttttcaagaaaattattaaattttagaaagaaggtatttttttatgaaatatgtagcttgttattgccgtgtaagcactgacgaacaggtaaaatttggcttt

SEQ ID NO: 21407 - DNA, 260 bp, Unknown
  Description of Unknown: LeftRegion for integrase B8408 sequence
tgatttcccaaaacttaaagagcttctaaaaaagaataaaacagaaattgactataaaaaatctgaaattcttgcttgattaactcttttcgaccaaaattcacaaatgttttttggttgaaaaacaaatttgaaatatggtataatgtagtaaagtttctttgctacattttctttttttaaaagagaaggggataacaatgacaaaagataatagaaaaacagctttatatattcgtgtttctacagattttcaagct

SEQ ID NO: 21408 - DNA, 260 bp, Unknown
  Description of Unknown: LeftRegion for integrase B8409 sequence
tatggaacattattttataaataagactttaaacgattatataaataaaaatttaacaaacattataaaaaataactaactactccccgaccaaagttcgtagttagttagctcaaagcactcttgaaaagagctaatttaattatatatttatttttagcttctttcaagagaacataggtttgaaaggagttttttatatgaaaactgtagcttgttattgtagagtcagtacagaagagcaagtcaaatatggcttt

SEQ ID NO: 21409 - DNA, 260 bp, Unknown
  Description of Unknown: LeftRegion for integrase B8410 sequence
gctatgtaataagtgttttgaatcctgaaaatacagagaacactctgttaatggtaaaggatggaaatgtaacttataacttcgcagataaactataaaaaaataacgcaccctccgaccaagaagttgtgcgttaaaaatagaaccaaaataggcttattttgttacgcctattttaccaaaaataatgaggtgaaacaatggcaaatgaaataaaacaagtagcgttatacatacgtgtgtctacagatcaacaagct

SEQ ID NO: 21410 - DNA, 260 bp, Unknown
  Description of Unknown: LeftRegion for integrase B8411 sequence
atgccgtccgtcagaatggcgcaggtgaaccgctcggtaaatcgcaccgttactctccccgcgtggttaaatgcggcggcaatcgagcgcaatatcaatttttcgcaagtcttgcaggatgcgctaaaaaaacagataagatcataagagccgccctcgacctgacaggccgggggcggaattaacaagggggaaagcagatgcaggacgttgtgagggtggcactatacccgcgcgtatctacggaggagcaggtatta

SEQ ID NO: 21411 - DNA, 260 bp, Unknown
  Description of Unknown: LeftRegion for integrase B8412 sequence
ggacttgaacattttgttaacatcaacaaaatgatagaaaaagccccagtgctaccaacaccggggcaatcccagaaaactacgcagaccggatggccagtataatcttctcacgcaaaagaaattataccacaaacctccggcatctgcataggtgtattttttatacccttttttaatagaatgaactggaggttaccatgacaaaaacttcgaaaagaatccgctgcgctatttatgaccgggtaagtacagacatg

SEQ ID NO: 21412 - DNA, 260 bp, Unknown
  Description of Unknown: LeftRegion for integrase B8413 sequence
tttgacactaaactattaagtgaaggaaataaaaaggaaaataatagaaaaaaattaaaataaaaaatagataatgtatccctcgccaaagttttacattatctattctcaaacactacttgtataagcagtttttattattatattacataataccttcttatacaagtaccgaatatttgtttaaggaggttttttatatgaaaactgttgcttgttattgtagagttagtacagaagaacaagtaaaatatggcttt

SEQ ID NO: 21413 - DNA, 260 bp, Unknown
  Description of Unknown: LeftRegion for integrase B8414 sequence
aaattgaggtagaaaaaaatggtaaagattactattgacggtaaagatgtcaagccggcggatgttattcttcccgaacagattttgaaaatcatcgcggaagctgtcggcggttgacaaaaccgtaacttaagtgtagaatgtgccgtaaatgcgataaatgcggcacattctttatttcagaaaggagattataaattatggaatgtgttgcttatataagagtttctacagaaaggcaagcggaggaaggctacgga

SEQ ID NO: 21414 - DNA, 260 bp, Unknown
  Description of Unknown: LeftRegion for integrase B8415 sequence
taaatggctaacagtgtgacaagatcaaaggtttgcagcaggttagatatcttttttataagctcctttctatccatatgatgcacctccttaaaaaaaagatgtttccatgctaacacaaagaagaaagcgatataatactttttttaacacttttgatgtgactaatggtgtaaacgtgacacaaggaaggacagaaaatggcagaaaaggaagaacagaaaaggttagataaggaaggaaagaaaagggcggctata

SEQ ID NO: 21415 - DNA, 260 bp, Unknown
  Description of Unknown: LeftRegion for integrase B8416 sequence
cggaagcaccttttgttttacataaaaaataaccgccccagtgttgacgcaccgagacggtaagaaatctccgaagagatacctatatttgtcagatatattgtatcatcttcggagcagccttgcaagagaacgaaagttcgctggctgttatttttatacccatttttacataccatacaaaaggaaggtgatgctgcatgaaaaaaatccgatgtgcaatctatgatagagtgtccacagagatacaagccacttcc

SEQ ID NO: 21416 - DNA, 260 bp, Unknown; identical to SEQ ID NO: 21412
  Description of Unknown: LeftRegion for integrase B8417 sequence

SEQ ID NO: 21417 - DNA, 260 bp, Unknown; identical to SEQ ID NO: 21402
  Description of Unknown: LeftRegion for integrase B8418 sequence

SEQ ID NO: 21418 - DNA, 260 bp, Unknown
  Description of Unknown: LeftRegion for integrase B8419 sequence
ggacttgaacattttgttaacatcaacaaaatgatagaaaaagccccggtgctaccaacaccgaggcattctcagaaaactacgcagaccggatggtcagtataatcttctcacgcaaaagaaattataccacaaacctccggcatctgcataggtgtattttttatacccttttttaatagaatgaactggaggttaccatgacaaaaacttcgaaaagaatccgctgcgctatttatgaccgggtaagtacagacatg

SEQ ID NO: 21419 - DNA, 260 bp, Unknown
  Description of Unknown: LeftRegion for integrase B8420 sequence
ataaaattgaggtagaaagaaatggtaaagattactattgacggtaaagatgtcaagccggcagatgttgttcttcccgagcagattttgaaaatcatcgcggaagctgtcggcggttgacaaaaccgtaacttaagtgtagaatgtgccgtaaatgcgataaatgcggcacattctttttagaaaggagattataaactatggaatgtgttgcttatataagagtttcgacagaaagacaagcggaggaaggctacgga

SEQ ID NO: 21420 - DNA, 260 bp, Unknown
  Description of Unknown: LeftRegion for integrase B8421 sequence
ttgattacataattattaaaaataataatgaaattattttactcttaatatctaatcaatatttattaaaaaacgttactgttggcgcagtaacgaactgaaaaacaatataacattagtacaagcaattacataataattatatatgagtttttcgtatataattatatcataaggcattaaaaaatggaagtgatataatgaaacaaaaagacagaattaaaacagttgcgctctatattcgtgtttccacagatcgg

SEQ ID NO: 21421 - DNA, 260 bp, Unknown
  Description of Unknown: LeftRegion for integrase B8422 sequence
ataagattgaggtagaaagaaatggtaaagattactattgacggtaaagatgtcaagccggcggatgttgttcttcccgaacagattttgaaaatcatcgcggaagctgtcggcggttgacaaaaccgtaacttaagtgtagaatgtgccgtaaatgcgataaatgcggcacattctttttagaaaggagattataaactatggaatgtgttgcttatataagagtttctacagaaagacaagcggaggaaggctacggg

SEQ ID NO: 21422 - DNA, 260 bp, Unknown
  Description of Unknown: LeftRegion for integrase B8423 sequence
ctgatttcccaaaacttaaagagcttctaaaaaagaataaaacagaaattgactataaaaaatctgaaattcttgcttgattaactcttttcgaccaaaattcacaaatgttttttggttgaaaaataaatttgaaatatggtataatgtagtaaagtttctttgctacattttctttttttaaagagaaggagacaacaatgacaaaagataataggaaaacagctttatatattcgtgtttctacagattttcaagcc

SEQ ID NO: 21423 - DNA, 260 bp, Unknown
  Description of Unknown: LeftRegion for integrase B8424 sequence
taaaattttactattataaataagattcaattaaaaaataatcaataaaaaagagaactatgtctctatttggcgatacgacacataattctctatatcaaagaaccttgaatgaaggtatctttatgctacatattatagcataacataaagccttttttcaagaaaatttttaaattttagaaagaaggtaattttttatgaaatatgtagcttgttattgccgtgtaagcactgacgaacaggcaaggtttggcttt

SEQ ID NO: 21424 - DNA, 260 bp, Unknown
  Description of Unknown: LeftRegion for integrase B8425 sequence
tttatgctcggtattctgccggcccgagacagaccgaccagagtatcgaagggcagcttagagtctgtgccgacttttgtaagcagcgagggcttaccgttatcgacacatactgcgaccgtcatatctcaggccgcacagacgagtgaccggagttccaaaggctcatcgccgacgccaagcgcaagaagttcgaggcggtggtcgtctataagacagaccgctttgcccggaacaaatacgatagcgccgtttataag

SEQ ID NO: 21425 - DNA, 260 bp, Unknown
  Description of Unknown: LeftRegion for integrase B8426 sequence
gaaaattaagaagttggaggcgttttgatggttaaagtaacaatgggtggtcaggagatcaacatagaagacgttcaactttcggacgaagttctggaaatgattgctgagtgttgtaattgaccaaaatattaaatgatgatagaatgtgccgtatgtatgataaacacggcacattcttctataaagggggtaattgagtgaaagaatgtgttgcgtatataagagtttctacggaaaagcaagccgaagaaggacac

SEQ ID NO: 21426 - DNA, 260 bp, Unknown
  Description of Unknown: LeftRegion for integrase B8427 sequence
ttgattttgtgaaatgagaggtgagcatatggcaattgttacgattgatgggaaagaaattgacatcgaacaaattgaactgccagaagaaattattaaaatcataattgaatgcttaggttgaccgcaaaaatattgtagtgtaaaatgtgtcgtaacatgatatgtgcggcacatttctacacaaaggaggaatagtcatggaatgtgttgcgtatttgcgtgtatcaacagaaaaacaggccgaagagggaaatgga

SEQ ID NO: 21427 - DNA, 260 bp, Unknown
  Description of Unknown: LeftRegion for integrase B8428 sequence
acaagatatctcgtgttgaaggagatggtgataaatggttatagtaaccatcgagggtaaggagattgatgttgaaaatattgaattgccagatgaagtgttaaggatgattgcagaagcgattgacagtaaataaagaatgaactaaaatgtgtcgcaagtgtagtaatgcggcacatttttgataggaggtataaaaaatggaatgtgttgcatacatgcgtgtctcgacagaaaaacaggcagaagaaggaaacgga

SEQ ID NO: 21428 - DNA, 260 bp, Unknown
  Description of Unknown: LeftRegion for integrase B8429 sequence
ttttcctttcgttcattttagtttccccaaaattggcgtttttatatgatagaaatctgattatttatttataactaaaaagtgatttattaaaaaaagtttttaaaaaaattatattttatgagtaaatctaaaatttattgtttaaaatatttatatatgataacatttagtaaaaatttagcgaaggggtactcattatggaaacaataataaaaaaagctgcttgctactgtagagtttcacatgaagaacaaaag

SEQ ID NO: 21429 - DNA, 260 bp, Unknown; identical to SEQ ID NO: 21426
  Description of Unknown: LeftRegion for integrase B8430 sequence

SEQ ID NO: 21430 - DNA, 260 bp, Unknown
  Description of Unknown: LeftRegion for integrase B8431 sequence
ttgattttgtgaaatgagaggtgagcatatggcaattgttacgattgatggaaaagaaattgacatcgaacaaattgaactgccagaagaaattattaaaatcataattgaatgcttaggttgaccgcaaaaatattgtagtgtaaaatgtgtcgtaacatgatatgtgcggcacatttctacacaaaggaggaatagtcatggaatgtgttgcgtatttacgtgtgtcgacagaaaaacaggccgaagagggaaatgga

SEQ ID NO: 21431 - DNA, 260 bp, Unknown
  Description of Unknown: LeftRegion for integrase B8432 sequence
aagttagcagattggagtaaaaaatggcaaaaatgacgttaaacgggaaagaaatttccccagaagatgtgatcctgcccgaaaaagtattggagctcatagcgaattgcttagattgacacctcttgtagcaggatgtagaatgtgccgtgaacatgataaacacggcacattctttttagagaaaaggaggaacggcaatggaatgtgtcgcttacttaagggtttcaaccgaaaaacaggcggaagaaggttatgga

SEQ ID NO: 21432 - DNA, 260 bp, Unknown
  Description of Unknown: LeftRegion for integrase B8433 sequence
acaaaatatctcgtgttaaaggagatggtgataaatggttatagtgaccatcaatggcaaagaggttgatgtagaaagtttagaactgccagaggaagtattacagataattgcagaagtaattgacagtaaataaagaatggactaaaatgtgtcgcaagtgtagtaatgcggcacatttttgataggaggtatataaagtggaatgtgttgcatatatgcgtgtctcgacagagaaacaggcagaagaaggtaatgga

SEQ ID NO: 21433 - DNA, 260 bp, Unknown; identical to SEQ ID NO: 21426
  Description of Unknown: LeftRegion for integrase B8434 sequence

SEQ ID NO: 21434 - DNA, 260 bp, Unknown; identical to SEQ ID NO: 21430
  Description of Unknown: LeftRegion for integrase B8435 sequence

SEQ ID NO: 21435 - DNA, 260 bp, Unknown
  Description of Unknown: LeftRegion for integrase B8436 sequence
ttgattttgtgaaatgagaggtgagcatatggcaattgttacgattgatggaaaagaaattgacatcgaacaaattgaactgccagaagaaattattaaaatcataattgaatgcttaggttgaccgcaaaaatattgtagtgtaaaatgtgtcgtaacatgatatgtgcggcacatttctacacaaaggaggaatagtcatggaatgtgttgcgtatttgcgtgtatcaacagaaaaacaggccgaagagggaaatgga

SEQ ID NO: 21436 - DNA, 260 bp, Unknown
  Description of Unknown: LeftRegion for integrase B8437 sequence
ttgattttgtgaaataggggtgatcgcatggcaatcgtaacacttgacggtaaaccggttgacattgaaaaaatcgaactgccggaggaaattgtggagttaatcatgacgtgtctggattgaccaaatgaataatgtggtgtagaatgtgtcgtaacatgatatgtgcggcacattttctacacaaaggaggaaaacgcatggaatgtgttgcatatttgcgtgtatctacagagaaacaggcagaggaaggaaacgga

SEQ ID NO: 21437 - DNA, 260 bp, Unknown
  Description of Unknown: LeftRegion for integrase B8438 sequence
ttgattttgtgaaatagaggtgatcgcatggcaatcgtaacacttgacggtaaaccggttgatattgaaaaaatcgaactgccggaggaaattgtggagttaatcatgacgtgtctggattgaccaaatgaataatgtggtgtagaatgtgtcgtaacatgatatgtgcggcacattttctacacaaaggaggaaaacgcatggaatgtgttgcatatttgcgtgtatctacagagaaacaggcagaagaaggaaacgga

SEQ ID NO: 21438 - DNA, 260 bp, Unknown; identical to SEQ ID NO: 21426
  Description of Unknown: LeftRegion for integrase B8439 sequence

SEQ ID NO: 21439 - DNA, 260 bp, Unknown
  Description of Unknown: LeftRegion for integrase B8440 sequence
cagattggagtaaaatggcaaaaatgacaaaaatgacgttaaacgggaaagaaatttccccagaagatgtgatcctgcctgaaaaagtattggagcttatagcgaattgcttagattgacacctcttgtagcaggatgtagaatgtgccgtgaacatgataaacacggcacattctttttagagaaaaggaggaacggcaatggaatgtgtcgcttacttaagggtttcaaccgaaaaacaggcggaagaaggttatgga

SEQ ID NO: 21440 - DNA, 260 bp, Unknown
  Description of Unknown: LeftRegion for integrase B8441 sequence
agatatctcgtgttaaaggagatggtgataaatggttgttatagtaaccatcgatggcaaggagattgatgttgaaaatattgaattgccggatgaagtgttaaggatgattgcagaagcgattgacagtaaataaagaatagactaaaatgtgtcgcaagtgtagtaatgcggcacatttttgataggagggataaaaaatggaatgtgttgcatacatgcgtgtctcgacagaaaaacaggcagaagaaggtaatgga

SEQ ID NO: 21441 - DNA, 260 bp, Unknown
  Description of Unknown: LeftRegion for integrase B8442 sequence
ttgattttgtgaaataggggtgattgcatgacaatcgtaacacttgacggtaaaccggttgacattgaaaaaatcgaactgccggaggaaattgtggagttaatcatgacgtgtctggattgaccaaatgaataatgtggtgtagaatgtgtcgtaacatgatatgtgcggcacattttctacacaaaggaggaaaacgcatggaatgtgttgcatatttgcgtgtatctacagagaaacaggcagaggaaggaaacgga

SEQ ID NO: 21442 - DNA, 260 bp, Unknown; identical to SEQ ID NO: 21426
  Description of Unknown: LeftRegion for integrase B8443 sequence

SEQ ID NO: 21443 - DNA, 260 bp, Unknown; identical to SEQ ID NO: 21426
  Description of Unknown: LeftRegion for integrase B8444 sequence

SEQ ID NO: 21444 - DNA, 260 bp, Unknown
  Description of Unknown: LeftRegion for integrase B8445 sequence
attggcaaattggagggtttaaatggtaaagataactgttgatggtaaagaagtaaaagcagaagatataaaactttctgctgatgttgtgaaagtcatatcatcatgccttgattgacattatagcaaaaagaggttagaatgtgtcgtaaagtacgataaatgcggcacattctttttatataaagggggatttagtgatggaatgtgttgcgtatatgagagtatcaacagaaaaacaagcagaagagggcaatggt

SEQ ID NO: 21445 - DNA, 260 bp, Unknown
  Description of Unknown: LeftRegion for integrase B8446 sequence
aaaataaaaagattggagttgtaaaatggttagagttactctgaatggcgaagaagttaaaacggaagaattggaactttcacaaaagatcatagaatacatagtttctttgttggattgacagaaaaatataataatagtaaaatgccgtatatcgtgatgtatgcggcatttttactaaagaaaggagaaatgttttaatgaattgtgtcgcatatatgcgtgtttcaacggaaaaacaggcagaagaaggaaatgga

SEQ ID NO: 21446 - DNA, 260 bp, Unknown; identical to SEQ ID NO: 21426
  Description of Unknown: LeftRegion for integrase B8447 sequence

SEQ ID NO: 21447 - DNA, 260 bp, Unknown; identical to SEQ ID NO: 21426
  Description of Unknown: LeftRegion for integrase B8448 sequence

SEQ ID NO: 21448 - DNA, 260 bp, Unknown; identical to SEQ ID NO: 21435
  Description of Unknown: LeftRegion for integrase B8449 sequence

SEQ ID NO: 21449 - DNA, 260 bp, Unknown; identical to SEQ ID NO: 21430
  Description of Unknown: LeftRegion for integrase B8450 sequence

SEQ ID NO: 21450 - DNA, 260 bp, Unknown; identical to SEQ ID NO: 21426
  Description of Unknown: LeftRegion for integrase B8451 sequence

SEQ ID NO: 21451 - DNA, 260 bp, Unknown
  Description of Unknown: LeftRegion for integrase B8452 sequence
aaaataaaaagattggagttgtaaaatggtaaaagtcactctgaatggcgaagaagttaaaacggaagaattggaactttcgcaaaagatcatagaatatatagtttctttgttggattgacaggaaaatataataatagtaaaatgccgtatatcgtgatgtatgcggcatttttactaaagaaaggagaaatgttttaatgaattgtgtcgcatatatgcgtgtttcaacggaaaaacaggcagaagaaggaaatgga

SEQ ID NO: 21452 - DNA, 260 bp, Unknown
  Description of Unknown: LeftRegion for integrase B8453 sequence
ataaaatatgtcggaaaagctattgtgacgataaaattcgataacaagatagttatgaagaaaagattaaggtaaataaaaagcccccgtttccgagggcgggctgcaatgacgcaaccgtaattcgcacctacattgtatcattgcggcccggaaaaatcaagtctcgggcatttctatgcccaaaataggaggatacaatgagagacgaaaatttagaaggaaaaagagctgctctttatatcagagtaagcacggaa

SEQ ID NO: 21453 - DNA, 260 bp, Unknown; identical to SEQ ID NO: 21426
  Description of Unknown: LeftRegion for integrase B8454 sequence

SEQ ID NO: 21454 - DNA, 260 bp, Unknown
  Description of Unknown: LeftRegion for integrase B8455 sequence
cagattggagtaaaatggcaaaaatgacaaaaatgacgttaaacgggaaagaaatttccccagaagatgtgatcctgcccgaaaaagtattggagcttatagcgaattgcttagattgacaccgtttgtagcaggatgtagaatgtgccgtgaacatgataaacacggcacattctttttagagaaaaggaggaacggcaatggaatgtgtcgcttacttaagggtttcaaccgaaaaacaggcggaagaaggttatgga

SEQ ID NO: 21455 - DNA, 260 bp, Unknown
  Description of Unknown: LeftRegion for integrase B8456 sequence
ttgattttgtgaaatagaggtgattgcatgacaattgtaacacttgacggtaaaccggttgacattgaaaaaatcgaactgccggaggaaattgtggagttaatcatgatgtgtctggattgaccaaatgaataatgtggtgtagaatgtgtcgtaacatgatatgtgcggcacattttctacacaaaggaggaaaacgcatggaatgtgttgcatatttgcgtgtatctacagagaaacaggcagaggaaggaaacgga

SEQ ID NO: 21456 - DNA, 260 bp, Unknown
  Description of Unknown: LeftRegion for integrase B8457 sequence
caaaagtaaaattaacaaactggagggatattatgattaaagttactcaaaatggcgagaatgtaaaaatggaaaacataactctttcagataatttactaaagataattgcagagataattgacaacaaataaatatgtgttacaatgtgtcgcataacgtgatgaatgcggcacattttactttaaggagataaatatatggaatgtgttgcttatatgagagtatctactgaaaagcaagctgttgagggtaatgga

SEQ ID NO: 21457 - DNA, 260 bp, Unknown
  Description of Unknown: LeftRegion for integrase B8458 sequence
aaaatatttcgcattaaaggagatgatggcaaatggttgtagtaaccatcaatggtaaggaaattgatacagaaaatgtagaattgccagaggaagtattgcggatgatcgcagaaacgattgacagtcaataattaacgtattaaaatgtgtcgcaaagtgtagtaatgcggcacatttttgataggagggaaataaaaatggaatgtgttgcatatatgcgtgtctcaacagaaaagcaggcagaagaggggaatggt

SEQ ID NO: 21458 - DNA, 260 bp, Unknown; identical to SEQ ID NO: 21426
  Description of Unknown: LeftRegion for integrase B8459 sequence

SEQ ID NO: 21459 - DNA, 260 bp, Unknown
  Description of Unknown: LeftRegion for integrase B8460 sequence
gaaaagatgtctcgtgttaaaggagatggtgataaatggttatagtaaccatcgagggcaaggagattgatgtggaaaatattgaattgccggatgaagtgttaaggatgattgcagaagcgattgacagtaaataaagaatggactaaaatgtgtcgcaagtgtagtaatgcggcacatttttgataggagggataaaaatggaatgtgttgcatacatgcgtgtctcgacagaaaagcaggcagaagaaggcaatgga

SEQ ID NO: 21460 - DNA, 260 bp, Unknown; identical to SEQ ID NO: 21456
  Description of Unknown: LeftRegion for integrase B8461 sequence

SEQ ID NO: 21461 - DNA, 260 bp, Unknown
  Description of Unknown: LeftRegion for integrase B8462 sequence
ttgattttgtgaaatgagaggtgagcatatggcaattgttacgattgatgggaaagaaattgacatcgaacaaattgaactgccagaagaaattattaaaatcataattgaatgcttaggttgaccacaaaaatattgtagtgtaaaatgtgtcgtaacatgatatgtgcggcacatttctacacaaaggaggaatagtcatggaatgtgttgcgtatttgcgtgtatcaacagaaaaacaggccgaagagggaaatgga

SEQ ID NO: 21462 - DNA, 260 bp, Unknown; identical to SEQ ID NO: 21435
  Description of Unknown: LeftRegion for integrase B8463 sequence

SEQ ID NO: 21463 - DNA, 260 bp, Unknown; identical to SEQ ID NO: 21435
  Description of Unknown: LeftRegion for integrase B8464 sequence

SEQ ID NO: 21464 - DNA, 260 bp, Unknown
  Description of Unknown: LeftRegion for integrase B8465 sequence
caggaagcagatatgtcactctgcaaaatggacaatatttaaaactgtctaatgcaaaaattgtaagataaataaaaagcccccgtttccgagggcagggctgcaatgatacagccgtaattcgcacctacattgtatcattgcggcccgagaaaatcaagtctcgggcatttctatgcccaaaaataggagggatcgtaatgaaagatgaaaacttagaaggaaaaatagctgctctttatatcagagtaagcacggaa

SEQ ID NO: 21465 - DNA, 260 bp, Unknown
  Description of Unknown: LeftRegion for integrase B8466 sequence
gctgttatcgtgggatatatcttttttgactaccgtatcccccaccaggggcttattcagggcggagaggccagcatattcgcgtggattgtctttttgctgcttgcggtcggtattggcttttttgccgctattttgatgatgtattttcgctatgcaaaaaagtatacattatcgccagataagggaggagatgaacaatgagtgtagtattgcgggcagcattatacccgcgtgtgtccacaagtgtagtattgcgg

SEQ ID NO: 21466 - DNA, 260 bp, Unknown; identical to SEQ ID NO: 21430
  Description of Unknown: LeftRegion for integrase B8467 sequence

SEQ ID NO: 21467 - DNA, 260 bp, Unknown
  Description of Unknown: LeftRegion for integrase B8468 sequence
aaaataaaaagattggagttgtaaaatggttaaagttactctgaatggcgaagaagttaaaacggaagaattggaactatcacaaaagatcatagaatatatagtttctttgttggattgacaggaaaatattataagagtaaaatgccgtatatcgtgatgtatgcggcatttttactaaagaaaggagaaatgttttaatgaattgtgtcgcatatatgcgtgtttcaacggaaaaacaggcagaagaaggaaatgga

SEQ ID NO: 21468 - DNA, 260 bp, Unknown
  Description of Unknown: LeftRegion for integrase B8469 sequence
ttgattttgtgaaatagaggtgatcgcatggcaatcgtaacacttgacggtaaaccggttgacattgaaaaaatcgaactgccggaggaaattgtagagttaatcatgacgtgtctggattgaccaaatgaataatgtggtgtagaatgtgtcgtaacatgatatgtgcgacacattttctacacaaaggaggaaaacgcatggaatgtgttgcatatttgcgtgtatctacagagaaacaggcagaggaaggaaacgga

SEQ ID NO: 21469 - DNA, 260 bp, Unknown
  Description of Unknown: LeftRegion for integrase B8470 sequence
tttgccattaattcttataagaaaaaccgcccagtgttaccagcactgaacggtcactacatacccgaagatatgcaagtattctaagcaaatatattgtatcatcttcggaacagtttaacaatcagaacatttattctattgttggctgttatttttgtacctattttttaatacattctacaaaggaaggtgattacatggcaaaaacaaaacgctgtgcaatttatattcgcgtgagtacagaagaacagttcata

SEQ ID NO: 21470 - DNA, 260 bp, Unknown; identical to SEQ ID NO: 21435
  Description of Unknown: LeftRegion for integrase B8471 sequence

SEQ ID NO: 21471 - DNA, 260 bp, Unknown
  Description of Unknown: LeftRegion for integrase B8472 sequence
acaagatatctcgtgttgaaggagatggtgataaatggttatagtaaccatcgagggcaaggaaattgatgttgaaaatattgaattgccggatgaagtgttaagaatgattgcagaagcgattgacagcaaataaagaatgaactaaaatgtgtcgcaagtgtagtaatgcggcacatttttgataggagggataaaaaatggaatgtgttgcatacatgcgtgtctctacagaaaaacaggcagaagaaggaaacgga

SEQ ID NO: 21472 - DNA, 260 bp, Unknown; identical to SEQ ID NO: 21436
  Description of Unknown: LeftRegion for integrase B8473 sequence

SEQ ID NO: 21473 - DNA, 260 bp, Unknown
  Description of Unknown: LeftRegion for integrase B8474 sequence
ttgattttgtgaaataggggtgatcgtatggcaatcgtaacacttgacggtaaaccggttgacattgaaaaaatcgaactgccggaggaaattgtggagttaatcatgatgtgtctggattgaccaaatgaataatgtggtgtagaatgtgtcgtaacatgatatgtgcggcacattttctacacaaaggaggaaaacgcatggaatgtgttgcatatttgcgtgtatctacagagaaacaggcagaggaaggaaacgga

SEQ ID NO: 21474 - DNA, 260 bp, Unknown; identical to SEQ ID NO: 21427
  Description of Unknown: LeftRegion for integrase B8475 sequence

SEQ ID NO: 21475 - DNA, 260 bp, Unknown; identical to SEQ ID NO: 21435
  Description of Unknown: LeftRegion for integrase B8476 sequence

SEQ ID NO: 21476 - DNA, 260 bp, Unknown
  Description of Unknown: LeftRegion for integrase B8477 sequence
aaaataaaaagattggagttgtaaaatggttaaagttactctgaatggcgaagaagttaaaacggaagaattggaactttcacaaaagatcatagaatatatagtttctttgttggattgacaagaaaatattataagagtaaaatgccgtatatcgtgatgtatgcggcatttttactaaagaaaggagaaatgttttaatgaattgtgtcgcatatatgcgtgtttcaacggaaaaacaagcagaagaaggaaatgga

SEQ ID NO: 21477 - DNA, 260 bp, Unknown
  Description of Unknown: LeftRegion for integrase B8478 sequence
ttgattttgtgaaataggggtgatcgcatggtaattgtaacacttgacggtaaaccggttgacattgaaaaaatcgaactgccggaggaaattgtggagttaatcatgacgtgtctggattgaccaaatgaataatgtggtgtagaatgtgtcgtaacatgatatgtgcggcacattttctacacaaaggaggaaaacgcatggaatgtgttgcatatttgcgtgtatctacagagaaacaggcagaggaaggaaacgga

SEQ ID NO: 21478 - DNA, 260 bp, Unknown; identical to SEQ ID NO: 21427
  Description of Unknown: LeftRegion for integrase B8479 sequence

SEQ ID NO: 21479 - DNA, 260 bp, Unknown
  Description of Unknown: LeftRegion for integrase B8480 sequence
cagattggagtaaaatggcaaaaatgacaaaaatgacgttaaacgggaaagaaatttctccagaagatgtgatcctgcccgaaaaagtattggagcttatagcgaattgcttagattgacaccgtttgtagcaggatgtagaatgtgccgtgaacatgataaacacggcacattctttttagagaaaaggaggaacggcaatggaatgtgtcgcttacttaagggtttcaaccgaaaaacaggcggaagaaggttatgga

SEQ ID NO: 21480 - DNA, 260 bp, Unknown
  Description of Unknown: LeftRegion for integrase B8481 sequence
ttgattttgtgaaataggggtgatcgcatggcaatcataacacttgacggtaaaccggttgacattgaaaaaatcgaactgccggaggaaattgtggagttaatcatgacgtgtctggattgaccaaatgaataatgtggtgtagaatgtgtcgtaacatgatatgtgcggcacattttctacacaaaggaggaaaacgcatggaatgtgttgcatatttgcgtgtatctacagagaaacaggcagaggaaggaaacgga

SEQ ID NO: 21481 - DNA, 260 bp, Unknown; identical to SEQ ID NO: 21471
  Description of Unknown: LeftRegion for integrase B8482 sequence

SEQ ID NO: 21482 - DNA, 260 bp, Unknown
  Description of Unknown: LeftRegion for integrase B8483 sequence
ttgattttgtgaaatgagaggtgagcatatggcaattgttacgattgatggaaaagaaattgacatcgaacaaattgaactgccagaagaaattattaaaatcataattgaatgcctaggttgaccgcaaaaatattgtagtgtaaaatgtgtcgtaacatgatatgtgcggcacatttctacacaaaggaggaatagtcatggaatgtgttgcgtatttgcgtgtatcaacagaaaaacaggccgaagagggaaatgga

SEQ ID NO: 21483 - DNA, 260 bp, Unknown
  Description of Unknown: LeftRegion for integrase B8484 sequence
ttgagggggataagggaacaactgcggcggtgtgataaggtcattcccttcgctttgatatatagaaagaagatattggaggtgagactatcaaagcggtaatatatgctcgttactcgagccacaaccaacgagaagaatcaatcgagggacagcttcgtgaatgtcacgagtttgccctcaagaacggtttcattgtcgtggacgaatatatcgaccgggctatctccggcaagacagacaaccgaccgagcttccag

SEQ ID NO: 21484 - DNA, 260 bp, Unknown
  Description of Unknown: LeftRegion for integrase B8485 sequence
ttgattttgtgaaatgagaggtgagcatatggcaattgttacgattgacggaaaagaaattgacatcgaacaaattgaactgccagaagaaattattaaaatcataattgaatgcttaggttgaccacaaaaatattgtagtgtaaaatgtgtcgtaacatgatatgtgcggcacatttctacacaaaggaggaatagtcatggaatgtgttgcgtatttgcgtgtatcaacagaaaaacaggccgaagagggaaatgga

SEQ ID NO: 21485 - DNA, 260 bp, Unknown
  Description of Unknown: LeftRegion for integrase B8486 sequence
ttgattttgtgaaataggggtgatcgcatgacaatcgtaacacttgacggtaaaccggttgacattgaaaaaatcgaactgccggaggaaattgtggagttaatcatgacgtgtctggattgaccaaatgaataatgtggtgtagaatgtgtcgtaacatgatatgtgcggcacattttctacacaaaggaggaaaacgcatggaatgtgttgcatatttgcgtgtatctacagagaaacaggcagaggaaggaaacgga

SEQ ID NO: 21486 - DNA, 260 bp, Unknown
  Description of Unknown: LeftRegion for integrase B8487 sequence
aaagttagcagattggagtaaaaatggcaaaaatgacgttaaacgggaaagaaatttccccagaagatgtgatcctgccagaaaaagtattggagcttatagcgaattgcttagattgacaccgtttgtagcaggatgtagaatgtgccgtgaacatgataaacacggcacattctttttagagaaaaggaggaacggcaatggaatgtgtcgcttacttaagggtttcaaccgaaaaacaggcggaagaaggttatgga

SEQ ID NO: 21487 - DNA, 260 bp, Unknown
  Description of Unknown: LeftRegion for integrase B8488 sequence
aaagttagcagattggagtaaaaatggcaaaaatgacgttaaacgggaaagaaatttccccagaagatgtgatcctgcccgaaaaagtattggagcttatagcgaattgcttagattgacaccgtttgtagcaggatgtagaatgtgccgtgaacatgataaacacggcacattctttttagagaaaaggaggaacggcaatggaatgtgtcgcttacttaagggtttcaaccgaaaaacaggcggaagaaggttatgga

SEQ ID NO: 21488 - DNA, 260 bp, Unknown
  Description of Unknown: LeftRegion for integrase B8489 sequence
ctaaaaaccattaaaatttatgcaaaaaaaccggcccggtgctaccaacaccgaaccggccgatctccggagagatacactattatgaccatacatattgtatcatcttcggaacatctggtcaatccgaacacagtttcgcggctgggtgttctttttgtaccctttttattaataagataccaaggaggagtgatacaatgattaaaacaggctgctacgtccgcgtgtctacagaaaaccagctggaaaactacagc

SEQ ID NO: 21489 - DNA, 260 bp, Unknown
  Description of Unknown: LeftRegion for integrase B8490 sequence
gattggcaaattggaggggttaaatggtaaagataactgttgatggtaaagaagtaaaggcagaagatataaaactttctgctgatgttgtgaaagtcatatcatcatgtcttaattgacattaaagtaaaaagaggttagaatgtgtcgtaaagtacgataaatacggcacattctttttatataaagggggatttaagatggaatgtgttgtgtatatgagagtatcaacagaaaagcaggcagaagagggcaatggt

SEQ ID NO: 21490 - DNA, 260 bp, Unknown; identical to SEQ ID NO: 21431
  Description of Unknown: LeftRegion for integrase B8491 sequence

SEQ ID NO: 21491 - DNA, 260 bp, Unknown; identical to SEQ ID NO: 21435
  Description of Unknown: LeftRegion for integrase B8492 sequence

SEQ ID NO: 21492 - DNA, 260 bp, Unknown
  Description of Unknown: LeftRegion for integrase B8493 sequence
attaaaaagaaaataagtaagttggagggatataatgattaaaattacccagaacggcgagaatgtaaaaacagaaagtataacgctttcagacagcttactaaagataattgcagagataattgacaataagtaaatatgtgttacaatgtgccgtataacgtgataaatgcggcacatttttataaggagtaaaatatatggaatgtgttgcttatatgagagtatctactgaaaagcaggctgttgagggcaatgga

SEQ ID NO: 21493 - DNA, 260 bp, Unknown
  Description of Unknown: LeftRegion for integrase B8494 sequence
cagagtatcggaggaaaaacagatgaatgttgtggttacgcaaagtggtaaaaaagtgaatattgctgatattgttttgcctgatgatgtggcaagaacaatagctagcatgattggttgacaagtaaataaatgacaagtagaatgtgccgtagaatgtagtgtatatgcggcacattttacgtaggagggtaataaaaatggaatgtgtggcatatataagagtgtcaacagaaagacaggttgaagagggttacggc

SEQ ID NO: 21494 - DNA, 260 bp, Unknown
  Description of Unknown: LeftRegion for integrase B8495 sequence
agacagactggaggtaaaaaatggttagagttacacaagacggcaaagatgttgacattgaagatgtttctctgccaaaagaaattattgagattatagcatccatatgctgttgacaccattgtaaaaaggctttagaatgtgtcgtatgtatgataaatacggcacattctttatatattgaaaggagtgtaaagaaaatggaatgtgtcgcatatatgcgtgtttccacggaaaaacaggcagaagaaggcaacggt

SEQ ID NO: 21495 - DNA, 260 bp, Unknown
  Description of Unknown: LeftRegion for integrase B8496 sequence
aaacagactggaggtaaaaaatggttagagttacacaagacggcaaagatgttgacattgaagatgtttctctgccaaaagaaattattgagattatagcatccatatgctgttgacaccattgtaaaaaggctttaaaatgtgtcgtatgtatgataaatacggcacattctttatatattgaaaggagtgtaaagaaaatggaatgtgtcgcatatatgcgtgtttccacggaaaaacaggcagaagaaggcaacggt

SEQ ID NO: 21496 - DNA, 260 bp, Unknown
  Description of Unknown: LeftRegion for integrase B8497 sequence
gcaaaaaattaagcgactggaggatattttatgattaatgttactcaaaatggtaaaaatgtagacacggaagaattaacattgccggacagtatcgttaaaatgattgcagagataattgacaagtaaattttagatgtgtaaaatgtgctgtatcgtgataaatgcggcacattttatactttaggaggatatatactatgaaatgtgttgcttatatgagagtatcgacagagaaacaggcagaagaaggtaacgga

SEQ ID NO: 21497 - DNA, 260 bp, Unknown
  Description of Unknown: LeftRegion for integrase B8498 sequence
gaaaataagtaagttggaggttataaatgattagggttactcaaaatggcgaagacgtaaaaacagaaaacataactctttcagacagcttactaaagataattgcagagataattgacaacaagtaaatatgtgttacaatgtgccgtagaacgtgataaatgcggcacatttatttatattataaggagataaaatatatggaatgtgttgcttatatgagagtatctactgaaaaacaggctgttgagggcaatgga

SEQ ID NO: 21498 - DNA, 260 bp, Unknown
  Description of Unknown: LeftRegion for integrase B8499 sequence
gtctttttgatttatttaaataacgcaagagcccctgtgcagcaaacacaggggcccagccttaccaagggtgtcacggttccccagataagaaatgttgagtacaagacatagtatatcatctttccgggcaccaggcaaccgtatgtgtaattttacgttaaccaaagagtatagttaagtattaaggagagatgaatatgattaaaggcgcatgttatgtccgcgtatcaacggacaatcagttagaaaactacagc

SEQ ID NO: 21499 - DNA, 260 bp, Unknown
  Description of Unknown: LeftRegion for integrase B8500 sequence
atcaaaaagaaaataagtaagttggaggaatataatgattaaaattacccagaatggcgagaatgtaaaagcagaaaacataacactttcagacaacttactaaagataattgcagagataattgacaacaaataaatatgtgttacaatgtgtcgcataatgtgataaatgcggcacattttttataaaggagaaaaatatggaatgtgttgcttacatgagagtatccactgaaaaacaggctgttgagggtaacgga

SEQ ID NO: 21500 - DNA, 260 bp, Unknown
  Description of Unknown: LeftRegion for integrase B8501 sequence
caagcaaaagattagtaagttggaggttttaaatgattaaagttacccaaaacggagtagatgtgaatatagaaaatataactattccggacaacttacaaaagataattgccgaagtgattgacaacaaataaatatgtgttaaaatgtgccgtataacgtgataaatgcggcacattttacataaaggaggattgacaatggaatgtgttgcgtatatgagggtatcaacggaaaagcaggctgttgagggcaacgga

SEQ ID NO: 21501 - DNA, 260 bp, Unknown
  Description of Unknown: LeftRegion for integrase B8502 sequence
gcatacgctctcttgggaggtgataggatgccggaaatctgggtctgcaccgcgcagccgggggatgcagcgctgcgcagggccgccgctgcctgcgtgctggagctcgagtacgccgtgctctctttgctgctcgcgcgcggacggctgacacgcacggaatacgatctctgcgccgcactgcttgggcaggcgctgacatgagcgccgggaaaaagccgctgcgcgtggctgcctactgccgcgtctccacagacggc

SEQ ID NO: 21502 - DNA, 260 bp, Unknown
  Description of Unknown: LeftRegion for integrase B8503 sequence
atcaaaaagaaaataagtaagttggagggatataatgattaaggttactcaaaacggagagagtgtgaaaacagaaaacataactctttcagacagcttactaaagataatcgcagagataattgacaataagtaaatatgtgttacaatgtgccgtataatgtgataaatgcggcacattttttataagggagaaaaatatggaatgtgttgcttatatgagagtatccactgaaaaacaggctgttgagggcaacgga

SEQ ID NO: 21503 - DNA, 260 bp, Unknown
  Description of Unknown: LeftRegion for integrase B8504 sequence
aaacagaatggaggtaaaaaatggttagagttacacaagacggcaaagatgttgatattgaagatgtttctctaccaaaagaaattattgagattatagcatctatatgctgttgacaccattgtaaaaaggctttagaatgtgtcgtatgtatgataaatacggcacattctttatatattgaaaggagcgtaaagaaaatggaatgtgtcgcatatatgcgtgtttccacggaaaagcaggcagaagaaggcaacggt

SEQ ID NO: 21504 - DNA, 260 bp, Unknown
  Description of Unknown: LeftRegion for integrase B8505 sequence
taaatagaatcggaggtttgactatatgacagttgtgcttacacagaatgggaaagaaattaatccagaagatgtagttttgccgtcagaggttttgaaactgattgcggaactgattaattgacgaaaaattgataatagtgtagaatgcgtcagtagtgaatatggcgcattcttttatatctgatggaggaatgagaatggaatgtgtcgcatatatgcgtgtttctacagagaaacaggcagaagagggaaacgga

SEQ ID NO: 21505 - DNA, 260 bp, Unknown
  Description of Unknown: LeftRegion for integrase B8506 sequence
caagcaaaagattagtaagttggaggttttaaatgattaaagttactcaaaacggagtagatgtggatgtagaaaatataactattccggacagcttacagaagataattgccgaagtgattgacaacaaataaatatgtgctaaaatgtgccgtataacgtgataaatgcggcacattttacataaaggaggattgacaatggaatgtgtcgcttatatgagagtatcgacggaaaaacaggctgttgagggcaacgga

SEQ ID NO: 21506 - DNA, 260 bp, Unknown
  Description of Unknown: LeftRegion for integrase B8507 sequence
caagcaaaaaattagtaagttggaggttttaaatgattaaagttactcaaaacggagtagatgtgaatatagaaaatataactattccggacagcttacaaaagataattgccgaagtgattgacaacaaataaatatgtgttaaaatgtgccgtataacgtgataaatgcggcacattttacataaaggaggattgacaatggaatgtgttgcgtatatgagggtatcaacggaaaaacaagctgttgagggcaacgga

SEQ ID NO: 21507 - DNA, 260 bp, Unknown
  Description of Unknown: LeftRegion for integrase B8508 sequence
gcaaaaaattaagcgattggaggatattttatgattaatgttactcaaaatggtaaaaatgtagacacagaagaattaacattgccggacagtatcgttaaaatgattgcagagataattgacaagtaaattttagatgtgtaaaatgtgctgtatcgtgataaatgcggcacattttatactttaggaggatatatactatgaaatgtgttgcttatatgagagtatcgacagagaaacaggcagaagaaggtaacgga

SEQ ID NO: 21508 - DNA, 260 bp, Unknown; identical to SEQ ID NO: 21498
  Description of Unknown: LeftRegion for integrase B8509 sequence

SEQ ID NO: 21509 - DNA, 260 bp, Unknown
  Description of Unknown: LeftRegion for integrase B8510 sequence
aaacagactggaggtaaaaaatggttagagttacacaagacggcaaagatgttgatattgaagatgtttctctgccaaaagaaattattgagattatagcatccatatgctgttgacaccattgtaaaaaggctttagaatgtgtcgtatgtatgataaatacggcacattctttatatattgaaaggagtgtaaataaaatggaatgtgtcgcatatatgcgtgtttccacggaaaaacaggcagaagaaggcaacggt

SEQ ID NO: 21510 - DNA, 260 bp, Unknown
  Description of Unknown: LeftRegion for integrase B8511 sequence
cagagtatcggaggaaaaacagatgaatgttgtggttacgcaaagcggtaaaaaagtgaatattgctgatattgttctgcccaatgatgtggcgagaacaatagctagcatgattggttgacaagtaaataaatgacaagtagaatgtgccgtagaatgtagtgtatatgcggcacattttacgtaggaggacaataaaaatggaatgtgtggcatatataagagtgtcaacagaaagacaggttgaagagggttacggc

SEQ ID NO: 21511 - DNA, 260 bp, Unknown
  Description of Unknown: LeftRegion for integrase B8512 sequence
atagaatcggaggtttgtctatatgacagttgtgcttacacagaatgggaaagaaattaatccagaggaagtagttcttccaccagaagtactaaagctgattgcagaattgattaattgacgaaaaaaatataatagtgtagaatgcgtcatgtgtagtgaatatggcgcattcttttatatctgatggaggaacgagaatggaatgtgtcgcatatatgcgtgtttccacggagaaacaggcagaagagggaaacgga

SEQ ID NO: 21512 - DNA, 260 bp, Unknown
  Description of Unknown: LeftRegion for integrase B8513 sequence
caaaaagaaaataagtaagttggagggatataatgattaaaattacccagaatggtgagagcgtaaaaatagaaaatataacactttcagacagcttactaaagataattgcagagataattgacaataagtaaatatgtgttacaatgtgccgtataatgtgataaatgcggcacattttactataaggagataaatatatggaatgtgttgcttatatgagagtatccactgaaaaacaggctgttgagggtaacgga

SEQ ID NO: 21513 - DNA, 260 bp, Unknown
  Description of Unknown: LeftRegion for integrase B8514 sequence
agtcaaaaatcagcagattggaggggtaatcatggtgattgtgacacgaaacggcaaggagattaagacgggcgaaatcaaattgccggacaagactaaagagctgattgcatcaataattgacaatcagtaagcataagggtaaaatgtgccgtaacgcgataagtacggcacattcttttttaagaggaggttaaacaatggaatgtgttgcgtacatgagagtatcaacggagaagcaagccgaagaaggtaacgga

SEQ ID NO: 21514 - DNA, 260 bp, Unknown
  Description of Unknown: LeftRegion for integrase B8515 sequence
cggagtatcggaggaaaagcagatgaatgttgtggttacacaaaacggtaagaaagtgaatattgctgatattgttctgcctgatgatgtggtgagaacaatagctagcatgattggttgacaagtaaataaatgacaagtagaatgtgccgtagaatgtagtgtatatgcggcacattttacgtaggagggtaataaaaatggaatgtgtggcatatataagagtgtcaacagaaagacaggttgaagagggttacggc

SEQ ID NO: 21515 - DNA, 260 bp, Unknown
  Description of Unknown: LeftRegion for integrase B8516 sequence
aaaaattaataatttaaactaaaacgaaagggcccctgtgcagcaaacacagaggcccagccttaccaatggtgtcacggttcccatgataagaaatgttaagtacaagacatagtatatcatctttccggacaccgggcaaccatatgtgtaattttacgtcaaccgaagagtatagttaaatatgaggagagattaatatgattaaaggcgcatgttatgtccgcgtatccacggacaatcagttggaaaactatagt

SEQ ID NO: 21516 - DNA, 260 bp, Unknown; identical to SEQ ID NO: 21504
  Description of Unknown: LeftRegion for integrase B8517 sequence

SEQ ID NO: 21517 - DNA, 260 bp, Unknown; identical to SEQ ID NO: 21497
  Description of Unknown: LeftRegion for integrase B8518 sequence

SEQ ID NO: 21518 - DNA, 260 bp, Unknown
  Description of Unknown: LeftRegion for integrase B8519 sequence
taaacagactggaggtaaaaaatggttagagttacacaagacggcaaagatgttgatattgaagatgtttctctgccaaaagaaattattgagattatagcatccatatgctgttgacaccattgtaaaaaggctttagaatgtgtcgtatgtatgataaatacggcacattctttatatattgaaaggagtgtaaaaaaatggaatgtgtcgcatatatgcgtgtttccacggaaaaacaagcagaagagggcaacggt

SEQ ID NO: 21519 - DNA, 260 bp, Unknown
  Description of Unknown: LeftRegion for integrase B8520 sequence
taaacagactggaggtaaaaaatggttagagttacacaagacggcaaagatgttgatattgaagatgtttctctgccaaaagaaattattgagattatagcatccatatgctgttgacaccattgtaaaaaggctttagaatgtgtcgtatgtatgataaatacggcacattctttatatattgaaaggagtgtaaaaaaatggaatgtgtcgcatatatgcgtgtttccacggaaaaacaggcagaagaaggcaacggt

SEQ ID NO: 21520 - DNA, 260 bp, Unknown
  Description of Unknown: LeftRegion for integrase B8521 sequence
attacggacgagattccgactgggagcattggtatctttaccagggggaatgaatgccttatcaaagaactgggaaccgacaggcttatttctcataataaagaatacggagacataccagctagagaagatataaaattagtaggacttgtattaggaaaggtggcagaagtatgaggtgtcaataaggagagatgaatatgattaaaggcgcatgttatgtccgcgtatccacggacaatcagttagaaaactacagc

SEQ ID NO: 21521 - DNA, 260 bp, Unknown
  Description of Unknown: LeftRegion for integrase B8522 sequence
caagcaaaaaattagtaagttggaggttttaaatgattaaagttacccaaaacggaatggatgtggatatagaaaatataactattccggacagcttacaaaagataattgccgaagtgattgacaacaaataaatatgtgttaaaatgtgccgtataacgtgataaatgcggcacattttacataaaggaggattgacaatggaatgtgttgcgtatatgagggtatcaacggaaaaacaggctgttgagggcaacgga

SEQ ID NO: 21522 - DNA, 260 bp, Unknown; identical to SEQ ID NO: 21497
  Description of Unknown: LeftRegion for integrase B8523 sequence

SEQ ID NO: 21523 - DNA, 260 bp, Unknown
  Description of Unknown: LeftRegion for integrase B8524 sequence
agtctttttgatttatttaaataacgcaagagcccctgtgcagcaaacacaggggcccagccttaccaagggtgtcacggttccccagataagaaatgttgagtacaagacatagtatatcatctttccgggcaccgggcaaccataggtgtaattttacatcaaccgaagagtatagttaaatatgaggagagatgaatatgattaaaggcgcatgttatgtccgcgtatccacggacaatcagttagaaaactacagc

SEQ ID NO: 21524 - DNA, 260 bp, Unknown
  Description of Unknown: LeftRegion for integrase B8525 sequence
caagcaaaagattagtaagttggaggttttaaatgattaaagttactcaaaacggagtagatgtggatatagaaaatataactattccggacagcttacaaaagataattgccgaagtgattgacaataaataaatatgtgttaaaatgtgccgtataacgtgataaatacggcacattttacataaaggaggattgacaatggaatgtgtcgcttatatgagagtatcgacggaaaaacaggctgttgagggcaacgga

SEQ ID NO: 21525 - DNA, 260 bp, Unknown
  Description of Unknown: LeftRegion for integrase B8526 sequence
aaatagaatcggaggtttgactatatgacagttgtgcttacacagaatgggaaagaaattaatccagaagatgtagttttgccgtcagaggttttgaaactgattgcggagctgattaattgacgaaaaattgataatagtgtagaatgcgtcatgtagtgaatatggcgcattcttttatgtctgatggaggaataaggatggaatgtgtcgcatatatgcgtgtttctacagagaaacaggcagaagagggaaacgga

SEQ ID NO: 21526 - DNA, 260 bp, Unknown
  Description of Unknown: LeftRegion for integrase B8527 sequence
cggagtatcggaggaaaagcagatgaatgttgtggttacacaaaacggtaagaaagtgaatattgctgatattgttctgcctgatgatgtgatgagaacaatagctagcatgattggttgacaagtaaataaatgacaagtagaatgtgccgtagaatgtagtgtatatgcggcacattttacgtaggaggataatagaaatggaatgtgtggcatatataagagtgtcaacagaaagacaggttgaagagggttacggc

SEQ ID NO: 21527 - DNA, 260 bp, Unknown
  Description of Unknown: LeftRegion for integrase B8528 sequence
agtcaaaaatcagcagattggaggggtaatcatggtgattgtgacacgaaacggcaaggagattaagacgggcgaaatcaaattgccggacaagactaaagagctgattgcatcaataattgacaatcagtaagcataagggtaaaatgtgccgtaacgcgataagtacggcacattcttttttaagaggaggttaaacaatggaatgtgttgcgtacatgagagtatcaacggagaagcaagccgaagaaggcaacgga

SEQ ID NO: 21528 - DNA, 260 bp, Unknown
  Description of Unknown: LeftRegion for integrase B8529 sequence
aaacagactggaggtaaaaaatggttagagttacacaagacggcaaagatgttgatattgaagatgtttctctgccaaaagaaattattgagattatagcatccatatgctgttgacaccattgtaaaaaggctttagaatgtgtcgtatgtatgataaatacggcacattctttatatattgaaaggagtgtaaagaaaatggaatgtgtcgcatatatgcgtgtttccacggaaaagcaggcagaagagggcaacggt

SEQ ID NO: 21529 - DNA, 260 bp, Unknown
  Description of Unknown: LeftRegion for integrase B8530 sequence
gcatacgctctcttgggaggtgatgagatgccggagatttgggtctgcaccgcacagcctgcggacgcagcgctgcgcaaggccgccgctgccggcacgcttgtgctcgagcacgccgtgctctctctgctgctcgcgcgcggacggctgacgcgcgcggaatatgacggctgcgccgcactgcttgggcaggcgctgacatgagcgccgggaaaaagccgctgcgcgtggctgcctactgccgcgtctccacagacggc

SEQ ID NO: 21530 - DNA, 260 bp, Unknown
  Description of Unknown: LeftRegion for integrase B8531 sequence
acagactggaggtaaaaaatggttagagttacacaagacggcaaagatgttgatattgaagatgtttctctgccaaaagaaattattgagattatagcatccatatgctgttgacaccattgtaaaaagactttagaatgtgttgtatgtatgataaatacggcacattctttatatattgaaaggagtgtaaagaaaaaatggaatgtgtcgcatatatgcgtgtttccacggaaaaacaggcagaagaaggcaacggt

SEQ ID NO: 21531 - DNA, 260 bp, Unknown
  Description of Unknown: LeftRegion for integrase B8532 sequence
aagtcaaaaatcagcagattggaggggtaatcatggtgattgtgacacagaatggcagggagattaagacaggcgaaatcaaattgccggacaagaccaaagaactgattgcatcaataattgacaatcagtaaatatgagcgtaaaatgtgccgtaacgcgataagtacggcacattctttttaagaggaggttaaacgatggaatgtgttgcgtacatgagagtatcaacggagaagcaagccgaagaaggtaacgga

SEQ ID NO: 21532 - DNA, 260 bp, Unknown
  Description of Unknown: LeftRegion for integrase B8533 sequence
tcaaaaatcaacagattggaggggaaatcatggtgattgtgacacagaatggcaaggaaatcaaggcaggcgaaatcaaattgccagacaaaaccaaagaactgattgcgtcgataattgacaatcagtaagcataagagtaaaatgtgccgtaacgcgataagtacggcacattctttttaataagaggaggttaaacgatggaatgtgttgcgtatatgagagtatcaacagaaaagcaggtagaagagggcaatggt

SEQ ID NO: 21533 - DNA, 260 bp, Unknown; identical to SEQ ID NO: 21497
  Description of Unknown: LeftRegion for integrase B8534 sequence

SEQ ID NO: 21534 - DNA, 260 bp, Unknown
  Description of Unknown: LeftRegion for integrase B8535 sequence
gattggaggtatacgctaatggcaattctgacaattgacggagaagtagtacaggcagaagatgtggagctagatgaagaaacgctccgtatgattgcagaaatactttctcggtctgattgacaaaaaaccgtataaaagatagaatgtgtcataatataggaaatatggcacattctatttaaaggaggaaatgatatatggaatgtgtcgcatatttgcgtgtttcaacagaaaagcaggcagaagagggccatggt

SEQ ID NO: 21535 - DNA, 260 bp, Unknown; identical to SEQ ID NO: 21498
  Description of Unknown: LeftRegion for integrase B8536 sequence

SEQ ID NO: 21536 - DNA, 260 bp, Unknown
  Description of Unknown: LeftRegion for integrase B8537 sequence
gattggcaaattggagggtttaaatggtaaagataactgttgatggtaaagaagtaaaagcagaagatataaaactttctgctgatgttgtgaaagtcatatcatcatgtcttgattgacattaaggtaaaaagaggttagaatgtgtcgtaaagtacgataaatacggcacattctttttatataaagggggatttaagatggaatgtgttgcgtatatgagagtatcaacagaaaagcaggttgaagaaggctatgga

SEQ ID NO: 21537 - DNA, 260 bp, Unknown
  Description of Unknown: LeftRegion for integrase B8538 sequence
cggagtatcggaggaaaagcagatgaatgttgtggttacacaaaacggtaagaaagtgaatattgctgatattgttctgcctgatgatgtggtgagaacaatagctagcatgattggttgacaagtaaataaatgacaagtagaatgtgccgtagaatgtagtgtatatgcggcacattttacgtaggaggataatagaaatggaatgtgtggcatatataagagtgtcaacagaaagacaggttgaagagggttacggc

SEQ ID NO: 21538 - DNA, 260 bp, Unknown
  Description of Unknown: LeftRegion for integrase B8539 sequence
aaacagactggaggtaaaaaatggttagagttacacaagacggcaaagatgttgatattgaagatgtttctctgccaaaagaaattattgagattatagcatccatatgctgttgacaccattgtaaaaaggctttagaatgtgtcgtatgtatgataaatacggcacattctttatatattgaaaggagtgtaaagaaaatggaatgtgtcgcatatatgcgtgtttccacggaaaagcaggcagaagagggcaacggc

SEQ ID NO: 21539 - DNA, 260 bp, Unknown
  Description of Unknown: LeftRegion for integrase B8540 sequence
cagagtatcggaggaaaagcagatgaatgttgtggttacacaaaacggtaaaaaagtaaatattgctgatattgttctgcctgatgatgtggcgagaacaatagctagcatgattggttgacaagtaaataaatgacaagtagaatgtgtcgtagaatgtagtgtatatgcggcacattttacgtaggagggtaataaaaatggaatgtgtggcatatataagagtgtcaacagaaagacaggttgaagagggttacggc

SEQ ID NO: 21540 - DNA, 260 bp, Unknown
  Description of Unknown: LeftRegion for integrase B8541 sequence
cggagtatcggaggaaaaacagatgaatgttgtggttacgcaaagtggtaaaaaagtgaatattgctgatattgttttgcctgatgatgtggcaagaacaatagctagcatgattggttgacaagtaaataaatgacaagtagaatgtgccgtagaatgtagtgtatatgcggcacattttacgtaggagggtaataaaaatggaatgtgtggcatatataagagtgtcaacagaaagacaggttgaagagggttacggc

SEQ ID NO: 21541 - DNA, 260 bp, Unknown; identical to SEQ ID NO: 21496
  Description of Unknown: LeftRegion for integrase B8542 sequence

SEQ ID NO: 21542 - DNA, 260 bp, Unknown; identical to SEQ ID NO: 21497
  Description of Unknown: LeftRegion for integrase B8543 sequence

SEQ ID NO: 21543 - DNA, 260 bp, Unknown
  Description of Unknown: LeftRegion for integrase B8544 sequence
atagaaagattggaggacggtaatcatggtaaagattacacttaacggaacagaaatacagccagaggatgtagagctgagtgaagaagcaaagaaaatgattgccgagttgctcaatcattgacaattaaccagtgaaaggatagaatgtgctatacacaggaagtacggcacgttctatctttaaggagggatagatagtggaatgtgtcgcatatatgcgtgtttctacagaaaaacaggcagaagaggggaatgga

SEQ ID NO: 21544 - DNA, 260 bp, Unknown; identical to SEQ ID NO: 21497
  Description of Unknown: LeftRegion for integrase B8545 sequence

SEQ ID NO: 21545 - DNA, 260 bp, Unknown
  Description of Unknown: LeftRegion for integrase B8546 sequence
atagaaagattggagggcggtaatcatggtaaagattacacttaacggaacagaaatacagccagaggatgtagagctgagtgaagaagcaaagaaaatgattgccgagatgctcaatcgttgacaattaaccagtgaaaggatagaatgtgctatacacaggaagtacggcacgttctatctttaaggagggatagatagtggaatgtgtcgcatatatgcgtgtttctacagaaaaacaggcagaagaggggaatgga

SEQ ID NO: 21546 - DNA, 260 bp, Unknown; identical to SEQ ID NO: 21497
  Description of Unknown: LeftRegion for integrase B8547 sequence

SEQ ID NO: 21547 - DNA, 260 bp, Unknown
  Description of Unknown: LeftRegion for integrase B8548 sequence
cggagtatcggaggaaaaacagatgaatgttgtggttacgcaaagtggtaaaaaagtgaatattgctgatattgttttgcctgatgatgtggcaagaacaatagctagcatgattggttgacaagtaaataaatgacaagtagaatgtgccgtagaatgtagtgtatatgcggcacattttacgtaggaggataatagaaatggaatgtgtggcatatataagagtgtcaacagaaagacaggttgaagagggttacggc

SEQ ID NO: 21548 - DNA, 260 bp, Unknown
  Description of Unknown: LeftRegion for integrase B8549 sequence
caagcaaaagattagtaagttggaggtttttaatgattaaagttacccaaaacggagtagatgtgaatatagaaaatataactattccggacagcttacaaaagataattgccgaagtgattgacaacaaataaatatgtgttaaaatgtgccgtataacgtgataaatgcggcacattttacataaaggaggattgacaatggaatgtgttgcgtatatgagggtatcaacggaaaaacaggctgttgagggaaatgga

SEQ ID NO: 21549 - DNA, 260 bp, Unknown
  Description of Unknown: LeftRegion for integrase B8550 sequence
tcaaaaatcagcagattggaggggtaatcatggtggttgtgacacagaatggcaaggaaatcaaggcaggtgaaatcaaattgccagacaagacaaaagaactgattgcatcaataattgacaatcagtaagcatgggagtagaatgtgccgtaacgcgataagtacggcacattctttttaataagaggaggttaaacaatggaatgtgttgcgtacatgagagtgtcgacagaaaggcaagctgaagaaggcaacgga

SEQ ID NO: 21550 - DNA, 260 bp, Unknown
  Description of Unknown: LeftRegion for integrase B8551 sequence
aaagaaaaaattaataaaatcggaggttaataatggtagttattactttgaatgggagaaaattgcaagctgatgaaattgagttaagtgaaaaaatcttatcaataatagcttcaattattgacaacaggtaaaaacaaatgtaaaatgtgtcgcaacgtgataaatgcggcacatttttactaaaggaggatttaatgatggaatgtgttgcgtacatgagggtttccactgaaaaacaggcagaagagggaaacgga

SEQ ID NO: 21551 - DNA, 260 bp, Unknown
  Description of Unknown: LeftRegion for integrase B8552 sequence
agtcaaaaatcagcagattggaggggtaatcatggtgattgtgacacagaatggcagggagattaagacaggcgaaatcaaattgccggacaagaccaaagaactgattgcatcaataattgacaatcagtaaatatgagcgtaaaatgtgccgtaacgcgataagtacggcacattcttttttaagaggaggttaaacgatggaatgtgttgcgtacatgagagtatcaacggagaagcaagccgaagaaggcaatggg

SEQ ID NO: 21552 - DNA, 260 bp, Unknown
  Description of Unknown: LeftRegion for integrase B8553 sequence
tgcatttttatattgcacatacgttctatctatcgtataatcattttgtaaataaaaaaatccggtactggcaataccggattcgtaacttatcaaccaggatgattgatatataaacacaaacaaattatatcatgcatcctgttgtttgtatagggtgtattttttatacccttttttcaaaagaaaggtggatgtttatgaaaagaaaaatcagatgtgcaatctatgaccgtgtatctcatgagctgcaagtagaa

SEQ ID NO: 21553 - DNA, 260 bp, Unknown
  Description of Unknown: LeftRegion for integrase B8554 sequence
gcaaaaaattaagcgactggaggatattttatgattaatgttactcaaaatggtaaaaatgtagacacggaagaattaacattgccggaaagtatcgttaaaatgattgcagagataattgacaagtaaattttagatgtgtaaaatgtgctgtatcgtgataaatgcggcacattttatactttaggaggatatatactatgaaatgtgttgcttatatgagagtatcgacagagaaacaggcagaagaaggtaacgga

SEQ ID NO: 21554 - DNA, 260 bp, Unknown; identical to SEQ ID NO: 21523
  Description of Unknown: LeftRegion for integrase B8555 sequence

SEQ ID NO: 21555 - DNA, 260 bp, Unknown
  Description of Unknown: LeftRegion for integrase B8556 sequence
gaaaataagtaagttggaggttataaatgattagagttactcaaaatggtgaagacgtaaaaacagaaaacataactctttcagacagcttactaaagataattgcagagataattgacaacaagtaaatatgtgttacaatgtgccgtagaacgtgataaatgcggcacatttatttatattataaggagataaaatatatggaatgtgttgcttatatgagagtatctactgaaaaacaggctgttgagggcaatgga

SEQ ID NO: 21556 - DNA, 260 bp, Unknown
  Description of Unknown: LeftRegion for integrase B8557 sequence
gaaaataagtaagttggaggttataaatgattagggttactcaaaatggcgaagacgtaaaaacagaaaacataactctttcagacagcttactaaagataattgcagagataattgacaacaagtaaatatgtgttacaatgtgccgtagaacgtgataaatgcggcacatttatttatattataaggagataaaatatatggaatgtgttgcttatatgagagtatctactgaaaaacaggctgttgagggtaatgga

SEQ ID NO: 21557 - DNA, 260 bp, Unknown
  Description of Unknown: LeftRegion for integrase B8558 sequence
atagaaagattggagggcggtaatcatggtaaagattacacttaacggaacagaaatacagccagaggatgtagagctgagtgaagaagcaaagaaaatgattgccgagttgctcaatcgttgacaattaaccagtgaaaggatagaatgtgctatacacaggaagtacggcacgttctatctttaaggagggatagatagtggaatgtgtcgcatatatgcgtgtttctacagaaaaacaggcagaagaggggaatgga

SEQ ID NO: 21558 - DNA, 260 bp, Unknown
  Description of Unknown: LeftRegion for integrase B8559 sequence
aaaataagtaagttggaggttatacaatgattagggttactcaaaatggtgaagacgtaaaaacagaaaacataactctttcagacagcttactaaagataattgcagagataattgacaacaagtaaatatgtgttacaatgtgccgtagaacgtgataaatgcggcacatttatttatattataaggagataaaatatatggaatgtgttgcttatatgagagtatctactgaaaaacaggctgttgagggcaatgga

SEQ ID NO: 21559 - DNA, 260 bp, Unknown
  Description of Unknown: LeftRegion for integrase B8560 sequence
caaaagtaaaattagcaaactggagggatattatgattaaagttactcaaaatggcgagaatgtaaaaacggaaaacataactctttcagataatttactaaagataattgcagagataattgacagcaaataaatatgtgttacaatgtgtcgcataacgtgatgaatgcggcacattttactttaaggagataaatatatggaatgtgttgcttatatgagagtatctactgaaaagcaagctgttgagggtaatgga

SEQ ID NO: 21560 - DNA, 260 bp, Unknown
  Description of Unknown: LeftRegion for integrase B8561 sequence
caaaaagaaaataagtaagttggagggacataatgattaaaattacccagaatggtgagagcgtaaaaatagaaaatataacactttcagacagcttactaaagataattgcagagataattgacaataagtaaatatgtgctaaaatgtgtcgcataacgtgataaatgcggcacattttactataaggagataaatatatggaatgtgttgcttatatgagagtatctactgaaaaacaggctgttgagggtaacgga

SEQ ID NO: 21561 - DNA, 260 bp, Unknown
  Description of Unknown: LeftRegion for integrase B8562 sequence
cggagtatcggaggaaaagcagatgaatgttgtggttacgcaaagcggtaaaaaagtgaatattgctgatattgttttgcctgatgatgtggcgagaacaatagctagcatgattggttgacaagtaaataaatgacaagtagaatgtgccgtagaatgtagtgtatatgcggcacattttacgtaggaggataataaaaatggaatgtgtggcatatataagagtgtcaacagaaagacaggttgaagagggttacggc

SEQ ID NO: 21562 - DNA, 260 bp, Unknown
  Description of Unknown: LeftRegion for integrase B8563 sequence
caagcaaaagattagtaagttggaggttttaaatgattaaagttacccaaaacggagtagatgtgaatatagaaaatataactattccggacagcttacaaaagataattgccgaagtgattgacaacaaataaatatgtgttaaaatgtgccgtataacgtgataaatacggcacattttacataaaggaggattgacaatggaatgtgttgcgtatatgagggtatcaacggaaaaacaggctgttgagggtaatgga

SEQ ID NO: 21563 - DNA, 260 bp, Unknown
  Description of Unknown: LeftRegion for integrase B8564 sequence
agtaagattatcaaacgtttgggacgcgtatcggatcgagaccgacttctgctgacgatgcgtggacaaatcagaacctgatataattggcagacaactgaggttgtctgctttttttgttacatactatagaacgcgcaaatttggtatgtaaaagcagcgttttttaagtcgatcaacattttgccaacgccggcaaaatgactgacattggctccggatcatctgatatttatttggatctatacctccacgacggg

SEQ ID NO: 21564 - DNA, 260 bp, Unknown
  Description of Unknown: LeftRegion for integrase B8565 sequence
gttcacaaattggaggtattgaattgataaaggtaacgcaaaatggtagagaggttcgcatagaggatattgttcttccaaaagatatactactcataatcgcaactatgttcgattgacagttatattaataatggttagaatgtgtcgtatgtatgataaatacggcacattctttttataagaaaggagaaaattacatggaatgtgtcgcatatattcgtgtgtctacagaaaaacaggcagaggaaggatatggt

SEQ ID NO: 21565 - DNA, 260 bp, Unknown
  Description of Unknown: LeftRegion for integrase B8566 sequence
attaaaaagaaaataagtaagttggagggatataatgattaaggttactcaaaatggcggagacgtaaaaacagaaaacataactctttcagacagcttactaaagataattgcagagataattgacaacaagtaaatatgtgttacaatgtgccgtagaacgtgataaatgcggcacattttttataaggagaaaatatatggaatgtgttgcttacatgagagtatctactgaaaaacaagctgttgagggtaacgga

SEQ ID NO: 21566 - DNA, 260 bp, Unknown
  Description of Unknown: LeftRegion for integrase B8567 sequence
aaacagactggaggtaaaaaatggttagagttacacaagacggcaaagatgttgatattgaagatgtttctctaccaaaagaaattattgagattatagcatctatatgctgttgacaccattgtaaaaaggctttagaatgtgtcgtatgtatgataaatacggcacattctttatatattgaaaggagcgtaaagaaaatggaatgtgtcgcatatatgcgtgtttccacggaaaagcaggcagaagaaggcaacggt

SEQ ID NO: 21567 - DNA, 260 bp, Unknown
  Description of Unknown: LeftRegion for integrase B8568 sequence
cggagtatcggaggaaaagcagatgaatgttgtggttacacaaaacggtaagaaagtgaatattgctgatattgttctgcctgatgatgtggtgagaacaatagctagcatgattggttgacaagtaaataaatgacaagtagaatgtgccgtagaatgtagtgtatatgcggcacattttacgtaggaggacaataaaaatggaatgtgtggcatatataagagtgtcaacagaaagacaggttgaagagggctacggc

SEQ ID NO: 21568 - DNA, 260 bp, Unknown; identical to SEQ ID NO: 21497
  Description of Unknown: LeftRegion for integrase B8569 sequence

SEQ ID NO: 21569 - DNA, 260 bp, Unknown; identical to SEQ ID NO: 21561
  Description of Unknown: LeftRegion for integrase B8570 sequence

SEQ ID NO: 21570 - DNA, 260 bp, Unknown; identical to SEQ ID NO: 21538
  Description of Unknown: LeftRegion for integrase B8571 sequence

SEQ ID NO: 21571 - DNA, 260 bp, Unknown
  Description of Unknown: LeftRegion for integrase B8572 sequence
taaaaacaaaataaacaggctggaggggatttaatggttaaagtaactatagacggagaagaagtagatatttccgaaatagaattaccggaaggcactgttaaacttattgcagaggtaattgacaatcagaactaaggctagtagaatgtgctgtatgtgataaatacggcgcattctaattttttggagggataattatgaaatgcgtagcgtatataagagtatcaacagaaaagcaagcagaggagggaaacgga

SEQ ID NO: 21572 - DNA, 260 bp, Unknown
  Description of Unknown: LeftRegion for integrase B8573 sequence
acagactggaggtaaaaaatggttagagttacacaagacggcaaagatgttgatattgaagatgtttctctgccaaaagaaattattgagattatagcatccatatgctgttgacaccattgtaaaaaggctttagaatgtgtcgtatgtatgataaatacggcacattctttatatattgaaaggagtgtaaagaaaaaatggaatgtgtcgcatatatgcgtgtttccacggaaaaacaggcagaagaaggcaacggt

SEQ ID NO: 21573 - DNA, 260 bp, Unknown; identical to SEQ ID NO: 21525
  Description of Unknown: LeftRegion for integrase B8574 sequence

SEQ ID NO: 21574 - DNA, 260 bp, Unknown; identical to SEQ ID NO: 21571
  Description of Unknown: LeftRegion for integrase B8575 sequence

SEQ ID NO: 21575 - DNA, 260 bp, Unknown
  Description of Unknown: LeftRegion for integrase B8576 sequence
aataaataggtaatactattcataagcaatgaaattcctttctgtgtttgtgggattggtttacctaaagtattgacacaaaaagggaggtcattgcttttttctttgaaaaagtggtgtaatccctgaaaatacaaggtttgtaacaaaaaatgaggtagtaaacttgacactaccgttaagtataaggagagatgaatatgattaaaggagcatgttatgtccgcgtatcaacggacaatcagttagaaaactacagc

SEQ ID NO: 21576 - DNA, 260 bp, Unknown
  Description of Unknown: LeftRegion for integrase B8577 sequence
aaacagactggaggtaaaaaatggttagagttacacaagacggcaaagatgttgatattgaagatgtttctctgccaaaagaaattattgagattatagcatccatatgctgttgacaccattgtaaaaaggctttagaatgtgtcgtatgtatgataaatacggcacattctttatatattgaaaggagtgtaaagaaaatggaatgtgtcgcatatatgcgtgtttccacggaaaaacaggcagaagagggcaacggt

SEQ ID NO: 21577 - DNA, 260 bp, Unknown
  Description of Unknown: LeftRegion for integrase B8578 sequence
tagttttttactccaaaaatctctttatgaacttatatatgcgttccaactgctgttcgttcgctttttctaataatttcataattgattttttgtagtttcttttcatttttctacctcctaaatttgaaaatatttccatttaggagtatagacattataaaaaaggaaaataatatatttagaaatggggttatgatatgcagaaagtaacaagggcggttttctacattcgtgtatcacacaaagaacaggtttta

SEQ ID NO: 21578 - DNA, 260 bp, Unknown; identical to SEQ ID NO: 21510
  Description of Unknown: LeftRegion for integrase B8579 sequence

SEQ ID NO: 21579 - DNA, 260 bp, Unknown
  Description of Unknown: LeftRegion for integrase B8580 sequence
agtcaaaaatcagcagattggaggggtaatcatggtgattgtgacacagaatggtaaggaaatcaaggcaggtgaaatcaaattgccggacaagactaaagagctgattgcatcaataattgacaatcagtaagcataagagtaaaatgtgccgtaacgcgataagtacggcacattcttttttaagaggaggttaaacgatggaatgtgttgcgtacatgagagtatcaacggagaagcaagccgaagaaggcaatggg

SEQ ID NO: 21580 - DNA, 260 bp, Unknown
  Description of Unknown: LeftRegion for integrase B8581 sequence
tttgcatttttatattgcacatacgttctatctatcgtataatcattttgtaaataaaaaatccggtactggcaataccggattcgtaacttatcaaccaggatgattgatatataaacacaaacaaattatatcatgcatcctgttgtttgtatagggtgtattttttataccctttttcaaaagaaaggtggatgtttatgaaaagaaaaatcagatgcgcaatctatgaccgtgtatctcatgagctgcaagtagaa

SEQ ID NO: 21581 - DNA, 260 bp, Unknown
  Description of Unknown: LeftRegion for integrase B8582 sequence
gctattttaaagggcttttggtgtttttctcatatagtgcgaaaaaactttaaatttttaaatggcttttaattatgttttaaaaaatgtttaaatggcttaattactgaattttttgaggttttccgactaaggaaaaaagaacattatcattatccagtaacatttctgacagtgataaacacgcttttgaggggattttggtttatcagcttgaccgatttgcccgtaaccgctacgacagcgctatctacaaatca

SEQ ID NO: 21582 - DNA, 260 bp, Unknown; identical to SEQ ID NO: 21497
  Description of Unknown: LeftRegion for integrase B8583 sequence

SEQ ID NO: 21583 - DNA, 260 bp, Unknown; identical to SEQ ID NO: 21526
  Description of Unknown: LeftRegion for integrase B8584 sequence

SEQ ID NO: 21584 - DNA, 260 bp, Unknown
  Description of Unknown: LeftRegion for integrase B8585 sequence
cggagtatcggaggaaaagcagatgaatgttgtggttacacaaaacggtaagaaagtgaatattgctgatattgttctgcctgatgatgtggtgagaacaatagctagcatgattggttgacaagtaaataaatgacaagtagaatgtgccgtagaatgtagtgtatatgcggcacattttacgtaggaggataatagaaatggaatgtgtggcatatataagagtgtcaacagaaagacaggttgaagagggctacggc

SEQ ID NO: 21585 - DNA, 260 bp, Unknown
  Description of Unknown: LeftRegion for integrase B8586 sequence
cggagtatcggaggaaaagcagatgaatgttgtggttacacaaaacggtaagaaagtgaatattgctgatattgttctgcctgatgatgtggtgagaacaatagctagcatgattggttgacaagtaaataaatgacaagtagaatgtgccgtagaatgtagtgtatatgcggcacattttacgtaggaggataataaaaatggaatgtgtggcatatataagagtgtcaacagaaagacaggttgaagagggttacggc

SEQ ID NO: 21586 - DNA, 260 bp, Unknown; identical to SEQ ID NO: 21509
  Description of Unknown: LeftRegion for integrase B8587 sequence

SEQ ID NO: 21587 - DNA, 260 bp, Unknown
  Description of Unknown: LeftRegion for integrase B8588 sequence
aaacagactggaggtaaaaaatggttagagttacacaagacggcaaagatgttgatatcgaagatgtttctctgccaaaagaaattattgagattatagcatccatatgctgttgacaccattgtaaaaaggctttagaatgtgtcgtatgtatgataaatacggcacattctttatatattgaaaggagtgtaaagaaaatggaatgtgtcgcatatatgcgtgtttccacggaaaaacaggcagaagaaggcaatggt

SEQ ID NO: 21588 - DNA, 260 bp, Unknown
  Description of Unknown: LeftRegion for integrase B8589 sequence
gcaaaaaattaagcgattggaggatattttatgattaatgttactcaaaatggtaaaaatgtagacacggaagaattaacattgccggacagtatcgttaaaatgattgcagagataattgacaagtaaattttagatgtgtaaaatgtgctgtatcgtgataaatgcggcacattttatactttaggaggatatatactatgaaatgtgttgcttatatgagagtatcgacagagaaacaggcagaagaaggtaacgga

SEQ ID NO: 21589 - DNA, 260 bp, Unknown; identical to SEQ ID NO: 21572
  Description of Unknown: LeftRegion for integrase B8590 sequence

SEQ ID NO: 21590 - DNA, 260 bp, Unknown
  Description of Unknown: LeftRegion for integrase B8591 sequence
tcaaaaatcagcagattggaggggtaatcatggtgattgtgacacagaacggcaaggaaatcaaggcaggtgaaatcaaattgccggacaagactaaagaactgattgcatcaataattgacaatcagtaagcatgggagtagaatgtgccgtaacgcgataagtacggcacattctttttaataagaggaggttaaacaatggaatgtgttgcgtacatgagagtatcaacggaaaagcaagccgaagaaggcaatggg

SEQ ID NO: 21591 - DNA, 260 bp, Unknown; identical to SEQ ID NO: 21538
  Description of Unknown: LeftRegion for integrase B8592 sequence

SEQ ID NO: 21592 - DNA, 260 bp, Unknown
  Description of Unknown: LeftRegion for integrase B8593 sequence
aaacagactggaggtaaaaaatggttagagttacacaagacggcaaagatgttgatattgaagatgtttctctgccaaaagaaattattgagattatagcatccatatgctgttgacaccattgtaaaaaggctttagaatgtgtcgtatgtatgataaatacggcacattctttatatattgaaaggagtgtaaagaaaatggaatgtgtcgcatatatgcgtgtttccacggaaaaacaggcagaagaaggcaacggt

SEQ ID NO: 21593 - DNA, 260 bp, Unknown
  Description of Unknown: LeftRegion for integrase B8594 sequence
cagagtatcggaggaaaaacagatgaatgttgtggttacacaaagcggtaaaaaagtgaatattgctgatattgttctgcctgatgatgtggtgagaacaatagttagcatgattggttgacaagtaaataaatgacaagtagaatgtgccgtggaatgtagtgtatatgcggcacattttacgtaggaggataataaaaatggaatgtgtggcatatataagagtgtcaacagaaagacaggttgaagagggctacggc

SEQ ID NO: 21594 - DNA, 260 bp, Unknown
  Description of Unknown: LeftRegion for integrase B8595 sequence
atagaaagattggagggcggtaatcatggtaaagattacacttaacggaacagaaatacagccagaggatgtagagctgagtgaagaagcaaagaaaatgattgccgagttgctcaatcattgacaattaaccagtgaaaggatagaatgtgctatacacaggaagtacggcacgttctatctttaaggagggatagatagtggaatgtgtcgcatatatgcgtgtttctacagaaaaacaggcagaagaggggaatgga

SEQ ID NO: 21595 - DNA, 260 bp, Unknown
  Description of Unknown: LeftRegion for integrase B8596 sequence
ggatgaaaaaaattatcagttttatccagatatgaatatgattgaagtggctgaatatttggtagatgaaggattatttggagaaatcccagaatcgattatatcttatattgattatgaaagtttagcccgtgatctaagctattctggatatgttcaaacaaattatggcgttattgaattaaattgaggtgaacagtatggaaatgataaaagttggcttatacgaccgagttagtcatgacgagcaagcattatat

SEQ ID NO: 21596 - DNA, 260 bp, Unknown
  Description of Unknown: LeftRegion for integrase B8597 sequence
cagagtatcggaggaaaaacagatgaatgttgtggttacgcaaagcggtaaaaaagtgaatattgctgatattgttctgcctgatgatgtggcgagaacaatagctagcatgattggttgacaagtaaataaatgacaagtagaatgtgccgtagaatgtagtgtatatgcggcacattttacgtaggagggcgataaaaatggaatgtgtggcatatataagagtgtcaacagaaagacaggttgaagagggctacggc

SEQ ID NO: 21597 - DNA, 260 bp, Unknown; identical to SEQ ID NO: 21526
  Description of Unknown: LeftRegion for integrase B8598 sequence

SEQ ID NO: 21598 - DNA, 260 bp, Unknown; identical to SEQ ID NO: 21538
  Description of Unknown: LeftRegion for integrase B8599 sequence

SEQ ID NO: 21599 - DNA, 260 bp, Unknown
  Description of Unknown: LeftRegion for integrase B8600 sequence
acagagtatcggaggaaaaacagatgaatgttgtggttacacaaagcggtaaaaaagtaaatattactgatattgttctacctgatgatgtagcgagaacaatagcgaatatgattggttgacaagtaaataaatgacaagtagaatgtgccgtagaatgtagtgtatatgcggcacattttacgtaggaggtaataaaaatggaatgtgtggcatatataagagtgtcaacagaaagacaggttgaagagggctacggc

SEQ ID NO: 21600 - DNA, 260 bp, Unknown
  Description of Unknown: LeftRegion for integrase B8601 sequence
gattggaggtatatgctaatggcaattctgacaattgacggagaagtagtacaggcagaagatgtggagctaaatgaagaaacgctccgtatgattgcagaaatactttctcagtctgattgacaaaaaaccgtataaaagatagaatgtgtcataatataggaaatatggcacattctatttaaaggaggaaatgatatatggaatgtgtcgcatatttgcgtgtttcaacagaaaagcaggcagaagagggtcatggt

SEQ ID NO: 21601 - DNA, 260 bp, Unknown
  Description of Unknown: LeftRegion for integrase B8602 sequence
gaaatctgaaagagaggatagcatgacaaaagtaaccgtaaacggcgaagaaatccagccggaagaaatcaagctcacagaaaaacagattgaagtgatcgccgccagcctgaactgttgataaagagctgttaaagtgttaaaatgtgccatgtatagcgttatatgtggcacatttttaaatcacaggagggagcaaaatggaatgtgtcgcatatttgagagtatcgacagaaaaacaggcagaagagggtcatgga

SEQ ID NO: 21602 - DNA, 260 bp, Unknown
  Description of Unknown: LeftRegion for integrase B8603 sequence
aaaaaataaaataaacaggctggagggaatcggatggttaaagtgactatagacggagaagaggtagatatttccaaaatagaattaccggaaggcactgttaagcttattgcagaggtaattgacaatcagaactaaggctagtagaatgtgctgtatgtgataaatacggcgcattctaattttttggagggataattatgaaatgcgtagcgtatataagagtatcaacagaaaagcaagcagaggagggaaacgga

SEQ ID NO: 21603 - DNA, 260 bp, Unknown
  Description of Unknown: LeftRegion for integrase B8604 sequence
tgtcaaaaatcagcagattggaggggtaatcatggtggttgtgacacagaatggcaaggaaatcaaggcaggtgaaatcaaattgccggacaagacaaaagagctgattgcatcaataattgacaatcagtaagcataggagtagaatgtgccgtaacgcgataagtacggcacattcttttttaagaggaggttaaacaatggaatgtgttgcgtacatgagagtatcaacagagaagcaagtcgaagaaggtaacgga

SEQ ID NO: 21604 - DNA, 260 bp, Unknown
  Description of Unknown: LeftRegion for integrase B8605 sequence
cggagtatcggaggaaaaacagatgaatgttgtggttacgcaaagcggtaaaaaagtgaatattgctgatattgttctgcctgatgatgtggcgagaacaatagctagcatgattggttgacaagtgaataaatgaaaagtagaatgtgccgtagaatgtagtgtatatgcggcacattttacgtaggaggacaataaaaatggaatgtgtggcatatataagagtgtcaacagaaagacaggttgaagagggctacggc

SEQ ID NO: 21605 - DNA, 260 bp, Unknown
  Description of Unknown: LeftRegion for integrase B8606 sequence
cagagtatcggaggaaaagcagatgaatgttgtggttacacaaagtggtaaaaaagtgaatattactgatattgttctacctgatgatgtggcgagaacaatagctagcatgatcggttgacaagtgaataaatgataagtagaatgtgccgtagaatgtagtgtatatgcggcacattttacgtaggaggacaataaaaatggaatgtgtggcatatataagagtgtcaacagaaagacaggttgaagagggctacggc

SEQ ID NO: 21606 - DNA, 260 bp, Unknown
  Description of Unknown: LeftRegion for integrase B8607 sequence
aaatagaatcggaggtttgactatatgacagttgtgcttacacagaatgggaaagaaattaatccagaagatgtagttttgccgtcagaggttttgaaactgattgcggagctgattaattgacgaaaaattgataatagtgtagaatgcgtcatgtagtgaatatggcgcattcttttatatctgatggaggaataaggatggaatgtgtcgcatatatgcgtgtttctacagagaaacaggcagaagagggaaacgga

SEQ ID NO: 21607 - DNA, 260 bp, Unknown; identical to SEQ ID NO: 21498
  Description of Unknown: LeftRegion for integrase B8608 sequence

SEQ ID NO: 21608 - DNA, 260 bp, Unknown
  Description of Unknown: LeftRegion for integrase B8609 sequence
gattggcaaattggagggtttaaatggtaaagataactgttgatggtaaagaagtaaaagcagaagatataaaactttctgctgatgttgtgaaagtcatatcatcatgccttgattgacattatagcaaaaagaggttagaatgtgtcgtaaagtacgataaacacggcacattctttttatataaagggggatttaagatggaatgtgttgcgtatataagagtatcaacagaaaaacaggttgaagaaggctacggg

SEQ ID NO: 21609 - DNA, 260 bp, Unknown
  Description of Unknown: LeftRegion for integrase B8610 sequence
agacagactggaggtaaaaaatggttagagttacacaagacggcaaagatgttgacattgaagatgtttctctgccaaaagaaattattgagattatagcatccatatgctgttgacaccattgtaaaaaggctttagaatgtgtcgtatgtatgataaatacggcacattctttatatattgaaaggagtgtaaagaaaatggaatgtgtcgcatatatgcgtgtttccacggaaaaacaagcagaagagggcaacggt

SEQ ID NO: 21610 - DNA, 260 bp, Unknown
  Description of Unknown: LeftRegion for integrase B8611 sequence
caagcaaaagattagtaagttggaggttttaaatgattaaagttacccaaaacggagtagatgtgaatatagaaaatataactattccggacagcttacaaaagataattgccgaagtgattgacaacaaataaatatgtgttaaaatgtgccgtataacgtgataaatgcggcacattttacataaaggaggattgacaatggaatgtgttgcgtatatgagggtatcaacggaaaaacaggctgttgagggtaatgga

SEQ ID NO: 21611 - DNA, 260 bp, Unknown
  Description of Unknown: LeftRegion for integrase B8612 sequence
aaacagactggaggtaaaaaatggttagagttacacaagacggcaaagatgttgatattgaagatgtttctctgccaaaagaaattgttgagattatagcatccatatgctgttgacaccattgtaaaaaggctttagaatgtgtcgtatgtatgataaatacggcacattctttatatattgaaaggagtgtaaagaaaatggaatgtgtcgcatatatgcgtgtttccacggaaaaacaggcagaagaaggcaacggt

SEQ ID NO: 21612 - DNA, 260 bp, Unknown; identical to SEQ ID NO: 21497
  Description of Unknown: LeftRegion for integrase B8613 sequence

SEQ ID NO: 21613 - DNA, 260 bp, Unknown
  Description of Unknown: LeftRegion for integrase B8614 sequence
caagcaaaaaattagtaagttggaggttttaaatgattaaagttactcaaaacggagtagatgtgaatatggaaaatataactattccggacagcttacaaaagataattgccgaagtgattgacaataaataaatatatgttaaaatgtgccgtataacgtgataaatgcggcacattttacataaaggaggattgacaatggaatgtgtcgcttatatgagagtatcgacagaaaaacaggctgttgagggcaacgga

SEQ ID NO: 21614 - DNA, 260 bp, Unknown; identical to SEQ ID NO: 21594
  Description of Unknown: LeftRegion for integrase B8615 sequence

SEQ ID NO: 21615 - DNA, 260 bp, Unknown
  Description of Unknown: LeftRegion for integrase B8616 sequence
attctttttatgttgcacatacgttctgtgcattgtataatcatattataaataaaaaaatccggtactggcaataccggattcgtaacttatcaaccaggatgattgatatataaacacaaacaaattatatcatgcatcctgttgtttgtatagggtgtattttttatacccttttttcaaaagaaaggtggatgtttatgaaaagaaaaatcagatgtgcaatctatgaccgtgtatctcatgagctgcaagtagaa

SEQ ID NO: 21616 - DNA, 260 bp, Unknown; identical to SEQ ID NO: 21497
  Description of Unknown: LeftRegion for integrase B8617 sequence

SEQ ID NO: 21617 - DNA, 260 bp, Unknown
  Description of Unknown: LeftRegion for integrase B8618 sequence
caagcaaaagattagtaagttggaggcttttaatgattaaagttacccaaaacggagtagatgtgaatatagaaaatataactatcccggacagcttacaaaagataattgccgaagtgattgacaacaaataaatatgtgttaaaatgtgccgtataacgtgataaatgcggcacattttacataaaggaggattgacaatggaatgtgttgcgtatatgagggtatcaacggaaaaacaggctgttgagggaaatgga

SEQ ID NO: 21618 - DNA, 260 bp, Unknown; identical to SEQ ID NO: 21511
  Description of Unknown: LeftRegion for integrase B8619 sequence

SEQ ID NO: 21619 - DNA, 260 bp, Unknown
  Description of Unknown: LeftRegion for integrase B8620 sequence
atcaaaaagaaaataagtaagttggagggatataatgattaaggttactcaaaacggagagaatgtgaaaacagaaaacataactctttcagacaacttactaaagataatcgcagagataattgacaataagtaaatatgtgttacaatgtgccgtataatgtgataaatgcggcacattttttataaaggaggaaaatatggaatgtgttgcttatatgagagtatccactgaaaaacaggctgttgagggcaacgga

SEQ ID NO: 21620 - DNA, 260 bp, Unknown; identical to SEQ ID NO: 21606
  Description of Unknown: LeftRegion for integrase B8621 sequence

SEQ ID NO: 21621 - DNA, 260 bp, Unknown
  Description of Unknown: LeftRegion for integrase B8622 sequence
acaattcctccgggtgctttcatagaaccatggaatgtgaatattttgccttcaggggagttcattttttgtgctgaatctcgtgaaaagcgtataaaaagcttgcaatcttctgcaaaatgtgatatatagattatacgaaacactgctttaaaagaacactccaccgttcaatgatgtgtaaatgggaggtgcctgccatgactgctgtgatctatgctcgttattcaactgacagccagcgcgaggaatccattgaa

SEQ ID NO: 21622 - DNA, 260 bp, Unknown
  Description of Unknown: LeftRegion for integrase B8623 sequence
aagtcaaaaatcagcagattggaggggtaatcatggtgattgtgacacagaatggcagggagattaagacaggcgaaatcaaattgccggacaagaccaaagaactgattgcatcaataattgacaatcagtaaatatgagcgtaaaatgtgccgtaacgcgataagtacggcacattctttttaagaggaggttaaacaatggaatgtgttgcgtacatgagagtatcaacggaaaggcaagccgaagaaggcaacgga

SEQ ID NO: 21623 - DNA, 260 bp, Unknown
  Description of Unknown: LeftRegion for integrase B8624 sequence
aagcaaaaaattagtaagttggaggttttaaatgattaaagttactcaaaacggagtagatgtgaatatagaaaatataactattccggacagcttacaaaagataattgccgaagtgattgacaataaataaatatgtgttaaaattatgccgtataacgtgataaatgcggcacatttttactaaaggaggattgacaatggaatgtgtcgcttatatgagagtatcgacagaaaaacaggctgttgagggtaacgga

SEQ ID NO: 21624 - DNA, 260 bp, Unknown; identical to SEQ ID NO: 21552
  Description of Unknown: LeftRegion for integrase B8625 sequence

SEQ ID NO: 21625 - DNA, 260 bp, Unknown; identical to SEQ ID NO: 21526
  Description of Unknown: LeftRegion for integrase B8626 sequence

SEQ ID NO: 21626 - DNA, 260 bp, Unknown; identical to SEQ ID NO: 21592
  Description of Unknown: LeftRegion for integrase B8627 sequence

SEQ ID NO: 21627 - DNA, 260 bp, Unknown; identical to SEQ ID NO: 21497
  Description of Unknown: LeftRegion for integrase B8628 sequence

SEQ ID NO: 21628 - DNA, 260 bp, Unknown
  Description of Unknown: LeftRegion for integrase B8629 sequence
gatatgggcggtggaggtacaacacacagattatttgatataggtattaattggaaagaacacatatatgtaggtaaaacaatatcgatgtaggaggtagggaagatgaatgctgatacagtaaaaataataaaagttgaatcaaatgtatataacttaatcgaggaactatattacaaattgaaagagcaaaaattaaaatgaagaatgctattatatatgttagagtttctacagaagaacaggcaaaaaatgactta

SEQ ID NO: 21629 - DNA, 260 bp, Unknown
  Description of Unknown: LeftRegion for integrase B8630 sequence
aaaataagtaagttggaggttatacaatgattagggttactcaaaatggtgaagacgtaaaaacagaaaacataactctttcagacagcttactaaagataattgcagagataattgacaacaagtaaatatgtgttacaatgtgccgtagaacgtgataaatgcggcacatttatttatatcataaggagataaaatatatggaatgtgttgcttatatgagagtatctactgaaaaacaggctgttgagggcaatgga

SEQ ID NO: 21630 - DNA, 260 bp, Unknown
  Description of Unknown: LeftRegion for integrase B8631 sequence
caaaagtaaaattagcaaactggagggatattatgattaaagttactcaaaatggcgagaatgtaaaaacggaaaacataactctttcagataatttactaaagataattgcagagataattgacaacaaataaatatgtgttacaatgtgtcgcataacgtgatgaatgcggcacattttactttaaggagataaatatatggaatgtgttgcttatatgagagtatctactgaaaagcaagctgttgagggtaatgga

SEQ ID NO: 21631 - DNA, 260 bp, Unknown; identical to SEQ ID NO: 21588
  Description of Unknown: LeftRegion for integrase B8632 sequence

SEQ ID NO: 21632 - DNA, 260 bp, Unknown; identical to SEQ ID NO: 21566
  Description of Unknown: LeftRegion for integrase B8633 sequence

SEQ ID NO: 21633 - DNA, 260 bp, Unknown
  Description of Unknown: LeftRegion for integrase B8634 sequence
agctttgtattatcgatctggaaaaatgagcgaagcggaatttctgaaaaaacttaaggaggagaaaattaaatatgatccgtactgggtgaactgcatctttatctatgtggacaattgataaagatatagataagtgataaaatgtgccatgtatagcgttatatgtggcacatttttaaatcacaggagggagcaaaatggaatgtgtcgcatatttgagagtatcgacagaaaaacaggcagaagaaggtcatgga

SEQ ID NO: 21634 - DNA, 260 bp, Unknown
  Description of Unknown: LeftRegion for integrase B8635 sequence
attgatccccatgaaccttttgcagtatatattaatggtaaagcaagaatacaggaaacaggtccagcaattttaataataaatcaagattaggaggtagggaagatgaatgctgatacagtaaaaataataaaagttgaatcaaatgtgtataatctaatcgaggaattatatagtaaattgaaagagcaaaaattaaaatgaagaatgctattatatatgttagagtttctacagaagaacaggcaaaaaatgactta

SEQ ID NO: 21635 - DNA, 260 bp, Unknown
  Description of Unknown: LeftRegion for integrase B8636 sequence
tatcaaatcacaatgagacatttaaaagatatgttagataagaagattatttcaatcgaagaatacaatcaaatgatggctgaatttaaagagaaatatacaccaaaaataagcagtttattctttgaaataacccaataagacttgatatatacatcatttagagtgatatatagtaatgataaaaatggaggtgtaagatgcgaaaaataacaaaattagaaacaaaaaacatagaacttcctaaacttaaaagagtg

SEQ ID NO: 21636 - DNA, 260 bp, Unknown
  Description of Unknown: LeftRegion for integrase B8637 sequence
aagtcaaaaatcagcagattggaggggtaatcatggtgattgtgacacagaacggcaaggaaatcaaggcaggtgaaatcaaattgccggacaagaccaaagaactgattgcatcaataattgacaatcagtaaatatgagcgtaaaatgtgccgtaacgcgataagtacggcacattctttttaagaggaggttaaacaatggaatgtgttgcgtacatgagagtatcaacggagaagcaagccgaagaaggtaacgga

SEQ ID NO: 21637 - DNA, 260 bp, Unknown
  Description of Unknown: LeftRegion for integrase B8638 sequence
aagtcaaaaatcagcagattggaggggtaatcatggtgattgtgacacagaatggcagggagattaagacaggcgaaatcaaattgccggacaagaccaaagaactgattgcatcaataattgacaatcagtaaatatgagcgtaaaatgtgccgtaacgcgataagtacggcacattctttttaagaggaggttaaacaatggaatgtgttgcgtacatgagagtatcaacggagaagcaagccgaagaaggtaacgga

SEQ ID NO: 21638 - DNA, 260 bp, Unknown
  Description of Unknown: LeftRegion for integrase B8639 sequence
atgccagaggaagatgaggaagaagaataataataaataaaaccgccccatttctgagacggtttcacagatactacctgccggacgtgccggatgatagaatctccttcgcaagagcattatatcatttctggatgcgtcccgcaagtgggcgtattttttaaaccttttttaatagaatttataatcaaggaagtgatatgatgggaaaaataattcgatgcgcaatctatgaccgcgtatctacagacatccaggtt

SEQ ID NO: 21639 - DNA, 260 bp, Unknown
  Description of Unknown: LeftRegion for integrase B8640 sequence
atcaaaaagaaaatcagtaagttggagggatataatgattaaggttactcaaaacggagaaaatgtgaaaacagaaaacataattctttcagacagcttactaaagataattgcagagataattgacaacaagtaaatatgtgttacaatgtgccgtagaacgtgataaatgcggcacattttttataaggagaaaatatatggaatgtgttgcttacatgagagtatctactgaaaaacaggctgttgagggcaacgga

SEQ ID NO: 21640 - DNA, 260 bp, Unknown; identical to SEQ ID NO: 21497
  Description of Unknown: LeftRegion for integrase B8641 sequence

SEQ ID NO: 21641 - DNA, 260 bp, Unknown; identical to SEQ ID NO: 21579
  Description of Unknown: LeftRegion for integrase B8642 sequence

SEQ ID NO: 21642 - DNA, 260 bp, Unknown; identical to SEQ ID NO: 21497
  Description of Unknown: LeftRegion for integrase B8643 sequence

SEQ ID NO: 21643 - DNA, 260 bp, Unknown
  Description of Unknown: LeftRegion for integrase B8644 sequence
tgcaacgaatgtaacgtttgcaatcggtgaaatccttaattgcgagcaaactatcaatccagagaaaatttattataagcgggattggatgaactgcatctttatctatgtggacaattgataaagatatagataagtgataaaatgtgccatgtatagcgttatatgtggcacatttttaaatcacaggaggaagcaaaatggaatgtgtcgcatatttgagagtatcgacagaaaaacaggcagaagagggtcatgga

SEQ ID NO: 21644 - DNA, 260 bp, Unknown
  Description of Unknown: LeftRegion for integrase B8645 sequence
taagtcaaaaatcagcagattggaggggtaatcatggtgattgtgacacagaatggtaaggaaatcaaggcaggtgaaatcaaattgccggacaagactaaagagctgattgcatcaataattgacaatcagtaagcataagagtaaaatgtgccgtaacgcgataagtacggcacattctttttaaaggaggttaaacaatggaatgtgttgcgtacatgagagtatcaacggaaaagcaagccgaagaaggcaacggg

SEQ ID NO: 21645 - DNA, 260 bp, Unknown
  Description of Unknown: LeftRegion for integrase B8646 sequence
atagaaagattggaggacggtaatcatggtaaagattacacttaacggaacagaaatacagccagaggatgtagaactgagtgaagaagcaaagaaaatgattgccgagttgctcaatcattgacaattaaccagtgaaaggatagaatgtgctatacacaggaagtacggcacgttctatctttaaggagggatagatagtggaatgtgtcgcatatatgcgtgtttctacagaaaaacaggcagaagagggaaatgga

SEQ ID NO: 21646 - DNA, 260 bp, Unknown
  Description of Unknown: LeftRegion for integrase B8647 sequence
caagcaaaaaattagtaagttggaggttttaaatgattaaagttactcaaaacggagtagatgtgaatatagaaaatataactattccggacagcttacaaaagataattgccgaagtgattgacaataaataaatatgtgataaaatgtgccgtataacgtgatagatgcggcacattttacataaaggaggattgacaatggaatgtgtcgcttatatgagagtatcgacggaaaaacaggctgttgagggtaacgga

SEQ ID NO: 21647 - DNA, 163 bp, Unknown
  Description of Unknown: LeftRegion for integrase B8648 sequence
ttactaaagataatcgcagagataattgacaataagtaaatatgtgttacaatgtgccgtataatgtgataaatgcggcacattttttataaaggaggaaaatatggaatgtgttgcttatatgagagtatccactgaaaaacaggctgttgagggcaacgga

SEQ ID NO: 21648 - DNA, 260 bp, Unknown
  Description of Unknown: LeftRegion for integrase B8649 sequence
caagcaaaagattagtaagttggaggttttaaatgattaaagttactcaaaacggagtagatgtgaatatagaaaatataactattccggacggcttacaaaagataattgccgaagtgattgacaataaataaatatgtgttaaaatgtgccgtataacgtgataaatgcggcacatttttactaaaggaggattaacaatggaatgtgtcgcttatatgagagtatcgacagaaaaacaggctattgagggtaatggc

SEQ ID NO: 21649 - DNA, 260 bp, Unknown; identical to SEQ ID NO: 21497
  Description of Unknown: LeftRegion for integrase B8650 sequence

SEQ ID NO: 21650 - DNA, 260 bp, Unknown
  Description of Unknown: LeftRegion for integrase B8651 sequence
caaaaagaaaataagtaagttggagggatataatgattaaaattacccagaatggtgagagcgtaaaaatagaaaatataacactttcagacagcttactaaagataatcgcagagataattgacaataagtaaatatgtgttacaatgtgtcgcataacgtgatgaatgcggcacattttactttaaggagataaatatatggaatgtgttgcttatatgagagtatctactgaaaagcaagctgttgagggcaatgga

SEQ ID NO: 21651 - DNA, 260 bp, Unknown; identical to SEQ ID NO: 21601
  Description of Unknown: LeftRegion for integrase B8652 sequence

SEQ ID NO: 21652 - DNA, 260 bp, Unknown
  Description of Unknown: LeftRegion for integrase B8653 sequence
tcaaaaatcaacagattggaggggtaatcatggtgattgtgacacagaatggcaaggaaatcaaggcaggcgaaatcaaattgccagacaagacaaaagaactgattgcatcaataattgacaatcagtaagcatgggagtagaatgtgccgtaacgcgataagtacggcacattctttttaataagaggaggttaaacaatggaatgtgttgcgtacatgagagtgtcgacagaaaggcaagctgaagaaggcaacgga

SEQ ID NO: 21653 - DNA, 260 bp, Unknown
  Description of Unknown: LeftRegion for integrase B8654 sequence
gattggaggcatatgctaatggcagttctgacaattgacggagaagtaatacaggcagaagatgtggagttaaatgaagaaacgctccgtatgattgcagaaatactttctcggtctgattgacaaaaaaccgtataaaagatagaatgtgtcataatataggaaatatggcacattctatttaaaggaggaaatgatatatggaatgtgtcgcatatttgcgtgtttcaacagaaaagcaggcagaagaggggcatggt

SEQ ID NO: 21654 - DNA, 260 bp, Unknown
  Description of Unknown: LeftRegion for integrase B8655 sequence
aaaataagtaagttggaggttatacaatgattagggttactcaaaatggtgaagacgtaaaaacagaaaacataactctttcagacagcttactaaagataattgcagagataattgacaacaagtaaatatgtgttacaatgtgccgtagaacgtgataaatgcggcacatttatttatattataaggagataaaatatatggaatgtgttgcttatatgagagtatctactgaaaaacaggctgttgagggtaacgga

SEQ ID NO: 21655 - DNA, 260 bp, Unknown
  Description of Unknown: LeftRegion for integrase B8656 sequence
gaaaataagtaagttggaggttataaatgattagagttactcaaaatggcgaagacgtaaaaacagaaaacataactctttcagacagcttactaaagataattgcagagataattgacaacaagtaaatatgtgttacaatgtgccgtagaacgtgataaatgcggcacatttatttatattataaggagataaaatatatggaatgtgttgcttatatgagagtatctactgaaaaacaggctgttgagggcaatgga

SEQ ID NO: 21656 - DNA, 260 bp, Unknown
  Description of Unknown: LeftRegion for integrase B8657 sequence
tcaaaaatcagcagattggagggggaatcatggtgattgtgacacagaatggcaaggaaatcaaggcaggtgaaatcaaattaccggacaagacaaaagaactgattgcagcaataattgacaatcagtaagcataagagtaaaatgtgccgtaacgcgataagtacggcacattctttttaataagaggaggttaaacaatggaatgtgttgcgtacatgagagtatcaacggagaagcaagtagaagaaggtaacgga

SEQ ID NO: 21657 - DNA, 260 bp, Unknown; identical to SEQ ID NO: 21497
  Description of Unknown: LeftRegion for integrase B8658 sequence

SEQ ID NO: 21658 - DNA, 260 bp, Unknown
  Description of Unknown: LeftRegion for integrase B8659 sequence
agtctttttgatttatttaaataacgcaagagcccctgtgcagcaaacacaggggcccagccttaccaagggtgtcacggttccccagataagaaatgttgagtacaagacatagtatatcatctttccgggcaccgggcaaccataggtgtaattttacgtcaaccgaagagtatagttaaatatgaggagagatgaatatgattaaaggcgcatgttatgtccgcgtatccacggacaatcagttagaaaactacagc

SEQ ID NO: 21659 - DNA, 260 bp, Unknown; identical to SEQ ID NO: 21497
  Description of Unknown: LeftRegion for integrase B8660 sequence

SEQ ID NO: 21660 - DNA, 260 bp, Unknown; identical to SEQ ID NO: 21606
  Description of Unknown: LeftRegion for integrase B8661 sequence

SEQ ID NO: 21661 - DNA, 260 bp, Unknown
  Description of Unknown: LeftRegion for integrase B8662 sequence
gaaaattaagaaattggaggcgttttgatggttaaagtaacgatgggtggtcaagaggtcaacatagaagatattgaactttcagaggatgttctggatgtgattgctgagtgttgtaattgaccaaaatattaaatgatgatagaatgtgccgtatgtatgataaacacggcacattcttctataaagggggtaattgagtgaaagaatgtgttgcgtatataagagtttctacggaaaagcaagccgaagaaggacac

SEQ ID NO: 21662 - DNA, 260 bp, Unknown
  Description of Unknown: LeftRegion for integrase B8663 sequence
aaacagactggaggtaaaaaatggttagagttacacaagacggcaaagatgttgatattgaagatgtttctctgccaaaagaaattattgagattatagcatccatatgctgttgacaccattgtaaaaaggctttagaatgtgtcgtatgtatgataaatacggcacattctttatatattgaaaggagtgtagagaaaatggaatgtgtcgcatatatgcgtgtttccacggaaaaacaggcagaagagggcaacggt

SEQ ID NO: 21663 - DNA, 260 bp, Unknown
  Description of Unknown: LeftRegion for integrase B8664 sequence
cggagtatcggaggaaaagcagatgaatgttgtggttacacaaaacggtaagaaagtgaatattgctgatattgttctgtctgatgatgtggtgagaacaatagctagcatgattggttgacaagtaaataaatgacaagtagaatgtgccgtagaatgtagtgtatatgcggcacattttacgtaggaggataatagaaatggaatgtgtggcatatataagagtgtcaacagaaagacaggttgaagagggctacggc

SEQ ID NO: 21664 - DNA, 260 bp, Unknown
  Description of Unknown: LeftRegion for integrase B8665 sequence
aagtctaaaatcagcagattggaggggtaatcatggtgattgtgacacagaatggcagggagattaagacaggcgaaatcaaattgccggacaagaccaaagaactgattgcatcaataattgacaatcagtaaatatgagcgtaaaatgtgccgtaacgcgataagtacggcacattctttttaagaggaggttaaacaatggaatgtgttgcgtacatgagagtatcaacggagaagcaagccgaagaaggtaacgga

SEQ ID NO: 21665 - DNA, 260 bp, Unknown
  Description of Unknown: LeftRegion for integrase B8666 sequence
agtctttttgatttatttaaataacgcaagaacccctgtgcagaaaacacaggggcccagccttaccaagggtgtcacggttcccatgataagaaatgttgagtacaagacatagtatatcatctttccggacaccgggcaaccatatgtgtaattttacgtcaaccgaagagtatagttaagtatgaggagagatgaatatgattaaaggcgcatgttatgtccgtgtatctacggacaatcagttagaaaactatagt

SEQ ID NO: 21666 - DNA, 260 bp, Unknown
  Description of Unknown: LeftRegion for integrase B8667 sequence
cagagtatcggaggaaaaacagatgaatgttgtggttacgcaaagcggtaaaaaagtgaatattgctgatattgttctgcccaatgatgtggcgagaacaatagctagcatgattggttgacaagtagataaatgacaagtagaatgtgccgtagaatgtagtgtatatgcggcacattttacgtaggaggacaataaaaatggaatgtgtggcatatataagagtgtcaacagaaagacaggttgaagagggttacggc

SEQ ID NO: 21667 - DNA, 260 bp, Unknown; identical to SEQ ID NO: 21588
  Description of Unknown: LeftRegion for integrase B8668 sequence

SEQ ID NO: 21668 - DNA, 260 bp, Unknown
  Description of Unknown: LeftRegion for integrase B8669 sequence
aaaataagtaagttggaggttatacaatgattagggttactcaaaatggcgaagacgtaaaaacagaaaacataactctttcagacagcttactaaagataattgcagagataattgacaacaagtaaatatgtgttacaatgtgccgtagaacgtgataaatgcggcacatttatttatattataaggagataaaatatatggaatgtgttgcttatatgagagtatctactgaaaaacaggctgttgagggcaatgga

SEQ ID NO: 21669 - DNA, 260 bp, Unknown
  Description of Unknown: LeftRegion for integrase B8670 sequence
cagagtatcggaggaaaagcagatgaatgttgtggttacacaaagcggtaaaaaagtgaatattgctgatattgttctgcctgatgatgtggcgagaacaatagctagcatgattggttgacaagtaaataaatgacaagtagaatgtgccgtagaatgtagtgtatatgcggcacattttacgtaggaggacaatagaaatggaatgtgtggcatatataagagtgtcaacagaaagacaggttgaagagggctacggc

SEQ ID NO: 21670 - DNA, 260 bp, Unknown; identical to SEQ ID NO: 21564
  Description of Unknown: LeftRegion for integrase B8671 sequence

SEQ ID NO: 21671 - DNA, 260 bp, Unknown; identical to SEQ ID NO: 21523
  Description of Unknown: LeftRegion for integrase B8672 sequence

SEQ ID NO: 21672 - DNA, 260 bp, Unknown; identical to SEQ ID NO: 21637
  Description of Unknown: LeftRegion for integrase B8673 sequence

SEQ ID NO: 21673 - DNA, 260 bp, Unknown; identical to SEQ ID NO: 21532
  Description of Unknown: LeftRegion for integrase B8674 sequence

SEQ ID NO: 21674 - DNA, 260 bp, Unknown
  Description of Unknown: LeftRegion for integrase B8675 sequence
cagagtatcggaggaaaaacagatgaatgttgtggttacgcaaagcggtaaaaaagtgaatattgctgatattgttttgcctgatgatgtggcaagaacaatagctagcatgattggttgacaagtaaataaatgacaagtagaatgtgccgtagaatgtagtgtatatgcggcacattttacgtaggagggcgataaaaatggaatgtgtggcatatataagagtgtcaacagaaagacaggttgaagagggctacggc

SEQ ID NO: 21675 - DNA, 260 bp, Unknown
  Description of Unknown: LeftRegion for integrase B8676 sequence
cggtaaatggctaacagggtaacaagatcaaaggtttgcagtagactggatatcttttttataagctcctttctatccatgatgcacctccttaaaaaaaagatgtttccatgctaacacaaaggggaaagcgatataatactttttttaacacttttgatgtgactaatggtgtaaacatggcacaaggaaggacagaaatggaagaacagaaaaggttagataaggaagggcagaaaagggcggctatatatgtgcgt

SEQ ID NO: 21676 - DNA, 260 bp, Unknown
  Description of Unknown: LeftRegion for integrase B8677 sequence
gcatttttatattgcacatacgttctatctatcgtataatcattttgtaaataaaaaaatccggtactggcaataccggattcgcgacttatcaaccaggatgattgatatataaacacaaacaaattatatcatgcatcctgttatttgtatagggtgtattttttataccctttttttcaaaagaaaggtggatgtttatgaaaagaaaaatcagatgtgcaatctatgatcgcgtgtctcatgaactgcaggtagaa

SEQ ID NO: 21677 - DNA, 260 bp, Unknown
  Description of Unknown: LeftRegion for integrase B8678 sequence
ttaaaaagaaaataagtaagttggaggatatacaatgattagggttactcaaaatcgtgaagacgtaaaaacagaaaacataactctttcagacagcttactaaagataattgcagagataattgacaacaagtaaatatgtgttacaatgtgccgtataacgtgataaatgcggcacatttttataaggagtaaaatatatggaatgtgttgcttatatgagagtatctactgaaaagcaggctgttgagggcaatgga

SEQ ID NO: 21678 - DNA, 260 bp, Unknown; identical to SEQ ID NO: 21545
  Description of Unknown: LeftRegion for integrase B8679 sequence

SEQ ID NO: 21679 - DNA, 260 bp, Unknown
  Description of Unknown: LeftRegion for integrase B8680 sequence
caaccctgcttcaaaggaacgccttacggatattctgcaaagactgatagaccgtgaatgtgaagaaatgctcggtgaatccggacaagaacctgagaagtaggctgtgtaatattggcatttcggcgcattgccattgacggtatattgcgctataatgataacatagctcgctttatctgtcggaaaggaaggttaatatgacagacaagataacagcgttgtattgtcgtctttcgcaggacgatatgttacagggt

SEQ ID NO: 21680 - DNA, 260 bp, Unknown; identical to SEQ ID NO: 21526
  Description of Unknown: LeftRegion for integrase B8681 sequence

SEQ ID NO: 21681 - DNA, 260 bp, Unknown
  Description of Unknown: LeftRegion for integrase B8682 sequence
gtcaaaaatcagcagattggaggggtaatcatggtgattgtgacacagaatggcaagaagattaagacaggcgaaatcaaattgccggacaagaccaaagaactgattgcatcaataattgacaatcagtaaatatgagcgtaaaatgtgccgtaacgcgataagtacggcacattcttttttaaagaggaggttaaacgatggaatgtgttgcgtacatgagagtatcaacggagaagcaagccgaagaaggtaacgga

SEQ ID NO: 21682 - DNA, 260 bp, Unknown; identical to SEQ ID NO: 21654
  Description of Unknown: LeftRegion for integrase B8683 sequence

SEQ ID NO: 21683 - DNA, 260 bp, Unknown
  Description of Unknown: LeftRegion for integrase B8684 sequence
tcaaaaatcagcagattggaggggtaatcatggtggttgtgacacagaatggcaaggaaatcaaggtaggtgaaatcaaattgccggacaagacaaaagagctgattgcatcaataattgacaatcagtaagcatgggagtagaatgtgccgtaacgcgataagtacggcacattctttttagtaagaggaggttaaacgatggaatgtgttgtgtacatgagagtatcaacagagaagcaagtcgaagaaggcaacgga

SEQ ID NO: 21684 - DNA, 260 bp, Unknown
  Description of Unknown: LeftRegion for integrase B8685 sequence
aagcaaaaaattagtaagttggaggttttaaaatgattaaagttactcaaaacggagtagatgtgaatatagaaaatataactattccggacagcttacaaaagataattgccgaagtgattgacaataaataaatatgtgttaaaatgtgccgtataacgtgataaatgcggcacattttacataaaggaggattgacaatggaatgtgtcgcttatatgagagtatcgacggaaaaacaggctgttgagggtaacgga

SEQ ID NO: 21685 - DNA, 260 bp, Unknown
  Description of Unknown: LeftRegion for integrase B8686 sequence
agaaaataagtaagttggaggttataaatgattagagttactcaaaatggcgaagacgtaaaaacagaaaacataactctttcagacagcttactaaagataattgcagagataattgacaacaagtaaatatgtgttacaatgtgccgtagaacgtgataagtgcggcacatttatttatattataaggagataaatatatggaatgtgttgcttatatgagagtatctactgaaaaacaggctgttgagggtaatgga

SEQ ID NO: 21686 - DNA, 260 bp, Unknown; identical to SEQ ID NO: 21509
  Description of Unknown: LeftRegion for integrase B8687 sequence

SEQ ID NO: 21687 - DNA, 260 bp, Unknown
  Description of Unknown: LeftRegion for integrase B8688 sequence
atagaatcggaggtttgtctatatgacagttgtgcttacgcagaatgggaaagaaattaatccagaagatgtagttttgccgtcagaagtgctaaagctgattgcagaactgattaattgacgaaaaattgataatagtgtagaatgcgtcatgtgtagtgaatatggcgcattcttttatatctgatggaggaacgagaatggaatgtgtcgcatatatgcgtgtttccacggagaaacaggcagaagagggaaacgga

SEQ ID NO: 21688 - DNA, 260 bp, Unknown
  Description of Unknown: LeftRegion for integrase B8689 sequence
aaacagactggaggtaaaaaatggttagagttacacaagccggcaaagatgttgatattgaagatgtttctctgccaaaagaaattattgagattatagcatccatatgctgttgacaccattgtaaaaaggctttagaatgtgtcgtatgtatgataaatacggcacattctttatatattgaaaggagtgtaaagaaaatggaatgtgtcgcatatatgcgtgtttccacggaaaaacaggcagaagaaggcaacggt

SEQ ID NO: 21689 - DNA, 260 bp, Unknown
  Description of Unknown: LeftRegion for integrase B8690 sequence
acaaggattatttgaaaaatataaagagatgtatgaaaaagaataacataaattattttcccaatttcaatgaaaatggaaaaggaggttgaagatgataataaagaatgataaattaactgaaaaacaaaaagagatcaatgctatgagattgatagaagtattaaaagccaaagttgaaaatgagtgaggttgtataaatgaaaaaaagggctgttatttatattagagaatccacaaaatttcaagaccctgagagt

SEQ ID NO: 21690 - DNA, 260 bp, Unknown
  Description of Unknown: LeftRegion for integrase B8691 sequence
ataacaccaccgggaaaatattaaatgggaaaaatatgaatgcagaatattatgctggagttgacgaaggcggaaacattgaaattgttttcaatttattttcagatgcgagtttaactttccatgcaaaaatttaaaagagagcctccgggcttttctttttaccgaaaaaagaacgtatgtgcgaaaggagaacggaaatgaaggcagctatttatatacgcgtatctactcaagaacaaatagagaattactctata

SEQ ID NO: 21691 - DNA, 260 bp, Unknown
  Description of Unknown: LeftRegion for integrase B8692 sequence
tacgccgcattcttcggcaagccacttttgggttactccaagttcggcccggcgttctctaattcgattttttaccatagggcacctcccagtctattttgctggtagagtacccaaaaaagcaaaaaaacacccccggcgctaccaacacctaggtttgacgaatccatatcacttaccagaggtaggaggaaaaagcaatgccaaagcggacgcgaattgaagataccggtattcagcgcgcggcactgtacatccgt

SEQ ID NO: 21692 - DNA, 260 bp, Unknown
  Description of Unknown: LeftRegion for integrase B8693 sequence
taactttaattttaatttttaaattattttggttggcatataattcatacaataactcatagaatttagtaatattcacattatcaatcctttcttatcacattgtgaaagataaatgcttcaaatagtatatttaataactacattatgaaacaaaatataatattattacaactagaatttaaaggggatattggaaaatgaaagcaaaaagaatagcaggatatgttagggtttcacacgatgaacaaaagaaatat

SEQ ID NO: 21693 - DNA, 260 bp, Unknown
  Description of Unknown: LeftRegion for integrase B8694 sequence
ctttgccctgctgtttatttttgccctggcgctggtgtatggcattaccctggacctgttaaaccccagcatgggccttttcagaggataaaaagaggagccgcctccgataccgaaataccggaggcggcgatcaggaagcggatgctgatgcaaagcaatccgctcctccattatagcaaagcaggaggaaaacgcaagtgaaaatcccagaagaaaaaatgcgggccgcattatatatccgggtaagcacggaagaa

SEQ ID NO: 21694 - DNA, 260 bp, Unknown
  Description of Unknown: LeftRegion for integrase B8695 sequence
gaagtgaaagtttatttggttaatattttacagatttaaaggtattaaaattgaattttcccattttcattgaaattgggaaaggaggttgaagatgataataaagaatgataaattaactgaaaaacaaaaagagatcaatgctatgagattgatagaagtattaaaagccaaagttgaaaatgagtgaggttgtataaatgaaaaaaagggctgttatttatattagagaatccacaaaatttcaagaccctgagagt

SEQ ID NO: 21695 - DNA, 260 bp, Unknown
  Description of Unknown: LeftRegion for integrase B8696 sequence
tgtctaaagtgttattggtcataaagttatttacaaatttaaaattgaactggtttagaaccttgtttcctttagcactcacactaattttaatagggatacatcagttaatttcgtaggaggtagggaagatgaagaatgatgaaaaacgtaaacaagaaactataaataaaatagtggaaatattactggaggaataaatggaaagatgtgttatatacgctcgtgtttccactcatgaacaagctgaaaacgacagt

SEQ ID NO: 21696 - DNA, 260 bp, Unknown
  Description of Unknown: LeftRegion for integrase B8697 sequence
ccttgatgtaactgaaaagtttctaaatgaagctttagaatgttataaaagtaaatatggtttttcagctacactagataattatgtgatattttttgagccaagatttagtattatgaatgcaaattttttgtaacaattcatagtatatttaagagccgttcagctcctcttaaatatacaataagggggaatgtaaaatgttaagagtagcactttatatacgtgttagtacagaagaacaagctttaaatggagat

SEQ ID NO: 21697 - DNA, 260 bp, Unknown
  Description of Unknown: LeftRegion for integrase B8698 sequence
accgaaaaggagtgatgcggatggtaagaatctttgtgaacggcaaacaggtgacaaaagaagaactttccaaatatgaaatccataacaaggcggtaaaaaggattctttcagaaaagttgacaaaaaataagtgatattttagaattgaccttgatagaatcttggtcaattcttttttaattgaaaggagaattgacatgaaaaaattaaatgtaggttatatgagagtgtctacagaagcacagaccgaaaagtat

SEQ ID NO: 21698 - DNA, 260 bp, Unknown
  Description of Unknown: LeftRegion for integrase B8699 sequence
accgaaaaggagtgatgcggatggtaagaatatatgtgaacggcaaacaggtgacaaaagaagaactttcgaattatgaaatccataacaaggcggtaaaaaggattctttcagaaaagttgacaaaaaataagtgatattttagaattgaccttgatagaatcttggtcaattcttttttaattgaaaggagaattgacatgaaaaaattaaatgtaggttatatgagagtgtctacagaagcacagaccgaaaagtat

SEQ ID NO: 21699 - DNA, 260 bp, Unknown
  Description of Unknown: LeftRegion for integrase B8700 sequence
accgaaaaggagtgatgcggatggtaagagtttttgtgaacggtaaacaggtgacaaaagaagaactttccaaatatgaaatccataacaatgcggtaaaaaggattctttcagaaaagttgacaaaaaataagtgatattttagaattgaccttgatagaatcttggtcaattcttttttaattgaaaggagaattgacatgaaaaaattaaatgtaggttatatgagagtgtctacagaagcacagaccgaaaagtat

SEQ ID NO: 21700 - DNA, 260 bp, Unknown
  Description of Unknown: LeftRegion for integrase B8701 sequence
accgaaaaggagtgatgcggatggtaagagtttttgtgaacggtaaacaggtgacaaaagaagaactttccaaatatgaaatccataacaaggcggtaaaaaggattctttcagaaaagttgacaaaaaataagtgatattttagaattgaccttgatagaatcttggtcaattcttttttaattgaaaggagaattgacatgaaaaaattaaatgtaggttatatgagagtgtctacagaagcacagaccgaaaagtac

SEQ ID NO: 21701 - DNA, 260 bp, Unknown
  Description of Unknown: LeftRegion for integrase B8702 sequence
accgaaaaggagtgatgcggatggtaagaatctttgtgaacggcaaacaggtgacaaaagaagaactttctaaatatgaaatccataacaaggcggtaaaaaggattctttcagaaaagttgacaaaaaataagtgatattttagaattgaccttgatagaatcttggtcaattcttttttaattgaaaggagaattgacatgaaaaaattaaatgtaggttatatgagagtgtctacagaagcacagaccgaaaagtat

SEQ ID NO: 21702 - DNA, 260 bp, Unknown
  Description of Unknown: LeftRegion for integrase B8703 sequence
cgaaaaggagtgatgcggatggtaagaatctttgtgaacggcaaacaggtgacaaaagaagaactttcgaattatgaaatccatagcaaggcggtaaaaaggattctttcagaaaagttgacaaaaaataagtgatattttagaattgaccttgatagaatcttggtcaattctttttttaaattgaaaggagaattgacatgaaaaaattaaatgtaggttatatgagagtgtctacagaagcacagaccgaaaagtat

SEQ ID NO: 21703 - DNA, 260 bp, Unknown
  Description of Unknown: LeftRegion for integrase B8704 sequence
accgaaaaggagtgatgcggatggtaagaatctttgtgaacggcaaacaggtgacaaaagaagaactttcgaattatgaaatccataacaaggcggtaaaaaggattctttcagaaaagttgacaaaaaataagtgatattttagaattgaccttgatagaatcttggtcaattcttttttaattgaaaggagaattgacatgaaaaaattaaatgtaggttatatgagagtgtctacagaagcacagaccgaaaagtat

SEQ ID NO: 21704 - DNA, 260 bp, Unknown
  Description of Unknown: LeftRegion for integrase B8705 sequence
ccgaaaaggagtgatgcggatggtaagaatctttgtgaacggcaaacaggtgacaaaagaagaactttctaaatatgaaatccataacaaggcggtaaaaaggattctttcagaaaagttgacaaaaaataagtgatattttagaattgaccttgatagaatcttggtcaattctttttttaattgaaaggagaattgacatgaaaaaattaaatgtaggttatatgagagtgtctacagaagcacagaccgaaaagtat

SEQ ID NO: 21705 - DNA, 260 bp, Unknown
  Description of Unknown: LeftRegion for integrase B8706 sequence
gaaaaggagtgatgcggatggtaagaatctttgtgaacggcaaacaggtgacaaaagaagaactttcgaattatgaaatccataacaaggcggtaaaaaggattctttcagaaaagttgacaaaaaataagtgatattttagaattgaccttgatagaatcttggtcaattcttttttttaaattgaaaggagaattgacatgaaaaaattaaatgtaggttatatgagagtgtctacagaagcacagaccgaaaagtat

SEQ ID NO: 21706 - DNA, 260 bp, Unknown
  Description of Unknown: LeftRegion for integrase B8707 sequence
cgaaaaggagtgatgcggatggtaagaatctttgtgaacggaaaacaggtgacaaaagaagaactttcgaattatgaaatccatagcaaagcggtaaaaaggattctttcagaaaagttgacaaaaaataagtgatattttagaattgaccttgatagaatcttggtcaattcttttttttgattgaaaggagaattgacatgaaaaaattaaatgtaggttatatgagagtgtctacagaagcacagaccgaaaagtat

SEQ ID NO: 21707 - DNA, 260 bp, Unknown
  Description of Unknown: LeftRegion for integrase B8708 sequence
accgaaaaggagtgatgcggatggtaagaatctatgtgaacggaaaacaggtgacaaaagaagaactttccaaatatgaaatccataacaaggcggtaaaaaggattctttcagaaaagttgacaaaaaataagtgatattttagaattgaccttgatagaatcttggtcaattcttttttaattgaaaggagaattgacatgaaaaaattaaatgtaggttatatgagagtgtctacagaagcacagaccgaaaagtat

SEQ ID NO: 21708 - DNA, 260 bp, Unknown
  Description of Unknown: LeftRegion for integrase B8709 sequence
accgaaaaggagtgatgcggatggtaagaatttttgtgaacggcaaacaggtgacaaaagaagaactttcgaattatgaaatccataacaaggcggtaaaaaggattctttcagaaaagttgacaaaaaataagtgatattttagaattgaccttgatagaatcttggtcaattcttttttaattgaaaggagaattgacatgaaaaaattaaatgtaggttatatgagagtgtctacagaagcacagaccgaaaagtat

SEQ ID NO: 21709 - DNA, 260 bp, Unknown
  Description of Unknown: LeftRegion for integrase B8710 sequence
ccgaaaaggagtgatgcggatggtaagaatctttgtgaacggcaaacaggtgacaaaagaagaactttcgaattatgaaatccataacaatgcggtaaaaaggattctttcagaaaagttgacaaaaaataagtgatattttagaattgaccttgatagaatcttggtcaattcttttttttattgaaaggagaattgacatgaaaaaattaaatgtaggttatatgagagtgtctacagaagcacagaccgaaaagtat

SEQ ID NO: 21710 - DNA, 260 bp, Unknown
  Description of Unknown: LeftRegion for integrase B8711 sequence
aaaataaagaaaaaaattagaaaggtaggtgcatttatgttgatccaaaatggagaggaggttgagccggaaaaagttgagctccctaaaaacatagttgatatgataatgtctataattgacaacaagtaattaaaaaggtaaaatgtgtcgtaccacgataagtgcggcacatttttatataaaaaggaggataataaatgaaatgcgtcgcatatataagagtgtcaactgacaaacaggtagaggaaggctttggg

SEQ ID NO: 21711 - DNA, 260 bp, Unknown; identical to SEQ ID NO: 21699
  Description of Unknown: LeftRegion for integrase B8712 sequence

SEQ ID NO: 21712 - DNA, 260 bp, Unknown
  Description of Unknown: LeftRegion for integrase B8713 sequence
accgaaaaggagtgatgcggatggtaagaatctatgtgaacggaaaacaggtgacaaaagaagaactttccaaatatgaaatccataacaaggcggtaaaaaggattctttcagaaaagttgacaaaaaataagtgatattttagaattgaccttgatagaatcttggtcaattcttttttaattgaaaggagaattgacatgaaaaaattaaatgtaggttatatgagagtgtctacagaagcacaggccgaaaagtat

SEQ ID NO: 21713 - DNA, 260 bp, Unknown
  Description of Unknown: LeftRegion for integrase B8714 sequence
accgaaaaggagtgatgcggatggtaagagtttttgtgaacggtaaacaggtgacaaaagaagaactttccaaatatgaaatccataacaaggcggtaaaaaggattctttcagaaaagttgacaaaaaataagtgatattttagaattgaccttgatagaatcttggtcaattcttttttaattgaaaggagaattgacatgaaaaaattaaatgtaggttatatgagagtgtctacagaagcacagaccgaaaagtat

SEQ ID NO: 21714 - DNA, 260 bp, Unknown
  Description of Unknown: LeftRegion for integrase B8715 sequence
ccgaaaaggagtgatgcggatggtaagaatctatgtgaacggaaaacaggtgacaaaagaagaactttcgaattatgaaatccataacaagacggtaaaaaggattctttcagaaaagttgacaaaaaataagtgatattttagaattgaccttgatagaatcttggtcaattcttttttaaattgaaaggagaattgacatgaaaaaattaaatgtaggttatatgagagtgtctacagaagcacagaccgaaaagtat

SEQ ID NO: 21715 - DNA, 260 bp, Unknown
  Description of Unknown: LeftRegion for integrase B8716 sequence
accgaaaaggagtgatgcggatggtaagaatctttgtgaacggcaaacaggtgacaaaagaagaactttcgaattatgaaatccatagcaaagcggtaaaaaggattctttcagagaagttgacaaaacataagtgatattttagaattgaccttgatagaatcttggtcaattctttttttgttgaaaggagaattgacatgaaaaaattaaatgtaggttatatgagagtgtctacagaagcacagaccgaaaagtat

SEQ ID NO: 21716 - DNA, 260 bp, Unknown
  Description of Unknown: LeftRegion for integrase B8717 sequence
aaaagaaaaaattagtagattggagtggtttgatggttaaaataacgaaaaacggtaaagaagttgagccggaaaaactgattatcccagaaaatgtaaagaaggtaatcgccgaaataattgacaagtagcaactatccgtatacaatgtgccgtaacacgataaatgcggcacattgtgtactaaggagggtttatagatgaaatgtgtcgcttatattagagtttcaacagaaaagcaggcagaggaagggtatggc

SEQ ID NO: 21717 - DNA, 260 bp, Unknown; identical to SEQ ID NO: 21698
  Description of Unknown: LeftRegion for integrase B8718 sequence

SEQ ID NO: 21718 - DNA, 260 bp, Unknown
  Description of Unknown: LeftRegion for integrase B8719 sequence
ccgaaaaggagtgatgcggatggtaagaatctatgtgaacggtaaacaggtgacaaaagaagaactttcgaattatgaaatccataacaaggcggtaaaaaggattctttcagaaaagttgacaaaaaataagtgatattttagaattgaccttgatagaatcttggtcaattcttttttaaattgaaaggagaattgacatgaaaaaattaaatgtaggttatatgagagtgtctacagaagcacagaccgaaaagtat

SEQ ID NO: 21719 - DNA, 260 bp, Unknown; identical to SEQ ID NO: 21712
  Description of Unknown: LeftRegion for integrase B8720 sequence

SEQ ID NO: 21720 - DNA, 260 bp, Unknown
  Description of Unknown: LeftRegion for integrase B8721 sequence
ccgaaaaggagtgatgcggatggtaagagtttttgtgaacggtaaacaggtgacaaaagaagaactttccaaatatgaaatccataacaaggcggtaaaaaggattctttcagaaaagttgacaaaaaataagtgatattttagaattgaccttgatagaatcttggtcaattctttttttaattgaaaggagaattgacatgaaaaaattaaatgtaggttatatgagagtgtctacagaagcacagaccgaaaagtat

SEQ ID NO: 21721 - DNA, 260 bp, Unknown
  Description of Unknown: LeftRegion for integrase B8722 sequence
gaaaaggagtgatgcggatggtaagaatctatgtgaacggcaaacaggtgacaaaagaagaactttcgaattatgaaatccataacaaggcggtaaaaaggattctttcagaaaagttgacaaaaaataagtgatattttagaattgaccttgatagaatcttggtcaattctttttttaaaattgaaaggagaattgacatgaaaaaattaaatgtaggttatatgagagtgtctacagaagcacagaccgaaaagtat

SEQ ID NO: 21722 - DNA, 260 bp, Unknown; identical to SEQ ID NO: 21703
  Description of Unknown: LeftRegion for integrase B8723 sequence

SEQ ID NO: 21723 - DNA, 260 bp, Unknown
  Description of Unknown: LeftRegion for integrase B8724 sequence
tacgagaaggagtgatgcggatggtaagaatctttgtgaacggcaaacaggtgacaaaagaagaactttcgaattatgaaatccataacaaggcggtaaaaaggattctttcagaaaagttgacaaaaaataagtgatattttagaattgaccttgatagaatcttggtcaattcttttttaattgaaaggagaattgacatgaaaaaattaaatgtaggttatatgagagtgtctacagaagcacagaccgaaaagtat

SEQ ID NO: 21724 - DNA, 260 bp, Unknown
  Description of Unknown: LeftRegion for integrase B8725 sequence
cgaaaaggagtgatgcggatggtaagaatctttgtgaacggaaaacaggtgacaaaagaagaactttcgaattatgaaatccataacaagtcggtaaaaaggattctttcagaaaagttgacaaaaaataagtgatattttagaattgaccttgatagaatcttggtcaattcttttttttaattgaaaggagaattgacatgaaaaaattaaatgtaggttatatgagagtgtctacagaagcacagaccgaaaagtat

SEQ ID NO: 21725 - DNA, 260 bp, Unknown
  Description of Unknown: LeftRegion for integrase B8726 sequence
accgaaaaggagtgatgcggatggtaagaatctttgtgaacggtaaacaggtgacaaaagaagaactttccaaatatgaaatccataacaaggcggtaaaaaggattctttcagaaaagttgacaaaaaataagtgatattttagaattgaccttgatagaatcttggtcaattcttttttaattgaaaggagaattgacatgaaaaaattaaatgtaggttatatgagagtgtctacagaagcacagaccgaaaagtat

SEQ ID NO: 21726 - DNA, 260 bp, Unknown
  Description of Unknown: LeftRegion for integrase B8727 sequence
cgaaaaggagtgatgcggatggtaagaatctttgtgaacggcaaacaggtgacaaaagaagaactttcgaattatgaaatccataacaaggcggtaaaaaggattctttcagaaaagttgacaaaaaataagtgatattttagaattgaccttgatagaatcttggtcaattctttttttaaattgaaaggagaattgacatgaaaaaattaaatgtaggttatatgagagtgtctacagaagcacagaccgaaaagtat

SEQ ID NO: 21727 - DNA, 260 bp, Unknown; identical to SEQ ID NO: 21697
  Description of Unknown: LeftRegion for integrase B8728 sequence

SEQ ID NO: 21728 - DNA, 260 bp, Unknown
  Description of Unknown: LeftRegion for integrase B8729 sequence
tagacagcatggataattaactatttgaaacattttgcttaaaaaaaagttcgtatttaatttttaaatgttcttgctctgcatacagtttaaataacatttcatagaacttctcgatattcataatatcgctcctttctgaaaaagttattagtattatgtactttattttctatttgtaaacattggaggttttctttttgaaaaaagttttaaaaataggcggttatgttagagtatcccatgaagaacaaaaaaag

SEQ ID NO: 21729 - DNA, 260 bp, Unknown; identical to SEQ ID NO: 21726
  Description of Unknown: LeftRegion for integrase B8730 sequence

SEQ ID NO: 21730 - DNA, 260 bp, Unknown; identical to SEQ ID NO: 21704
  Description of Unknown: LeftRegion for integrase B8731 sequence

SEQ ID NO: 21731 - DNA, 260 bp, Unknown
  Description of Unknown: LeftRegion for integrase B8732 sequence
aatctcatggaggtaatagatcaagtgaccacaatctatgtaaatggtaagagggttacgaaagatgaattaaaaaattacgagatacaaatagaatccgtaaagaagatactggcagataaattgacgaaaagtaaatgaaatgttatgctatggctagagtaaaacctagccattacttatatgggaggatggctaaaatgaaaaagatggacgttgcatatctgagagtatcaacagaaacacagactgaaaaatac

SEQ ID NO: 21732 - DNA, 260 bp, Unknown
  Description of Unknown: LeftRegion for integrase B8733 sequence
accgaaaaggagtgatgcggatggtaagaatctttgtgaacggaaaacaggtgacaaaagaagaactttcgaattatgaaatccatagcaaagcggtaaaaaggattctttcagagaagttgacaaaacataagtgatattttagaattgaccttgatagaatcttggtcaattctttttttgttgaaaggagaattgacatgaaaaaattaaatgtaggttatatgagagtgtctacagaagcacagaccgaaaagtat

SEQ ID NO: 21733 - DNA, 260 bp, Unknown
  Description of Unknown: LeftRegion for integrase B8734 sequence
gtattgactggtggtattggtctattggctggttttgccggaaaaaaaggcaaaaatgaattcttctgcaggaaatgtaacaatacttttttgcataaataaaaaaacacgctcctccgaccaagaaagcgcgtgtttaaaataaggcaatagcttatttagctatgcctattatactaaataataggatgtgattcaacttgcaacgagtagcaatttatatgcgtgtatcgactgatcagcaggcaaaacatggtgac

SEQ ID NO: 21734 - DNA, 260 bp, Unknown
  Description of Unknown: LeftRegion for integrase B8735 sequence
cgaaaaggagtgatgcggatggtaagaatctatgtgaacggcaaacaggtgacaaaagaagaactttccaaatatgaaatccataacaaggcggtaaaaaggattctttcagaaaagttgacaaaaaataagtgatattttagaattgaccttgatagaatcttggtcaattctttttttaaattgaaaggagaattgacatgaaaaaattaaatgtaggttatatgagagtgtctacagaagcacagaccgaaaagtat

SEQ ID NO: 21735 - DNA, 260 bp, Unknown; identical to SEQ ID NO: 21697
  Description of Unknown: LeftRegion for integrase B8736 sequence

SEQ ID NO: 21736 - DNA, 260 bp, Unknown
  Description of Unknown: LeftRegion for integrase B8737 sequence
accgaaaaggagtgatgcggatggtaagagtttttgtgaatggtaaacaggtgacgaaagaagaacttacaaattatgaaattcataacaaagcggtaaaaaggattctttcagagaagttgacaaaacataagtgatattttagaattgaccttgatagaatcttggtcaattcttttttaattgaaaggagaattgacatgaaaaaaataaatgtaggttatatgagagtgtctacagaagcacagaccgaaaagtat

SEQ ID NO: 21737 - DNA, 260 bp, Unknown
  Description of Unknown: LeftRegion for integrase B8738 sequence
accgaaaaggagtgatgcggatggtaagaatctttgtgaacggaaaacaggtgacaaaagaagaactttccaaatatgaaatccataacaaggcggtaaaaaggattctttcagaaaagttgacaaaaaataagtgatattttagaattgaccttgatagaatcttggtcaattcttttttaattgaaaggagaattgacatgaaaaaattaaatgtaggttatatgagagtgtctacagaagcacagaccgaaaagtat

SEQ ID NO: 21738 - DNA, 260 bp, Unknown
  Description of Unknown: LeftRegion for integrase B8739 sequence
taccgaaaaggagtgatgcggatggtaagaatctttgtgaacggaaaacaagtgacaaaagaagaactttcgaattatgaaatccataacaaagcggtaaaaaggattctttcagagaagttgacaaaacataagtgatattttagaattgaccttgatagaatcttggtcaattcttttttattgaaaggagaattgacatgaaaaaaataaatgtaggttatatgagagtgtctacggaagcacagaccgaaaagtat

SEQ ID NO: 21739 - DNA, 260 bp, Unknown; identical to SEQ ID NO: 21707
  Description of Unknown: LeftRegion for integrase B8740 sequence

SEQ ID NO: 21740 - DNA, 260 bp, Unknown
  Description of Unknown: LeftRegion for integrase B8741 sequence
accgaaaaggagtgatgcggatggtaagaatctatgtgaacggcaaacaggtgacaaaagaagaactttcgaattatgaaatccataacaaggcggtaaaaaggattctttcagaaaagttgacaaaaaataagtgatattttagaattgaccttgatagaatcttggtcaattcttttttaattgaaaggagaattgacatgaaaaaattaaatgtaggttatatgagagtgtctacagaagcacagaccgaaaagtat

SEQ ID NO: 21741 - DNA, 260 bp, Unknown
  Description of Unknown: LeftRegion for integrase B8742 sequence
accgaaaaggagtgatgcggatggtaagaatctttgtgaacggcaaacaggtgacaaaagaagaactttcgaattatgaaatccataacaaagcggtaaaaaggattctttcagagaagttgacaaaaaataagtgatattttagaattgaccttgatagaatcttggtcaattcttttttaattgaaaggagaattgacatgaaaaaattaaatgtaggttatatgagagtgtctacagaagcacagaccgaaaagtat

SEQ ID NO: 21742 - DNA, 260 bp, Unknown; identical to SEQ ID NO: 21698
  Description of Unknown: LeftRegion for integrase B8743 sequence

SEQ ID NO: 21743 - DNA, 260 bp, Unknown
  Description of Unknown: LeftRegion for integrase B8744 sequence
accgaaaaggagtgatgcggatggtaagaatctatgtgaacggaaaacaggtgacaaaagaagaactttcgaattatgaaatccataacaagacggtaaaaaggattctttcagaaaagttgacaaaaaataagtgatattttagaattgaccttgatagaatcttggtcaattctttttttattgaaaggagaattgacatgaaaaaattaaatgtaggttatatgagagtgtctacagaagcacagaccgaaaagtat

SEQ ID NO: 21744 - DNA, 260 bp, Unknown; identical to SEQ ID NO: 21732
  Description of Unknown: LeftRegion for integrase B8745 sequence

SEQ ID NO: 21745 - DNA, 260 bp, Unknown
  Description of Unknown: LeftRegion for integrase B8746 sequence
accgaaaaggagtgatgcggatggtaagaatctttgtgaacggcaaacaggtgacaaaagaagaactttccaaatatgaaatccataacaaggcggtaaagaggattctttcagaaaagttgacaaaaaataagtgatattttagaattgaccttgatagaatcttggtcaattcttttttaattgaaaggagaattgacatgaaaaaattaaatgtaggttatatgagagtgtctacagaagcacagactgaaaagtat

SEQ ID NO: 21746 - DNA, 260 bp, Unknown; identical to SEQ ID NO: 21732
  Description of Unknown: LeftRegion for integrase B8747 sequence

SEQ ID NO: 21747 - DNA, 260 bp, Unknown; identical to SEQ ID NO: 21713
  Description of Unknown: LeftRegion for integrase B8748 sequence

SEQ ID NO: 21748 - DNA, 260 bp, Unknown
  Description of Unknown: LeftRegion for integrase B8749 sequence
accgaaaaggagtgatgcggatggtaagaatctatgtgaacggcaaacaggtgacaaaagaagaactttcgaattatgaaatccataacaaggcggtaaaaaggattctttcagaaaagttgacaaaaaataagtgatattttagaattgaccttgatagaatcttggtcaattcttttttgattgaaaggagaattgacatgaaaaaattaaatgtaggttatatgagagtgtctacagaagcacagaccgaaaagtat

SEQ ID NO: 21749 - DNA, 260 bp, Unknown
  Description of Unknown: LeftRegion for integrase B8750 sequence
accgaaaaggagtgatgcggatggtaagaatctttgtgaacggcaaacaggtgacaaaagaagaactttctaaatatgaaatccataacaaggcggtaaaaaggattctttcagaaaagttgacaaaaaataagtgatattttagaattgaccttgatagaatcttggtcaattcttttttgattgaaaggagaattgacatgaaaaaattaaatgtaggttatatgagagtgtctacagaagcacagaccgaaaagtat

SEQ ID NO: 21750 - DNA, 260 bp, Unknown
  Description of Unknown: LeftRegion for integrase B8751 sequence
ccgaaaaggagtgatgcggatggtaagaatctttgtgaacggcaaacaggtgacaaaagaagaactttcgaattatgaaatccataacaaggcggtaaaaaggattctttcagaaaagttgacaaaaaataagtgatattttagaattgaccttgatagaatcttggtcaattctttttttaattgaaaggagaattgacatgaaaaaattaaatgtaggttatatgagagtgtctacagaagcacagaccgaaaagtat

SEQ ID NO: 21751 - DNA, 260 bp, Unknown
  Description of Unknown: LeftRegion for integrase B8752 sequence
aaacaatcgatatcttccttactatgtcctgtttttttacaggacatagtatataaataaaaaacaccctagcgccaactaggatgtttaaaaaagtgatacgccaatatcactaaaaagtaaaaacacaccgaatgcctttttacgtactcaattatagcatttttgtacgtttaaggcaaaataaaggagtcttaaatatgaaacaaaaagcaagaatatatgcacgtgtttctagagatgaacaagtcaaatatggt

SEQ ID NO: 21752 - DNA, 260 bp, Unknown; identical to SEQ ID NO: 21750
  Description of Unknown: LeftRegion for integrase B8753 sequence

SEQ ID NO: 21753 - DNA, 260 bp, Unknown; identical to SEQ ID NO: 21704
  Description of Unknown: LeftRegion for integrase B8754 sequence

SEQ ID NO: 21754 - DNA, 260 bp, Unknown
  Description of Unknown: LeftRegion for integrase B8755 sequence
accgaaaaggagtgatgcggatggtaagaatctttgtgaacggcaaacaagtgacaaaagaagaactttcgaattatgaaatccataacaaagcggtaaaaaggattctttcagaaaagttgacaaaaaataagtgatattttagaattgaccttgatagaatcttggtcaattcttttttaattgaaaggagaattgacatgaaaaaaataaatgtaggttatatgagagtgtctacagaagcacagaccgaaaagtat

SEQ ID NO: 21755 - DNA, 260 bp, Unknown
  Description of Unknown: LeftRegion for integrase B8756 sequence
gaaaaggagtgatgcggatggtaagaatctatgtgaacggtaaacaggtgacaaaagaagaactttcgaattatgaaatccatagcaaggcggtaaaaaggattctttcagaaaagttgacaaaaaataagtgatattttagaattgaccttgatagaatcttggtcaattcttttttttaaattgaaaggagaattgacatgaaaaaaataaatgtaggttatatgagagtgtctacagaagcacagaccgaaaagtat

SEQ ID NO: 21756 - DNA, 260 bp, Unknown
  Description of Unknown: LeftRegion for integrase B8757 sequence
accgaaaaggagtgatgcggatggtaagaatctttgtgaacggaaaacaggtgacaaaagaagaactttcgaattatgaaatccataacaaggcggtaaaaaggattctttcagaaaagttgacaaaaaataagtgatattttagaattgaccttgatagaatcttggtcaattcttttttaattgaaaggagaattgacatgaaaaaattaaatgtaggttatatgagagtgtctacagaagcacagaccgaaaagtat

SEQ ID NO: 21757 - DNA, 260 bp, Unknown
  Description of Unknown: LeftRegion for integrase B8758 sequence
tctatggggtgcagtgttatgtaaaatcagatgagcaaaaacagaaagtcatggacatgaaaatagatgaacattacactatccgagtaaaaattaaagatgtcggagaagttatgggatattccgctgatataattgaattcgtagactaaagattaagccacttttatagtggctttttctatcagaaaggaacagcaatgattaactgcgcaatctacccacgtaaatccaaagccgtggacaactccgacagcatg

SEQ ID NO: 21758 - DNA, 260 bp, Unknown
  Description of Unknown: LeftRegion for integrase B8759 sequence
cgattttgacaaagcaactgaaaaatatctataaataaaatctgccccggtgctaccaacaccggagcagatcaggaactacatcgggaaatccgatacagtcacctcgcaagtgaaattgtatcatttttcccggtgaaatacaagcaccgggcatttttatgccctgctgccataaaatgtatgaggaggatgatataatgatccgttgtgccatttatgatcgtgtgtctaccgacctgcaggtggaaaagggctta

SEQ ID NO: 21759 - DNA, 260 bp, Unknown
  Description of Unknown: LeftRegion for integrase B8760 sequence
tctatggggtgcagtgttatgtaaaatcagatgagcaaaaacagaaagtcatggacatgaaaaaagatgaacattacactatccgagtaaaaattaaagatgtcggagaagttatgggatattccgctgatataattgaattcgtagactaaagattaagccacttttatagtggctttttctgtcagaaaggaacagtaatgattaactgcgcaatctacccacgtaaatccaaagccgtggacaactccgacagcatg

SEQ ID NO: 21760 - DNA, 260 bp, Unknown
  Description of Unknown: LeftRegion for integrase B8761 sequence
tttacggtgtacagtgttatgtaaaatcagatgagcaaaagcagaaagtcatggacatgaaaatagatgagcattacactatccgagtaaaaattaaagatgtcggagaagttatgggatattccgctgatataattgaattcgtagactaaagattaagccacttttatagtggctttttctgtcagaaaggaacagtaatgattaactgtgcaatctacccacgtaaatccaaagccgtggacaactccgacagcatg

SEQ ID NO: 21761 - DNA, 260 bp, Unknown
  Description of Unknown: LeftRegion for integrase B8762 sequence
tttacggtgtacagtgttatgtaaaatcagatgagcaaaagcagaaagtcatggacatgaaaatagatgagcattacactatccgagtaaaaattaatgatgtcggagaagttatgggatattccgctgatataattgaattcgtagactaaagattaagccacttttatagtggctttttctgtcagaaaggaacagcaatgattaactgcgcaatctacccacgtaaatccaaagccgtggacaactccgacagcatg

SEQ ID NO: 21762 - DNA, 260 bp, Unknown
  Description of Unknown: LeftRegion for integrase B8763 sequence
tctatggggtgcagtgttatgtaaaatcagatgagcaaaaacagaaagtcatggacatgaaaaaagatgaacattacactatccgagtaaaaattaaagatgtcggagaagttatgggatattccgctgatataattgaattcgtagactaaagattaagccacttttatagtggctttttctatcagaaaggaacagcaatgattaactgcgcaatctacccacgtaaatccaaagccgtggacaactccgacagcatg

SEQ ID NO: 21763 - DNA, 260 bp, Unknown
  Description of Unknown: LeftRegion for integrase B8764 sequence
tttacggtgtacagtgttatgtaaaatcagatgagcaaaagcagaaagtcatggacatgaaaatagatgagcattacactatccgagtaaaaattaaagatgtcggagaagttatgggatattccgctgatataattgaattcgtagactaaagattaagccacttttatagtggctttttctgtcagaaaggaacagtaatgattaactgcgcaatctacccacgtaaatccaaagccgtggacaactccgacagtatg

SEQ ID NO: 21764 - DNA, 260 bp, Unknown
  Description of Unknown: LeftRegion for integrase B8765 sequence
tttacggtgtgcagtgttatgtaaaatcagatgagcaaaaacagaaagtcatggacatgaaaatagatgagcattacactatccgagtaaaaattaaagatgtcggagaagttatgggatattctgctgatataattgaatttgtagactaaagattaagccacttttatagtggctttttctgtcagaaaggaacattaatgattaactgtgcaatctacccacgtaaatccaaagccgtggacaactccgacagcatg

SEQ ID NO: 21765 - DNA, 260 bp, Unknown
  Description of Unknown: LeftRegion for integrase B8766 sequence
taataagttaaaattgatatcggattatttcggtgttggaattgattattttattcaaggaaacaatgttgatgttttgcctgaattatcaaatgaagaacttaaattattatcacagttcagaaaaatagatgatataaaaaagaaaatgatatggataatattatcttcttaatttgcttcgtcagaaaggaacagcaatgattaactgcgcaatctacccacgtaaatccaaagccgtggacaactccgacagcatg

SEQ ID NO: 21766 - DNA, 260 bp, Unknown
  Description of Unknown: LeftRegion for integrase B8767 sequence
tctatggggtgcagtgttatgtaaaatcagatgagcaaaaacagaaagtcatggacatgaaaaaagatgaacattacactatccgagtaaaaattaaagatgtcggagaagttatgggatattccgctgatataattgaattcgtagactaaagattaagccacttttatagtggctttttctgtcagaaaggaacaataatgattaactgcgcaatctacccacgtaaatccaaagccgtggacaactccgacagcatg

SEQ ID NO: 21767 - DNA, 260 bp, Unknown
  Description of Unknown: LeftRegion for integrase B8768 sequence
tgtttaaagaattagaagttactaaagatattccgcttcaatacaaagtagaaattaatcaataaaaaagccatagggtgttggcgcactctatggcaaggaaagtaatttttcataccgcaaagtaagaaatatataaagtctttccgtctatattataccataaacggacggactttttcaatgaaaagggggtctatatggatataataagggccgcactctatataagggtatcgacggaagaacaggtccgcgaa

SEQ ID NO: 21768 - DNA, 260 bp, Unknown
  Description of Unknown: LeftRegion for integrase B8769 sequence
attttgacaaagcaactgaaaaatatctataaataaaatctgccccagtgctaccaacaccggagcagattaggaaccatatcgggaaatccgatacaatcacctagacaagtgaaattgtatcattttccccggtgaaaatacaagcaccgggcatttttatgccctgctgccataaaatgtatgaggaggatgatataatgatccgttgtgccatttatgatcgtgtgtctaccgacctgcaggtggaaaagggctta

SEQ ID NO: 21769 - DNA, 260 bp, Unknown
  Description of Unknown: LeftRegion for integrase B8770 sequence
tttacggtgtgcagtgttatgtaaaatcagatgagcaaaaacagaaagtcatggacatgaaaatagatgagcattacactatccgagtaaaaattaaagatgtcggagaagttatgggatattccgctgatataattgaatttgtagactaaagattaagccacttttatagtggctttttctgtcagaaaggaacagcaatgattaactgcgcaatctacccacgtaaatccaaagccgtggacaactccgacagcatg

SEQ ID NO: 21770 - DNA, 260 bp, Unknown
  Description of Unknown: LeftRegion for integrase B8771 sequence
ctttgcctgtttactatctgcgggcataaattttatgagggaaaaatcggcatggggattgtttatctgttcaccgcagggttattcggtattggttggttaattgatctcattttaattctctgcaaaccaaatccgtactacgtatagattgattaagccacttttatagtggctttttctgtcagaaaggaacagcaatgattaactgcgcaatctacccacgtaaatccaaagccgtggacaactccgacagcatg

SEQ ID NO: 21771 - DNA, 260 bp, Unknown
  Description of Unknown: LeftRegion for integrase B8772 sequence
aattacttaagtaacttcggatagatcgcctataattaaaatctgccccggtacgccaataccggagcagatcaggaaccacatcgggagtaccgatacagtcacctcgcaagtgaaattgtatcatttttcccggtgaaatacaagcaccgggcatttttatgccatgctgccataaaatgtatgaggaggatgatataatgatccgttgtgccatttatgatcgtgtgtctaccgacctgcaggtggaaaagggctta

SEQ ID NO: 21772 - DNA, 260 bp, Unknown
  Description of Unknown: LeftRegion for integrase B8773 sequence
atttgaatcaataaaatatatgtaatataaataattaaaatctgccccggtacgccaataccggagcagatcaggaaccacatcgggagtaccgatacagtcacctacacaagtgaaattgtatcattttcccggtgaaaatacaagcaccgggcatttttatgccctgctgccataaaatgtatgaggaggatgatataatgatccgttgtgccatttatgatcgtgtgtctaccgacctgcaggtggaaaagggctta

SEQ ID NO: 21773 - DNA, 260 bp, Unknown
  Description of Unknown: LeftRegion for integrase B8774 sequence
ctttgcctgtttactatctgcgggcataaattttatgagggaaaaatcggcatgggtattgtttatctgttcaccgcagggttattcggtattggttggttaattgatctcattttaattctctgcaaaccaaatccgtactacgtatagattgattaagccacttttatagtggctttttctgtcagaaaggaacagcaatgattaactgcgcaatctacccacgtaaatccaaagccgtggacaactctgacagcatg

SEQ ID NO: 21774 - DNA, 260 bp, Unknown
  Description of Unknown: LeftRegion for integrase B8775 sequence
tttacggtgtacagtgttatgtaaaatcagatgagcaaaagcagaaagtcatggacatgaaaatagatgaacattacactatccgagtaaaaattaaagatgtcggagaagttatgggatattccgctgatataattgaattcgtagactaaagattaagccacttttatagtggctttttctatcagaaaggaacagcaatgattaactgcgcaatctacccacgtaaatccaaagccgtggacaactccgacagcatg

SEQ ID NO: 21775 - DNA, 260 bp, Unknown; identical to SEQ ID NO: 21770
  Description of Unknown: LeftRegion for integrase B8776 sequence

SEQ ID NO: 21776 - DNA, 260 bp, Unknown
  Description of Unknown: LeftRegion for integrase B8777 sequence
gtatatggagctgaacaaaacggttattaatatataaaaaatctgccccggtacgccaataccggagcagatcaggaactacatcgggaaatccgatacagtcacctcgcaagtgaaattgtatcatttttcccggtgaaatacaagcaccgggcatttttatgccctgctgccataaaatgtatgaggaggatgatataatgatccgttgtgccatttatgatcgtgtgtctaccgacctgcaggtggaaaagggctta

SEQ ID NO: 21777 - DNA, 260 bp, Unknown; identical to SEQ ID NO: 21760
  Description of Unknown: LeftRegion for integrase B8778 sequence

SEQ ID NO: 21778 - DNA, 260 bp, Unknown
  Description of Unknown: LeftRegion for integrase B8779 sequence
tttacggtgtacagtgttatgtaaaatcagatgagcaaaagcagaaagtcatggacatgaaaatagatgagcattacactatccgagtaaaaattaaagatgtcggagaagttatgggatattccgctgatataattgaatttgtagactaaagattaagccacttttatagtggctttttctgtcagaaaggaacagtaatgattaactgcgcaatctacccacgtaaatccaaagccgtggacaactccgacagcatg

SEQ ID NO: 21779 - DNA, 260 bp, Unknown
  Description of Unknown: LeftRegion for integrase B8780 sequence
caaatagaacgagaagaaaagaaaaaattgaaataaaaatctgccccggtacgccaataccggagcagatcaggaaccacatcgggaaaaccgatacagtcacctacacacgtgaaattgtatcggttttcccggcgaaaatacaagcaccgggcatttttatgctctgctgccataaaatgtatgaggaggatgatataatgatccgttgtgccatttatgatcgtgtgtctaccgacctgcaggtggaaaagggctta

SEQ ID NO: 21780 - DNA, 260 bp, Unknown
  Description of Unknown: LeftRegion for integrase B8781 sequence
tgaagtagaaaaaagactttgcgaagagttgaatattgaatatattaacttaaatttacgtacaggacctagtcacagatttactgaaaaagaataccaagagcttaaatctgattatgctcagttatttttacaattaaacaagcttaatgttgagaaagaccaagagtagtttttaaataagatagggggattcgtttatgctaaagagagcagcgttatacattagggtttctactgatcaacaagcaaaacacggg

SEQ ID NO: 21781 - DNA, 260 bp, Unknown
  Description of Unknown: LeftRegion for integrase B8782 sequence
ttgattttttggaggtgtttgaaaacatgactacaatttatgttaatggacagcgtgttacaaaggaagatctgaaaaataatgaaattaaaatagaaagtgtaaaaaaaatacttgctgagaaattgactaagacaaagtgatgttgtagactatggctagaataaaaacctagccattttcttttaggaggatggcctatgagcaaattgcaggtggcatatttgagagtatcaacagaaacacagactgaaaaatac

SEQ ID NO: 21782 - DNA, 260 bp, Unknown
  Description of Unknown: LeftRegion for integrase B8783 sequence
aaagagtttttggaggtgtctggcaatatgactacaatctatgtcaatggtaagcgtgtgacaaaagaagagctcaaaaacaatgaaattcagatagagtcagtaaaaaaaatactgtcagagaaattgacgaaaagtaaatagaattgtagaatatggctagaataaaaactagccatttcttttaggaggaatggcatatgagaaaacttaatgtcgcgtatctaagagtatctacagaagctcagaccgaaaagtac

SEQ ID NO: 21783 - DNA, 260 bp, Unknown
  Description of Unknown: LeftRegion for integrase B8784 sequence
ttcacttaatttttctatcaattctaataagtcttgtttcataaatagccaaactcctctcaactgtttatctagaacaaatgttctgaaaacattatagtgactgaggcgcgcaaaagcaacgtgaaaatgtttccattaaggaggtgatgcgagaatatattttcgctgcacgacatcactataaaggagacaggaaaatggggattttaagagtaggtttatatgaacgtgtttctacaacagagcaaagtttgaac

SEQ ID NO: 21784 - DNA, 260 bp, Unknown; identical to SEQ ID NO: 21780
  Description of Unknown: LeftRegion for integrase B8785 sequence

SEQ ID NO: 21785 - DNA, 260 bp, Unknown
  Description of Unknown: LeftRegion for integrase B8786 sequence
tggattttttggaggtgtttgaaaacatgactacaatttatgttaatggtcggcgtgttacaaaggaagatctgaaaaataacgaaattcaaattgaaagtgttaaaaaaatgcttgctgagaaattgactaagacaaagtgatgttgtagactatggctagaataaaaacctagccattttcttttaggaggatggcatatgagcaaattacaggtggcatatttgagagtatcaacagagacacagactgaaaaatac

SEQ ID NO: 21786 - DNA, 260 bp, Unknown
  Description of Unknown: LeftRegion for integrase B8787 sequence
ttgattttttggaggtgtttgaaaacatgactacaatttatgttaatggacagcgtgttacaaaggaagatctgaaaaataatgaaattaaaatagaaagtgtaaaaaaaatacttgctgagaaattgactaagacaaagtgatgttgtagactatggctagaataaaaacctagccattttcttttaggaggatggcctatgagcaaattgcaggtggcatatttgagagtatcaacagaaacacagactgaaaagtac

SEQ ID NO: 21787 - DNA, 260 bp, Unknown
  Description of Unknown: LeftRegion for integrase B8788 sequence
tgaagtagaaaaaagactttgcgaagagttaaatattgaatatattaacttaagtttacgtacaggacctagtcatagatttactgaaaaagaataccaagaacttaaatctgattatgctcagttatttttacaattaaacaagcttaatgttgagaaagaccaagagtagtttttaaataagatagggggattcgtttatgctaaagagagcagcgttatacattagggtttctactgatcaacaagcaaaacacggg

SEQ ID NO: 21788 - DNA, 260 bp, Unknown
  Description of Unknown: LeftRegion for integrase B8789 sequence
tgaggtagaaaaaagactttgcgaagagttgaatattgaatatattaacttaaatttacgtacaggacctagtcacagatttactgaaaaagaataccaagagcttaaatctgattatgctcagttatttttacaattaaacaagcttaatgttgagaaagaccaagagtagtttttaaataagatagggggattcgtttatgctaaagagagcagcgttatacattagggtttctactgatcaacaagcaaaacacggg

SEQ ID NO: 21789 - DNA, 260 bp, Unknown
  Description of Unknown: LeftRegion for integrase B8790 sequence
ggcttttcaagtcataccctggaggtgttttcattgttgtctttttttcgcacgcacaccacccgcaccgtcacctcgccccgggcggaaataattcgggccagagcctcatatagtgccttgacggcctgcgcatccatgggcatccctccggtgcattgtatgcgccgcgcggccgcggcagaacgggaggtggtacgatgagcggcgacgtaattcgggcggcgggctacatccgcgtttccacggccgagcaggct

SEQ ID NO: 21790 - DNA, 260 bp, Unknown
  Description of Unknown: LeftRegion for integrase B8791 sequence
ctcgcttaatttttcgatcaattctaataagtcttgtttcataaatagaaaaactcctctcaactgtttatctagaacaaatgttctgaaaacattatagtgactgaggcgtataaaagcaacgtgaaaatgtttccattaaggaggtgatgcgagaatatattttagctgcaagacatcactataaaggagacaggaaaatggggattttaagagtaggtttatacgagcgtgtttcaacaacagagcaaagtttgaat

SEQ ID NO: 21791 - DNA, 260 bp, Unknown
  Description of Unknown: LeftRegion for integrase B8792 sequence
ggcttttcaagtcataccttggaggtgttttttgtgtccgcctttttcacaatggagatcacccggatgtccacatcctcgcgcgccgaaatgatgcgcgccaacgtctcatataaatttcttacggcggcctcgtccatctgtgctcacccctgccagcatatgtgcggggcggccgccccagaacaggaggtgtcacgatgagcgctcccgttgtccgtgccgcggggtatatccgcgtctctacggccgagcaggcg

SEQ ID NO: 21792 - DNA, 260 bp, Unknown
  Description of Unknown: LeftRegion for integrase B8793 sequence
aaaatattctatcaaattttagcgatttttgatagaagccatatacggcattaaaacaaataaaaaaacccgccagcgccaactggcaggatcggcagcgacggcaatcgctgtagcgcagttaaaatgaccacgaatcatttctttttctgcgctttcattttaccaaaaatcaggaataaatgaaaggatgattgaatatgctgagagggtttctttacgcccgaatatccgtcgaagaacggaatcaaaagaaatac

SEQ ID NO: 21793 - DNA, 260 bp, Unknown; identical to SEQ ID NO: 21786
  Description of Unknown: LeftRegion for integrase B8794 sequence

SEQ ID NO: 21794 - DNA, 260 bp, Unknown
  Description of Unknown: LeftRegion for integrase B8795 sequence
aaagagtttttggaggtatctggcaatatgactacaatctatgtcaatggtaagcgtgtgacaaaagaagaactcaaaaacaatgaaattcagatagagtcagtaaaaaaaatactgtcagagaaattgacgaaaagtaaatagaattgtagaatatggctagaataaaaactagccatttcttttaggaggaatggcatatgagaaaacttaatgtcgcgtatctaagagtatctacagaagctcagactgaaaagtac

SEQ ID NO: 21795 - DNA, 260 bp, Unknown; identical to SEQ ID NO: 21791
  Description of Unknown: LeftRegion for integrase B8796 sequence

SEQ ID NO: 21796 - DNA, 260 bp, Unknown; identical to SEQ ID NO: 21786
  Description of Unknown: LeftRegion for integrase B8797 sequence

SEQ ID NO: 21797 - DNA, 260 bp, Unknown
  Description of Unknown: LeftRegion for integrase B8798 sequence
aaagagtttttggaggtgtctggcaatatgactacaatctatgtcaatggtaagcgtgtgacaaaagaagagctcaaaaacaatgaaattcagatagagtcagtaaaaaaaatactgtcagagaaattgacgaaaagtaaatagaattgtagaatatggctagaataaaaactagccatttcttttaggaggaatggcatatgagaaaacttaatgtcgcgtatctaagagtatctacagaagctcagactgaaaagtac

SEQ ID NO: 21798 - DNA, 260 bp, Unknown
  Description of Unknown: LeftRegion for integrase B8799 sequence
aaactggagagcctgttgaattttaagatttatttataataaaaaatcgccccagtgttggcgcaccaggacgactttgtgtgaatcttttgcagctatcagttgatgctacaatcttttctgagcaatttgattatagcacgaactgatacgcctgcaaaggtgtattttttatacccatttttaaggagcgataggttatgagtataacaaatgttgctatttatgtgcgtgtatctacggaccggcaggcaaaaaaa

SEQ ID NO: 21799 - DNA, 260 bp, Unknown
  Description of Unknown: LeftRegion for integrase B8800 sequence
ctactccgtccgagcgtgagttgatggaacggcaactcaaagtcgagcgtgagaagcaggatttgctggagcgaagcgtgaagatgctgcgtaggatcgtgtttggcttgatagttgttgttgcactgatcgccatgtatgcggtcacgctggataattgtgcgtctacagtcggtttttttagagggtgaggttaccacatgaaacaaagagctgcactctacgtcagggtgtccacggaggaacaggcaaagcacggg

SEQ ID NO: 21800 - DNA, 260 bp, Unknown
  Description of Unknown: LeftRegion for integrase B8801 sequence
gaaactggagagcctgttgaattttaagatttatttataataaaaaatcgccccggtgttggcgcaccaggacgactttgtgtgaatcttttgcagctatcagttgatgctacaatcttttctgaacaatttgattatagcacgaactgatacgcctgcaaaggtgtattttttatacccattttaaggagtgataggttatgagtataacaaatgttgctatttatgtacgtgtatctacggaccggcaggcaaaaaaa

SEQ ID NO: 21801 - DNA, 260 bp, Unknown
  Description of Unknown: LeftRegion for integrase B8802 sequence
tggattttttggaggtgtttgaaaacatgactacaatttatgttaatggtcagcgtgttacaaaggaagatctgaaaaataacgaaattcaaattgaaagtgttaaaaaaatgcttgctgagaaattgactaagacaaagtgatgttgtagactatggctagaataaaaacctagccattttcttttaggaggatggcatatgagcaaattacaagtggcatatttgagagtatcaacagagacacagactgaaaaatac

SEQ ID NO: 21802 - DNA, 260 bp, Unknown
  Description of Unknown: LeftRegion for integrase B8803 sequence
agtttttggaggtatctggcaatatgactacaatttatgttaatggaaaaagagtcactaaagaagaactcaaaaaaaatgaaattcagatagaggcagtcaaaaaaattctatccgagaaattgacgaaaaataaataaaattgtagaatatggctagaataaaacctagccatttcttttagaaagggatggccaaatatgagtaaacttaatgttgcatatttaagagtatcaacagaatctcaaaccgaaaagtac

SEQ ID NO: 21803 - DNA, 260 bp, Unknown
  Description of Unknown: LeftRegion for integrase B8804 sequence
taccccgtccgaacgtgaattgatggaacggcagctgaaggttgagcgcgagaagcaggctttgctggaacggagcgtgaaggccttgcgcaggatcgtgtttggcctgctggccgttattgcagtggtcgccgtgtatgccgtcacgctggatgtctgcacgtctacagtcggattttttagaggatgaggtgggatctatgaggcaaagagcggcgctctatatccgggtgtccacggaggaacaggcaaagcacggg

SEQ ID NO: 21804 - DNA, 260 bp, Unknown
  Description of Unknown: LeftRegion for integrase B8805 sequence
ttaaaaaaggaggaagaaagtggttaggatatacgtaaatgggatccttacaaaaagagaagatttggaaaaaattgaaataaaaaatgaaaatataaaaaagattcttgccagtaaattgacggaaaagaagtgatgatatagaattgaccttgatagaatctcggtcaattctttttaaatggaaaggaagagttgacatgaagaaaatgaatgtaggttatcttagggtatcgaccgagaaccagacggaaaaatat

SEQ ID NO: 21805 - DNA, 260 bp, Unknown; identical to SEQ ID NO: 21588
  Description of Unknown: LeftRegion for integrase B8806 sequence

SEQ ID NO: 21806 - DNA, 260 bp, Unknown
  Description of Unknown: LeftRegion for integrase B8807 sequence
aaagaggaacagttagtatattatttcgaacactgtaaataaaaaatcgccccggtgttggcgcaccaggacgactttgtgtgaatcttttgcagctatcagttgatgctacaatcctttctgagcaatttgattatagcacgaactgatacgcctgcaaaggtgtattttttatacccatttttaaggagtgataggttatgagtataacaaatgttgctatttatgtgcgtgtatctacggaccggcaggcaaaaaaa

SEQ ID NO: 21807 - DNA, 260 bp, Unknown
  Description of Unknown: LeftRegion for integrase B8808 sequence
gagaaccggttgagttctgattttatgtaaaataaaaatcgccccggtattagggtaccggaacgactttacagattgcatgtgaaacttttgcagctatcagttgatgctacaatcatttcgtgaccaatttgattatagcacgaactgatacgcctgcataggtgtattttttatacccatttttaaggagtgatactatgagtataataaacgttgctatatatgtgcgtgtttccacggaccggcaggcgaaaaag

SEQ ID NO: 21808 - DNA, 260 bp, Unknown
  Description of Unknown: LeftRegion for integrase B8809 sequence
ggtaaatggctagcagagtaacaagatcaaaggtttgcagcaggttggatatcttttttataagctcctttctatccatgatgcacctccttaaaaaaaagatgtttccatgctaacacaaaggggaagacgatataatactttttttaacacttttgatgtgactaatggtgtaaacgtaacacaagaaaggacaggaaatgacagaaaaggaagaacagaaaagggcggctatatatgtgcgtgtatcaaccgcagaa

SEQ ID NO: 21809 - DNA, 260 bp, Unknown
  Description of Unknown: LeftRegion for integrase B8810 sequence
aaactggagagcctgttgaattttaagatttatttataataaaaaatcgccccagtgttggcgcaccaggacgactttgtgtgaatcttttgcagctatcagttgatgctacaatcttttctgaacaatttgattatagcacgaactgatacgcctgcaaaggtgtatttttttatacccattttaaggagtgataggttatgagtataacaaatgttgctatttatgtacgtgtatctacggaccggcaggcaaaaaaa

SEQ ID NO: 21810 - DNA, 260 bp, Unknown
  Description of Unknown: LeftRegion for integrase B8811 sequence
aagcgcgcggatatgatgcgtgcaagaaatgttatagataaataaaaatcgtcccagtgttggcgcaccaggacgacttcgtgaaaactctgcagctatcagttgatgctacaattcttttccagacaattagaattatagcacgaactgatacgcctgcataggtgtattttttatacccatttttaaggagtgatactatgagtataacaaacgttgctatatatgtacgtgtttccacggaccggcaggcgaaaaag

SEQ ID NO: 21811 - DNA, 260 bp, Unknown; identical to SEQ ID NO: 21810
  Description of Unknown: LeftRegion for integrase B8812 sequence

SEQ ID NO: 21812 - DNA, 260 bp, Unknown
  Description of Unknown: LeftRegion for integrase B8813 sequence
taaatggctagcagagtaacaaggtcaaaggtttgcagcaggttggatatcttttttataagctcctttctatccatataatgcgcctccttaaaaaaaagatgtttccatgctaacacaaaggggaagacgatataatactttttttaacacttttgatgtgactaatggtgtaaacgtgacacaagaaaggacaggaaatgacagaaaaggaagagcagaaaagggcggctatatatgtgcgtgtatcaaccgcagaa

SEQ ID NO: 21813 - DNA, 260 bp, Unknown
  Description of Unknown: LeftRegion for integrase B8814 sequence
gaaaagaatttgacacaagcggaacttgccgagattgtcggcggcacacattcaacagtggcgaagtgggaagctggcgtaaacttaccgcgcgcaaaagaattgcgtatattagcaaggctgttcgaggtcagctctgattacttgatcggtttaacggatgatcgtacaccctactatctaaaagagaaggcgaagtcgtgagaacaggtttatatgtaagagtttcgacaacggaacaagaaaagcatggttactct

SEQ ID NO: 21814 - DNA, 260 bp, Unknown
  Description of Unknown: LeftRegion for integrase B8815 sequence
aaaagaggaacagttagtatattatttcgaacactgtaaataaaaaatcgccccggtgttggcgcaccaagacgactttgtgtgaatcttttgcagctatcagttgatgctacaatcttttctgaacaatttgattatagcacgaactgatacgcctgcaaaggtgtattttttatacccattttaaggagtgataggttatgagtataacaaatgttgctatttatgtacgtgtatctacggaccggcaggcaaaaaaa

SEQ ID NO: 21815 - DNA, 260 bp, Unknown
  Description of Unknown: LeftRegion for integrase B8816 sequence
taaatggctagcagagtaacaaggtcaaaggtttgcagcaggttggatatcttttttataagctcctttctatccatataatgcgcctccttaaaaaaaagatgcttttacactaacacaaaaaggaaagcgatataatactttttctaacacttttgatgtgactaatggtgtaaacgtgacacaagaaaggacaggaaatggcagaaaaggaaggacagaaaagggcggctatatatgtgcgtgtatcaaccgcagaa

SEQ ID NO: 21816 - DNA, 260 bp, Unknown; identical to SEQ ID NO: 21807
  Description of Unknown: LeftRegion for integrase B8817 sequence

SEQ ID NO: 21817 - DNA, 260 bp, Unknown; identical to SEQ ID NO: 21801
  Description of Unknown: LeftRegion for integrase B8818 sequence

SEQ ID NO: 21818 - DNA, 260 bp, Unknown
  Description of Unknown: LeftRegion for integrase B8819 sequence
ggagaaaaagtatcaggcggccctcgcggtggcccgtgaaatgctgcaaaaaggcgtcataaacgaggcggattttctgcgcattgaggccagactggcggcaaaattccggcctgttttgggcggtattttctgctgaaaagcctttcttttcagggtggcttcctataacatcagtgtcctgaaaggagggcgtatttatggaacgcattattcaaaaagttaccccgcccgcgcggaaaaaagcgccaaagctaaag

SEQ ID NO: 21819 - DNA, 260 bp, Unknown
  Description of Unknown: LeftRegion for integrase B8820 sequence
agcgcgcggatatgatgcgtgcaagaaatgttatagataaataaaaatcgtcccagtgttggcgcaccaggacgactttgtgaaaactctgcagctatcagttgatgctacaattcttttccagacaattagaattatagcacgaactgatacgcctgcataggtgtattttttatacccattttttaaggagtgatactatgagtataacaaacgttgctatatatgtacgtgtttccacggaccggcaggcgaaaagg

SEQ ID NO: 21820 - DNA, 260 bp, Unknown
  Description of Unknown: LeftRegion for integrase B8821 sequence
agcgcgcggatatgatgcgtgcaagaaatgttatagataaataaaaatcgccccagtgttggcgcaccaggacgactttgtgaaaactctgcagctatcagttgatgctacaattcttttccagacaattagaattatagcacgaactgatacgcctgcataggtgtattttttatacccattttttaaggagtgatactatgagtataacaaatgttgctatatatgtacgtgtctccacagaccggcaggcaaaaaag

SEQ ID NO: 21821 - DNA, 260 bp, Unknown
  Description of Unknown: LeftRegion for integrase B8822 sequence
cttaaaagtccccggtgctacaaacaccgaggacaagcattgctccgaagatacaacgccccaaacaagcatattgtatcacttcggagcagcctttcgcaagcagaactcacgttctacttaggctgttatttttgtacccatttttccaacatacaccgtatgtcggaggaataaattaataagaatggagtgatattatggtaaaaaaacacgttgctctttacgtcagggtatccacggaagaacaaaagaatcac

SEQ ID NO: 21822 - DNA, 260 bp, Unknown; identical to SEQ ID NO: 21820
  Description of Unknown: LeftRegion for integrase B8823 sequence

SEQ ID NO: 21823 - DNA, 260 bp, Unknown
  Description of Unknown: LeftRegion for integrase B8824 sequence
aagcgcgcggatatgatgcgtgcaagaaatgttatagataaataaaaatcgccccagtgttggcgcaccaggacgacttcgagaaaactctgcagctatcatttgatgctacaattcttttccagacaattagaattatagcacgaactgatacgcctgcataggtgtattttttatatccatttttaaggagtgatactatgagtataacaaatgttgctatatatgtacgtgtctccacagaccgacaggcgaaaaag

SEQ ID NO: 21824 - DNA, 260 bp, Unknown
  Description of Unknown: LeftRegion for integrase B8825 sequence
agcaggtattgcgttataaaactactataaagaccgctgccaagatgctggagcaggggattatttccgagaaagagtttgctgaatttgagcaggaaattgcagaaaaatatggtattaaaagtgactcacttttccgcaatattgctggataatatctgagtaaagaggtaatatacgagcaacaaaaggaggtacatatgcgtgaaattcagttggtaacacccaacaatcgacccattcttgtgcgcaaacgcgta

SEQ ID NO: 21825 - DNA, 260 bp, Unknown
  Description of Unknown: LeftRegion for integrase B8826 sequence
gattttttagaaaaaggtgattacatgacaactgtttatgttaatggagaacgtgtaaaaaaagaagagcttgataaaattgagattcacatggaaaatgttaagaaaattctatccgagaaattgactaaaaatgactaacggtttagaattgacttagggtgaaaacttggtcaattctttttgaaggagaattgattatgggaaaaatgaatgtagcttacatgagagtttcaacagaagctcagacagaaaagtac

SEQ ID NO: 21826 - DNA, 260 bp, Unknown
  Description of Unknown: LeftRegion for integrase B8827 sequence
aaagcgcgcggatatgatgcgtgcaagaaatgttatagataaataaaaatcgtcccagtgttggcgcaccaggacgacttcatgaaaactctgcagctatcagttgatgctacaattcttttccagacaattagaattatagcacgaactgatacgcctgcataggtgtattttttatacccatttttaaggaggatactatgagtataacaaatgttgctatatatgtacgtgtctccacagaccgacaggcgaaaaag

SEQ ID NO: 21827 - DNA, 260 bp, Unknown
  Description of Unknown: LeftRegion for integrase B8828 sequence
ttgagtttctgaaaggagatgtttgtttgacaactatttacgtgaacggtcaacgtgtcgacaagaaagatcttgaaaaaatggaaattcacattgaaagtgtaaaaaagattctttctgagaaattgacaaaaaataaatagcagtgtaggattgacctgaatagagttcaggtcaattttattaaagggggaattgacatgaacagattgaacgtaggatacctgcgggtgtcgactgaggcacagacagagaaatat

SEQ ID NO: 21828 - DNA, 260 bp, Unknown
  Description of Unknown: LeftRegion for integrase B8829 sequence
acgaaagaggaacagttagtatattatttcgaacattgcaaataaaaatcgccccagtgctggcacaccaggacgactttgtgtgaatcttttgcagctatcagttgatgctacaatcttttccgaacaatttgattatagcatgaactgatacgcctgcataggtgtattttttatacccatttttaaggagtgatactatgagtataacaaatgttgctatatatgtacgtgtttccacggaccggcaagcgaaaaaa

SEQ ID NO: 21829 - DNA, 260 bp, Unknown
  Description of Unknown: LeftRegion for integrase B8830 sequence
aacagttagtatattatttcgaacattgcaaataaaaatcgccccggtattagggtaccggaacgactttacagattgcatgtgaaacttttgcagctatcagttgatgctacaatcatttcgtgaccaatttgattatagcacgaactgatacgcctgcataggtgtattttttatacccatttttaaggagtgatactatgagtataacaaatgttgctatatatgtacgtgtctccacagaccggcaggcaaaaaag

SEQ ID NO: 21830 - DNA, 260 bp, Unknown
  Description of Unknown: LeftRegion for integrase B8831 sequence
gaaccggttgagttctaattttaagcaaaacaaaaatcgccccggtattagggtaccggaacgactttacagattgcatgtgaaacttttgcagctatcagttgatgctacaatcatttcgtgaccaatttgattatagcacgaactgatacgcctgcataggtgtatttttttatacccattttttaaggagtgatactatgagtataacaaatgttgctatatatgtacgtgtctccacagaccgacaggcaaaaaag

SEQ ID NO: 21831 - DNA, 260 bp, Unknown
  Description of Unknown: LeftRegion for integrase B8832 sequence
acgaaagaggaacagttagtatattatttcgaacattgcaaataaaaatcgccccagtgctggcacaccaggacgactttgtgtgaatcttttgcagctatcagttgatgctacaatcttttccgaacaatttgattatagcatgaactgatacgcctgcataggtgtattttttatacccatttttaaggagtgatactatgagtataacaaatgttgctatatatgtacgtgtttccacggaccggcaggcgaaaaag

SEQ ID NO: 21832 - DNA, 260 bp, Unknown
  Description of Unknown: LeftRegion for integrase B8833 sequence
aagcgcgcggatatgatgcgtgcaagaaatgttatagataaataaaaatcgtcccagtgttggcgcaccaggacgacttcgtgaaaactctgcagctatcagttgatgctacaattcttttccagacaattagaattatagcacgaactgatacgcctgcataggtgtattttttatacccatttttaaggagtgatactatgagtataacaaatgttgctatatatgtacgtgtctccacggaccggcaagcgaaaaaa

SEQ ID NO: 21833 - DNA, 260 bp, Unknown
  Description of Unknown: LeftRegion for integrase B8834 sequence
gcgcgcggatatgatgcgtgcaagaaatgttatagataaataaaaatcgtcccagtgttggcgcaccaggacgactttgtgaaaactctgcagctatcagttgatgctacaattcttttccagacaattagaattatagcacgaactgatacgcctgcataggtgtattttttatacccatttttaaggagtgatatattatgagtataacaaatgttgctatatatgtacgtgtctccacagaccgacaggcgaaaaag

SEQ ID NO: 21834 - DNA, 260 bp, Unknown
  Description of Unknown: LeftRegion for integrase B8835 sequence
agcaggtattgcgttataaaactactataaaggccgctgtcgagatgctgaagcaggggattatttccgagaaagagtttgctgaatttgagcaggaaattgcagaaaaatatggtattaaaagtgactcacttttccgcaatatcgctggataatatctgtgtaaagaggtaatatacgagcaacaaaaggaggtacatatgcgtgaaattcagttggtaacacccaacaatcgacccattcttgtgcgcaaacgcgta

SEQ ID NO: 21835 - DNA, 260 bp, Unknown
  Description of Unknown: LeftRegion for integrase B8836 sequence
cttacgcaaaagcaaggaaagaattatcgaaatagaacaatttaaaagtcgccccagtgttggcacaccaggacgaccttgtgaatctttgcagctatcagttgatgctacaattcttccctagacagttagaattatagcacgaactgatacgcctgcataggtgtatttttttatacccatttttaaggagtgatactatgagtataacaaatgttgctatatatgtacgtgtctccacggaccgacaagcgaaaaaa

SEQ ID NO: 21836 - DNA, 260 bp, Unknown
  Description of Unknown: LeftRegion for integrase B8837 sequence
agcaggtattgcgttataaaactactataaagaccgctgccgagatgctggagcaggggattatttccgagaaagagtttgctgaatttgagcaggaaattgcagaaaaatatggtattaaaagtgactcacttttccgcaatatcgctggataatatctgtgtaaagaggtaatatacgagcaacaaaaggaggtacatatgcgtgaaattcagttggtaacacccaacaatcgacccattcttgtgcgcaaacgcgta

SEQ ID NO: 21837 - DNA, 260 bp, Unknown
  Description of Unknown: LeftRegion for integrase B8838 sequence
acgaaagaggaacagttagtatattatttcgaacattgcaaataaaaatcgccccagtgctggcacaccaggacgactttgtgtgaatcttttgcagctatcagttgatgctacaatcttttccgaacaatttgattatagcatgaactgatacgcctgcataggtgtattttttatacccatttttaaggagtgatactatgagtataacaaatgttgctatatatgtacgtgtctccacggaccggcaagcgaaaaaa

SEQ ID NO: 21838 - DNA, 260 bp, Unknown
  Description of Unknown: LeftRegion for integrase B8839 sequence
attgagaccggagaaccagttgagttttaatttcaagtaaaataaaaaaccgtcccagtgttggcgcaccaggacgactttgtgaaaactctgcagctatcagttgatgctacaattcttttccagacaattagaattatagcacgaactgatacgcctgcatagatgtttttttatacccatttttaaggagtgatactatgagtataacaaatgttgctatatatgtacgtgtctccacggaccggcaagcgaaaaaa

SEQ ID NO: 21839 - DNA, 260 bp, Unknown
  Description of Unknown: LeftRegion for integrase B8840 sequence
ttcttacgcaaaagcaaggaaagaattatcgaaatagaacaatttaaaagtcgccccagtgttggcacatcaggacgaccttgtgaatctttgcagctatcagttgatgctacaattcttccctagacagttagaattatagcacgaactgatacgcctgcataggtgtattttttatacccatttttaaggaggatactatgagtataacaaatgttgctatatatgtacgtgtctccacagaccggcaggcgaaaaag

SEQ ID NO: 21840 - DNA, 260 bp, Unknown
  Description of Unknown: LeftRegion for integrase B8841 sequence
ggaatcgaacgaaatgacaacaatttttattgatggcaaacctgtgaaaaaagaggacatcgagaactatgaaatcaagttggattcagttaaaaaaactatcaaaaataaattgacttgattgtattttgaggagtagaattgactggagcaaatccggtcaattctttttattttaaaacattataaggagaattgatatgggaaaaatgaatgttggatacctgagagtatctacagagaatcaaacagaaaagtac

SEQ ID NO: 21841 - DNA, 260 bp, Unknown
  Description of Unknown: LeftRegion for integrase B8842 sequence
ttgagtttctgaaaggagatgtttgtttgacaactatttacgtgaacggtcaacgtgtcgacaagaaagatcttgaaaaaatggaaattcacattgaaagtgtaaaaaagattctttctgagaaattgacaaaaaataaatagcagtgtaggattgacctgaatagagttcaggtcaattttattaaagggggaattgacatgaacaaattgaacgtaggatacctgcgggtgtcgactgaggcacagacagagaaatat

SEQ ID NO: 21842 - DNA, 260 bp, Unknown; identical to SEQ ID NO: 21820
  Description of Unknown: LeftRegion for integrase B8843 sequence

SEQ ID NO: 21843 - DNA, 260 bp, Unknown
  Description of Unknown: LeftRegion for integrase B8844 sequence
aacagtgtgacaagatcaaaggtttgcagcaggttagatatcttttttataagctcctttctatccatatgatgcacctccttaaaaaaagatgtttccatgctaacacaaagaggaaagcgatataatactttttttaacactttttacatgactaatcacgtaaacgtgacacagtaagaaaggatacagaaaaggaaatggaaggaaagaaaagggcggctatatatgtgcgtgtatcaaccgcagaacaaagagat

SEQ ID NO: 21844 - DNA, 260 bp, Unknown
  Description of Unknown: LeftRegion for integrase B8845 sequence
aaagcgcgcggatatgatgcgtgcaagaaatgttatagataaataaaaatcgtcccagtgttggcgcaccaggacgacttcgtgaaaactctgcagctatcagttgatgctacaattcttttccagacaattagaattatagcacgaactgatacgcctgcataggtgtattttttatacccatttttaaggaggatactatgagtataacaaatgttgctatatatgtacgtgtctccacagaccggcaggcaaaaaag

SEQ ID NO: 21845 - DNA, 260 bp, Unknown
  Description of Unknown: LeftRegion for integrase B8846 sequence
ttgagtttctgaaaggagatgtttgtttgacaactatttacgtgaacggtcaacgtgtcgacaagaaagatcttgaaaaaatggaaattcacattgaaagtgtaaaaaagattctttctgagaaattgacaaaaaataaatagcagtgtaggattgacctgaatagagttcaggtcaattttattaaagggagaattgacatgaacaaattgaacgtaggatacctgcgggtgtcgactgaggcacagacagagaaatat

SEQ ID NO: 21846 - DNA, 260 bp, Unknown
  Description of Unknown: LeftRegion for integrase B8847 sequence
acgaaagaggaacagttagtatattatttcgaacattgcaaataaaaatcgccccagtgctggcacaccaggacgactttgtgcgaatcttttgcagctatcagttgatgctacaatcttttccgaacaatttgattatagcatgaactgatacgcctgcataggtgtattttttatacccatttttaaggagtgatactatgagtataacaaatgttgctatatatgtacgtgtctccacggaccggcaagcgaaaaaa

SEQ ID NO: 21847 - DNA, 260 bp, Unknown
  Description of Unknown: LeftRegion for integrase B8848 sequence
ttgagaccggagaaccagttgagttttaatttcaagtaaaataaaaaaccgtcccagtgctggcgcaccaggacgactttgtgaaaactctgcagctatcatttgatgctacaattcttttccagacaattagaattatagcacgaactgatacgcctgcataggtgtattttttatacccatttttaaggagtgatactatgagtataacaaatgttgctatatatgtacgtgtctccacagaccgacaggcgaaaaag

SEQ ID NO: 21848 - DNA, 260 bp, Unknown
  Description of Unknown: LeftRegion for integrase B8849 sequence
gagaccggagaaccagttgagttttaatttcaagtaaaataaaaaaccgtcccagtgttggcgcaccaggacgactttgtgaaaactctgcagctatcagttgatgctacaattcttttccagacaattagaattatagcacgaactgatacgcctgcataggtgtattttttatacccatttttaaggagtgatatgttatgagtataacaaatgttgctatatatgtacgtgtctccacagaccgacaggcgaaaaag

SEQ ID NO: 21849 - DNA, 260 bp, Unknown
  Description of Unknown: LeftRegion for integrase B8850 sequence
ataatatccgaagctattttatgattctatttcaatcaaataaaaatcgccccagtgttggcgcaccaggacgacttcgtgaaaactctgcagctatcagttgatgctacaattcttttccagacaattagaattatagcacgaactgatacgcctgcataggtgtattttttatacccatttttaaggagtgatatgttatgagtataacaaatgttgctatatatgtacgtgtctccacagaccgacaggcgaaaaag

SEQ ID NO: 21850 - DNA, 260 bp, Unknown
  Description of Unknown: LeftRegion for integrase B8851 sequence
agcgcgcggatatgatgcgtgcaagaaatgttatagataaataaaaatcgtcccagtgttggcgcaccaggacgacttcgtgaaaactctgcagctatcaattgatgctacaattcttttccagacaattagaattatagcacgaactgatacgcctgcataggtgtattttttatacccattttttaaggagtgatactatgagtataacaaatgttgctatatatgtacgtgtctccacagaccgacaggcgaaaaaa

SEQ ID NO: 21851 - DNA, 260 bp, Unknown; identical to SEQ ID NO: 21814
  Description of Unknown: LeftRegion for integrase B8852 sequence

SEQ ID NO: 21852 - DNA, 260 bp, Unknown; identical to SEQ ID NO: 21840
  Description of Unknown: LeftRegion for integrase B8853 sequence

SEQ ID NO: 21853 - DNA, 260 bp, Unknown
  Description of Unknown: LeftRegion for integrase B8854 sequence
aaaggacggtctggaacaccgccttgagaacaaacggcagaccatcggcctgatggacacagaactgtgcaatctttggcactccgtgaagctatacaggcggatcatactcggtttgtcactattgatcatcgggcttttcgtctggtgcgtttgggttgacatccattgtgccaactatggattttggaggggataacatgtgccaaaaaatagtggtcactctaccaaataatctacgcatccgtgtagcactgtac

SEQ ID NO: 21854 - DNA, 260 bp, Unknown; identical to SEQ ID NO: 21844
  Description of Unknown: LeftRegion for integrase B8855 sequence

SEQ ID NO: 21855 - DNA, 260 bp, Unknown
  Description of Unknown: LeftRegion for integrase B8856 sequence
agcgcgcggatatgatgcgtgcaagaaatgttatagataaataaaaatcgtcccagtgttggcgcaccaggacgacttcgtgaaaactctgcagctatcaattgatgctacaattcttttccagacaattagaattatagcacgaactgatacgcctgcataggtgtattttttatacccattttttaaggagtgatactatgagtataacaaatgttgctatatatgtacgtgtctccacagaccgacaggcgaaaaag

SEQ ID NO: 21856 - DNA, 260 bp, Unknown
  Description of Unknown: LeftRegion for integrase B8857 sequence
aaagaggaacagttagtatattatttcgaacactgtaaataaaaaatcgccccggtgttggcgcaccaggacgactttgtgtgaatcttttgcagctatcagttgatgctacaatcttttctgagcaatttgattatagcacgaactgatacgcctgcaaaggtgtattttttatacccatttttaaggagtgataggttatgagtataacaaatgttgctatttatgtgcgtgtatctacggaccggcaggcaaaaaaa

SEQ ID NO: 21857 - DNA, 260 bp, Unknown
  Description of Unknown: LeftRegion for integrase B8858 sequence
gcgcgcggatatgatgcgtgcaagaaatgttatagataaataaaaatcgtcccagtgttggcgcaccaggacgacttcgtgaaaactctgcagctatcagttgatgctacaattcttttccagacaattagaattatagcacgaactgatacgcctgcataggtgtattttttatacccatttttaaggagtgatatgttatgagtataacaaatgttgctatatatgtacgtgtctccacagaccgacaggcgaaaaag

SEQ ID NO: 21858 - DNA, 260 bp, Unknown; identical to SEQ ID NO: 21837
  Description of Unknown: LeftRegion for integrase B8859 sequence

SEQ ID NO: 21859 - DNA, 260 bp, Unknown
  Description of Unknown: LeftRegion for integrase B8860 sequence
ttgagtttctgaaaggagatgtttgtttgacaactatttacgtgaacggccaacgtgtcgacaagaaagatcttgaaaaaatggaaattcacattgaaagtgtaaaaaagattctttctgagaaattgacaaaaaataaatagcagtgtaggattgacctgaatagagttcaggtcaattttattaaagggggaattgacatgaacaaattgaacgtaggatacctgcgggtgtcgactgaggcacagacagagaaatat

SEQ ID NO: 21860 - DNA, 260 bp, Unknown
  Description of Unknown: LeftRegion for integrase B8861 sequence
ttgagtttctgaaaggagatgtttgtttgacaactatttacgtgaacggccaacgtgtcgacaagaaagatcttgaaaaaatggaaattcacattgaaagtgtaaaaaagattctttctgagaaattgacaaaaaataaatagcagtgtaggattgacctgaatagagttcaggtcaattttattaaagggggaattgacatgaacaaattgaacgtaggatacctgcgggtgtcgactgaggcgcagacagaaaaatac

SEQ ID NO: 21861 - DNA, 260 bp, Unknown
  Description of Unknown: LeftRegion for integrase B8862 sequence
aagcgcgcggatatgatgcgtgcaagaaatgttatagataaataaaaatcgccccagtgttggcgcaccaggacgactttgagaaaactctgcagctatcatttgatgctacaattcttttccagacaattagaattatagcacgaactgatacgcctgcataggtgtattttttatacccatttttaaggagtgatactatgagtataacaaatgttgctatatatgtacgtgtctccacagaccgacaggcgaaaaag

SEQ ID NO: 21862 - DNA, 260 bp, Unknown; identical to SEQ ID NO: 21855
  Description of Unknown: LeftRegion for integrase B8863 sequence

SEQ ID NO: 21863 - DNA, 260 bp, Unknown
  Description of Unknown: LeftRegion for integrase B8864 sequence
tgtgcctgtcggtgaataattgacaaataatttttaataaataaaaatcgccccagtgttggcgcaccaggacgacttcgtgaaaactctgcagctatcatttgatgctacaattcttttccagacaattagaattatagcacgaactgatacgcctgcataggtgtattttttatacccattttttaaggagtgatactatgagtataacaaatgttgctatatatgtacgtgtctccacagaccggcaggcaaaaaag

SEQ ID NO: 21864 - DNA, 260 bp, Unknown
  Description of Unknown: LeftRegion for integrase B8865 sequence
gagaccggagaaccagttgagttttaatttcaagtaaaataaaaaaccgtcccagtgttggcgcaccaggacgactttgtgaaaactctgcagctatcagttgatgctacaattcttttccagacaattagaattatagcacgaactgatacgcctgcataggtgtattttttatacccatttttaaggagtgatatattatgagtataacaaatgttgctatatatgtacgtgtctccacagaccgacaggcgaaaaag

SEQ ID NO: 21865 - DNA, 260 bp, Unknown; identical to SEQ ID NO: 21849
  Description of Unknown: LeftRegion for integrase B8866 sequence

SEQ ID NO: 21866 - DNA, 260 bp, Unknown; identical to SEQ ID NO: 21827
  Description of Unknown: LeftRegion for integrase B8867 sequence

SEQ ID NO: 21867 - DNA, 260 bp, Unknown; identical to SEQ ID NO: 21826
  Description of Unknown: LeftRegion for integrase B8868 sequence

SEQ ID NO: 21868 - DNA, 260 bp, Unknown
  Description of Unknown: LeftRegion for integrase B8869 sequence
caaaaagtccccggtgctaccaacaccgaggacaagcattgctccgaagatgcaataccacaaatcaaacatattgtatcacttcggagcagccaaaagcaagtggaactcatgttctgcttaggctgttatttttgtacctatttttccaacatacatcgtatgtcggaggaataaattaataagaatggagtgatattatggcaaaaaaacacgttgctctttacgtcagggtatccacggaagaacaaaagaatcac

SEQ ID NO: 21869 - DNA, 260 bp, Unknown
  Description of Unknown: LeftRegion for integrase B8870 sequence
gttcgcctttgccttggctctcgcattgcagagttccgtgttcagttctgaaatggttgttcttctcttcttgacggtctttttcaggtcttcagtctctgctttcaggttcttatcttttccagacaattagaattatagcacgaactgatacgcctgcataggtgtattttttatacccatttttaaggagtgatactatgagtataacaaatgttgctatatatgtacgtgtctccacggaccggcaagcgaaaaaa

SEQ ID NO: 21870 - DNA, 260 bp, Unknown
  Description of Unknown: LeftRegion for integrase B8871 sequence
taaagcgcgcggatatgatgcgtgcaagaaatgttatagataataaaaatcgtcccagtgttggcgcaccaggacgactttgtgaaaactctgcagctatcagttgatgctacaattcttttccagacaattagaattatagcacgaactgatacgcctgcataggtgtattttttatacccatttttaaggaggatactatgagtataacaaatgttgctatatatgtacgtgtctccacggaccggcaagcgaaaaaa

SEQ ID NO: 21871 - DNA, 260 bp, Unknown; identical to SEQ ID NO: 21849
  Description of Unknown: LeftRegion for integrase B8872 sequence

SEQ ID NO: 21872 - DNA, 260 bp, Unknown; identical to SEQ ID NO: 21844
  Description of Unknown: LeftRegion for integrase B8873 sequence

SEQ ID NO: 21873 - DNA, 260 bp, Unknown
  Description of Unknown: LeftRegion for integrase B8874 sequence
cttaaaagtccccggtgctacaaacaccgaggacaagcattgctccgaagatacaacgccccaaacaagcatattgtatcacttcggagcagcctttcgcaagcagaactcacgttctacttaggctgttatttttgtacccatttttccaacatacaccgtatgtcggaggaataaattaataagaatggagtaatattatggtaaaaaaacacgttgctctttacgtcagggtatccacggaagaacaaaagaatcac

SEQ ID NO: 21874 - DNA, 260 bp, Unknown
  Description of Unknown: LeftRegion for integrase B8875 sequence
agaataatatcagaagctattttatgattctattccgatcaaataaaaatcgccccagtgttggcgcaccaggacgactttgtgaaaactctgcagctatcagttgatgctacaattcttttccagacaattagaattatagcacgaactgatacgcctgcataggtgtattttttatacccatttttaaggaggatactatgagtataacaaatgttgctatatatgtacgtgtctccacagaccggcaggcaaaaaaa

SEQ ID NO: 21875 - DNA, 260 bp, Unknown
  Description of Unknown: LeftRegion for integrase B8876 sequence
aataatatccgaagctattttatgattctatttcaatcaaataaaaatcgccccagtgttggcgcaccaggacgacttcgtgaaaactctgcagctatcagttgatgctacaattcttttccagacaattagaattatagcacgaactgatacgcctgcataggtgtattttttatacccattttttaaggagtgatactatgagtataacaaatgttgctatatatgtacgtgtctccacagaccgacaggcaaaaaag

SEQ ID NO: 21876 - DNA, 260 bp, Unknown
  Description of Unknown: LeftRegion for integrase B8877 sequence
caattcccggttccataaagaatcgggagttttttatttttttcgttattttcatctccttaacgactttacagattgcatgtgaaacttttgcagctatcagttgatgctacaatcatttcgtgaccaatttgattatagcacgaactgatacgcctgcataggtgtattttttatatccatttttaaggagtgatactatgagtataacaaatgttgctatatatgtacgtgtctccacagaccgacaggcgaaaaag

SEQ ID NO: 21877 - DNA, 260 bp, Unknown
  Description of Unknown: LeftRegion for integrase B8878 sequence
ttgagaccggagaaccagttgagttttaatttcaagtaaaataaaaaccgtcccagtgctggcgcaccaggacgactttgtgaaaactctgcagctatcatttgatgctacaattcttttccagacaattagaattatagcacgaactgatacgcctgcataggtgtattttttatacccattttttaaggagtgatactatgagtataacaaatgttgctatatatgtacgtgtctccacagaccgacaggcgaaaaag

SEQ ID NO: 21878 - DNA, 260 bp, Unknown
  Description of Unknown: LeftRegion for integrase B8879 sequence
aaaggacggtctggaacaccgccttgagaacaaacggcagaccatcggcctgatggacacagaactgtgcaatctttggcactccgtgaagctatacaggtggatcatactcggtttgtcactattgatcatcgggcttttcgtctggtgcgtttgggttgacatccattgtgccaactatggattttggaggggataacatgtgccaaaaaatagtggtcactctaccaaataatctacgcatccgtgtagcactgtac

SEQ ID NO: 21879 - DNA, 260 bp, Unknown
  Description of Unknown: LeftRegion for integrase B8880 sequence
tcttacgcaaaagcaaggaaagaattatcgaaatagaacaatttaaaagtcgccccagtgttggcacaccaggacgaccttgtgaatctttgcagctatcagttgatgctacaattcttccctagacagttagaattatagcacgaactgatacgcctgcataggtgtattttttatacccatttttaaggagtgatactatgagtataataaacgttgctatatatgtgcgtgtctccacggaccggcaggcaaaaaaa

SEQ ID NO: 21880 - DNA, 260 bp, Unknown
  Description of Unknown: LeftRegion for integrase B8881 sequence
gcaacaaatccaaaaggacttgagcctagtaagaaagtagctagacaaggtggcgcaatcgccagaaacgcccgcaaagaactggaagaaaaaacgggagcctctgcaatttcaaagcataccgctaaagacataaaggagttagacaaatagcgccgtcaggaatcccctggcggcgtgatcttaggaggtgcgcatttgtgaaacgggctgcgttatatattcgagtcagtacagaagagcaggcccggcacggccta

SEQ ID NO: 21881 - DNA, 260 bp, Unknown
  Description of Unknown: LeftRegion for integrase B8882 sequence
aaaggacggactagaacaccgccttgagaacaaacggcagaccatcggcctgatggacacagaactgtgcaatctttggcactccgtgaagctatacaggtggatcatactcggtttgtcactattgatcatcgggctttttgcctggtgcgtttgggttgacatccattgtgccaactatggattttggaggggataacatgtgccaaaaaatagtggtcactctaccaaataatctacgcatccgtgtagcactgtac

SEQ ID NO: 21882 - DNA, 260 bp, Unknown
  Description of Unknown: LeftRegion for integrase B8883 sequence
aattcttggtgtccagtgcttcataaaagatgaagatgcaaaagcaaaagtaatggatatgtccataggagacactgtaactcttaaggtccatataaaggaagttggagaagttatggcatacgtcgcagacattatagaaatcgaatagtatacagtccctctagtaaatgagggactttttttaaagggagttaaaaatgaacatagcaatttatccaagaaaatcaaaaaaagatgataattcagaatcaatggaa

SEQ ID NO: 21883 - DNA, 260 bp, Unknown
  Description of Unknown: LeftRegion for integrase B8884 sequence
aaaggacggactagaacaccgccttgagaataagcggcagaccatcggcctgatggacacagaactgtgcaatctttggcactccgtgaagctatacaggtggatcatactcggtttgtcactattgatcatcgggctttttgcctggtgcgtttgggttgacatccattgtgctaactatggattttggaggggataacatgtgccaaaaaatagtggtcactctaccaaataatctacgcatccgtgtagcactgtac

SEQ ID NO: 21884 - DNA, 260 bp, Unknown
  Description of Unknown: LeftRegion for integrase B8885 sequence
tgcttgtttttaggatggtttggagttcataaattctatgaagggaaaattttatttggaattttatatttattaacttttggtttatttggtgtcggagttgtaattgaccttatattaattatattgaagccaaatccatattatgtataaaaattatgcccctctattaatatgagggtttttttagggagttaaaaatgaacatagcaatttatccaagaaaatcaaaaaaagatgataattcagaatcaatggaa

SEQ ID NO: 21885 - DNA, 260 bp, Unknown
  Description of Unknown: LeftRegion for integrase B8886 sequence
aattgttggtgtccaatgctatataaaagatgatgatgtaaaagcaaaggtaatggaaatgtccaaagacgatactataacgctaaaagttcatattaaaagcgttggagaagttattggatactcggcagatattatagaaatagaatagtatacagtccctctagcaaatgagggactttttttaaagggagttaaaaatgaacatagcaatttatccaagaaaatcaaaaaaagatgataattcagaatcaatggaa

SEQ ID NO: 21886 - DNA, 260 bp, Unknown
  Description of Unknown: LeftRegion for integrase B8887 sequence
aaaggacggactagaacaccgccttgagaacaaacggcagaccatcggcctgatggacacagaactgtgcaatctttggcactccgtgaagctatacaggtggatcatactcggtttgtcactattgatcatcgggctttttgcctggtgcgtttgggttgacatccattgtgccaactatggattttggaggggataacatgtgccaaaaaatagtggtcactttaccaaataatctacgcatccgtgtagcactgtac

SEQ ID NO: 21887 - DNA, 260 bp, Unknown
  Description of Unknown: LeftRegion for integrase B8888 sequence
aattgttggtgtccaatgctatataaaagatgatgatgtaaaagcaaaggtaatggaaatgtccaaagacgatactataacgctaaaagttcatattaaaagcgttggagaagttattggatactcggcagatattatagaaatagaatagtatacagtccctctagcaaatgagggactttttttaaagggagttaaaaatgaacatagcaatttatccaaggaaatcaaaaaaagatgataattcagaatcaatggaa

SEQ ID NO: 21888 - DNA, 260 bp, Unknown
  Description of Unknown: LeftRegion for integrase B8889 sequence
atttgataatatcatagcaccgaggataatataaggcaatcagcagattttcacaattctttccatttatattttgtattgacctatatctagtggtctttatttttataccacaattttactttttacgataggttttcattctagtgaaaagccgccgtcaggaatcacctggcggcgtgatcttaggaggtggagctatgcaacgagctgcattatatataagggttagtacagaagaacaagcccggcatggcttg

SEQ ID NO: 21889 - DNA, 260 bp, Unknown; identical to SEQ ID NO: 21881
  Description of Unknown: LeftRegion for integrase B8890 sequence

SEQ ID NO: 21890 - DNA, 260 bp, Unknown
  Description of Unknown: LeftRegion for integrase B8891 sequence
agaagaaaccctccaggcggagaaagtcggcctcgaaaagcatttgtccagcaaacggcagatcattacgatgatggagcagggcgtgaaaacccggaaccgcatcattgccgctttgctggttttattgtttttatccataacctatgcgttgtaccttgataccaattgtattcaaatcggcttttggaggggatagcatgtgccaaaaaatagtggtcactctaccaaatattctacgcatccgtgtagcactgtac

SEQ ID NO: 21891 - DNA, 260 bp, Unknown; identical to SEQ ID NO: 21881
  Description of Unknown: LeftRegion for integrase B8892 sequence

SEQ ID NO: 21892 - DNA, 260 bp, Unknown; identical to SEQ ID NO: 21881
  Description of Unknown: LeftRegion for integrase B8893 sequence

SEQ ID NO: 21893 - DNA, 260 bp, Unknown; identical to SEQ ID NO: 21881
  Description of Unknown: LeftRegion for integrase B8894 sequence

SEQ ID NO: 21894 - DNA, 260 bp, Unknown; identical to SEQ ID NO: 21887
  Description of Unknown: LeftRegion for integrase B8895 sequence

SEQ ID NO: 21895 - DNA, 260 bp, Unknown; identical to SEQ ID NO: 21882
  Description of Unknown: LeftRegion for integrase B8896 sequence

SEQ ID NO: 21896 - DNA, 260 bp, Unknown; identical to SEQ ID NO: 21882
  Description of Unknown: LeftRegion for integrase B8897 sequence

SEQ ID NO: 21897 - DNA, 260 bp, Unknown; identical to SEQ ID NO: 21885
  Description of Unknown: LeftRegion for integrase B8898 sequence

SEQ ID NO: 21898 - DNA, 260 bp, Unknown
  Description of Unknown: LeftRegion for integrase B8899 sequence
aaaggacggattagaacaccgccttgagaacaaacggcagaccatcggcctgatggacacagaactgtgcaatctttggcactccgtgaagctatacaggtggatcatactcggtttgtcactattgatcatcgggctttttgcctggtgcgtttgggttgacatccattgtgccaactatggattttggaggggataacatgtgccaaaaaatagtggtcactctaccaaataatctacgcatccgtgtagcactgtac

SEQ ID NO: 21899 - DNA, 260 bp, Unknown; identical to SEQ ID NO: 21882
  Description of Unknown: LeftRegion for integrase B8900 sequence

SEQ ID NO: 21900 - DNA, 260 bp, Unknown
  Description of Unknown: LeftRegion for integrase B8901 sequence
gcttgtttttaggatggtttggagttcataaattctatgaagggaaaattttatttggaattttatatttattaacttttggtttatttggtgtcggagttgtaattgaccttatattaattatattgaagccaaatccatattatgtataaaaattatgcccctctattaatatgaggggttttttaagggagttaaaaatgaacatagcaatttatccaaggaaatcaaaaaaagatgataattcagaatcaatggaa

SEQ ID NO: 21901 - DNA, 260 bp, Unknown; identical to SEQ ID NO: 21885
  Description of Unknown: LeftRegion for integrase B8902 sequence

SEQ ID NO: 21902 - DNA, 260 bp, Unknown; identical to SEQ ID NO: 21900
  Description of Unknown: LeftRegion for integrase B8903 sequence

SEQ ID NO: 21903 - DNA, 260 bp, Unknown; identical to SEQ ID NO: 21900
  Description of Unknown: LeftRegion for integrase B8904 sequence

SEQ ID NO: 21904 - DNA, 260 bp, Unknown; identical to SEQ ID NO: 21900
  Description of Unknown: LeftRegion for integrase B8905 sequence

SEQ ID NO: 21905 - DNA, 260 bp, Unknown
  Description of Unknown: LeftRegion for integrase B8906 sequence
aaaggacggactagaacaccgccttgagaacaaacggcagaccatcggcctgatggacacagaactgtgcaatctttggcactccgtgaagctatacaggtggatcatactcggtttgtcactattgatcatcgggctttttgcctggtgcgtgtgggttgacatccattgtgccaactatggattttttgggggataacatgtgcaaaaaaatagtggttactctaccaaataatctacgcatccgtgtagcactgtac

SEQ ID NO: 21906 - DNA, 260 bp, Unknown
  Description of Unknown: LeftRegion for integrase B8907 sequence
aattgttggtgtccaatgctatataaaagatgatgatgtaaaagcaaaagtaatggaaatgtctaaagacgatactgtgacgctcaaagttcatattaaaaacgttggggaagttatggggtactccgcagatattatagaaatagaatagtatacagtccctctattaaatgagggactttttttaaagggagttaaaaatgaacatagcaatttatccaaggaaatcaaaaaaagatgataattcagaatcaatggaa

SEQ ID NO: 21907 - DNA, 260 bp, Unknown; identical to SEQ ID NO: 21881
  Description of Unknown: LeftRegion for integrase B8908 sequence

SEQ ID NO: 21908 - DNA, 260 bp, Unknown
  Description of Unknown: LeftRegion for integrase B8909 sequence
agaagaaaccctccaggcggagaaagtcggcctcgaaaagcatttgtccagcaaacggcagatcattacgatgatggagcagggcgtgaaaacccggaaccgcatcattgccgctttgctggttttattgtttttatccataacctatgcgttgtaccttgataccaattgtattcaaatcggcttttggaggggatagcatgtgccaaaaaatagtggtcactctaccaaataatctacgcatccgtgtagcactgtac

SEQ ID NO: 21909 - DNA, 260 bp, Unknown
  Description of Unknown: LeftRegion for integrase B8910 sequence
gcttgtttttaggatggtttggagttcataaattctatgaagggaaaattttatttggaattttatatttattaactttcggtttatttggtgttggagttgtaattgaccttatattaattatattgaagccaaatccatattatgtataaaaattatgcccctctattaatgtgaggggtttttttagggagttaaaaatgaacatagcaatttatccaaggaaatcgaaaaaagatgataattcagaatcaatggaa

SEQ ID NO: 21910 - DNA, 260 bp, Unknown
  Description of Unknown: LeftRegion for integrase B8911 sequence
aataacttgtatatggaatatgaaataacggtaagcatcaatggagtccaagtgagcatggaggagtatcggcggcacgattttagtcgctcgacatcaaacaagagtagaccaaaaaaggtagaaattaaggaggcagtatgatatactaagggggtcgaaagactcccttagtttttttttggttaaggaggaatattatggttactgcgctatacgcacgagtatctaccgatgcacaagctgaagaaggctacagc

SEQ ID NO: 21911 - DNA, 260 bp, Unknown
  Description of Unknown: LeftRegion for integrase B8912 sequence
tgcttgtttttaggatggtttggagttcataaattctatgaagggaaaattttatttggaattttatatttattaacttttggtttatttggtgtcggagttgtaattgaccttatattaattatattgaagccaaatccatattatgtataaaaattatgcccctctattaatatgaggggttttttagggagttaaaaatgaacatagcaatttatccaagaaaatcgaaaaaagatgataattcagaatcaatggaa

SEQ ID NO: 21912 - DNA, 260 bp, Unknown; identical to SEQ ID NO: 21885
  Description of Unknown: LeftRegion for integrase B8913 sequence

SEQ ID NO: 21913 - DNA, 260 bp, Unknown
  Description of Unknown: LeftRegion for integrase B8914 sequence
aattgttggtgtccaatgctatataaaagatgatgatgtaaaagcaaaggtaatggaaatgtccaaagacgatactataacgctaaaagttcatattaaaagcgttggagaagttattggatactcggcagatattatagaaatagaatagtatacagtccctctagcaaatgagggactttttttaaagggagttaaaaatgaacatagcaatttatccaagaaaatcaaaaaaagatgacaattcagaatcaatggaa

SEQ ID NO: 21914 - DNA, 260 bp, Unknown; identical to SEQ ID NO: 21881
  Description of Unknown: LeftRegion for integrase B8915 sequence

SEQ ID NO: 21915 - DNA, 260 bp, Unknown
  Description of Unknown: LeftRegion for integrase B8916 sequence
caattattggtgtccaatgctatataaaagatgatgatgtaaaagcaaaggtaatggaaatgtctatagacgatactataacgctcaaagttcatattaaaaacgttggggaagttatggggtactctgcagatattatagaaatagaataatataaagtccctcatttactagagggacttttttaaagggagttaaaaatgaacatagcaatttatccaagaaaatcaaaaaaagatgacaattcagaatcaatggaa

SEQ ID NO: 21916 - DNA, 260 bp, Unknown
  Description of Unknown: LeftRegion for integrase B8917 sequence
gcttgtttttaggatggtttggagttcataaattctatgaagggaaaattttatttggaattttatatttattaacttttggtttatttggtgtcggagttgtaattgaccttatattaattatattgaagccaaatccatattatgtataaaaattatgcccctctattaatatgaggggttttttaagggagttaaaaatgaacatagcaatttatccaagaaaatcaaaaaaagatgataattcagaatcaatggaa

SEQ ID NO: 21917 - DNA, 260 bp, Unknown; identical to SEQ ID NO: 21881
  Description of Unknown: LeftRegion for integrase B8918 sequence

SEQ ID NO: 21918 - DNA, 260 bp, Unknown; identical to SEQ ID NO: 21906
  Description of Unknown: LeftRegion for integrase B8919 sequence

SEQ ID NO: 21919 - DNA, 260 bp, Unknown
  Description of Unknown: LeftRegion for integrase B8920 sequence
ttgtttttaggatggtttggagttcataaattctatgaagggaaaattttatttggaattttatatttattaacttttggtttatttggtgtcggagttgtaattgaccttatattaattatattgaagccaaatccatattatgtataaaaattatgcccctctagcaaatgagggactttttttaaagggagttaaaaatgaacatagcaatttatccaaggaaatcaaaaaaagatgataattcagaatcaatggaa

SEQ ID NO: 21920 - DNA, 260 bp, Unknown
  Description of Unknown: LeftRegion for integrase B8921 sequence
ctgtactagatggtgatacattaacaattaatatgagcggacaagatataacatttaagagaaaataaaaaaaagccctgtgctggtaacacagagcaaataaacggtactggtaataccgtcttggtacaataaaatgacttggtcggtcatagcttttattgtacctacattttaacataaaaatggaggttataacaatgattaaacaaaaagtgcgattatatgcgcgtgtatcgacagaagagcaagccagaaag

SEQ ID NO: 21921 - DNA, 260 bp, Unknown
  Description of Unknown: LeftRegion for integrase B8922 sequence
aaaggacggactagaacaccgccttgagaacaaacggcagaccatcggcctgatggacacagaactgtgcaatctttggcactccgtgaagctatacaggtggatcatactcggtttgtcactattgatcatcgggctttttgcctggtgcgtttgggttgacatccattgtgccaactatggattttggaggggataacatgtgcccaaaaatagtggtcactctaccaaataatctacgcatccgtgtagcactgtac

SEQ ID NO: 21922 - DNA, 260 bp, Unknown
  Description of Unknown: LeftRegion for integrase B8923 sequence
agaagaaaccctccaggcggagaaagtcggcctcgaaaagcatttgtccagcaaacggcagatcattacgatgatggagcagggcgtgaaaacccggaaccgcatcattgccgctttgctggttttattgtttttctccatatcctatgcgttgtaccttgatttcaattgtatccaaatgggcttctggaggggatagcatgtgccaaaaaatagtggtcactctaccaaataatctacgcatccgtgtagcactgtac

SEQ ID NO: 21923 - DNA, 260 bp, Unknown
  Description of Unknown: LeftRegion for integrase B8924 sequence
cgaaaaaactctgcatgcggagaacgtcggccttgagaaacacttatccagcaaacggcaaatcattacgatgatggagaagggcgtaaaaacccggaaccgcatcattgccgcgttgctggttttattgtttttctccatatcctatgcgttgtaccttgatttcaattgtatccaaaccggattctggaggggatagcatgtgccaaaaaatagtggtcactttaccaaataatctacgcatccgtgtagcactgtac

SEQ ID NO: 21924 - DNA, 260 bp, Unknown
  Description of Unknown: LeftRegion for integrase B8925 sequence
agaagaaaccctccaggcggagaaagtcggcctcgaaaagcatttgtccagcaaacggcagatcattacgatgatggagcggggcgtgaaaacccggaaccgcatcattgccgctttgctggttttattgtttttatccataacctatgcgttgtaccttgataccaattgtattcaaatcggcttttggaggggatagcatgtgccaaaaaatagtggtcactctaccaaataatctacgcatccgtgtagcactgtac

SEQ ID NO: 21925 - DNA, 260 bp, Unknown
  Description of Unknown: LeftRegion for integrase B8926 sequence
aaaggacggactagaacaccgccttgagaacaaacggcagaccatcggcctgatggatacagaactgtgcaatctttggcactccgtgaagctatacaggtggatcatactcggtttgtcactattgatcatcgggctttttgcctggtgcgtttgggttgacatccattgtgctaactatggattttggaggggataacatgtgccaaaaaatagtggtcactctaccaaataatctacgcatccgtgtagcactgtac

SEQ ID NO: 21926 - DNA, 260 bp, Unknown
  Description of Unknown: LeftRegion for integrase B8927 sequence
aaaggacggactagaacaccgccttgagaataagcggcagaccatcggcctgatggacacaggactgtgcaatctttggcactccgtgaagctatacaggtggatcatactcggtttgtcactattgatcatcgggctttttgcctggtgcgtttgggttgacatccattgtgctaactatggattttggaggggataacatgtgccaaaaaatagtggtcactctaccaaataatctacgcatccgtgtagcactgtac

SEQ ID NO: 21927 - DNA, 260 bp, Unknown
  Description of Unknown: LeftRegion for integrase B8928 sequence
caattgttggtgttcaatgctatataaaagatgatgatgtaaaagcaaaggtaatggaaatgtctaaagacgatactgtgacgctcaaagttcatattaaaaacgttggggaagttatggggtactccgcagatattatagaaatagaatagtatacagtccctctagtaaatgagggactttttttaagggagttaaaaatgaacatagcaatttatccaagaaaatcaaaaaaagatgacaattcagaatcaatggaa

SEQ ID NO: 21928 - DNA, 260 bp, Unknown
  Description of Unknown: LeftRegion for integrase B8929 sequence
gtttgtttttaggatggtttggagttcataaattctatgaagggaaaattttatttggaattttatatttattaacttttggtttatttggtgtcggagttgtaattgaccttatattaattatattgaagccaaatccatattatgtataaaaattatgcccctctattaatatgaggggttttttaagggagttaaaaatgaacatagcaatttatccaaggaaatcaaaaaaagatgataattcagaatcaatggag

SEQ ID NO: 21929 - DNA, 260 bp, Unknown
  Description of Unknown: LeftRegion for integrase B8930 sequence
tgcttgtttttaggatggtttggaattcataaattctatgaagggaaaattttatttggaattttatatttattaacttttggtttatttggtgtcggagttgtaattgaccttatattaattatattgaagccaaatccatattatgtataaaaattatgcccctctattaatatgaggggttttttagggagttaaaaatgaatatagcaatttatccaaggaaatcaaaaaaagatgataattcagaatcaatggaa

SEQ ID NO: 21930 - DNA, 260 bp, Unknown
  Description of Unknown: LeftRegion for integrase B8931 sequence
tgtcaaagtatactctatggaggtttttttatgtcttctttcttttcaacatgtacacgaaccacaactccttctcgatttcccacaattctggccaataccgtaaatatcttttccgcctgttctatttccatggtatcaccccgtttactcaagcgtatgcttaaagcaggtggcacagaacgaaaggaggccattgtatgcaggtgattcgtggagcaggatatatccgtgtatccaccacggaacaggcaacgcgc

SEQ ID NO: 21931 - DNA, 260 bp, Unknown
  Description of Unknown: LeftRegion for integrase B8932 sequence
ttttatcaaattgaaatagataacaatggtaaattagtattatccaaggatcaaagcgacttctaacaaaaaaagccctgtgctggtaacacagagcaaataaacggtactggtaataccgtcttggtacaataaaatgacttggtcggtcatagcttttattgtacctacattttaacataaaaatggaggttataacaatgattaaacaaaaagtgcgattatatgcgcgtgtatcgacagaagagcaagccagaaag

SEQ ID NO: 21932 - DNA, 260 bp, Unknown; identical to SEQ ID NO: 21887
  Description of Unknown: LeftRegion for integrase B8933 sequence

SEQ ID NO: 21933 - DNA, 260 bp, Unknown
  Description of Unknown: LeftRegion for integrase B8934 sequence
aattcttggtgtccagtgcttcataaaagatgaagatgcaaaagcaaaagtaatggatatgtccataggagacactgtaactcttaaggtccatataaaggaagttggagaagttatggcatatgtcgcagacattatagaaatcgaatagtataaagtccctctgacaaatgagggactttttttaaagggagttaaaaatgaacatagcaatttatccaaggaaatcaaaaaaagatgataattcagaatcaatggaa

SEQ ID NO: 21934 - DNA, 260 bp, Unknown
  Description of Unknown: LeftRegion for integrase B8935 sequence
aattgttggtgtccaatgctatataaaagatgatgatgtaaaagcaaaggtaatggaaatgtccaaagacgatactataacgctaaaagttcatattaaaagcgttggagaagttattggatactcggcagatattatagaaatagaatagtatacagtccctctagcaaatgagggactttttttaaagggagttaaaaatgaacatagcaatttatccaaggaaatcaaaaaaagatgacaattcagaatcaatggaa

SEQ ID NO: 21935 - DNA, 260 bp, Unknown
  Description of Unknown: LeftRegion for integrase B8936 sequence
gttcttcaaagtgaggttggagatgccggaagctctgttgggactataaaaacatatcgctgggagggcactgacggaactttgtcttatgcaaccattttatttgatgattatattgtatatagtaaacatggttatggactagaataacaatacgccgtcaggaatcacctggcggcgtgatcttaggaggtggagctatgcaacgagctgcattatatataagggttagtacagaagaacaagcccggcatggcttg

SEQ ID NO: 21936 - DNA, 260 bp, Unknown
  Description of Unknown: LeftRegion for integrase B8937 sequence
gatgcactaaatgatatcaacgtggaaactctgatggagtgcaatcagaactatgatacattatcagaggaacaatacgatgctatctcagcgtatgtttatgcggcattgaaagagtacacgagtcagcagagcgaagaacacgaaatacacgaatagcttcggctactcgttttattttgaaagatggaggtgatgacgtgcgatgtgcactttatatcagagtatcttctgatgaacaaaagagaaaaggttattct

SEQ ID NO: 21937 - DNA, 260 bp, Unknown; identical to SEQ ID NO: 21906
  Description of Unknown: LeftRegion for integrase B8938 sequence

SEQ ID NO: 21938 - DNA, 260 bp, Unknown
  Description of Unknown: LeftRegion for integrase B8939 sequence
aataacttgtatatggaatatgaaataacagtaagcatcaatggagtccaagtgagcatggaggagtatcgacagcacgattttagccgctcgatatcgaataacagtaggtcaaaaacagtagaaattaaggaggcagtatgatatactaagggagtcgaaagactcccttagtttttttttggttaaggaggaacattatggttactgcgctatacgcacgagtatctaccgatgcacaagccgaagaaggctacagc

SEQ ID NO: 21939 - DNA, 260 bp, Unknown
  Description of Unknown: LeftRegion for integrase B8940 sequence
cattattggtgtccaatgctatataaaagatgatgatgtaaaagcaaaagtaatggaaatgtctatagacgatactataactctcaaagttcatattaaaagcgttggggaagttattggatactcggcagatattatagaaatagaataatatacagtccctctagtaaatgagggactttttttaaagggagttaaaaatgaacatagcaatttatccaaggaaatcaaaaaaagatgataattcagaatcaatggaa

SEQ ID NO: 21940 - DNA, 260 bp, Unknown; identical to SEQ ID NO: 21885
  Description of Unknown: LeftRegion for integrase B8941 sequence

SEQ ID NO: 21941 - DNA, 260 bp, Unknown; identical to SEQ ID NO: 21887
  Description of Unknown: LeftRegion for integrase B8942 sequence

SEQ ID NO: 21942 - DNA, 260 bp, Unknown; identical to SEQ ID NO: 21890
  Description of Unknown: LeftRegion for integrase B8943 sequence

SEQ ID NO: 21943 - DNA, 260 bp, Unknown
  Description of Unknown: LeftRegion for integrase B8944 sequence
aattgttggtgttcaatgctatataaaagatgatgatgtaaaagcaaaggtaatggaaatgtctaaagacgatactataacgctcaaagttcatattaagagcgttggggaagttatgggttactctgcagatattatagaaatagaatagtatatagtccctctagtaaatgagggactttttttaaagggagttaaaaatgaacatagcaatttatccaaggaaatcaaaaaaagatgataattcagaatcaatggaa

SEQ ID NO: 21944 - DNA, 260 bp, Unknown
  Description of Unknown: LeftRegion for integrase B8945 sequence
ttgctgtcacattccatttcaccggcgccgtcgcggcgccgcacatccgtcacgcggatctccacgccctcgcgcagagagataatccgtaccagagcttcatacactcttctgacggcagcctcgtccatgtgcgttccccctcgtcagcatatgcgcacggctgccggcaaagaaccgcagaaggggagggaagccgcatgaaggtcattcggggagctggctatgtgcgcgtgtctactgcggagcaggcgctgcgc

SEQ ID NO: 21945 - DNA, 260 bp, Unknown
  Description of Unknown: LeftRegion for integrase B8946 sequence
gtttgtttttaggatggtttggagttcataaattctatgaagggaaaattttatttggaattttatatttattaacttttggtttatttggtgtcggagttgtaattgaccttatattaattatattgaagccaaatccatattatgtataaaaattatgcccctctattaatatgaggggttttttaagggagttaaaaatgaacatagcaatttatccaaggaaatcaaaaaaagatgataattcagaatcaatggaa

SEQ ID NO: 21946 - DNA, 260 bp, Unknown
  Description of Unknown: LeftRegion for integrase B8947 sequence
agaagaaaccctccaggcggagaaagtcggcctcgaaaagcatttgtccagcaaacggcagatcattacgatgatggagcagggcgtgaaaacccggaaccgcatcattgccgctttgctggttttattgtttttatccataacctatgcgttgtaccttgataccaattgtattcaaatcggcttttggaggggatagcatgtgccaaaaaatagtgatcactctaccaaatattctacgcatccgtgtagcactgtac

SEQ ID NO: 21947 - DNA, 260 bp, Unknown; identical to SEQ ID NO: 21885
  Description of Unknown: LeftRegion for integrase B8948 sequence

SEQ ID NO: 21948 - DNA, 260 bp, Unknown
  Description of Unknown: LeftRegion for integrase B8949 sequence
gcttgtttttaggatggtttggagttcataaattctatgaagggaaaattttatttggaattttatatttattaacttttggtttatttggtgtcggagttgtaattgaccttatattaattatattgaagccaaatccatattatgtataaaaattatgcccctctattaatatgaggggtttttttagggagttaaaaatgaacatagcaatttatccaagaaaatcaaaaaaagatgataattcagaatcaatggaa

SEQ ID NO: 21949 - DNA, 260 bp, Unknown
  Description of Unknown: LeftRegion for integrase B8950 sequence
tggataatagcataacacctgtagatttataaatcaatcagcatattttcacaattctttccatttatattttgtattgacctatatctagtggtctttacttttataccacaattttactttttaaaataggtttccattttagtgaaaagccgccgtcaggaatcccctggcggcgtgatcttaggaggtgcgcatttgtgaaacgggctgcgttatatattcgagtcagtacagaagagcaggcccggcacggccta

SEQ ID NO: 21950 - DNA, 260 bp, Unknown
  Description of Unknown: LeftRegion for integrase B8951 sequence
aattgttggtgttcaatgctatataaaagatgatgatgtaaaagcaaaggtaatggaaatgtctaaagacgatactgtgacgctcaaagttcatattaaaaacgttggggaagttatggggtactccgcagatattatagaaatagaatagtatacagtccctctagtaaatgagggacttttttttaagggagttaaaaatgaacatagcaatttatccaagaaaatcaaaaaaagatgataattcagaatcaatggaa

SEQ ID NO: 21951 - DNA, 260 bp, Unknown; identical to SEQ ID NO: 21900
  Description of Unknown: LeftRegion for integrase B8952 sequence

SEQ ID NO: 21952 - DNA, 260 bp, Unknown
  Description of Unknown: LeftRegion for integrase B8953 sequence
aaaggacggtctagaacaccgccttgcaaataagcggaagaccatcggcctgatggaaacggagctaaacaacctccgccattccgtgaagctatacaggtggatcatacttggtttgtcgctatcgatcgtcggtcttttcgtctggtgcgtgtgggttgacatccattgtgccaactatggatttttgaggggataacatgtgccaaaaaatagtggtcactctaccaaataatctacgcatccgtgtagcactgtac

SEQ ID NO: 21953 - DNA, 260 bp, Unknown
  Description of Unknown: LeftRegion for integrase B8954 sequence
gcttgtttttaggatggttgggagttcataaattctatgaagggaaaattttatttggaattttatatttattaacttttggtttatttggtgttggagttgtaattgaccttatattaattatattgaagccaaatccatattatgtataaaaattatgcccctctattaatgtgaggggtttttttagggagttaaaaatgaacatagcaatttatccaaggaaatcaaaaaaagatgacaattcagaatcaatggaa

SEQ ID NO: 21954 - DNA, 260 bp, Unknown; identical to SEQ ID NO: 21881
  Description of Unknown: LeftRegion for integrase B8955 sequence

SEQ ID NO: 21955 - DNA, 260 bp, Unknown; identical to SEQ ID NO: 21885
  Description of Unknown: LeftRegion for integrase B8956 sequence

SEQ ID NO: 21956 - DNA, 260 bp, Unknown
  Description of Unknown: LeftRegion for integrase B8957 sequence
aaaggacggactagaacaccgccttgagaacaaacggcagaccatcggcctgatggacacagaactgtgcaatctttggcactccgtgaagctatacaggtggatcatactcggtttgtcactattgattatcgggctttttgtctggtgcgtttgggttgacatccattgtgccaactatggattttggaggggataacatgtgccaaaaaatagtggtcactctaccaaataatctacgcatccgtgtagcactgtac

SEQ ID NO: 21957 - DNA, 260 bp, Unknown; identical to SEQ ID NO: 21900
  Description of Unknown: LeftRegion for integrase B8958 sequence

SEQ ID NO: 21958 - DNA, 260 bp, Unknown; identical to SEQ ID NO: 21881
  Description of Unknown: LeftRegion for integrase B8959 sequence

SEQ ID NO: 21959 - DNA, 260 bp, Unknown; identical to SEQ ID NO: 21909
  Description of Unknown: LeftRegion for integrase B8960 sequence

SEQ ID NO: 21960 - DNA, 260 bp, Unknown; identical to SEQ ID NO: 21923
  Description of Unknown: LeftRegion for integrase B8961 sequence

SEQ ID NO: 21961 - DNA, 260 bp, Unknown
  Description of Unknown: LeftRegion for integrase B8962 sequence
aaaggacggtctagaacaccgccttgcgaataagcggaagaccatcggcctgatggaaacggagctaaacaacctccgccattccgtgaagctatacaggtggatcatacttggtttgtcgctatcgatcgtcggtctcttcgtctggtgcgtgtgggttgacatccattgtgccaactatggatttttgagggaataacatgtgccaaaaaatagtggtcactctaccaaataatctacgcatccgtgtagcgctgtac

SEQ ID NO: 21962 - DNA, 260 bp, Unknown
  Description of Unknown: LeftRegion for integrase B8963 sequence
tgcttgtttttaggatggtttggagttcataaattctatgaagggaaaattttatttggaattttatatttattaacttttggtttatttggtgtcggagttgtaattgaccttatattaattatattgaagccaaatccatattatgtataaaaattatgcccctctattaatatgaggggttttttagggagttaaaaatgaacatagcaatttatccaaggaaatcaaaaaaagatgataattcagaatcaatggaa

SEQ ID NO: 21963 - DNA, 260 bp, Unknown
  Description of Unknown: LeftRegion for integrase B8964 sequence
aaaggacggtctggaacaccgccttgagaataagcggaagaccatcggcctgatggacacagaactgtgcaatctttggcactccgtgaagctatacaggtggatcatactcggtttgtcactattgatcatcgggctttttgcctggtgcgtttgggttgacatccattgtgccaactatggattttggaggggataacatgtgccaaaaaatagtggtcactctaccaaataatctacgcatccgtgtagcactgtac

SEQ ID NO: 21964 - DNA, 260 bp, Unknown; identical to SEQ ID NO: 21882
  Description of Unknown: LeftRegion for integrase B8965 sequence

SEQ ID NO: 21965 - DNA, 260 bp, Unknown; identical to SEQ ID NO: 21900
  Description of Unknown: LeftRegion for integrase B8966 sequence

SEQ ID NO: 21966 - DNA, 260 bp, Unknown
  Description of Unknown: LeftRegion for integrase B8967 sequence
gatgcactaaatgatatcaacgtggaaactctgatggagtgcaatcagaactatgatacattatcagaggaacaatacgatgctatctcagcgtatgtttatgcggcattgaaagagtacacgagtcagcagagcgaagaacacgaaatacacgaatagcttcggctactcgttttattttgaaagatggaggtgatgacgtgcgatgtgcactttatatcagagtatcctctgatgaacaaaaaagaaacggtttctct

SEQ ID NO: 21967 - DNA, 260 bp, Unknown
  Description of Unknown: LeftRegion for integrase B8968 sequence
aatggatgattattcggacctagaggacgaccaaaaccgttccgaagaatatgagaaaacaagtgctccgtctgatactccggacgaatacgatatcttcacgctccttcttattggagttgcaatagccggaggctcatattatatgggtacaaagaagaataaataggaaacagaggtacaaacaaggtggtgatagtatgagatgtgcactttatatcagagtatcttctgatgaacaaaagagaaacggtttctct

SEQ ID NO: 21968 - DNA, 260 bp, Unknown
  Description of Unknown: LeftRegion for integrase B8969 sequence
tgcttgtttttaggatggtttggagttcataaattctatgaagggaaaattttatttggaattttatatttattaacttttggtttatttggtgtcggagttgtaattgaccttatattaattatattgaagccaaatccatattatgtataaaaattatgcccctctattaatatgaggggttttttagggagttaaaaatgaacatagcaatttatccaagaaaatcaaaaaaagatgacaattcagaatcaatggaa

SEQ ID NO: 21969 - DNA, 260 bp, Unknown
  Description of Unknown: LeftRegion for integrase B8970 sequence
tgtcaaagtatgctctatggaggtttttttatgtcttctttcttttcaacatgtacacgaaccacaactccttctcgattccccacaattctggctaataccgtaaatatcttttccgcctgttctatttccatggtatcaccccgtttactcaagcgtatgcttaaagcaggtggcacagaacgaaaggaggccattgtatgcaggtgattcgtggagcaggatatatccgtgtatccaccacggaacaggcaacgcgc

SEQ ID NO: 21970 - DNA, 260 bp, Unknown
  Description of Unknown: LeftRegion for integrase B8971 sequence
gcttgtttttaggatggtttggagttcataaattctatgaagggaaaattttatttggaattttatatttattaacttttggtttatttggtgtcggagttgtaattgaccttatattaattatattgaagccaaatccatattatgtataaaaattatgcccctctattaatatgaggggttttttaagggagttaaaaatgaacatagcaatttatccaaggaaatcaaaaaaaaatgataattcagaatcaatggaa

SEQ ID NO: 21971 - DNA, 260 bp, Unknown; identical to SEQ ID NO: 21909
  Description of Unknown: LeftRegion for integrase B8972 sequence

SEQ ID NO: 21972 - DNA, 260 bp, Unknown; identical to SEQ ID NO: 21916
  Description of Unknown: LeftRegion for integrase B8973 sequence

SEQ ID NO: 21973 - DNA, 260 bp, Unknown
  Description of Unknown: LeftRegion for integrase B8974 sequence
ggaagaaaccttacaagcggagaaagtcggccttgaaaagcatttatccagcaaacggcaaatcattacgatgatggagaagggtgtgaaaacccggaaccgcgtaattgccgcgttgctggttttattgtttttctccatatcctatgcgttgtacctcgattttaaatgtatccaattcggcttttggaggggatagcatgtgccaaaaaatagtggtcactctaccaaataatctacgcatccgtgtagcactgtac

SEQ ID NO: 21974 - DNA, 260 bp, Unknown; identical to SEQ ID NO: 21936
  Description of Unknown: LeftRegion for integrase B8975 sequence

SEQ ID NO: 21975 - DNA, 260 bp, Unknown; identical to SEQ ID NO: 21885
  Description of Unknown: LeftRegion for integrase B8976 sequence

SEQ ID NO: 21976 - DNA, 260 bp, Unknown; identical to SEQ ID NO: 21887
  Description of Unknown: LeftRegion for integrase B8977 sequence

SEQ ID NO: 21977 - DNA, 260 bp, Unknown; identical to SEQ ID NO: 21881
  Description of Unknown: LeftRegion for integrase B8978 sequence

SEQ ID NO: 21978 - DNA, 260 bp, Unknown; identical to SEQ ID NO: 21900
  Description of Unknown: LeftRegion for integrase B8979 sequence

SEQ ID NO: 21979 - DNA, 260 bp, Unknown; identical to SEQ ID NO: 21900
  Description of Unknown: LeftRegion for integrase B8980 sequence

SEQ ID NO: 21980 - DNA, 260 bp, Unknown; identical to SEQ ID NO: 21939
  Description of Unknown: LeftRegion for integrase B8981 sequence

SEQ ID NO: 21981 - DNA, 260 bp, Unknown
  Description of Unknown: LeftRegion for integrase B8982 sequence
aaaggacggtctggaacaccgccttgagaataagcggaagaccatcggcctgatggacacagaactgtgcaatcttcggcactccgtgacgctctacaggtggatcatactcggtttgtcgctattgatcgtcgggctttttgcctggtgcgtgtgggttgacattcattgtgccaactatggatttttgaggggataacatgtgccaaaaaatagtggttactctaccaaataatctacgcatccgtgtagcactgtac

SEQ ID NO: 21982 - DNA, 260 bp, Unknown; identical to SEQ ID NO: 21900
  Description of Unknown: LeftRegion for integrase B8983 sequence

SEQ ID NO: 21983 - DNA, 260 bp, Unknown
  Description of Unknown: LeftRegion for integrase B8984 sequence
cttgtttttaggatggtttggagttcataaattctatgaagggaaaattttatttggaattttatatttattaacttttggtttatttggtgtcggagttgtaattgaccttatattaattatattgaagccaaatccatattatgtataaaaattatgcccctctattaatatgagggggttttttaagggagttaaaaatgaacatagcaatttatccaaggaaatcaaaaaaagatgataattcagaatcaatggag

SEQ ID NO: 21984 - DNA, 260 bp, Unknown
  Description of Unknown: LeftRegion for integrase B8985 sequence
aattcttggtgtccagtgcttcataaaagatgaagatgcaaaatcaaaagtaatggatatgtccataggagacactgtaactcttaaggtccatataaaggaagttggagaagttatggcatacgtcgcagacattatagaaatcgaatagtatacagtccctctagtaaatgagggactttttttaaagggagttaaaaatgaacatagcaatttatccaagaaaatcaaaaaaagatgataattcagaatcaatggaa

SEQ ID NO: 21985 - DNA, 260 bp, Unknown; identical to SEQ ID NO: 21885
  Description of Unknown: LeftRegion for integrase B8986 sequence

SEQ ID NO: 21986 - DNA, 260 bp, Unknown
  Description of Unknown: LeftRegion for integrase B8987 sequence
aattgttggtgtccaatgctatataaaagatgatgatgtaaaagcaaaagtaatggaaatgtctaaagacgatactgtgacgctcaaagttcatattaaaaacgttggggaagttatggggtactccgcagatattatagaaatagaatagtatacagtccctctattaaatgagggactttttttaaagggagttaaaaatgaacatagcaatttatccaagaaaatcaaaaaaagatgataattcagaatcaatggaa

SEQ ID NO: 21987 - DNA, 260 bp, Unknown; identical to SEQ ID NO: 21906
  Description of Unknown: LeftRegion for integrase B8988 sequence

SEQ ID NO: 21988 - DNA, 260 bp, Unknown
  Description of Unknown: LeftRegion for integrase B8989 sequence
cattaggaactattacaattcattaattattattaaaagcatgttgaatcagcaaattatttcaaaagaagatgccataaaatctgagtcttttttagctaagaaatattgtatcaaacctgacagcatttatcgtctaaatgacttgataaatgacgataatagagtgatgtatagtagcgaaaggacgtgaataaataatgaaaatagtaacagaaattggtgcaattgctccaattaagaaactaaaaaaggtttgt

SEQ ID NO: 21989 - DNA, 260 bp, Unknown
  Description of Unknown: LeftRegion for integrase B8990 sequence
cattattggtgtccaatgctatataaaagatgatgatgtaaaagcaaaagtaatggaaatgtctaaagacgatactataacgctcaaagttcatattaaaaacgttggggaagttatggggtactccgcagatattatagaaatagaatagtatacagtccctctagtaaatgagggactttttttaaagggagttaaaaatgaacatagcaatttatccaaggaaatcaaaaaaagatgataattcagaatcaatggaa

SEQ ID NO: 21990 - DNA, 260 bp, Unknown
  Description of Unknown: LeftRegion for integrase B8991 sequence
gcttgtttttaggatggtttggagttcataaattctatgaagggaaaattttatttggaattttatatttattaacttttggtttattaggtgtcggagttgtaattgaccttatattaattatattgaagccaaatccatattatgtataaaaattatgcccctctattaatgtgaggggtttttttagggagttaaaaatgaacatagcaatttatccaagaaaatcaaaaaaagatgataattcagaatcaatggaa

SEQ ID NO: 21991 - DNA, 260 bp, Unknown; identical to SEQ ID NO: 21906
  Description of Unknown: LeftRegion for integrase B8992 sequence

SEQ ID NO: 21992 - DNA, 260 bp, Unknown
  Description of Unknown: LeftRegion for integrase B8993 sequence
aaaggacggactagaacatcgccttgagaacaaacggcagaccatcggcctgatggacacagaactgtgcaatctttggcactccgtgaagctatacaggtggatcatactcggtttgtcactattgatcatcgggctttttgcctggtgcgtttgggttgacatccattgtgccaactatggattttggaggggataacatgtgccaaaaaatagtggtcactctaccaaataatctacgcatccgtgtagcactgtac

SEQ ID NO: 21993 - DNA, 260 bp, Unknown; identical to SEQ ID NO: 21881
  Description of Unknown: LeftRegion for integrase B8994 sequence

SEQ ID NO: 21994 - DNA, 260 bp, Unknown
  Description of Unknown: LeftRegion for integrase B8995 sequence
gcttgtttttaggatggtttggagttcataaattctatgaagggaaaattttatttggaattttatatttattaacttttggtttatttggtgtcggagttgtaattgaccttatattaattatattgaagccaaatccatattatgtataaaaattatgcccctctattaatatgaggggttttttaagggagttaaaaatgaacatagcaatttatccaaggaaatcaaaaaaagatgacaattcagaatcaatggaa

SEQ ID NO: 21995 - DNA, 260 bp, Unknown
  Description of Unknown: LeftRegion for integrase B8996 sequence
aaaggacggactagaacaccgccttgagaacaaacggcagaccatcggcctgatggacacagaactgtgcaatctttggcactccgtgaagctatacaggtggatcatactcggtttgtcactattgatcatcgggctttttgcctggtgcgtttgggttgacatccattgtgctaactatggattttggaggggataacatgtgccaaaaaatagtggtcactctaccaaataatctacgcattcgtgtagcgctgtac

SEQ ID NO: 21996 - DNA, 260 bp, Unknown
  Description of Unknown: LeftRegion for integrase B8997 sequence
aggggaagattatttgcagatgctattagacgcagaaaaaagaggctgaaaacagcctccctctccataatttaatagttaataaaataatttctactcacacgcatattatatatgcggacaactatattatagcaaaatattatcacaaagtcaagtaaatacccgccccggaggtacgaaggcaggaagggaaataaatgaaaagagccgctttatacgtgcgagtaagcacgcaagagcagaagaacagtggattg

SEQ ID NO: 21997 - DNA, 260 bp, Unknown
  Description of Unknown: LeftRegion for integrase B8998 sequence
catttgtattgctccgattattgcagaaaaggagaaaaaaagatacagctgtgcatagcagatattaagcgtgggaaaagcagagatttgcaaaaatatatagatgatcgcaatcagtacagagaaaaggttgcacaggagaaagctagtgaaaattagcaacacccgccccggaggtacgaaggcaggaagggaaataaatgaaaagagccgctttgtacgtgcgagtaagcacgcaagagcagaagaacagtggattg

SEQ ID NO: 21998 - DNA, 260 bp, Unknown
  Description of Unknown: LeftRegion for integrase B8999 sequence
aaactatggaattaaaaagatacgaaaacatagcattggttaacgaatttgaaaatgcttgttttcgcttggttaactttccggacagtgaagaaataaccgagaaatacgaaaagcttagaaaaaagctaatagacaggcttagttgtatgtagatagcagcacccgccccggaggtacgaaggcaggaagaggaataaatgaaaagagccgctttatatgtgcgagtaagcacgcaagagcagaagaacagtggattg

SEQ ID NO: 21999 - DNA, 260 bp, Unknown
  Description of Unknown: LeftRegion for integrase B9000 sequence
aaactatggaattaaaaagatacgaaaacatagcattagttaatgaatttgaaaacgcttgttttcgcttggttaactttccggacagtgaagaaataaccgagaaatacgaaaagcttagaaaaaagctaatagataggcttagttgtatgtagatagcagcacccgccccggaggtacgaaggcaggaagggaaataaatgaaaagagccgctttgtacgtgcgagtaagcacgcaagagcagaagaacagtggattg

SEQ ID NO: 22000 - DNA, 260 bp, Unknown
  Description of Unknown: LeftRegion for integrase B9001 sequence
tgcacctattttggacagcgaggtgttttctttatgtctttttttaccttttccacagtgatttttacaggcgttccccgccctgaaatgatacgcgccagctctgcatatatctttactgcatccattgccgcgccccctttctgttgcattcatacgcgggcggcggcagcggtatgcggaaggaggcatgctgcagcatgaatgtaattcgcggcgttggctatatccgtgtttctaccgccgagcaggccacacgc

SEQ ID NO: 22001 - DNA, 260 bp, Unknown
  Description of Unknown: LeftRegion for integrase B9002 sequence
catttgtattgctccgattattgcagaaaaggagaaaaaaagatacagctgtgcatagcagatattaagcgtgggaaaagcagagatctgcaaaaatatatagatgatcgcaatcagtacagagaaaaggttgcacaggagaaagctagtgaaaattagcagcacccgccccggaggtacgaaggcaggaagggaaataaatgaaaagagccgctttgtacgtgcgagtaagcacgcaagagcagaagaacagtggattg

SEQ ID NO: 22002 - DNA, 260 bp, Unknown
  Description of Unknown: LeftRegion for integrase B9003 sequence
aatataaaaaataatacattttcgtgtatttttctcttgacataatagacattatcgtgtacaataagattaaatcaagagaggagatacaaagaaataaccgagaaatacgaaagtctcagaaaaaagctaatagatagacttagcagctataattagcagcacccgccccggaggtacgaaggcaggaagggaaataaatgaaaagagccgctttatacgtgcgagtaagcacgcaagagcagaagaacagcggtctg

SEQ ID NO: 22003 - DNA, 260 bp, Unknown
  Description of Unknown: LeftRegion for integrase B9004 sequence
aagctatagaattaaaaagatacgaaaacatagcattggttaacgaatttgaaaatgcttgttttcgcttggttaactttccggatagtgaagaaataaccgagaaatacgaaaagcttagaaaaaagctaatagacaggcttagttgtatgtagatagcagcacccgccccggaggtacgaaggcaggaagggaaataaatgaaaagagccgctttatacgtgcgagtaagcacgcaagagcagaagaacagtggattg

SEQ ID NO: 22004 - DNA, 260 bp, Unknown
  Description of Unknown: LeftRegion for integrase B9005 sequence
cagaactgaaacagctctgaacatgtaagcataagcatcaccccctctttcggagggggcaagaagtcccctccgggatggaggggccaaccgcctaccgttgcaggtagcgccgaattgaggatagcatattgtggcgggaaatgcaaggggaagcccagcctagcactcgatgttaagcagagggtgggaaagctatattgttcgctgtcagggggaaaggggcaggagttatgactcgcgcagctttatatatccgc

SEQ ID NO: 22005 - DNA, 260 bp, Unknown
  Description of Unknown: LeftRegion for integrase B9006 sequence
aaatcaatttaagacattggtagacgtcgattttgataattaccgtaaacgcaacgaaaatcgttccgtcagaaagaactgcactatcccatcttggttgaatgacgaagcagaaaaagctggaatcaatttttcggccactttgcaggaagcattaaaggcccaattaggattataggaaaaagggaggaaaaacatccatgaaacgcgtagcattatacatgcgcgtgtccaccgaagaacaagcgctccacggctac

SEQ ID NO: 22006 - DNA, 260 bp, Unknown
  Description of Unknown: LeftRegion for integrase B9007 sequence
aaactatggaattaaaaagatacgaaaacatagcattggttaacgaatttgaaattgcttgttttcgcttggttaactttccggacagtgaagaaataaccgagaaatacgaaaagcttagaaaaaagctaatagacaggcttagttgtatgtagatagcagcacccgccccggaggtacgaaggcaggaagggaaataaatgaaaagagccgctttgtacgtgcgagtaagcacgcaagagcagaagaacagtggattg

SEQ ID NO: 22007 - DNA, 260 bp, Unknown
  Description of Unknown: LeftRegion for integrase B9008 sequence
aaactatggaattaaaaagatacgaaaacatagcattggttaacgaatttgaaaatgcttgttttcgcttggttaactttccggacagtgaagaaataaccgagaaatacgaaaagcttagaaaaaagctaatagacagacttagttgtatgtagatagcagcacccgccccggaggtacgaaggcaggaagggaaataaatgaaaagagccgctttgtacgtgcgagtaagcacgcaagagcagaagaacagtggattg

SEQ ID NO: 22008 - DNA, 260 bp, Unknown; identical to SEQ ID NO: 22003
  Description of Unknown: LeftRegion for integrase B9009 sequence

SEQ ID NO: 22009 - DNA, 260 bp, Unknown
  Description of Unknown: LeftRegion for integrase B9010 sequence
atataaaaaataatatactttcgtatatttttatcttggtaaaatagtcattatcgtatataatccaatcaaaccaaaagaggatatacaaagaaataaccgagaaatacgaaagtcttagaaaaaaagctaatggatagacttagcagctataattagcaacacccgccccggaggtacgaaggcaggaagggaaagaaatgaaaagagccgctttatacgtgcgagtaagcacgcaggagcagaagaacagtggattg

SEQ ID NO: 22010 - DNA, 260 bp, Unknown
  Description of Unknown: LeftRegion for integrase B9011 sequence
gaactgaaacagctctgaatatgtaagcataagcatcaccccctctttcggagggggcaagaagtcccctccgggatggaggggccaaccgcctaccgttgcaggtagcgccgaattgaggatagcatattgtggcgggaaatgcaaggggaagccccgcctagcacttacgatgttaggcagagggtgggaaagctatattgttcgctgtcagggggaaaggggcagaggttatgactcgcgcagctttatatatccgc

SEQ ID NO: 22011 - DNA, 260 bp, Unknown
  Description of Unknown: LeftRegion for integrase B9012 sequence
aaaagatgggctggaacaccgccttgaaaataagcggaagaccatcggcctgatggaggcggaactgaataacctacgtcattccgtaaaactatacaggtggatcatgctcggtttgtcgctattgatcgtcggtctcttcgtctggtgcgtgtgggtagatattcactgcgccaattacggattttggaggggatagtatgagagccgcactatatatccgcgtctcgacggaagaacaggcgcggcacggcctatct

SEQ ID NO: 22012 - DNA, 260 bp, Unknown
  Description of Unknown: LeftRegion for integrase B9013 sequence
atataaaaaataatatactttcgtatatttttatcttggtaaaatagtcattatcgtatttaatccaattaaaccaaaagaggatgtgcgaagaaataaccgagaaatacgaaagtcttagaaaaaaagctaatagatagacttagcagctataattagcagcacccgccccggaggtacgaaggcaggaagggaaataaatgaaaagagccgctttgtacgtgcgagtaagcacgcaagagcagaagaacagtggattg

SEQ ID NO: 22013 - DNA, 260 bp, Unknown; identical to SEQ ID NO: 22003
  Description of Unknown: LeftRegion for integrase B9014 sequence

SEQ ID NO: 22014 - DNA, 260 bp, Unknown
  Description of Unknown: LeftRegion for integrase B9015 sequence
aatataaaaaataatatactttcgtatatttttatcttggtaaaatagtcattatcgtatttaatccaattaaaccaaaagaggatgtgcaaagaaataaccgagaaatacgaaagtcttagaaaaaaactaatagatagacttagcagctataattagcagcacccgccccggaggtacgaaggcaggaagaggaataaatgaaaagagccgctttatatgtgcgagtaagcacgcaagagcagaagaacagtggattg

SEQ ID NO: 22015 - DNA, 260 bp, Unknown
  Description of Unknown: LeftRegion for integrase B9016 sequence
aagttgcgacacgataggaacgtgaacatagatacaattatgtatttgtgtgagaaattagactgccaggtatgcgatattgtggaatataaaaaataatacattttcgtgtattttcatcttggcataatagacattatcgtgtataattgaattaaatcaagaaaggagatacaaaaaaatgagggggttgagaaataatgaaaagagccgctttatatgtgcgagtaagcacgcaggagcaaaaaaacagcggtctg

SEQ ID NO: 22016 - DNA, 260 bp, Unknown
  Description of Unknown: LeftRegion for integrase B9017 sequence
ttggttattatagtaataaaaaagacgccattgctgcaagaaaagaggcggaagaaaaaatgcatggtccatttttggaatggtacgcagaacattatcccaaacaatgggaaaccaagaagaaaaaagctaatagatagacttagcagctataattggcagcacccgccccggaggtacgaaggcaggaaggggaataaatgaaaagagccgctttgtacgtgcgagtaagcacgcaagagcagaagaacagtggattg

SEQ ID NO: 22017 - DNA, 260 bp, Unknown
  Description of Unknown: LeftRegion for integrase B9018 sequence
aaaactatagaattaaaaagatacgaaaacatagcattggttaacgaatttgaaaatgcttgttttcgcttggttaactttccggatagtgaagaaataaccgagaaatacgaaactctcagaaaaaagctaatagataggcttagcagctataattagcagcacccgccccggaggtacgaaggcaggaagggaaagaaatgaaaagagccgctttatacgtgcgagtaagcacgcaagagcagaagaacagcggattg

SEQ ID NO: 22018 - DNA, 260 bp, Unknown
  Description of Unknown: LeftRegion for integrase B9019 sequence
atataaaaaataatatactttcgtatatttttatcttggtaaaatagtcattatcgtatttaatccaattaaaccaaaagaggatgtgcgaagaaataaccgagaaatacgaaaatcttagaaaaaaagctaatagatagacttagcagctataattagcagcacccgccccggaggtacgaaggcaggaaaggaaataaatgaaaagagccgctttatacgtgcgagtaagcacgcaagagcagaagaacagtggattg

SEQ ID NO: 22019 - DNA, 260 bp, Unknown
  Description of Unknown: LeftRegion for integrase B9020 sequence
agtataaaaaataatatattttcgtgtatttttacctcgacataatagtcattatcgtgtataatgtgagtaaatcaagagaggagatacaaagaaataaccgagaaatacgaaagtctcagaaaaaagctaatagatagacttagcagctataattagcagcacccgccccggaggtacgaaggaaggaagggaaataaatgaaaagagccgctttatacgtgcgagtaagcacgcaagagcagaagaacagcggattg

SEQ ID NO: 22020 - DNA, 260 bp, Unknown; identical to SEQ ID NO: 22003
  Description of Unknown: LeftRegion for integrase B9021 sequence

SEQ ID NO: 22021 - DNA, 260 bp, Unknown
  Description of Unknown: LeftRegion for integrase B9022 sequence
aaactatagaattaaaaagatacgaaaacatagcattggttaacgaatttgaaaatgcttgttttcgcttggttaactttccagacagtgaagaaataaccgagaaatacgaaaaactcagaaaaaagctaatagacaggcttagttgtatgtagatagtagcacccgccccggaggtacgaaggcaggaaaggaaataaatgaaaagagccgctttatacgtgcgagtaagcacgcaagagcagaagaacagtggtctg

SEQ ID NO: 22022 - DNA, 260 bp, Unknown; identical to SEQ ID NO: 21999
  Description of Unknown: LeftRegion for integrase B9023 sequence

SEQ ID NO: 22023 - DNA, 260 bp, Unknown
  Description of Unknown: LeftRegion for integrase B9024 sequence
ttggttattatagcaataaaaaagacgccattgctgcaagaaaagaggcggaagaaaaattgcatggtccgtttttggaatggtacgcagaaaattatcccaaacaatgggaagctaagaagaaaaaagctaatagatagacttagcagctataattagcagcacccgcctcggaggtacgaaggcaggaaggggaataaatgaaaagagccgctttatacgtgcgagtaagcacgcaagagcagaaaaacagcggtctg

SEQ ID NO: 22024 - DNA, 260 bp, Unknown; identical to SEQ ID NO: 22004
  Description of Unknown: LeftRegion for integrase B9025 sequence

SEQ ID NO: 22025 - DNA, 260 bp, Unknown
  Description of Unknown: LeftRegion for integrase B9026 sequence
aaactatggaattaaaaagatacgaaaacatagcattggttaacgaatttgaaaatgcttgttttcgcttggttaactttccggacagtgaagaaataaccgagaaatacgaaaagcttagaaaaaagctaatagacaggcttagttgtatgtagatagcagcacccgccccggaggtacgaaggcaggaagggaaataaatgaaaagagccgctttgtacgtgcgagtaagcacgcaagagcagaagaacagtggattg

SEQ ID NO: 22026 - DNA, 260 bp, Unknown
  Description of Unknown: LeftRegion for integrase B9027 sequence
atataaaaaataatatactttcgtatatttttatcttggtaaaatagtcattatcgtatttaatccaattaaatcaaaagaggatgtacaaagaaataaccgagaaatacgaaagtcttagaaaaaaagctaatagatagacttagcagctataattagcagcacccgccccggaggtacgaaggcaggaagggaaataaatgaaaagagccgctttgtacgtgcgagtaagcacgcaagagcagaagaacagtggattg

SEQ ID NO: 22027 - DNA, 260 bp, Unknown
  Description of Unknown: LeftRegion for integrase B9028 sequence
aaactatagaattaaaaagatacgaaaacatagcattggttaacgaatttgaaaatgcttgttttcgcttggttaactttccggatagtgaagaaataaccgagaaatacgaaaatctcagaaaaaagctaatagacaggcttagttgtatgtagatagcagcacccgccccggaggtacgaaggcaggaaggtaaataaatgaaaagagccgctttatacgtgcgagtaagcacgcaagagcagaagaacagcggattg

SEQ ID NO: 22028 - DNA, 260 bp, Unknown; identical to SEQ ID NO: 22003
  Description of Unknown: LeftRegion for integrase B9029 sequence

SEQ ID NO: 22029 - DNA, 260 bp, Unknown
  Description of Unknown: LeftRegion for integrase B9030 sequence
tcttgcacctattttggacagcgaggtgttttctttatgtctttttttaccttttccacagtgatttttacaggcattccccgccctgaaatgatacgcgccagctctgcatatatctttactgcatccattgccgcgccccctttctgttgcattcatacgcgggcggcggcagcggtatgcggaaggaggcgcgcagcatgaatgtaattcgcggcgtgggctatatccgcgtttctaccgccgagcaggccacacgc

SEQ ID NO: 22030 - DNA, 260 bp, Unknown
  Description of Unknown: LeftRegion for integrase B9031 sequence
aaactatagaattaaaaagatacgaaaacatagcattggttaacgaatttgaaaatgcttgttttcgcttggttaactttccggacagtgaagaaataaccgagaaatacgaaaagcttagaaaaaagctaatagacaggcttagttgtatgtagatagcagtgcccgccccggaggtacgaaggcaggaagggaaataaatgaaaagagccgctttgtacgtgcgagtaagcacacaagagcagaagaacagtggattg

SEQ ID NO: 22031 - DNA, 260 bp, Unknown
  Description of Unknown: LeftRegion for integrase B9032 sequence
aaactatagaattaaaaagatacgaaaacatagcattagttaacgaatttgaaaatgcttgttttcgcttggttaactttccggacagtgaagaaataaccgagaaatacgaaaatctcagaaaaaagctaatagacaggcttagttgtatgtagatagcagcacccgccccggaggtacgaaggcaggaagggaaataaatgaaaagagccgctttatacgtgcgagtaagcacgcaagagcagaagaacagtggattg

SEQ ID NO: 22032 - DNA, 260 bp, Unknown
  Description of Unknown: LeftRegion for integrase B9033 sequence
aaactatagaattaaaaagatacgaaaacatagcattagttaatgaatttgaaaacgcttgtttttgcttggttaactttccgaatagtgaagaaataaccgagaaatacgaaagtctcaggaaaaagctaatagacaggcttagcggtatgtaggcagcagcacccgccccggaggtacgaaggcaggaagggaaataaatgaaaagagccgctttatatgtgcgagtaagcacgcaagagcagaagaacagtggattg

SEQ ID NO: 22033 - DNA, 260 bp, Unknown
  Description of Unknown: LeftRegion for integrase B9034 sequence
aaactatggaattaaaaagatacgaaaacatagcattggttaacgaatttgaaaatgcttgttttcgcttggttaactttccggacagtgaagaaataaccgagaaatacgaaaagcttagaaaaaagctaatagacaggcttagttgtatgtagatagcagcacccgccccggaggtacgaaggcaggaagggaaataaatgaaaagagccgctttatatgtgcgagtaagcacgcaagagcagaagaacagtggattg

SEQ ID NO: 22034 - DNA, 260 bp, Unknown
  Description of Unknown: LeftRegion for integrase B9035 sequence
agaaagtatggaaaatatgccaaattagaaacagaaaaaagagcctgaaaacagactccctttccgttaacttaatagttaataaaatagtttctactcacacgcatatacaatatgcggacaactatattatagcaaaatattatcacaaagtcaaataaatacccgccccggaggtacgaaggaaggaagggaaataaatgaaaagagccgctttatacgtgcgagtaagcacgcaagagcagaaaaacagcggattg

SEQ ID NO: 22035 - DNA, 260 bp, Unknown; identical to SEQ ID NO: 22034
  Description of Unknown: LeftRegion for integrase B9036 sequence

SEQ ID NO: 22036 - DNA, 260 bp, Unknown
  Description of Unknown: LeftRegion for integrase B9037 sequence
acagggtaacaagatcaaaggtttgcagtagactggatatcttttttataagctcctttctatccatattatgcgcctccttaaaaaaaagatgtttccatgctaacacaaagggaaaagcgatataatactttttttaacactttttacatgactaatcatgtaaacgtggcacagtaagaaaggatacagaaaaggaaatggaaggaaagaaaagggcggctatatatgtgcgtgtatcaaccgcagaacaaaaggaa

SEQ ID NO: 22037 - DNA, 260 bp, Unknown
  Description of Unknown: LeftRegion for integrase B9038 sequence
atttgtattgctccgattattgcagaaaaggagaaaaaaagatacagctgtgcatagcagatattaagcgtgggaaaagcagagatctgcaaaaatatatagatgatcgcaatcagtacagagaaaaggttgcacaggagaaagctagtgaaaattagcagcacccgccccggaggttacgacggcaggaagggaaataaatgaaaagagccgctttgtacgtgcgagtaagcacgcaagagcagaagaacagtggattg

SEQ ID NO: 22038 - DNA, 260 bp, Unknown; identical to SEQ ID NO: 22019
  Description of Unknown: LeftRegion for integrase B9039 sequence

SEQ ID NO: 22039 - DNA, 260 bp, Unknown
  Description of Unknown: LeftRegion for integrase B9040 sequence
tggttattatagtgataaaaaagatgctgttgctgcaagaaaggaggcggaagaaaaattgcatggtccgtttttggaatggtacgcagaacattatcccaaacaatgggaaactaagaagaaaaaagctaatggacagacttagtggtatgtagatagcagcacccgcctcggaggtacgaaggcaggaagggaaataaatgaaaagagccgctttatacgtgcgagtaagcacgcaagagcagaagaacagtggattg

SEQ ID NO: 22040 - DNA, 260 bp, Unknown; identical to SEQ ID NO: 22019
  Description of Unknown: LeftRegion for integrase B9041 sequence

SEQ ID NO: 22041 - DNA, 260 bp, Unknown
  Description of Unknown: LeftRegion for integrase B9042 sequence
ttggttattatagcaataaaaaagacgccattgctgcaagaaaagaggcggaagaaaaattgcatggtccatttttggaatggtacgcagaacattatcccaagcaatgggaaactaagaagaaaaaagctaatagataggcttagcagctataattagcagcacccgccccggaggtacgaaggcaggaaaggaaataaatgaaaaaagcagctttgtacgtgcgagtaagcacgcaagagcagaagaacagtggattg

SEQ ID NO: 22042 - DNA, 260 bp, Unknown
  Description of Unknown: LeftRegion for integrase B9043 sequence
aaactatagaattaaaaagatacgaaaacatagcattagttaatgaatttgaaaacgcttgttttcgcttggttaactttccggacagtgaagaaataaccgagaaatacgaaaagcttagaaaaaagctaatagacaggcttagttgtatgtagatagcagcacccgccccggaggtacgaaggcaggaagggaaataaatgaaaagagccgctttatacgtgcgagtaagcacgcaagagcagaagaacagtggattg

SEQ ID NO: 22043 - DNA, 260 bp, Unknown
  Description of Unknown: LeftRegion for integrase B9044 sequence
aatataaaaaataatacattttcgcgtatttttttcttgacacgatagtcattatcgtgtttaatcaaattaaaccaagagatgagatacaaagaaatgaaaaagcatggaaaactaagaagaaaaaagctaatagataggcttagcagctataattagcagcacccgccccggaggtacgaaggcaggaaaggaaataaatgaaaagagccgctttatacgtgcgagtaagcacgcaagagcagaagaacagtggattg

SEQ ID NO: 22044 - DNA, 260 bp, Unknown; identical to SEQ ID NO: 22017
  Description of Unknown: LeftRegion for integrase B9045 sequence

SEQ ID NO: 22045 - DNA, 260 bp, Unknown; identical to SEQ ID NO: 22014
  Description of Unknown: LeftRegion for integrase B9046 sequence

SEQ ID NO: 22046 - DNA, 260 bp, Unknown
  Description of Unknown: LeftRegion for integrase B9047 sequence
aaaatatggaattaaaaagatatgaaaacatagcattggttaacgaatttgaaaacgcttgttttcgcttggttaactttccggacagtgaagaaataaccgagaaatacgaaaatctcagaaaaaagctaatagacaggcttagttgtatgtagatagcagcacccgccccggaggtacgaaggcaggaagaggaataaatgaaaagagccgctttatatgtgcgagtaagcacgcaagagcagaagaacagtggattg

SEQ ID NO: 22047 - DNA, 260 bp, Unknown
  Description of Unknown: LeftRegion for integrase B9048 sequence
atataaaaaataatatactttcgtatatttttatcttggtaaaatagtcattatcgtatttaatccaattaaaccaaaagaggatgtgcgaagaaataaccgagaaatacgaaaatcttagaaaaaaagctaatagatagacttagcagctataattagcagcacccgccccggaggtacgaaggcaggaaaggaaataaatgaaaagagccgctttatacgtgcgagtaagcacgcaagagcagaagaacagcggattg

SEQ ID NO: 22048 - DNA, 260 bp, Unknown
  Description of Unknown: LeftRegion for integrase B9049 sequence
aaactatagaattaaaaagatacgaaaacatagcattagttaatgaatttgaaaacgcttgttttcgcttggttaactttccggacagtgaagaaataaccgagaaatacgaaaagcttagaaaaaagctaatagacaggcttagttgtatgtagatagcagcacccgccccggaggtacgaaggcaggaagaggaataaatgaaaagagccgctttgtacgtgcgagtaagcacgcaagagcagaagaacagtggattg

SEQ ID NO: 22049 - DNA, 260 bp, Unknown
  Description of Unknown: LeftRegion for integrase B9050 sequence
gaatataaaaaatgatacattttcgtgtatttttctcttgacataatagtcattatcgtgtataatgtgagtaaatcaagagaggagatacaaagaaataaccgagaaatacgaaagtctcagaaaaagctaatagatagacttagcagctataattagcagcacccgccccggaggtacgaaggaaggaagggaaataaatgaaaagagccgctttatacgtgcgagtaagcacgcaagagcagaagaacagcggattg

SEQ ID NO: 22050 - DNA, 260 bp, Unknown
  Description of Unknown: LeftRegion for integrase B9051 sequence
tggttattatagtgataaaaaagacgccattgctgcaagaaaagaggcggaagaaaaattacacggtccgtttttggaatggtacgcagaacattatcccaaacaatgggaagctaagaagaaaaaagctaatggacagacttagtggtatgtagatagcagcacccgccccggaggtacgaaggcaggaaaggaaataaatgaaaagagccgctttatacgtgcgagtaagcacgcaagagcagaagaacagtggattg

SEQ ID NO: 22051 - DNA, 260 bp, Unknown
  Description of Unknown: LeftRegion for integrase B9052 sequence
gaaatcaatttaagacattggtagacgtcgattttgacaattaccgtaaacgcaacgaaaatcgttccgtcagaaagaactgcactatcccatcttggctgaatgacgaagcagaaaaagctggaatcaatttttcggccactttacaggaagcattaaaggctcaattaggaatgtaggaaaaagggaggaaaacgtccatgaaacgcgtagcattgtacatgcgcgtgtccaccgaagaacaggcgctccatggctac

SEQ ID NO: 22052 - DNA, 260 bp, Unknown
  Description of Unknown: LeftRegion for integrase B9053 sequence
aaactatagaattaaaaagatgcgaaaacatagcactggttaacgaatttgaaaatgcttgttttcgcttggttaactttccggacagtgaagaaataaccgagaaatacgaaaagcttagaaaaaagctaatagacaggcttagttgtatgtagatagcagcacccgccccggaggtacgaaggcaggaagggaaataaatgaaaagagccgctttatacgtgcgagtaagcacgcaagagcagaagaacagcggattg

SEQ ID NO: 22053 - DNA, 260 bp, Unknown; identical to SEQ ID NO: 22023
  Description of Unknown: LeftRegion for integrase B9054 sequence

SEQ ID NO: 22054 - DNA, 260 bp, Unknown
  Description of Unknown: LeftRegion for integrase B9055 sequence
catttgtattgctccgattattgcagaaaaggagaaaaaaagatacagctgtgcatagcagatattaagcgtgggaaaagcagagatctgcaaaaatatatagatgatcgcaatcagtacagagaaaaggttgcacaggagaaagctagtgaaaattagcagcacccgccccggaggtacgaaggcaggaagggaaataaatgaaaagatgtgctttgtacgtgcgtgtgagcacgcaagagcagaagaacagtggattg

SEQ ID NO: 22055 - DNA, 260 bp, Unknown; identical to SEQ ID NO: 22003
  Description of Unknown: LeftRegion for integrase B9056 sequence

SEQ ID NO: 22056 - DNA, 260 bp, Unknown
  Description of Unknown: LeftRegion for integrase B9057 sequence
aagttgcgacacgataggaacgtgaacatagatacaattatgtatttgtgtgagaaattagactgccaggtatgcgatattgtggaatataaaaaataatacattttcgtgtattttcatcttggcacaatagacattatcgtgtataattgaattaaatcaagaaaggagatacaaaaaaatgagggggttgagaaataatgaaaagagccgctttatatgtgcgagtaagcacgcaggagcaaaaaaacagcggtctg

SEQ ID NO: 22057 - DNA, 260 bp, Unknown
  Description of Unknown: LeftRegion for integrase B9058 sequence
agaaagtatggaaaatatgccaaattagaaacagaaaaaagagcctgaaaacagactccctttccgttaacttaatagttaataaaatagtttctactcacacgcatatacaatatgcggacaactatattatagcaaaatattatcacaaagtcaaataaatacccgccccggaggtacgaaggcaggaagggaaataaatgaaaagagccgctttgtacgtgcgagtaagcacgcaagagcagaagaacagtggattg

SEQ ID NO: 22058 - DNA, 260 bp, Unknown
  Description of Unknown: LeftRegion for integrase B9059 sequence
atataaaaaataatatactttcgtatatttttatcttggtaaaatagtcattatcgtatttaatccaattaaaccaaaagaggatgtgcgaagaaataaccgagaaatacgaaaatcttagaaaaaaagctaatagatagacttagcagctataattagcagcacccgccccggaggtacgaaggcaggaagggaaataaatgaaaagagccgctttgtacgtgcgagtaagcacgcaagagcagaagaacagtggattg

SEQ ID NO: 22059 - DNA, 260 bp, Unknown
  Description of Unknown: LeftRegion for integrase B9060 sequence
aagctatagaattaaaaagatacgaaaacatagcattggttaacgaatttgaaaatgcttgttttcgcttggttaactttccggatagtgaagaaataaccgagaaatacgaaaagcttagaaaaaagctaatagacaggcttagttgtatgtagatagcagcacccgccccggaggtacgaaggcaggaagggaaataaatgaaaagagccgctttatacgtgcgagtaagcacgcaagagcagaagaacagcggattg

SEQ ID NO: 22060 - DNA, 260 bp, Unknown
  Description of Unknown: LeftRegion for integrase B9061 sequence
ttagactgccaagtgtgcgacattgtggaatataaaaaataatacattttcgtgtatttttctattgatataatagacactatcgtgtacaataatattaaatcaagagaggagatacaaagaaatgaaaaagcatggaaaactaagaagaaaaaagctaatgaacagacttaacgccgtggaggtaggaaggggaataaatgaaaagagccgctttatatgtgcgagtaagcacgcaagagcagaagaacagtggtctg

SEQ ID NO: 22061 - DNA, 260 bp, Unknown
  Description of Unknown: LeftRegion for integrase B9062 sequence
tgcacctattttggacagcgaggtgttttctttatgtctttttttaccttttccacagtgatttttacaggcgttccccgccctgaaatgatacgcgccagctctgcatatatctttactgcatccattgccgcgccccctttctgttgcattcatacgcgggcggcggcagcggtatgcggaaggaggcatgctgcagcatgaatgtaattcgcggcgttggctatatccgcgtttctaccgccgagcaggccacgcgc

SEQ ID NO: 22062 - DNA, 260 bp, Unknown; identical to SEQ ID NO: 21999
  Description of Unknown: LeftRegion for integrase B9063 sequence

SEQ ID NO: 22063 - DNA, 260 bp, Unknown
  Description of Unknown: LeftRegion for integrase B9064 sequence
ccgtggtctgcccccattgtcagcgagacattcctcagccgactgccgaagaaatcgccaaagctgaagccgaaactgtcgaatgcccgacgtgtcactatagagccccgaagggcgccgactgctgccctcggtgcaacaatcttatacattaaaaaagaccccgcctgtgcggggtttacttatacacggagaacgcaatgaagaataaacgagtagccctatatattcgcgtaagcaccgaggagcaggctcgtcag

SEQ ID NO: 22064 - DNA, 260 bp, Unknown
  Description of Unknown: LeftRegion for integrase B9065 sequence
catttgtattgctccgattattgcagaaaaggagaaaaaaagatacagctgtgcatagcagatattaagcgtgggaaaagcagagatctgcaaaaatatatagatgatcgcaatcagtacagagaaaaggttgcacaggagaaagctagtgaaaattagcagcacccgccccggaggtacgaaggcaggaaggaaaataaatgaaaagagctgctttatatgtgcgagtgagcacgcaagagcagaagaacagtgggttg

SEQ ID NO: 22065 - DNA, 260 bp, Unknown; identical to SEQ ID NO: 22048
  Description of Unknown: LeftRegion for integrase B9066 sequence

SEQ ID NO: 22066 - DNA, 260 bp, Unknown
  Description of Unknown: LeftRegion for integrase B9067 sequence
ttgatgctcttgctttaggtcagaatcgcttggctcaacaggtctggaatttcgaagtgctaaagaaaaacggacagaaacagacctatactatatcatcacagttcttcacccccgaagaaatgaaaaaactattcgacgctaaataccaataaaaaacaccccgcctgtgcggggtttacttatacacggagaccaatatgaagaataatcgggtggccctatacatacgggtaagcactgaggaacaggctcgtcag

SEQ ID NO: 22067 - DNA, 260 bp, Unknown
  Description of Unknown: LeftRegion for integrase B9068 sequence
aaactatagaattaaaaagatacgaaaacatagcattggttaacgaatttgaaaacgcttgtttttgcttggttaactttccggatagcaaagaagcaaccgagaaatacgaaagtctcagaaaaaagctaatagacagacttagcggtatgtagatagcagcacccgccccggaggtacgaaggcaggaagggaaataaatgaaaagagctgctttatatgtgcgagtaagcacgcaggagcaaaagaacagtggattg

SEQ ID NO: 22068 - DNA, 260 bp, Unknown; identical to SEQ ID NO: 22056
  Description of Unknown: LeftRegion for integrase B9069 sequence

SEQ ID NO: 22069 - DNA, 260 bp, Unknown
  Description of Unknown: LeftRegion for integrase B9070 sequence
aaactatagaattaaaaagatacgaaaacatagcattagttaatgaatttgaaaacgcttgttttcgcttggttaactttccggacagtgaagaaataaccgagaaatacgaaaagcttagaaaaaagctaatagacaggcttagttgtatgtagatagcagcacccgccccggaggtacgaaggcaggaagggaaataaatgaaaagagccgctttatacgtgcgagtaagcacacaagagcagaagaacagtggattg

SEQ ID NO: 22070 - DNA, 260 bp, Unknown
  Description of Unknown: LeftRegion for integrase B9071 sequence
aaactatggaattaaaaagatacgaaaacatagcattggttaacgaatttgaaaatgcttgttttcgcttggttaactttccggacagtgaagaaataactgagaaatacgaaaagcttagaaaaaagctaatagacaggcttagttgtatgtagatagcagcacccgccccggaggtacgaaggcaggaaaggaaataaatgaaaagagccgctttatatgtgcgagtaagcacgcaagagcagaagaacagcggattg

SEQ ID NO: 22071 - DNA, 260 bp, Unknown
  Description of Unknown: LeftRegion for integrase B9072 sequence
aagctgcgacacgatagaaacgtgaacatagatacaattatgtatttgtgcgagaaattagactgtcaggtgtgcgacatcgtggaatataaaaaatagtatattttcgtatatttttatcttggaataatagacatcatcgcgtataattgaattaaactaagagaagagatacaaagaaatgagagggttgagaaataatgaaaagagccgctttatacgtgcgagtaagcacgcaagagcagaagaacagtggattg

SEQ ID NO: 22072 - DNA, 260 bp, Unknown
  Description of Unknown: LeftRegion for integrase B9073 sequence
aaaatatagaattaaaaagatatgaaaacatagcgttggtgaacgaatttgaaaacgcttgtttttgcttggttaactttccggatagtgaagaaataaccaagaaatacgaaagtctcagaaaaaagctaatagacaggcttagttgtatgtagacagcagcgcccgccccggaggtacgaaggcaggaaggaaaataaatgaaaagagccgctttgtacgtgcgagtaagcacgcaagagcagaagaacagtggattg

SEQ ID NO: 22073 - DNA, 260 bp, Unknown
  Description of Unknown: LeftRegion for integrase B9074 sequence
catttgtattgctccgattattgcagaaaaggagaaaaaaagatacagctatgcatagcagatattaagcgtgggaaaagcagagatttgcaaaaatatatagatgatcgcaatcagtacagagaaaaggttgcacaggagaaagctagtgaaaattagcagcacccgccccggaggtacgaaggcaggaagggaaataaatgaaaagagccgctttgtacgtgcgagtaagcacgcaagagcagaagaacagtggattg

SEQ ID NO: 22074 - DNA, 260 bp, Unknown; identical to SEQ ID NO: 22019
  Description of Unknown: LeftRegion for integrase B9075 sequence

SEQ ID NO: 22075 - DNA, 260 bp, Unknown
  Description of Unknown: LeftRegion for integrase B9076 sequence
aaactatggaattaaaaagatacgaaaacatagcattggttaacgaatttgaaaatgcttgttttcgcttggttaactttccggacagtgaagaaataaccgagaaatacgaaaagcttagaaaaaaactaatagacaggcttagttgtatgtagatagcagcacccgccccggaggtacgaaggcaggaagggaaataaatgaaaagagccgctttatacgtgcgagtaagcacgcaagagcagaagaacagtggattg

SEQ ID NO: 22076 - DNA, 260 bp, Unknown; identical to SEQ ID NO: 22001
  Description of Unknown: LeftRegion for integrase B9077 sequence

SEQ ID NO: 22077 - DNA, 260 bp, Unknown; identical to SEQ ID NO: 22014
  Description of Unknown: LeftRegion for integrase B9078 sequence

SEQ ID NO: 22078 - DNA, 260 bp, Unknown
  Description of Unknown: LeftRegion for integrase B9079 sequence
catttgtattgctccgattattgcagaaaaggagaaaaaaagatacagctatgcatagcagatattaagcgtgggaaaagcagagatttgcaaaaatatatagatgatcgcaatcagtacagagaaaaggttgcacaggagaaagatagtgaaaattagcagcacccgccccggaggtacgaaggcaggaagggaaataaatgaaaagagccgctttgtacgtgcgagtaagcacgcaagagcagaagaacagtggattg

SEQ ID NO: 22079 - DNA, 260 bp, Unknown
  Description of Unknown: LeftRegion for integrase B9080 sequence
catttgtattgctccgattattgcagaaaaggagaaaaaaagatacagctgtgcatagcagatattaagcgcggaaaaagcagagatctgcaaaaatatatagatgatcgcaatcagtacagagaaaaggttgcacaggagaaagctagtaaaaattagcagcacccgccccggaggtacgaaggcaggaaaggaaataaatgaaaagagccgctttatacgtgcgagtaagcacgcaagagcagaagaacagtggattg

SEQ ID NO: 22080 - DNA, 260 bp, Unknown; identical to SEQ ID NO: 21999
  Description of Unknown: LeftRegion for integrase B9081 sequence

SEQ ID NO: 22081 - DNA, 260 bp, Unknown
  Description of Unknown: LeftRegion for integrase B9082 sequence
aaactatagaattaaaaagatacgaaaacatagcattggttaatgaatttgaaaatgcttgttttcgcttggttaactttccggatagtgaagaaataaccgagaaatacgaaaatctcagaaaaaagctaatagacaggcttagcggtatgtagacagcagcgcccgccccggaggtacgaaggcaggaaggaaaataaatgaaaagagccgctttgtacgtgcgagtaagcacgcaagagcagaagaacagcggattg

SEQ ID NO: 22082 - DNA, 260 bp, Unknown
  Description of Unknown: LeftRegion for integrase B9083 sequence
gaacgggtatgcattaagcggttttataagacagatacaggggttatgcttgtgtccgaaaatccgaaatatgcaccgcttcaattcagtgagtcgaattgtacggattttaaggttttggggttggcggtgttaaaacaaagcgaaatacattaaaaaagccccgcctgtgcggggtttacttatacgcggagaacaatatgaagaataaacgagtagccttatatatacgcgtaagcaccgaagagcaagcacggcaa

SEQ ID NO: 22083 - DNA, 260 bp, Unknown
  Description of Unknown: LeftRegion for integrase B9084 sequence
ttgtgtaaattgtagtaaagttcttacagaagaagaaatagaatattatgataatttttgtgagtattgtgaaggagaactatatcaatcaatgttgcaggaggaaaaatgacagcaaatatattaagaaaaaatgtaagtaaaatagacttaaaagatataaaaaaagctataaaagcaatagcagatgaggttaaaaagtgaattgcaaagttgcaatatacgcaagagaatcaacagaaaagcaagatatagataca

SEQ ID NO: 22084 - DNA, 260 bp, Unknown
  Description of Unknown: LeftRegion for integrase B9085 sequence
tcttgtacctattttggacagcgaggtgttttctttatgtcttttttcaccttctccacagtgatttttacaggcgttccccgccctgaaatgatacgcgccagttctgcatatatctttactgcatccattgccgcgccccctctctgttgcattcatacgcgggcagcggcagcggtatgcggaaggaggcgcgcggcatgaatgtaattcgcggcgtgggctatattcgcgtttctaccgccgagcaggccacacgc

SEQ ID NO: 22085 - DNA, 260 bp, Unknown
  Description of Unknown: LeftRegion for integrase B9086 sequence
aaatcaatttaagacattggtagacgtcgattttgataattaccgtaaacgcaacgaaaatcgttccgtcagaaagaactgcactatcccatcttggttgaatgacgaagcagaaaaagctggaatcaatttttcggccactttgcaggaagcattaaaggcccaattaggattataggaaaaagggaggaaaaacatccatgaaacgcgtagcattatacatgcgcgtgtccaccgaagaacaggcgctccacggctac

SEQ ID NO: 22086 - DNA, 260 bp, Unknown; identical to SEQ ID NO: 22034
  Description of Unknown: LeftRegion for integrase B9087 sequence

SEQ ID NO: 22087 - DNA, 260 bp, Unknown
  Description of Unknown: LeftRegion for integrase B9088 sequence
ttggttattatagcaataaaaaagacgccattgctgcaagaaaggaggcggaagaaaaattgcatggtccatttttagaatggtacgcagagcattatcccaaacaatgggaggctaagaagaaaaaagctaatagataagcttagcagctataattagcagcacccgccccggaggtacgaaggcaggaagggaaataaatgaaaagagccgctttatacgtgcgagtaagcacgcaagagcaaaagaacagtggattg

SEQ ID NO: 22088 - DNA, 260 bp, Unknown
  Description of Unknown: LeftRegion for integrase B9089 sequence
atataaaaaataatatactttcgtatatttttatcttggtaaaatagtcattatcgtatttaatccaattaaaccaaaagaggatgtacaaagaaataaccgagaaatacgaaagtcttagaaaaaaagctaatagatagacttagcagctataattagcagcacccgccccggaggtacgaaggaaggaagggaaataaatgaaaagagccgctttatacgtgcgagtaagcacgcaagagcagaagaacagcggattg

SEQ ID NO: 22089 - DNA, 260 bp, Unknown
  Description of Unknown: LeftRegion for integrase B9090 sequence
aaattataacataaaaaaatcctccagcactgcaatgctgaaggagtgttgaagaggtgtactgcaatacacccaatacataaaaagaatggctaccaaccatatatctttttatgtactcattttaccacaagcaattaattgcttcaattatgcaattaatttgcaatatatttaataaaaaagaaaggatgagtacaatgcaaaatgtacgaatatacgcacgtgtttctacagccgagcaaaagaaaaaagatatt

SEQ ID NO: 22090 - DNA, 260 bp, Unknown; identical to SEQ ID NO: 22003
  Description of Unknown: LeftRegion for integrase B9091 sequence

SEQ ID NO: 22091 - DNA, 260 bp, Unknown; identical to SEQ ID NO: 22003
  Description of Unknown: LeftRegion for integrase B9092 sequence

SEQ ID NO: 22092 - DNA, 260 bp, Unknown
  Description of Unknown: LeftRegion for integrase B9093 sequence
gaaaatatggaaaatatgccaaattagaaacaggaaaaagagcctgaaaacagactctttttccccttaacttaatagttaataaaatagtttctactcacacgcatatacaatatgcggacaattatattatagcaaaatattatcacaaagtcaaataaatacccgccccggaggtacgaaggcaggaagggaaataaatgaaaagagccgctttatacgtgcgagtaagcacgcaagagcagaagaacagcggtctg

SEQ ID NO: 22093 - DNA, 260 bp, Unknown
  Description of Unknown: LeftRegion for integrase B9094 sequence
ttggttattatagcaataaaaaagacgccattgctgcaagaaaggaggcggaagaaaaattgcatggtccatttttagaatggtacgcagagcattatcccaaacaatgggaggctaagaagaaaaaagctaatagataagcttagcagctataattagcagcacccgccccggaggtacgaaggcaggaagggaaataaatgaaaagagccgctttatacgtgcgagtaagcacgcaagagcagaagaacagcggtctg

SEQ ID NO: 22094 - DNA, 260 bp, Unknown; identical to SEQ ID NO: 22025
  Description of Unknown: LeftRegion for integrase B9095 sequence

SEQ ID NO: 22095 - DNA, 260 bp, Unknown
  Description of Unknown: LeftRegion for integrase B9096 sequence
aaactatggaattaaaaagatacgaaaacatagcattggttaacgaatttgaaaatgcttgttttcgcttggttaactttccggacagtgaagaaataactgagaaatacgaaaagcttagaaaaaagctaatagacaggcttagttgtatgtagatagcagcacccgccccggaggtacgaaggcaggaagggaaataaatgaaaagagccgctttatacgtgcgagtaagtacgcaagagcagaagaacagtggattg

SEQ ID NO: 22096 - DNA, 260 bp, Unknown
  Description of Unknown: LeftRegion for integrase B9097 sequence
aaactatggaattaaaaagatacgaaaacatagcattggttaacgaatttgaaaatgcttgttttcgcttggttaactttccggacagtgaagaaataaccgagaaatacgaaaagcttagaaaaaagctaatagacaggcttagttgtatgtagatagcagcacccgccccggaggtacgaaggcaggaagggaaataaatgaaaagagccgctttatacgtgcgagtaagcacgcaagagcagaagaacagtggattg

SEQ ID NO: 22097 - DNA, 260 bp, Unknown; identical to SEQ ID NO: 22003
  Description of Unknown: LeftRegion for integrase B9098 sequence

SEQ ID NO: 22098 - DNA, 260 bp, Unknown; identical to SEQ ID NO: 22023
  Description of Unknown: LeftRegion for integrase B9099 sequence

SEQ ID NO: 22099 - DNA, 260 bp, Unknown; identical to SEQ ID NO: 22011
  Description of Unknown: LeftRegion for integrase B9100 sequence

SEQ ID NO: 22100 - DNA, 260 bp, Unknown
  Description of Unknown: LeftRegion for integrase B9101 sequence
acagtgtgacaagatcaaaggtttgcagtaggttagatatcttttttataagctcctttctatccatatgatgcacctccttaaaaaaaagatgtttccatgctaacacaaagaggaaagcgatataatactttttttaacactttttacatgactaatcatgtaaacgtgacacagtaagaaaggatacagaaaaggaaatggaaggaaagaaaagggcggctatatacgtgcgtgtatcaactgtagagcaaaaagaa

SEQ ID NO: 22101 - DNA, 260 bp, Unknown
  Description of Unknown: LeftRegion for integrase B9102 sequence
ccgtggtctgccctcattgtcagcgagacattcctcagccgacggccgaagaaattgccaaagctgaagccgaaaccgtcgaatgcccgacgtgtcactatagagccccgaagggcgccgactgctgccctcggtgcaataatcttatacattaaaaaagaccccgcacaagcggggtttacttatatacggagaacaacatgaagaataagcgagtagccctatatatacgcgtaagcactgaagagcaagcacggcaa

SEQ ID NO: 22102 - DNA, 260 bp, Unknown
  Description of Unknown: LeftRegion for integrase B9103 sequence
aaactatggaattaaaaagatacgaaaacatagcattggttaacgaatttgaaaatgcttgttttcgcttggttaactttccggacagtgaagaaataactgagaaatacgaaaagcttagaaaaaagctaatagacaggcttagttgtatgtagatagcagcacccgccccggaggtacgaaggcaggaaaggaaataaatgaaaagagtcgctttatacgtgcgagtaagtacgcaagagcagaagaacagtggattg

SEQ ID NO: 22103 - DNA, 260 bp, Unknown
  Description of Unknown: LeftRegion for integrase B9104 sequence
tgctagacgcagaaaaaagaggctgaaaacagcctccctccccattaacttaatagttaataaaataatttctactcacacgcatatataatatgcggacaactatattatagcaaaatattatcgcaaagtcaaattagacttagcagctataattagcagcgcccgccccggaggtacgaaggcaggaagggaaataaatgaaaagagccgctttatacgtgcgagtaagcacgcaggaacagaagaacagtggattg

SEQ ID NO: 22104 - DNA, 260 bp, Unknown
  Description of Unknown: LeftRegion for integrase B9105 sequence
catttgtattgctccgattattgcagaaaaggagaaaaaaagatacagctgtgcatagcagatattaagcgtgggaaaagcagagatctgcaaaaatatatagatgatcgcaatcagtacagagaaaaggttgcacaggagaaagctagtgaaaattagcagcacccgccccggaggtacgaaggcaggagggaaaataaatgaaaagagccgctttatatgtgcgagtaagcacgcaagagcagaagaacagcggtctg

SEQ ID NO: 22105 - DNA, 260 bp, Unknown; identical to SEQ ID NO: 22023
  Description of Unknown: LeftRegion for integrase B9106 sequence

SEQ ID NO: 22106 - DNA, 260 bp, Unknown
  Description of Unknown: LeftRegion for integrase B9107 sequence
gaaaatatggaaaatatgccaaattagaaacaggaaaaagagcctgaaaacagactctttttccccttaacttaatagttaataaaatagtttctactcacacgcatatacaatatgcggacaattatattatagcaaaatattatcacaaagtcaaataaatacccgccccggaggtacgaaggcaggaagggaaataaatgaaaagagccgctttatacgtgcgagtaagcacgcaagagcagaagaacagcggtcta

SEQ ID NO: 22107 - DNA, 260 bp, Unknown
  Description of Unknown: LeftRegion for integrase B9108 sequence
agattaaaaaaggaggaagaaagtggttaggatatacgtaaatgggatccttacaaaaagagaagatttggaaaaaattgaaataaaaaatgaaaatataaaaaagattcttgccagtaaattgacggaaaagaagtgatgatatagaattgaccttgatagaatctcggtcaattcttttttagagaggaagagttgacatgaagaaaatgaatgtaggttatctgagggtatccacagaaaaccagacggaaaaatat

SEQ ID NO: 22108 - DNA, 260 bp, Unknown; identical to SEQ ID NO: 22054
  Description of Unknown: LeftRegion for integrase B9109 sequence

SEQ ID NO: 22109 - DNA, 260 bp, Unknown
  Description of Unknown: LeftRegion for integrase B9110 sequence
ttgcacctattttggacagcgaggtgttttctttatgtcttttttaccttttccacagtgatttttacaggcgttccccgccctgaaatgatacgcgccagctctgcatatatctttactgcatccattgccgcgccccctttctgttgcattcatacgcgggcggcggcagcggtatgcggaaggaggcatgctgcagcatgaatgtaattcgcggcgttggctatatccgcgtttctaccgccgagcaggccacgcgc

SEQ ID NO: 22110 - DNA, 260 bp, Unknown
  Description of Unknown: LeftRegion for integrase B9111 sequence
acagtgtgacaagatcaaaggtttgcagcaggttagatatcttttttataagctcctttctatccatatgatgcacctccttaaaaaaaagatgttttcatgctaacacaaagaggaaagcgatataatactttttttaacactttttacatgactaatcatgtaaacgtgacacagtaagaaaggatacagaaaaggaaatggaaggaaagaaaagggcggctatatatgtccgcgtatcaaccgcagaacaaagagat

SEQ ID NO: 22111 - DNA, 260 bp, Unknown
  Description of Unknown: LeftRegion for integrase B9112 sequence
ttgacagtaaaaatgtttctgattgaaaccatctgtcgaaaaaaaagagttgtctaactcatattcaatttttagattctcctgttcagcataaagattaaacagcaacgaatatattttttctgcgtccatattttcaccgcccctcatcggctagtatggactgctttttttattttcaaacaatcggaggtatttttatgagaaaaaatctgcgagtggcaggatacgctcgtgtttccactgatgaacaaaagaaa

SEQ ID NO: 22112 - DNA, 260 bp, Unknown
  Description of Unknown: LeftRegion for integrase B9113 sequence
tgacagtaagaatgtttctgattgaaaccatctgtcgaaaaaaaagagttgtctaactcatattcaatttttagattctcctgttcagcataaagattaaacaacaacgaatatattttttctgcgtccatattttcaccgcctctcatcggctagtatggactgctttttttattttcaatcaatcggaggtatttttgatgaaaaaaaatttacgaattggtggttatgcccgtgtatctactgatgaacaaaagaaa

SEQ ID NO: 22113 - DNA, 260 bp, Unknown
  Description of Unknown: LeftRegion for integrase B9114 sequence
ttgacagcaagaatgtttctgattgaaaccatctgtcgaaaaaaaagagttgtttaactcatattcaattttgatattttcctgttcagcataaagattaaacaacaacgaatatattttttctgcatccatattttcaccgcccctcatcggctagtatggactgctttttttattttcaatcaatcggaggtaattttatgagaaaaaatctgcgagtggcaggatacgctcgtgtttccactgatgaacaaaagaaa

SEQ ID NO: 22114 - DNA, 260 bp, Unknown
  Description of Unknown: LeftRegion for integrase B9115 sequence
cttgacagcaagaatgtttctcattgaaaccatctgtcgaaaaaaaagagttgtctaactcatattcaattttgagattttcctgttcagcataaagattaaacagcaacgaatatattttttttgcgtccatattttcaccgccctcatcggctagtatggactgctttttttattttcaaacaaacggaggtatttttatgagaaaaaatctgcgagtggcaggatacgctcgtgtttccactgatgaacaaaagaaa

SEQ ID NO: 22115 - DNA, 260 bp, Unknown
  Description of Unknown: LeftRegion for integrase B9116 sequence
agacagtaaaaatgtttctgattgaaaccatctgtcgaaaaaaaagagttatctaactcatactcaattttgagatcttcctgttctgcataaagattaaacagcaaagaatagaaactttcagcgtccatatgctcaccgcctttcaatggctagtatggactgctttttttattttcaatcaatcggagggattttttatgagaaaaaaactgcgagtggcaggatatgctcgtgtttccactgacgagcaaaaaaaa

SEQ ID NO: 22116 - DNA, 260 bp, Unknown; identical to SEQ ID NO: 22112
  Description of Unknown: LeftRegion for integrase B9117 sequence

SEQ ID NO: 22117 - DNA, 260 bp, Unknown
  Description of Unknown: LeftRegion for integrase B9118 sequence
tagacagcaagaatgtttctgattgaaaccatctgtcgaaaaaaaagaattgtctaattcatattcaattttgatattttcctgttcagcataaagattaaacagcaacgaatatattttttctgcgtccatattttcaccgtcctcatcggctagtatggactgctttttttattttcaatcaaacggatgtaatttttatgagaaaaaatctgcgagtggcaggatacgctcgtgtttccactgatgaacaaaagaaa

SEQ ID NO: 22118 - DNA, 260 bp, Unknown; identical to SEQ ID NO: 22034
  Description of Unknown: LeftRegion for integrase B9119 sequence

SEQ ID NO: 22119 - DNA, 260 bp, Unknown
  Description of Unknown: LeftRegion for integrase B9120 sequence
agtataaaaaataatatattttcgtgtatttttacctcgacataatagtcattatcgtgtataatgtgagtaaatcaagagaggagatacaaagaaataaccgagaaatacgaaagtctcagaaaaaagctaatagatagacttagcagctataattagcagcacccgccccggaggtacgaaggaaggaagggaaataaatgaaaagagccgctttatacgtgcgagtaagcacgcaagagcagaaaaacagcggattg

SEQ ID NO: 22120 - DNA, 260 bp, Unknown
  Description of Unknown: LeftRegion for integrase B9121 sequence
ttgacagcaagaatgtttctgattgaaacactctgtcgaaaaaaaagagttgtctaactcatattcaattttgatattttcctgttcagcataaagattaaacagcaacgaatatattttttctgcgtccatattttcaccgcccctcatcggctagtatggactgctttttttattttcaatcaatcggagggatttttatgaaaaaaaaactgcgagtggcaggatatgctcgtgtttcaacagatgaacaaaaaaaa

SEQ ID NO: 22121 - DNA, 260 bp, Unknown
  Description of Unknown: LeftRegion for integrase B9122 sequence
tagacagcaagaatgtttctgattgaaaccatctgtcgaaaaaaaagaattgtctaattcatactcgattttaagattttcttgttcggcatacagattaaacaacaacgaatataatttttctgcgtccatattttcaccgcctctcatcggctagtatggactgctttttttattttcaaacaaacggaggtatttttatgagaaaaaatctgcgagtggcaggatacgctcgtgtttccactgatgaacaaaagaaa

SEQ ID NO: 22122 - DNA, 260 bp, Unknown
  Description of Unknown: LeftRegion for integrase B9123 sequence
acagtgtgacaagatcaaaggtttgcagcaggttagatatcttttttataagctcctttctatccatatgatgcacctccttaaaaaaaagatgtttttatgctaacacaaagaggaaagcgatataatactttttttaacactttttacatgactaatcatgtaaacgtgacacagtaagaaaggatacagaaaaggaaatggaaggaaagaaaagggcggctatatatgtgcgtgtatcaaccgcagagcaaagagat

SEQ ID NO: 22123 - DNA, 260 bp, Unknown
  Description of Unknown: LeftRegion for integrase B9124 sequence
cttgacagcaagaatgtttctgattgaaaccatctgtcgaaaaaaaagagttgtctaactcataatcaattttaagattttcctgttcagcatacaaattaaacaacaacgaatatattttttctgcgtccatattttcaccgccctcatcggctagtatggactgctttttttattttcaaacaatcggaggtatttttatgagaaaaaatctgcgagtggcaggatacgctcgtgtttccactgacgaacaaaaaaaa

SEQ ID NO: 22124 - DNA, 260 bp, Unknown
  Description of Unknown: LeftRegion for integrase B9125 sequence
agacagcaagaatgtttctgattgaaaccatctgtcgaaaaaaaagagttgtctaactcatactcaattttgagatcttcctgttcagcataaagattaaacagcaaagaatagaaactttcagcgtccatatgctcaccgcctttcaatggctagtatggactgctttttttattttcaatcaatcggagggattttttatgagaaaaaaactgcgagtggcaggatatgctcgtgtttccactgacgaacaaaagaaa

SEQ ID NO: 22125 - DNA, 260 bp, Unknown
  Description of Unknown: LeftRegion for integrase B9126 sequence
cttgacagcaagaatgtttctcgttgaaaccatctgtcgaaaaaaaagagttgtctaactcatattcaattttgagattttcctgttcagcataaagattaaacagcaacgaatatattttttttgcgtccatattttcaccgccctcatcggctagtatggactgctttttttattttcaatcaatcggaggtaattttatgagaaaaaatctgcgagtggcaggatacgctcgtgtttccactgatgaacaaaagaaa

SEQ ID NO: 22126 - DNA, 260 bp, Unknown
  Description of Unknown: LeftRegion for integrase B9127 sequence
cgacagcaagaatgtttctgattgaaacaacctgtcgaaaaaaaagagttatctaactcatattcaattttgagatcttcttgttcagcataaagattaaacagcaacgaatatattttttctgcgtccatattttcaccgcccttcatcggctagtatggactgctttttttattttcaatcaagcggaggttatttttatgagaaaaaaactgcgagtggcaggatatgctcgtgtttccactgacgaacaaaagaaa

SEQ ID NO: 22127 - DNA, 260 bp, Unknown
  Description of Unknown: LeftRegion for integrase B9128 sequence
aacagtgtgacaagatcaaaggtttgcagcaggttagatatcttttttataagctcctttctatccatatgatgcacctccttaaaaaaagatgtttccatgctaacacaaagaggaaagcgatataatactttttttaacactttttacatgactaatcatgtaaacgtgacacagtaagaaaggatacataaaaggaaatggaaggaaagaaaagggcggctatatatgtccgtgtatcaaccgcagaacaaagagat

SEQ ID NO: 22128 - DNA, 260 bp, Unknown
  Description of Unknown: LeftRegion for integrase B9129 sequence
tttcacttaacactctcttaatggttttacatagtttttctaaatctacttcctgattcataaactcacctattatttacttagttaagaatatgctaaaatataaggatattgacaatatttaagaccttttatacttttccttcttatcattagatgagctactttctgcataagatatttagaagggatgatgtcttatgttaaggtgtgctatctatatcagagtatctacagaagaacaaaaaattaacgggctg

SEQ ID NO: 22129 - DNA, 260 bp, Unknown
  Description of Unknown: LeftRegion for integrase B9130 sequence
cgacagcaagaatgtttctgattgaaacaacctgtcgaaaaaaaagagttatctaactcatattcaattttgagatcttcttgttcagcataaagattaaacagcaacgaatatattttttctgcgtccatattttcaccgcccttcatcggctagtatggactgctttttttattttcaatcaatcggaggtattttttatgagaaaaaaactgcgagtggcaggatatgctcgtgtttccactgacgaacaaaagaaa

SEQ ID NO: 22130 - DNA, 260 bp, Unknown; identical to SEQ ID NO: 22019
  Description of Unknown: LeftRegion for integrase B9131 sequence

SEQ ID NO: 22131 - DNA, 260 bp, Unknown
  Description of Unknown: LeftRegion for integrase B9132 sequence
agacagcaagaatgtttctgattgaaaccatctgtcgaaaaaaaagagttgtctacttcatattcaattttgatattttcctgttcagcataaagattaaacagcaacgaatatattttttctgcgtccatattttcaccgcccctcatcggctagtatggactgctttttttattttcaatcaatcggaggtattttttatgagaaaaaaactgcgagtggcaggatatgctcgtgtttccactgatgaacaaaagaaa

SEQ ID NO: 22132 - DNA, 260 bp, Unknown
  Description of Unknown: LeftRegion for integrase B9133 sequence
ggaatttaacatccgggaagaatggatccgaacaggcgagggcgatatgcacatagcgcaggccaaggatgaagaaatcagccggtttttgcatgacgtattaggcgttttcaaggggagttgcacaaaatgcggtttgcaaacattgtacgcatttattgtacatcaacccccaatcaaaatcaaggggggattgaaaaatgagagtagcactatatgctagagtgtcaacggaggagcaggccgtgcatggcctatct

SEQ ID NO: 22133 - DNA, 260 bp, Unknown
  Description of Unknown: LeftRegion for integrase B9134 sequence
tgacagtaaaaatgtttctgattgaaacagtctgtcgaaaaaaaagagttgtctaactcatattcaattttgagatcttcctgttcagcataaagattaaacagcaaagaatagaaactttcagcgtccatatgctcaccgcctttcaatggctagtatggactgctttttttattttcaatcaatcggaggtattttttatgagaaaaaaactgcgagtggcaggatatgctcgtgtttccactgacgaacaaaaaaaa

SEQ ID NO: 22134 - DNA, 260 bp, Unknown
  Description of Unknown: LeftRegion for integrase B9135 sequence
ccttgacagcaagaatgtttctgattgaaaccatctgtcgaaaaaaaagagttgtttaactcatattcaatttggatattttcctgttcagcataaagattaaacaataatgaatatattttttctgcgtccatattttcaccgcctcatcggctagtatggactgctttttttattttcaaacaatcggaggtatttttatgagaaaaaatctgcgagtggcaggatatgctcgtgtttcaacagatgaacaaaagaaa

SEQ ID NO: 22135 - DNA, 260 bp, Unknown; identical to SEQ ID NO: 22134
  Description of Unknown: LeftRegion for integrase B9136 sequence

SEQ ID NO: 22136 - DNA, 260 bp, Unknown
  Description of Unknown: LeftRegion for integrase B9137 sequence
acagggtaacaagatcaaaggtttgcagtagactggatatcttttttataagctcctttctatccatatgatgcacctccttaaaaaaaagatgtttccatgctaacacaaagaagaaagcgatataatactttttttaacactttttacatgactaatcatgtaaacgtgacacagtaagaaaggatacagaaaaggaaatggaaggaaagaaaagggcggctatatatgtccgtgtatcaaccgcagaacaaagagat

SEQ ID NO: 22137 - DNA, 260 bp, Unknown
  Description of Unknown: LeftRegion for integrase B9138 sequence
ttgacagtaaaaatgtttctgattgaaaccatctgtcgaaaaaaaagagttgtctaactcatattcaatttttagattctcctgttcagcatacaaattaaacaacaacgaatatattttttctgcgtccatattttcaccgcccctcatcggctagtatggactgctttttttattttcaaacaatcggaggtatttttatgagaaaaaatctgcgagtggcaggatacgctcgtgtttccactgatgaacaaaagaaa

SEQ ID NO: 22138 - DNA, 260 bp, Unknown
  Description of Unknown: LeftRegion for integrase B9139 sequence
tagacagcaagaatgtttctgattgaaacactctgtcgaaaaaaaagaattgtctaactcatattcaattttgagattttcctgttcagcataaagattaaacaacaacgaatatattttttctgcgtccatattttcaccgcccctcatcggctagtatggactgctttttttattttcaaacaaacggaggtatttttatgagaaaaaatctgcgagtggcaggatatgcccgtgtatctaccgatgaacaaaagaaa

SEQ ID NO: 22139 - DNA, 260 bp, Unknown
  Description of Unknown: LeftRegion for integrase B9140 sequence
agaagagtttgaagatgactgggaagatgaagaagaatattaaaaaataaaaataagttatttgaagagggagtttccctcttcttttaatactggaggtaaattatgataatagctaatgaaaaaatgacagaaactgaaaaaataatagcagcaagaaaaatactagaattaataaaagctaaaaaagatgattaaaaatgaaaagagcagttatatatattagagaatctacaaaatttcaagaccctgatactcaa

SEQ ID NO: 22140 - DNA, 260 bp, Unknown
  Description of Unknown: LeftRegion for integrase B9141 sequence
tagacagcaagaatgtttctgattgaaaccatctgtcgaaaaaaaagagttgtctaactcataatcaatttttagattctcctgttcagcataaagattaaacagcaacgaatatattttttccgcgtccatattttcaccgcctctcatcggctagtatggactgctttttttattttcaaacaatcggaggtatttttatgagaaaaaatctgcgagtggcaggatacgctcgtgtttccactgatgaacaaaagaaa

SEQ ID NO: 22141 - DNA, 260 bp, Unknown
  Description of Unknown: LeftRegion for integrase B9142 sequence
cttgacagtaaaaatgtttctgattgaaaccatctgtcgaaaaaaaagagttgtctaactcatactcgattttaagattttcctgttcagcataaagattaaacaacaacgaatatattttttctgcatccatattttcaccgccctcatcggctagtatggactgctttttttattttcaatcaatcggaggtaattttatgagaaaaaatctgcgagtggcaggatacgctcgtgtttccactgatgaacaaaagaaa

SEQ ID NO: 22142 - DNA, 260 bp, Unknown
  Description of Unknown: LeftRegion for integrase B9143 sequence
ctaacagggtaacaagatcaaaggtttgcagtagacttgatatcttttttataagctcctttctatccatatgatgcacctccttaaaaaaaagatgtttccatgctaacacaaagaagaaagcgatataatactttttttaacactttttacatgactaatcatgtaaacgtaacacaagaaaggatacagaaaaggaaatggaaggaaagaaaagggcggctatatatgtccgcgtatcaaccgcagaacaaagagat

SEQ ID NO: 22143 - DNA, 260 bp, Unknown
  Description of Unknown: LeftRegion for integrase B9144 sequence
cgacagcaagaatgtttctgattgaaacaacctgtcgaaaaaaaagagttatctaactcatattcaattttgagatcttcttgttcagcataaagattaaacagcaacgaatatattttttctgcgtccatattttcaccgcccttcatcggctagtatggactgctttttttattttcaatcaatcggaggtatttttgatgaaaaaaaatttacgaattggtggttatgcccgtgtatctactgatgaacaaaagaaa

SEQ ID NO: 22144 - DNA, 260 bp, Unknown
  Description of Unknown: LeftRegion for integrase B9145 sequence
ccttgacagcaagaatgtttctgattgaaacaacctgtcgaaaaaaaagagttgtttaactcatattcaattttgatattttcctgttcagcataaagattaaacagcaacgaatatattttttctgcgtccatattttcaccgcctcatcggctagtatggactgctttttttattttcaaacaatcggaggtatttttatgagaaaaaatctgcgagtggcaggatatgctcgtgtttccactgacgaacaaaagaaa

SEQ ID NO: 22145 - DNA, 260 bp, Unknown
  Description of Unknown: LeftRegion for integrase B9146 sequence
tagacagcaagaatgtttctgattgaaacaacctgtcgaaaaaaaagagttgtctaactcatattcgattttgatattttcctgttcagcataaagattaaacaacaacgaatatattttttctgcgtccatattttcaccgcccctcatcggctagtatggactgctttttttattttcaatcaagcggaggtaattttatgagaaaaaaactgcgagtggcaggatatgctcgtgtttccactgacgaacaaaaaaaa

SEQ ID NO: 22146 - DNA, 260 bp, Unknown
  Description of Unknown: LeftRegion for integrase B9147 sequence
cagtgtgcaggaaaggcaaggtgggtgcatgtatcgcaatgtaatgatgtatcagatcatggttgatattctgaaaggatggctggaaaacggcgtaatttcgcaaaaagactatcgggcaatgcatacaacaatggctgaaaaatacggcatatctttgtccggtatattcgttgataattcctccgtgacgagttaatatggtatcggaaggaggggttattacgaaaagattgatacaaaaaattgaacccacaatc

SEQ ID NO: 22147 - DNA, 260 bp, Unknown
  Description of Unknown: LeftRegion for integrase B9148 sequence
tcgacagcaagaatgtttctgattgaaaccatctgtcgaaaaaaaagagttgtctaactcatattcaattttgatattctcctgttcagcataaagattaaacagcaacgaatatattttttctgcgtccatattttcaccgccctcatcggctagtatggactgctttttttattttcaatcaagcggaggtaatttttatgagaaaaaaactgcgagtggcaggatatgctcgtgtttcaacagacgaacaaaagaaa

SEQ ID NO: 22148 - DNA, 260 bp, Unknown
  Description of Unknown: LeftRegion for integrase B9149 sequence
cgacagcaagaatgtttctgattgaaacaacctgtcgaaaaaaaagagttatctaactcatactcaattttgagatcttcttgttcagcataaagattaaacagcaacgaatatattttttctgcgtccatattttcaccgcccttcatcggctagtatggactgctttttttattttcaatcaatcggaggtattttttatgagaaaaaaactgcgagtggcaggatatgctcgtgtttccactgacgaacaaaagaaa

SEQ ID NO: 22149 - DNA, 260 bp, Unknown
  Description of Unknown: LeftRegion for integrase B9150 sequence
agacagcaagaatgtttctgattgaaaccatctgtcgaaaaaaaagagttgtttaactcatattcaattttgagattttcctgttcagcataaagattaaacaacaacgaatatattttttctgcgtccatattttcaccgcccctcatcggctagtatggactcctttttttattttcaatcaatcggaggtattttttatgagaaaaaaactgcgagtggcaggatatgctcgtgtttccactgacgaacaaaaaaaa

SEQ ID NO: 22150 - DNA, 260 bp, Unknown
  Description of Unknown: LeftRegion for integrase B9151 sequence
agacagcaagaatgtttctgattgaaaccacctgtcgaaaaaaaagaattgtctaactcataatcaattttgactttttcctgttcagcataaagattaaacagcaacgaatatattttttctgcgtccatattttcaccgcccctcatcggctagtatggactgctttttttattttcaatcaagcggaggtaatttttatgagaaaaaaattgcgagtggcaggatatgctcgtgtttcaactgacgaacaaaaaaaa

SEQ ID NO: 22151 - DNA, 260 bp, Unknown
  Description of Unknown: LeftRegion for integrase B9152 sequence
cgacagcaagaatgtttctgattgaaacaacctgtcgaaaaaaaagagttgtctaactcatattcaattttgagatcttcctgttctgcataaagattaaacagcaaagaatagaaactttcagcgtccatatgctcaccgcctttcaatggctagtatggactgctttttttattttcaatcaatcggaggtattttttatgagaaaaaaactgcgagtggcaggatatgctcgtgtttccactgacgaacaaaaaaaa

SEQ ID NO: 22152 - DNA, 260 bp, Unknown
  Description of Unknown: LeftRegion for integrase B9153 sequence
tgacagtaaaaatgtttctgattgaaaccatctgtcgaaaaaaaagagttgtctaactcatactcaattttgagatcttcctgttcagcataaagattaaacagcaaagaatagaaactttcagcgtccatatgctcaccgcctttcaatggctagtatggactgctttttttattttcaatcaatcggagggattttttatgagaaaaaaactgcgagtggcaggatatgctcgtgtttctactgacgaacaaaaaaaa

SEQ ID NO: 22153 - DNA, 260 bp, Unknown
  Description of Unknown: LeftRegion for integrase B9154 sequence
ttgacagcaaaaatgtttctgattgaaaccatctgtcgaaaaaaaagagttgtctaactcatactcgattttgagattttcctgttcggcataaagattaaacaacaacgaatatattttttctgcgtccatattttcaccgcccctcatcggctagtatggactgctttttttattttcaaacaaacggatgtatttttatgagaaaaaatctgcgagtggcaggatacgctcgtgtttccactgatgaacaaaagaaa

SEQ ID NO: 22154 - DNA, 260 bp, Unknown
  Description of Unknown: LeftRegion for integrase B9155 sequence
tagacagcaagaatgtttctgattgaaacaacctgtcgaaaaaaaagagttgtctaactcatattcaatttttagattttcctgttcagcataaagattaaacagcaacgaatatattttttctgcgtccatattttcaccgcccatcatcggctagtatggactgctttttttattttcaaacaattggaggtatttttatgagaaaaaatctgcgagtggcaggatatgctcgtgtatccactgatgaacaaaagaaa

SEQ ID NO: 22155 - DNA, 260 bp, Unknown
  Description of Unknown: LeftRegion for integrase B9156 sequence
ttgacagcaagaatgtttctgattgaaaccatctgtcgaaaaaaaagagttgtctaactcatactcgattttgagattttcctgttcagcataaagattaaacagcaacgaatatattttttctgcgtccatattttcaccgcctctcatcggctagtatggactgctttttttattttcaaacaagcggaggtatttttatgagaaaaaatctgcgagtggcaggatacgctcgtgtttccactgatgaacaaaagaaa

SEQ ID NO: 22156 - DNA, 260 bp, Unknown
  Description of Unknown: LeftRegion for integrase B9157 sequence
ccttgacagcaagaatgtttctgattgaaacaacctgtcgaaaaaaaagagttgtttaactcatattcaattttgatattttcctgttcagcataaagattaaacagcaacgaatatattttttctgcgtccatattttcaccgcctcatcggctagtatggactgctttttttattttcaaacaatcggaggtatttttatgagaaaaaatctgcgtgtggcaggatacgcccgtgtatctactgatgaacaaaagaaa

SEQ ID NO: 22157 - DNA, 260 bp, Unknown
  Description of Unknown: LeftRegion for integrase B9158 sequence
cgacagcaagaatgtttctgattgaaaccatctgtcgaaaaaaaagagttgtctaactcatattcaattttgagatcttcctgttcagcataaagattaaacagcaaagaatagaaactttcagcgtccatatgctcaccgcctttcaatggctagtatggactgctttttttattttcaaccaatcggaggtattttttatgagaaaaaaactgcgagtggcaggatatgctcgtgtttcaacagatgaacaaaaaaaa

SEQ ID NO: 22158 - DNA, 260 bp, Unknown
  Description of Unknown: LeftRegion for integrase B9159 sequence
tgacagtaaaaatgtttctgattgaaaccatctgtcgaaaaaaaagagttgtctaactcatactcaattttgagatcttcctgttcagcataaagattaaacagcaaagaatagaaactttcagcgtccatatgctcaccgcctttcaatggctagtatggactgctttttttattttcaatcaatcggagggattttttatgagaaaaaaactgcgagtggcaggatatgctcgtgtttcaacagatgaacagaaaaaa

SEQ ID NO: 22159 - DNA, 260 bp, Unknown
  Description of Unknown: LeftRegion for integrase B9160 sequence
ttgacagcaaaaatgtttctgattgaaaccatctgtcgaaaaaaaagagttgtctaactcatattcaattttgagatcttcttgttcagcgtaaagattaaacagcaacgaatatattttttctgcgtccatattttcaccgccttcatcggctagtatggactgctttttttattttcaatcaatcggaggtattttttatgagaaaaaatctgcgagtggcaggatatgctcgtgtttccactgacgaacaaaagaaa

SEQ ID NO: 22160 - DNA, 260 bp, Unknown
  Description of Unknown: LeftRegion for integrase B9161 sequence
aaaaatgaataagtacttagcttcaatagcaatgataaagcagatgatcaatgaagggattgtaattgaaaaagacatgccacagattaataaatactttagtgaaaaatatggtattaaagaaggcagtttatatagtcaaaataacttgataaagactccaactagagcgatgtatgtagacgaaaggagtaagaaaaatggctgaaacaataaaaataaattcattaccaacacttcccactttgcttaaagttgca

SEQ ID NO: 22161 - DNA, 260 bp, Unknown
  Description of Unknown: LeftRegion for integrase B9162 sequence
tgacagcaagaatgtttctgattgaaaccatctgtcgaaaaaaaagagttgtctaactcatattcaattttgatattttcctgttcagcataaagattaaacaataatgaatatattttttctgcgtccatattttcaccgcccctcatcggctagtatggactgctttttttattttcaatcaatcggaggtattttttatgagaaaaaaactgcaagtggcaggatatgctcgtgtttccactgacgaacaaaagaaa

SEQ ID NO: 22162 - DNA, 260 bp, Unknown
  Description of Unknown: LeftRegion for integrase B9163 sequence
ctaacagggtaacaagatcaaaggtttgcagtagactggatatcttttttataagctcctttctatccatatgatgcacctccttaaaaaaaagatgtttccatgctaacacaaagaagaaagcgatataatactttttttaacactttttacatgactaatcatgtaaacgtaacacaagaaaggatacagaaaaggaaatggaaggaaagaaaagggcggctatatatgtccgcgtatcaaccgcagaacaaagagat

SEQ ID NO: 22163 - DNA, 260 bp, Unknown
  Description of Unknown: LeftRegion for integrase B9164 sequence
gctaacagggtaacaagatcaaaggtttgcagcaggttagatatcttttttataagctcctttctatccatatgatgcacctccttaaaaaaagatgtttccatgctaacacaaagaggaaagcgatataatacttttttcaacactttttacatgactaaccatgtaaacgcaacacaagaaaggatacagaaaaggaaatggaaggaaagaaaagggcggctatatatgtccgtgtatcaaccgcagaacaaagagat

SEQ ID NO: 22164 - DNA, 260 bp, Unknown
  Description of Unknown: LeftRegion for integrase B9165 sequence
ttgacagtaaaaatgtttctgattgaaaccatctgtcgaaaaaaaagagttgtctaactcatactcgattttgagattttcctgttcagcatacaaattaaacaacaacgaatatattttttctgcatccatattttcaccgcccctcatcggctagtatggactgctttttttattttcaatcaatcggaggtaattttatgagaaaaaatctgcgagtggcaggatacgctcgtgtttccactgatgaacaaaagaaa

SEQ ID NO: 22165 - DNA, 260 bp, Unknown
  Description of Unknown: LeftRegion for integrase B9166 sequence
cttgacagtaaaaatgtttctgattgaaaccatctgtcgaaaaaaaagagttgtctaactcatactcgattttaagattttcctgttcagcataaagattaaacagcaacgaatatattttttttgcatccatattttcaccgccctcatcggctagtatggactgctttttttattttcaatcaatcggaggtatttttatgagaaaaaatctgcgagtggcaggatacgctcgtgtttccactgatgaacaaaagaaa

SEQ ID NO: 22166 - DNA, 260 bp, Unknown
  Description of Unknown: LeftRegion for integrase B9167 sequence
ctaacagtgtgacaagatcaaaggtttgcagcaggttagatatcttttttataagctcctttctatccatatgatgcacctccttaaaaaaaagatgtttccatgctaacacaaagaagaaagcgatataatactttttttaacactttttacatgactaatcatgtaaacgtaacacaagaaaggatacagaaaaggaaatggaaggaaagaaaagggcggctatatatgtccgtgtatcaaccgcagagcaaagagat

SEQ ID NO: 22167 - DNA, 260 bp, Unknown
  Description of Unknown: LeftRegion for integrase B9168 sequence
ctcgacagcaagaatgtttctgattgaaaccatctgtcgaaaaaaaagagttgtttaactcatattcaattttgatattttcctgttcagcataaagattaaacaataatgaatatattttttctgcgtccatattttcaccgccctcatcggctagtatggactgctttttttattttcaaacaaacggaggtatttttatgagaaaaaatctgcgagtggcaggatacgctcgtgtttccactgatgaacaaaagaaa

SEQ ID NO: 22168 - DNA, 260 bp, Unknown
  Description of Unknown: LeftRegion for integrase B9169 sequence
ctaacagggtaacaagatcaaaggtttgcagcaggttagatatcttttttataagctcctttctatccatatgatgcacctccttaaaaaaaagatgtttccatgctaacacaaagaagaaagcgatataatactttttttaacactttttacatgactaatcatgtaaacgtaacacaagaaaggatacagaaaaggaaatggaaggaaagaaaagggcggctatatatgtccgtgtatcaaccgcagaacaaagagat

SEQ ID NO: 22169 - DNA, 260 bp, Unknown
  Description of Unknown: LeftRegion for integrase B9170 sequence
ctaacagtgtgacaagatcaaaggtttgcagcaggttagatatcttttttataagctcctttctatccatatgatgcacctccttaaaaaaaagatgtttccatgctaacacaaagaggaaagcgatataatactttttttaacactttttacatgactaatcatgtaaacgtaacacaagaaaggatacagaaaaggaaatggaaggaaagaaaagggcggctatatatgtccgtgtatcaaccgcagaacaaagagat

SEQ ID NO: 22170 - DNA, 260 bp, Unknown
  Description of Unknown: LeftRegion for integrase B9171 sequence
tagacagcaagaatgtttctgattgaaaccatctgtcgaaaaaaaagaattgtctaactcatactcaattttgagatcttcctgttcggcatacaaattaaacaacaacgaatatattttttctgcgtccatattttcaccgcccctcatcggctagtatggactgctttttttattttcaaacaatcggaggtatttttatgagaaaaaatctgcgagtggcaggatacgctcgtgtttccactgacgaacaaaaaaaa

SEQ ID NO: 22171 - DNA, 260 bp, Unknown; identical to SEQ ID NO: 22134
  Description of Unknown: LeftRegion for integrase B9172 sequence

SEQ ID NO: 22172 - DNA, 260 bp, Unknown
  Description of Unknown: LeftRegion for integrase B9173 sequence
atattttggcattgatacgtcaagctatgatgaagcaacagacctcacactgcgcatcgagtctctgtttcacgatcttcctgttcagcataaagattaaacagcaaagaatagaaactttcagcgtccatatgctcaccgcctttcaatggctagtatggactgctttttttattttcaatcaatcggaggtattttttatgagaaaaaaactgcgagtggcaggatatgctcgtgtttcaacagatgaacaaaaaaaa

SEQ ID NO: 22173 - DNA, 260 bp, Unknown; identical to SEQ ID NO: 22127
  Description of Unknown: LeftRegion for integrase B9174 sequence

SEQ ID NO: 22174 - DNA, 260 bp, Unknown
  Description of Unknown: LeftRegion for integrase B9175 sequence
tgacagcaagaatgtttctgattgaaaccatctgtcgaaaaaaaagagttgtctaactcatattcaattttgagatcttcctgttctgcataaagattaaacagcaaagaatagaaactttcagcgtccatatgctcaccgcctttcaatggctagtatggactgctttttttattttcaatcaatcggaggtatttttgatgaaaaaaaatttacgaattggtggttatgcccgtgtatctactgatgaacaaaagaaa

SEQ ID NO: 22175 - DNA, 260 bp, Unknown
  Description of Unknown: LeftRegion for integrase B9176 sequence
tagacagcaagaatgtttctgattgaaaccatctgtcgaaaaaaaagagttatccaactcatactcaattttgatatcttcttgttcggcataaagattaaacagcaaagaatagaagctttcagcgtccatatgctcaccgcctttcaatggctagtatggactgctttttttattttcaatcaagcggaggtaattttatgagaaaaaaactgcgagtggcaggatatgctcgtgtttcaacagatgaacaaaaaaaa

SEQ ID NO: 22176 - DNA, 260 bp, Unknown
  Description of Unknown: LeftRegion for integrase B9177 sequence
cttgacagcaagaatgtttctgattgaaaccatctgtcgaaaaaaaagagttgtctaactcatactcgattttgagattttcctgttcagcatacaaattaaacaacaacgaatatattttttctgcgtccatattttcaccgccctcatcggctagtatggactgctttttttattttcaaacaagcggaggtatttttatgagaaaaaatctgcgagtggcaggatacgctcgtgtttccactgatgaacaaaagaaa

SEQ ID NO: 22177 - DNA, 260 bp, Unknown
  Description of Unknown: LeftRegion for integrase B9178 sequence
acaatataatacatttttgtcaaacttaaaagccgccctactctaccaaagcaaggcggccaagctctcgatgatacgaaagccccaaacaagcatattgtatcatcccgagcagccaaacgcaagcgaaactactgttctctgctggctgtattttttatactcatttttcatattcttaaaaaggatggtgatgcaatatgattagatgtgctctatatgacagagtttcaaccgacctgcaggcagaatatggccgc

SEQ ID NO: 22178 - DNA, 260 bp, Unknown; identical to SEQ ID NO: 18312
  Description of Unknown: LeftRegion for integrase B9179 sequence

SEQ ID NO: 22179 - DNA, 260 bp, Unknown
  Description of Unknown: LeftRegion for integrase B9180 sequence
ataactgtggtgcagactggaacgaacaggcagtaaagaaagcaaaggaatatttggactattcttctttctctcgttccgggctgattggtcagctgaaatatgaaggctttacaactgagcaggccgaatacggtgtaacccagaacggcctataattgtaatttcccgccacagcgggggcaaaggggtgaaatgcagtgcgggcgtttatctatggccgcttttccagccataagcagcaggaattaagcatagag

SEQ ID NO: 22180 - DNA, 260 bp, Unknown
  Description of Unknown: LeftRegion for integrase B9181 sequence
gacttacgctgtatgtcaggactgtggtcacagatggaaaattaaataaaaaatcccccggcgcttccaacaccgggggacgtacaccccgaagagtatacaatttattacaacaacagtatatcatcttcggacagccaacgcaatacggaactcttgttctgttggctgttatttttatacccaaaaggagggactttatgaagcaaatagcaatctatatccgtgtatctacggatacacaagccaaaaaaggggac

SEQ ID NO: 22181 - DNA, 260 bp, Unknown
  Description of Unknown: LeftRegion for integrase B9182 sequence
aaatgaagtagttcatcatatcaataaaaacaagcaagataatcgtcttgaaaacctccagctgctaactgtccatgagcactgtcagcttcattcaaaagaacgatgggcagctgtaaaagggggtgattaagtgggtattgaacgtataaaaagagctgcgatctatatccgcgtccgaaagcacttcagagcaaatgatgcatggaaagtctctggaagcccagaaagaatacctcgcaagctatgcaaaggatcat

SEQ ID NO: 22182 - DNA, 260 bp, Unknown
  Description of Unknown: LeftRegion for integrase B9183 sequence
gaggaaactttgcaggcgcggaatgatgagctggaacgccatgttgacgcaaaagcagacatgatcgagatcatgcggcgtggagtgcgtatccgcaacggcgtgattgctataatgttttttataattgttcttctcgctgcgtggtgcgtgtacattgattttcattgtatagattacggattttggagggggatttgatgatagcggcattgatgagagtggctttgataagagtggctttgtatatccgcgtctca

SEQ ID NO: 22183 - DNA, 260 bp, Unknown
  Description of Unknown: LeftRegion for integrase B9184 sequence
gaggagactttgcaagcgcggaatgatgagctggaacgccatgttgacgcaaaggccgataccattgaaatcatgcggcgcggcgtgcatatccgaaacggcgtgattgctataatgttcctcatcatcgtttttctcgctgtgtggtgcgtgtacattgattttcattgtatagattacggattttggagggggattcgatgatagcggcattgatgagagaggctttgataaaagcggcattgtatatccgcgtcacg

SEQ ID NO: 22184 - DNA, 260 bp, Unknown; identical to SEQ ID NO: 22182
  Description of Unknown: LeftRegion for integrase B9185 sequence

SEQ ID NO: 22185 - DNA, 260 bp, Unknown; identical to SEQ ID NO: 22182
  Description of Unknown: LeftRegion for integrase B9186 sequence

SEQ ID NO: 22186 - DNA, 260 bp, Unknown; identical to SEQ ID NO: 22182
  Description of Unknown: LeftRegion for integrase B9187 sequence

SEQ ID NO: 22187 - DNA, 260 bp, Unknown
  Description of Unknown: LeftRegion for integrase B9188 sequence
aaaatatggaattaaaaagatatgaaaacatagcattggttaacgaatttgaaaacgcttgttttcgcttggttaactttccggacagtgaagaaataaccgagaaatacgaaaatctcagaaaaaagctaatagacaggcttagttgtatgtagatagcagcacccgccccggaggtacgaaggaaggaagggaaataaatgaaaagagccgctttatacgtgcgagtaagcacgcaagagcagaagaacagcggattg

SEQ ID NO: 22188 - DNA, 260 bp, Unknown
  Description of Unknown: LeftRegion for integrase B9189 sequence
atcatagaacacttgacgccgaccgaggaaactttgcaagcacggaatgatgagttggaacgtcacgttgacgcaaaggccgataccatagagatcatgcggcgcggtgtacgcatccgcaacggcgtgattgctataatgtttgtcattatcgttctgctggctgcatggtgcttgtacattgattggagggggatttgatgatagcggcattgatgagagtggctttgataagagtggctttgtatatccgcgtctcg

SEQ ID NO: 22189 - DNA, 260 bp, Unknown; identical to SEQ ID NO: 22182
  Description of Unknown: LeftRegion for integrase B9190 sequence

SEQ ID NO: 22190 - DNA, 260 bp, Unknown
  Description of Unknown: LeftRegion for integrase B9191 sequence
gaggaaaccttgcaagcgcggaatgatgagctggaacgccatgttgatgcaaaggccgataccatcgagatcatgcggcgcggcgtgcgtatccgcaatggcgtgattttatttttgtttattgcggtggtactgctggccgcatggtgcgtgtatattgatctgcactgcactaactacggtttttggagggggatttgatgatagcggcattgatgagagtggctttgataagagcggcactgtatatccgcgtgtca

SEQ ID NO: 22191 - DNA, 260 bp, Unknown
  Description of Unknown: LeftRegion for integrase B9192 sequence
atttccgaacacctgacaccgaccgaggaaaccttgcaagcgcggaatgatgagctggaacgccatgttgacgcgaaagcggacatgatcgagatcatgcggcgcggcgtccgtatccgcaacggcgtgattgctataatgtttgtcattatcgtcctactggctgcatggtgcttgtacattgattggagggggatttgatgatagcggcattgatgagagaggctttgataagagcggcattgtatatccgcgtcacg

SEQ ID NO: 22192 - DNA, 260 bp, Unknown; identical to SEQ ID NO: 22188
  Description of Unknown: LeftRegion for integrase B9193 sequence

SEQ ID NO: 22193 - DNA, 260 bp, Unknown
  Description of Unknown: LeftRegion for integrase B9194 sequence
atttccgaacacttgacgccgaccgaggaaactttacaagcgcggaatgatgagctggaacgccatgttgacgcaaaggccgataccattgagatcatgcggcgcggtgtccatatccgcaacggcgtgattgctataatgtttgtcattatcgtcctactggctgcatggtgcttgtacattgattggagggggatttgatgatagcggcattgatgagagaggctttgataagagcggcattgtatatccgcgtcacg

SEQ ID NO: 22194 - DNA, 260 bp, Unknown; identical to SEQ ID NO: 22183
  Description of Unknown: LeftRegion for integrase B9195 sequence

SEQ ID NO: 22195 - DNA, 260 bp, Unknown; identical to SEQ ID NO: 22182
  Description of Unknown: LeftRegion for integrase B9196 sequence

SEQ ID NO: 22196 - DNA, 260 bp, Unknown
  Description of Unknown: LeftRegion for integrase B9197 sequence
atcatagaacacttgacgccgaccgaggaaactttgcaagcatggaatgatgagttggaacgtcacgttgacgcaaaggccgataccatagagatcatgcggcgcggtgtacgcatccgcaacggcgtgattgctataatgtttgtcattatcgttctgctggctgcatggtgcttgtacattgattggagggggatttgatgatagcggcattgatgagagtggctttgataagagtggctttgtatatccgcgtctcg

SEQ ID NO: 22197 - DNA, 260 bp, Unknown
  Description of Unknown: LeftRegion for integrase B9198 sequence
gaggaaactttgcaggcgcggaatgatgagctggaacgccatgttgacgcaaaagcagacatgatcgagatcatgcggcgtggagtgcgtatccgcaacggcgtgattgctataatgttttttataattgttcttctcgctgcatggtgcgtgtacattgattttcattgtatagattacggattttggagggggatttgatgatagcggcattgatgagagtggctttgataagagtggctttgtatatccgcgtctca

SEQ ID NO: 22198 - DNA, 260 bp, Unknown; identical to SEQ ID NO: 22182
  Description of Unknown: LeftRegion for integrase B9199 sequence

SEQ ID NO: 22199 - DNA, 260 bp, Unknown
  Description of Unknown: LeftRegion for integrase B9200 sequence
gaggaaactttgcaggcgcggaatgatgagctggaacgccatgttgacgcaaaagcagacatgatcgagatcatgcggcgtggagtgcgtatccgcaacggcgtgattgctataatgttttttataattgttcttctcgctgcgtggtgcgtgtacattgattttcattgtatagattacggattttggagggggatttgatgatagcggcattgatgagagcggctttgataagagtggctttgtatatccgcgtctca

SEQ ID NO: 22200 - DNA, 260 bp, Unknown
  Description of Unknown: LeftRegion for integrase B9201 sequence
tcaatgccgttttagctggttactgtattgtaaaaacacctaaagaatagtaaaattagattgatttaaataataaccactcagtgagtggttattatattacaaaaaaataaaaccgctttaaagcggttcgtgtatagcaattatttctgtgcagcattgctatgcttatattataacagatataaggagtatttaaaatgaaaaatgttagactatatattcgtgtatcgcatgaagagcaggttaaattcggctac

SEQ ID NO: 22201 - DNA, 260 bp, Unknown
  Description of Unknown: LeftRegion for integrase B9202 sequence
gaggaaactttgcaggcgcggaatgatgagctggaacgccatgttgacgcaaaagcagacatgatcgagatcatgcggcgtggagtgcgtatccgaaacggcgtgattgctataatgtttttcatcatcgttcttcttgctgcgtggtgcgtgtacattgattttcattgtatagattacggtttttggagggggatttgatgagagcggcattgatgagagtggctttgataagagtggctttgtatatccgcgtctca

SEQ ID NO: 22202 - DNA, 260 bp, Unknown; identical to SEQ ID NO: 22182
  Description of Unknown: LeftRegion for integrase B9203 sequence

SEQ ID NO: 22203 - DNA, 260 bp, Unknown; identical to SEQ ID NO: 22197
  Description of Unknown: LeftRegion for integrase B9204 sequence

SEQ ID NO: 22204 - DNA, 260 bp, Unknown
  Description of Unknown: LeftRegion for integrase B9205 sequence
attgcttcagtctccacctacatctcggcttcaaatccgtttttaatcaaatatattgctatatttaatccctacataagtcttctggtccttattgtagtatttagtcaataaattaaatacaatttactgcttcattctccattatatagggtgtatattacgcgaatatgctataatacttgcataggaggtaatatatggaagcactactttatacaagagtgtccaaagaagatcaagtaaaattcggtatgtct

SEQ ID NO: 22205 - DNA, 260 bp, Unknown
  Description of Unknown: LeftRegion for integrase B9206 sequence
atttccgaacggttgaccaggaacgaggaaacattgcaggcgcgaaacgatgagctggaacgtcatgttgacgcaaaaactgatatgatcgagatcatgcggcgcggtgtccgtatccgcaacggcgtgattgccataatgtttgtcatcattgttatgcttgctgtgtggtgcgtgtacattgattggagggggatttgatgatagcggcattgatgagagtggctttgataagagtggcattgtatatccgcgtctca

SEQ ID NO: 22206 - DNA, 260 bp, Unknown; identical to SEQ ID NO: 22183
  Description of Unknown: LeftRegion for integrase B9207 sequence

SEQ ID NO: 22207 - DNA, 260 bp, Unknown
  Description of Unknown: LeftRegion for integrase B9208 sequence
ctcgaggaaagtgaaagaattgagaagtaattaagccctaataaataaaacaaaacccccactaatgtgagggtaatgtataagggctgtaatgatacaacctgactcgcactcaaattgtatcatctcagcccaaagatttcaagtttttgggtatttttatacccttttttaccaacaatctgaatgaggtaaattaaatgagatgtgcaatttatataagagtatcatcggcggaacaacgccgagaaggatattca

SEQ ID NO: 22208 - DNA, 260 bp, Unknown
  Description of Unknown: LeftRegion for integrase B9209 sequence
attctatcaaaataaacgattagcctataaaaatattgaatattaacataaaacaaaacccccactatgtgagggtaatgtatagggctgtatgatacaacctgactcgcactcaaattgtatcatctcagcccaaagatttcaagtttttgggtatttttatacccttttttaccaacaatctgaatgaggtaaattaaatgagatgtgcaatttatataagagtatcatcggcggaacaacgccgagaaggatattca

SEQ ID NO: 22209 - DNA, 260 bp, Unknown
  Description of Unknown: LeftRegion for integrase B9210 sequence
gaggaaactttgcaggcgcggaatgatgagctggaacgccatgttgacgcaaaagcagacatgatcgagatcatgcggcgtggagtgcgtatccgcaacggcgtgattgctataatgttttttataattgttcttctcgctgcgtggtgcgtgtacattgattttcattgtatagattacggattttggagggggatttgatgatagcggcattgatgagagtggctttgataagagttgctttgtatatccgcgtctca

SEQ ID NO: 22210 - DNA, 260 bp, Unknown
  Description of Unknown: LeftRegion for integrase B9211 sequence
tcaatgccgttttagctggttactgtattgtaaaaacacctaaagaatagtaaaatcagattgatttaaataataaccactcagtgagtggttattatattacaaaaaaataaaaccgctttaaagcggttcgtgtatagcaattatttctgtgcagcattgctatgcttatattataacagatataaggagtatttaaaatgaaaaatgttagactatatattcgtgtatcacatgaagagcaggttaaattcggctac

SEQ ID NO: 22211 - DNA, 260 bp, Unknown
  Description of Unknown: LeftRegion for integrase B9212 sequence
gaggaaactttgcaggcgcggaatgatgagctggaacgccatgttgacgcaaaagcagacatgatcgagatcatgcggcgcggcgtccgtatccgcaacggcgtgattgctataatgttttttataattgttcttctcgctgcgtggtgcgtgtacattgattttcattgtatagattacggattttggagggggatttgatgatagcggcattgatgagagtggctttgataagagtggctttgtatatccgcgtctca

SEQ ID NO: 22212 - DNA, 260 bp, Unknown; identical to SEQ ID NO: 22205
  Description of Unknown: LeftRegion for integrase B9213 sequence

SEQ ID NO: 22213 - DNA, 260 bp, Unknown; identical to SEQ ID NO: 22182
  Description of Unknown: LeftRegion for integrase B9214 sequence

SEQ ID NO: 22214 - DNA, 260 bp, Unknown; identical to SEQ ID NO: 22182
  Description of Unknown: LeftRegion for integrase B9215 sequence

SEQ ID NO: 22215 - DNA, 260 bp, Unknown
  Description of Unknown: LeftRegion for integrase B9216 sequence
catcaatattaattttaaaaataaaagctcctgtgctggaacacaagagcttttaccacgatacttacataagcagtgcctatgatataataccgccctgaacaagctatattatatcatttgaaacaccgcttttgcaagtaggtgttatttttgtacttaaaattgttgcactggtgcaacttaaggaggaatgatatatgaaacgcgctgctatttatgttagagtatctacaaaagaacaaaaagaaaagggctta

SEQ ID NO: 22216 - DNA, 260 bp, Unknown
  Description of Unknown: LeftRegion for integrase B9217 sequence
aaggatgggctggaacaccgccttgaaaataagcggctgaccatcggcctgatggagacggagctgaacaacctacgtcattccgtaaaactatacaggtggatcatactcggtttgtcactattgatcgtcggtctcttcgcctggtgcgtgtgggtagatattcgctgcgccaattacggattttggaggggacaatattgaatgtcttacgcgcagcgctttatccgcgcgtcagtacggaagagcaggcgaagttt

SEQ ID NO: 22217 - DNA, 260 bp, Unknown
  Description of Unknown: LeftRegion for integrase B9218 sequence
ttgcaagtattattcttccttattgctttataaaaaattactttttgatggtgaaatttcagagcaagaattcgataaaattgaaaatcgtttagcaaagaaatattgtatcaaaattgatagtattattaggtcaaatgagttgataaattcctcttttagagcaatatatgtaggtgcaaaaaaggaggtaaaaacgaatgatagtaaatgaaatagtccctcaagagttagcgaataaaaggttgagagtttgtgcc

SEQ ID NO: 22218 - DNA, 260 bp, Unknown
  Description of Unknown: LeftRegion for integrase B9219 sequence
tcttgcatacaggtcgtttacgttgtataatcagcctataaatttaaaaaatccggcgcaaaacgcaccggattcatggttacttatcaaccgcaggaacggctaataatcaccgcaacaattagattatagcatacatcctgtcgattgtatagggtgtattttttataccctttttaaacagaaaaggaggctgacaaatgaaaaagagagttgcgctttatgttcgcgtgagtacgcaggaacagaaaaaacatggt

SEQ ID NO: 22219 - DNA, 260 bp, Unknown
  Description of Unknown: LeftRegion for integrase B9220 sequence
tattgcatacaggtcgtttacgttgtataatcagcctataaatttaaaaaatccggcgcaaaacgcaccggattcatggttacttatcaaccgcaggaacggctaataatcaccgcaacaattagattatagcatacatcctgtcgattgtatagggtgtattttttataccctttttaaacagaaaaggaggctaacaaatgaaaaagagagttgcgctttatgttcgcgtaagtacgcaggaacagaaaaaacatggt

SEQ ID NO: 22220 - DNA, 260 bp, Unknown
  Description of Unknown: LeftRegion for integrase B9221 sequence
cgagatggttttataataaataaaagctcctgtgctggaacacaagagcctttacctgcgacttacaattaagctgtgctcaaatgatataatcgccctaagcaagccatattatatcattctaaacaccgcttttgcaagtaggtgttatttttgtacttaaaaatgttgcactggtgcaacttaaggaggaatgatatatgaaacgtgctgctatttatgttagagtatctacaaaagaacaaaaagaaaagggctta

SEQ ID NO: 22221 - DNA, 260 bp, Unknown
  Description of Unknown: LeftRegion for integrase B9222 sequence
aaggacgggctgaaacaccgccttgaaaataagcggcagaccattgacgtgcaaaaccataccattcacgtcatggaaaagggcctgcggattcggaactgcgtgattctggttatgggcatagcaatcgtcctgctgctgtgctggtgcgtatttatggatatgcacgctttgaatatcggcttttggaggggacaatattgaatgttttacgcgcagcgctttatccgcgcgtcagtacggaagagcaggcgaagttt

SEQ ID NO: 22222 - DNA, 260 bp, Unknown
  Description of Unknown: LeftRegion for integrase B9223 sequence
gcatgcacccaaacattgggataatccagcaatgagggagaacgaaaaggttagccctcaaaaaaacaaaaatgcccccggtgtaccgagcaccgagggcattacgcagatatcggggagtaaaaagggagaacccaatttggaggaatctgcacaattattatagcgcaggccctccataaaatcaaggaggaataaatatgcgtgtggcgctgtatgcgcgagtgtccacagaggagcaggccatacacggcttgtca

SEQ ID NO: 22223 - DNA, 260 bp, Unknown
  Description of Unknown: LeftRegion for integrase B9224 sequence
cgcatatatgtacaatttattattatgatgatggcgccgatagtatgtttttatataaagacaatttatatattattttcacagatgcaagttcaacggataaacgaactctcgtaaaagaaactttagacactatacgccttaattaaaaataaaaataataatttgtttttaaacgaatcataaaaaggggtattcatatgagatgtgcaatatatataagagtatcatcagatgaacaacgaagaaaagggttttca

SEQ ID NO: 22224 - DNA, 260 bp, Unknown
  Description of Unknown: LeftRegion for integrase B9225 sequence
atttatatgctcataggcgtatgcagtattcttttgtgcgccgttgtatggtacgtcatatttgacatccaggtagagaccgccggtattttccgctcggctgggacaagcatttttgctggcgtcctcgccctgatactgaacgcctccgtcgcaaccatcatttacgccttcaaaagcattcacaaggggaaaaagaaatgagagttgcactttatgtccgcgtctccacggaagaacaagccgttcacggcctttcc

SEQ ID NO: 22225 - DNA, 260 bp, Unknown
  Description of Unknown: LeftRegion for integrase B9226 sequence
aagatacagataagctagtgacaaaaggttcgtactttttaacaattagctataacaaataaaaaaacaccccctgcgccagcagagagtgcgtggtatcagcgccaactgacaccgggtatagaaaaaatgaccaccacgtcataactttttctatacctctattttagcactttttaaaatgaatggaggttttatttatggaaatgaaaaacgcccgtttgtacgctcgtgtatctactgatgagcaaagaaaaaaa

SEQ ID NO: 22226 - DNA, 260 bp, Unknown
  Description of Unknown: LeftRegion for integrase B9227 sequence
aaagatgggctggaacaccgccttgaaaataagcggaagaccatcggcctgcaaaaccataccattcacgtcctggaaaagggtctgcggattcggaactgcgtgattttgattatgggcatagcaatcggcctgctgttgtgctggtgcgtatttgtggatatgcacgccatgaatatcggcttttggaggggataatattgaatgtcttacgcgcagcgctttatccgcgcgtcagtacggaagaacaggcgaagttt

SEQ ID NO: 22227 - DNA, 260 bp, Unknown
  Description of Unknown: LeftRegion for integrase B9228 sequence
aaggacgggctgaaacaccgccttgaaaataagcggcagaccattgacgtgcaaaaccataccattcacgtcatggaaaagggcctgcggattcggaactgcgtgattctggttatgggcatagcaatcgtcctgctgctgtgctggtgcgtatttatggatatgcacgctttgaatatcggtttttggaggggataatattgaatgttttacgcgcagcgctttatccgcgcgtcagtacggaagagcaggcgaagttt

SEQ ID NO: 22228 - DNA, 260 bp, Unknown
  Description of Unknown: LeftRegion for integrase B9229 sequence
tagatttttacattacttaaaataaaagcccctgtgctaccaacacaagagcttttaccacgatacttacataagcagtgcttatgatacataccgccctgaacaagcacattgtatcatttctaacaccgcttttgcaagtaggtgttatttttgtacttaaaattgttgcactggtgcaacttaaggaggaatgatatatgaaacgcgctgctatttatgttagagtatctacaaaagaacaaaaagaaaagggctta

SEQ ID NO: 22229 - DNA, 260 bp, Unknown
  Description of Unknown: LeftRegion for integrase B9230 sequence
tcttgcatacaggtcgtttacgttgtataatcagcctataaatttaaaaaatccggcgcaaaacgcaccggattcatggttacttatcaaccgcaggaacggctaataatcaccgcaacaattagattatagcatacatcctgtcgattgtatagggtgtattttttataccctttttaaacagaaaaggaggctaacaaatgaaaaagagagttgcgctttatgttcgcgtgagcacgcaggaacagaaaaaacatggt

SEQ ID NO: 22230 - DNA, 260 bp, Unknown
  Description of Unknown: LeftRegion for integrase B9231 sequence
catcaatattaattttaaaaataaaagctcctgtgctggaacacaagagcttttaccacgatacttacataggcagtgcctatgatataatatcgccctagacaagctatattatatcattctagacaccgcttttgcaagtaggtgttatttttgtacttaaaaatgttgcactggtgcaacttaaggaggaatgatatatgaaacgcgctgctatttatgttagagtatctacaaaagaacaaaaagaaaagggctta

SEQ ID NO: 22231 - DNA, 260 bp, Unknown
  Description of Unknown: LeftRegion for integrase B9232 sequence
catcaatattaattttaaaaataaaagctcctgtgctggaacacaagagcttttaccacgatacttacataagcagtgcctatgatataataccgccctgaacaagctatattatatcatttgaaacaccgcttttgcaagtaggtgttatttttgtacttaaaaatgttgcactggtgcaacttaaggaggaatgatatatgaaacgcgctgctatttatgttagagtatctacaaaagaacaaaaagaaaagggctta

SEQ ID NO: 22232 - DNA, 260 bp, Unknown
  Description of Unknown: LeftRegion for integrase B9233 sequence
tagcccagtgtcagactatcaatgtcacatatagctacctgaagtccttgaatcactccaaatacatacatttcattattaatataatttcgtttagcaatagtacaaaacattttattttccatactcatgccctccttttcataatataccttgaatttcaagcgaatatgctataatacttgcataggaggaaatatatggaagcactactttatacaagagtgtccaaagaagatcaagtaaaattcggtatgtct

SEQ ID NO: 22233 - DNA, 260 bp, Unknown
  Description of Unknown: LeftRegion for integrase B9234 sequence
tgaaagttattattcctcactagcagtaattaaatccatgctaaaaataaatcttatagatattgatgaatataaaaaatctgaagcattaattgcaaaaagacattgtatcaaagatgactcgatttaccgcactaattacttgataaatcctgggttcagagcgattaatgtaacgaaccataaggaggtaaaaaataatggaaatgaagataacgaaaataagcacgttaccacaattagatagaaagaaaagagtg

SEQ ID NO: 22234 - DNA, 260 bp, Unknown
  Description of Unknown: LeftRegion for integrase B9235 sequence
cttctgctggtgattgtcggctatgtggtgtttgactatagcgtgccatatgccggtctgattcaaggcgggcaggccagcacggcggcatggatcgttattgtcctgctggcggtcggcgtcggtgtaattgcgtcggcgttcttgagcgcgttaagatatgcggagaatatagcatccaaagaaagggagaacgaaacatgaaaagcaacgtgcttcgtgcggcactatatccgcgagtgtccacggaagaacaagcc

SEQ ID NO: 22235 - DNA, 260 bp, Unknown
  Description of Unknown: LeftRegion for integrase B9236 sequence
tggcctatatcgtgtgggatctctcgcaccccgggcaaggcattttgcgataaaaaaagcccccggtgtccgagcaccgagggcttttttgcagaggatcagggagataccaaatagacaccagatcaacggaatcaatttggaggaatctgcgtatatattataccgcagttcatccgcgaaatcaaggaggaattgcaatgcgtgtagcattatatgctagagtgtcaacagaagagcaggctatacacggtttgtcg

SEQ ID NO: 22236 - DNA, 260 bp, Unknown
  Description of Unknown: LeftRegion for integrase B9237 sequence
gctgttatcgtgggatatatcttttttgactaccacattccccataaggggcttattcagggcgggcaagctggtgtatttgcatggattgtctttttgcttcttgccgccggtattggcatttttgccgctattttgatgatgtatttgcgctatgcaaagaagtatacattgtcgccagataagggaggagatgaacaatgagtgtagtattgcgggcagcattatacccgcgtgtgtccacagaagaacagaaaaag

SEQ ID NO: 22237 - DNA, 260 bp, Unknown
  Description of Unknown: LeftRegion for integrase B9238 sequence
gctgttatcgtgggatatatcttttttgactaccgtatcccccaccaggggcttattcagggcggagaggccagcatattcgcatggatcgtctttttgctgcttgcagtcggtattggcttttttgccgctgttttgatgatgtattttcgctatgcaaaaaagtatacattgtcgccagataagggaggagatgaacaatgaatgtagtattgcgggcagcattatacccgcgtgtgtccacagaagaacagaaaaag

SEQ ID NO: 22238 - DNA, 260 bp, Unknown
  Description of Unknown: LeftRegion for integrase B9239 sequence
gctgttatcgtgggatatatcttttttgactaccgtatcccccaccaggggcttattcagggcggagaggccagtatattcgcatggattgtctttttgctgcttgcagtcggtattggcttttttgccgctattttgatgatgtattttcgctatgcaaaaaagtatacattgtcgccagataagggaggagataaacaatgagtgtagtattgcgggcagcattatacccgcgtgtgtccacagaagagcagaaaaag

SEQ ID NO: 22239 - DNA, 260 bp, Unknown
  Description of Unknown: LeftRegion for integrase B9240 sequence
gctgttatcgtgggatatatcttttttgactaccgtatcccccaccaggggcttattcagggtggagaggccagcatattcgcgtggatcgtctttttgctgcttgcggtcggtattggcttttttgccgctattttgatgatgtattttcgctatgcaaaaaagtatacattgtcgccagataagggaggagataaacaatgaatgtagtattgcgggcagcattatacccgcgtgtgtccacggaagaacagaaaaag

SEQ ID NO: 22240 - DNA, 260 bp, Unknown
  Description of Unknown: LeftRegion for integrase B9241 sequence
gctgttatcgtgggatatatcttttttgactaccgtattccccaccaggggcttattcagggtggagaggccagcatattcgcatggatcgtctttttgctgcttgccgtcggcatcggcatttttgccgctattttgatgatgtatttgcgctatgcaaaaaagtatacattgtcgccagataagggaggagataaacaatgagtgtagtattgcgggcagcattatacccgcgtgtgtccacagaagagcagaaaaag

SEQ ID NO: 22241 - DNA, 260 bp, Unknown
  Description of Unknown: LeftRegion for integrase B9242 sequence
gaatttcggtatcagcacttcacaactggtttcaccttaatcacacacctagcaagagctctatcaagaaactatgcatatattttaatgttgatagtagttactttttaaaagaaaatcccgattaaggctatctaatgagtccgggccccgcatcaacaaactgaggcggggcctgtttttactccggaggcatctatatgaacactaacaagcgagcagccctttatatccgtgtaagtacagaagaacaagccagg

SEQ ID NO: 22242 - DNA, 260 bp, Unknown
  Description of Unknown: LeftRegion for integrase B9243 sequence
tatagaacgctattacatgtcgcttgcacccatccaggctatggaaagaaatggtctcatattgcattctgaatttctcaaagcggaggattttttggctcaaaaatataacctgaaaaaacacaatatttataggtcaaatgacttgataaaaaccgagaaaagagtgatagatatactaccaaaaaaggaggcgcaaaatgatacaaaaaaagataacgacaatagacgctgcaccgagattagaaagactgattaac

SEQ ID NO: 22243 - DNA, 260 bp, Unknown
  Description of Unknown: LeftRegion for integrase B9244 sequence
gctgttatcgtgggatatatcttttttgactaccacattccccataaggggcttattcagggcgggcaagcgggtgtattcgcatggatcgtctttttgcttcttgccgccggcatcggcatttttgccgctattttgatgatgtatttgcgctatgcaaaaaagtatacattgtcgccagataagggaggagatgaacaatgagtgtagtattgcgggcagcattatacccgcgtgtgtccacggaagaacaggcaaag

SEQ ID NO: 22244 - DNA, 260 bp, Unknown
  Description of Unknown: LeftRegion for integrase B9245 sequence
ggctgttatcgtgggctatatcttttttgactaccgtatcccccaccaggggcttattcagggcggagaggccagcatattcgcatggatcgtctttttgctgcttgcagtcggtattggctttttgccgctattttgatgatgtattttcgctatgcaaaaaagtatacattgtcgccagataagggaggagataaacaatgagtgtagtattgcgggcagcattatacccgcgtgtgtccacagaagagcagaaaaag

SEQ ID NO: 22245 - DNA, 260 bp, Unknown
  Description of Unknown: LeftRegion for integrase B9246 sequence
gctgttatcgtgggatatatcttttttgactaccgtatcccccaccaggggcttattcagggcggagaggccagcatattcgcatggatcgtctttttgctgcttgcagtcggtattggcttttttgccgctattttgatgatgtattttcgctatgcaaaaaaatatacattgtcgccagataagggaggagatgaacaatgagtgtagtattacgggcagcattatacccgcgtgtgtccacggaagagcaggcaaag

SEQ ID NO: 22246 - DNA, 260 bp, Unknown
  Description of Unknown: LeftRegion for integrase B9247 sequence
gctgttatcgtaggatatatcttttttgactaccgtatcccccaccaggggcttattcagggcggagaggccagcatattcgcatggattgtctttttgctgcttgcagtcggtattggcttttttgccgctattttgatgatgtattttcgctatgcaaaaaagtatacattgtcgccagataagggaggagataaacaatgagcgtagtattgcgggcagcattatacccgcgtgtgtccacggaagaacagaaaaag

SEQ ID NO: 22247 - DNA, 260 bp, Unknown
  Description of Unknown: LeftRegion for integrase B9248 sequence
gctgttattgtgggatatatcttttttgactaccgtatcccccaccaggggcttattcagggcggagaggccagcatattcgcatggatcgtttttttgcttcttgcagtcggtattggcttttttgccgctattttgatgatgtattttcgctatgcaaaaaagtatacattgtcgccagataagggaggagataaacaatgaatgtagtattgcgggcagcattatacccgcgtgtgtccacggaagaacagaaaaag

SEQ ID NO: 22248 - DNA, 260 bp, Unknown
  Description of Unknown: LeftRegion for integrase B9249 sequence
cctttcaaataattactaattgctgcttctgttaatccagtttcaatagctaattctttttgagttaatttcctttctactaatttttctctaaaatctttcgcaaattcttttttattatacatataatttcactccttttcataatataccttgaatttcaagcgaatatgctataatacttgcgtaggaggtaatatatggaagcactactttatacaagagtgtccaaagaagatcaagtaaaattcggtatgtct

SEQ ID NO: 22249 - DNA, 260 bp, Unknown; identical to SEQ ID NO: 22247
  Description of Unknown: LeftRegion for integrase B9250 sequence

SEQ ID NO: 22250 - DNA, 260 bp, Unknown; identical to SEQ ID NO: 22238
  Description of Unknown: LeftRegion for integrase B9251 sequence

SEQ ID NO: 22251 - DNA, 260 bp, Unknown
  Description of Unknown: LeftRegion for integrase B9252 sequence
ctgatgaacacgaggtatttcattccacagaaggcaatgagtctatttctatttatcaatgtaaacgttgtaagcaactcgtgtttgctaaattccccgctataaattcaaaagaataaccgtacacaactcttttaatgagtccaagccccgcatcaacaaactgaggcggggcctgtttttactccggaggcatctatatgaacactaacaagcgagcagctctttatatccgtgtaagtacagaagaacaagccagg

SEQ ID NO: 22252 - DNA, 260 bp, Unknown
  Description of Unknown: LeftRegion for integrase B9253 sequence
gctgttatcgtgggatatatcttttttgactaccgtatcccccaccaggggcttattcagggcggagaggccagcatattcgcatggatcgtctttttgctgcttgcagtcggtattggcttttttgccgctattttgatgatgtattttcgctatgcaaaaaagtatacattgtcgccagataagggaggagataaacaatgagtgtagtattgcgggcagcattatacccgcgtgtgtccacagaagagcagaaaaag

SEQ ID NO: 22253 - DNA, 260 bp, Unknown
  Description of Unknown: LeftRegion for integrase B9254 sequence
gctgttatcgtgggatatatcttttttgactaccgtattccccaccaggggcttattcagggtggagaggccagcatattcgcatggatcatctttttgcttcttgccgtcggcatcggcatttttgccgctattttgatgatgtatttgcgctatgcaaaaaagtatacattgtcgccagataagggaggagataaacaatgattgcagtattgcgggcagcattatacccgcgtgtgtccacggaagaacagaaaaag

SEQ ID NO: 22254 - DNA, 260 bp, Unknown
  Description of Unknown: LeftRegion for integrase B9255 sequence
gctgttatcgtgggatatatcttttttgactaccacattccccataaggggcttattcagggcgggcaagctggtgtattcgcatggatcgtcttttcgcttcttgccgccggcatcggcatttttgccgctattttgatgatgtatttgcgctatgcaaaaaagtatacattgtcgccagataagggaggagatgaacaatgattgcagtattgcgggcagcattatacccgcgtgtgtccacagaagaacaggcaaag

SEQ ID NO: 22255 - DNA, 260 bp, Unknown
  Description of Unknown: LeftRegion for integrase B9256 sequence
tacgcgaaaaaaagagaagaacataatgctgttttctatctcaggtccatacgtccacacataagtgttgatagatcacatgctacttaaatctagatgcattattgatcataacattatgccagctagaactgtttcttctcataatataaattgattcttacgcgaatatgctataatacttgcgtaggaggtaatatatggaagcactactttatacaagagtgtccaaagaagatcaagtaaaattcggtatgtct

SEQ ID NO: 22256 - DNA, 260 bp, Unknown
  Description of Unknown: LeftRegion for integrase B9257 sequence
gctgttatcgtgggatatatcttttttgactaccgtatcccacaccaggggcttattcagggcggagaggccagcatattcgcatggatcgtctttttgctgcttgcagtcggtattggcttttttgccgccattttgatgatgtatttgcgatatgcaaaaaagtatacattgtcgccagataaggaaggagataaacaatgaatgtagtattgcgggcagcattatacccgcgtgtgtccacggaagaacagaaaaag

SEQ ID NO: 22257 - DNA, 260 bp, Unknown
  Description of Unknown: LeftRegion for integrase B9258 sequence
gctgttatcgtgggatatatcttttttgactaccgtatcccccaccagggtcttattcagggcggagaggccagcatattcgcatggatcgtctttttgctgcttgcggtcggtattggcttttttgccgctattttgatgatgtattttcgctatgcaaaaaagtatacattgtcgccagataagggaggagatgaacaatgaatgtagtattgcgggcagcattatacccgcgtgtgtccacagaagaacagaaaaag

SEQ ID NO: 22258 - DNA, 260 bp, Unknown
  Description of Unknown: LeftRegion for integrase B9259 sequence
tctgttatcgtgggatatatcttttttgactaccacattccccataaggggcttattcagggcgggcaagcgggtgtattcgcatggatcgtctttttgcttcttgccgccggtatcggcatttttgccgctattttgatgatgtatttgcgctatgcaaagaagtatacattgtcgccagataagggaggagatgaacaatgagtgtagtattgcgggcagcattatacccgcgtgtgtccacagaagaacaggcaaag

SEQ ID NO: 22259 - DNA, 260 bp, Unknown
  Description of Unknown: LeftRegion for integrase B9260 sequence
gctgttatcgtgggatatatcttttttgactaccgtatcccccaccaggggcttattcagggcggagaggccagcatattcgcatggattgtctttttgctgcttgcagtcggtattggcttttttgccgctattttgatgatgtattttcgctatgcaaaaaagtatacattgtcgccagataagggaggagatgaacaatgaatgtagtattgcgggcagcattatacccgcgtgtgtccacggaagaacagaaaaag

SEQ ID NO: 22260 - DNA, 260 bp, Unknown
  Description of Unknown: LeftRegion for integrase B9261 sequence
gctgttattgtgggatatatcttttttgactaccatattccccataaggggcttattcagggcgggcaagcgggtgtattcgcatggattgtctttttgcttcttgccgccggtatcggcatttttgccgctattttgatgatgtatttgcgctatgaaaaaaagtatacattgtcgccagataagggaggagatgaacaatgagtgtagtattgcgggcagcattatacccgcgtgtgtccacagaagaacagaaaaag

SEQ ID NO: 22261 - DNA, 260 bp, Unknown
  Description of Unknown: LeftRegion for integrase B9262 sequence
gctgttatcgtgggatatatcttttttgactaccgtatcccccaccaggggcttattcagggcggagaggccagtatattcgcgtggattgtctttttgctgcttgcggtcggtattggcttttttgccgctattttgatgatgtattttcgctatgcaaaaaagtatacattgtcgccagataagggaggagatgaacaatgagtgtagtattgcgggcagcattatacccgcgtgtgtccacagaagaacaggcaaag

SEQ ID NO: 22262 - DNA, 260 bp, Unknown
  Description of Unknown: LeftRegion for integrase B9263 sequence
gctgttatcgtgggatatatcttttttgactaccgtatcccccaccaggggcttattcagggcggagaggccagcatattcgcatggatcgtttttttgcttcttgcagtcggtattggcttttttgccgctattttgatgatgtattttcgctatgcaaaaaagtatacattgtcgccagataagggaggagataaacaatgattgcagtattgcgggcagcattatacccgcgtgtttccacggaagaacagaaaaag

SEQ ID NO: 22263 - DNA, 260 bp, Unknown
  Description of Unknown: LeftRegion for integrase B9264 sequence
gctgttatcgtgggatatatcttttttgactaccgtgtcccccaccaagggcttattcagggcgggcaagcgggtgtatttgcatggatcgtctttttgcttcttgccgccggtatcggcatttttgccgctattttgatgatgtatttgcgctatgcaaaaaagtatacattgttgccagataagggagaagatgaacaatgagtgtagtattgcgggcagcattatacccgcgtgtgtccacggaagagcaggcaaag

SEQ ID NO: 22264 - DNA, 260 bp, Unknown
  Description of Unknown: LeftRegion for integrase B9265 sequence
gctgttatcgtgggatatatcttttttgactaccgtatcccccaccaagggcttattcagggcggagaggccagcatattcgcatggattgtctttttgcttcttgcagtcggtattggcttttttgccgctattttgatgatgtattttcgctatgcaaaaaagtatacattgtcgccagataagggaggagatgaacaatgaatgtagtattgcgggcagcattatacccgcgtgtgtccacagaagaacagaaaaag

SEQ ID NO: 22265 - DNA, 260 bp, Unknown
  Description of Unknown: LeftRegion for integrase B9266 sequence
ggctgttatcgtgggctatatcttttttgactaccgtatcccccaccaggggcttattcagggcggagaggccagcatattcgcatggatcgtctttttgctgcttgcagtcggtattggcttttttgccgctattttgatgatgtattttcgctatgcaaaaagtatacattgtcgccagataagggaggagataaacaatgagtgtagtattgcgggcagcattatacccgcgtgtgtccacagaagagcagaaaaag

SEQ ID NO: 22266 - DNA, 260 bp, Unknown
  Description of Unknown: LeftRegion for integrase B9267 sequence
gctgttatcgtgggatatatcttttttgactaccgtatcccccaccaggggcttattcagggcggagaggccagcatattcgcatggattgtctttttgctgcttgcggtcggtattggcttttttgccgctattttgatgatgtattttcgctatgcaaaaaagtatacattgtcgccagataagggaggagataaacaatgaatgtagtattgcgggcagcattatacccgcgtgtgtccacggaagaacagaaaaag

SEQ ID NO: 22267 - DNA, 260 bp, Unknown
  Description of Unknown: LeftRegion for integrase B9268 sequence
gctgttatcgtgggatatatcttttttgactaccgtatcccccaccaggggcttattcagggcggagaggccagcatattcgcatggatcgtttttttgcttcttgccgtcggcatcggcttttttgccgctattttgatgatgtattttcgctatgcaaaaaagtatacattgtcgccagataagggaggagataaacaatgagtgtagtattgcgggcagcattatacccgcgtgtgtccacagaagaacaaaaaaag

SEQ ID NO: 22268 - DNA, 260 bp, Unknown
  Description of Unknown: LeftRegion for integrase B9269 sequence
gcacaccctgcattggcatgaacgctgacgcagggtgtttctctgtctgtgggaaatgcacccacccctagtgtaatcctcaaaaagtatagtggaaaatcaaaaagtatggggcaaattcagattgtatcaaagacggctattacatagactaagacatcagcgccaccaacaccaaacatcgcgccggtttcaatcagatgattgccgatgccctggcgggaaaggttgaccttatcattacaaaatcggtcagccga

SEQ ID NO: 22269 - DNA, 260 bp, Unknown
  Description of Unknown: LeftRegion for integrase B9270 sequence
gctgttattgtgggatatatcttttttgactaccgtatcccccaccaggggcttattcagggcggagaggccagcatattcgcatggattgtctttttgctgcttgcggtcggtattggcttttttgccgctattttgatgatgtattttcgctatgcaaaaaagtatacattgtcgccagataagggaggagatgaacaatgagtgtagtattgcgggcagcattatacccgcgtgtgtccacggaagaacagaaaaag

SEQ ID NO: 22270 - DNA, 260 bp, Unknown; identical to SEQ ID NO: 22268
  Description of Unknown: LeftRegion for integrase B9271 sequence

SEQ ID NO: 22271 - DNA, 260 bp, Unknown
  Description of Unknown: LeftRegion for integrase B9272 sequence
gctgttatcgtgggatatatcttttttgactaccgtatcccccaccaggggcttattcagggcggagaggccagcatattcgcatggattgtctttttgctgcttgcagtcggtattggcttttttgccgctattttgatgatgtattttcgctatgcaaaaaagtatacattgtcgccagataagggaggagataaacaatgagtgtagtattgcgggcagcattatacccgcgtgtgtccacagaagaacagaaaaag

SEQ ID NO: 22272 - DNA, 260 bp, Unknown
  Description of Unknown: LeftRegion for integrase B9273 sequence
gctgttatcgtgggatatatcttttttgactaccgtatcccacaccaggggcttattcagggcggagaggccagcatattcgcatggatcgtctttttgctgcttgcagtcggtattggcttttttgccgctattttgatgatgtattttcgctatgcaaaaaagtatacattgtcgccagataagggaggagatgaacaatgaatgtagtattgcgggcagcattatacccgcgtgtgtccacagaagaacagaaaaag

SEQ ID NO: 22273 - DNA, 260 bp, Unknown
  Description of Unknown: LeftRegion for integrase B9274 sequence
gctgttatcgtgggatatatcttttttgactaccacattccccataaggggcttattcagggcgggcaagcgggtgtattcgcatggatcgtctttttgcttcttgccgccggcatcggcatttttgccgctattttgatgatgtatttgcgctatgcaaaaaagtatacattgtcgccagataagggaggagatgaacaatgagtgtagtattgcgggcagcattatacccgcgtgtgtccacggaagaacagaaaaag

SEQ ID NO: 22274 - DNA, 260 bp, Unknown
  Description of Unknown: LeftRegion for integrase B9275 sequence
gctgttatcgtgggatatatcttttttgactaccgtatcccccaccaagggcttattcagggcggagaggccagcatatttgcatggattgtctttttgctgcttgcggtcggtattggcttttttgccgctattttgatgatgtattttcgctatgcaaaaaagtatacattgtcgccagataagggaggagataaacaatgaatgtagtattgcgggcagcattatacccgcgtgtgtccacggaagaacagaaaaag

SEQ ID NO: 22275 - DNA, 260 bp, Unknown
  Description of Unknown: LeftRegion for integrase B9276 sequence
agtacctccggtaatattattgtaattgattcactaagaaaatgtcaaataaaaaaatcctccagcactggcaatgctgaaggttgttaaagaggtgtacggcaatacaccttgtacataaaaagtatgagcactagtcatataactttttatgtactcattttatcaaatttaaatagaaaatgaaaggatgggtacttatgaaaaaagctagactttatgcaagagtatcaactgcagaacaaaagaggaagaatata

SEQ ID NO: 22276 - DNA, 260 bp, Unknown
  Description of Unknown: LeftRegion for integrase B9277 sequence
gctgttattgtgggatatatcttttttgactaccacattccccataaggggcttattcagggcgggcaagcgggtgtattcgcatggatcgtctttttgcttcttgccgccggcatcggcatttttgccgctattttgatgatgtatttgcgctatgcaaaaaagtatacattgtcgccagataagggaggagatgaacaatgagtgtagtattgcgggcagcattatacccgcgtgtgtccacagaagaacagaaaaag

SEQ ID NO: 22277 - DNA, 260 bp, Unknown
  Description of Unknown: LeftRegion for integrase B9278 sequence
tacgcgaaaaaaagagaagaacataatgctgttttctatctcaggtccatacgtccacacataagtgttgatagatcctatgctacttaaatctagatgcattattgatcataacattatgccagctagaactgtttcttctcataatataaattgattcttacgcgaatatgctataatacttgcgtaggaggtaatatatggaagcactactttatacaagagtgtccaaagaagatcaagtaaaattcggtatgtct

SEQ ID NO: 22278 - DNA, 260 bp, Unknown
  Description of Unknown: LeftRegion for integrase B9279 sequence
agaatttcggtatcagcactcaacaactggtttcatcttaaacgcacacctagaaagagctctatcaataaactatgcaaatattttaatgttgatagtagttactttttaaaagaaaatcccgattaagactatctaatgagtctgagccccgcatcaacaactgaggcggggtttgtttttactccggaggcatctatatgaacactaacaagcgagcagccctttatatccgtgtaagtacagaagagcaagccagg

SEQ ID NO: 22279 - DNA, 260 bp, Unknown
  Description of Unknown: LeftRegion for integrase B9280 sequence
gctattatcgtgggatatattttttttgactaccgtattccccaccaggggcttattcagggtggagaggccagcatattcgcatggatcatctttttgcttcttgccgtcggcatcggcatttttgccgctattttgatgatgtatttgcgctatgcaaaaaagtataaattgtcgccagataagggaggagataaacaatgattgcagtattgcgggcagcattatacccgcgtgtgtccacggaagaacagaaaaag

SEQ ID NO: 22280 - DNA, 260 bp, Unknown
  Description of Unknown: LeftRegion for integrase B9281 sequence
gctgttatcgtgggatatatcttttttgactaccgtatcccacaccaggggcttattcagggcggagaggccagcatattcgcatggatcgtctttttgctgcttgcagtcggtattggcttttttgccgctattttgatgatgtattttcgctatgcaaaaaagtatacattgtcgccagataagggaggagatgaacaatgaatgtagtattgcgggcagcattatacccgcgtgtgtccacggaagaacagaaaaag

SEQ ID NO: 22281 - DNA, 260 bp, Unknown; identical to SEQ ID NO: 22276
  Description of Unknown: LeftRegion for integrase B9282 sequence

SEQ ID NO: 22282 - DNA, 260 bp, Unknown
  Description of Unknown: LeftRegion for integrase B9283 sequence
cgaaaaaaaaaaagagaagaacataatgctgttttctatctcaggcccatacgtccacacataagtgttgatagatcccatgctacttaaatctagatgcattattgatcataacattatgccagctagaactgtttcttctcataatataaattgattcttacgcgaatatgctataatacttgcataggaggaaatatatggaagcactactttatacaagagtgtccaaagaagatcaagtaaaattcggtatgtct

SEQ ID NO: 22283 - DNA, 260 bp, Unknown
  Description of Unknown: LeftRegion for integrase B9284 sequence
gctgttatcgtgggatatatcttttttgactaccgtatcccccaccaggggcttattcagggcggagaggccagtatattcgcatggattgtctttttgctgcttgcagtcggtattggcttttttgccgctattttgatgatgtattttcgctatgcaaaaaagtatacattgtcgccagataagggaggagataaacaatgagtgtagtattgcgggcagcattatacccgcgtgtgtccacagaagaacagaaaaag

SEQ ID NO: 22284 - DNA, 260 bp, Unknown
  Description of Unknown: LeftRegion for integrase B9285 sequence
gctgttatcgtgggatatatcttttttgactaccgtatcccacaccaggggcttattcagggcggggaggccagcatattcgcgtggatcgtctttttgctgcttgcggtcggtattggcttttttgccgctattttgatgatgtattttcgctatgcaaaaaagtatacattgtcgccagataagggaggagatgaacaatgaatgtagtattgcgggcagcattatacccgcgtgtgtccacggaagaacagaaaaag

SEQ ID NO: 22285 - DNA, 260 bp, Unknown
  Description of Unknown: LeftRegion for integrase B9286 sequence
gctgttatcgtgggatatatcttttttgactaccgtatcccacaccaggggcttattcagggcggagaggccagtacattcgcatggatcgtctttttgctgcttgcagtcggtattggcttttttgccgctattttgatgatgtattttcgctatgcaaaaaagtatacattgtcgccagataagggaggagatgaacaatgaatgtagtattgcgggcagcattatacccgcgtgtgtccacggaagagcaggcaaag

SEQ ID NO: 22286 - DNA, 260 bp, Unknown
  Description of Unknown: LeftRegion for integrase B9287 sequence
gctgttatcgtgggatatatcttttttgactaccgtatcccccaccaggggcttattcagggcggagaggccagcatattcgcgtggatcgtctttttgctgcttgcggtcggtattggcttttttgccgctattttgatgatgtattttcgctatgcaaaaaagtatacattgtcgccagataagggaggagatgaacaatgaatgtagtattgcgggcagcattatacccgcgtgtgtccacggaagaacagaaaaag

SEQ ID NO: 22287 - DNA, 260 bp, Unknown
  Description of Unknown: LeftRegion for integrase B9288 sequence
acgaaggtgctggtatctcccgtgtccatgcttatgcccgtgtctccacagacagcgaggagcagctcaccagctacgaggcccaggtagactattacaccaagtatatccggtcgaagccggaatgggagtttgtaaaggtctacacggacgagggcatctcggccgtcaacacaaaaaagcgtgacggcttcaacgccatggtggcggatgccctggctgggaagattgacctcatcgtgaccaaatccatcagccgc

SEQ ID NO: 22288 - DNA, 260 bp, Unknown
  Description of Unknown: LeftRegion for integrase B9289 sequence
ctgtttggcgtccatcatccgtcaaaataacgcgatcgcaaaaaagaatgatgacattgccgagcagttgctttgggtcaataataagctcacggctttgatcaagcaaaattccggaagtgccgagaacggcaaaacgaagccatcagaacccgcagaataaagatgcacaaaataggacttgggataggaagatgcacatgacgcgcgtcgcgttatatatccgtgtatcaacggaagatcagaaaatacatggactt

SEQ ID NO: 22289 - DNA, 260 bp, Unknown
  Description of Unknown: LeftRegion for integrase B9290 sequence
gctgttatcgtgggatatatcttttttgactactgcattccccatcaggggcttattcagggcggacaggcgagtgtgctcgcatggatcgtctttttgcttcttgccgccggtattggcatttttgccgccatttttatgatgtatctgcgctatgcaaaaaagtatacattgtcgccagacaagggaggagatgaacaatgagtgtagtattgcgggcagcgttatacccgcgtgtatccacggaagaacaagccaaa

SEQ ID NO: 22290 - DNA, 260 bp, Unknown
  Description of Unknown: LeftRegion for integrase B9291 sequence
ctaggaaataaaatatatgcaatctttttatcatacggcatgttatttatgttttggacaagcaagccgttaatactgggaaacaagaaaattaccaatacattatttaattatgacggtatatttttctatgtgttaggctttatttgtattgtaattggcctatttttagataacgatatctttataaggtaattattatggataaaattaagcgggcggcattgtatatacgtgtaagcacagaagaacaagctcga

SEQ ID NO: 22291 - DNA, 260 bp, Unknown
  Description of Unknown: LeftRegion for integrase B9292 sequence
agcctatcccggagtcagagcgcaacgcactgctccagcaaatccaattcggcgaggagaaatgcgcgatgctggagcgatccatctccagcaagaaaaagatcatcctcgccatgtttttgctggccttggtcgtgctggtttatggaataacgctcgacgtactctgcgggggcatcggatttataaggaggtaacccatgccaaagcaaatacgcgccgcgctctatgtacgcgtctccagcgaggagcaagcccgc

SEQ ID NO: 22292 - DNA, 260 bp, Unknown
  Description of Unknown: LeftRegion for integrase B9293 sequence
gcctgtctcagactccgagcgcaagctcctgctccagcagatcgcgttcggcgacgagcgatgcgctatgctggagagatcaattgcaacaaaaaagaggatcattttagccctatttatcctcgcgcttgtcgtgctgatgtacggggtaacgctcgatgtactctgcgggagcatcggatttatcaggaggtaacaccatgccaaagcaaatacgcgccgcgctctatgtacgcgtctccagcgaggagcaagcccgc

SEQ ID NO: 22293 - DNA, 260 bp, Unknown
  Description of Unknown: LeftRegion for integrase B9294 sequence
agaaagggactaaccgcctaccgttgcgataacaccttacgctgtgaattatagcatttggctttttatttgtccagtaaacatgatggattttaattgcaccggattcgaggcaattaaacagggcaataaaaaatcccccaccggttgcagccgatggggaaagctattattaaagtgcatcaaaacaggaggaaactatgcaaagagcggctttgtatattcgagtaagttcggaagaacaggctattcatgggcta

SEQ ID NO: 22294 - DNA, 260 bp, Unknown
  Description of Unknown: LeftRegion for integrase B9295 sequence
taataagaataagaaatttttagatgaattgttgccttattggggcgatatgactgaagatgctcaaataagagcggaagaattaaaagcggtcgaagaagcgacgataaaacttgaatccgagaaaaaataaaacttccccaccggttgcagccgatggggaaagctattattaaagtgcatcaaaacaggaggaaactatgcaaagagcggctttgtatattcgagtaagttcggaagaacaggctattcatgggcta

SEQ ID NO: 22295 - DNA, 260 bp, Unknown; identical to SEQ ID NO: 22001
  Description of Unknown: LeftRegion for integrase B9296 sequence

SEQ ID NO: 22296 - DNA, 260 bp, Unknown
  Description of Unknown: LeftRegion for integrase B9297 sequence
cagaaccggctaaacatcgcgcaatcaattgagacaaattacgaggtggcaaaggccggaaatcgtctggtacagccggatcatgtacagccagatttggatttgctgagaaaagcgatcaaattgggaaaagaatctgctcttaacgggagaaaaacgtactccgtttttacagcagacagccagaaggaggaaggaaattgaaacgagccgcattatacgtccgcgtatcgagcgcagagcagagggatcacgggttg

SEQ ID NO: 22297 - DNA, 260 bp, Unknown
  Description of Unknown: LeftRegion for integrase B9298 sequence
gccaattccggactcagagcgcaagctgctgctccagcagatcgcgtttggcaacgagcgctgtgccatactggagcggtcaatcgccacgaaaaagaggatcatcttggctttgtttgcgattgtgctcacggtcctaatatacggcgtaacgctcgatgtactctgcgggagcatcggatttatcaggaggtaacaccatgccaaagcagatacgcgccgcgctttatgtgcgcgtctcgagtgaggagcaggcccgc

SEQ ID NO: 22298 - DNA, 260 bp, Unknown
  Description of Unknown: LeftRegion for integrase B9299 sequence
gccggtgcaggactcagaacgcaaactgctgctccagcagatcgcgttcggcaacgagcgctgtgccatgctggagcggtcaatcgccacgaaaaagaggatcatcttggctttgttcgcgattgtgctcacggtcctaatatacggcgtaacgctcgatgtgctctgcgggagcatcggatttatcaggaggtaaccccatgccaaatcagatacgcgccgcgctttatgtgcgcgtctcgagtgaggagcaagcccgc

SEQ ID NO: 22299 - DNA, 260 bp, Unknown
  Description of Unknown: LeftRegion for integrase B9300 sequence
gccgataccggactcagagcgcaagctgctgctccagcagatcgcgtttggcaacgagcgctgtgccatgctggagcggtcaatcgccacgaaaaagaggatcatcttggctttgtttgcgactgtgctcacggtcctaatatacggcgtaacgctcgatgtactctgcgggagcatcggatttatcaggaggtaacgccatgccaaatcagatacgcgccgcgctttatgtgcgcgtctcgagtgaggagcaagcccgc

SEQ ID NO: 22300 - DNA, 260 bp, Unknown
  Description of Unknown: LeftRegion for integrase B9301 sequence
gccgataccggactcagagcgcaagctgctgctccagcagatcgcgtttggcaacgagcgctgtgccatgctggagcggtcaatcgccacgaaaaagaggatcatcttggctttgtttgcgattgtgctcacggtcctaatatacggcgtaacgctcgatgtactctgcgggagcatcggatttatcaggaggtaacgccatgccaaatcagatacgcgccgcgctttatgtgcgcgtctcgagtgaggagcaagcccgc

SEQ ID NO: 22301 - DNA, 260 bp, Unknown
  Description of Unknown: LeftRegion for integrase B9302 sequence
tgattgaaacaacctgtcgaaaaaaaagagttgtctaactcatactcaattttgagatcttcctgttcagcataaagattaaacagcaacgaatatattttttctgcatccatattttcaccgtcctcatcggctagtatggactgctttttttattttcaatcaatcggagggattttttatgagaaaaaaaactgcgagtggcaggatatgctcgtgtttccactgacgaacaaaagaaatatggatattcaatacag

SEQ ID NO: 22302 - DNA, 260 bp, Unknown
  Description of Unknown: LeftRegion for integrase B9303 sequence
gaatgagtttatgaaattttataattatgaagcagaaatgctatataaaaatatttgccttacttacaattgtaaattcacaatctttgaagataaattaataacaattgaagatttgaaagtaattgaaaaaagtttgattgaaattaaagaaaaagatttaaataaataattagttttatagtaaaggagtaaattacatgttaagagtagctttatatattagagtaagtactgaagaacaagctctacacggtgac

SEQ ID NO: 22303 - DNA, 260 bp, Unknown
  Description of Unknown: LeftRegion for integrase B9304 sequence
tctactccattatataaacacaatactagtgcttaaaaattggaaaaagagcggtttaattagtgatgaagattatatcaaaatggaagcaaagacagccagaaaatttggtattaaaaatgtcagtctatatcgttcaattgacttgctatataagccttttagagtgatatatatgtgtgacaaaaaggaggaataaaatggctgagaacatcactaaaatagctgctagacctagcttaattagcaaaaaaagggta

SEQ ID NO: 22304 - DNA, 260 bp, Unknown
  Description of Unknown: LeftRegion for integrase B9305 sequence
ttagtcgaagaaatttttgaaaaaaataacattgaaaattcccatgaaatgacagatttgggttcttactgctacaaactcatgtatgccacgtcaaaattactggttagaaaagataatcgcatagatgaattccgtgcagaatgtttatcacaactaatatcagcgaaaaaagaataaatacattcaaggaggttgctatgaaacgatgtgctttatatgtccgtgtatcgacggatgagcaaaagaaacacggtcta

SEQ ID NO: 22305 - DNA, 260 bp, Unknown
  Description of Unknown: LeftRegion for integrase B9306 sequence
ccgtcttgcatctccacttgcctgcggtatctaactaattaacaaactcgtaaagggctgtggttggagcctccttgcaaccgtcacgcggtaggtgaaaataccaacccacagcatcctatacagtatagcagatttgtcttcgttcttggagaggaacgctaaaaactactacttttatattatacgaggtgttccgtatgaaaaagacgatacgggttattgaacccaccataccgcttctcaaaaagaaaaagcgt

SEQ ID NO: 22306 - DNA, 260 bp, Unknown
  Description of Unknown: LeftRegion for integrase B9307 sequence
gaggaaactttgcaggcgcggaatgatgagctggaacgccatgttgacgcaaaagcagacatgatcgagatcatgcggcgtggagtgcgtatccgcaacggcgtgattgctataatgttttttataattgttcttctcgctgcgtggtgcgtgtacattgattttcattgtatagattacggattttggagggggattcgatgatagcggcattgatgagagtggctttgtatatccgcgtctcaagcgaagaacaggcg

SEQ ID NO: 22307 - DNA, 260 bp, Unknown
  Description of Unknown: LeftRegion for integrase B9308 sequence
tgtctgtctgttcgtgcctgccacgttaggatttccattgcgtcatcctcctagttttgattatgtacacgcttcaggcactctatacaaataaaaaaggaagccgtgaccagcgacttcccttgcgaaacattgaaacaaaatatatcgcggaagaccgcccacgatgatattatgtcctttgcagccacgatgatcaggtgcttcacggcgatacgcttgaagcacaagatctgattcttgaagatttcatcaaagtg

SEQ ID NO: 22308 - DNA, 260 bp, Unknown
  Description of Unknown: LeftRegion for integrase B9309 sequence
gaggaaactttgcaggcgcggaatgatgagctggaacgccatgttgacgcaaaagcagacatgatcgagatcatgcggcgtggagtgcgtatccgcaacggcgtgattgctataatgttttttataattgttcttctcgctgcgtggtgcgtgtacattgattttcattgtatagattacggattttggagggggatttgatgagagcggctttgataagagtggctttgtatatccgcgtctcaagcgaagaacaggcg

SEQ ID NO: 22309 - DNA, 260 bp, Unknown
  Description of Unknown: LeftRegion for integrase B9310 sequence
aaatgaatcgtaatatcatcatctatcaggttatggttgaaattatcaaaacctggcttcgttcaggaaagatctcaagaaaagattatacggaaatgaacacaaaaatggctgaaaaatacggcatatctttgtcgggtatattcgttgataaatctgaaaatccatgctaatatggtatctgaaaggaggaggtttacatggaacgtttgatacaaaaaatagaaccttctgttgatatttcacataaattacaaaac

SEQ ID NO: 22310 - DNA, 260 bp, Unknown
  Description of Unknown: LeftRegion for integrase B9311 sequence
cgccctcttccgctatcagcttgttatgacatgggtgcgtttgctgctgaaacgttcccttatcaccaaggcagagtacgccaaaattgatacaatgatcgcccggaaatacggcatattttcgtgcagcatattccgttgaaaaccgttgacttttcgccgatttagagcgaatatggtaaacgaaggaggtggtttttgtggaacgaatcattcagagggttcagttccccaatgcacagaaagtaaagctgctgaga

SEQ ID NO: 22311 - DNA, 260 bp, Unknown
  Description of Unknown: LeftRegion for integrase B9312 sequence
ttagtcgaagaaatttttgaaaaaaataacattgaaaattcccatgaaatgacagatttgggttcttactgctacaaactcatgtatgccacgtcaaaattactggttagaaaagataatcgcatagatgaattccgtgcagaatgtttatcacaactaatatcagcgaaaaaagaataaatacattcaaggaggttgctatgaaacgatgtgctttatatgtccgtgtatccacggatgaacaaaagaaacacggtcta

SEQ ID NO: 22312 - DNA, 260 bp, Unknown; identical to SEQ ID NO: 22309
  Description of Unknown: LeftRegion for integrase B9313 sequence

SEQ ID NO: 22313 - DNA, 260 bp, Unknown
  Description of Unknown: LeftRegion for integrase B9314 sequence
agcgacttcccttgcgaaacattgaaacaaaatatatcgcggaagaccgcccacgatgatattatgtccttttacattctatcatatcaagccttctttcgctaccagaaagaaggtttttatatgtcttttttactccaaacccacaacttttcgggcttcgtgtagttaaatatatcagatgcagccacgatgatcaggtgcttcacggcgatacgcttgaagcacaagatctgattcttgaagatttcatcaaagtg

SEQ ID NO: 22314 - DNA, 260 bp, Unknown
  Description of Unknown: LeftRegion for integrase B9315 sequence
atagagcattatctgattgctatcacaacggctaataaaatgttagattcaaaaatcatttcgcttgaagattataaaaaaatcgagaataaaatggctcaaaaatattgtatcaaaactaatagtatttatcgtttgaataacttgataaataaaccttgtagcggtaatatcacacactgacaaaaggaggaaaaaacgtgcagataacgaagatttcagcagcaaaaaaactagaaaagaaaaaattagtgtgtgca

SEQ ID NO: 22315 - DNA, 260 bp, Unknown
  Description of Unknown: LeftRegion for integrase B9316 sequence
tcataaagggaaagaggcctgtaagggtatccggataagggatacagaacttacaggtctttctttttcggaaccaatggtagtagaggaggtaatgatagatggcgagaagcattacggttataccagcaaaagagcctacgatgctggtgaacgggcagcagatagaattgaaaaagaaagtagcagcgtactgccgcgtgtcaacggaccaagaagaacagttatcaagttatgagaatcaggtgagatactatacg

SEQ ID NO: 22316 - DNA, 260 bp, Unknown
  Description of Unknown: LeftRegion for integrase B9317 sequence
cattataacgccagtttctgatagcaatatgataaaattgaaaattccgagccttatctacggaaaggttacaaaatttgaacccgtccgagaaatttgaacccgtttttctgtaaaaataaaattgtatcagagacggcttttagatagatgagggaataacaggtactcgtgaggacaagcgtgacgagtttcagcgaatgataagcgactgccggaaaggcaagatagacaggatatatacaaagtctatcagccga

SEQ ID NO: 22317 - DNA, 260 bp, Unknown
  Description of Unknown: LeftRegion for integrase B9318 sequence
tcataaagggaaagaggcctgtaagggtatccggataagggatacagaacttacaggtctttctttttcggaaccaatggtagtagaggaggtaatgatagatggcgagaagcattacggttataccagcaaaagagcctacgatgctggtgaacgggcagcagatagaattgaaaaagaaagtagcagcgtactgccgcgtgtcaacggaccaagaagaacagttatcaagttatgagaaccaggtgagatactatacg

SEQ ID NO: 22318 - DNA, 260 bp, Unknown
  Description of Unknown: LeftRegion for integrase B9319 sequence
taaaaaagtacgacagacaattgaagaactgggcggtaccatgccagaagacctgcctacaccaaagaaaagtattaaacaaatccaacgagagcaagaaaggaaaaagctaaagtaaaaaattcaccgcccgacatttgcggggttatgcagggggaagcgcaatgtaggccgctggcatttggaaaggagcggggtttatgattcgcgcagctatatatatccgcgtaagcaccgaggagcaagcaaggcatggtctg

SEQ ID NO: 22319 - DNA, 260 bp, Unknown
  Description of Unknown: LeftRegion for integrase B9320 sequence
taaaaaagtacgacaaacaattgaagaactgggcggtactatgccagaagacctgcctacaccaaagaaaagtattaaacaaatccaacgagagcaagaaaggaaaaagctaaagtaaaaaattccccgcccgacatttgcggggttatgcggggggaagcgcaatgtaggccgctggcatttggaaaggagcgggggttatgactcgcgcagctttatatatccgcgtaagcaccgaggagcaagcaaagcatggtctg

SEQ ID NO: 22320 - DNA, 260 bp, Unknown
  Description of Unknown: LeftRegion for integrase B9321 sequence
ggaaaaaatcggtctggaaaagcgattatccaacaagcgggagacgattgatgtgcagaatcataccatcaatgtgatggaaaagggtctgcggattcgcaactgcgtgattttggttatgggcgtagcaatcgtcctgttgctgtgctggtgcgtatatgtaaatatgcacgcgctgaatatcggttttggagggaataatgagagctgcgttatatatccgcgtgtccaccgaagagcaggccaagcacggtctatcc

SEQ ID NO: 22321 - DNA, 260 bp, Unknown
  Description of Unknown: LeftRegion for integrase B9322 sequence
gaaaaggtcggtctggaaaagcgattatccaacaagcgggagacgattgatgtgcagaatcataccatcaatgtgatggaaaagggtctgcggattcgcaactgcgtgattttggttatgggcgtagcaatcgtcctgttgctgtgctggtgcgtatatgtaaatatgcacgcgctgaatatcggtttttggagggaataatgagagctgcgttatatatccgcgtgtccaccgaagagcaggccaagcacggtctatcc

SEQ ID NO: 22322 - DNA, 260 bp, Unknown
  Description of Unknown: LeftRegion for integrase B9323 sequence
tgactacaaggcagaactgaaacagctctgagtatgtaagcataagcatcaccccctcttgcggcggagggggcaagaagtcccctccgggatggaggggccaaccgcctaccgttgcgggtagcgccgaacctaggatatcatattgtcggcggaaatgcaagggagacctatggcaaggtgggggagggagcaagtttatgacgcgagcagctatatatatccgcgtgagcaccgaggagcaagcaaggcacggcctg

SEQ ID NO: 22323 - DNA, 260 bp, Unknown
  Description of Unknown: LeftRegion for integrase B9324 sequence
gaaaaggtcggtctggaaaagcgcttatccaacaagcgggagacgattgatgtgcagaatcataccatcaatgtgatggaaaagggtctgcggattcgcaactgcgtgattttggttatgggcgtagcaatcgtcctgttgctgtgctggtgcgtatatgtggatatgcacgcgctgaatatcggtttttggagggaataatgagagctgcgttatatatccgcgtgtccaccgaagaacaggccaagcaaggtctatcc

SEQ ID NO: 22324 - DNA, 260 bp, Unknown
  Description of Unknown: LeftRegion for integrase B9325 sequence
gtcagatggcttaccaggcggcgatggcgctcgcccggcgtatgctctcaaagggcttgatctccaaggaagagtacgctgaaattgatatgatcatcgccaaaaagtacggcatatcttcgtgcagtatattccgctgaaatggctggataaatcgtgcgttcagaggtaatatgtcacacaccaaggaggtgaacgacatggagagagtcatagaacgggtcgatttccagatccccatgcagccgaaggcgctgcgc

SEQ ID NO: 22325 - DNA, 260 bp, Unknown
  Description of Unknown: LeftRegion for integrase B9326 sequence
cagatggcttaccaggcagcgatggcgctcgcccggcgtatgctctcaaagggcttgatctccgaggaagagtacgctgaaattgatacgatcatcgccaaaaagtacgggatatcttcgtgcagtatattccgctgaaatggctggataaatcgtgcgttcagaggtaatatgtcacacaccaaagggaggtgaacaacatggagagagtcatagaacgggtcgatttccagatccccatgcagccgaaggcgctgcgc

SEQ ID NO: 22326 - DNA, 260 bp, Unknown
  Description of Unknown: LeftRegion for integrase B9327 sequence
gtcaccagcaattttaaaatctagatcaatgtaggatggaacttgttccatcttacatatgagaatatcttttatccttcttgattaatcaatacattttgtaattactgattttataattatgatttaattttcataagatgcttttctatatttttttactattaagtaaagaaatatagaaaggggtgtagtaaaagatgatgattaagataggaggatatttgagatgttcaactaaaaaacaaagttctcacaat

SEQ ID NO: 22327 - DNA, 260 bp, Unknown
  Description of Unknown: LeftRegion for integrase B9328 sequence
gatacagctgttattcaataagcaagagcaaagcaaaggcacaaggatatactgcttgctcaagatgttggtaaaatgaaaaaccgcccctgttgccgcaggagcgattttcgacgtgctacatgtgttcatatagatacaagttacaaacatattgtagcacgtccttatatttttttcaactttattttgggggaattatgagagttgcactatatgaaagagttagttccgaagaacaagcacttcacggttactca

SEQ ID NO: 22328 - DNA, 260 bp, Unknown
  Description of Unknown: LeftRegion for integrase B9329 sequence
taaaaaagtacgacagacaattgaagaactgggcggtaccatgccagaagacctgcctacaccaaagaaaagtattaaacaaatccaacgagagcaagaaaggaaaaagctaaagtaaaaaattcaccgcccgacatttgcggggttatgcagggggaagcgcaatgtaggccgctggcatttggaaaggagcggggtttatgattcgcgcagctatatatatccgcgtaagcaccgaggagcaagcaaggcacggcctg

SEQ ID NO: 22329 - DNA, 260 bp, Unknown
  Description of Unknown: LeftRegion for integrase B9330 sequence
cggttagaaagttatctcgcttcaatgctccaggcaaaacagatgatgtcgatggggattttaacctctgatgattacgccgctattgatacaataatgaccgaaaaatacggcatatcttcgtgtagtttgtattgcggaatcgacttgatatatgatggttttagaggtaatatgtcacactgcaaggaggtgacgtaatgtcaagaaaaataaccatcgtatcaaaaccaccaaaattggagcggaaaaagagagtt

SEQ ID NO: 22330 - DNA, 260 bp, Unknown
  Description of Unknown: LeftRegion for integrase B9331 sequence
gctcctgtgctatcaggctgccatgcacattgcccggcaatggctgagttcagggctgatcacggcggaggactgcgtaaaatttgatacaatcactgccgaaaagtttggtatatccgcccggagcatttggcgtgatattaacttgataaagctgccgactgacggtaatatgtcgcctgcgaaagggggtatctcaagtggaacgaaccattcagattgttcagcccatgaagctggctgaacgaaaagttctgcgt

SEQ ID NO: 22331 - DNA, 260 bp, Unknown
  Description of Unknown: LeftRegion for integrase B9332 sequence
cgaacgaacattgaaagctcgaaacgacgaattggaacggcatgttgacgcaaaggcagacaccatagaaatcatgcgtcgcggtgtgcgcatccgaaacgtcgttatttttattatgttttgcatcatcgtgtttctcgccatttggtgcgtgtacattgatatgcactgcctaaactatggattctggaggagataagatgagggctgcattatatattcgcgtgtcaacggaggagcaggcccggcacggcctgtcc

SEQ ID NO: 22332 - DNA, 260 bp, Unknown
  Description of Unknown: LeftRegion for integrase B9333 sequence
aatcgcccgcgcaatgatcgagaccagaataaaggctgatttgactcaaaaggagctttctgcccgctccggtattgccctgtccgatattgaagaatatgaaaacggcaacggtgatccatcacttcacacgctccaacgccttgcgaaggctatgggcaagcgtatccatgtcacatttgaagaaaggacgtgatcccatgcgcgtggccggatatacccgggtgagcacgcaggagcagaagctccacggcgtctcc

SEQ ID NO: 22333 - DNA, 260 bp, Unknown
  Description of Unknown: LeftRegion for integrase B9334 sequence
aggttagaaagctaccttgtttccatgctccaggcaaaacgaatgctgtcgatggggattataaccccggaagattacgccgatattgatacaattatgaacgaaaaatacggtatatcttcgtgtagtttatattgcggaatggacttgatatatgatggctttagaggtaatatgtcacactataaggaggtgacgttatgtcaggaaaaataaccatcgtatcaaaaccgccaaagctggaaagaaaaaagagagta

SEQ ID NO: 22334 - DNA, 260 bp, Unknown
  Description of Unknown: LeftRegion for integrase B9335 sequence
cgaggaaaccttgcaggcgcgaaatgatgagctggaacgtcacgtcgacgcaaaggccgacaccattgagatcatgcggcgtggtgtgcgcatccgcaactgcgtgatttttattttgtttatcatggttttattgttggctgcatggtgcctgtacattgacatgcactgcctaaactacggattctggaggggttgagatgagggctgctttatatatccgcgtgtcaacagaggagcaggcccgacacggcctgtcc

SEQ ID NO: 22335 - DNA, 260 bp, Unknown
  Description of Unknown: LeftRegion for integrase B9336 sequence
aacgaggaaaccttgcaggcgcgaaatgacgagctggagcgtcatgttgacgcaaaggaagacatgatcgagattatgcggcgcggcgtgcacatccgcaactgcgtgattgctataatgtttgtcatcatggttatgcttgctgtgtggtgcgtgtatgtcgacctccattgcgcagattacggtttttggaggggtctatgatgagggtggctttgtatatccgcgtgtcgagcgaagaacaggcacggcatggcctg

SEQ ID NO: 22336 - DNA, 260 bp, Unknown
  Description of Unknown: LeftRegion for integrase B9337 sequence
accgaggaaactttgcaagcgcgcaacgatgagctggaacgccatgttgacgcaaaggccgataccattgagatcatgcggcgcggtgtccatatccgcaacggcgcgattgctgtaatgtttgttattatcgctcttctcgctgcgtggtgtgtgtacattgattttcattgtgtagattacggattttggagggggctatgatgagagtggcattgtatatccgcgtctcgagcgaggagcaggcgcggcatggcttg

SEQ ID NO: 22337 - DNA, 260 bp, Unknown
  Description of Unknown: LeftRegion for integrase B9338 sequence
tgttatgctggatagtaacagcaatcgcatttattgccgcatttgtttctgttctgatttaatagcacatatgtgtccccctacacctctccactgttaacgccaacagttcgatgtgacccagtgggggacatttttattcagttaccgagaaaacctcggcaactgaaccaagctcaacactgaaaggacgtgatcccatgcgcgtggccggatatgcccgggtgagcacgcaggagcagaagctccacggcgtctcc

SEQ ID NO: 22338 - DNA, 260 bp, Unknown
  Description of Unknown: LeftRegion for integrase B9339 sequence
aagcactattcagtacagaatagccatgtcgatggcaaaaagtatgctgaacaaggggatcataaccaaggaagaatacgcaaaaattgatacaattatgaccaaaaacgctgagttatctttgggtactatattctccgaaattccttgatattactgcctttcagagcgaatatgtcacacgataaggaggcgatatcatggaaagaacaatcaagcgagtcgaccgcaaactccccaagcaggaaaaactcatacgt

SEQ ID NO: 22339 - DNA, 260 bp, Unknown; identical to SEQ ID NO: 20761
  Description of Unknown: LeftRegion for integrase B9340 sequence

SEQ ID NO: 22340 - DNA, 260 bp, Unknown; identical to SEQ ID NO: 22332
  Description of Unknown: LeftRegion for integrase B9341 sequence

SEQ ID NO: 22341 - DNA, 260 bp, Unknown
  Description of Unknown: LeftRegion for integrase B9342 sequence
cggttagaaagctaccttgcttccatgctccaggcaaaacgaatgctgtcgatggggattataaccccggaagattacaccgatattgatacaattatgaacgaaaaatacggtatatcttcgtgtagtttatactgcggaattgacttgatatatgatggttttagaggtaatatgtcacactataaggaggtgacgttatgtcaggaaaaataaccatcgtatcaaaaccgccaaagcttgaaagaaaaaagagagta

SEQ ID NO: 22342 - DNA, 260 bp, Unknown; identical to SEQ ID NO: 22331
  Description of Unknown: LeftRegion for integrase B9343 sequence

SEQ ID NO: 22343 - DNA, 260 bp, Unknown
  Description of Unknown: LeftRegion for integrase B9344 sequence
cactcccgtaagggaacttgagatgcaggatacgccgccctgccaatactcacgcagaagcgcttctggacgcaagcctatggccgccgttcaggagcgtttttctatttgccgctcccctgctgggagcgtaaataatgaaaagtggttgtttccattttggaaaataccactcatattctcagaaaggacgtgatcccatgcgcgtggccggatatgcccgggtgagcacgcaggagcagaagctccacggcgtctcc

SEQ ID NO: 22344 - DNA, 260 bp, Unknown
  Description of Unknown: LeftRegion for integrase B9345 sequence
gcactctatcctgatgcccaaaagtggaatacagagatccttcctgctatggaagccctattcgaggaatataaacaggaaatcgatttgtaccatttggcctttccgaaagattggtctgaccaactttttagataaacgcagttaccgagaaaacctcggcaactgaaccaaactcagcactgaaaggacgtgatcccatgcgcgtggccggatatgcccgggtgagcacgcaggagcagaagctccacggcgtctcc

SEQ ID NO: 22345 - DNA, 260 bp, Unknown
  Description of Unknown: LeftRegion for integrase B9346 sequence
cgaggaaaccttgcaggcgcgaaatgatgagctggaacgccacgtcgacgcaaaggccgacaccattgagatcatgcggcgtggtgtgcgcatccgcaactgcgtgatttttattttgtttatcatggttttattgttggctgcatggtgcctgtacattgacatgcactgcctaaactacggattctggaggggttgagatgagggctgctttatatatccgcgtgtcaacagaggagcaggcccgacacggcctgtcc

SEQ ID NO: 22346 - DNA, 260 bp, Unknown
  Description of Unknown: LeftRegion for integrase B9347 sequence
acgcattgttcggtacagaatagccatgtcgatggcaaaaagtatgctgaacaaggggattataaccgaggaagaatacgcaaaaattgatacaattatgaccaaaaatgccgagttatctttggatactatattctccgaaattccttgatattactgcctttcagagcgaatatgtcacacgataaggaggcgatatcatggaaagaacaatcaagcgagtcgaccgcaaactccccaagcaggaaaaacttatacgg

SEQ ID NO: 22347 - DNA, 260 bp, Unknown
  Description of Unknown: LeftRegion for integrase B9348 sequence
atttttatgctgctcggcgtttgcgccctgctgctcgtttcagtcattagctatatcatcttcgacatacagatcacgaccgccgggctgttccagtcggcaaaaacaagcacgcttgccgttttcctcggccttgtcgttctcgccgccggcggctccatcgggtacgccgttcacactatccacaaggggaggaagaaatgagagttgcactctacatccgcgtctccacggaagaacaagccgttcacggcctttcc

SEQ ID NO: 22348 - DNA, 260 bp, Unknown
  Description of Unknown: LeftRegion for integrase B9349 sequence
atcatagaacacttaacgccgactgaggaaaccttacaagcgcggaatgatgagttggaacgccatgttgacgcgaaagcggacatgattgagatcatgcggcgcggtgtccgtatccgcaacaacgtgattgctataatgtttgtcattatcgttctgctggctgtatggtgcttgtacattgattggagggggatttgatgagagcggcactatatatccgcgtatctacggaagaacaggcacggaacggcctgtca

SEQ ID NO: 22349 - DNA, 260 bp, Unknown
  Description of Unknown: LeftRegion for integrase B9350 sequence
atttatatgcttataggcatatgcagtattcttttgtgcgccgttgtatggtacgtcatatttgacatccaggtagagaccgccggtattttccgctcggccgggacaagcatttttgcgggcgtcctcgccctgatactgaacgcctccgtcgcaaccatcatttacgccttcaaaagcatttacaaggggaaaaagaaatgagagttgcactttatgtccgcgtctccacggaagaacaagccgttcacggcctttcc

SEQ ID NO: 22350 - DNA, 260 bp, Unknown
  Description of Unknown: LeftRegion for integrase B9351 sequence
gagaaaaccttgcaagcgcggaatgatgagctggaacgccatgttgacgcaaaggccgataccattgagatcatgcggcgcggtgtgcgtatccgcaatggcgtgattgctatattgttcctcatcaccgtttttctcgctgcgtggtgcgtgtacatcgatttccattgcatagattacggattttggaggggggttcgatgagagcggcattgtatatccgcgtctcgagcgaagaacaggcgcggcatggcctgtcc

SEQ ID NO: 22351 - DNA, 260 bp, Unknown
  Description of Unknown: LeftRegion for integrase B9352 sequence
atttatatgcttataggcgtatgcagtattcttttgtgcgccgttgtatggtacgtcatatttgacatccaggtagagaccgccggtattttccgctcggctgggacaagcatttttgcgggcgtcctcgccctgatactgaacgcctccgtcgcaaccatcatttacgccttcaaaagcatttacaaggggaaaaagaaatgagagttgcactttatgtccgcgtctccacggaagaacaagccgttcacggcctttcc

SEQ ID NO: 22352 - DNA, 260 bp, Unknown
  Description of Unknown: LeftRegion for integrase B9353 sequence
gaagagaccttgcaggcgcgaaatgacgagctggagcgccatgttgacgcaaaggaagacatgatcgagattatgcggcgtggtgtccatatccgcaacgccgtaatttttattttatttgtggtggtggtgttactgaccgcgtggtgcgtgtatgtcgatttgcattgcgcagattacggattttggagggggcggtgatgagagcagcactgtatatccgcgtgtcgagcgacgaacaggcgcggcatggcctgtca

SEQ ID NO: 22353 - DNA, 260 bp, Unknown
  Description of Unknown: LeftRegion for integrase B9354 sequence
gaggagacattgcaggcgcgcaacgatgagctggaacgccatgttgacgcaaaagcggacatgattgagatcatgcggcgcggcgtgcgtatccgaaacggcgtgattgctatattgttcctcatcaccgtttttctcgctgcgtggtgcgtgtatatcgatttccattgcatagattacggattttggaggggggttcgatgagagcggcattgtatatccgcgtctcgagcgaggagcaggcgcggcatgggctatca

SEQ ID NO: 22354 - DNA, 260 bp, Unknown
  Description of Unknown: LeftRegion for integrase B9355 sequence
atttccgaacacttgacgccgaccgaggaaactttgcaagcgcggaatgatgagctggaacgccatgttgatgcaaaagcagacatgattgagatcatgcggcgtggagtgcgtatccgaaacgtcgtgattgctataatgtttgccattatcgttctgctggccgcgtggtgtttgtacattgattggagtgggattttatgagagtggcattgtatatccgcgtctcgagcgaggagcaggcgcggcatggcctgtca

SEQ ID NO: 22355 - DNA, 260 bp, Unknown
  Description of Unknown: LeftRegion for integrase B9356 sequence
gtatcacaccaccctcgccctaatcgacgggttggtagaggatggctgctttacgcaggcagacaggcgtaaagcttacacaattatcaatcgcaaatacggcttatcttcggatagtatatttgccgaaaccgcttgatatatctcgcttttagagcaatatatagagtaccgaatattgatacaagggagggaaaaacatggaacgcagcataaaacagaccatattctacaagccgccgtcagagcagctaaagcgt

SEQ ID NO: 22356 - DNA, 260 bp, Unknown
  Description of Unknown: LeftRegion for integrase B9357 sequence
gaagagaccttgcaggcgcgaaatgacgagctggagcgccatgttgacgcaaaggaagacatgatcgagattatgcggcgtggtgtccatatccgcaacgccgtgatttttattttatttgtggtggtggtgttactgaccgcgtggtgcgtgtatgtcgatttgcattgcgcagattacggattttggagggagcggtgatgagagcagcactgtatatccgcgtgtcgagcgacgaacaggcgcggcatggcctgtca

SEQ ID NO: 22357 - DNA, 260 bp, Unknown; identical to SEQ ID NO: 13602
  Description of Unknown: LeftRegion for integrase B9358 sequence

SEQ ID NO: 22358 - DNA, 260 bp, Unknown
  Description of Unknown: LeftRegion for integrase B9359 sequence
aaaggatgggctggaacaccgccttgaaaataagcggaagaccatcggcctgatggaggcggaactgaataacctacgtcattccgtaaaactatacaggtggatcatgctcggtttgtcgctattgatcgtcggtctcttcgtctggtgcgtgtgggtagatattcgctgcgccaattacggattttggaggggatagtatgagagccgcactatatatccgcgtctcgacggaagaacaggcgcggcacggcctgtca

SEQ ID NO: 22359 - DNA, 260 bp, Unknown; identical to SEQ ID NO: 22351
  Description of Unknown: LeftRegion for integrase B9360 sequence

SEQ ID NO: 22360 - DNA, 260 bp, Unknown
  Description of Unknown: LeftRegion for integrase B9361 sequence
agaagaaaccctccaggcggagaaagtcggcctcgaaaagcatttgtccagcaaacggcagatcattacgatgatggagcagggcgtgaaaacccggaaccgcatcattgccgctttgctggttttattgtttttattcataacctatgcgttgtaccttgataccaattgtattcaaatcggcttttggaggggatagcatgagagtcgcactatatatccgcgtctcgacggaagaacaagcacggcacggcctgtca

SEQ ID NO: 22361 - DNA, 260 bp, Unknown
  Description of Unknown: LeftRegion for integrase B9362 sequence
gaggaaactttgcaagcgcggaatgatgagctggaacgccatgttgacgcaaaggccgataccattgagatcatgcggcgcggcgtgcgtatccgaaacggcgtgattgctataatgttcctcatcatcgtttttctcgctgtgtggtgcgtgtacattgattttcattgtatagattacggattttggaggggaatttgatgagagcggcgctatatatccgcgtgtccagcgaggaacaggcgcggcatggtctatca

SEQ ID NO: 22362 - DNA, 260 bp, Unknown; identical to SEQ ID NO: 22360
  Description of Unknown: LeftRegion for integrase B9363 sequence

SEQ ID NO: 22363 - DNA, 260 bp, Unknown
  Description of Unknown: LeftRegion for integrase B9364 sequence
gaggagaccttgcaggcgcgaaacgacgagctggagcgccatgttgacgcaaaggcagacatgatcgagattatgcggcgtggtgtccatatccgcaacgccgtgatttttattttatttgtggtggtggtgttactgaccgcgtggtgcgtgtatgtcgatttgcattgcgcagattacggattttggagggggcggtgatgagagcagcactgtatatccgcgtgtcgagcgacgaacaggcgcggcatggcctgtca

SEQ ID NO: 22364 - DNA, 260 bp, Unknown
  Description of Unknown: LeftRegion for integrase B9365 sequence
atttccgaacacttgacaccaaccgaggaaaccttgcaagcgcggaatgatgagctggaacgccacgtggacgcaaaggccgataccatcgagatcatgcggcgcggtgtccgtatccgaaacggcgtgattgctataatgtttgtcattatcgttctactggctgtatggtgcttgtagattgattggagggggatttgatgagagcggcactatatatccgcgtttccagcgaggaacaagcgcggcatggtctatca

SEQ ID NO: 22365 - DNA, 260 bp, Unknown
  Description of Unknown: LeftRegion for integrase B9366 sequence
gaggaaaccttgcaagcgcggaatgatgagctggaacgccatgttgacgcaaaggccgataccattgagatcatgcggcgcggtgtccatatccgcaacggcgcgattgctgtaatgtttgttataatcgtttttctcgctgcgtggtgcgtgtacattgattttcattgtatagattacggattttggagggggattcgatgagagcggcgctatatatccgcgtgtccagcgaggaacaggcgcggcatggtctatca

SEQ ID NO: 22366 - DNA, 260 bp, Unknown
  Description of Unknown: LeftRegion for integrase B9367 sequence
gaggaaactttgcaagcgcggaatgatgagctggaacgccatgttgacgcaaaggccgataccattgagatcatgcggcgcggcgtgcgtatccgaaacggcgtgattgctataatgtttgtcatcattgctatgcttgctgtgtggtgcgcgtacattgattttcactgcatagattacggattttggagggggattcgatgagagcggcattgtatatccgcgtgtccagcgaggaacaggcgcggcatggcctgtcc

SEQ ID NO: 22367 - DNA, 260 bp, Unknown
  Description of Unknown: LeftRegion for integrase B9368 sequence
aaaagatgggctggaacaccgccttgaaaataagcggaagaccatcggcctgatggaggcggaactgaataacctacgtcattccgtaaaactatacaggtggatcatgctcggtttgtcgctattgatcgtcggtctcttcgtctggtgcgtgtgggtagatattcgctgcgccaattacggattttggaggggatagtatgagagtcgcactatatatccgcgtctcgacggaagaacaggcgcggcacggcctgtca

SEQ ID NO: 22368 - DNA, 260 bp, Unknown
  Description of Unknown: LeftRegion for integrase B9369 sequence
atttccgaacacctgacgccgaccgaggaaactttgcaagcgcggaatgatgagctggaacgccatgttgacgcgaaagcggataccattgagatcatgcggcgcggtgtccatatccgcaacggcgtgattgctataatgtttgccattatcgttctgctggctgcatggtgcttgtacattgattggagggggatttgatgcgagcggcattgtatatccgtgtgtcgagcgaggagcaggcgcggcatggtctatca

SEQ ID NO: 22369 - DNA, 260 bp, Unknown
  Description of Unknown: LeftRegion for integrase B9370 sequence
gaagagaccttgcaggcgcgaaatgacgagctggagcgccatgttgacgcaaaggaagacatgatcgagattatgcggcgtggtgtccatatccgcaacgccgtgatttttattttatttgtggtggtggtgttactgaccgcgtggtgcgtgtatgtcgatttgcattgcgcagattacggattttggagggggcggtgatgagagcagcactgtatatccgcgtgtcgagcgacgaacaggcgcggcatggcctgtca

SEQ ID NO: 22370 - DNA, 260 bp, Unknown
  Description of Unknown: LeftRegion for integrase B9371 sequence
gaggaaactttgcaagcgcggaatgatgagctggaacgccatgttgacgcaaaggccgataccattgagatcatgcggcgcggtgtccatatccgcaacggcgcgattgctgtaatgtttgttataatcgtttttctcgctgcgtggtgcgtgtacattgattttcattgtatagattacggattttggagggggattcgatgagagtggcattgtatatccgcgtcacgagcgaggagcaggcgcggcatgggctgtcc

SEQ ID NO: 22371 - DNA, 260 bp, Unknown
  Description of Unknown: LeftRegion for integrase B9372 sequence
atttccgaacacctgacgccgaccgaggaaaccttgcaagcgcggaatgatgagctggaacgccatgttgacgcgaaagcggacatgatcgagatcatgcggcgcggtgtccgtatccgaaacggcgtgattgctataatgtttgtcattatcgttctgctggctgcatggtgcttgtacgttgattggagggggatttgatgcgagcggcgctatatatccgcgtgtccagcgaggaacaggcgcggcatggtctatca

SEQ ID NO: 22372 - DNA, 260 bp, Unknown
  Description of Unknown: LeftRegion for integrase B9373 sequence
atcatagaacacttaacgccgactgaggaaaccttacaagcgcggaacgatgagttggaacgccatgttgacgcgaaagcggacatgattgagatcatgcggcgcggtgtccgtatccgcaacaacgtgattgctataatgtttgtcattatcgttctgctggctgcatggtgcttgtacattgattggagggggatttgatgagagcggcactatatatccgcgtctcgacggaagaacaggcgcggcacggcctgtca

SEQ ID NO: 22373 - DNA, 260 bp, Unknown; identical to SEQ ID NO: 22369
  Description of Unknown: LeftRegion for integrase B9374 sequence

SEQ ID NO: 22374 - DNA, 260 bp, Unknown
  Description of Unknown: LeftRegion for integrase B9375 sequence
aaaagatgggctggaacaccgccttgaaaataagcggaagaccatcggcctgatggaggcggaactgaataacctacgtcattccgtaaaactatacaggtggatcatgctcggtttgtcgctattgatcgtcggtctcttcgtctggtgcgtgtgggtagatattcactgcgccaattacggattttggaggggatagtatgagagccgcactatatatccgcgtctcgacggaagaacaggcgcggcacggcctgtca

SEQ ID NO: 22375 - DNA, 260 bp, Unknown
  Description of Unknown: LeftRegion for integrase B9376 sequence
gaggaaacgttgcaagcgcgaaatgatgagctagaacgccatgttgacgcaaaggccgataccattgagatcatgcggcgcggtgtccatatccgcaacggcgcgattgctgtaatgtttgttatcatcgctcttctcgctgcgtggtgcgtgtacattgattttcattgtatagattacggattttggagggggatttgatgagagcggcactatatatccgcgtctcgagcgaggaacaggcgcggcatggtctatca

SEQ ID NO: 22376 - DNA, 260 bp, Unknown
  Description of Unknown: LeftRegion for integrase B9377 sequence
atttatatgctcatcggcgtatgcagtattcttttgtgcgccgttgtatggtacatcatatttgacatccaggtagagaccgccggtattttccgctcggctgggacaagcatttttgcgggtgtcctcgccctgatactgaacgcctccgtcgcaaccatcatttacgccttcaaaagcattcacaaggggaaaaagaaatgagagttgcactttatgtccgcgtctccacggaagaacaagccgttcacggcctttcc

SEQ ID NO: 22377 - DNA, 260 bp, Unknown
  Description of Unknown: LeftRegion for integrase B9378 sequence
atctccgaacacttgacgccaacagaagaaaccttgcaagcgcggaatgatgagttggaacgtcacgttgacgcgaaagcggacatgatcgagatcatgcggcgtggagtgcgtatccgcaacggcgtgattgctataatgtttgccattatcgttctgctggccgcgtggtgcttgtacattgattggagggggattttatgagagtggcattgtatatccgcgtctcgagcgaggaacaggcgcggcatggcctatca

SEQ ID NO: 22378 - DNA, 260 bp, Unknown
  Description of Unknown: LeftRegion for integrase B9379 sequence
atttatatgcttataggcgtatgcagtattcttttgtgcgccgttgtatggtacgtaatatttgacatccaggtagagaccgccggtattttccgctcggctgggacaagcatttttgcgggcgtcctcgccctgatactgaacgcctccgtcgcaaccatcatttacgccttcaaaagcatttacaaggggaaaaagaaatgagagttgcactttatgtccgcgtctccacggaagaacaagccgttcacggcctttcc

SEQ ID NO: 22379 - DNA, 260 bp, Unknown
  Description of Unknown: LeftRegion for integrase B9380 sequence
gaggaaactttgcaggcgcggaatgatgaactggaacgccatgttgacgcaaaagcagacatgatcgagatcatgcggcgtggagtgcgtatccgcaactgcgtgattgctataatgtttttcatcatcgttcttctcgctgcgtggtgcgtgtacattgattttcattgtatagattacggtttttggagggggatttgatgagagtggctctgtatatccgcgtgtcgagcgaggagcaggcgcggcatggcctgtcc

SEQ ID NO: 22380 - DNA, 260 bp, Unknown
  Description of Unknown: LeftRegion for integrase B9381 sequence
gagaaaaccttgcaagcgcggaatgatgagctggaacgccatgttgacgcgaaagccgataccattgagatcatgcggcgcggtgtgcgtatccgcaacggcgtgattgctataatgttcctcatcatcgtttttctcgctgtgtggtgcgtgtacattgattttcattgtatagattacggattttggagggggattcgatgagagcggcgctatatatccgcgtgtccagcgaggagcaggcgcggcatggcttgtct

SEQ ID NO: 22381 - DNA, 109 bp, Unknown
  Description of Unknown: LeftRegion for integrase B9382 sequence
ggcagtactgccatctacacatttttttctttgaggaggacattaatttatgaagagaattatagctatgtatttacgagtatccactttagaccaagcacgaaatgga

SEQ ID NO: 22382 - DNA, 260 bp, Unknown
  Description of Unknown: LeftRegion for integrase B9383 sequence
gaggaaactttgcaagcgcggaatgatgagctggaacgccatgttgacgcaaaggccgataccattgagatcatgcggcgcggcgtgcgtatccgcaacggcgtgattgctatattgttcctcatcaccgtttttctcgctgcgtggtgcgtgtacatcgatttccattgcatagattacggattttggaggggggttcgatgagagcggcattgtatatccgcgtctcgagcgaggagcaggcgcggcatgggctatca

SEQ ID NO: 22383 - DNA, 260 bp, Unknown
  Description of Unknown: LeftRegion for integrase B9384 sequence
gaggagactttgcaagcgcggaatgatgagctggaacgccatgttgacgcaaaggccgataccattgagatcatgcggcgcggtgtccatatccgcaacggcgcgattgctgtaatgtttgttatcatcgctcttctcgctgcgtggtgcgtgtacattgattttcattgtatagattacggattttggagggggatttgatgagagcggcattgtatatccgcgtctcgagcgaggaacaggcgcggcatggcttgtct

SEQ ID NO: 22384 - DNA, 260 bp, Unknown; identical to SEQ ID NO: 22224
  Description of Unknown: LeftRegion for integrase B9385 sequence

SEQ ID NO: 22385 - DNA, 260 bp, Unknown
  Description of Unknown: LeftRegion for integrase B9386 sequence
gaggaaactttgcaagcgcggaatgatgagctagaacgccatgttgacgcaaaggccgataccattgagatcatgcggcgcggcgtgcatatccgaaacggcgtgattgctataatgttcctcatcatcgtttttctcgctgtgtggtgcgtgtacattgattttcattgtatagattacggattttggagggggattcgatgagagcggcgctatatatccgcgtctcgagcgaggagcaggcgcggcatggcttgtca

SEQ ID NO: 22386 - DNA, 260 bp, Unknown; identical to SEQ ID NO: 22348
  Description of Unknown: LeftRegion for integrase B9387 sequence

SEQ ID NO: 22387 - DNA, 260 bp, Unknown
  Description of Unknown: LeftRegion for integrase B9388 sequence
atcatagaacacttgacgccgaccgaggaaacgttgcaggcgcgcaacgatgagctggaacgccacgttgacgcgaaagcggacatgatcgagattatgcggcgtggagtgcgtatccgaaacggcgtgattgctataatgtttgtcattatcgtcctgctggccgcgtggtgcttgtacattgattggagggggatttgatgatagcggcattgtatatccgcgtctcgagcgaggaacaggcccggcatggcctgtcc

SEQ ID NO: 22388 - DNA, 260 bp, Unknown
  Description of Unknown: LeftRegion for integrase B9389 sequence
atttatatgcttataggcgtatgcagtattcttttgtgcgccgttgtatggtacgtcatatttgacatccaggtagagaccgccggtattttccgctcggctgggacaagcatttttgcgggcgtcctcgccctgatactgaacgcctccgtcgcaaccatcatttacgccttcaaaagcatttacaaggggaaaaagaaatgagagttgcactttacatccgtgtttcgacggaagaacaagccgttcacggtctttcc

SEQ ID NO: 22389 - DNA, 260 bp, Unknown
  Description of Unknown: LeftRegion for integrase B9390 sequence
atttccgaacacttgacgccgactgaggaaactttgcaagcacggaatgatgagttggaacgccacgttgacgcaaaagcagacacgatcgagattatgcggcgcggtgtccgtatccgaaacggcgtgattgctataatgtttgtcattatcgttctactggctgcatggtgcttgtagattgattggagggggacttgatgagagcagcattgtatatacgcgtgtccagcgaggaacaagcgcggcatggtttatca

SEQ ID NO: 22390 - DNA, 260 bp, Unknown; identical to SEQ ID NO: 22369
  Description of Unknown: LeftRegion for integrase B9391 sequence

SEQ ID NO: 22391 - DNA, 260 bp, Unknown; identical to SEQ ID NO: 22369
  Description of Unknown: LeftRegion for integrase B9392 sequence

SEQ ID NO: 22392 - DNA, 260 bp, Unknown
  Description of Unknown: LeftRegion for integrase B9393 sequence
aacggaacgtggtaagcgtttttgggaagaatatcttcgcgaaaaggaaaaagaggctcaaaaaacagcctgaattctattctctgggaattttaataaaaaatgcagtttagtgctttaaatcgttgacaaattcttttgaaagtgatatactattaaataaagaaaaccaacaacgcaacgacaataaggaggtagcaatgaaggcagtaatttatgctcgttactcttgtgataaccaacgtgaagagagtatcgaa

SEQ ID NO: 22393 - DNA, 260 bp, Unknown; identical to SEQ ID NO: 22369
  Description of Unknown: LeftRegion for integrase B9394 sequence

SEQ ID NO: 22394 - DNA, 260 bp, Unknown; identical to SEQ ID NO: 22374
  Description of Unknown: LeftRegion for integrase B9395 sequence

SEQ ID NO: 22395 - DNA, 260 bp, Unknown
  Description of Unknown: LeftRegion for integrase B9396 sequence
gaggaaaccttgcaggcgcggaatgatgagctggaacgccatgttgacgcaaaggccgataccattgagatcatgcggcgcggcgtgcgtatccgaaacggcgtgattgctataatgttcctcatcatcgtttttctcgctgtgtggtgcgtgtacattgattttcattgtatagattacggattttggagggggatttgatgcgagcggcgctatatatccgcgtgtccagcgaggagcaggcgcggcatggcttgtct

SEQ ID NO: 22396 - DNA, 260 bp, Unknown
  Description of Unknown: LeftRegion for integrase B9397 sequence
atttccgaacacttgacgccgaccgaggaaaccttgcaggcgcggaatgatgagctggaacgccatgttgacgcaaaggccgataccattgagatcatgcggcgcggcgtgcatatccgaaacggcgtgattgctataatgtttgtcattatcgttctgctgtctgcatggtgcttgtatattgattggagggggatttgatgagagcggcgctatatatccgagtgtccagcgaggaacaggcgcggcatggtctatca

SEQ ID NO: 22397 - DNA, 260 bp, Unknown
  Description of Unknown: LeftRegion for integrase B9398 sequence
gaggaaaccttgcaagcgcgaaatgatgagctggaacgccatgttgacgcaaaggccgataccattgagatcatgcggcgcggagtgcgtattcgcaacggcgtgattgctataatgttcctcatcatcgtttttctcgctgtgtggtgcgtgtacattgattttcattgtatagattacggattttggaggggggttcgatgagagcggcattgtatatccgcgtctcgagcgaggagcaggcgcggcatggcctgtcg

SEQ ID NO: 22398 - DNA, 260 bp, Unknown
  Description of Unknown: LeftRegion for integrase B9399 sequence
atttccgaacacttgacgccgaccgaggaaaccttgcaggcgcgcaacgatgagctggaacgccacgttgatgcaaaagcagacacgatcgagattatgcggcgcggtgtccgtatccgaaacggcgtgattgctataatgtttgtcattatcgttctactggctgcatggtgcttgtagattgattggagggggatttgatgagagcagcattgtatatacgcgtgtccagcgaggaacaagcgcggcatggtctatca

SEQ ID NO: 22399 - DNA, 260 bp, Unknown
  Description of Unknown: LeftRegion for integrase B9400 sequence
gatgggctggaacaccgccttgaaaataagcggaagaccatcggcctgatggagacggagctgaataacctacgtcattccgtaaaactatacaggtggatcatactcggtttgtcgctattgatcgtcggtctcttcgtctggtgcgtgtgggtcgatattcactgcgccaattacggcttttggaggggatagatagtatgagagtcgcactatatatccgcgtatctacggaagaacaggcacggcacggcctgtca

SEQ ID NO: 22400 - DNA, 260 bp, Unknown; identical to SEQ ID NO: 22366
  Description of Unknown: LeftRegion for integrase B9401 sequence

SEQ ID NO: 22401 - DNA, 260 bp, Unknown
  Description of Unknown: LeftRegion for integrase B9402 sequence
gaggaaactttgcaagcgcggaatgatgagctggaacgccatgttgacgcaaaggccgataccattgagatcatgcggcgcggtgtccatatccgcaacggcgcgattgctgtaatgtttgttatcatcgtttttctcgctgcgtggtgcgtgtacattgattttcattgtatagattacggattttggagggggattcgatgagagtggcattgtatatccgcgtcacgagcgaggagcaggcgcggcatgggctgtcc

SEQ ID NO: 22402 - DNA, 260 bp, Unknown
  Description of Unknown: LeftRegion for integrase B9403 sequence
gaggaaactttgcaagcgcgaaatgatgagctggaacgccatgttgacgcaaaggccgataccattgagatcatgcggcgcggcgtgcgtatccgaaacggcgtgattgctataatgtttgtcatcattgctatgcttgctgtgtggtgcgcgtacattgattttcactgcatagattacggattttggagggggattcgatgagagcggcattgtatatccgcgtctcgagcgaggagcaggcgcggcatgggctatca

SEQ ID NO: 22403 - DNA, 260 bp, Unknown; identical to SEQ ID NO: 22360
  Description of Unknown: LeftRegion for integrase B9404 sequence

SEQ ID NO: 22404 - DNA, 260 bp, Unknown
  Description of Unknown: LeftRegion for integrase B9405 sequence
gagaaaaccttgcaagcgcggaatgatgagctggaacgccatgttgacgcaaaggccgataccattgagatcatgcggcgcggcgtgcatatccgcaacggcgtgattgctataatgttcctcatcattgtttttctcgctgtgtggtgcgtgtacattgattttcattgcatagattacggattttggagggggattcgatgagagcggcattgtatatccgcgtgtccagcgaggaacaggcgcggcatggtctatca

SEQ ID NO: 22405 - DNA, 260 bp, Unknown
  Description of Unknown: LeftRegion for integrase B9406 sequence
ttacgagcaatatttatcttcattaatggtatttaaacaaatgcttcatttgggtttgttaagtgacaaagaatataacaaaagtgagaatctccttgctaataaatactgtatcaacaaaggtaatttataccgtcaaaatgacttgataataaaggactttagagtgatatatgtaatggaaaataaggaggttcaacatggaaacgaaagttactaaaattgatgcgttgcctaaacttgaaaagaaattaagagta

SEQ ID NO: 22406 - DNA, 260 bp, Unknown
  Description of Unknown: LeftRegion for integrase B9407 sequence
atttccgaacacttgacgccaaccgaggaaactttgcaagcgcgtaacgatgagctggaacgccatgttgacgcaaaagcggacatgatcgagattatgcggcgcggtgttcgtatccgaaacgttgtgattgctataatgtttgtcattatcgtctttctggccgcgtggtgcttgtacattgattggagggggatttgatgagagcggcgctatatatccgcgtgtccagcgaggaacaggcgcggcatggtttgtct

SEQ ID NO: 22407 - DNA, 260 bp, Unknown
  Description of Unknown: LeftRegion for integrase B9408 sequence
gaggaaactttgcaggcgcggaatgatgagctggaacgccatgttgacgcaaaagcagacatgatcgagatcatgcggcgtggagtgcgtatccgcaactgcgtgattgctataatgtttttcatcatcgttcttctcgctgcgtggtgcgtgtacattgattttcattgtatagattacggtttttggagggggatttgatgagagtggctctgtatatccgcgtgtcgagcgaggagcaggcgcggcatggcctgtcc

SEQ ID NO: 22408 - DNA, 260 bp, Unknown
  Description of Unknown: LeftRegion for integrase B9409 sequence
gaggaaaccttgcaagcgcggaatgatgagctggaacgccatgttgacgcaaaggccgataccattgagatcatgcggcgcggcgtgcatatccgaaacggcgtgattgctataatgttcctcatcatcgtttttctcgctgtgtggtgcgtgtacattgattttcattgtatagattacggattttggagggggatttgatgagagcggcattgtatatgcgcgtcacgagcgaggagcaggctcggcatgggctatca

SEQ ID NO: 22409 - DNA, 260 bp, Unknown
  Description of Unknown: LeftRegion for integrase B9410 sequence
aaaagatgggctggaacaccgccttgaaaataagcggaagaccatcggcctgatggaggcggaactgaataacctacgtcattccgtaaaactatacaggtggatcatgctcggtttgtcgctattgatcgtcggtctcttcgtctggtgcgtgtgggtagatattcgctgcgccaattacggattttggaggggatagtatgagagccgcactatatatccgcgtctcgacggaagaacaggcgcggcacggcctgtca

SEQ ID NO: 22410 - DNA, 260 bp, Unknown
  Description of Unknown: LeftRegion for integrase B9411 sequence
aaaagatgggctggaacaccgccttgaaaataagcggaagacaatcggcctgatggaggcggaactgaataacctacgtcattccgtaaaactatacaggtggatcatgctcggtttgtcgctattgatcgtcggtctcttcgtctggtgcgtgtgggtagatattcgctgcgccaattacggattttggaggggatagtatgagagccgcactatatatccgcgtctcgacggaagaacaggcacggcacggcctgtca

SEQ ID NO: 22411 - DNA, 260 bp, Unknown
  Description of Unknown: LeftRegion for integrase B9412 sequence
atcatagaacacttgacgccgaccgaggaaactttgcaagcgcggaatgatgaactagaacgccacgttgacgcaaaagcggacatgatcgagatcatgcggcgtggagtgcgtatccgaaacagcgtgattgctataatgtttgtcattatcgttctgctggttgcatggtgcttgtacgttgattggagggggatttgatgcgagcggcattgtatatccgcgtctcgagtgaggagcaggcgcggcatggattgtcc

SEQ ID NO: 22412 - DNA, 260 bp, Unknown
  Description of Unknown: LeftRegion for integrase B9413 sequence
atttccgaacacttgacgccgaccgaggaaactttgcaagcgcgaaatgatgagctggaacgccatgttgacgcaaaggccgataccattgagatcatgcggcgcggcgtgcatatccgaaacggcgtgattgctataatgtttgtcattatcgttctgctggctgcatggtgcttgtacgttgattggagagggatttgatgcgagcggcattgtatatccgcgtgtccagcgaggagcaggcgcggcatggcctgtca

SEQ ID NO: 22413 - DNA, 260 bp, Unknown
  Description of Unknown: LeftRegion for integrase B9414 sequence
gaggagaccttgcaggcgcgaaacgacgagctggagcgccatgttgacgcaaaggcagacatgatcgagattatgcggcgcggtgtgcatatccgaaacggcgtgattttcattttgtttgtcgtggtcgtattgctgactgcctggtgcgtgtatgtagacatccattgcccagattacggttttgggagggggatttgatgagggtggctctgtatattcgcgtttcaagcgaagaacaggcacgtcacggcctgtca

SEQ ID NO: 22414 - DNA, 260 bp, Unknown
  Description of Unknown: LeftRegion for integrase B9415 sequence
atttccgaacacttgacgccgaccgaggaaactttgcaagcgcggaaggatgagctggaacgccatgttgatgcaaaagcagacatgattgagatcatgcggcgtggagtgcgtatccgaaacgtcgtgattgctataatgtttgccattatcgttctgctggccgcgtggtgtttgtacattgattggagtgggattttatgagagtggcattgtatatccgcgtctcgagcgaggagcaggcgcggcatggcctgtca

SEQ ID NO: 22415 - DNA, 260 bp, Unknown; identical to SEQ ID NO: 22395
  Description of Unknown: LeftRegion for integrase B9416 sequence

SEQ ID NO: 22416 - DNA, 260 bp, Unknown
  Description of Unknown: LeftRegion for integrase B9417 sequence
ttacgagcaatatttatcttcattaatgatatttaaacaaatgcttcatttggatttgttaactgataaagaatataacgaaagtgagaatctccttgctaataaatactgtatcaacaaaggtaatttataccgtcaaaatgacttgataataaaggactttagagtgatatatgtaatggaaaataaggaggttcaacatggaaactaaaattactaaaattgatgcgttgcctaaacttgaaaagaaattaagagta

SEQ ID NO: 22417 - DNA, 260 bp, Unknown
  Description of Unknown: LeftRegion for integrase B9418 sequence
gaggaaaccttgcaagcgcgaaatgacgagctggaacgccacgttgacgcaaaatcagacacgatcgagattatgcgtcgcggtgtgcatatccgaaacggcgtgatttttattttgttcatcgcggtcgtattgctgactgcctggtgcgtgtatgtcgacatccattgcccagattacggtttttggagggggatttgatgagggtggctttgtatatccgcgtttcaagcgaagaacaggcacgtcacggcctgtca

SEQ ID NO: 22418 - DNA, 260 bp, Unknown; identical to SEQ ID NO: 22401
  Description of Unknown: LeftRegion for integrase B9419 sequence

SEQ ID NO: 22419 - DNA, 260 bp, Unknown; identical to SEQ ID NO: 22369
  Description of Unknown: LeftRegion for integrase B9420 sequence

SEQ ID NO: 22420 - DNA, 260 bp, Unknown
  Description of Unknown: LeftRegion for integrase B9421 sequence
atttccgaacacttgacgccgactgaggaaactttgcaagcacggaatgatgagttggaacgccacgttgatgcaaaggccgacaccatagagatcatgcggcgcggcgtccgtatccgaaacggcgtgattgctataatgtttgtcattatcgttctactggctgcatggtgcttgtagattgattggagggggacttgatgagagcggcattgtatatacgcgtgtccagcgaggaacaagcgcggcatggtctatca

SEQ ID NO: 22421 - DNA, 260 bp, Unknown
  Description of Unknown: LeftRegion for integrase B9422 sequence
gaggagaccttgcaggcgcgaaacgacgagctggagcgccatgttgacgcaaaggcagacatgatcgagattatgcggcgcggtgtgcatatccgaaacggcgtgattttcattttgtttgtcgtggtcgtattgctgactgcctggtgcgtgtatgtagacatccattgcccagattacggtttttggagggggatttgatgagggtggctctgtatattcgcgtttcaagcgaagaacaggcacgtcacggcctgtca

SEQ ID NO: 22422 - DNA, 260 bp, Unknown
  Description of Unknown: LeftRegion for integrase B9423 sequence
atttccgaacacttgacgccgaccgaggaaaccttgcaggcgcgcaatgatgagctggaacgccacgttgatgcaaaagcagacacgatcgagattatgcggcgcggtgtccgtatccgaaacggcgtaattgctataatgtttgtcattatcgttctactggctgcatggtgcttgtagattgattggagggggatttgatgagagcagcattgtatatacgcgtgtccagcgaggaacaagcgcggcatggcctatca

SEQ ID NO: 22423 - DNA, 260 bp, Unknown; identical to SEQ ID NO: 22354
  Description of Unknown: LeftRegion for integrase B9424 sequence

SEQ ID NO: 22424 - DNA, 260 bp, Unknown
  Description of Unknown: LeftRegion for integrase B9425 sequence
gagaaaaccttgcaagcgcggaatgatgagctggaacgccatgttgacgcgaaagccgataccattgagatcatgcggcgcggtgtgcgtatccgcaacggcgtgattgctatattgttcctcatcaccgtttttctcgctgcgtggtgcgtgtacatcgatttccattgcatagattacggattttggaggggggttcgatgagagcggcattgtatatccgcgtctcgagcgaggagcaggcgcggcatggcttgtct

SEQ ID NO: 22425 - DNA, 260 bp, Unknown
  Description of Unknown: LeftRegion for integrase B9426 sequence
gaggagaccttgcaggcgcgaaacgacgagctggagcgccatgttgacgcaaaggcagacatgatcgagattatgcggcgcggtgtgcatatccgaaacgccgtgatttttattttatttgtggtggtggtgttactgaccgcgtggtgcgtgtatgtcgatttgcattgcgcagattacggattttggagggggcggtgatgagagcagcactgtatatccgcgtgtcgagcgacgaacaggcgcggcatggcctgtca

SEQ ID NO: 22426 - DNA, 260 bp, Unknown
  Description of Unknown: LeftRegion for integrase B9427 sequence
atttatatgcttataggcgtatgcagtattcttttgtgcgccgttgtatggtacgtcatatttgacatcaaggtagagaccgccggtattttccgctcggctgggacaagcatttttgcgggcgtcctcgccctgatactgaacgcctccgtcgcaaccatcatttacgccttcaaaagcatttacaaggggaaaaagaaatgagagttgcactttatgtccgcgtctccacggaagaacaagccgttcacggcctttcc

SEQ ID NO: 22427 - DNA, 260 bp, Unknown; identical to SEQ ID NO: 22369
  Description of Unknown: LeftRegion for integrase B9428 sequence

SEQ ID NO: 22428 - DNA, 260 bp, Unknown; identical to SEQ ID NO: 22351
  Description of Unknown: LeftRegion for integrase B9429 sequence

SEQ ID NO: 22429 - DNA, 260 bp, Unknown
  Description of Unknown: LeftRegion for integrase B9430 sequence
gaggaaactttgcaagcgcgtaacgacgagctggaacgccatgttgatgcaaaagctgataccatcgagatcatgcggcgcggcgtccgtattcgcaacgttgtgattgctataatgtttgtcatcattgctatgcttgctgtgtggtgcgtgtacattgatttacattgtatagattacggattttggagggggattcgatgagggcggcactatatatccgcgtgtccagcgaggaacaggcgcggcatggactgtcc

SEQ ID NO: 22430 - DNA, 260 bp, Unknown
  Description of Unknown: LeftRegion for integrase B9431 sequence
agaagaaaccctccaagcggagaaagtcggcctcgaaaagcatttgtccagcaaacggcagattattacgatgatggagcagggcgtgaaaacccggaaccgcatcattgccgctttgctggttttattgtttttctccatatcctatgcgttgtaccttgatttcaattgtatccaaatgggcttctggaggggatagtatgagagccgcactatatatccgcgtctcgacggaagaacaggcgcggcacggcctgtca

SEQ ID NO: 22431 - DNA, 260 bp, Unknown
  Description of Unknown: LeftRegion for integrase B9432 sequence
atttccgaacacttgacaccgaccgaggaaactttgcaggcgcggaatgacgagctggaacgccatgttgacgcgaaagcggacatgatcgagatcatgcggcgcggcgtgcgtatccgcaacggcgtgattgctataatgtttgtcattatcgttctgctgtctgcatggtgcttgtatattgattggagggggatttgatgagagcggcgctatatatccgagtgtccagcgaggaacaggcgcggcatggtctatca

SEQ ID NO: 22432 - DNA, 120 bp, Unknown
  Description of Unknown: LeftRegion for integrase B9433 sequence
tgtgtggtgcgtgtacattgattttcattgcatagattacggattttggagggggattcgatgagagcggcattgtatatccgcgtctcgagcgaggagcaggcgcggcatggcttgtct

SEQ ID NO: 22433 - DNA, 260 bp, Unknown
  Description of Unknown: LeftRegion for integrase B9434 sequence
gagaaaaccttgcaagcgcggaatgatgagctggaacgccatgttgacgcaaaggccgataccattgagatcatgcggcgcggtgtgcgtatccgcaatggcgtgattgctataatgtttgtcatcattgctatgcttgctgtgtggtgcgcgtacattgattttcactgcatagattacggattttggagggggattcgatgagagcggcattgtatatccgcgtgtccagcgaggaacaggcgcggcatggcctgtcc

SEQ ID NO: 22434 - DNA, 260 bp, Unknown
  Description of Unknown: LeftRegion for integrase B9435 sequence
gaggaaactttgcaagcgcgcaacgatgagctggaacgccatgttgacgcaaaggccgataccattgagatcatgcggcgcggtgtccatatccgcaacggcgcgattgctgtaatgtttgttatcatcgctcttctcgctgcgtggtgcgtgtacattgattttcattgtgtagattacggattttggagggggctctgatgagagcggcattgtatatccgcgtctcgagcgaggagcaggcgcggcacggcttgtcc

SEQ ID NO: 22435 - DNA, 260 bp, Unknown; identical to SEQ ID NO: 22374
  Description of Unknown: LeftRegion for integrase B9436 sequence

SEQ ID NO: 22436 - DNA, 260 bp, Unknown; identical to SEQ ID NO: 22412
  Description of Unknown: LeftRegion for integrase B9437 sequence

SEQ ID NO: 22437 - DNA, 260 bp, Unknown
  Description of Unknown: LeftRegion for integrase B9438 sequence
gaagagaccttgcaggcgcgaaatgacgagctggagcgccatgttgacgcaaaggaagacatgatcgagattatgcggcgtggtgtccatatccgcaacgccgtgatttttattttatttgtggtggtggtgttactgaccgcgtggtgcgtgtatgtcgatttgcattgcgcagattacggattttggagggggcggtgatgagagcagcactgtatatccgcgtgtcgagcgaagaacaggcacgtcacggcctgtca

SEQ ID NO: 22438 - DNA, 260 bp, Unknown; identical to SEQ ID NO: 22409
  Description of Unknown: LeftRegion for integrase B9439 sequence

SEQ ID NO: 22439 - DNA, 260 bp, Unknown
  Description of Unknown: LeftRegion for integrase B9440 sequence
gaggaaactttgcaagcgcggaatgatgagctggaacgccatgttgacgcgaaagcggataccattgagatcatgcggcgcggcgtgcgtatccgaaacggcgtgattgctataatgttcctcatcatcgtttttctcgctgtgtggtgcgtgtacattgattttcattgtatagattacggattttggagggggattcgatgagagtggcattgtatatccgcgtcacgagcgaggagcaggcgcggcatgggctgtcc

SEQ ID NO: 22440 - DNA, 260 bp, Unknown
  Description of Unknown: LeftRegion for integrase B9441 sequence
gaggaaaccttgcaagcgcggaatgatgagctggaacgccatgttgacgcaaaggccgataccattgagatcatgcggcgcggtgtccatatccgcaacggcgtgattgctataatgttcctcatcatcgtttttctcgctgtgtggtgcgtgtacattgattttcattgtatagattacggattttggatggggatttgatgcgagcggcgctatatatccgcgtgtctagcgaggaacaggcgcggcatgggctgtcc

SEQ ID NO: 22441 - DNA, 260 bp, Unknown; identical to SEQ ID NO: 22348
  Description of Unknown: LeftRegion for integrase B9442 sequence

SEQ ID NO: 22442 - DNA, 260 bp, Unknown; identical to SEQ ID NO: 22401
  Description of Unknown: LeftRegion for integrase B9443 sequence

SEQ ID NO: 22443 - DNA, 260 bp, Unknown
  Description of Unknown: LeftRegion for integrase B9444 sequence
atttccgaacacttgacgccgaccgaggaaaccttgcaggcgcgaaacgatgagctggaacgccacgtcgacgcaaaggctgacacgatcgagattatgcggcgcggtgtccgtatccgaaacggcgtaattgctataatgtttgtcattatcgttctactggctgcatggtgcttgtagattgattggagggggatttgatgagagcggcattgtatatacgcgtgtccagcgaggaacaagcgcggcatggtctatca

SEQ ID NO: 22444 - DNA, 260 bp, Unknown
  Description of Unknown: LeftRegion for integrase B9445 sequence
gaagagaccttgcaggcgcgaaatgacgagctggagcgccatgttgacgcaaaggaagacatgatcgagatcatgcggcgtggcgtccatatccgcaacgccgtgatttttattttatttgtggtggtggtgttactgaccgcgtggtgcgtgtatgtcgatttgcattgcgcagattacggattttggagggggctgtgatgagagcagcactgtatatccgcgtttcgagcgaagagcaggcgcggcatggcctgtca

SEQ ID NO: 22445 - DNA, 260 bp, Unknown
  Description of Unknown: LeftRegion for integrase B9446 sequence
aaaagatgggctggaacaccgccttgaaaataagcggaagaccatcggcctgatggaggcggaactgaataacctacgtcattccgtaaaactatacaggtggatcatgctcggtttgtcgctattgatcgtcggtctctccgtctggtgcgtgtgggtagatattcgctgcgccaattacggattttggaggggatagtatgagagccgcactatatatccgcgtctcgacggaagaacaggcgcggcacggcctgtca

SEQ ID NO: 22446 - DNA, 260 bp, Unknown
  Description of Unknown: LeftRegion for integrase B9447 sequence
atttttatgctgctcggcgtttgcgccctgctgctcgtttcagtcattagctatgtcatcttcgacatacagctcacgaccgccgggcttttccaatcggcaaaaacaagcacgcttgccgttttcctcggccttgtcgttctcgccgccgtcggctccatcggatacgccgttcatacgattcacaaagggaggaagaaatgagagttgcgctttacatccgcgtgtcaaccgaagaacaagccgttcacggcctttcc

SEQ ID NO: 22447 - DNA, 260 bp, Unknown; identical to SEQ ID NO: 22421
  Description of Unknown: LeftRegion for integrase B9448 sequence

SEQ ID NO: 22448 - DNA, 260 bp, Unknown
  Description of Unknown: LeftRegion for integrase B9449 sequence
gaggaaaccttgcaagcgcggaatgatgagctggaacgccatgttgacgcaaaggccgataccattgagatcatgcggcgcggcgtgcgtattcgaaacggcgtaattgctataatgttcctcatcatcgtttttctcgctgtgtggtgcgtgtacattgattttcattgtatagattacggattttggagggggattcgatgagagcggcgctatatatccgcgtgtccagcgaggaacaggcgcggcatggtctatca

SEQ ID NO: 22449 - DNA, 260 bp, Unknown; identical to SEQ ID NO: 22421
  Description of Unknown: LeftRegion for integrase B9450 sequence

SEQ ID NO: 22450 - DNA, 260 bp, Unknown; identical to SEQ ID NO: 22374
  Description of Unknown: LeftRegion for integrase B9451 sequence

SEQ ID NO: 22451 - DNA, 260 bp, Unknown; identical to SEQ ID NO: 22350
  Description of Unknown: LeftRegion for integrase B9452 sequence

SEQ ID NO: 22452 - DNA, 260 bp, Unknown
  Description of Unknown: LeftRegion for integrase B9453 sequence
atttttatgctgctcggtgtttgcgctcttctgctagtttcagtcattagctatatcgtcttcgacatacagatcacgaccgccgggcttttccggtcagcaaaaacaagcacgcttgcggtgttcctaggccttgtcgttctcgccgccgtcggctccatcgggtacgccgttcacacgatcaacgtagggaggaagaaatgagagttgcgctttacatccgcgtttcgacggaagaacaagccgttcatggcctttcc

SEQ ID NO: 22453 - DNA, 260 bp, Unknown; identical to SEQ ID NO: 22445
  Description of Unknown: LeftRegion for integrase B9454 sequence

SEQ ID NO: 22454 - DNA, 260 bp, Unknown
  Description of Unknown: LeftRegion for integrase B9455 sequence
gagaaaaccttgcaagcgcggaatgatgagctggaacgccatgttgacgcgaaagccgataccattgagatcatgcggcgcggtgtgcgtatccgcaacggcgtgattgctatattgttcctcatcaccgtttttctcgctgcgtggtgcgtgtacatcgatttccattgcatagattacggattttggaggggggttcgatgagagcggcattgtatatccgcgtctcgagcgaggagcaggcgcggcatggtctatca

SEQ ID NO: 22455 - DNA, 260 bp, Unknown
  Description of Unknown: LeftRegion for integrase B9456 sequence
gaggaaactttgcaagcgcgaaatgatgagctggaacgccatgttgacgcaaaggccgataccattgagatcatgcggcgcggcgtgcgtatccgaaacggcgtgattgctataatgttcctcatcatcgtttttctcgctgtgtggtgcgtgtacattgattttcattgcatagattacggattttggaggggggttcgatgagagcggcattgtatatccgcgtctcgagcgaggagcaggcgcggcatgggctgtcc

SEQ ID NO: 22456 - DNA, 260 bp, Unknown; identical to SEQ ID NO: 22364
  Description of Unknown: LeftRegion for integrase B9457 sequence

SEQ ID NO: 22457 - DNA, 260 bp, Unknown
  Description of Unknown: LeftRegion for integrase B9458 sequence
atttccgaacacttgacgccgaccgaggaaaccttgcaggcgcggaatgatgagctggaacgccatgttgacgcaaaggccgataccattgagatcatgcggcgcggcgtgcatatccgaaacggcgtgattgctataatgtttgtcattatcgttctgctggctgcatggtgcttgtacgttgattggagggggatttgatgcgagcggcattgtatatccgcgtgtccagcgaggagcaggcgcggcatggtctatca

SEQ ID NO: 22458 - DNA, 260 bp, Unknown; identical to SEQ ID NO: 22348
  Description of Unknown: LeftRegion for integrase B9459 sequence

SEQ ID NO: 22459 - DNA, 260 bp, Unknown; identical to SEQ ID NO: 22420
  Description of Unknown: LeftRegion for integrase B9460 sequence

SEQ ID NO: 22460 - DNA, 260 bp, Unknown
  Description of Unknown: LeftRegion for integrase B9461 sequence
gagaaaaccttgcaagcgcggaatgatgagctggaacgccatgttgacgcgaaagccgataccattgagatcatgcggcgcggtgtgcgtatccgcaacggcgtgatcgctataatgttcctcatcatcgtttttctcgctgtgtggtgcgtgtacattgattttcattgcatagattacggattttggagggggattcgatgagagcggcattgtatatgcgcgtcacgagcgaggagcaggcgcggcatgggctatca

SEQ ID NO: 22461 - DNA, 260 bp, Unknown; identical to SEQ ID NO: 22411
  Description of Unknown: LeftRegion for integrase B9462 sequence

SEQ ID NO: 22462 - DNA, 260 bp, Unknown; identical to SEQ ID NO: 22350
  Description of Unknown: LeftRegion for integrase B9463 sequence

SEQ ID NO: 22463 - DNA, 260 bp, Unknown
  Description of Unknown: LeftRegion for integrase B9464 sequence
atttccgaacacttgacgccgaccgaggaaactttgcaagtgcgaaatgatgagctggaacgccatgttgacgcaaaggccgataccattgagatcatgcggcgcggcgtgcatatccgaaacggcgtgattgctataatgtttgtcattatcgttctgctggctgcatggtgcttgtacgttgattggagagggatttgatgcgagcggcattgtatatccgcgtgtccagcgaggagcaggcgcggcatggcctgtca

SEQ ID NO: 22464 - DNA, 260 bp, Unknown; identical to SEQ ID NO: 22401
  Description of Unknown: LeftRegion for integrase B9465 sequence

SEQ ID NO: 22465 - DNA, 260 bp, Unknown; identical to SEQ ID NO: 22421
  Description of Unknown: LeftRegion for integrase B9466 sequence

SEQ ID NO: 22466 - DNA, 260 bp, Unknown
  Description of Unknown: LeftRegion for integrase B9467 sequence
tcgttcgggatttccgaacacctgacgccgaccgaggaaactttgcaagcgcggaatgatgagctggaacgccatgttgacgcaaaggccgataccattgagatcatgcggcgcggtgtccatatccgcaacggcgcgattgctgtaatgtttgttatcatcgtttttctcgctgcgtggtgcttttggagggggatttgatgagagcggcgctatatatccgcgtgtccagcgaggaacaggcgcggcatggtctatca

SEQ ID NO: 22467 - DNA, 260 bp, Unknown; identical to SEQ ID NO: 22369
  Description of Unknown: LeftRegion for integrase B9468 sequence

SEQ ID NO: 22468 - DNA, 260 bp, Unknown; identical to SEQ ID NO: 22420
  Description of Unknown: LeftRegion for integrase B9469 sequence

SEQ ID NO: 22469 - DNA, 260 bp, Unknown; identical to SEQ ID NO: 22348
  Description of Unknown: LeftRegion for integrase B9470 sequence

SEQ ID NO: 22470 - DNA, 260 bp, Unknown; identical to SEQ ID NO: 22421
  Description of Unknown: LeftRegion for integrase B9471 sequence

SEQ ID NO: 22471 - DNA, 260 bp, Unknown; identical to SEQ ID NO: 22374
  Description of Unknown: LeftRegion for integrase B9472 sequence

SEQ ID NO: 22472 - DNA, 260 bp, Unknown; identical to SEQ ID NO: 22466
  Description of Unknown: LeftRegion for integrase B9473 sequence

SEQ ID NO: 22473 - DNA, 260 bp, Unknown
  Description of Unknown: LeftRegion for integrase B9474 sequence
gaggaaaccttgcaagcgcgcaacgacgaactggaacgccacgtggacgcaaaagcagacacgatcgagatcatgcggcgcggcgtccgtatccgaaacggcgtggttgctataatgttcctcatcatcgtttttctcactgtgtggtgcgtgtacattgattttcattgtatagattacggattttggagggggatttgatgagagcggcattgtatatgcgcgtcacgagcgaggagcaggctcggcatgggctatca

SEQ ID NO: 22474 - DNA, 260 bp, Unknown; identical to SEQ ID NO: 22421
  Description of Unknown: LeftRegion for integrase B9475 sequence

SEQ ID NO: 22475 - DNA, 260 bp, Unknown
  Description of Unknown: LeftRegion for integrase B9476 sequence
ttcttttgtacttttattctttttcttttgtacttatgtacctcttttgtatttttgtatatctctttggtacgtttatatcttatcattccgcgtcgatttacgcaatcaattttcctcgcatttttcgacatatcttgacattttcccttgcatcacttatgatgcagttaagaccaccaagaaaggagtgtatgtatatgaaaaaagttggtctatatgtgcgtgtatccacgcaggagcagaaattgcacggtatc

SEQ ID NO: 22476 - DNA, 260 bp, Unknown
  Description of Unknown: LeftRegion for integrase B9477 sequence
ttttgtacttttattcttttttcttttgtacttatgtacctcttttgtatttttttgtatatctctttggtacgtttatatcttatcattccgcgtcgatttgcgcaatcaatttccctcgcatttttcgacatatcttgacatttccccttgcatcacttatgatgcagttaagaccaccaagaaaggagtgtatgtatatgaaaaaagttggtctatatgtgcgtgtatccacgcaggagcagaaattgcacggtatc

SEQ ID NO: 22477 - DNA, 260 bp, Unknown
  Description of Unknown: LeftRegion for integrase B9478 sequence
tcttttgtacttttattctttttcttttgtacttatgtacctcttttgtatttttgtatatctctttggtacgtttatatcttatcattccgcgtcgatttgcgcaatcaagttccctcgcatttttcgacatatcttgacattttcctttgcatcacttatgatgcaattgaagccataaaagaaaggagtacgtgcttatgaaaaaagttggtttgtatgttcgtgtgtctacacaggaacaaaaactgcatggcatc

SEQ ID NO: 22478 - DNA, 260 bp, Unknown
  Description of Unknown: LeftRegion for integrase B9479 sequence
tcttttgtacttttattctttttcttttgtacttatgtacctcttttgtatttttgtatatctctttggtacgtttatgtcttatcattccgcgtcgatttgcgcaatcaagttccctcgcatttttcgacatatcttgacattttcctttgcatcacttatgatgcaattgaagccataaaagaaaggagtacatgcttatgaaaaaagttggtttgtatgttcgtgtgtctacacaggaacaaaaactgcatggcatc

SEQ ID NO: 22479 - DNA, 260 bp, Unknown
  Description of Unknown: LeftRegion for integrase B9480 sequence
actatatctcctatctaaattcattaaatttctttaaaaagatgctattttgcaaggtaattgacgagaaagagtatgaaaaagcagaggatttgcttgctaaaaaatactgtatcaataaagggaatttatatcgtcaaaatgagttgataaataagtcctttagagcgatatatggtgatgaaaaataggaggtaattatggacaaaaagataactgtaattgatgcccttcctaagttagaaaagaagctaagagta

SEQ ID NO: 22480 - DNA, 260 bp, Unknown; identical to SEQ ID NO: 22224
  Description of Unknown: LeftRegion for integrase B9481 sequence

SEQ ID NO: 22481 - DNA, 260 bp, Unknown
  Description of Unknown: LeftRegion for integrase B9482 sequence
atttatatgcttatcggcgtatgcagtattcttttatgtgccgttgtatggtacgtcatatttgacatccaggtagagaccgccggtattttccgctcggctgggacaagcatttttgcgggcgtcctcgccctgatactgaacgcctccgtcgcaaccatcatttacgccttcaaaagcattcacaaggggagaaagaaatgagaattgcactttatgtccgcgtctccacggaagaacaagccgttcacggcctttcc

SEQ ID NO: 22482 - DNA, 260 bp, Unknown
  Description of Unknown: LeftRegion for integrase B9483 sequence
acaagatcatgcagtacaaggcagcggtgcaaattttgaaaacgcttcttgctgaacgaaaaataacagaagaagattatcggcgtgtgcatgacatcttagccaaggaatgcggcataaactcgtgcagtatattccttgactcttgtccgatcatacggtaatatgtcatcggaaagggggaggttatcacggcacgagtgatacaaaaagttgtatttccgcagaaaaagcagtttccattgaaacggacggcagcc

SEQ ID NO: 22483 - DNA, 260 bp, Unknown
  Description of Unknown: LeftRegion for integrase B9484 sequence
cgacgcactgagatacaaagaactcattatgaagctcgcaaaaacaaagcgagtgatcacgcgcaaagatgtggtagaactccttcatgtttccgggccgcaggcgtatcgtcttttgaaaaaactggaaggcgagggcagtctgcgctgtgaaggaacaaccaggaacgcacaatatcatatcgtctagggagaaaactatgaacgcagttatttatgcacgatactcctctgataaccagcgtgaagaatccattgag

SEQ ID NO: 22484 - DNA, 260 bp, Unknown
  Description of Unknown: LeftRegion for integrase B9485 sequence
atttatatgctcataggcgtatgcagtattcttttgtgcgccgttgtatggtacatcatatttgacatccagatagagaccgccggtattttccgctcggctgggacaagcatttttgcgggcgtcctcgccctgatactgaacgcctccgtcgcaaccatcatttacgccttcaaaagcatttacaaggggaaaaagaaatgagagttgcactttatgtccgcgtctccacggaagaacaagccgttcacggcctttcc

SEQ ID NO: 22485 - DNA, 260 bp, Unknown
  Description of Unknown: LeftRegion for integrase B9486 sequence
atttatatgcttataggcgtatgcagtattcttttgtgcgccgttgtatggtacgtcatatttgacatccaggtagagaccgccggtattttccgctcggctgggacaagcatttttgcgggcgtcctcgccctgatactgaacgcctccgtcgcaaccatcatttacgccttcaaaagcattcacaaggagaaaaagaaatgagagttgcactttatgtccgcgtctccacggaagaacaagccgttcacggcctttcc

SEQ ID NO: 22486 - DNA, 260 bp, Unknown; identical to SEQ ID NO: 22482
  Description of Unknown: LeftRegion for integrase B9487 sequence

SEQ ID NO: 22487 - DNA, 260 bp, Unknown
  Description of Unknown: LeftRegion for integrase B9488 sequence
atttatatgctcataggcgtatgcagtattcttttgtgcgccgttgtatggtacgtcatatttgacatccaggtagagaccgccggtattttccgctcggctgggacaagcatttttgcgggcgtcctcgccctgatactgaacgcctccgtcgcaaccatcatttacgccttcaaaagcattcaaaaggggaaaaagaaatgagagttgcactttatgtccgcgtctccacggaagaacaagccgttcacggcctttcc

SEQ ID NO: 22488 - DNA, 260 bp, Unknown
  Description of Unknown: LeftRegion for integrase B9489 sequence
atttttatgctcctcggtgtttgcgctcttctgctcgtttcagtcattagctatatcgtcttcgacatacagatcatgaccgccgggcttttccggtcagcaaaaacaagcacgcttgcggtgttcctgggccttgtcgttctcgctgccatcggcgccatcgggtacgccgttcatacgatccacaaagggagaaagaaatgagagttgcactttacatccgcgtttcgacggaagaacaagccgttcacggcctttcc

SEQ ID NO: 22489 - DNA, 260 bp, Unknown
  Description of Unknown: LeftRegion for integrase B9490 sequence
atttatatgctcataggcgtatgcagtattcttttgtgcgccgttgtatggtacgtcatatttgacattcaggtagagaccgccggtattttccgctcggctgggacaagcatttttgcgggtgtcctcgccctgatactgaacgcctccgtcgcaaccatcatttacgccttcaaaagcattcacaaggggaaaaagaaatgagagttgcactttatgtccgcgtctccacggaagaacaagccgttcacggcctttcc

SEQ ID NO: 22490 - DNA, 260 bp, Unknown
  Description of Unknown: LeftRegion for integrase B9491 sequence
atttatatgctcatcggcgtatgcagtattcttttatgtgccgttgtatggtacgtcatttttgacattcaggtagagagcgccgggattttccgctcggcggggacaagcgtttttgcgggcgtcctcgccctgatactgaacgcctccgtcgcaaccatcatttacgccttcaaaagcatttacaaggggaaaaagaaatgagagttgcactttacatccgtgtttcgacggaagaacaagccgttcacggtctttcc

SEQ ID NO: 22491 - DNA, 260 bp, Unknown
  Description of Unknown: LeftRegion for integrase B9492 sequence
atttatatgctcataggcgtatgcagtattcttttgtgcgccgttgtatggtacgtcatatttgacatccaggtagagaccgccggtattttccgctcggctgggacaagcatttttgcgggtgtcctcgccctgatactgaacgcctccgtcgcaaccatcatttacgccttcaaaagcattcacaaggggaaaaagaaatgagagttgcactttatgtccgcgtctccacggaagaacaagccgttcacggcctttcc

SEQ ID NO: 22492 - DNA, 260 bp, Unknown
  Description of Unknown: LeftRegion for integrase B9493 sequence
atttatatgctcataggcgtatgcagtattcttttgtgcgccgttgtatggtacgtcatatttgacatccaggtagagaccgccggtattttccgctcggctgggacaagcatttttgcgggcgtcctcgccctgatactgaacgcctccgtcacaattatcatttacgccttcaaaagcatttacaaggggaaaaagaaatgagagttgcactttatgtccgcgtctccacggaagaacaagccgttcacggcctttcc

SEQ ID NO: 22493 - DNA, 260 bp, Unknown
  Description of Unknown: LeftRegion for integrase B9494 sequence
atttatatgctcataggcgtatgcagtatccttttgtgcgcagttgtatggtacgtcatatttgacatccaggtagagaccgccggtattttccgttcggctgggacaagcatttttgcgggcgtcctcgccctgatactgaacgcctccgtcgcaaccatcatttacgccttcaaaagcatttacaaggggaaaaagaaatgagagttgcactttatgtccgcgtctccacggaagaacaagccgttcacggcctttcc

SEQ ID NO: 22494 - DNA, 260 bp, Unknown; identical to SEQ ID NO: 22482
  Description of Unknown: LeftRegion for integrase B9495 sequence

SEQ ID NO: 22495 - DNA, 260 bp, Unknown
  Description of Unknown: LeftRegion for integrase B9496 sequence
atttatatgctcataggcgtatgcagtattcttttgtgcgctgttgtatggtacgtcatatttgacatccaagtagagaccgccggtattttccgctcggctgggacaagcatttttgcgggcgtcctcgccctgatactgaacgcctccgtcacaaccatcatttacgccttcaaaagcattcacaaggggaaaaagaaatgagagttgcactttatgtccgcgtctccacggaagaacaagccgttcacggcctttcc

SEQ ID NO: 22496 - DNA, 260 bp, Unknown; identical to SEQ ID NO: 22316
  Description of Unknown: LeftRegion for integrase B9497 sequence

SEQ ID NO: 22497 - DNA, 260 bp, Unknown
  Description of Unknown: LeftRegion for integrase B9498 sequence
gattgcggagaaaaagccgaagcctcttctgcacggaacgcggctggtgcgaatatggaagggaaaaaagtatgaggtgactctctgcgacgagggtaaatttgaatacaacggcatcttcttcaaatcgctctcggcggtggcaaaagcaatcacgggaacgcactggaacgggaaaaccttcttcggagtgaaataatatggataaagaaaacaaggcagtacgttgcgcaatctatacgcggaagagccacgaggag

SEQ ID NO: 22498 - DNA, 260 bp, Unknown
  Description of Unknown: LeftRegion for integrase B9499 sequence
ataagatcattacgtatcaaaccactgtttcgattttgaaaagctggatgcgtgctggattggtcacgccggaggaattccaaaaaatcaacaccataatcgccgaacgttccggtttatctttgtgcagtatattccttgactcctgcccgatcgtacggtaatatgtcatcggaaagggggagattatcacggcacgagtgatacaaaaagttgcgtttccacagaaaaagccgttcctgttgaaacggacggcagcc

SEQ ID NO: 22499 - DNA, 260 bp, Unknown; identical to SEQ ID NO: 16310
  Description of Unknown: LeftRegion for integrase B9500 sequence

SEQ ID NO: 22500 - DNA, 260 bp, Unknown
  Description of Unknown: LeftRegion for integrase B9501 sequence
gtctgtttgcctaccagatggcgatggcactcgcccggagtatgcgttccaaggggctgatctcagccaaagagtacgctaaaattgatacgatcatcgccaataaatatggcatatcttcgtgtagtatattccgctgaaatcgctggataactggggcattcagaggtaatatgtaacacacctaaggaggtgaaccgatggatagaattataaaacgggtcgatttcccgaaaatcatgcagccgcagtttttgaaa

SEQ ID NO: 22501 - DNA, 260 bp, Unknown
  Description of Unknown: LeftRegion for integrase B9502 sequence
agtatctgagatgcaggatacgccgccctgctaacatccaaatagttaggcagacaacctcggttgtctgcttttttgttgcatactatagaacacgcaaaattggcatgcaaaaacagcggattttaagtcgatgacgttttgccggtgtcggcaaaatgttggcttagccccatgctgtggtcacggaaaggacgtttatgaggatagctttatacgctcgtgtgagcaccgaagagcaggcgattcatgggctttcg

SEQ ID NO: 22502 - DNA, 260 bp, Unknown
  Description of Unknown: LeftRegion for integrase B9503 sequence
ctgcgcaatgctggatcacctcggccgagcgggggaactggacgcccaaacccgtgaacgggcaaatgccgttctcgccatgaagaccggcctgaaacgggacagcattttcctttaaattcgtcatgatatggacttgctatatcctccgaaacgagcaatatatgtagctgacgatacttgatacaaaggagaagaccatgccgagaaccgtagaacaaatccaatttactccccacatgccgaaagcccttcgggtg

SEQ ID NO: 22503 - DNA, 260 bp, Unknown
  Description of Unknown: LeftRegion for integrase B9504 sequence
gcagcaaagaagattgatgtggtgattaccatgagggctgccacgattgcccgtaactggggacagtttatggagttcatgctgatttgcagtaagagaaatgtggaagtgttgtgcattgacaaggtagaggatgcacaggccattttccaaaggattcaggagtttaagaaaaggttttttgaaggaagtgatgtaacgtgcgagtaaaagtgattaacaaacgaccagcttcggttttacaaaagaaaagggtttat

SEQ ID NO: 22504 - DNA, 260 bp, Unknown
  Description of Unknown: LeftRegion for integrase B9505 sequence
acttactaggtcttagtgaagtcagaaaaccagaagtcttagttttgtcagaaaaagagaaaatcctcattgacgcataccgtactgctaatgacatgggacaattaaacataatctatgtctgcatggatgaaatgaaaaaagcaaaaggggaaggcgtacttgtagggtaattgatttcatagaatggaggaagaaccatgtatgaggatataaaaacagcctgcctatacgttagattctcaagccataaccagact

SEQ ID NO: 22505 - DNA, 260 bp, Unknown
  Description of Unknown: LeftRegion for integrase B9506 sequence
aaaagtcaaagaatacaataccgccctcgccgtcatcagagaaatgcgctccaccgggattatcaccgatgaagatttcggcataatatgcacagttctggctgagaaatacggtctaagttcgtgcagtatatttgccggaatcgacttgataaccgcccggactgacggtaatatctgaccgataggaggtattatctatggatagaatcatagaaaaaatgcggtttgacgtgccgacgcagcccaaggcaaaacgg

SEQ ID NO: 22506 - DNA, 260 bp, Unknown
  Description of Unknown: LeftRegion for integrase B9507 sequence
ggtcacaatctacttttctaaaaacagaaataaccatgttgaaaggaatattctcgaaaaccttttggatacatttgagaacagaatgaacgcacagattggatgctgaatttctttaagttcattttcagatttcgctggatattatagaaattatgtagtattgttggtttgcaaaaatcgtatgaaagggtgatgaaatgaaaagagtatattgcttgtacagagtatcaaccaaaggtcaggttgataaagatgat

SEQ ID NO: 22507 - DNA, 260 bp, Unknown
  Description of Unknown: LeftRegion for integrase B9508 sequence
acttctccattcaaagttatgattcgcaaggccgtggcgatcttttggtaaatacgacggacaaatacgacggcaaagtaatcttaaatgatccgatcatttttcaggtctcagccgtcggcgattggagtataactctgaactaatcttaatttaagagccccaccgcaaggggctcttgtcaaacgcaggagggctatatgagagcagcgttatatgagagagtatcgacggatgagcagcggattcacggcctgtcg

SEQ ID NO: 22508 - DNA, 260 bp, Unknown
  Description of Unknown: LeftRegion for integrase B9509 sequence
tttgttcggtggttgcattgtagcaggaggcagaacggctgtcaactatcaaaattggtaaaaagcggtttcagtacatatacatgtaccgatttttgcaaagttgcacaaatcgaatttttgatttcttaatttgcacccctgttacgaaattttgtagccatgttgccaaacttcgtaaaaggagaacggagaaaaacatgaaagcagcgttatatatcagagtaagcacagaggagcaggccatacacggcctgtcc

SEQ ID NO: 22509 - DNA, 260 bp, Unknown
  Description of Unknown: LeftRegion for integrase B9510 sequence
atgccgtcgagcagctccgcaagctgggtgaattgcgggatagtggtatcctgagtgatgaggagtttgcggcgaagaagtccgtattgctcgacaagataaaataaaaaatcccccggctgttggcgcagcgcaagggggatcagaggtgggtgcttctccgcctccgattctatcatatatggaggatattgtaaatcatgcgagccgcattatatgagcgcgtttccaccgaggagcagaaaatgcacggcttatcg

SEQ ID NO: 22510 - DNA, 260 bp, Unknown
  Description of Unknown: LeftRegion for integrase B9511 sequence
attttggtgtgacattattaaaatgcaaatagaaatagctttgaggccttggtggtttatgctgccagggccttgatttttttcttttgttgtgttcgcgcagacaaaaaataaatggccttgaaaccgttaatttactttactttctgggcgttcagagtgatatatagactacaaaaatttgaaaggagtgagcttttatgcgacttagaaagattgagccgattgaagcaaagactaagaagataagagtatgcgct

SEQ ID NO: 22511 - DNA, 260 bp, Unknown
  Description of Unknown: LeftRegion for integrase B9512 sequence
tgattacggtgcggttcagaagcgagtaaacgaaatgttattataagtttgggcctgggaggagtaatccttccgggttctttttttgtattttaccagttcggtcataccgataattatacccttgaaaccgctaaattgcttgacttatagcggaacaagagcgttaataggactaccaaaaaggaaggagaattcgcatgaaacttagaaaaatagaacctttaaaacctaagcaaaaaaagcttagagtatgtgct

SEQ ID NO: 22512 - DNA, 260 bp, Unknown
  Description of Unknown: LeftRegion for integrase B9513 sequence
gtacggaaggacgtgattagggacatgaaagtagcactttatgtccgtgtcaggtatcgacactagaacaagcagaagaaggttactcaattaatgaacaaaaagataagcttaaaaagtattgcgaaatcaaggattggacgattgttaaagagtacgtagatcctggtcgctctggatcaaacatcaatcgtcccagcatgcaacagcttatcaaagatgcagatacaggattatacgatgctgtgcttgtctataag

SEQ ID NO: 22513 - DNA, 260 bp, Unknown
  Description of Unknown: LeftRegion for integrase B9514 sequence
tgattacggtgcggttcagaagcgagtaaacgaaatgttatcataagtttgggcctgggaggagtaatccttccgggttctttttttgtattttaccagttcggtcataccgataattatacccttgaaaccgctaaattgcttgacttatagcggaacaagagcgttaataggactaccaaaaaggaaggagaattcgcatgaaacttaggaaaatagaacctttaaaacctaagcaaaaaaagctaagagtatgtgct

SEQ ID NO: 22514 - DNA, 137 bp, Unknown
  Description of Unknown: LeftRegion for integrase B9515 sequence
tcgtgggctcggagatgtgtataagagacagggaataaacaataaaagcagtcggatatgcacgattttcttcttcaatgcaacgagaagaatctataacagctcaaaaaagatatatgatgatgtatgctaaaaga

SEQ ID NO: 22515 - DNA, 260 bp, Unknown
  Description of Unknown: LeftRegion for integrase B9516 sequence
gttacttacgggcctttcttttacagagccaatggtagttgaggaggtgtttgagaatggcgagaagcattacggttataccagcaaagcagcctacgataatggagaacgggcagcagatagaattgaagaagaacgtagcagcgtattgccgcgtatcaacagatcaagaagaacagttatcgagttatgagaatcaggtgcgatattacactgaggtgataaccagaaatgcggagtatgaactggttgatatttac

SEQ ID NO: 22516 - DNA, 260 bp, Unknown
  Description of Unknown: LeftRegion for integrase B9517 sequence
attcactgatattgtcctgttattaacaggtatgttctcatagttgattcggatgttctaggaatcatcctcatagttgattcggatgttctaggaatcatcctcatagttgatttagaccttgatgatttttattagacacgtttaaatacactacctaaagcgatacaatctaggtatcagttttgaggtggtaaacaatgaaacgtgtcatttcatacattcgtttctcatcagagaagcaagctaaaggcgactca

SEQ ID NO: 22517 - DNA, 260 bp, Unknown
  Description of Unknown: LeftRegion for integrase B9518 sequence
cattatttgatttgcatataatctctacaatacaatatagatgaggtatatataccatcaacatcatagaggagaattatcagaataaaatactaagagctggtttatttgagcgtgtatcaacagaagaacaatcgaaatttggttatagtattgccacacaagtagaagcacttgaagaacatgcggcaaagaatagaatgaagatagtagaccattattgtgacgctggtgttagcggaggtatagcatacaagaaa

SEQ ID NO: 22518 - DNA, 260 bp, Unknown
  Description of Unknown: LeftRegion for integrase B9519 sequence
cactaccagtttgtcatgtcatgggttcgctccctattagccaagtcccttataacaaaggcagagtacgccaaaattgatataatgatggcacagaaatacggcgtatcttcgtgcagcatatatcgctgaaatctgcgtaaaatcgttgactaatctccgaatagacggtaacatggtaagcgaaggaggtgtgctgtgtggagaaaaaagaacgaatcgtagagagggttcaattccccaatgcacagaaagtaaag

SEQ ID NO: 22519 - DNA, 260 bp, Unknown
  Description of Unknown: LeftRegion for integrase B9520 sequence
ttgtggccaatatatatttgcattatataactatgaggattactccaagaatacattttaaaataaaaaactcccccggctgctccaacagccgagggaaaattgaatacaattacacctgaagcataaccgcatcaaccgcatcttgattataccacgcttcaggttaactttgctatacctaaaggagcctgtttttaatgtccaagaattgtgttatatatgcccgctactcttctgatcgccaaagagatgaaagt

SEQ ID NO: 22520 - DNA, 260 bp, Unknown
  Description of Unknown: LeftRegion for integrase B9521 sequence
gaggtttacgatatctcccccgacgaagtcaaggagtcttatcttgaaggcgaagacctgaatgataacgccgtagttcttgatgatatcgcatgggcagaacggtatggcaagaactttgattggaaaatttttgctgtcgagcaaggcgctccggtgcaaacaccgacggtgcctttgtttaatacgctgagataataatgatgcggtggcggaataggtatacgcttacaaattacagttcggatgtcgcccagaaa

SEQ ID NO: 22521 - DNA, 260 bp, Unknown
  Description of Unknown: LeftRegion for integrase B9522 sequence
agaactcgccttcatcacggactctcacacgttgagcgtgctggcggggcggggcgtgctcacacccgcagagtatcagcgtgctcaccggttgttatggaaggcgtggacgccgatctatcaaccacagattgtgggcgaaacgactggataaacaccgcctttagagcgtgtatagacctaacgcgaaaggagaaaacgtggcacacatcagtgtggtgacaccagttcggccgccgaccccgaaactggtcaacgtg

SEQ ID NO: 22522 - DNA, 260 bp, Unknown
  Description of Unknown: LeftRegion for integrase B9523 sequence
agaactcgccttcatcacggactctcacacgttgagcgtgctggcggggcggggcgtgctcacgcccgcagagtatcagcgtgctcaccggttgttatggaaggcgtggacgccgatctatcaaccacagattgtgggcgaaacgactggataaacacttggtttagagcgtgtatagacctaacgcgaaaggagaaaacgtggcacacatcagtgtggtgacaccagttcggtcgcctgccccgaaactggtcaacgtg

SEQ ID NO: 22523 - DNA, 260 bp, Unknown
  Description of Unknown: LeftRegion for integrase B9524 sequence
cacaatgcaagctcaaagattgagccatcattaaaatttgatgttcagctcatttcgtttccatcaacgctgtttgctcaagttgaaccttgggattagggtttggtgttgcaataagctcgtcatcttattaggtggcgggctttttcaaattgaccaattatgtaattgattaaataagtaatttggaggtgattcgtttggcgagaaagaaatcaaagctcaacgacaacaacctcgccatcgcgtactaccgctac

SEQ ID NO: 22524 - DNA, 260 bp, Unknown
  Description of Unknown: LeftRegion for integrase B9525 sequence
cctttaaataaaggttgttttatggtactatgtgcaaaaatatgttagtatgtttttatgtgttaacaaacggtgcattgtgagtccatagtcctgttgcagcatgttggacagtgaaagaagttataaagaaaaaattttaggcgcaaggacgatgatgtctttgcgtctttttcttaattgacgagagatatgatttgatgaaaaaaatcagattggttttaccacctccaaaagaacagaaaaaactgagagtagca

SEQ ID NO: 22525 - DNA, 260 bp, Unknown
  Description of Unknown: LeftRegion for integrase B9526 sequence
ttcaaggctatggattactatgacacacatagcataaattaaaacagccgcttccaacatggtcgaaattgactggtttggaagcggctattttatcaattcgttgacttcacccaaacaaaggctatactgtagtcaaagaatacgtcgatgaagcgaaaagcggacgcagtaccttaacgcgtgacgcatacaatcagatgatggctgatgctatggagaacaaattcgacgttattattttccataaaatcgaccgc

SEQ ID NO: 22526 - DNA, 260 bp, Unknown
  Description of Unknown: LeftRegion for integrase B9527 sequence
aatgttaaaacttactttcaatttttgcacactttagtgtttacagtgaacacctatagattatataatcgtcttagcaaacgttgtggtaccaacgtttagcggggaaaggagtcgaaatttggatggcatttactgacaatttgcaggcgcttatgagcgcaaaagggatttcccgtcgaaaattggcgaaattatgaatggcatacgcaatgtacttgagaaaatctagaaaggacgatgacactggcatcgaggac

SEQ ID NO: 22527 - DNA, 260 bp, Unknown
  Description of Unknown: LeftRegion for integrase B9528 sequence
gtaatgattggcgaattagaaaatagtaattctggtaaagtgataaaagcaaaagaatttaagctaaacagaaaaggtaaaatgattttgtaggaggtagggaagatgaatgctgatacagtaaaaataataaaagttgaatcaaatgtatataacttaatcgaggaactatattacaaattgaaagagcaaaaattaaaatgaagaatgctattatatatgttagagtttctacagaagaacaggcaaaaaatgactta

SEQ ID NO: 22528 - DNA, 260 bp, Unknown
  Description of Unknown: LeftRegion for integrase B9529 sequence
tgcatctcgcccgactgcccatagaaatagtcaaacatcctgacttcctcgcttgttctgccttgtcacatccttgacacctccgttcgtagtatgatgaaatatgatgtatgactatcgttatttttctttataaagatggcctgccatgctacaatagccgcatctacggccaccggacaacaggaaaggagtatctcatggccagaaccgccgacaccattgccatctattcccgcaagtcccgctataccggcaag

SEQ ID NO: 22529 - DNA, 260 bp, Unknown; identical to SEQ ID NO: 14013
  Description of Unknown: LeftRegion for integrase B9530 sequence

SEQ ID NO: 22530 - DNA, 260 bp, Unknown
  Description of Unknown: LeftRegion for integrase B9531 sequence
taaggacaagtaaatcaccgatgttgaaataaggagctgaaaggcttcttattttttgctcccgataccgttaacctgagagatatataccatttaagttaacggttttcatattttcacgatataatagaattcgccggctccgagctgcggtgtgggcttatctgcccacataatctgcggcaggaggaggtgaacctatgaagataacgaagaaacaaccacttcgacctcgcggtcgcagcgaggataaaaggcag

SEQ ID NO: 22531 - DNA, 260 bp, Unknown
  Description of Unknown: LeftRegion for integrase B9532 sequence
taatgacaagtaaatcaccgatgttgaaataaggagctgaaaggcttcttattttttgctcccgataccgttaacctgagcgatttataccatttaagttaacggttttcatattttcacgatataatagaattcgccggctccgagctgcggtgtgggcttatctgcccacataatctgcggcaggaggaggtgaacctatgaagataacgaagaaacaaccacttcgacctcgcggtcgcagcgaggataaaaggcag

SEQ ID NO: 22532 - DNA, 260 bp, Unknown
  Description of Unknown: LeftRegion for integrase B9533 sequence
ataactttctacttttcactactattaaactgtattcagttttgttgcgttatttttgcaacctatttctcaaaatagtggcataaccgattgtattattatgttaactccgagcaaacaaaattcatccatatattataattatgatagaatagaagggtatgtctatcaaataatatgaataaagggagcgaagagacatggctattaagaagggtgacgatggctatcttattaatgacatgggtgaagtatggggc

SEQ ID NO: 22533 - DNA, 260 bp, Unknown; identical to SEQ ID NO: 21584
  Description of Unknown: LeftRegion for integrase B9534 sequence

SEQ ID NO: 22534 - DNA, 260 bp, Unknown
  Description of Unknown: LeftRegion for integrase B9535 sequence
gctgctgataagaaacttgatttctttttcattattccagtataaaagttttgcaattatagccaaatttgtattattaacataatatgttgtttctgcgacagttctttttaccacgatttcatacctattattttgcttattatactacaaaagaaatgtttgtttgcttcttctgaattttgtggtatcgttgacgcatgaaaaaagctgtattatatgcaagagtatcaagcaatagacaggaaaaagagggtttt

SEQ ID NO: 22535 - DNA, 260 bp, Unknown
  Description of Unknown: LeftRegion for integrase B9536 sequence
caaataatcaaaacatacgagaaataaaggtagggcgagcgatcgcccttcttttttgcccttgtagcgcaagatatggtggtaaaaccgcaccacatgttgatatacagcgatataataaagtagcgccgcctccgcatgcgtcagggtcgatgtcggcaatcgatcaaatctgtggcgcagaaggaggtgatgcattcttgaagaagattaaaatcgacagagctatacaagagcgccctgctacgcgaaagcagaca

SEQ ID NO: 22536 - DNA, 260 bp, Unknown
  Description of Unknown: LeftRegion for integrase B9537 sequence
aaataatcaaaacatacgagaaataaaggcagggcgagcaatcgcccttctttttttgcccttgtagcgcaagatatggtggtaaaaccgcaccacatgttgatatacagcgctataataaagtagcgccgcctccgcatgcgtcagggtcgatgtcggcaatcgatcaaatctgtggcgcagaaggaggtgatgcattcttgaagaagattaaaatcgacagagctatacaagagcgacctgctacacgaaagcagacg

SEQ ID NO: 22537 - DNA, 260 bp, Unknown; identical to SEQ ID NO: 22535
  Description of Unknown: LeftRegion for integrase B9538 sequence

SEQ ID NO: 22538 - DNA, 260 bp, Unknown
  Description of Unknown: LeftRegion for integrase B9539 sequence
gcaacacgcgagcgcaccgagcagagcttctttgttccgaagcaagaaatcgttgacaacggatacgacctctctattaataagtataaaaagatggagtatgttgctgaagagtacccttccacagatgaaattctgtcgaagatcgaaaagatagagcaggagattgtttctgggttggcagaattgaggtcaatgttatgattaagcggaacattcttgattgcatgacgcttgttggcggaacgcctttgcgcttt

SEQ ID NO: 22539 - DNA, 260 bp, Unknown; identical to SEQ ID NO: 21913
  Description of Unknown: LeftRegion for integrase B9540 sequence

SEQ ID NO: 22540 - DNA, 260 bp, Unknown
  Description of Unknown: LeftRegion for integrase B9541 sequence
agccatgagccatgacaacgaataataggaagccttcgggcttcttatttttttgctcagaatacatacggattgaactgcaaatatcgctcaaatatgatgcttttgcactataattaaagggcgccggctccgtgctgccgtagcctgtggatttcttgccacagttacaattctgcagcgggaggaggtgaacccgtatgaaaataaccaagaaacaaccacttcgaccgcgtgggcgcagtgatgagaaaaggcag

SEQ ID NO: 22541 - DNA, 260 bp, Unknown
  Description of Unknown: LeftRegion for integrase B9542 sequence
tgtaacgatgaagctaaaaaaaacagagagcaattagaagataatatcatagatttatttgtatcttattttaaaaataatacatataaaaattaatatagaaaatcaagagatacttcggtcatttcttgatttttttactagttattataaaatataatcaatggttatagaaaatataaatatggagctgtcttattatgactttgttttcaactaaaaataaatataacaaaacattaaagaatgctgatgtcatt

SEQ ID NO: 22542 - DNA, 260 bp, Unknown
  Description of Unknown: LeftRegion for integrase B9543 sequence
caaatgaaaaagagaatattaatacatataaagctaatattgaaaacctaattatcgctatgctgtttgattacattaaaaataaacaataatttcaacaagcaggatgatatatttctatcgtcttgcttttatctatgtgtgattataaaatatatacatagcgttataaaaggtatacgaaaataatggaggttatcatggtgatggatgaaaatttattctcaaaagaaaacaaatataaaaaaatgcagaggtca

SEQ ID NO: 22543 - DNA, 260 bp, Unknown
  Description of Unknown: LeftRegion for integrase B9544 sequence
cgttcttttatgacaggtacccgcccgctcctgatgcgcccgcgtctccggcatcctccacatccccgacttcctctacacccgtgaacaaggcgggcagtggagtggaacacaaggccgacaactgagacaccgtgtggacaaacacaggtaggagagggcgagatggaagtacctgacggaggcagaaaggaggagcgatgaagccgggaacagttgtaaagaagcttgatcagcaggctttgtttgagaaaggctac

SEQ ID NO: 22544 - DNA, 260 bp, Unknown
  Description of Unknown: LeftRegion for integrase B9545 sequence
atggaggatgcacgtgcagggaaatttgatctgctgattacggaatccattgaacgctttgccccgactgctgaagagacgatgcagtgtacagaggaattgagggatctgcccaaacctgttatggtgaggttcctgaaagaccggatagattcggagacagtccattcaattattccgattatcagggggtggcgcccttgaaggacatcagaaaggctgcggaagatcgtgccgcccatccgagcaacacaccggca

SEQ ID NO: 22545 - DNA, 260 bp, Unknown
  Description of Unknown: LeftRegion for integrase B9546 sequence
taatttgaattgaccgacgcgaaaatagatctttcttcaacttaaatcgcaaaactatgctagtaaaaacctttggagcggcagttcaaggaattaacgctactatagctacttatatacaactactatttacaattatttatatatctttgtattcagaaatcagatacaaaactaatcaataataaataattaacaccatgaaatcagctgaaaattcaaataaaagagtttgtttctatttaagaaactcaactaat

SEQ ID NO: 22546 - DNA, 260 bp, Unknown
  Description of Unknown: LeftRegion for integrase B9547 sequence
cgtggtctggcgcaaccgcgagtggaccgatgccgagtgggccgagttcctgcgactgctcttcggcccccgaccacctgccaagtgatccgagccgtcgtcaactgctgccgccctgcgctaccttgactccagacgcaaacgtgcgccaggggttccagcccctggcgcacagcgaccgactgtgaaggagtcgagtcatgcctagtctaaccatgcccgtggccactggtgtgcttagggccgttgactacaatcgg

SEQ ID NO: 22547 - DNA, 260 bp, Unknown; identical to SEQ ID NO: 13121
  Description of Unknown: LeftRegion for integrase B9548 sequence

SEQ ID NO: 22548 - DNA, 260 bp, Unknown
  Description of Unknown: LeftRegion for integrase B9549 sequence
gaataaatatacattataataatatgtatcaagcatataattatttaataaataaattgtaaatgatgtactgcacataacaaacggttactactgcgggtgctgttcgcgctctcggggttcggtcagctaggtcagtcgctacttattatctaattgacaacattctcagatatatattattctatagggagaagattatgggtaagtcaattcaggtaaaatctggtataatgggaatctacgtcagaacgtcagta

SEQ ID NO: 22549 - DNA, 260 bp, Unknown
  Description of Unknown: LeftRegion for integrase B9550 sequence
aaatgaaaagagatataatcttggcttgagaatggcaaataatctccttgataaaggcttaatttccgagcaagattacctcgaaattaacgataaattggcgcaaaaatatacccctatctttggttaatttatgctcataaaatcgttgataaattgtatcaacagagttaatatgtaccacagaaaggagtgatacaatggctacaaaaatgacagtcattcaacctaaaaagataaaagagttcaaagaacttcgt

SEQ ID NO: 22550 - DNA, 260 bp, Unknown; identical to SEQ ID NO: 13135
  Description of Unknown: LeftRegion for integrase B9551 sequence

SEQ ID NO: 22551 - DNA, 260 bp, Unknown
  Description of Unknown: LeftRegion for integrase B9552 sequence
agtctcaaaagagcaaaaagaagagatatacaaagaaatcatgaagttatatcttaatatgtaaaaaaagcacctcaaaagagatgcttcaaaggattgtgtttcgattgtcttgcttgatgctttgaaattcttcggcagtataaaaccacgaagagcgagtctttccgtctgcttcgtgctttcgagcaattcgattgatgcagtcatacacattcaagagatgttgtctgttcataagagcgcaccgccttttgatt

SEQ ID NO: 22552 - DNA, 62 bp, Unknown
  Description of Unknown: LeftRegion for integrase B9553 sequence
cgctcgcgtccgctggcgggggtgcgtcatacgcattgcccggggcgcggaccgagcgcgca

SEQ ID NO: 22553 - DNA, 260 bp, Unknown
  Description of Unknown: LeftRegion for integrase B9554 sequence
ataaattgcttcaaataagccctccggctctttcaatctttggtggatttatggtgcaaaatcaccaagaattgacttgctattagttctcacctacggcaatattaccacaacccgaaggtttgaaggtacagaccaggggcagcgcaggaagcacgaaacttcatagagaagtacatacatgaaaggaggtactccatatgggtacaacagagggaaccacagaaactatgattgagcagaaggcaatcagacagcct

SEQ ID NO: 22554 - DNA, 260 bp, Unknown
  Description of Unknown: LeftRegion for integrase B9555 sequence
tgatgaagaaactatctatcagaagtacatgcgcaaaagtaaagaagtccaagctcggaaagagcagaagggggagaaagggatctaatcatggccaatcaaaacaaaccgattcaactttcagagcaagaaatcagcgagcgcgagcgccggattgctgagatcttagttcaagtgaaacggcggctagaatcgaaaaaatgactcctctattgccacctggcacaagaatagggctttttatccgcgtttcgacggat

SEQ ID NO: 22555 - DNA, 260 bp, Unknown
  Description of Unknown: LeftRegion for integrase B9556 sequence
aaggggtcagacccggcatgtgaaaattttgagagagcaaatggacgacgaattggatgaactagctgcctttttggcagacatgatcgcaaaatatatattaaaaattcaataatggtaggggcgtggcttcggctgcgccccctattttttgtgtcttcttgcaattggtgatatatttacactaggagagaagacatatgaaaacaaaggtttatatttatacgcgtgtgtcaaccgcaatgcagacagacggatat

SEQ ID NO: 22556 - DNA, 260 bp, Unknown
  Description of Unknown: LeftRegion for integrase B9557 sequence
agtatttctatataggtaatttagagaataagtatccaattgctagactgcaagatatggtaaactaatattttaagtgtatttaattttttctactaacatcacaacaaaataacatataaatatatttagagtattagtttagcatataaatgcttctaatactcttttgtgtttttatgagaaaggagacgatataaatggattcaaagaatcaagaagaaaaaagaattgctggtatttatattcgtgttagtaca

SEQ ID NO: 22557 - DNA, 260 bp, Unknown
  Description of Unknown: LeftRegion for integrase B9558 sequence
attttcctgtagtgatcttataatgaaacttataaatgaacaattaatttgggaaaaagaacaagaaatattattagaacaaaatattgcaaaataattatttaaaatgtagaggagtttacttcactacatttttattgttattaataataaatacggttaaaatatacacagtaatataaacaattggaggatatatattgattaattatattgaaaattataatcttaattctttagatgatttaaattttcttaaa

SEQ ID NO: 22558 - DNA, 249 bp, Unknown
  Description of Unknown: LeftRegion for integrase B9559 sequence
cattggcataggcactgcgatcttgccgacaaatggtaagaaactcctgcagtgtgaactcttcgtccttggcagcttcataacgctggcgatagtgatcgaatatattcatggcatgccgtccttttgtataatctgggaacatttgtgaatcagcacttttagcttaattcttcaacgggataaaaaatgctccgtcctatatgttatgagagagtttcaacaatctatcaagcagtgatggcaaat

SEQ ID NO: 22559 - DNA, 260 bp, Unknown
  Description of Unknown: LeftRegion for integrase B9560 sequence
gatgctttggtggcagaggtagccaagaaaccctcagatatcaagaaaatcacagccgatgacggcaacacgctccacttccacttggcggatggcagtgtggttacccgcatttgggcagaccgctccagagcagaatcctggacggctgaaaagcgcgaggcagcaagacaaaaagagatagaaaggagacaagccgaatggcacgagcaatcacagtaattcctgccaccaaagataaattcacggcactgccaacc

SEQ ID NO: 22560 - DNA, 260 bp, Unknown
  Description of Unknown: LeftRegion for integrase B9561 sequence
tatgcatcatcagggcggttggaatcacaaggaattctggtggtgcggaaaacgagtaaagcaaggaccgcaagcctgtgagggagtcagggttccggctacggttgcagatacttggaaatttgaagggtgcatatatgtaacggaaggagaggatgagaatggtaaaaaatgttacagttatcaaagcaaatccgaggatgacggtaacggatgcgaaggttaataagaaacttcgtgttgctgcctactgccgagta

SEQ ID NO: 22561 - DNA, 260 bp, Unknown
  Description of Unknown: LeftRegion for integrase B9562 sequence
ttggcgcttcagtacctctcttgccagtttcgtgtacaagactcggagtgtcatctgcaacatcttttacccctcttttctcactttaaaggatattaattacatttacacactaccggatgattggctttctgtcagctcttttatgtacgccctaaaatctatatacttgatacataagcgtgataggatgatggtgtatggataagattttagttgcgggttatagacgagtaagcacgaaaagccttgaccaagca

SEQ ID NO: 22562 - DNA, 260 bp, Unknown
  Description of Unknown: LeftRegion for integrase B9563 sequence
cgtgtcgaagaagagtcatgagatttccctgtgtgccagacttctggcacagcaggagcacccgattgggatttactttatttctgaggatattttcaccctggcgtcctattatctggaggacatgaaagacagttatttcaaatacgaccctgatgtagcggtaatttccgatagggcagtctcaagggagatgcttcatgattgattatgcagcgcaggagacgagaaagaagaagcgagcaaaaattaaacagcgt

SEQ ID NO: 22563 - DNA, 260 bp, Unknown; identical to SEQ ID NO: 22553
  Description of Unknown: LeftRegion for integrase B9564 sequence

SEQ ID NO: 22564 - DNA, 260 bp, Unknown
  Description of Unknown: LeftRegion for integrase B9565 sequence
atatttttcatctttaaatattttattgcaagtatcataaatttgttgcagcttttctttagttaaaggttttttataaaatgtaattttcatttagtacctcctttaataaattgtatgaaatatgtattcatccagaacttttcaataacataattaaagtttactatttgaagcgataaaaaaggagtggtaaataaatgaaatcccaagatgatgttcttatgtatttcagaaaaaatcgtgaagatgaagaaata

SEQ ID NO: 22565 - DNA, 260 bp, Unknown
  Description of Unknown: LeftRegion for integrase B9566 sequence
attatatttgtcaataggaaataacaagtatttttatatttgttgcaaataaaatccgcccgggtgcggcaacacccggacggaagcaaatgacccaaccaccacagaagggacagtctgcccatttatgataccatggcaggctgttctcgtcaagcaaattcgcaagcgcttgcgaatttcagaaaggagtattctacatgcgtattcccggagcttttattaatgccagatattctacagacaatcagaatcccgac

SEQ ID NO: 22566 - DNA, 260 bp, Unknown
  Description of Unknown: LeftRegion for integrase B9567 sequence
acaatttctgaaaagaaagctatcctaaaaatgataaaagaactgaaagtagcacttcgcaattcaaaccaataatcaaaattgaataaaaagttatcttgaaaatcgactacaggttaatacttaacctctggtcgatttctttttatgcccagaaaaatataataggtatgtaataatcggcaaaggatggtctcacgatgaaagagaaagaagaacgcataggcaacgccgcctcccaaaaggaaaagataagacaa

SEQ ID NO: 22567 - DNA, 260 bp, Unknown
  Description of Unknown: LeftRegion for integrase B9568 sequence
aggcaagatgacttgcggtcaatgtactgctggttgaacggggtcttatgattttgacccaaattcaaagtgttcctacaaatatattttttcaaaaataaactgcaggatataacgctatcctgaggtttattgattccggaagtgctgctttttatcataatgctgtgcctttgcaacttaaggaaaaggagaaaaccatgaccgaagcagaaagacaattaggaacccgcgatgagcagaaagaacgaatccggaaa

SEQ ID NO: 22568 - DNA, 260 bp, Unknown
  Description of Unknown: LeftRegion for integrase B9569 sequence
gtccagagatgctcaagaaatggcgatttgcgcaagaatgctcgctgctcgcaagcctcctgttggcatctacttcatatcagaagatctatacactttggcatcgtattatcgtgacgatcttcgagagccttgttttctcccaacccctgactggaagatcctgcctgatgacgagctggatatgagaggtgcgcttcatgagtaaatcagccaagaaagcagctgatcaagcagaacgtgagaaagtacataagcga

SEQ ID NO: 22569 - DNA, 260 bp, Unknown
  Description of Unknown: LeftRegion for integrase B9570 sequence
taaccaaacaagaatttgcaaaagaagttgtttctttattaaataaaactgatggaattgctgaacaagaaaaagcactacttgttcaaactttaaatcttatttgttctgataaagaataagaacactcgttctttatgtgcttaatatataaacaaaatgtgttataaaaatgaaattaattaaaaggaatgatgaatatgatgtacaacatgaatgactatcagatagaacttgataaattaggaaagattattatt

SEQ ID NO: 22570 - DNA, 260 bp, Unknown
  Description of Unknown: LeftRegion for integrase B9571 sequence
tatgatggaactcactttactcgcacgatatttcgcagcgttgccccaccctattggaatgtacttcgcatcagaagacatcttcacgcttgccacctattatcgtagtgacacttcggacaaagatttcttcttcccgtccgagaactggaaactccttcccgacgataacgaagaacccctaaaaggaatagcgcaaaatgattgatatagaaaaaagagaactcctcgcccaaaagaaggcgaagacccgtcaacgt

SEQ ID NO: 22571 - DNA, 260 bp, Unknown
  Description of Unknown: LeftRegion for integrase B9572 sequence
cattgaggagtatcggaaattgaagccagagcagagggcgctcacatcaataattttctcactcttggcgcaggacaacgcaaacggtttcctcattgcccgcgccctattcgatggcaaggagatcgcgagcgacagcacctccgtcgtctatggagccgtcagcatatctgggagcgtcccgcttgaggaatacctccttgaacactccggaaaatcctgacacggcgccgcgttgcgccatctactgccgctattcc

SEQ ID NO: 22572 - DNA, 260 bp, Unknown
  Description of Unknown: LeftRegion for integrase B9573 sequence
acaagcgggtaacgccggaggggctcttgctcctcctccgcacggcggcgattgcagccgacaagctgggattcgaggacgtttatgcgggtctggccgagatgatccagactatcgacaagctaaaaggttaaactaacgaagccgccgggttgcagcccgacggcttctttcatgaacgctgacacgggagcgctcacatgagcaattctaacggtatgggcgggagacgctacacccgccgcaaaaaggaagaccag

SEQ ID NO: 22573 - DNA, 260 bp, Unknown; identical to SEQ ID NO: 18422
  Description of Unknown: LeftRegion for integrase B9574 sequence

SEQ ID NO: 22574 - DNA, 260 bp, Unknown
  Description of Unknown: LeftRegion for integrase B9575 sequence
aagaattgacaaaagaaataacacaagatgaatattttgctctaaaactattagaacaaatgacgcaaaatcaaattattccgagcagaatgtttcaatcaataatagaagattatcgtgggaagattgacttcaaagaattttcgtgttatgatgatagcaaaatacatcaaagagtgaatatctaaaggagtctatctatgagtgatttacggagaaacccattatattatttaaggtcaaataaagatttacaagat

SEQ ID NO: 22575 - DNA, 260 bp, Unknown
  Description of Unknown: LeftRegion for integrase B9576 sequence
tgaaatgcaagaacaagaacaagaacaaggaaatatttagggagagtaaagcgcattatataattatcaatggttaattgtaaatggttaatgataactgataactgcctaaagcattcctttggtgaacggtataatcattttgtagtttaaaatgtttaggctatttttgtatcacaaaactactaataaataccgatatgaaagcagctttattgttaagagtgtccactgagcaacaggatttagacagccaaaag

SEQ ID NO: 22576 - DNA, 260 bp, Unknown
  Description of Unknown: LeftRegion for integrase B9577 sequence
gaggagatcgacttcgacttctgcccccactgcgccctcgaactcatcgagaaatacggcgtggacgacgccttcgtcaggggccttgacggagacctgacgttccgcatcgggtccgaaaagacgccgttcagcttcttcagcatggagaagatagcctacgtccacagcatcggatgccaacttgcggaggatgagatatgacacgctgcctcatctacgcaaggcaatcgtccggcgacaacgagcaaagcgaatcc

SEQ ID NO: 22577 - DNA, 260 bp, Unknown; identical to SEQ ID NO: 13265
  Description of Unknown: LeftRegion for integrase B9578 sequence

SEQ ID NO: 22578 - DNA, 260 bp, Unknown
  Description of Unknown: LeftRegion for integrase B9579 sequence
aaataatataatcagtgatgaagatggcgcattgattattataaatatcttatatgaacaaggcattattaataaaagaacttatgataatattttgaaaaagtataagattacataatatagaaaaatactgttgaaaataaggcttattttatatataatagtatataaaataggctttatttttgaaaggagataacatggataattatataacgtccctcgatagaaatagaccaagaaatattgctttttatgga

SEQ ID NO: 22579 - DNA, 260 bp, Unknown
  Description of Unknown: LeftRegion for integrase B9580 sequence
ttattattatcttttattaaatattgaaattatagaatatattttaccacaaaatgtaaattttgtcaagcaaatttattacccttatttttatagtaatattgttcttgcattgattttgattttatattatacttctgtatgtaacatttatgttggattgtttcataaacattgtgttaaatatttgaggttaaattatgaatcaatatgcagaaaaagaattatctggtttagtctttcaaacatttgaacaactg

SEQ ID NO: 22580 - DNA, 260 bp, Unknown
  Description of Unknown: LeftRegion for integrase B9581 sequence
aggattaaatgatttatagtattagtcattgctaactaataaataaaaaataggggcatacaaatagctattgctaaatgtacgccccttatttttttacacgattttcatcatgtttaattttgacttgacaagttatttcaaatatgttacactaataatggatttgtgtagctatctgattgcaaggagtttgataaatgaatatttatgaaatcatgaatcaaatgcgtgttgaacgaaaacgtattgaagatttt

SEQ ID NO: 22581 - DNA, 260 bp, Unknown
  Description of Unknown: LeftRegion for integrase B9582 sequence
gagatatgcaaagcgaaaaggtaaacacgcatgatgaaacactatttgccgccttgaaattaatccaaaacctatataggaggaattttatcagttcatacatgtacaataatatcctgtctgaatacgaagactgtattgacattacagattttcagtgctaagataatatacataattaggaaaacggggtggcaataatgtattgttacgaaaataatgtagcaaaaccacgcaatgtcgtcgtgtacgcgagagta

SEQ ID NO: 22582 - DNA, 216 bp, Unknown
  Description of Unknown: LeftRegion for integrase B9583 sequence
  modified_base (139)..(156): a, c, t, g, unknown or other
caacgacgagtttttctcgcgaaaaactcgctactgctcaatccacggacatccttgtccgttctgaaaagctttttgccgtaagccttttgcaaataggcggtacagatacaaggcgcgagcacaaattaaccgcagnnnnnnnnnnnnnnnnnnatgtccataaaactttactttatacaaaagtatgttatactggaggatatggaagtgctc

SEQ ID NO: 22583 - DNA, 260 bp, Unknown
  Description of Unknown: LeftRegion for integrase B9584 sequence
aatactgaacagtatttaatatcatttcaacacgcaaaaaacatgtttaatcaaagcataatttcttatgaagaacttactaaaattgaagagaaattaagaaaaaaatattgtatcaaaattaacagtttatatgtcggaattgactggatatgtactccttttagaggtaatatgtgacacacgaaaggaggaatattatgcaagtaacaaaactaccgtcattaccacaattaccaaagaaaagaaaagtggctgct

SEQ ID NO: 22584 - DNA, 260 bp, Unknown
  Description of Unknown: LeftRegion for integrase B9585 sequence
aatatggcactataatatataccaaaacggcaatataagaatttcggcaacgttgtcttgaaaagctcatgaagtgcagtgaatatcacaaatagcattcttaaactggtaaaattaggaacttcactacaccgacagctaatcacttttgactgaaaaacagcattgcataaaacatgtgggaggaaggcttttagacaatgaatgatgtagcatggactcagacagaaccaggattacaacaacagatatatcgacca

SEQ ID NO: 22585 - DNA, 260 bp, Unknown
  Description of Unknown: LeftRegion for integrase B9586 sequence
ttaagcgatgaagaaaaagacaagatatacgcagcgctgaaactgattgaaaacctacataaacagggcttggtaaagaagcatattttcaaaaacattttgaacgattacagagattgtattgacttatccgaattcaaatgctatacttaataggcatacatacataacaaaattaggaattgtagggaggataagcaatgtaccaatatggctaccaagccccaaagcaaagaaaagtcgctgtgtatgccagagtt

SEQ ID NO: 22586 - DNA, 260 bp, Unknown
  Description of Unknown: LeftRegion for integrase B9587 sequence
gcgcaggctggactttgtgccggaaacggcctcttagggtttggagagtagcgtaatgggtaagcgtcacaaggcacctgatccgcctgatgacattgacgaagccgcagtcacgcggtttatcgaggttttggcgcggatcgcggcgaggcacgactacaacaaactgaaggaagcgcagcagcgcgcgaggcacgataatgaacaaggcaaccgagcccccccacaaaagggccgtcacctattcaaggttctcaagt

SEQ ID NO: 22587 - DNA, 122 bp, Unknown
  Description of Unknown: LeftRegion for integrase B9588 sequence
acttttataacgtaaaaatgccgattttattgcctgaatataacttaaagatatataagaatatgaaagctgcatttctgattagatgctcgaccaaaaaacaagattacgagcgacaagta

SEQ ID NO: 22588 - DNA, 260 bp, Unknown
  Description of Unknown: LeftRegion for integrase B9589 sequence
tatctggcggctcgtgagatcgcggagggcttcctgaaaaagggcctgctgaccgaggaggaattcaccaaaattgacgccttcctgaccgagaaattctccccacagatgggcaaactaatcgcggctacaggccagaattaacttgctatgcaccccttttagagtgatatatggtacgggaaaggaggcgaaaagccgtgaaaactgtaaagaaaatcgaggtcacgaggccggtcctgcctacccgaaagaaggtc

SEQ ID NO: 22589 - DNA, 260 bp, Unknown
  Description of Unknown: LeftRegion for integrase B9590 sequence
gtgggtttcttgcctaccggtccgagagacagtagaatgactgaggatgtgcacaaactagccgagaggttcaccgtcgtcaaccagcacggcgaactctccgacgaggcgatccacgggatcgccaacctgctgatcgagcacgtccgtgtcgtcgagcccaacctgctggacctgagcaagaaacccgaggtccgaccatgatctcaccaccacccaccgcgatgccttgctgtgagtattacagaatgtccacgtta

SEQ ID NO: 22590 - DNA, 260 bp, Unknown
  Description of Unknown: LeftRegion for integrase B9591 sequence
ccttcagcacaggcacaggccgcggcgtcgtcgtcaccagcgcccttggattatcaccgagccgcagcgcaaactgcagcatgtcccacgtctcctgcccatgtttccatttaccgagttcgctgcactagtgaatttcatgcacttgcagcgttttttaaccccggcctgctatagggctgagaacacagagcaaaacgatggctaaagcagtggcaagaaccaaagcatactcatacgtgcgtatctcatcaaaagga

SEQ ID NO: 22591 - DNA, 260 bp, Unknown
  Description of Unknown: LeftRegion for integrase B9592 sequence
gtcgccatcaaaaagacctccttctttttgaaagtgcaaagctataccttgcatcttcattatatgcaatccagccccctttgtaaagccgcctgtgcaactttcacgtaaaaaacgcacaaacccctccagccgtttccaactggaggggtctgccccgtcgccaaaaggtaaggataaaaacaagaaggtttctttccatgcgttgcctgcccttacagcatagcacgctttttggatatgggcaagcaaaagccccg

SEQ ID NO: 22592 - DNA, 260 bp, Unknown
  Description of Unknown: LeftRegion for integrase B9593 sequence
catcttctccgtagaaaagacagggcgttttggaacgagttgaacctaaacgtgcaactctacttatataaatggctcccagatatgatatttcggaaatgaatttaactttttgactgttgaaagtgtggaaagatttattttccccagaacttgcaacggcttgcaacaaacttaaaactacttgaaaggtggtatttatgcctcgcaaaaagaaactgcaagaggtaggcggactgcggctggtggcgtactatcgc

SEQ ID NO: 22593 - DNA, 260 bp, Unknown
  Description of Unknown: LeftRegion for integrase B9594 sequence
tcgacgtgatggaccatatgagcccctgcaaaaaatgtgcaataaatgcatttaattttgaaagtgtaccgaattggtttacaagaaagtaaaaaataccccccggtgctgtaacaccgggaggccgtgcaaccccacccaaccaatcacgaaaggggagatctgcccttttatggtagcatccccggaaaggaaagtcaatggcaaaaagaatcccgggcgcatttatctgcgccagatactccacagataaccaatcc

SEQ ID NO: 22594 - DNA, 260 bp, Unknown
  Description of Unknown: LeftRegion for integrase B9595 sequence
aagaaactgacgaaagagatcatattacaaatgatgagttaatacttttaagcgcactaaatcatatgtgcgaatctggaaaaatatcacacagcctatttacttctgtccttcgtgattataaatcaaaagttgacatatctaagttcacatgctataatcataattacaaatgattataattatatgtgaggttagttatgagagtagaaaataatcaaccaagaaacatagctatatatgcacgagtatctacagaa

SEQ ID NO: 22595 - DNA, 260 bp, Unknown
  Description of Unknown: LeftRegion for integrase B9596 sequence
cgtcgccgggttgtggcggcgttctcagttgtttggcgtagaacagatgtgctatcaaggtatcatgtgtgaccgtgttcgtcaactacttgtggcgaacgggatagatccagtatcacgagtacatcgttttacgacaagtcgtgaatgtgcgatagagggacgttctgtcgcatcagtgcagggaagggcagggagaaatggagggggtgttagagccggcggcggcgtacgtgcgtggctcgacgctgatgcagaag

SEQ ID NO: 22596 - DNA, 260 bp, Unknown
  Description of Unknown: LeftRegion for integrase B9597 sequence
ccttagagatttccaaggaggtatataggaagaaatgaataaaactattaataagaataatgaggcagctgtatcagaagaattaataaatagtttattagagatttttgtaacagagtttattaacaaagagcttgatgcctctaatactcagcgttacacttcatatccaattagtgagacaaaggaggatagcatagatggaacaaatgttcagtagcccatcatcaataaaaagggtatgtgcttatggaagagta

SEQ ID NO: 22597 - DNA, 260 bp, Unknown; identical to SEQ ID NO: 13353
  Description of Unknown: LeftRegion for integrase B9598 sequence

SEQ ID NO: 22598 - DNA, 260 bp, Unknown
  Description of Unknown: LeftRegion for integrase B9599 sequence
accacgacgccacagaggccgcacatcgcggcctcttctttcggttggaccgttcgttcgaccgcgccccgaacgcccgtgcgggccacccgtgcgcccacaacacccgcgctggaggcctgcggccaaggcgaggtaactgtgtggtcggcgcggtacgtcgcccgccaaacgaacgtccacgaacccgaggagaacccatgagcaagaacggaaccaagccggcggtcggctatatccgcatgagcaccgacaagcag

SEQ ID NO: 22599 - DNA, 260 bp, Unknown
  Description of Unknown: LeftRegion for integrase B9600 sequence
gggcggcgagccgggcgcgagcgcgggcaagtcggaatgaacgttacgtcaaatggttaacgcttccttaactggtggaactgtaccaatgtcgcgtcgcccgccgaaagacccgattctggccctggcgtatcatctggcctacgaggcgggacagcgcgagttcttgcgcgagcacatggagctgaaggagcttttccgtgacatcgacaagaaagcccgccgcgaagaactcagcgcttcgattggtcgacgacgtg

SEQ ID NO: 22600 - DNA, 260 bp, Unknown
  Description of Unknown: LeftRegion for integrase B9601 sequence
atatggaagaaagctcgaaaaacgcacttactaagacagcgctactcaactactataatcaggttctatatgataatggcttaatcagcgaagatgaaagaaacagaatgtcacggttaatcaatgaacgtagttgacaagagtgtgcatgagacattataatataaacatgatacatcgaacaaagtgaggtgtagaccgtggacatattttctacaaggcagctactcagaacgatgtcgatctatgatattcctctg

SEQ ID NO: 22601 - DNA, 260 bp, Unknown
  Description of Unknown: LeftRegion for integrase B9602 sequence
tcatgcaacgtaatggaccaaggcagaacagggggtagaatccgggcagcccacaagccggatagcgaggcccggattctccgctgtggacaagtgaacagccgctggggatcggcgcatgaccccaccagcccacaagccggatagcgaggcccggattctccgctgtggacaagtgaacagccgcccgggggcagcgcatgctcccaacccattcaccggtcccgatgctggctgtcgcctattcccgctggagctcc

SEQ ID NO: 22602 - DNA, 260 bp, Unknown
  Description of Unknown: LeftRegion for integrase B9603 sequence
aagcgcgtgacgccggaagggctgatactgatcctacgcacggcggcgattgcagccgacaagctgggattcgaggacgtttatgcgggtctggccgagatgatccagactatcgacaagctaaaaggttaaactgacgaagccgccgggcatgcactcccggcggcttccaccatgaacgctaattaggagccttcacgatgattactgattctaaacggcgggacgcccgccgcaagcgcgtcattctctatttgagg

SEQ ID NO: 22603 - DNA, 260 bp, Unknown
  Description of Unknown: LeftRegion for integrase B9604 sequence
gttcaagatccattgtgccctttgcggttcaaggctcacgaggcacgtcaacacgaaaagcggacgggtcacgtggatgtgcaataggtacaagcatcatggccccgatcagtgtccggggatgcggatattcgatgatgagattaggaaatggatgcccatagaggctgacatatatatcacggaaaggaggaccccagatggcaagaaatatcacagttattcctgccaaagagaagaaaatagcgactaatgctccc

SEQ ID NO: 22604 - DNA, 260 bp, Unknown
  Description of Unknown: LeftRegion for integrase B9605 sequence
ctattgttgaaaaataaatcagcaacgcaaacagaatatattatgcttaaaattatggaagtgttatgtaggcaaggaaatatatcaaaaaaaacattttgtagtatcttgaaagactataaagataaaattgattattctgatttctcatgttataatgatagcaacaaacggaataatgtgatagcataaggtgtaatatgagaacggatgacagcaagaaaaggaatattgtaatttatgcaagagtctcgacagaa

SEQ ID NO: 22605 - DNA, 260 bp, Unknown
  Description of Unknown: LeftRegion for integrase B9606 sequence
cgcagaaatcgagagcggctgtattgccgtggtcgtggtggacggtacagaagggtttttaaaacaagtcgagttcggtgagaattccacctcgcttcactcgttcaatccgtattatcccgacatggagtttgtagatgccgaccagaaacgtttgcactttatcggtcgcgtccgggaaatgaagcggaggttctgatatgcctcagaagtttaaaatcgacctctctatgctgaccccagaagaacagcagcagttt

SEQ ID NO: 22606 - DNA, 95 bp, Unknown
  Description of Unknown: LeftRegion for integrase B9607 sequence
aacaagtaattgattttattgaaaaggtgtagattatggctcagaagttatacagttatcagcgttggtcgagtgctgtacaggccgatggaaca

SEQ ID NO: 22607 - DNA, 260 bp, Unknown
  Description of Unknown: LeftRegion for integrase B9608 sequence
ctgagcttcggcgacagaggccgggttactgcgctagtggctgagttggatcgctggaagttcctccgttccgccggtgccgccacgccgtcgtagcagcattcatcgcaatgcctcacatgttgtagaacagcctccgcccaggctccgttcacaacccgcgtattattcgcaatcattatcacttaggtttcaaaagcatgaccaagaaacggtgtgtaattgacaactctcagggggccatcgtcggatatctccgc

SEQ ID NO: 22608 - DNA, 260 bp, Unknown
  Description of Unknown: LeftRegion for integrase B9609 sequence
cgtgaaaaactttatcaggccaccatgaatgtctttgatggcatgctcaaaaagggcctgatcacagaggagcaatacgccataattgatacaaaaatgctggaaaaatacaggccattattgggtacattatttcgccaaattgacttgatataattcgcttttagagtgatatatagtagcggaaaggagctgattttatgcgaaaaatcaacaaaatcgagccgttgatgccgaccttgccaagtcgcaaaaaggtc

SEQ ID NO: 22609 - DNA, 260 bp, Unknown
  Description of Unknown: LeftRegion for integrase B9610 sequence
ggcctgcgtggggccacccctataggatgcagattaatcgtcgccgattgtctgccccagcagccgctgcacatcgcgcgcgttgtcgatggcgtagctgccgaagttgttgttcatcagtgacaacacgtcacttctgttatactcacgctatcagtcctgatacaggtgagagagcggacgtggaaggggccaggacgatgacagcgacaaggccagggcagggcacagcgggcatacaggccacgacaggcgcgaca

SEQ ID NO: 22610 - DNA, 260 bp, Unknown
  Description of Unknown: LeftRegion for integrase B9611 sequence
gatgtcgtcccgtaacccgggaccatgaaaccgaaaccgctcgtcatcgaagaggtcttcaaccccaactctgttgaaggtcaccgcgcgcacatggcagcgctccagaccctgatcgagatcatcctggacaacgacgccaggtacggcgtgccggagaaagtagacgcccagccagtcgcgtaatacaatgggcaaccatggcacccaagcagtctgccgccaagcggcgcgtgcaccttgttcccctgtcgcctgtt

SEQ ID NO: 22611 - DNA, 260 bp, Unknown
  Description of Unknown: LeftRegion for integrase B9612 sequence
ggcttcggatctaccggttacaaataacaactttaaacttgaaatattacgattttcgagatataaaagaatgaaaacgcttgacgcagacatacaaaatttaataaggcagccaatcgatccggaagaactggccgaaatgtcgcgtatgtttacgggcgcgatcaatagtttaattaaatgtcttgtggaagcgaagcatgaaggccgtaatattaaccagggtatcgacgaaagaacaagaggaaggacacagtctt

SEQ ID NO: 22612 - DNA, 260 bp, Unknown
  Description of Unknown: LeftRegion for integrase B9613 sequence
atttacatgacagtacttgggaacattcccaagttttgacaagacactcagaatttgaaaaatctcacgaatcctattatattataagaaaaaggagtataatatgagtagttatcacagagaagcttggaaacacttttatcctgatggaaatggtaaagcattagaacggacatgttctacatcacatcaattacttaatgaaatatgaagatcctaaacgttacagacaatggaacgttgaagacttggtaatggtg

SEQ ID NO: 22613 - DNA, 260 bp, Unknown
  Description of Unknown: LeftRegion for integrase B9614 sequence
cttgtaggccataacaatctcgcaactggtggtctgtgtctctaaattgatgccgaaaaatatgtcacgcaccaggcacagattgagggcgccactgatgccggggacatgcaaccagcgtggcgtgtgggcgatcggtgtctcgcccgtcgcgtctcgtgtcacgtatcaccacctcttttgtagaaaggatacctcacatggccgccgcaccccacgccaccacccggctcgtcgccatctatgtccgcgtctcgacc

SEQ ID NO: 22614 - DNA, 260 bp, Unknown
  Description of Unknown: LeftRegion for integrase B9615 sequence
ctttgccacatcaggatcatggccaccagacaccgcctgtgaccaggtgtttgcaactgcagaacaatcagcccgactgaatcagcttggcttatgggtaccaacgatcacccctgtgctttacattcccccagctgccatatctaccagctcaggcattatctcaggaagcggatcgaattgcgatccatcctaccctgatgtatgcattccacgatacccgcctgatctcgattgcagtcagatcccataccgccgtt

SEQ ID NO: 22615 - DNA, 260 bp, Unknown; identical to SEQ ID NO: 13417
  Description of Unknown: LeftRegion for integrase B9616 sequence

SEQ ID NO: 22616 - DNA, 260 bp, Unknown
  Description of Unknown: LeftRegion for integrase B9617 sequence
accaacacgagcgcgctcgtcgagacctggcccgtcggcgacccgcgcactaccgcgcgcctgctcgcccagatcctggtgcgtcgcgcgctggtcgacctggggatcgtccccgatgatccgcgccccgaaaggcagcaccggactaaatatccggcccgctcgggcgttaccttgccggagccggaggaagatcaccgatgatggtccgcacgtaccgtcgacgctcgaagaacgacgaaggcaagcagcagttcagc

SEQ ID NO: 22617 - DNA, 260 bp, Unknown
  Description of Unknown: LeftRegion for integrase B9618 sequence
tcgaacccaagaatgtaattacggtaataatagtgtgatagggagggttgcaatgggttacacacgaactgaaaagaaggaagaagccaaacgcacggcaaacaaactcctgatccgctcgcgggtggagtatgtcgtcgactcggaacgggtcgatcagggattgcgcctgatcttacgtcgcgtgatgggagaacccgatgagccgcaaccgcttccgagacccggagaagacccttgcccggtacgacgaacaagat

SEQ ID NO: 22618 - DNA, 260 bp, Unknown
  Description of Unknown: LeftRegion for integrase B9619 sequence
caggaaaagctctaccaggcgaccatgagcatggtcagaaagatgcttgcggaggggcttatcaccgaggaagagtaccgtcagattgatacaatgttcctggcaaaataccgccctcttttcggcacattattctctgaaatctgttgactttacagccttttagagtgatgtatagtagcggaaaggagcgtgatttcatgccgaatttaagaaaaatcgaagcggctgtacccgccatccgggaaaagaagaaggta

SEQ ID NO: 22619 - DNA, 260 bp, Unknown
  Description of Unknown: LeftRegion for integrase B9620 sequence
tcctcttcagaactccgcttctgttttaaggatggcagaaccgtaagccgcaactggcagccgccggaacgtgtggggcggccttggactgaggagcagagggcaaaatttaaggaatccattaagggcgcctatacgccagagcggcgccggcagatgagcgaacacatgaagcaattacggaaggagcgtggagacaaatggcgcagagaaaagtaacggcgatcccggcgaccatcaccaaatatactgccgttcct

SEQ ID NO: 22620 - DNA, 260 bp, Unknown
  Description of Unknown: LeftRegion for integrase B9621 sequence
cggaggccggcagaccggcgtgatgagatggaatacatcatcgggaaaaccttccggcactgttccctgcatgaccagatggttatcctcgcggccatggctccatacctgtccccggatgaatcccggcggctggtggatgagtacaccaagcggcgaggggatgaaaccagcgagattgtgatccggattcggaaagaatgaccatgcggaaagatattgatccagaggcgagaaaagccgccctttatatccgagta

SEQ ID NO: 22621 - DNA, 260 bp, Unknown
  Description of Unknown: LeftRegion for integrase B9622 sequence
cggagccgcgtcgctatctcacggagggcctgcagcggcgtatccaccaggctgcaggcaaggtcgcggagcttatcgacatggcgggctttcagcaggtagtcgtcacttatcttggacccggcaaatggtcggcggatttgaaatacctggagacggaagcgtgatggagcagatgtcgacatgaccacgttgatgatatgagcgtccgagctgcgatcatcgtccggctttcccgtgaggatctcaaccagcccgga

SEQ ID NO: 22622 - DNA, 260 bp, Unknown
  Description of Unknown: LeftRegion for integrase B9623 sequence
ggacgttgggatgtcccttgctgagtttcagcaggcattccgtgattacgtgaagaaaaccccagttgaccccgagcactggaagggggacgttgtaatcagctggccttggatgtagttataccaggcatttctgcgatgtacttgaccggtggcagtgcccacactacggtgatcgaagtacattgccggtttgggacgtggacagggatctgggcttcaaggcaggcacgatctggtctttcgagagggtctctcat

SEQ ID NO: 22623 - DNA, 260 bp, Unknown
  Description of Unknown: LeftRegion for integrase B9624 sequence
cgttgcgatgacagcatgagggccggctggggggggaaaagccgattaaataaataccggccggaaatcgtcgcgttattgaaaaacggaagtcccaaaacgtttgtcgctcaaaggtacggtgttgacccggcgacattgtataatttcatagaaaagcaccacctggacgttacaccagggcctttactggagcagccatgaagtcgaaaccgaaagcagtaatttatcttcgggtctccactcctgctcaaatgaag

SEQ ID NO: 22624 - DNA, 260 bp, Unknown
  Description of Unknown: LeftRegion for integrase B9625 sequence
cggtcgaagaccgatcgccacgatggtccacgcgctcggcaccacccacgcgaagtacatcatccccttgctgctgctgggtttcgcgccggtcggaatgagcttgagctggtcgccaagccgaaggtacgggtgttgcagtgtggccctgcacggggccgagttggacaggccccgagcaccacggatcggaggtcgccatgcccaacgtcgtcacgtactgccgcgtctcctcggacgagcaggccctgaaggacctg

SEQ ID NO: 22625 - DNA, 260 bp, Unknown
  Description of Unknown: LeftRegion for integrase B9626 sequence
gcagcagtgcttggtaacaacgtgaccttccacttccgcgacgggcatgaggtgacaaagagcttcaagaaaaaacggcaaggcacaaaatggactgaagaacgccgtgaaaagcaaacccaagcaattagagccagctggaccgatgaacgccgggcggcagcaagtgaaaggatgagagaaataaggagtgaaaagaaatggccaaaaccgtaacgactataccggcgacaatcagccggttcacgtcttcgccaatt

SEQ ID NO: 22626 - DNA, 60 bp, Unknown
  Description of Unknown: LeftRegion for integrase B9627 sequence
gtcgagcagcggcccggacaccttcgcctgatagtccgcggcacagcgcggtgcccgcgc

SEQ ID NO: 22627 - DNA, 260 bp, Unknown
  Description of Unknown: LeftRegion for integrase B9628 sequence
ctgcactgcgggcacactggcaccggcggcaggaggcccgcctgacgcagtcgagtgcgacggacacgctccagggaggcagacggcatggggcggtggcggctccccataccgtagcggctgtcggactagagatgctgttttgagaagagtccgttcaggcagcgcctaaggtcaatgcaatggatcagacgaggcccatgctgggagtgccctactccagaattagctctgccggccaggtgtccggcctcggcctc

SEQ ID NO: 22628 - DNA, 260 bp, Unknown
  Description of Unknown: LeftRegion for integrase B9629 sequence
ttatagggcatacaaaagataaagaaaaacagcgtttaaaacgagacaattatatggagggacaattaatggaaaaagctatattgtatgccataaatgaaagaatgttctcgctcggtctgatagacgagaaaacaagagataaaattaaagctgaaatcagcattagaaagtaacgacaatgtattgagtggatttatatgaggtgttatactttatatgattccactccctgtttattaagggagaaatgcactatg

SEQ ID NO: 22629 - DNA, 260 bp, Unknown
  Description of Unknown: LeftRegion for integrase B9630 sequence
gccacgatcctcgaccacacggtaacctttcattttagggacggccatactgaatccagagatttcttggataagcgccacggtacaccttggactgaggaacgcaaggaaaaagcgagagcgtccatgaaagctgcttggacagacgaacgcaaggaggcaatgagcgaaagaatcaagaaaataaggagtgaaaagaaatggccaaatccgtaacaaccataccggcgacgctgtcacgcttcacagcggcaccgatc

SEQ ID NO: 22630 - DNA, 260 bp, Unknown
  Description of Unknown: LeftRegion for integrase B9631 sequence
ttatagggcatacaaaagataaagaaaaacagcgcttaaaacgagataattatatggagggacaattaatggaaaaagctatattgtatgccataaacgaaagaatgttctcacttggtctgatagatgagaaaacaagagataaaattaaagctgaaatcagcattagaaagtaacgaaaatgtattgagtggagttatatgaggtgttatactttatatgattccactccctgtttattaagggagaaatgcactatg

SEQ ID NO: 22631 - DNA, 260 bp, Unknown
  Description of Unknown: LeftRegion for integrase B9632 sequence
cgtcaccaacgccgattccgccgggcgctggcgcgagctgctggccggcgcaggcgtgcgccgcgccgcggtggccggatcgggcgtcttccgcgacgaggcgtccgacgcgcgcctgcgccagatgttcttcgacggggtgatcgacgcgttcctggtggttttgaatgtgcaaacacttttctgcgaggaaaccgcgaatgagtgatgcgcacatcaagcccggcacagtggcctactcgtacatacggatgagtacg

SEQ ID NO: 22632 - DNA, 260 bp, Unknown
  Description of Unknown: LeftRegion for integrase B9633 sequence
gctggaatcatttgacgaaacggctttccgtgagcagattgcctgcattcatatcgttgctccgtttcaactttccatccgcttctttgacgggcatacctttgaagcggcatgggaaaataagcgaaaaatgcccaagcatacggagcagcgcaagcagcatatgcgggaagtaatgatacagaaatggagggaaaaatgtggcgaaagtaacgactataccggcgacgataagccggttcacggcaacgccgatcaat

SEQ ID NO: 22633 - DNA, 260 bp, Unknown
  Description of Unknown: LeftRegion for integrase B9634 sequence
tgcacccttgaaggcgctggcccagcacaaccggagggcgtggtgagcgaggcggtgcggctcccgctgctccgggtggaagtggctctggccccggtccccatgtcctttgaccagctcgaggcttggctcgaccgctatctcgagtacattctagaacgccgtcctcccccctcgctcccgacgcccgaggtcgccgcgtgactgacactccttcggatcggagtttgggagcgaccgacaccgtgtgctatctccgg

SEQ ID NO: 22634 - DNA, 260 bp, Unknown
  Description of Unknown: LeftRegion for integrase B9635 sequence
ctaactgttggccaagcagcagcttacgggctcttgcctcacgcgcgcgcgtcattatacggctagctttccttcgttcaacatccagcgccgattttctcgccgccgtacttctccaaaccaccgtttgggcttgcgaattgccccagctggggcatatttccctttgacaattcgcgtgcagttgacctcggatgccaatggataccaacgcctacatagcgtattttcgcgtctccactccccgccaaggcgtcagc

SEQ ID NO: 22635 - DNA, 260 bp, Unknown
  Description of Unknown: LeftRegion for integrase B9636 sequence
gatttcacgatggacagtgtacctgagcggccgttcgagacgatcgaggtggtcaacgagcacctcacgatccgacgggtctacaagccagacaaggaccgctgcgtcgcagccaccgttctcctgctgcgcgccgctgcgcaggctcgcgctaccaggctcgcccgcgaagccgccgagcagagcgccgaggccgagcgatgagcgcgcggcgcggcaggggcgggctgatcccgctcaccgatgagttcgtggcctac

SEQ ID NO: 22636 - DNA, 260 bp, Unknown
  Description of Unknown: LeftRegion for integrase B9637 sequence
aatgcctgcctgttcctgcgaaggcaggccgtttggggcgttgggggaacatcattggtttcgacggtatcgacggtcgcctatctggggctggaagcgcgcggcgtggaggttcagtgccagctcgtgcccggcctccccaatttcatcaatgtataagcgcaaacactgattaacgattacagcgttaaggtgtttgaatggacgcgattatctatatccgctggtcgtcgttggagcagaccaagggtgacagctat

SEQ ID NO: 22637 - DNA, 260 bp, Unknown
  Description of Unknown: LeftRegion for integrase B9638 sequence
atcagcagaagcacgctactcaagatcgaagccggcgaccaccagccacacccgcctaccatccgcaagctcgcgcgcgcgctggctgtcgatcccgtccagctcacgaccgagtaaaaaaaggttgccccgcgctgcgagtctaaaacagccggggcagtggcagatcgtaggagtgtgaaaggactgatagacctgcaatgcctactgtacaaccggcggccgacggtcgagctgtgaaaaccatcggtgtgctggtc

SEQ ID NO: 22638 - DNA, 260 bp, Unknown
  Description of Unknown: LeftRegion for integrase B9639 sequence
agtctaccccccacgccgccgccagccgacgacgagcggccgagccttcgcgaggcacttggcgacatcctgctggacctgattgaggctggttgcctctacgtccgcgaccacccagccgtcaagatccgcatcagtcggcacgtcggcgagaacgtcgtccagatcgaggtcgagcaccagcgcgccgagggcgaagcatgagcgcaccgcggctgctgcgtggacgcacggcgccgctcgacgacgtcacgatcgcc

SEQ ID NO: 22639 - DNA, 260 bp, Unknown
  Description of Unknown: LeftRegion for integrase B9640 sequence
ccgactgagtcctccccaccgggccggtcggcctgctacgatggtgacgaaatgccatcatccgtgcgctgtggcgcaaaaaacgttgacacgggcgcatcgtctgcgcagactcccgggcatgacgccggacgaccgcttgcgcgccatcctggccgagttgtacgcgccgctgctcgacgtcgccaaggaggttgcggatgagcggccggggctcgagcccgccgcggcgtaccaggagatccgccatcggctacgtg

SEQ ID NO: 22640 - DNA, 260 bp, Unknown
  Description of Unknown: LeftRegion for integrase B9641 sequence
ggttatagtgttcttccttgatttgacctgttgtcagtaaatacttagcccaggcttcaaaaatttgctgtttcacaaaatcactccctatgaaagtcttgactaggatagcctattctatactatctataacgatttgtgattttccctattgacaaactaatcacggtattgtataattgatatagggtggtgataaaatggatatttataatatcgctaatgaactgaaactttctcataagaccattcatgatatt

SEQ ID NO: 22641 - DNA, 260 bp, Unknown
  Description of Unknown: LeftRegion for integrase B9642 sequence
gtttcgaaaaatctcaaaggattaaacgtgaaaaaagtggtcggtcttataagctatttttaaactaatccagttattacttaattataactgggtaattttaaaaccataaaaagaacgtatgttcaatatattgtaataatatacctgttaaactaaacatataaatattctatactaatagcatgaggtgataacaaatgaaagcagcaatttattctcgtaaatctaaatttactgaggaaggtgaatcaatagaa

SEQ ID NO: 22642 - DNA, 260 bp, Unknown
  Description of Unknown: LeftRegion for integrase B9643 sequence
ctggagctgctgcgcgtggtcgaggacaacacccgtatcctgcgcgaggtcctcgagcacctgcgcgatatcgatgcccgcctggcgcgtatcgaggggcgtacgctgccccccaccgaaaattgagccccgtgccgcttcagttcggcacggggctcgcgcagatcaaccgcagtgtaggaaagaggaattgatccgcaatgaagagtgtatccaaacacgaacgactgaacgggcatagcaacccgctcgtcggtcct

SEQ ID NO: 22643 - DNA, 260 bp, Unknown
  Description of Unknown: LeftRegion for integrase B9644 sequence
gtcgagaatttgacttttgaatgggctaaaacaaataggcatacagaaacgcaactgcgcacaatgacaaaaggcgcaggtcacacacacggcagcacagtggaatcatgaggttacagagcacgtggaatcaggaaagcgcaggtcaatatcaggaatgacagcagcacggcaccaggcacaaggggtgggggctcggcatggatggaccgccatcggccatggagggggagggtaccagaatatctgcaataaaacct

SEQ ID NO: 22644 - DNA, 260 bp, Unknown
  Description of Unknown: LeftRegion for integrase B9645 sequence
gcccggcgggccgcgttgtcatcccacaaacgcggcaaaaacgaacaatgaaccgtcgaaatggacgctgcgtcaattggttaacgcttccttaaccgccggaactatagcaatgtcgcgtgagtccgaatccgaggcttggctagaactggcaagagccatcgggcgggcggcggcacgggatctatttcggcggacttatggggttgttcatgtcgacgaaaaagagggcggtgatctacgcaaggttctccaacgag

SEQ ID NO: 22645 - DNA, 260 bp, Unknown
  Description of Unknown: LeftRegion for integrase B9646 sequence
atttatcaagcccgccgttcccccccggggcgcgatgtgcggaacttcatttgcccgcgcccctgcatgcccaccatggtggttgattttccaggttgattttccggttaagattcgcaattacgactcccggttaagattcgcccgccctttccttccgccgttccctatctcctaatctcctaatctccctatctcctatgcgcgcagcgctctacatccgcgtctccaccgaccgccaggcctccgagggcatctcc

SEQ ID NO: 22646 - DNA, 260 bp, Unknown
  Description of Unknown: LeftRegion for integrase B9647 sequence
cgtgctaccgcagcggttgtagactgcgggcatgccgaaaggaacgaacgtggcgatcaccgtccgcctccccgccgacgtccaccgcgacctggccgagctcgcccgcgagcagcgccgcagcctcaacaccgccatcatcgtggccgccgagcggtacatccggcagatgcgtgcgcggcagccgaaggaggcgccggatggccgctgagcccggccccggccggcgcggggacgcctacctgcgcaagtcccccggc

SEQ ID NO: 22647 - DNA, 260 bp, Unknown
  Description of Unknown: LeftRegion for integrase B9648 sequence
gatgggggaatgtacaatgcgtgttgcagaaaccgtcattatcttacaccgacaaatagctcttaatcaacgattacacaaaaaagggattataccttacactgtctattcaaaggttaacgatgaattgcaacgacgattgcaacataccacaaaatatgatatacttgtataacacaacatgaaaaggaggcagttacatgacttcaaagttgctgaatatcaaaaatgctttaaatgcgggtatttctatttttgat

SEQ ID NO: 22648 - DNA, 260 bp, Unknown
  Description of Unknown: LeftRegion for integrase B9649 sequence
ggtgaagaccgacggagcgaagatcgtgttcaccgcgccgctggtgaagcgcttctacgggcagcccgtcggcaatctgctcaactgggcgatccccttcggcggcctgcggcatacaacctgggaatcggcgcaaaaatcaccgatggggtgaaatattattgacgtgcgcatgtagtcgtgcaaaactggaatccatgatgcaaccaaacgaacttccccccgaggtaatttcccttatcagattcagcaccgccgag

SEQ ID NO: 22649 - DNA, 260 bp, Unknown
  Description of Unknown: LeftRegion for integrase B9650 sequence
tgggtaaaaatttatggcgactaagaaaccgagtcaaggtacacttaaaggcgttgcgacggtactactggaaatcggcgcgcagagaacagaacaacttcgccaaataagagttctgctgcaagagagtaaagatgttgaagctctcgacgccatgcgggaatacctcgcgatgaatccagcaacaaggaacccaagggatgaaaacgaaagacaagcaagctgaaccgaagaaggcggcgattgagctgattcgggta

SEQ ID NO: 22650 - DNA, 260 bp, Unknown
  Description of Unknown: LeftRegion for integrase B9651 sequence
catcgttccgcgattggcagcgttggtgacgaacatgacgtcagccaagttgaccagtattggtttcaagaaccgttggtcatgctggagcggcggcgcgcactcgagcaactaacacctgaacaattggcgactcgcgcagtgttactcgagcggatcggccgcggtgaactatccgctgaggaatttgcgagcctgcaatgaagacgcgcgctcgcacggtgacgaccagcaccaccgcgtcctaccagaccaatatc

SEQ ID NO: 22651 - DNA, 260 bp, Unknown; identical to SEQ ID NO: 13634
  Description of Unknown: LeftRegion for integrase B9652 sequence

SEQ ID NO: 22652 - DNA, 260 bp, Unknown
  Description of Unknown: LeftRegion for integrase B9653 sequence
accggcgcgtcgtctattttcgataagtgcgccgaaaaaatactgtggctaacgtattttaataacaaaatgctaagcgaaggacagatcacgaaagaagaacatagaaagatacaacagaagatttccaagattgacgcttcatgaatatcgtagtaaaataataatgactataatgacggaagcggtgtgatttcaaaatggaagatttctataaaatcaaagaagctctcaagattatgccgattactcaaataccc

SEQ ID NO: 22653 - DNA, 260 bp, Unknown
  Description of Unknown: LeftRegion for integrase B9654 sequence
ttattgcgaaattaacgggtaacccgtaaaagtgaaggtgatttgcatgggtgagaggcaagtcaggtcagaccctgacccaaccgatccgagaagcctcgaccacccctcccacaaggagcaatggcttgcgttagcgcgtgcgctggggcggctggatgcaaggcgagattttgagacacttcgcaaggggaaaaccggtgaccaaacttcaactcgtaaggccaagcccgatccttagaggggcaatctacgcgcgc

SEQ ID NO: 22654 - DNA, 240 bp, Unknown
  Description of Unknown: LeftRegion for integrase B9655 sequence
gttcggcatagtcgaaatcggccgcgccctcggccacccggaagcgcgagcggggcgcgccggtgaagctttgcagcagctcgatcacctcgtcgggggtctgcaccagcaccgcgccttcgcggatacgcgttgtgacagtagcacaaaactctggaatgtgcttttctggagtttgcaatgacaacacccgcttacatctacgcccgcttttccagcatggaacagggcaaaggcacc

SEQ ID NO: 22655 - DNA, 260 bp, Unknown
  Description of Unknown: LeftRegion for integrase B9656 sequence
tccgatacgcttgttttgtccgcaaacggagagaccaacggtctgcaaaatctgtttgaagatatccgcttcgggcaaatcgatggcgtcataattgaagatacaatcttttttggcgaaaattctacccgcttgacgcagattatagacttttttgccgctcatcaaacccgcatccaagtcgtcagggagaccgtgccatgcccgaaaaaataatcaattgtgccatttatacccgtaaatctactgaagaaggcttg

SEQ ID NO: 22656 - DNA, 260 bp, Unknown
  Description of Unknown: LeftRegion for integrase B9657 sequence
tacgtcacggtgcttgtgcgcttcgggatcgaagaccggcaggcagcgtcgcagctcacgccgggcgatctcgtggagatcgtgcggtcatgaatcccgacctgcgccgcctcgtcgagcttctcgcacgaatcgccgctcggcgtgctcgcgaacgccgcgagttgccggccctcccctcccgcccctagagtccgaccgtgcgcgcagccctctacacgcgatactcgaccgaagaccagtcgtccacgcccgcgcag

SEQ ID NO: 22657 - DNA, 260 bp, Unknown
  Description of Unknown: LeftRegion for integrase B9658 sequence
acttccaacgtcgtgctgcccgccctgaggagtttgccgagacgactcaaagggcaccggaagaatctcgcactttaactacagaagcctcagcacccacaagataaagcaccctctctgaatatcttcaaaagccgccctacgggcggcttttctgctatactaaaaacgcatcacccattttgctccaagaaaacgccatgaacgcccaacatccccttcccccaggcacccccgtcgccgcctacctgcgcgacagc

SEQ ID NO: 22658 - DNA, 260 bp, Unknown
  Description of Unknown: LeftRegion for integrase B9659 sequence
ccagccactgataggatgtacgccgatgatgatctgcttctcttatgaaagaagcagatcatcagttccccctcctccaccctgggctgtcgcgcctatcctcgactcgcacctcaacacgtacaacggcaactgctaaaaatgcggttgctctctttttaacctggacgcagatactttgggttaacaggacgcccaaaatgacagacgcccccaagcctaaagcataccgctatcaccggttcagcacgcccgagcag

SEQ ID NO: 22659 - DNA, 260 bp, Unknown
  Description of Unknown: LeftRegion for integrase B9660 sequence
ctgtatgagccatcatctaagtgcaatgacagcgagcgtgatgcttacgttcaggaactccagcgtttgcttgcttgctatcagcttgccagctcggatgataaaaatgtcgtttgggcagtgctgaacaaatatgcaccgcatatcgacacgatatagccccaggcatggggcttttcttgttgtatgggaaaaacattatgagaaataaatcattggcaggaagagccaataaccgggcagaacgccctcgtaaggtt

SEQ ID NO: 22660 - DNA, 260 bp, Unknown
  Description of Unknown: LeftRegion for integrase B9661 sequence
gagagaggccaacccagagaaggcccgggagatgaacgctgcgcacaaccgggactacagacagagggccaagggccgcccagagcagtgaacaacccccgtccatgagggcgggggttcgctgtttccgctggtcaagcctggtgtaccctgtgggggagccgctaaggcgtagcccccacgggggataccatcggaccatgagactaggagtcgtgaccggtatggacgtccacgccggagtgtatggccgccagtcc

SEQ ID NO: 22661 - DNA, 260 bp, Unknown
  Description of Unknown: LeftRegion for integrase B9662 sequence
aaaagttttagagaaattcaaaatatctgatgaggaattagatattcttatagaagcaggggttgaagaattgaataggttaaaaaatattgaaaacaataaactatcaacataagagggtaataccctcttttttcttgcattaacataagtaatgttatataataagtgtaatacaaaatgatgtgaggagtgttaatatgaatatccttgaaatgcgggatttgttattaaatcaaggaaaaacaatttatgattta

SEQ ID NO: 22662 - DNA, 260 bp, Unknown
  Description of Unknown: LeftRegion for integrase B9663 sequence
tcaagccacatacataccagtatcacatcttcacaatcaaagagtgtcaggaactcttgctacttgcaaagaacggacatataggagaaatcaacaaccgcatacagcacgctacggctcgtttccttgcggataattcccctgacaataaaaatattgctgtttgagataaagcccctgcatggggcttttcgttttatatggaggtatatattatggcgtacaacgcacaaaacaagaccggtgcaagggtggctatc

SEQ ID NO: 22663 - DNA, 260 bp, Unknown
  Description of Unknown: LeftRegion for integrase B9664 sequence
  modified_base (98)..(98): a, c, t, g, unknown or other
ctcgctgctggcgctcggcccggttcgggtcgatttcgacggcatcaaagacgccgttattcattgtattcaaggtgatgaatgtccccccccccccngtatatccattttgtctataattacgaagcagctccgggaccacggagctgcttcaacgataaagggggactatcatgaaaaaagggattgctctccgcaccgtgaaaaagactgcggaggagctgctcaacaccatcaaggtggcgatctatatccgggtc

SEQ ID NO: 22664 - DNA, 260 bp, Unknown
  Description of Unknown: LeftRegion for integrase B9665 sequence
acaggagtacggcatgatcactcacgccaaggagcggacctacgaaggagtagcgcgtgccgcatgggccctggcgcagcaggaggccagcgccctggagcggatagagcactttctggaaaatggggattctgaaagtgcgctcacggccatgaaagacttcttcggtcagaaaaaaccgagcgcgagggctcaactgtatgacaccgaggaaagaaaacgagtcgtttgaccggattccggtcgtagcgctgattcgc

SEQ ID NO: 22665 - DNA, 260 bp, Unknown
  Description of Unknown: LeftRegion for integrase B9666 sequence
cctgccggagtttgacgaggagcttttcaatcagcagctggcttacgcaacggtgcccgcagacaatcagattgtctttcacttccgggatgggcacgaggcttccagaaccttcgtccagaagcgccaaatgccacgccagaccgaggagaggaagaagcacatgagcgaggtcatgaaagcgaaatggagggaacgccatgccgaaaacgactaagaagattaccaccatcccggctacgctgacccgcttcacagct

SEQ ID NO: 22666 - DNA, 260 bp, Unknown
  Description of Unknown: LeftRegion for integrase B9667 sequence
cacgccggagcaggaagcggcaaaacgccgggagctggaacagcagctttatgaggtgttccgcaaatatgccgacaaacggcagagtgaggaagccggagcataagattttccgaagccatcgttgatttgcggggctgctgacggtataataaaggtgtcagcagctccgtttcttttttaagaaaaggagcgacaatatgaataatcgaatagacgcaatctatgcaaggcaatcggtagacaaaaaggacagcatt

SEQ ID NO: 22667 - DNA, 260 bp, Unknown
  Description of Unknown: LeftRegion for integrase B9668 sequence
cctgccggagtttgacgaggagcttttcaatcagcagctggcttacgcaacggtgcccgcagacaatcagattgtctttcacttccgggatgggcacgaggcttccagaaccttcgtccagaagcgccaaatgccacgccagaccgaggagagaaagaagcacatgagcgaggtcatgaaagcgaactggagggaacgccatgccgaaaacgactaagaagattaccaccatcccggctacgctgacccgcttcacagct

SEQ ID NO: 22668 - DNA, 260 bp, Unknown
  Description of Unknown: LeftRegion for integrase B9669 sequence
ccaccccgcccggaccccggcgaggcaggatggaaccatggatctccgaatcttcaccgaaccccagcagggcgccacctacgagaccctgctcaccgtggcgaaggccaccgaggatctcgggttcgacgcgttcttcggaaccggtaccgtatctacccatggagctagttgccctgggggacagggaccaccaagacatggtcagggcagtgacctacggccggcagagccacaagagcgagactgacagccaggca

SEQ ID NO: 22669 - DNA, 260 bp, Unknown
  Description of Unknown: LeftRegion for integrase B9670 sequence
cgccgaccgatgtaacctcttccaacatcaccagatcaggcgactccgtggccagcgaccagggcgggaccggccccacagctgaatgttacgacggcacgacaagctacagccatcatccgagtgggacgtgctcccaccacggtggcgtcgccacctgggatgatacgttgccgcatgcgagccaataggccgcctctttgaccatacaacgtcgcccatcctcctccgacccgccgccgcccggcaccccggccgcg

SEQ ID NO: 22670 - DNA, 260 bp, Unknown
  Description of Unknown: LeftRegion for integrase B9671 sequence
cctgccggagtttgacgaggagcttttcaatcagcatctggcttacgcgacggtgcccgcagacaatcagattgtctttcacttccgggatgggcgcgaggtttccagaaccttcgtccagaagcgccagatgccgcgccagactgaggagaggaagaagcacatgagcgaggtcatgaaagcgaaatggagggaacgccatgccgaaaacgactaagaagattaccaccatcccggctacgctgacccgcttcacagct

SEQ ID NO: 22671 - DNA, 260 bp, Unknown
  Description of Unknown: LeftRegion for integrase B9672 sequence
aggtcttcgggagagtgtaaacccgtccacccttgagatttgttggtttacagggtatgcttggagtggacaatgaaacaggggcttccctggtggaacaggaaaacccctcgaccccgcaggaacgtgacttcactgcgattacctccattatcgcacatggtcacgtaccagggtagaaagcacagtacgtgactgctatgctcgccacttcaacgctgcccattgatccgcctagcggagaatgggagtatctcttg

SEQ ID NO: 22672 - DNA, 260 bp, Unknown
  Description of Unknown: LeftRegion for integrase B9673 sequence
gcggctacttcaattggcggcactgacgatcgtggccgatcacgaacgaacgtaacgtcaaattggttaagcttccttaaccccttggaatgtagcaatgtcgcgtgagtccgaatccgaggcttggctggagctggcaagagcaatcgggcgggcggcggcacgggatctgtttcagcggacttatggggtagtccaccatgacgaaaaagagagcggcactttacgcgaggttctcgagcgatctgcaaaaagatcga

SEQ ID NO: 22673 - DNA, 260 bp, Unknown
  Description of Unknown: LeftRegion for integrase B9674 sequence
gttacatcccacaaacgcggcgaaaacgagcaatgaaccgtcgaaatggacgctgcgtcaattggttaacgcttccttaaccgccggaactatagcaatgtcgcgtgagtccgaatccgaggcttggctggaactggcaagagccatcgggcgggcggcggcgcgagatctgtttcagcggacttatggggtagtccaccatgacgaaaaagagggcggcactttacgcgaggtattcgagcgatctgcaaaaagatcga

SEQ ID NO: 22674 - DNA, 197 bp, Unknown
  Description of Unknown: LeftRegion for integrase B9675 sequence
cccttaaaaacacgaaaatcgttttttaaagttgaaggctaaatttttttggaaaaaacaaaagtttctttgtagaaagtttggtaatttccaaaaatatacgtacctttgcatcagaattttaaaaattgacaattatgaagaaagtaatcggttatgtaagggtaagcactgacaagcaggacttacaaaggcaa

SEQ ID NO: 22675 - DNA, 260 bp, Unknown
  Description of Unknown: LeftRegion for integrase B9676 sequence
acctcacccctcacgccaacgccattccccccgcaatggcccaccaataaattgtgcgtagggcagcgccatttcggcatgtcccggaagacccatttcgtgtgccatgccttacggggcaggggccagtatcctcattacagtgattcgctggatttggcaaaaagccaccagtaacattgtaacgaggagaacataccgtgaaaaaccagcaaaaaaccgcctatagttatgtccgcttttcaaccccccgccagcag

SEQ ID NO: 22676 - DNA, 260 bp, Unknown
  Description of Unknown: LeftRegion for integrase B9677 sequence
ccaaaaggcgaataagcgaccacggcattatgtggtgtaagtctttgggtaaatgtataacataaacgacttagacaatgatttgataaatgaattcaagactttaggaatcagtgatgaaaatgatatgataatcatactgaacggacttgatggcttggctgaaataggatacacaatttacaaaaagggaagaaacgatgattaagaaaacaaggaaacttagccacgatgaaaagatagtggagaaaaggaaacaa

SEQ ID NO: 22677 - DNA, 260 bp, Unknown
  Description of Unknown: LeftRegion for integrase B9678 sequence
gagcttgctggtcgcgaagcacccaaacaggcgcaaggcataccgatctacaccgagaacgagcaacgcattatcaatgcctacagatcggcgacgccccaggggcgagcggccatagaggcggtggcacaatcacaagaggggatggtggggaaacctacgtctgatctcgcagacaccggctaaatggacctaaaagaatgcgccgcccgacctcgcaaatcgggcggcgcagcgtgcctattggcgtaggcaccatg

SEQ ID NO: 22678 - DNA, 260 bp, Unknown; identical to SEQ ID NO: 13960
  Description of Unknown: LeftRegion for integrase B9679 sequence

SEQ ID NO: 22679 - DNA, 260 bp, Unknown
  Description of Unknown: LeftRegion for integrase B9680 sequence
aaccctagaaagatttataaagaataaacttatgataaaagaaaagatggaaaaggaagctgattactttgcaagtgaacttctgttatctaatattgatgactatgtaattgaaggattaacttgcactcagctttctattttattatctgttcccgagaaatatgtaaagtataaattagctaaataaggagggtatcatgctagctgcaatttattcccgtaaatctaagttttctgagaaaggagaatcagttgaa

SEQ ID NO: 22680 - DNA, 260 bp, Unknown
  Description of Unknown: LeftRegion for integrase B9681 sequence
atccgcgaaggtcgaactcgaagcaccggaagcctcgtgactgcgccggcgaacaggcccgtgcgcatcgcgcgcgcaacgatcaccgaggtcgagacgcagaaagttctcgtgttcgatcctgttcggcgacagcgccagctcgcggcgttgatgaagctgctcgacagcggcgacgttccgcgcgagggttcgaagccgtgagagccgtcgtgtacgcgcgcgtgagctcggcgatccaacgcgatcgcgagaccatc

SEQ ID NO: 22681 - DNA, 260 bp, Unknown
  Description of Unknown: LeftRegion for integrase B9682 sequence
atggaaatcgaacatgaatatgtaataacagatatagaagaagctatggaagtgattttaaatcaagaaaacttaattttgcgtggagaaatcctagatgatgaatcaaagattcagctatcaaacagtataaaaatggccttacaatttgctgttgaagcacaaaaacgaaataataaattgatataaggggtgctcttatgattgctgcaatatattcacgtaaatctaagttctccgagaaaggagaaagtgtagaa

SEQ ID NO: 22682 - DNA, 260 bp, Unknown
  Description of Unknown: LeftRegion for integrase B9683 sequence
ttgtcggtgtaacaaatgtcgaaactcctaatccaaactttccggaagatatacttctccttgttcaagcatacactcgtgcctcagatgctgataaaacagttttatgggcattatttgacaaatatttgtccccgcttgataaagatgtgcttaatgaggttttatcgaataatgatacaaattaagggttttacgatatgaataaaataattgatacactaaatacacaaaaagcggctatctatattagagtatct

SEQ ID NO: 22683 - DNA, 260 bp, Unknown
  Description of Unknown: LeftRegion for integrase B9684 sequence
cgaccttggccttactaatgttttgtattatgtaaatggttcttgtctttccgaaatcgacccggacaaatattccggatggaaatatgctatttatctcaggattgacgattccatccagcagacgcttgatgatcttccttccgatccatgaagatttaacgttctaatctgattattccgaaaatgtcggaggtaatatgaaaaaggccgccgtcccgtcctgctctccccgcaccgccgtcgcctatgcccgctat

SEQ ID NO: 22684 - DNA, 260 bp, Unknown
  Description of Unknown: LeftRegion for integrase B9685 sequence
agaagatatgataaaaaagaaaaaatatggattactttaagatttgaaaaagaacatgatcaaaaaaatgttgataatattattgattgtattgttaataatctataaaatgacttgtcctattgacaagtcttttttatttatggtatatatgattcaaatatgtaatatagaacaaaacacaaccaaggaggaaaaatatgtttaatatacaaggtaaaaaagctgttgcactatacagagtgtcaacagaaagacaa

SEQ ID NO: 22685 - DNA, 260 bp, Unknown
  Description of Unknown: LeftRegion for integrase B9686 sequence
ttcttcatcggtggaccttgcagcgatcggaagccgggccgggcgacgatagcccagaaaatctcgtcgcaatactattcacgtaagtttttccgttacctggctttgcgtcgcgccgttcaacaaaagcgcccgaccataccacatgctcgtcaatggccgcaagaccaagtttcaacaggatttaggttcgtttaactatgccaagcgtccaaaaaacaggcaaaggcaataccccccgtccttgggttatctacaca

SEQ ID NO: 22686 - DNA, 260 bp, Unknown; identical to SEQ ID NO: 14095
  Description of Unknown: LeftRegion for integrase B9687 sequence

SEQ ID NO: 22687 - DNA, 260 bp, Unknown
  Description of Unknown: LeftRegion for integrase B9688 sequence
agtggctttctttaaatctgccgcgtgatatgcgggcgcaatatgaaaacgacccgttatttgctgcgcaaaagaagaaaaccgctatacattggaaagcaacccttgcgggcgtatctgatattgataaattcaaagatttaatcgtcgtggcttgtcgccctgcgcctgctgcgtcgtaatagaaaggataaaccacgatgaaagataataaggcgggatttgacgggcgtattacggctttatatacgcgcgtttcg

SEQ ID NO: 22688 - DNA, 260 bp, Unknown; identical to SEQ ID NO: 15072
  Description of Unknown: LeftRegion for integrase B9689 sequence

SEQ ID NO: 22689 - DNA, 260 bp, Unknown
  Description of Unknown: LeftRegion for integrase B9690 sequence
ccggggacagatttttagaagataatgaagattcgcaggaagatcgcggcggtttcgaggaagagctgcgccgtctttccgtgtgctacaggtatgcttccgccgctgatcgtggcgtaatatgggctgtattgaacaaatacgttcctatgctaacggctgacgggctcctgtaatctatttccggctgccgaaagaaaatggcaagcctatacaaagaagaggctggcactccgctgcttaaggtcgctatctatatc

SEQ ID NO: 22690 - DNA, 260 bp, Unknown; identical to SEQ ID NO: 14114
  Description of Unknown: LeftRegion for integrase B9691 sequence

SEQ ID NO: 22691 - DNA, 260 bp, Unknown; identical to SEQ ID NO: 14111
  Description of Unknown: LeftRegion for integrase B9692 sequence

SEQ ID NO: 22692 - DNA, 61 bp, Unknown
  Description of Unknown: LeftRegion for integrase B9693 sequence
gatgacgcaaagggccgcactgtacgccaggttctcgagcgatctgcaaaaggatcgaagc

SEQ ID NO: 22693 - DNA, 260 bp, Unknown
  Description of Unknown: LeftRegion for integrase B9694 sequence
tgatcaatataaaatgtgggttgctttagaattcccattggaaggagacaaagaaatagataaaacaataactcaaatgttgagtgatgcatatattcaaaactgtcttagataagacagttttttctttcttgactcatatgcaaaatgtatgttaaataagacataatgaatacataattaaggctggtgtaatagctatggcgaatggattaatcaagaatcacaatcaaaatctacaattaaaacgtgtagctgct

SEQ ID NO: 22694 - DNA, 260 bp, Unknown; identical to SEQ ID NO: 13552
  Description of Unknown: LeftRegion for integrase B9695 sequence

SEQ ID NO: 22695 - DNA, 260 bp, Unknown
  Description of Unknown: LeftRegion for integrase B9696 sequence
ggctactggctgtaaaatgctggtagccctcattttttagttgtatctagtatataaggggtgtataatagatagaaactgaaaacagcctcataaagccctctattttatcgagggtaaagaagtctacacctaatatataaaaatggctgtatgaggcacacaggagctcacagaactattacaggagggtaaacaggatggcatacaggaaaataacggatataagagatactattggtatgagagcggtattttat

SEQ ID NO: 22696 - DNA, 260 bp, Unknown
  Description of Unknown: LeftRegion for integrase B9697 sequence
aaataatataatcagcgatgaaaatggtgcattgattattataaatatcttatatgaacaaggcattattaataaaagaacttatgataatattttgaaaaagtataagattacataatatagaaaaatactgttgaaaataaggcttattttatatataatagtatataaaataggctttatttttgaaaggagataacatgaataattatatagcgtccctcgatagaaatagaccaagaaatattgctttttatgga

SEQ ID NO: 22697 - DNA, 260 bp, Unknown; identical to SEQ ID NO: 13552
  Description of Unknown: LeftRegion for integrase B9698 sequence

SEQ ID NO: 22698 - DNA, 260 bp, Unknown; identical to SEQ ID NO: 14186
  Description of Unknown: LeftRegion for integrase B9699 sequence

SEQ ID NO: 22699 - DNA, 260 bp, Unknown
  Description of Unknown: LeftRegion for integrase B9700 sequence
accaccgaccgccgcgggccgcagtcgcggcttgaccgccggatgacatgacactacgatgggagggacatgaccgatgcgtcggcgcccgagtagaccccgaacacggccgccggggggagagacgatctatgtagatcgcccctggccgacgcccgagaacctcgccgcattgcggcgactgctggagtccgtatcccatggcacggaagacgaccccgaccgcgaagggactggccgcgacctacagccgggtgagc

SEQ ID NO: 22700 - DNA, 243 bp, Unknown
  Description of Unknown: LeftRegion for integrase B9701 sequence
tcagtctcgcaataaaaacacatacggggcatcgcagcagcggtgccctaaaactatatctaacggttacgttacgtttacggtataggttacggttacggtatggttacggttatacacggaacgtccgtggatttttggtcggacgttcctatggaatatcccgaaaaaggaggacttcgtatggcttctcgcatcgccgagaaactggccgcgaagaaggcggccatctatattcgcgtc

SEQ ID NO: 22701 - DNA, 260 bp, Unknown
  Description of Unknown: LeftRegion for integrase B9702 sequence
cgcattctgcactacagtgcaacgctggcggtctttcggacatgggtacgcaatggctggatcacggaagacgattttcggttgctggaagctaagatggcggaacgctacgggctatcaaacaacagtatatatcgtcaaaccccttgataattctggctttcagagcgaatataccatgaccgaagggaggaatcggcatggagcgaatcattacaagggttccagtacaaaactcacaagcgctcaggcttaccaag

SEQ ID NO: 22702 - DNA, 260 bp, Unknown
  Description of Unknown: LeftRegion for integrase B9703 sequence
ccgcaacgtcatcatcaacgtcgagcgcggctatcccctgccgcggcccaagaccattcgcaagctcgccgccgccttcgacgtgtcggtcgcgcagctcaccgagggcgagtaaaaaagacagagaaaagccccgcgccgctcgtgttcggccggggccatggcagatccaacagtgtgaaaggactgaacctgcagctatgagtgtaatcggtgtcctgatccgcaattcaaccgctaagcaggtcggcaactaccgc

SEQ ID NO: 22703 - DNA, 260 bp, Unknown; identical to SEQ ID NO: 13390
  Description of Unknown: LeftRegion for integrase B9704 sequence

SEQ ID NO: 22704 - DNA, 260 bp, Unknown; identical to SEQ ID NO: 13390
  Description of Unknown: LeftRegion for integrase B9705 sequence

SEQ ID NO: 22705 - DNA, 260 bp, Unknown
  Description of Unknown: LeftRegion for integrase B9706 sequence
ttgacagcccggccagcgcgccgggcttttttgtcgcccgctatatgaatggcggggagagcgccgccgaatttgcgtcaagccacaaaattcaggaacgaagtaacagtcccaggcggcttatattttcggaccccttcgccttcgcagttgttgcctcatatatgatggccacggctccacttacatctgtcccgaccatgaagctccaacccttcgtcatcagctacgcccggtactcctccaccgctcaacgcgag

SEQ ID NO: 22706 - DNA, 260 bp, Unknown
  Description of Unknown: LeftRegion for integrase B9707 sequence
actaaggcactatgaaaaaagcaccagctctacaggtcgaagaaatcagcggcaatcaatatccagatcttgatgcagctcaacgagcagcattgtcgctgatttctgctgagcttcagtctgttattcaaagcctgttagagcaaggtgtattggtaaatatcaatggcaagatcatccccaatcaacaaggataatgcatgaaagatcattactcctctcccccgcctggacttcccgagcgatcgcgtgtatgggct

SEQ ID NO: 22707 - DNA, 260 bp, Unknown
  Description of Unknown: LeftRegion for integrase B9708 sequence
gcccactacgaaagagttctttgctttcagttttatagtctgccccgtcatcaaatcccagggagtccagaatctcacacactgagttcatgcttgccagagcgggcggctataatcgaaccctagcaagtcgaattatagcataagcccgctcaattttatagggcttattttttgtactcatttttaggggtagtgctatgatcgataatatcaacagccggaagactgccctctatgtccgtgtctcgaccgtttac

SEQ ID NO: 22708 - DNA, 260 bp, Unknown
  Description of Unknown: LeftRegion for integrase B9709 sequence
acggagcacgcggggagccccgctccacacccgctcatccgcctccccttcccgcttgagcaggttgagccgaccggcccgcaggcgccgcaggcgccgcaggcgccgcacaggtaccgcgctctcgtgcggtccctggccgctctcgtggtggccgatctcaccgaccccaaggacgtgtagcttcaaggccctccctcatgcgcgccgccatctacgcccgccgctcgaccgatgagcaccaggccgccagcctcgac

SEQ ID NO: 22709 - DNA, 260 bp, Unknown
  Description of Unknown: LeftRegion for integrase B9710 sequence
gcgctgcgctgcgccgacttgaccaacgacactatcgcccgcctgtggccaaagatctgcgcccgcctcgcccacggcgtcgcgctgctgcccgtgccggcgaaagccgtgcagtgattgaccagtggagcgatctaacctggccgcgaacctgaaagcgcgtcttgcccccgaattgacatgggtggagccgcgtgacgatgatgccgcgcgtcgtgctgaggcggcgctcatcgaactcgtcgaggcaatggccgtgc

SEQ ID NO: 22710 - DNA, 260 bp, Unknown
  Description of Unknown: LeftRegion for integrase B9711 sequence
actcctctctttgatgtgttcttcattgatggttaaatagcaaaagacggacgatcgcaaagagccatcctccgtctttatatatattatgattacggtatataggttacgattccgtttacggttacggttgcgccggaatttccgtggaaattccgtggaaattcctgtgattttccataagataaggtggtgtcagagtggatgcatccagaagcctatcgaaaaagaaggcggcaatatacactcgtgtttctaca

SEQ ID NO: 22711 - DNA, 220 bp, Unknown
  Description of Unknown: LeftRegion for integrase B9712 sequence
gccgcgagatcctgtccgacgacatgcggccgcgcgaggtcatttaggaagcggctgatccggcaccggcctactaccactgcagaccggacaacggccgaccccgaggggtcaaggggacgactgttgtagaccatatatcaccctgctatcatgagacatgagcaacgcagcagaaaccggctacgctattgtttacgttagatgttctaaagatgag

SEQ ID NO: 22712 - DNA, 260 bp, Unknown
  Description of Unknown: LeftRegion for integrase B9713 sequence
ctggatgactgtgctgcatttgaaaaagcggtggcatctctgattgcctgcctgagaagctaatatatatatcttcttatagatttatctataagaagtggttacggttaggttacggttacggttagacgaggatttccaaaatttttccagcggatcgtccgtgtgacaacccacggacagtcacatttggaggcaaaatggcttatttgaaagacttcacagcccggaaggtggcaatctatatccgggtttctaca

SEQ ID NO: 22713 - DNA, 260 bp, Unknown
  Description of Unknown: LeftRegion for integrase B9714 sequence
tcggccaatgtcagcattgcggaatcttttttctggccaaacgcgaacatcccagagggagacttcgcacagaaggttgtagcaaagatcatgcagacgctcacaacaaagaggctgacaaagaaaaagctcgaacacgcgctcgtaagcagcgaagacgccagaaagaatcgaaatcgcgtgccaggaggagaagctaaatgagagcggccctatacggtcgattcagcactgaccatcagcgactggaatccattgca

SEQ ID NO: 22714 - DNA, 260 bp, Unknown
  Description of Unknown: LeftRegion for integrase B9715 sequence
ccccgcgcccggtggatatccgtcgccgtgtggggactggatatttcgccggatgatccgcgtttttctgctcaaaagaacaaacaggcgcggttctggaaggcttcaatccgcgacgtgtccgatctgtctgattttgacgacgttgttgtcgcgtcctgctgccagaatatgaactaatatcagaaaaggatcaagccatgaatgaaaagaaaaagattgtcgcattatatacccgcgtttcgaccggatatcagatc

SEQ ID NO: 22715 - DNA, 260 bp, Unknown
  Description of Unknown: LeftRegion for integrase B9716 sequence
gaagaagggtcgaatatcgcgatggcatagcgcatatcattgtggacgcgtccaggcggccgccgtgatgatcatttcggaagacataaaaagcccgttccggcatagccgaaacgggccgcaaaaccagccaacaccacttgtccgatttgcatatatattatatcgcgggcgtggcgtgaagtcaaggagaataatagatgaaacgctcaaattccacgcataaaaatacagatccggtaaatccggccaggacgaag

SEQ ID NO: 22716 - DNA, 260 bp, Unknown
  Description of Unknown: LeftRegion for integrase B9717 sequence
aacctccgtactgtcaaattttgtgtcactgtttataacaaactgtcccattacagtactggcgaaaaccagtgtcaccagaatacagattacttttttcattatactttcaatttaaacgttacacccctataaccaaaaaaaactgcgattttctgcaggtcaaacgttaaaaattgttaaaaattttaggcggctatttgacaagaaaaactgtaatttgttggaacataagtagtagaccattgttgcatccttat

SEQ ID NO: 22717 - DNA, 260 bp, Unknown
  Description of Unknown: LeftRegion for integrase B9718 sequence
gcctcactttcaaaaacacctttgaaagtaatatagcacttttttgtaaaaaaatcaagtaatatgatagaaaaccgcacaaaagttgtgaactcagccgaactagccccccaacacacatatccgcgtgcgttggggaattttttatttgctacaatggggatagaacatctgacagtctccgaaaggaggctggctctatgccaagagcaaagaaagcggcgatatactgccgtgtatctaccattcatcaggtagac

SEQ ID NO: 22718 - DNA, 260 bp, Unknown
  Description of Unknown: LeftRegion for integrase B9719 sequence
tgtaaacatatgtattgtctggctatggagcttggtctcctggatggacttccggtctatgataaaagatcggcttcctatgatcctgattctgaattgaagagatatcgttctctgtatgaaagtggtcagatcagcgcggatgcatatgtgaaagtctgcagcgcgcttgcgaaattgaagaaataaaaaaccgcccggtgctaccaacaccaggcgacctgttcttccttgcggaagctgtaaactctacgaataaa

SEQ ID NO: 22719 - DNA, 260 bp, Unknown
  Description of Unknown: LeftRegion for integrase B9720 sequence
gaaattaactcctacacttcaatcaaagcttcttatatatctaaatggaatggtagatgctttgtctcctactgtatcaactgacatagaaaaaaggttatcagtatagaaaaatataaagaagaaaataaaacgcccatataggctgtaataaccatgtacaacactttataaatataccggatgggagttaaaataaaatgcagaatagttctgataaaaatataaatagagttgcaatatacatacgagtctctaca

SEQ ID NO: 22720 - DNA, 260 bp, Unknown
  Description of Unknown: LeftRegion for integrase B9721 sequence
taaacgcattatcaagagtttttttgggatgattcttgtcgatggtaaaaatcatcttaaatatgtaattgataatacattttcaattattgatgagttgcatgaacaaattgataaactcaacaaatgtaaacctttcttaaaaggtcaatattacgatgagacaacaaataatacagtaacctacgaggtaattaaatatgagggacattaaagttattgaatccaaacaatcaaaaggatcaaaacatattatcaaa

SEQ ID NO: 22721 - DNA, 260 bp, Unknown
  Description of Unknown: LeftRegion for integrase B9722 sequence
ggccgacacgggcatcttcatcaagaagcgtcgcaagtgaaattaatttcatgggcaaggtcatcaagctgacaagtcgggggccggagaaagtcccggcccccaagaaactcacaccgcagatgattgcgctgataaaggcccttgccagagaaggggcacgtgaggaccatagggcatcattgaaaaatgggtagcccatgaatcgtgcagccatctacgctcgtttttcgactgaccagcagaacgaaaagtccacg

SEQ ID NO: 22722 - DNA, 260 bp, Unknown
  Description of Unknown: LeftRegion for integrase B9723 sequence
cgccaaggtcaagatggatatggtctccgcctggtggttcgggacgatcgtttaaaatcccgcgtgcaccggcagcctgcgcaattttcaacacggcctgacgcacttcctcttctgtgccatgaaatataatcggtgcttgggtgatcattaagcctcctgaatatgatctctaaatatttgttctaattataatccacatgaataaccattcctttcccccaggtagcctggcagcggcctatttccgagactcgggc

SEQ ID NO: 22723 - DNA, 260 bp, Unknown
  Description of Unknown: LeftRegion for integrase B9724 sequence
ggggatttttaatgcagttctttggggtcagggattgcgtataaacgacctttctgccagtttggtgtcgcggtcaatccccaataaaatcaacgatttagaccattatgtgaaaaagaacaaaagaattcttgacttctgattgacataatgggatattgtccacgttaagacggtcaaacgaaaataaaaaactgaatatgaaaaacgcatacagttacgtcaggtggtcaaccctttcacaaggtgaaacgggtcgc

SEQ ID NO: 22724 - DNA, 260 bp, Unknown
  Description of Unknown: LeftRegion for integrase B9725 sequence
ttaaccgggggattgctgttgaccattggtccatggtattatgagcaagagcgaacacaaacggtgcgggctaattcggaaagtcagcccagctaacccgcgcagtttggagcatccaagtcacggggatgctttgggggaattggcagaggcccttggccgcgcacttgcggacaagcttgcaaaagaaatgaccaatgatgaaacgcgcagcactgtacgcccgattttccagcgacctgcaaaaagatcggtccata

SEQ ID NO: 22725 - DNA, 260 bp, Unknown
  Description of Unknown: LeftRegion for integrase B9726 sequence
gagaaaataaaatcccccattttgaaacccccatgatacattgatatcatggggtttttaatgatatgaatatggtgtccaaatagaaagttggacgaatccatcttttcaagtggacacataggacaatccttgatataattgggtttcaggtggtttgtccacctgaacacacaacttgagaggatgaaacacacatcatggcagaccatattgaaatgtttaaacagattaaaaaagtagcaggatttttgaggata

SEQ ID NO: 22726 - DNA, 260 bp, Unknown
  Description of Unknown: LeftRegion for integrase B9727 sequence
tgatttcgccacgcttgaaagaatcgccgatttcttcggtgtcgataccgattatcttatcgggcgatctgtccgttctgttgccctggataaggcggaagtcgatctgattgaaagattgcgcctgctgcctgaaggcgaaaagaatatgattcttcgggctgttgggattattgactaatatttgaaaggatcaaaccatgaatgaacaaaagactatcgcaatatatacccgcgtttcaaccgggtatcaggtcgac

SEQ ID NO: 22727 - DNA, 260 bp, Unknown
  Description of Unknown: LeftRegion for integrase B9728 sequence
tagagtactttaaaaagcaatgattatgaaacagacagtagaagaagcagcaaaggaaaacatactgtttaatcacagaacagttgacagaactttgttgggtaaagatttggcaaggtttggagaaattaattaagctaataacttttatgattaaatttaaagtgctatatttgtgctgaaattcaagcactaagaagatgaaacgagcagcattattgctaagatgtagcaccaatatacaggattataaccgtcag

SEQ ID NO: 22728 - DNA, 260 bp, Unknown
  Description of Unknown: LeftRegion for integrase B9729 sequence
acaaataaggttccgcctcctatatgtccccctgctaaccgtggcaaaattggcatcattcgacacctgcctgttgatgatccccgcaatccgaaccacccgagccatgatgacaagtggttggagttggcaaggtctctaggtcgggcaatggcagattttgaatgggatcggctcaacggtcctaatgggaaaacaaaatgaagaccgcagttatttatgcgagatattctagcgatcttcaaaaagatcgttctatc

SEQ ID NO: 22729 - DNA, 260 bp, Unknown
  Description of Unknown: LeftRegion for integrase B9730 sequence
tttaagtatacggcgcgggcgcgttggatttctgttgatgttttgggattaaatatttcggcttcggatcccttattcgctgcgcaaaagaacaagaatcaaaggttttggaaggctgcaattcaggacgtgtctgaactttcgaaatttgatgatattgttttttcttcttttcaaaagaattccgggggattgatttaatgaacgaaaacaaaacagtcgccatttatacccgcgtttcgaccgggtatcaggttgac

SEQ ID NO: 22730 - DNA, 260 bp, Unknown
  Description of Unknown: LeftRegion for integrase B9731 sequence
tttaagtatacggcgcggtcgcgttggatttctgttgatgtttttggattaaatatttcaccttcggatcccttattcgctgcgcaaaagaacaagaatcaaaggttttggaaagctgcaattcaggacgtgtccgaactttcgaaatttgatgatattgttttttcttcttttcaaaagaattccgggggattgatttaatgaacgaaaacaaaacagtcgccatttatacccgtgtttcgaccgggtatcaggttgac

SEQ ID NO: 22731 - DNA, 260 bp, Unknown
  Description of Unknown: LeftRegion for integrase B9732 sequence
tcatactgcctgaccgggaaggtgtccagagtctcggacatcattgtggaagcgggcctgtgcgcgggcaactccaactgcgtcctgtgcgggaagctcatggaaaacatcgaaaaaggaatttttgttgcagttgcaaaagacgggatgccactggatatgtgacatcccgtcatctttaacagaaagcggaggacctattgcctgatatcgaaagaacccccttgcagaacagagcggcaatctacataagggtatcc

SEQ ID NO: 22732 - DNA, 260 bp, Unknown
  Description of Unknown: LeftRegion for integrase B9733 sequence
gatcctttgagaccgctcccgccggagctgactggcctggtgagggagcgggcgaagctgtatggcgacagcttcatgctggacgtcgcgccctacacgaccgctttcatgcatcacgacctggcgcccgtctccgatgaggagaggccgtcgcccgcccgcctgtttccggaccgcctgtgggcgccgcgcagcgagccatgacccccgccatctacgcccgatactccaccgatctgcagcgcgaggaatccattgag

SEQ ID NO: 22733 - DNA, 260 bp, Unknown
  Description of Unknown: LeftRegion for integrase B9734 sequence
ctcataaacaaaattaatacctttgtgaacagcacatggataatgatagcatcgttagtaatatctatacttattttattttggaaatagaaacctgctttggcaggttttttattcaagttttttatataattattattttaatttattgctttttgtgatataatataaataaatacacattatcaaaggtgattataatgagcgataaattgaaagttgtggcgtatgcaagggttagtacatcgtcaaaagatcaa

SEQ ID NO: 22734 - DNA, 260 bp, Unknown
  Description of Unknown: LeftRegion for integrase B9735 sequence
ctcggcggaatcaatgccgacagcgtcacaaagaaaaccaacttccttgttttgggaaataatgacctgtgttcctcaatcaaagacggcaaaagttccaaacataaaaaagccgaaaagtatattttgggcggcgcagacttgtctattatcccggaaaatgttttttatgatatgttagacgaataaagggtgattgtatgcgggcttttatttactgccgattttccagccataagcagcaagagcttagcatagaa

SEQ ID NO: 22735 - DNA, 260 bp, Unknown
  Description of Unknown: LeftRegion for integrase B9736 sequence
gtcggcacatggaaaaatgatggtgaagattaccttctttctctcaacatggatcatcccgtgaaatggtatgccatgctgatagacggtttcctttttgtacgtcctcatgattccccggatcatcttctgcgtttcagacctctctgtacattctctcctgatactgattatctgcagatcccgtaaaggaggccgccatgaatcccgaatataaaccggctgtcatatatgcccgttacagcagctcctcccagact

SEQ ID NO: 22736 - DNA, 260 bp, Unknown
  Description of Unknown: LeftRegion for integrase B9737 sequence
gtcgctcgcggcgtcggagtgcccactccgaaaacgtaccgctcactcccattgacaacgattcctgagtgatagtagagtctcaatcgttctagagaaactaagggcgcgcggctcctcaacaagacaactctcccttgtgtgagccgcgcgcagaaagtggaacgagtgagtgtcggaccgccagcctggtctcgtggatgcgttactcgaagtgggacggcagcgccagcaagtcctcgcgaatcttcgaagtgctc

SEQ ID NO: 22737 - DNA, 260 bp, Unknown
  Description of Unknown: LeftRegion for integrase B9738 sequence
cgagcgtgagctctaccatctcctgtccgtgctggcctgtgatgccgaagatcccaagagcgccgccctactggcaaaactgctgcccatgccacaagctacaggtcaacggcctggggatgtgtgtgtgtttgacaccacatcgcgaacgcggtgtactctcaaacacgtacatccgcgatctagggagagcgtgtggcatgccccctgtagatacaccgctaagaagaccagctcgatgcaagcgcgccatcatctac

SEQ ID NO: 22738 - DNA, 260 bp, Unknown
  Description of Unknown: LeftRegion for integrase B9739 sequence
aggagcaatgcgaagcgcttgtctgaagcgcccgtctcctaaggcatcccggatggttttcatccgccgctttgctgcggatccgcccgacgagctggcggagcacgtgcggatcgtctttgagccctggctcgccgcgctgtcgccggcggccggtgctacaatcaaagcggatccgaagcccacgacaggtgatcaacatgaagcaagcgggcgcgctgatccgcgtctcgacctcccgccaacttgagggcacgagc

SEQ ID NO: 22739 - DNA, 260 bp, Unknown
  Description of Unknown: LeftRegion for integrase B9740 sequence
gatgggggatccgtgaccttccagaaaggcgagcatcgggtcacggctctaatcatcctcggcaatgatgcagacgaacttgtcgccgattggagtttcaattctcccgaggccgactccgccttcgaggccggatgggatgcctttcgtaatgtctgggaaggcaagagcgttccaacgatgcaagaaggaggtgaaggatgagcaacgcaaagaagaccctctcaccttacgcgattagctacctccgattctcctcc

SEQ ID NO: 22740 - DNA, 260 bp, Unknown
  Description of Unknown: LeftRegion for integrase B9741 sequence
ggcggctatgaagaaggctgcagaggacgccggcgccaagttgacgcgcggcgatgccgacgccatcgtggagatcgcacggcagcgtgcggagcttctgcgacgagtgcaggaagcgctgctggcgaccgacgagcccaccgcggtgcgcctgatgcggcagtattgtggaatcgatcctgaagaggaaaccaaccccgatgagcgcagcgaaaagcagcagtcctagactcgatgccatcggcatcgtacgcgtcagt

SEQ ID NO: 22741 - DNA, 260 bp, Unknown
  Description of Unknown: LeftRegion for integrase B9742 sequence
taaaaggctgggagccttattttttttgccttttctattgctatttttatataggtggtgtataatagataggaactgagtaaaaagcggttttaagcccctcttttgatgagggtaaggaaatatacacctaagagcttaaagtggctgtacgaggcacacaggagcccacaggggcacttataaaggagagttacaggatggcttacaggagagtaaaggatcttatagatacgataggcttaagagctgtattttat

SEQ ID NO: 22742 - DNA, 260 bp, Unknown
  Description of Unknown: LeftRegion for integrase B9743 sequence
cgcagccttggccaacaggagcgatgaatgactctcgaaatccactggggaaaggttgctcgtcatctcaaggatgacgccgagcaaatcagagaacgcgcgataaccgcgtttcacggggacatcgctacgcagaaggaaatgcagacccgcgccgcgatcctggaatcgttggcgaacgcactttggtacggcctagagtgaaacgcgccgcgatctacgcccgcttctcaagcgacctacagtccgaccgctcgatc

SEQ ID NO: 22743 - DNA, 260 bp, Unknown
  Description of Unknown: LeftRegion for integrase B9744 sequence
aaccggcggccaactagtcagccccctgctcgacacattcgaatacatcggcatcgtggcgagcagcttctggcctcataagcgcacctgaagctcggcgcgtctcgtcgaattcgaatcaagtcggcgggccaccgaacaccaatattgcacctttcgtggcgcagtctcgcgtctgcaagtcaagcaggacagtgtccatgcagctagccgcacctcccaaagacgtcacgacggcaggatcgaaagctgctcagtac

SEQ ID NO: 22744 - DNA, 260 bp, Unknown
  Description of Unknown: LeftRegion for integrase B9745 sequence
tcaacgcacgacagaaaggtatctaaagaaatgaaaccttgctttaacgtgatttacgaagatgataacctaactattccagaaatcgacgactatgatttacttcattttggtctgtattttatgaagatatttgaacgtgaaattcagaaaacagaaccagaatttaaaattttaaatttttgatatagaatatcattatgaagattgcagtcgtttatattcgtgtttcgacagaagaacaatcgaaacacggcttt

SEQ ID NO: 22745 - DNA, 260 bp, Unknown
  Description of Unknown: LeftRegion for integrase B9746 sequence
ctacgggccgcgccatccgccacgccgaagctggcgacgggctcgcacctgattcgcgtctggcaaggcgatacacaccaggtcactgtgctggacgatgggtattggtatgccggcaagcgttggggcagcctgtcggccatcgccaaggcgatcactggcaccgcctggtctggacccgtgttcttcggaatcaagtcgtgaaacgtggatctttcgcctgtgcgatctacacccgtaagtcgtccgaggaagggctt

SEQ ID NO: 22746 - DNA, 260 bp, Unknown
  Description of Unknown: LeftRegion for integrase B9747 sequence
ctgaagcgtgtggccgcagaggccatgggggtaaaagcttttgatgaggatagatttcgggagaaagtggaatatatcgaagccggaaagccaaattgcctgactgtccattttaaggatgggagaacagaagagatttcttatacacctacgccgtccaagcgacgttccaaggcacggagaaaggagagcagagaaaagtggcgaagacagtaaggaccatcccggctaccatcagccgttatacggcggccccgatt

SEQ ID NO: 22747 - DNA, 260 bp, Unknown
  Description of Unknown: LeftRegion for integrase B9748 sequence
aggcgcattgagtcaaatcttaatattaacttagcacgggagggaagtaggttttcttcaggagatggaataccagatgaaaataacaaaatattgcggcttccattgattgctcaggcattgccgccccgtcgagctgtgccattgctcatcgttctatttgcaattgtttttgttttgttcattgttactcaattaggatggatttaatattgagctatctccctcccccatccactcttcctcctggctcgatcgta

SEQ ID NO: 22748 - DNA, 260 bp, Unknown
  Description of Unknown: LeftRegion for integrase B9749 sequence
ggtaaccacagttattaatcaggatgtagaaaattgggttgaagaggtgatatcaactaaagaattttatgattttgcagctacattaatgtacaagtataaaaaagcataaggtaaaacaagtatacctgtttttcccatggtatacttgtgcttatatacagacataaaagataaagcaatatggaggttatgatctattgcttatattaaagggagatcaaaagctaagtacggacaatataatgcatttgattggc

SEQ ID NO: 22749 - DNA, 60 bp, Unknown
  Description of Unknown: LeftRegion for integrase B9750 sequence
gcgcatcctagcgataccatacctatacgcggtcgtttttctattgtttcagtcatgagg

SEQ ID NO: 22750 - DNA, 260 bp, Unknown
  Description of Unknown: LeftRegion for integrase B9751 sequence
gcattgggaagaactcttttaccgttggtttctgggcatggtggcgcattggagggggatggaccgtcagcatggcaacagtacttcgcctttgctggtgggttcacaaggattccggaaatccacttatgttaagttttcaaagttataccttgctattgaaaatactctttatctttgcatcaaagataagataaacaatgaaaagagttataggttatattcgcgtctccactgataatcaagaccttgaaaggcaa

SEQ ID NO: 22751 - DNA, 260 bp, Unknown; identical to SEQ ID NO: 14780
  Description of Unknown: LeftRegion for integrase B9752 sequence

SEQ ID NO: 22752 - DNA, 260 bp, Unknown
  Description of Unknown: LeftRegion for integrase B9753 sequence
catttgggtgcaacgccgggtgcccttacaggagcccagcaaagcgctgcgggatgcagcagctgtaaacctcccgttttcgaccgtgcggcgggtgcgggcagctgcgatttagccagtgctggcctccagtctcggtagcgctgtcctagttgcccaatatgttgttaatgcaggatggcgctacataatgggcaacaatgaaaagcccagtcacggcctacagctacgagcgcgtcagccagcctcagcaagccaag

SEQ ID NO: 22753 - DNA, 260 bp, Unknown
  Description of Unknown: LeftRegion for integrase B9754 sequence
tataattgctaattcaatatataataaacctgaatttcaaaaactattacagggagctttaaatcctagtaatatataatataaaggaatgtgcattaattgcatgttcttttatattatatatatgatataatcaacatagaatgatttaaattaataaggaacggtcagataaaaagtccaaaggggatgtgcatacaatggagaagaaattagaaagaattaaaatagcttgctatataagagtaagtacagataag

SEQ ID NO: 22754 - DNA, 260 bp, Unknown
  Description of Unknown: LeftRegion for integrase B9755 sequence
ggcaatgaccaaagaacaactgcaagcggaaatggcatatcacgcatcgttggagccgttcgcttgtctcctaaaagatggcgtgatcagtgaagaggattacgccataattaagacaattttgaccaagaaataccgccccatatttgtcggatatatatctccaaaacaactggataataatccgattcagaggtaatatgtacgctacgaaaggggtgagaaccatgaaaaatgtatttgatatcacaccacagcaa

SEQ ID NO: 22755 - DNA, 260 bp, Unknown
  Description of Unknown: LeftRegion for integrase B9756 sequence
tgttcggcatttcggtctatgatatttctgatctgccgccggagccggagatcgtgaaccggagcaatcggcttatgaaggcgttggaagatccgatgtttgatatcgtcatccgcgcgtgggatcagctctccggtgcgaataagggcgagttgatcgagttcatccagtccaaactcaataagcgcgagggctgacgcatgccgacaaaaaaacgccctgccgccgctgccggtcaccggtactgcatctacgcgcgg

SEQ ID NO: 22756 - DNA, 260 bp, Unknown
  Description of Unknown: LeftRegion for integrase B9757 sequence
tacggaaaaagccgcttgatggtgaaaacatcaatattcctgaattttgtcagactcttttattcttctttgaaaactgtgatgcacctggtcaactgcgcataatccaattagccatgaatgaatatgaccgaacacaaaaagaaaaaacaaatccaacgaaagactctgctatcggctaagatcatcgacctatctgaatggagaaagacgctatgaaaatcacgaaatttcccattgacctctccatgctgaccgaa

SEQ ID NO: 22757 - DNA, 260 bp, Unknown
  Description of Unknown: LeftRegion for integrase B9758 sequence
cacagtgccgttgctattcgatctgttgattcatggctacatcggttcagaaccatcaaaagaagggttttggtttgactttgggatattggttgctgagtggatcgtagtccgatatgggctttcttggatatggaagaagatttctggcgggaaataaaaggtcctttatgtatggatgccttagaaagggaaacgatatggatgaatttgctgcccgcccggtagccgatattctggcccggtactcaacagacaat

SEQ ID NO: 22758 - DNA, 260 bp, Unknown
  Description of Unknown: LeftRegion for integrase B9759 sequence
gatgggcgttacgctttataatcagctcgacggcattgataaaggaaaggccgaagcctttatgcaagggcttctcgcgcaagacaagtacactgttcagcctgatgtcgggaaaaaacacgcgtaattcgtgcgcgtgacggaaccacggttagggccgtatacgacagaaacattattcgtcttgtgagggaaggaacatggtaaaaattaaatacaacggaacggcttggcaacagtcgtacggccccggtgaattg

SEQ ID NO: 22759 - DNA, 260 bp, Unknown
  Description of Unknown: LeftRegion for integrase B9760 sequence
aggagttcagcgagcagtgccctgagtgcaaggaggctggcgtcccgaagagcgagtcgacctacgacacaccccagggcttcggcgcccaccgcaaggcggcacacggcgtcaccggctcagccggcaagtaacccactgctgagagcccggtcccccttgaggcggaccgggctctcggcatttccgcaggtcagacgatgtgcagttttatgagccccacgttcgtcgggcgtagtaaagtgcaccccaccacgctc

SEQ ID NO: 22760 - DNA, 260 bp, Unknown
  Description of Unknown: LeftRegion for integrase B9761 sequence
ggacgacaaccgagaggacgcgaacgccatgatcgccatccccctgacccgtggccgagtggcccaccgaggcagatatcgcgccagcgacagacgctccgacgaccgcatcctcacgcccggcgagggccttctgctctgcctcgtcgtcatgatcgccctgtactttgccgtttgggctggctggaaggcggtgttcggtggctaacctggcgacgttactcccggagatcaagtcgctgggcgacactccgctggag

SEQ ID NO: 22761 - DNA, 260 bp, Unknown; identical to SEQ ID NO: 14693
  Description of Unknown: LeftRegion for integrase B9762 sequence

SEQ ID NO: 22762 - DNA, 260 bp, Unknown
  Description of Unknown: LeftRegion for integrase B9763 sequence
ctttgctgagactacgcttgttattaacgtagctttctaccacatgattgctggtatcgacaccaaaatccagttcacgactatcgattttgataccggtgaaattatcacctccaatagccactaacatttatcaaacgaacacaatgagccccctccatcggccgtagcctggaggggataaaagaaaggagcgccatatggaccggatacccggtgcgtttatcaacgccagatactccacagacaatcagaatcct

SEQ ID NO: 22763 - DNA, 260 bp, Unknown
  Description of Unknown: LeftRegion for integrase B9764 sequence
gctggccacatacgaaacccccgtgcaatgcctcgaaaatagagcgatcgcggctaaacaatccaccaacaccgatcggcattttatctgcttgccttccagtcaaaccataaaatatatacccaagctaaaataaccactggatcggttcgccgttatatgaataatagaaaccacccaacacaccaaaggtgtaacccatgaccaccgccgccatatatgcccgcttttcatcttccaatcagcgtgatgcgtcaata

SEQ ID NO: 22764 - DNA, 260 bp, Unknown
  Description of Unknown: LeftRegion for integrase B9765 sequence
cccgttctttctaccgcgcagtcgagcgagcgcccaaacaatggaaaagccggctaaaaatcgcaagcgcgatctagtcttcgagcgtcccgcgaacgacacgagcgccgaaacaatccagctaagcgcaaatacgcgcgaacgcgtcgcgcaagtgctagcggaaatcgtcgccgaaagtatgctgcggcgagcaagtaatgacgaagccaagtagcacttttcccgcgggaacgcgcgtcgtgttgtatctgcgtcga

SEQ ID NO: 22765 - DNA, 260 bp, Unknown
  Description of Unknown: LeftRegion for integrase B9766 sequence
gctaccgaacaccgggctgagcccggcgagccacacgggtagcttatgcggcacccccggcaacccctcaaaagcggccctccggagcccaagccggcgccgcccgcgcctgtggttaacgtcgccagggccattgcccggatgatggcccgcgaggatcatgaccgcgaggccgatagttttacccaaaccgacccaaaatgacccgcgccgcgatctacgcccgcttctcctccgagctccaaagcgatcgctcgatc

SEQ ID NO: 22766 - DNA, 260 bp, Unknown; identical to SEQ ID NO: 14916
  Description of Unknown: LeftRegion for integrase B9767 sequence

SEQ ID NO: 22767 - DNA, 260 bp, Unknown
  Description of Unknown: LeftRegion for integrase B9768 sequence
cgcgttggcaactggaacccatacggtcgaattggtgaagatggacggcgacaatcccaccatttacaagaaagcagaatacaaagtggcataaaaagtgcgccgcccacttgtcttggcggacgcgggcggcgcttgccttgaacgaaaccgaaacgcacaccgaacggcggacgttccgaaaggcggtttaattatacatggcaaccaggcgaattcacaccaatagtgaaacatgcgtgcgcgtggcggtatacgcc

SEQ ID NO: 22768 - DNA, 260 bp, Unknown
  Description of Unknown: LeftRegion for integrase B9769 sequence
cgtgcaatgccgctcgcgcccggcctgcggctggtgcgcgaatggcagggcaaggtgcacgtggtcactgtcgatgataccggcgcgatccaatggaacgggcagcgctggaaaagcctcagcgaggtagcccgcgccatcaccggtacgcgctggtcgggtcctgccttctttggcctcaaacagcgaaaggcagcggcatgaagaaggtccgctgcgcgatctacacgcgtaaatcgagcgaggaaggcctcgagcag

SEQ ID NO: 22769 - DNA, 260 bp, Unknown; identical to SEQ ID NO: 15063
  Description of Unknown: LeftRegion for integrase B9770 sequence

SEQ ID NO: 22770 - DNA, 260 bp, Unknown; identical to SEQ ID NO: 14679
  Description of Unknown: LeftRegion for integrase B9771 sequence

SEQ ID NO: 22771 - DNA, 260 bp, Unknown; identical to SEQ ID NO: 14965
  Description of Unknown: LeftRegion for integrase B9772 sequence

SEQ ID NO: 22772 - DNA, 260 bp, Unknown
  Description of Unknown: LeftRegion for integrase B9773 sequence
ggcggcgggcgcagtagcgctaatcgcacttttgcttacgagggtaaagcggacttagcatgattaatatagcacatctttacttaaaagtcaaccaaagtgtggacccggagggggtcgaaccctcataagcgaatgctaagtccgctttgttcccatcaaccgggcccacgccttgattgtatataaaaaacggcaatatgacaatccctccctttccccctggcgaccgggtcgccggctacttccgtgactccggc

SEQ ID NO: 22773 - DNA, 260 bp, Unknown
  Description of Unknown: LeftRegion for integrase B9774 sequence
gtcaattacctatgccctctccctacctcacccaactccaaactgaccacacagatctcacccgcattcttcaatatcaccaaaacaacacccatccacgggatactccttcagggcgcatcctgcgtggcatttacctgatgatcctggaagatgcgctgaaagtggtcaactcattacttcaaattcccgatctctaaatgtacctccctcccccatccactcttccccctggctcgatcgtggattcatatcgccgc

SEQ ID NO: 22774 - DNA, 260 bp, Unknown
  Description of Unknown: LeftRegion for integrase B9775 sequence
gcctactggctggctgcaattggcttttttgccggtctccttcttctggtgtttggattgtggtattgcagcgtaattctgattcctgccggcgccctggctgccataacgcaaactctaaaaatccgaagcctacaagaacaaatcggcggatatgatgcagccatccgaaatgcccgcgtatacctgcgtacgatactatgaacgctcatccttttcccgccggcagcctggtggcggcctatttccgtgactcaggc

SEQ ID NO: 22775 - DNA, 260 bp, Unknown
  Description of Unknown: LeftRegion for integrase B9776 sequence
gatacccctcctgaaacagatactcttatggttgtcattgttgatgacgaagaaggatttgttaagaaaatcagcattgatgaagatactgtgacccttcgctcttttaacccacactatcctccccgtgtttttggcggtgttgaaattggacgattgcgctttgtcggtagagtcatggagttaaaaaggagatttgcatgaaaaaatttccaatcgacctctcctgtctgacagaggaagaaatctctcaatttcag

SEQ ID NO: 22776 - DNA, 260 bp, Unknown
  Description of Unknown: LeftRegion for integrase B9777 sequence
attatagatgaacacctgtttagaaaagtacagattataagaaatgaaattgccgtcaagcaacatcgttataaaagccccgggccaattaaggaacttaggcttattacaaattaccggtcggagaaagtagaaaagaagtatgatgatccataccgacaagccgcatatgcatatagtaaaattaaggaggtgtaacagtgactgctaacgttactattattccaccaagaaaaatattaggaaacacggcagataaa

SEQ ID NO: 22777 - DNA, 260 bp, Unknown
  Description of Unknown: LeftRegion for integrase B9778 sequence
cgctatcaggtgatggccggtttgcccatggagatcgaggtgtacctcggtggccgctacgtggccacgatccgtggccacgtggattcgatccgggggtcgggcgggtcgatggccacggcgctgcgtgtcgtggccacggacatgaccatggccatggtcactgagccggcggtggccgtggccacggagggggagtcatgccaaggctgagttcgagggtgtccgggcggacgctgaccgctgcggacgtgcagcgg

SEQ ID NO: 22778 - DNA, 260 bp, Unknown
  Description of Unknown: LeftRegion for integrase B9779 sequence
gacgacgtctccgttgacgcaccgactcccacacactccaagctgcgaccgcagttgagacgaacgctccgtatgcagcgagtggatcaatttcagtcatcgatgtctccgcgcgtgcccgagaccacctgtcatcttgcccttgctgagcttccgtccggcacggtagtcatgactgtaacggtcgaaaggaggccggcatgcccgtacggtgcgtcgtctactcgcgcgtgtccacagatgcgcaggagcgggatgga

SEQ ID NO: 22779 - DNA, 260 bp, Unknown
  Description of Unknown: LeftRegion for integrase B9780 sequence
gtaaaaccatcatttcagaagggtcactttacgaagataagctattacgatacttctctttgtgtgacgcagaaggtaaacttcgagtcatccaatgtgccatgaacgagttcgatagaacccaaaaagaaaaaacagaagttgaagaaccgattgctgtcggctaaggttatcaaccttatcgaatggagaaaaatactatgaaactacctatcgacctctcctgtctgacagaggaagaaatctctcaatttcaagaa

SEQ ID NO: 22780 - DNA, 260 bp, Unknown
  Description of Unknown: LeftRegion for integrase B9781 sequence
tcaagctgtgaccgatatcaaaacgaagcaccgtagttgtttaggatggtgctggtggcttttgctggccatttgtacccttggcctaatcctgatcatcccgatcttgaccaacagtaaaaccaagtcgaaaactcacacggaggcgctatgccaggattgcggccatcgctggaaggtataacctaaagacatccaagatgaccaccccccctttcccccccggcgaccaggtggccggctacttccgagattccggc

SEQ ID NO: 22781 - DNA, 260 bp, Unknown
  Description of Unknown: LeftRegion for integrase B9782 sequence
ggctgatcgacgtcgcgctggaggaggccgagcgcgagaagcccctgtgggacgcgctcgacgccgccgtagacgcccacggcgccgaggccgtacgccacgcgctcctgaggctcgccgccgacggggccccctccgcccgccgcgccgcctagcccgtagggctgccctacattccggctccacccctcccgctgcccatgcccccgccgctccccgtcgctcaactgttgagggtgtccaccgaagggcaggccgac

SEQ ID NO: 22782 - DNA, 260 bp, Unknown
  Description of Unknown: LeftRegion for integrase B9783 sequence
aacaaacgaattgtatatgctgcatcctatgcgttgctgaaaagatttgtccgcaagggctttataacaacgcagacctttgaaaaattgaatatggctatggccgattgtcaagtatgcgatgtgatcatttcgcatcattgtgaaaaagacgagaaaaagtagaatgaaattaatgaagcgaaagagaggtaaaagaaatgttagctgagaaaaaagttcagatcctaaaaggcaggagaagttcggctaatgatgta

SEQ ID NO: 22783 - DNA, 260 bp, Unknown
  Description of Unknown: LeftRegion for integrase B9784 sequence
ttgatttcaattgatttcgattgcatacaactgtccgcaggctgccgacagcggcgaacaaccggcggcagatggtatacaaatagtaaaaaaatcccccgttcggctcctaccccgaacgagggaaacgcaataccacgaatcagtgtccctatgaaacacacgtactctcaaacaccaattaaccgggggattgctccttgattatagcacttccccggcaaagaatcaaggggaatgccatggcgaggaaacagaag

SEQ ID NO: 22784 - DNA, 260 bp, Unknown
  Description of Unknown: LeftRegion for integrase B9785 sequence
cttcgatcaagggcttatgacggtcttgcctgatcttacaattcaggtctcggactacgtgaaggacggctacgacgaccaaaatacgagagactggctactcggcgtagagggtacaaaaatcatcaggccgaagaggttcgcaccaaatcgcgacatgctggcctaccacaatgagtttgtattcctgaggtgatttcatgcagcgagcagtgatatacgccagatacagccctgggccaaatcagacagagcagtca

SEQ ID NO: 22785 - DNA, 260 bp, Unknown; identical to SEQ ID NO: 15062
  Description of Unknown: LeftRegion for integrase B9786 sequence

SEQ ID NO: 22786 - DNA, 260 bp, Unknown
  Description of Unknown: LeftRegion for integrase B9787 sequence
gagaaaattattaattgtaacataaaatgcaaaatgccttctgccagcattccgaataagtattattacacaacactggaaaaatgcacatgccaaagctatatatacaacaacaaagaaggtctgccctgcaagcacatgatagctcttgccatagcaacaaaagtaatacaaccagctaacaccgaaaggaacacgtcatgccctactgcctctacgtaagaaagtcccgagccgatgctgaagcagaagcacgcggg

SEQ ID NO: 22787 - DNA, 260 bp, Unknown
  Description of Unknown: LeftRegion for integrase B9788 sequence
gttccgtgaaagcggttgcacaacaaaccctgaaggtatcagaaagtttttatctattcacgggcaccttccattcgaggcagaagatttctttaccgatgtcggggaggaaaacgggattgttccaatcccactcgaaagcgaggattgtgacccgatcatcttagcagtgtacaggctaatgcgtgtcctgaattatcatggccaataaagtagcaatttatgtccgcgtatcaacgcaatatcaagtagaccgagag

SEQ ID NO: 22788 - DNA, 260 bp, Unknown; identical to SEQ ID NO: 22720
  Description of Unknown: LeftRegion for integrase B9789 sequence

SEQ ID NO: 22789 - DNA, 260 bp, Unknown
  Description of Unknown: LeftRegion for integrase B9790 sequence
caggaggcggcgggagaggatatgcggtccatgaatgcggagctggtctggctgctcaacgaagcgctggagcgccgcgcagccaggcggcaacgtgccgagcagcagggcaccaacgacgaccagcccaggtaacatgctgccccgacgcctgggtgaacaggctcggggcgcggtgagacctgttgaggagatcccacatgaccagtgtacccgagcgaccctcgatcggcgggccgcctgtctacgacatctacaag

SEQ ID NO: 22790 - DNA, 260 bp, Unknown
  Description of Unknown: LeftRegion for integrase B9791 sequence
agaagaaaatgaagactttattattataatgtctgatgaaccggaacatattaaagaaaaaaattactatgatttaaaaaaatatatcattaaaattttaaataatattgataaatacaaggataataaagtaccagtgtagaaataatctatactggttatttttttatttatctaatttggacaaagggagtatgattatgaatttatgtattgtttatgtcagagtaagtacaattgagcaaaagaaaggttatagt

SEQ ID NO: 22791 - DNA, 260 bp, Unknown
  Description of Unknown: LeftRegion for integrase B9792 sequence
gttcgcggtttcctgcaacttctgaaagaacagaagaaagccttggtggagttcgatccgctcgtctggcaagcggccgttcattatatgattatatatgaagactgcacggtgaagttcgtattcagagacgggacggaactgccgtgggtaatcaaccccggagtcaagacctacaaaaagaaaaaggcggtggaattatgccggatgtccgaataataccgtcaaggcagaagaaaacggcaaaaaagcgaatggca

SEQ ID NO: 22792 - DNA, 260 bp, Unknown
  Description of Unknown: LeftRegion for integrase B9793 sequence
ctggtgcccgctcaccagcaaatggtgccatgccgatacgctactgatgacagccaacaaatgaacacccccgcgcggatcagccgagagccggtgcccgagctcctcgcgctggtccgcgccatcgcccgcgcccaggccgagaccgacatggcccagtggcttgccaaacaggatgcatcgggccgaaaagcaacggcgtgacacgcgccgcaatctacgcccgctattccagcgatcggcaatctgagttctcggcc

SEQ ID NO: 22793 - DNA, 260 bp, Unknown
  Description of Unknown: LeftRegion for integrase B9794 sequence
ttggcattgttgtagtaaagtaattatttttgctatgtattcttcattcatatgtagcccctttcccaaacatggaacaaacgttctgaaactattatactatctgacaattcagatatatagtggaaattgttgttaattttgttatacacctaatgttgaaaaatgtgtgtcgaattttgttaggaaggatgttaagaatgtataaacaatttgaaatcaactttacacccgaggaagttatcgactatttaaggaaa

SEQ ID NO: 22794 - DNA, 260 bp, Unknown
  Description of Unknown: LeftRegion for integrase B9795 sequence
caagcagatggttgatgttttgtcaggctctcctctgacaatatccattgcttggaggccaaaaagtcatcagaaagaacttgctattattcggattcagaggtatatatgggtcggaaccctttgcaccttgaaaaccgaatatagcgcgttacaaactgtgcagacatgcctccaccacgaataaaggaggaactccaatgaagcgagttttgtgtctgtacagagtatctacaaaaggtcaggttgatccgaaggat

SEQ ID NO: 22795 - DNA, 260 bp, Unknown
  Description of Unknown: LeftRegion for integrase B9796 sequence
ctcggcggaatcaatgccgacagcgttacaaagaaaaccaactttcttgttttggggaacaacgacctgtgttcctcaatcaaagacggcaagagttccaaacataaaaaagccgaaaagtacattttgggcggtgcagacttgtctattatcccggaaaatgttttttatgatatgttagacgaataaagggtgattgtatgcgggcttttatttactgccgattttccagccataagcagcaagagcttagcatagaa

SEQ ID NO: 22796 - DNA, 260 bp, Unknown
  Description of Unknown: LeftRegion for integrase B9797 sequence
gggcaaatgaacggacgggtcactgcaacggaagaagtgtttcattgggaaagtctcgacggttcgcaacagttcaagatcagcgcgcacaacgaggtccttgtcatcaccgcagaggataaggccctcggcacatcgagctgcgtcactctagccaccacgtccgcgcgtgcgctcaaagcttggttcaacgtgcgaccatgatcgccgccatctacgcccgctattcatcggaccttcagtccgagcgctcgatcgat

SEQ ID NO: 22797 - DNA, 260 bp, Unknown
  Description of Unknown: LeftRegion for integrase B9798 sequence
gccgccgctgccgagcggtatgccggcctgaacgatccaacgccggcccacaggctggcactgctgcggcagaagctggagctggagccggagaacgaagaaaccctgtgggaactttttgagtcggcagtaacccatgtgtgcatcggcaaaggcggagagatcagcctatcccaaaaagatcaaaaggagtgtgcctcatgaacatacagaaaaccgcccccacccccaaactggtcactatgattccggctgaccct

SEQ ID NO: 22798 - DNA, 260 bp, Unknown
  Description of Unknown: LeftRegion for integrase B9799 sequence
aaaaaaagaattatcgatactatcctggacatgttggaacgacataacgttgagaaagccgccgcgggggagtaggtacctcaaaagaagtggtttctctttttacctcgaacgctgcggcatatttaccgctacctgctggcaaataaaagaaaatagggtacagaagattttcccatgtttttattttggaggttattatgaggttaaagaaaattaaagtggctatttatatccgcgtaagcactcatcaccaggtg

SEQ ID NO: 22799 - DNA, 260 bp, Unknown
  Description of Unknown: LeftRegion for integrase B9800 sequence
agacctcacccaactccccgcggacggactgatcctgctcgtcgcccgcctctgcacccgcctcgacgacacgctctgcctcgtcagggagatctccccgccccggccgcccgccgcgcacccatagctcgggtaccggtaatcacgattgtggggcgacaaacctggttagggacaccagaagcggctagcattcccgcatgccgtatgcgcccgaatacctgcacctcgtcatccccggcccccgcttcgaagcctgg

SEQ ID NO: 22800 - DNA, 260 bp, Unknown; identical to SEQ ID NO: 13129
  Description of Unknown: LeftRegion for integrase B9801 sequence

SEQ ID NO: 22801 - DNA, 260 bp, Unknown
  Description of Unknown: LeftRegion for integrase B9802 sequence
gacacacctcctgaaacagatactcttatggttgtcattgttgatgacgaagaaggatttgttaagaaaatcagtattgatgaagatactgtgacccttcgctcttttaatccacactatcctccccgtgtttttggtggtgttgaaattggacgattgcgctttgtcggtagagtcatggagttaaaaaggagatttgcatgaaaaaatttccaatcgacctttcctgtctgacagaggaagaaatctctcaatttcag

SEQ ID NO: 22802 - DNA, 260 bp, Unknown
  Description of Unknown: LeftRegion for integrase B9803 sequence
gccaacgttgggagcgactcgcggtggccctggtctacctggcctgggccgccgtgtggggcgggctgatctggtacggggaaacccgggaggccggttgggcctgggggttcggtgccgtcatcatgattgcgcccctggtgctgctgtccctgctgaccggtaggatctcggacggcctcgacgaggggccctagagcatgcccgctgactgccccctgcccgccggctcgaccgtggccggctacggccgcgactcg

SEQ ID NO: 22803 - DNA, 260 bp, Unknown
  Description of Unknown: LeftRegion for integrase B9804 sequence
tacagttttaaaataactattatttattatgtccaaaattatataaaaatcagcacatagctttagcagagattgtataaaaaaagagcaatagagagaaatctttattgctctttttatttgtaaaaaaaattaagatgggtataatttaattaatatatattaagttacgcccatttaaagaaagtgggagtataaagatggaaacaaaattaataaaagtagcctgctattgcagagtatcaactaaaagtgaggaa

SEQ ID NO: 22804 - DNA, 260 bp, Unknown
  Description of Unknown: LeftRegion for integrase B9805 sequence
ctgacggccgacggcgcccgagcttctgaggccgcgccgtgaaaccccgcgcagccgcgcccgagatcctggaccccgcgatcgtgcgggtgatcgaagctcttgcgcggcgccaggctcggttggactatgaggccgcccagaacaggagcgtcacgcccatgtcatccgcctcgccggcccgcgcgcgcgcctgacgcatgcgcgtcgccctctatgcccgctatagctccgagcggcagaacgagcgctcgatcgag

SEQ ID NO: 22805 - DNA, 260 bp, Unknown
  Description of Unknown: LeftRegion for integrase B9806 sequence
actgactaactaacggtttgcccatttggtatcacctctagggcgtacattccggaaatctcacgaaagtgtcggaaaatcccgacaaaaaaccaaaaaaaccggaatatacaattaggcggaattaacagctgaatgggtctatatagcttgacttgtccgaggggttgttataggggtgttgtaaagaaaggaaaacgatgatcgcaccagtccaagataagaaaagaaaacgattcattatttacactcgatgctcc

SEQ ID NO: 22806 - DNA, 260 bp, Unknown
  Description of Unknown: LeftRegion for integrase B9807 sequence
ggcatcagcgacatgacgctctggcgctggatgcacgatgagcgggtcggctttccgcggcccacggtgataaaccggcggcgctactttcgcgagtccgacattgcggaatttcaatcccgcgcaacggaatccccggtgggttcagaggccagatcgctgccgcctcaatcccgcgaactggccactaaacgcccctgatgcgcgtcgccctctacgcccgctacagcaacgaccgccagaacgagcgctcgatcgag

SEQ ID NO: 22807 - DNA, 260 bp, Unknown
  Description of Unknown: LeftRegion for integrase B9808 sequence
tgttaaaggcaagattgccagttttaccggaagtgatggcggagttgcttataagactaccctcaagaagtgctcatgcccggattttgcgaagcgaggtgtgccttgcaagcatatgttttatctggcggatcgttgcgatctgattgaccgataagcgcgatgatctttaaggtcatagttttcgagaggtttataccatgccaaagaaaaatgaaatacccacagagcagagcgagggcggcattaaggccgtaatc

SEQ ID NO: 22808 - DNA, 260 bp, Unknown
  Description of Unknown: LeftRegion for integrase B9809 sequence
aaacgacaggggagactatatgactagattgaaggatcggttagaagcggattaccttctagaattcatgggcgaggaaactcaccctgctaatctactgaacaaagaaaatcctatgtatagaaatatgggattaaagtaattttgttttacctaaccaccattgaccaactcacaaagttggttttttgttatgtcgtatgaaattaatcacatatcttagggtctcgactgatagtcaagattcagggcttgaaatg

SEQ ID NO: 22809 - DNA, 260 bp, Unknown
  Description of Unknown: LeftRegion for integrase B9810 sequence
tcattgacccccaccatttttgaatcccccacgccctccccaaccccggagtgtaactgctcaatcgattacaactgccctgattttgcgcgcccggccgatgctcaattttgcttcactcaatgcggtggatccacgtcatccaactgggccgggcttgatgccgatggcgacgggtatgcctgtgaatacaaaccctaatgtctgaagcacccttccccctcaactcccgcgtggtggcttacctgcgcgattctggt

SEQ ID NO: 22810 - DNA, 260 bp, Unknown
  Description of Unknown: LeftRegion for integrase B9811 sequence
ccgttaactctattcacaatggttcccacgggggcggcgggcgcggtctgttcgtgcgccggtgattcactcaattgtaatgatttttccagccatgctgcagcgcaggcgtgtttcgattattgcgtatcacagggcgcgggggatatccacaaactggaccagaacaacgacggcaacgcctgcgagagtttatagccatgcgcctcgaaccgcctccctccaccctgccgcccggctccaccgtttgggcttatctg

SEQ ID NO: 22811 - DNA, 227 bp, Unknown
  Description of Unknown: LeftRegion for integrase B9812 sequence
tttgatatgtcgggggcttgagcttctggattctgcatacccgtcccagccctgtcaatgcatttgcatgcataattagggcccctgcgaggcaccctctatgtacattgttgcaatcggctggctaactgcaatgaaaagtacacattccatagccatggcataaaatgaccaccatggccaatgtatatagctacctccggttctcttccctcaagcaggctgct

SEQ ID NO: 22812 - DNA, 260 bp, Unknown
  Description of Unknown: LeftRegion for integrase B9813 sequence
cgcggcccggcgatccgagccaaggccagccgctggcgtgccccgccgcagggccactcttgacgatccggccagggccgcgtccctaagatcatccggagcgtaggcgcaggtcaggggctgggcaagggctcattccaaatgcagtagttcacggacgtgcgtggacacgaacactcgccaactgctacatttggcccatgacaccactgaagcgccggcagacccgccgtgaccaggacaaacgagcccaggccgcc

SEQ ID NO: 22813 - DNA, 260 bp, Unknown
  Description of Unknown: LeftRegion for integrase B9814 sequence
gcacgatgccggctggcttttcgacctgaccgataccgaggttcggcgcgggctgccctgcccggtctgcaatgaaatcccgggggagcgtaaagcataatggctgaaatcgaccctcgcctactggacttcgtgagggcattggcaaaagctgatgcccgccgcgagcgcgcgcgtggattgattgattgtgaggaagcatgcaaatcagacgagccggcatctatgcccgcttctcgaccgaccttcaaaacgatagg

SEQ ID NO: 22814 - DNA, 260 bp, Unknown
  Description of Unknown: LeftRegion for integrase B9815 sequence
cagcgattcagcagatcacggcgcaggaacaaggcgaggcgaaggcgctgacatccacattcgagggctgctggtttctgcagaatcacacattgctgtgggggtggcacgacggtttggtgtggggcggaatcgcattggcgctgatcgtccttggcatgcttgcattggcctacatataaaaaactgggatcctaaaaatgaaacgagcagcgacctactcacgattctcaactgacaagcagacggaggcctcgatc

SEQ ID NO: 22815 - DNA, 260 bp, Unknown
  Description of Unknown: LeftRegion for integrase B9816 sequence
ccactacgtgaggatcacgtggcgaggggccgaaggggcccggacgtggacggtggttcccagcccgtatgagaagcatccaggcgacggttacaagatcctggagaccggggagatccggcagaagctctagatcccctgggtttctctgatgtgcggaaagtatggagcatcggcatgctctgtgatttactcactggatggtcaccaagaaaaccgggaagacagccgtcgtttattgccgcgtaagcggcaagggt

SEQ ID NO: 22816 - DNA, 260 bp, Unknown
  Description of Unknown: LeftRegion for integrase B9817 sequence
ttacctctaaatactctttccatattcacctccatttaaagcaccgggacaggcgccgtttactattgtaatataacaatcggcattgtcacctgcgtgcggaatatcacggaattttaaatctagattaaatagtctaatcatttgcaatatcggctattttcttgtaaagtggtctcaaaggaggaggaaagtaaccaatgttcaaagaatatccagtattttacaactacaaaacaaaagagtatggaagaaaatct

SEQ ID NO: 22817 - DNA, 260 bp, Unknown
  Description of Unknown: LeftRegion for integrase B9818 sequence
ggaggtgcggcgtaaaaatgagaaaagcgccctcatcggacgctcttgcacaataccaatatatcacgggtaaacggtagcgacttctaccggcgcgctaatctatttctattattcgtccagttttcaaaaagtatttgtgtgcgcactttggttttggttataatcaacttacaaactaaaggcgaggtgagatgcacatgctcaaaactgactacttaatcagtcttggaatcgaacacatcatcaactatctgcgg

SEQ ID NO: 22818 - DNA, 260 bp, Unknown
  Description of Unknown: LeftRegion for integrase B9819 sequence
caacagttcacatgaaaataaaaaattaacccctgctcaaataagattaaaactagcgaatgacaaaagaatggtatgtttgaaaggttcagatatgaaacccattggaaaagccattaaaatagatatttcgcagaatgaaatccttttggatattctcaatcgagtttctaaacaccctgaagacgaggagagttccgatgaatgaaaattttaaacaccaaacagctttaatttatgttcgattgtctagtaaaaaa

SEQ ID NO: 22819 - DNA, 260 bp, Unknown
  Description of Unknown: LeftRegion for integrase B9820 sequence
cttgcagttatatactttctccatactcacctctctataagcaccggggcaggtgccgattactattgtaatataacaacgttcattgtcacctgcgtacggtatatcacggaattttaaatctagattaaattatcaaatcatttgcaatatcggatacttttctgtaaagtaagacaaaaggaggaggaaattaaccaatgtataaagaatatccaagattttacaactatgaagtactagactacggaaggaaatca

SEQ ID NO: 22820 - DNA, 260 bp, Unknown; identical to SEQ ID NO: 15376
  Description of Unknown: LeftRegion for integrase B9821 sequence

SEQ ID NO: 22821 - DNA, 260 bp, Unknown
  Description of Unknown: LeftRegion for integrase B9822 sequence
tcatgcacggccagcagcgcctcggtgatttggctttttagatgatcaatctctatcatataaggggcccctttcactgggaacgtgtgttccgttattcatatattagaataacaaaaacagttcacacttgcaatataatagaaaaaatgcgtaattttaagataatttaagcatttacaaaaagggagtagaaaaaaatgtatttaccacccaaaattgactttgcgccagaggaggtcctcgactatctgcgaaag

SEQ ID NO: 22822 - DNA, 260 bp, Unknown
  Description of Unknown: LeftRegion for integrase B9823 sequence
gttccattttgatactcatatactttattcatattcacctctttacaacaccgggacgtttataactattttaatataataaatattattgtcacctacgtacggttttcacgtaattttaaatctagattaaaatatcaaaccatttgcaatttcggctatattcttgtaaagtgggtacaaaggaggagaaatataacatgtataaagaatatcctaagttttacaactacgaaacactggactatgggaggaagtct

SEQ ID NO: 22823 - DNA, 260 bp, Unknown
  Description of Unknown: LeftRegion for integrase B9824 sequence
accttcctttcattaaacgctatgtaaaaatcgcgaaaaagtaagaccctatgtgggccttgcttttatcataactgatctccgattttctccatgaaaaattcataagcttcaagaacgttatctgtgagtgttccaaaacattataaaatatgaaattgtctgacacaacgagaaatatttaccaagaggagataattatgtataaagaatatccggtattttacaattacgaaactttagaatatgatcggaaatca

SEQ ID NO: 22824 - DNA, 260 bp, Unknown
  Description of Unknown: LeftRegion for integrase B9825 sequence
aacatttactctaaaagtcgaagctggaaaaacatatggcatttgttccagctgcgatgggaagtatacggtcaaataaaaatcccccgttcggctcctaccccgaacgagggaacgcaataccacgactatcacgaattcagcgggggattgctatttcattatagcatacccccaggcaaaaaacaaggagggtatgtatgccaaaggcaagagcagcgaagcaggacaccggcttcaccgctgccatctatgcccga

SEQ ID NO: 22825 - DNA, 260 bp, Unknown
  Description of Unknown: LeftRegion for integrase B9826 sequence
cgggatcattcagcaaaccacgggtggacccccagaccttcgcacgtttcgcaccacgccgcccaaggctaagcgcgtagcgaaggcatgagcctggagcaagtgctcgcgtgggttgtgattccgatgcttaccggctcggcttgcgcagcgatcggattctacttcggaaaaaagataacaaaactcaaggatggcaaatgaaacgagcagcgacctacgcacgattctcaaccgacaaacagacggaggcctcgatc

SEQ ID NO: 22826 - DNA, 260 bp, Unknown
  Description of Unknown: LeftRegion for integrase B9827 sequence
ttatttgatgaaccttttcaaagtgatgtgtcaaatattctttatcaaatgcacaaagatggtaaattggaaaaaacaaagcatggcaaaagttacattttacattataaagaataaataattgtactgcacaaataaaggtggtgatgcaaaaaaatatgccccagcaacaagaaaaaacataaaaggaaggtgaaaatatgtataggtatgaaaaaattgaattcagaccagaagaaattcttgactatttgagaaag

SEQ ID NO: 22827 - DNA, 260 bp, Unknown
  Description of Unknown: LeftRegion for integrase B9828 sequence
ggccgtaaagcatcaggtcgaacctcatggcgatctcgcgcgattcgcactcgtggcacgggcccatgcgaccaccaccgtaagtaagaagccggttacttaacgtgataccacagggagggacagggcctctggcctggggaaataggcgggtgcactttgccgttggcgactaatgccgtgggtggtaatctgcacccatgaccccacacgaagatgacgccgtaattcggcgcccgcgccgcacactgagacccaag

SEQ ID NO: 22828 - DNA, 260 bp, Unknown
  Description of Unknown: LeftRegion for integrase B9829 sequence
gcttgtatcctgatatccaaccccataccggcctccttgttcttgcctatatatacagagcgcctcgatatggccgaaatgtttcactgctaaaaaaaataaaaataattcgcttgatatatcgcggggttcgctgtagggttgcccccctgtttgaaacaaatggggtgtagacaggcgctataagagaggaggaactcatgggaaaaaagagcgaggttgtccagaagattagaagggcctgtggcctgtatctccgc

SEQ ID NO: 22829 - DNA, 260 bp, Unknown
  Description of Unknown: LeftRegion for integrase B9830 sequence
tcgacgcctcgccggatggcaaagtcaaagccgaatggctaggcagattaaacgggctggatttcaccatctacgattacaaatcgcccatatcgccggaagagtgccaagaatggcacatcggcggcagaaacgcgatgatagcgcctttggttatcgcgtatttcaaaaccgtgctgggcacaaaataaaacactcttatgaaagccgcactttacgcgcgtgtatcgtcgcaaggccaagcggacaaggatttatcc

SEQ ID NO: 22830 - DNA, 260 bp, Unknown
  Description of Unknown: LeftRegion for integrase B9831 sequence
gccgaaaattgttcgacgcagccgctctcaatagagaaattcaagttcttctgaatcaagaatgaaggaagccctagcaagccccaaaccttgctagggctttttttgtgcccaaatcttagcctagagaaagctagacttgcacgcccttaactgaaagtctaggctagaataaagcccctacccttggagaaacaatcatgagttttgcctattcctacatccgatttagcacgaaaaagcaaggaaaagaaggaaga

SEQ ID NO: 22831 - DNA, 260 bp, Unknown
  Description of Unknown: LeftRegion for integrase B9832 sequence
gcaatggcaaatgctcctatgagcgaaaagcagatgggatgtatttgacagatgaggtttggacgttttaaaaaagtgctcccgcatccgtgcggccacactgatgcgggatatacagtacgtctggtaagcaacttttacccatagcgtctgcactaccattatagcagacgccgcacaaaaatgcaaggagtctgcctatggcaaaaaagaaggaaaaaccgcaaccggttcaaacggctgccatctatgccaggtat

SEQ ID NO: 22832 - DNA, 260 bp, Unknown
  Description of Unknown: LeftRegion for integrase B9833 sequence
ccctctggttgtcctgctcctggtctgtatcggccttatcctctattttcgcctcagatcccgcctgccacattcgcccgccgaataatgcactcccgcctcttggcgggtttttgttttgtcaaaatttttgttgcattttctctttttcgtggtatccttcaggtatactccagtcaaaaaaagaaagggggttccccatgccctcgcctgccgcctcccctgtggtggctggtgtttatgcccgcaaaagtaaatat

SEQ ID NO: 22833 - DNA, 260 bp, Unknown; identical to SEQ ID NO: 14775
  Description of Unknown: LeftRegion for integrase B9834 sequence

SEQ ID NO: 22834 - DNA, 260 bp, Unknown
  Description of Unknown: LeftRegion for integrase B9835 sequence
gcgctttcttccgctgcctgatcggtgggatcttcggctggcattacttctacgttggcaggattggccgcggattcctctgctggatcactgtcggcaatttctgcgtcgttggcaacatcatcgacctttggaagatccaccagggcaaatttaaggataacgtcgggcagtatctccgccagtaagggaggtgtgctatgcctgtaagcataacattcagtgcagatcttaaaaaggcgaagggcgaaccgatcctt

SEQ ID NO: 22835 - DNA, 260 bp, Unknown
  Description of Unknown: LeftRegion for integrase B9836 sequence
aactcaaagagagttatgaggccctatatgatgcgtacaacgcgctgcataacactgtgctgtcgccatctggaagtatcagttccttcggcgccgctgtgtccgatacacttaaagctttcgtcgcagcggacgatgatcttgcgctctgggtagaataagaagatcaaacatatccaaagagggaaggagaatgtgccgtgcctaagaagaacgctgggcagccggtaaaaccgaagcgtgggcaaaagctcgatgca

SEQ ID NO: 22836 - DNA, 260 bp, Unknown
  Description of Unknown: LeftRegion for integrase B9837 sequence
ggagttggagatcgagtacctccggcggcacggctacttgctcgacggggaggaggagcggttcctggcggcggaggacgactaaggtcggttctcattgcacaccctgccggttgccgatataatggcggagccggcggggacttgcgatcccgagccggctcctcaccacaacgcaaacctagcaggaggttcgcatcatggctcacggcattctacccgagaatgcggcggttctctacctccgcatgagttccgca

SEQ ID NO: 22837 - DNA, 62 bp, Unknown
  Description of Unknown: LeftRegion for integrase B9838 sequence
agcttacacccgaagaaatattagactacctaagaaaatcaaggtctgatgatccacttttg

SEQ ID NO: 22838 - DNA, 260 bp, Unknown
  Description of Unknown: LeftRegion for integrase B9839 sequence
ctgtgcatagcggcctttttggtaagctgttcggatacagcacagtaactgtgagcacagccggcaccgctggtaccgagtatatctttaccaaggtagccaatgcggaagaattccaacaaaagtacatcgagattgcaaacagataatctatcattttcgtgaagtcacgaaaatggcaagaaagagaggtgacaccgttgactacgcccaagcatccgccaaaaccgaaacgtggtaagaagattgaagccgaagcc

SEQ ID NO: 22839 - DNA, 260 bp, Unknown; identical to SEQ ID NO: 15702
  Description of Unknown: LeftRegion for integrase B9840 sequence

SEQ ID NO: 22840 - DNA, 260 bp, Unknown; identical to SEQ ID NO: 15508
  Description of Unknown: LeftRegion for integrase B9841 sequence

SEQ ID NO: 22841 - DNA, 260 bp, Unknown
  Description of Unknown: LeftRegion for integrase B9842 sequence
attaccgcaaactgaccggtgcagatatcgttctgtccgattaaaatcccgctttgtaggtactatgcacaaacttccttttacccctggctatttggatttgtttgcgtataatgttcgttaccgagggaaaagaggttacgcctacattttgttacaaacctccctcactcaaaatctactgaaaggagtcagcgaaaatgcctaaagcggtactcatttcgcccatcacaaaacaaggcattcagaagataagagtt

SEQ ID NO: 22842 - DNA, 260 bp, Unknown
  Description of Unknown: LeftRegion for integrase B9843 sequence
agataacagacggaacaggttgctatgacgtttatgacaatccggatggcaaactgatccacagcggcatcactggcaaatcatacaatgtcactgagattggaaagatcacttttgatgatggaaacatcctagaactcgtcaacagcacattcatcttctacccttacaccgggatctttcactgattggagaaaaccatgaaaaagcagcccgaaatcctgaacgcggtcatatacgccagatactcatcccactcc

SEQ ID NO: 22843 - DNA, 260 bp, Unknown
  Description of Unknown: LeftRegion for integrase B9844 sequence
aggtattcctggtctttcgtttagttggaagcgggctgtcggtatttccggcgcgaagtcaaaaatatcacgggcaaccgggatacccacaacaaaatcaggcagaagaagaaaagcgggggcagcaatgggttgcttactaccaattttactcatttttacaatgacaatttcaatgatcttgattttctagcggaataatgccctctgacgcccctttccccctcaattcccgcgtggtggcctacctgcgtgattca

SEQ ID NO: 22844 - DNA, 260 bp, Unknown
  Description of Unknown: LeftRegion for integrase B9845 sequence
aaccggaactgtcccaaaaagaaaaacggcttcttcaaatgttcagacagatggaagaaaccgtttcggaggactgcttgcggtattgcgaatttgcgcttttcaagcaggaagaagaaaagaaaaaagcggcacaggtcggttgataaaaacacagggaaacattttatacgtagactttagaccggaggaaacgcgtaatggctgtaagcataacctataacgcggacttgaaaaaggcaaagggtgaaccgatcctc

SEQ ID NO: 22845 - DNA, 260 bp, Unknown
  Description of Unknown: LeftRegion for integrase B9846 sequence
aatccaaaagggttattttgagagggctatcagtgtaagggctgatagccctattttttttttgtctaaatttcaggagatttctggttattactcaaataataagtaatatgggtttacatagtatcaaaaagatgtataataagtatgagatattatgacaaacctgtacaaaatctaatcaacaggaggaaaacaggatggtacaggagaaattaagagcggtattttatgcaagggtatctacagaggaagagaga

SEQ ID NO: 22846 - DNA, 260 bp, Unknown
  Description of Unknown: LeftRegion for integrase B9847 sequence
atgcccgcaagcggggctgttcgcgatggataacgcctgataggcatccaacaagatgcctatcgcaccgaaacagaaaatcccgcttaccagcgggcctttttcggccgggatcgatatagatagcagagactacgggcacccaagcgacaccatacctatactcggaggcttggcgttcgcggcagaaggggttcggggtgagtcgtccatcggtctatagctatctgagattttcggacccccgccaagcggcgggg

SEQ ID NO: 22847 - DNA, 207 bp, Unknown
  Description of Unknown: LeftRegion for integrase B9848 sequence
gcgttgccggtcaggatacgccttgctccggcaaagaggccttctgtcgccctccacgggctgatgtgaaccatattaattcattctgcgcagttgtgtgccttcatttatccagttaacaactggcgtcacaggtgaggaacacgcatgaaagcaatcgcttacgtccgctggtcgagcaaggaccagaaaaaaggcgactctgaa

SEQ ID NO: 22848 - DNA, 260 bp, Unknown
  Description of Unknown: LeftRegion for integrase B9849 sequence
gagcctgccgagcctgccgagccttccgatgctgaaaaactccgtgccgagaacgcggcccttcgtgcgcagcttgcccagcagcagaaatccctgcgtatgcaccggcttgttacgctcatcctcttgggcattctttcgctgtgtgcccttgtgcttgtggccgacgtgctcatcccatcaatcggctggattcgcacatgaaaattaccgccccggcccgatcagccagagcggtatctttggaggcttttgtggat

SEQ ID NO: 22849 - DNA, 260 bp, Unknown
  Description of Unknown: LeftRegion for integrase B9850 sequence
ggtaaacctagcagcttatgtcggtaactgcattcaacaatatcttgatgaggaatagtgttctattattccccaatactgttctaaatgtcttatttttacctttttgctatatttttctcaagaaaattatatcagaatggtaaaaatatattatctttgcattatcgaaataacaacaacttaaaaactaaacgattatgtcaaaggttatattgctttcacgagtcagtaccgcacaccaggatctgactcaacaa

SEQ ID NO: 22850 - DNA, 260 bp, Unknown; identical to SEQ ID NO: 13521
  Description of Unknown: LeftRegion for integrase B9851 sequence

SEQ ID NO: 22851 - DNA, 260 bp, Unknown
  Description of Unknown: LeftRegion for integrase B9852 sequence
tttgatggctctccaatcccaactcaaaaacgatgtatctgccttgctcgatcagctcattcagaccgacatggagcttgtcttccatcttgaggaaaaaagcggttcgagcgaaacggcgtgatatacgttgactttcaaaggaaatagcattttcttgcgccctccggctcggagagcgccttttttcggaggtctgtatgccttattgtatttatcttcgcaaaagccgcgccgatctcgaagcggagtcccacggc

SEQ ID NO: 22852 - DNA, 260 bp, Unknown
  Description of Unknown: LeftRegion for integrase B9853 sequence
gtctacacctatttgatgcgaaagttcgaggatcagcagtattatgacgaggagatggagccgcacaccataccgcacggtgctcagatggtggccagcgtctctctttccggttctgagctccgcgttgagttcccggatgatgatgtgaccgccttgcttgatgctcacggtgtcaaccgttgcagggggtggaagccgtgaaaaagaaaaaagaggtcgctgccggatccgttccggctgtgatctatgccagatat

SEQ ID NO: 22853 - DNA, 260 bp, Unknown; identical to SEQ ID NO: 13964
  Description of Unknown: LeftRegion for integrase B9854 sequence

SEQ ID NO: 22854 - DNA, 260 bp, Unknown
  Description of Unknown: LeftRegion for integrase B9855 sequence
gtctacacctatttgatgcgaaagttcgaggatcagcagtattatgacgaggagatggagccacacaccataccgcacggtgctcagatggtggccagtgtctctctttccggttctgagctccgcgttgagtttccggatgatgatgtgaccgccttgcttgatgctcacggtgtcaaccgttgcagggggtggaagctgtgaaaaagaaaaaggagaccgctgccggatccgttccggctgtgatctatgccagatat

SEQ ID NO: 22855 - DNA, 260 bp, Unknown
  Description of Unknown: LeftRegion for integrase B9856 sequence
ccgcatgacgagcctgccgagccttccgatgctgaaaaactccgcgccgagaacgcggcccttcgtgcgcagcttgcccagcagcagaaatccctgcgtatgcaccggcttgtgacgctcatcctcttgggcattttttcgctgtgtgcccttgcgcttgtagccgacgtgctcatcccatcaatcggctggattcgcacatgaaaattaccgccccggcccgatcagccagagcggtatctttggaggcttttgtggat

SEQ ID NO: 22856 - DNA, 260 bp, Unknown
  Description of Unknown: LeftRegion for integrase B9857 sequence
gtctacacctatttgatgcgaaagtatgaggatcagcagtattatgacgaggatatggagccgcacaccattccgcatggtgctcagatggtggccagcgtctcgctttccggttctgagctccgcgttgagttcccggatgatgatgtgaccgccttgctcgatgctcacggcgtcaaccgttgcagggggtggaagctgtgaaaaagaaaaaagaggtcgctgccggatctgttccggccgtgatctatgccagatat

SEQ ID NO: 22857 - DNA, 260 bp, Unknown
  Description of Unknown: LeftRegion for integrase B9858 sequence
ttgagcggttctttcagaattcaatgtccagcacggctggacggttgaccgcgatgttcgtcttcatatcagcatcctattcgttgccctttttcgctgcggtgataaagcgcataggtgaagtgcgtgcgttgccagcgcaggccatcagttccccactgaagcgctaaccgcaattcccagcaacggaaagcctggacatgccgcctgtcccaagagtcgctctatccggggtcgccctctattgccgtgtctccggc

SEQ ID NO: 22858 - DNA, 260 bp, Unknown
  Description of Unknown: LeftRegion for integrase B9859 sequence
ggctactggctgtaaaatgctggtagccctcattttttagttgtatctagtatataaggggtgtataatagataggaactgaaaacagcctcataaagccctctgttttatcgagggtaaagaagtctacacctaatatataaaagtggctgtatgaggtacacaggagctcacaggactattacaggagggtaaacaggatggcatacaggaaaataacggatataaaagatactataggtatgagagcggtattttat

SEQ ID NO: 22859 - DNA, 260 bp, Unknown
  Description of Unknown: LeftRegion for integrase B9860 sequence
tttgtctgacatggtgcgccgcctttcttccgtagggaatgcatgttcgttttaaaaccatgataatacaaaatagttacaaaaactattctataaaaaatagttctaaaattcaatcaagatattttcacgcttttttatggatttttgctttttccgcgaaaatccaatgcatattgtcgaagaatggggaataaaaaatgtataatagcaaaatcgaattactaacaattgacgggatctatatttatttacgaaaa

SEQ ID NO: 22860 - DNA, 260 bp, Unknown; identical to SEQ ID NO: 15638
  Description of Unknown: LeftRegion for integrase B9861 sequence

SEQ ID NO: 22861 - DNA, 260 bp, Unknown
  Description of Unknown: LeftRegion for integrase B9862 sequence
acagtcagagactactacaggtacttgcgtttgaacgcagacctggcacacgacgagattttaaccatgatccagtcgggtttagtgagtcagatcggaacaaagaaccggacacctgtgtacagctttaccgaaaaggtaaaggagctaaagcagtcctgacatcattccgtgtcccggcgacattcatctacgctcgggtgtcgacccgagagcaggctgagaacggagtcagtatcgaaactcaggtagcgaagtgt

SEQ ID NO: 22862 - DNA, 260 bp, Unknown
  Description of Unknown: LeftRegion for integrase B9863 sequence
gcggtcaccaggctggccgatctcccgaccggggtccggggtttctgctaccatgacgatgatggccggtgctatgtcatcctgaacgcccggctgtcatcggagcaaaacgcccgttcttatcagcatgagctggaacacatcagccgggatgacctgagcgcgcccggctatcgtgagtatacgcaggaggcgcagccatgaaaaagcagcagcagcggacgcaggaaccgccgcaggatgtagcggtgatctatgcg

SEQ ID NO: 22863 - DNA, 260 bp, Unknown
  Description of Unknown: LeftRegion for integrase B9864 sequence
aatatcattatacataatccaaacaacatggataaattcaataattattattcatctgtcattattgatacaataaaaaaaatagcataaatataaaggtgtccgacaatggcaaatattgtcggacacctttatatttattgacttttttcagaaaatatgctataatgaaagactatctacaaaaaggagacatataaatgagaatagcaatatattcaagaaaatcaaaatttacaggcaaaggtgaaagtattgga

SEQ ID NO: 22864 - DNA, 260 bp, Unknown
  Description of Unknown: LeftRegion for integrase B9865 sequence
tatcacaactgcagaacgcgagcaaatcgctatgaaaacagaggaaaaattgcgaaaaaataattgctaattctttgtgtttcttcggttttgggctggactttttgcaattattctggtatctttgtccctgccttaaaaaggcggggacaaaaattttacgcaggttcaaacccagaactatgaaaggagaaaaagcaatgaaaaaacgcgcagtggcatacatcagagtatctacggcaagctcggcgcagctgcac

SEQ ID NO: 22865 - DNA, 260 bp, Unknown
  Description of Unknown: LeftRegion for integrase B9866 sequence
attaaatcaatcggcgaaaatgttgttagacgcatatatggcgatatgcgaagcagattaccaattggaacaaattggcgcaaccaaagaggaacttcgcacggagttggaacagctgttactctatgacgatgattatgcggtattggatgaagatgtaatcccttttcttcttaaacttataatccgtatcaagtaagatggaaaaggctataatttgggtacgagtcagcactaaccaacaggacatagaggaccaa

SEQ ID NO: 22866 - DNA, 260 bp, Unknown
  Description of Unknown: LeftRegion for integrase B9867 sequence
ggagaagaaaataactccaaatgcttatatgtacctactttatcaaaatatgtgcgatatcaacgaaacctattaatactaaagcttttcgacgaaggttataggagcaatcagattaaaaaacacataaagagagaattatgtgaggacataagtattcgccacatagatcgtatttgtttaaaaagtaaaatgaaacgatgactgataaaaccgcaataatatatgcccgtgttagctcagctaaacaggcagaagaa

SEQ ID NO: 22867 - DNA, 260 bp, Unknown
  Description of Unknown: LeftRegion for integrase B9868 sequence
tatacaatcgtggcagcatttgcgtcctgttattatattgttttcaagtagattagtcctcgttatcggtggctcttgcattacctcggtgcagagcgcagttttacttcgcgttgcgggtgctggtatcagattgtcttgaagcgcccagactacgtctaatatataatcccccctctatagcgcgtgcgggggtctaaatgtcgacgtcagtcggaattgtctacagctatctccggttctcggatccgcgtcaggcg

SEQ ID NO: 22868 - DNA, 260 bp, Unknown; identical to SEQ ID NO: 22706
  Description of Unknown: LeftRegion for integrase B9869 sequence

SEQ ID NO: 22869 - DNA, 166 bp, Unknown
  Description of Unknown: LeftRegion for integrase B9870 sequence
tcatcctcgtcttggagtatcctaattatttctatcattttaccccctcccttaatggtataatctatgcaccactaaagttgtcctaagacaaggaggcgtaaatttgaagatagacgctttttatggtaggaattcgacggacgagcaagctgaaaaggggacg

SEQ ID NO: 22870 - DNA, 260 bp, Unknown
  Description of Unknown: LeftRegion for integrase B9871 sequence
ccctgacgaggacgaggatgtgctggagctgcagcgccttctcgcctgctatcaggtggcgagcgtggacgaccgcaaggtggtgtgggctgtcctgaacaagtatgcgccggtcgttaccttctgacggcggcaggcgcaagacagcgatctacatccgggtctccaccacctaccaagcggataaggactcgctgccgatgcagcgcaaagacctcatagcgtactcggagctgatactcggcatcccggactacgag

SEQ ID NO: 22871 - DNA, 260 bp, Unknown
  Description of Unknown: LeftRegion for integrase B9872 sequence
acggggggagtagagtcctcctgcgttcgtagtacgaacagagtttttttgcgacagggtggggaggagggggaccatggggaagcgaactgacatgcggcaggagcagcggcgggagatcgtcctgatccgggagttcgtcaacgatcaggcggcggtgcgccgcttctatcagatactgctctccataggggctgaagatgaaagaggcgacagcgaagcgggtggcgttgtacgtgcgggtgtcggggacggagcag

SEQ ID NO: 22872 - DNA, 260 bp, Unknown
  Description of Unknown: LeftRegion for integrase B9873 sequence
aagcaagcaatgtttctttttcgttcatgggtgtttcctttcttccatctagggaatgtgtgttcgtataaatataataacattacttttgttttaaaagtattatatataataaaattcaaaaattaaacacaaataatacgcataattgataaaaatatttgctttttcggcaaaaattatatatggagggattcaaaatgtataacaataaaatagagtttgaatatagcgaaataataatatatttgagaaagtcg

SEQ ID NO: 22873 - DNA, 260 bp, Unknown
  Description of Unknown: LeftRegion for integrase B9874 sequence
aagtgtctacagagcagcgtgataccattcccaaaaactttgaaaagacaccgtatttcggcaattgctaacaatctgtgttcttttggttttggactggatttcctcctacctttctgatacctttgcccctgcctctaaggcgggggcaaaaaaatttaagcatgttcaagtccaatacatagaaggaggaagaaacaatgggaaagcccaaaaagcgtgtggtcacctatgttcgagtatcctcttcaagtaaagct

SEQ ID NO: 22874 - DNA, 260 bp, Unknown
  Description of Unknown: LeftRegion for integrase B9875 sequence
gttttataacaacttttctcttatttctcatataacattttactcctttttataaccttatttgttatattaatctatcaaactatcatagtcaatatattttacttattatttttattatgttaatatatatttaggaggtgatagcgatgtagtaattaaaaaggttataagaaataaattaaaaggagtgatatgatatgtctagtatatcaagaacaattgaaagaagtcgaacaagaaaaacagcagttgcttat

SEQ ID NO: 22875 - DNA, 260 bp, Unknown
  Description of Unknown: LeftRegion for integrase B9876 sequence
agcaatcatgaatgtagtgataccgggcaaagtaaaagccatgaacacatacatggagaagctgaacaaagaccttgtaaaagctgttgaggaattaggcggtgatgctgccattggtctgcagtattggtctttcaagaatgacttttatgttgcaggtaccgctgttaagttcaaataattgttaggaggtttgccgcatggcaacaaagaaaaagaaaattgaatcaggtgtaggtgccatctatgccagatactca

SEQ ID NO: 22876 - DNA, 260 bp, Unknown
  Description of Unknown: LeftRegion for integrase B9877 sequence
cgaacagattggcgcggaaattaaacgacgccgaaaagaaaagaaacttacgcaggaacaactatccgaattaaccggaatcgggcgcaccgctattgctaaatacgaattaggaacaatagagctcggcatctcccacttttctataatttgtgatgccctgggatgcactccggcggaattttggcgggggttagacaatgagcaagaataacgcggtaatttacgcccgttattcatccagcgggcagcgggaagaa

SEQ ID NO: 22877 - DNA, 260 bp, Unknown
  Description of Unknown: LeftRegion for integrase B9878 sequence
aaccgctacatcgacacgctggtgatggccggcctcaagcccaaggtgatccaggagctgatccagaaggagctgaaggaaaagctcacgctggtgcaggttcgcaagatgagcaacaagcgccgcgctcgcctctcgggtgaagccgatggcggctctcagtcgcaaccgcagcccgccatgcctacagtgccgccacgatgaaacgggccgtcatctatgcccgcgtgagcacggagcgccaggcggatgaggggctg

SEQ ID NO: 22878 - DNA, 260 bp, Unknown
  Description of Unknown: LeftRegion for integrase B9879 sequence
attggcaaagatgaatcagttagagttcgtatgcctccattttcaaaatttcgtcgattccaacgtaatcaacttattaagcagctttctgcggaagggttacgtacagaccagataaaaaaacatatcaaaaaacacttatgtgaagatgtaagccttcgtcacatagatcgtatttgtgcgaagagtaaaataaaaaaatgagtgaaaaaaccgctgttatttatgccagagtttctgataaaaaacaggtcgaaaat

SEQ ID NO: 22879 - DNA, 260 bp, Unknown
  Description of Unknown: LeftRegion for integrase B9880 sequence
tggcggcgccgatacacagcggctcaccgagcgccaggtcaagatcatcgaagaaatctgggcaatacacttcgcgtgaactcgccctcccttctcctgcgcatgatcgcgagacggatcgcagccgatctcactgccgaattcgcggggcatgacatcgaggtacaatcccccgcggccgaccaccgaagaggcgcccattgcgcgcagcaagctacgcccgttattccactgacaagcagcgcgaaacctccgtcgaa

SEQ ID NO: 22880 - DNA, 260 bp, Unknown
  Description of Unknown: LeftRegion for integrase B9881 sequence
ggagcctttttccgttgcctgataggcgggatctttggctggcactatttctatgtgggccgtgtgggccggggcctcatgtgcattccgactttcggaaacttctttattgtcggaaacatcctcgacctttggaagatcagcagaggaaagtttaaagataacgtgggacagtatctccggcaataaggaggtttcctatggcggtcagtatcagttacaacgcggacttgaaaaaggcaaagggtgaaccgatcctt

SEQ ID NO: 22881 - DNA, 260 bp, Unknown
  Description of Unknown: LeftRegion for integrase B9882 sequence
aacggttcccgcatccccgacatcaacgctatccttacgtttgcagacttctttggcgtgcgagcggagtggatgttcggcatcgaacccgtggaaaggtacgaagatgtggcagacgaagaccgcaaaagaatcgacctgttcaagttggcttccgaaaacgacaaggcagtcatcgacttcatactgtcgaagtacaaatgaaagccgctatctacactcgtgtctcgacgacccatcagattgataaagacagcctg

SEQ ID NO: 22882 - DNA, 260 bp, Unknown
  Description of Unknown: LeftRegion for integrase B9883 sequence
cggtcgtctgccacccgcgccgggccggaaggacggcggttatgcacctggtgaatgggcacggcggcgactgatggatttttaccggcccgccgctcgcagcatgctgatccgactcctcgcggagcggatcgtggcggaatggctggacgagacggcagctcttgaggcggtgcccgatcggccgcacaatgttacacatgaccaaatcacttccccccttgctgcgcgcggcttcctacagccggtacagctctgac

SEQ ID NO: 22883 - DNA, 260 bp, Unknown
  Description of Unknown: LeftRegion for integrase B9884 sequence
agaatgccacctatacacacgggagtgcagaggctgttcttgtatgcgatggtgactactgggattctagtaccgacaagacaggcaccgcagaaaatggatactatggcagagacatcatcaagcacgactatgagaaagtcagctctgtcgaggatgcaatccaatacatttatgatcatcaaggataggagatatccatgccgaagcgcgagagacaacagccagccttgaccgccgccatctatgcccggtactcg

SEQ ID NO: 22884 - DNA, 260 bp, Unknown
  Description of Unknown: LeftRegion for integrase B9885 sequence
attgcggagttttacggcgttagccttgattattttggcgttgcaacaactgaggaagtgtttgagattttggcaagggcaaaagatgtttttgcatctgatgtgatcagcaaagacgaaaaagagcagttatataaagagcttatgaaattgtatttgcaattaagtgaataagcacataaaaaggggatcagaggaaaatgagaaaaacaaaacaagagaaaaagcaatcatatatcagagcagttatatatatccgt

SEQ ID NO: 22885 - DNA, 260 bp, Unknown; identical to SEQ ID NO: 22758
  Description of Unknown: LeftRegion for integrase B9886 sequence

SEQ ID NO: 22886 - DNA, 260 bp, Unknown
  Description of Unknown: LeftRegion for integrase B9887 sequence
actccataggcggcttcggctgcgattccttcactaaaaagacggatttcctgataacaggatatcagaatcccggagttctcgccggtaaagaaaaatcgagcaagcgcatcgccgctgaaaaaatgcttgcgtctggaaaatcgatcgagataataccggaagaagattttttgaaaatgctttaattggagatgaacatgaaaaaacaatcctccgccagaaatgcttcgcagcctctgaacgcggtcatctatgcc

SEQ ID NO: 22887 - DNA, 260 bp, Unknown
  Description of Unknown: LeftRegion for integrase B9888 sequence
tgtggtggcaacagcgtgggccgtcctgcaatcgccgcgccatcaccttcgcgaacatcgagcttcggaagatgggctatctaccgcacgagcgcgcggtagcatgaagcacgatcccgccttgatcactatcgtgaaggcgcttgcgcgcgccgctgcggcacgggactatgcagccagccgaaaaaaggaacagaacagtgcggacggtaatctacgcgcgattttcgagccagctacagaatagccgctcaatcgac

SEQ ID NO: 22888 - DNA, 260 bp, Unknown
  Description of Unknown: LeftRegion for integrase B9889 sequence
aattcggtatttatattccctttctcgttcaacgaatccaagaagacaaggagcgaactggaggtaaatatgaattaaagaacattgaacaatttataattcaagtacatgacattgagtcggttttattcaggaaattaactcatctctatgatgatgacgatttttgatccccgttaaaagaaggtgtgattactctaatgagaattgaagatctagagggcttgcctggtattctctatctacgtaaatcgagaaag

SEQ ID NO: 22889 - DNA, 260 bp, Unknown
  Description of Unknown: LeftRegion for integrase B9890 sequence
agcttggaaacaggtatttcgtgtctctgtcggataaggaattggctaaaaggcagaagaaaacaaagaaaacagaagtggaaagtgaataaaaatcctccgcgttgcgcataacgcggaggaaagggtcagtcaacaccacttgtctaaacccataattatattaccattatgccaggtatttgtcaaggagaaatcttatgaacgcagtcatatacgcgcgctattcgtcgcataaccagaacgagcagtccatcgag

SEQ ID NO: 22890 - DNA, 260 bp, Unknown
  Description of Unknown: LeftRegion for integrase B9891 sequence
ttcaatattactaaaatctactaaaaaaaataaatatggatattatattagtatgagaataccaaataaaaatgaagaaaatgatagatttaaagaaattacagaaaacttttttatgagagagattatttagtctctcttttcctttgttcttttttatgttataataattttattattagacattaggagtattacacatggataaaaaacgtgtttggacattatatagagtttcaacaaaagcacaagtcaataaa

SEQ ID NO: 22891 - DNA, 260 bp, Unknown
  Description of Unknown: LeftRegion for integrase B9892 sequence
caagatcgaattgacagagccatgagtggtgatcttactccgaagtgggtagatgagaaaggtaagatcgcgcggtttgttggcagtggtggtaaagagtataagactacgcttaagaagtgttcttgtcctgactttgcaaagcgtggtgttccttgtaagcatatgttttatctcgccggtcgttgtggagtgcttaaatgaagaatgtcaatcagtcgttaatacccgcggtgatctatgcaaggtattcaagctct

SEQ ID NO: 22892 - DNA, 260 bp, Unknown
  Description of Unknown: LeftRegion for integrase B9893 sequence
ttcaatacttcttgaatcaattcaaaaaaataagtatggatattatatgagtatggaaataccaaataagaacgaagaaaatgataaatttaaaaaaattacagaagaattttttatgagagagattatctagtctctctttttatttatagttttttatgttataataattttattattagacattaggagtattacacatggataaaaaacgtgtatggactttataccgtgtttccacaaaagaacaagttaaccac

SEQ ID NO: 22893 - DNA, 260 bp, Unknown
  Description of Unknown: LeftRegion for integrase B9894 sequence
gtggatcaatacgctcagacgcttgccgatatgacaaagctgagcgcagcggaagtgcaaaggtcctgcgtgtgtagcttctccaccgcgtcccaaatcatggaccgcctgaagctctacggcctcgcggcagaaaagcagaccagcatttatgaatggaccgacaaggcctattctctgggcgcagaaggggtgaacgggtgacaggggtaatgtcagtagatattaagtggaacgtgcctcagaagggcaaggaaggc

SEQ ID NO: 22894 - DNA, 260 bp, Unknown
  Description of Unknown: LeftRegion for integrase B9895 sequence
atagtcctgtacgattgtccagtggctcataacgatctccttccgagatttaccgggttccgccggctcgggagattgattcctacaatcaaattatacgcccaatgggcgcaattgcaatagtatatttacagactaattcgggcatcctaacgacactatacctatacttttcggactcgacatgacaaactgcctgaatggacaatccgaaagtatacagctatctccgattctccgacccgaagcaggcggctagc

SEQ ID NO: 22895 - DNA, 260 bp, Unknown
  Description of Unknown: LeftRegion for integrase B9896 sequence
atccagaactcggccgtcgtgcagggaaacaatgccacgacgctgatcgtccggaacggatccgtcgagcggaaggagctcagcgacgaggaggtcgagctgctgcggatcttcgaggctcttgatgtgaagggccggacggcgctgctgtccgctgccttcgatctcgaggagctgatcccgccgaaggagggcgactgatggccgcaaaaaaagcgcccgccggcggcgaggccatgcgggcgtacatttacgggaga

SEQ ID NO: 22896 - DNA, 260 bp, Unknown
  Description of Unknown: LeftRegion for integrase B9897 sequence
actccgggaactatgattattatgccgaatacgtcaccatgggcaaccgtgacttcgtatatctgatagcagaagaaagacaataaaaaaatgcccgccccggtttcccaggacgggccgcaaaatcagccaacaccacttgtccgatttgctattccattatagcgcggcgagggttatttgtcaaggagcgaaaacgcatgaaaaccgttaaaacccaaagcggcgcgacgaaagcggtaatctatgcccgctattcg

SEQ ID NO: 22897 - DNA, 260 bp, Unknown
  Description of Unknown: LeftRegion for integrase B9898 sequence
tgattcgctgcttggttgtttcttcagaagcaaacaaggacttttaatatttgttaatgaaaatatatccaagcaggatcagaataaggtaattgaaattattaaagaaaagactgatgaatgcaagactgctgatttaggcattgtaaaagcaggctttaaatatcgttgcggcggatcatgctgcaagtataaaggggatggaagtattgaatgttgcagcttatgtccgatattcaagcgagaatcaaagacaggaa

SEQ ID NO: 22898 - DNA, 260 bp, Unknown
  Description of Unknown: LeftRegion for integrase B9899 sequence
ttactccgggaactatgattattttgtcgaatatgtcaccatgggcaaccgtgatttcgtgtatctgacagccgaagaacggcaataaaaatgcccgccccggtttcccaggacgggccgcaaaatcagccaacaccacttgtccgatttgctatttcattatagcgcggcgagggttatttgtcaaggagcgaaaacgcatgaaaaccgttaaaacccaaagcggcgcgacgaaagcggtaatctatgcccgctattcg

SEQ ID NO: 22899 - DNA, 260 bp, Unknown
  Description of Unknown: LeftRegion for integrase B9900 sequence
atgaagtggaagaaagccagtgctaaggaagaaatgtctgagtaaaagacggcgtgccgcacgcgccttcaatcgtccttcaaaagcaaaaagcccacaccgcgggtccagcgcgatgtgggcggcagagtactctatggcgtgaggtgtctgcatgtttattatagcagacaccggccggaaaggcaaggtgtttgcctatggcaaaacgaaaaaaggaagttcagcagccagcacaaattgccgcgatctatgcccgg

SEQ ID NO: 22900 - DNA, 260 bp, Unknown
  Description of Unknown: LeftRegion for integrase B9901 sequence
gatatgcaggtcgattcggtcgagcagcggcccggacaccttggcctgatagtccgcggcgcagcgcggtgcccgcgcacaggcgaggccggcatcgccgagatgaccgcaacgacacggattcatcgccgcgatcagctggacgcgcgctgcgacgcacgtaaacaaatgggcaacacctgacatctacggggtaggctatgtctcaaaatgcaatcatctacgcgcgcttttcaaccgcggagcaaagcaagggttat

SEQ ID NO: 22901 - DNA, 260 bp, Unknown
  Description of Unknown: LeftRegion for integrase B9902 sequence
acggccaaatccgttcggcaacgcccacggcaggacccgttccgtcaaagtgaccagttccgtacccgaaaacagccggcaggaggactgtccagcggagagtaaaaaggggcgcgcgcagagagtgtgtgggcggaggtctccggctaccccgtttactcgttctcccgcctattccgcctgtcaaggaagcccagaccatgcccgccgaccgtcccacccctaccccgccgaataatgaggtcaacccttccctgccc

SEQ ID NO: 22902 - DNA, 260 bp, Unknown
  Description of Unknown: LeftRegion for integrase B9903 sequence
ttactccgggaattatgattattttgtcgaatacatcaccatgggcaaccgtgatttcgtgtatctgacagccgaagaacggcaataaaaatgcccgccccggtttcccaggacgggccgcaaaatcagccaacaccacttgtccgatttgctatttcattatagcgcggcgagggttatttgtcaaggagcgaaaacgcatgaaaaccgttaaaacccaaagcggcgcgacgaaagcggtaatctatgcccgctattcg

SEQ ID NO: 22903 - DNA, 260 bp, Unknown
  Description of Unknown: LeftRegion for integrase B9904 sequence
caaagcagtatttgacctaaaaacccccaaagccaagataaaaagaatcgagaaatttgcgacgatagtttctgaatacaaacagaagatgaccgacccttcaagcgtgagtaaagttgagcaaaaaatagaaaagctgctcaagcaaaccgaaaatgaattggttgtaaaaaaatcatagttcttgtccccctatttcaatgcccaactcccctttcccccccggtgcccacgtcgctgcctacctgcgagacagcggc

SEQ ID NO: 22904 - DNA, 260 bp, Unknown
  Description of Unknown: LeftRegion for integrase B9905 sequence
gtggtgattggtggcctcttgctcttgatcagcttgattgatcaatccatgtcgcctaacaggccgacagcgctttacatccttggcggctgctttgtgacctatttcatggtcagcatcgcctccgatgtccacagggtagcgtactatacgcgcaagatcgccgaagcgaccgagaagcagcccgaagaacctaaagcatgaaagcagcagaaccgcttcgcaccgccgtcatctacgcccgctactcctccgcgcag

SEQ ID NO: 22905 - DNA, 260 bp, Unknown
  Description of Unknown: LeftRegion for integrase B9906 sequence
aagaaattagggaggcccgtcatggaaattaagaaatgtaaaatagatataaataaaatccctaaagaggataaagagattatagggcgtaggtttttggcttgtgtaaaggactattttaaaaagcccggcgtagaggaggagtacaaactatggctcgctcaacgtaataaaaattttgtttgatttataatttatttatgaataacgccgtaacctataatagattttctccgggccctaatcaaagggaggagagt

SEQ ID NO: 22906 - DNA, 260 bp, Unknown; identical to SEQ ID NO: 15830
  Description of Unknown: LeftRegion for integrase B9907 sequence

SEQ ID NO: 22907 - DNA, 260 bp, Unknown
  Description of Unknown: LeftRegion for integrase B9908 sequence
tatagacaagttcaatgagatattcaagagttgcgacaaactagaagaattcaatgaagagatctgcaaactaatgctagaagaaataatagtaatgagcagaaacaaattgatatataagtttagaaatggatacagagcagagatagaagtcattgactactacctagaaagagatgaaattggggaggtggaaatttatgcttgcgcctaatgtaagagtgatacaaccaacaaaaataatagatgatacatcaatg

SEQ ID NO: 22908 - DNA, 260 bp, Unknown
  Description of Unknown: LeftRegion for integrase B9909 sequence
gttattttaagagtggggagattgctattaaaggggtagcaatctccccttatttttttttgcctaaaaagtgaggagaaatgccgttatcactcaggtgaaagaggtgtatttacattctttcaaaaagctgtataatatgtttgagatactttgtaaaacctatcaaatatctcaaggagaacacaggaggaaacaggatggaaagagcggtattttatgccagagtgagcactgaggaggagaaacagcttaatgct

SEQ ID NO: 22909 - DNA, 260 bp, Unknown
  Description of Unknown: LeftRegion for integrase B9910 sequence
aaatatattatactcgactattggtcttatatgtacttctttagggatgacattaattaatacaaaaccgcctcaactataatgcattgattactaacacattaagagtataaaatccgtctaaattgttttagtcatctatttttattttatactcttagtttttttcatacatttgggtgtatttaaaccacaaagttatgaaaaaatgcatcatttattctagagtctcatccgaccatcaggattattcatctcaa

SEQ ID NO: 22910 - DNA, 260 bp, Unknown
  Description of Unknown: LeftRegion for integrase B9911 sequence
tcaatcgctaatggtttaatcacatttgaatataaggggccggaagaaaaactcgtacatcgccagcgtgatcagtccggtgatgatttccctggccgtgattagttccatttctgcacctccttcagagagaggatagcatattttacaatattcttcaatctttttacaaaattattgtattttgtacggaggtttctatgaataataacgccgctgtgatttatgcccgatactcttcgcaccgtcaggatgaacag

SEQ ID NO: 22911 - DNA, 260 bp, Unknown
  Description of Unknown: LeftRegion for integrase B9912 sequence
gctttagaaaatggttacttaggaagtgtaagagataataaattttctgctccttataattaatattagcccttcggggcttctctttttacacaaataccgaacaaatgtatataaataatcacatatttgttctattaagtgaaaacattactactaattatataaaaatgtgaactaatatttttggagggtttataatgaataatacaactgcagcaatttatgcacgtttcagttctaataaccagagagaggaa

SEQ ID NO: 22912 - DNA, 260 bp, Unknown
  Description of Unknown: LeftRegion for integrase B9913 sequence
gattgtggatctatatcgctctcaacagtccaatcatccataaggcgagatatagccaccaagccagaacccaatgagcttgttgaggcgtccacaaatcgagatcagttcttttcgctccggcccgctctctgtacacatttcgtgtaggtccaagcgtcaagcagcgaagctaaactttcgcgctcgacggaggttcaatgcgagcgagggtttacagctatctcagattcagcgacgccaagcaggccacaggcgcc

SEQ ID NO: 22913 - DNA, 260 bp, Unknown
  Description of Unknown: LeftRegion for integrase B9914 sequence
caactcttttgaagtaatgtgagtattaaattcaataattcgatatcgttacattcttgtaactgttttgtgattgcttctacgtaaacattgtgcatgagcaaaccccctgtaagaacatatgctctatattatggtatataattgttagaattatgtgtaacgtgtgaattttatatgacaactaaggagatgggaaaatgtataaagtatatgagccgctatcggcagaagaatgtttagagtatttgagaaaatca

SEQ ID NO: 22914 - DNA, 260 bp, Unknown
  Description of Unknown: LeftRegion for integrase B9915 sequence
cacgtttcgccgtgggtaaaggccaccatcgcacgcgcgaaggaggataaatgaacaacctccaaaccctaatccgcctcctcgccaaacaagccgtgcgcgatcatttgcaggcgcagcagcccgcgccgtgcggcaagccggccgagcgttcaaatcgcccggttcaaatcccggcccgcgcgcgttaatctccgcccatgcgacccgccgcctactgccgtttttcgtccgacgcccagcgcgaagcctcgatccgt

SEQ ID NO: 22915 - DNA, 260 bp, Unknown
  Description of Unknown: LeftRegion for integrase B9916 sequence
cacacataccgcccgccccagcaccctgcgcaagctggctcaggcgctgggcgtcaagcccacccagctcacgtcgaaccagtaaaaaggtgaagaaaaagccccgcatcgttccgtagacgaccggggcatggcagaccctttgggattgaaaggactgaatctgcaatgagcactctactacgaggtgggccgaccgggtgagcgtcatcgacctgcacacacggcaacccgtcgatgagcgcccaggcgtcgtcctg

SEQ ID NO: 22916 - DNA, 260 bp, Unknown
  Description of Unknown: LeftRegion for integrase B9917 sequence
gtttgtcggggttctctggatcattgaaaccataaaggaaacgaaatgaccaactaccaccagattcttatccgcctgctggcccgccaagccgtgcgcgagcgcgtgacacagcaaacgcccgcgccgtgcggaactcagccgatccgttcaaatcgccccgttcaaatcgccgagcaaacaaagtagtcttgaagattatgagaacagccgcctactgtcgattcagcagcgacgcccagcgcgaggcgagcatccgc

SEQ ID NO: 22917 - DNA, 260 bp, Unknown
  Description of Unknown: LeftRegion for integrase B9918 sequence
ggtggatattatccgccgccggatccgcagccctacattgttggccattcagaatgtctggatacggcataccggttttctttttggtaaagaaaaagccccggctttcaccggggcatcccatgagttgtgctcatgtaatctcgcaaattatagtatagcactgctccgggatattttgaagtattccgggcatttttatgccctttttaggaggttttgctgtgcattttggaatttatggaagaaaatcatatttt

SEQ ID NO: 22918 - DNA, 260 bp, Unknown; identical to SEQ ID NO: 17524
  Description of Unknown: LeftRegion for integrase B9919 sequence

SEQ ID NO: 22919 - DNA, 260 bp, Unknown; identical to SEQ ID NO: 15922
  Description of Unknown: LeftRegion for integrase B9920 sequence

SEQ ID NO: 22920 - DNA, 260 bp, Unknown
  Description of Unknown: LeftRegion for integrase B9921 sequence
aaagcgggaggaggtcatactggccgtgctggatgccatccagcgttccggcggctccgcgcttcaggttgacgtgaaggcttcacttccgagttggatgtccgattacttcgacgatgccgtgcgcgagctgtacgaaactggacggattaaaacgtccaaggacggcgctcgcgtccggctggaattggtataagcctatggaagaactgactcaggagccttgcttcgtctacgctcgctattcctctcacgcgcag

SEQ ID NO: 22921 - DNA, 260 bp, Unknown; identical to SEQ ID NO: 15606
  Description of Unknown: LeftRegion for integrase B9922 sequence

SEQ ID NO: 22922 - DNA, 260 bp, Unknown; identical to SEQ ID NO: 14687
  Description of Unknown: LeftRegion for integrase B9923 sequence

SEQ ID NO: 22923 - DNA, 260 bp, Unknown
  Description of Unknown: LeftRegion for integrase B9924 sequence
taaaatacttgaaaagaaacacgatcttcatccaagcctcaaagatggttttctaaaattatatggctacacaaatcgtgaaaacgggattcgacatgcaatattcgatgaggaaccaaatctgactaatcaggatgcaaagtttttcctattgtcttgtaccagttttatcaattatctaaaatctaagctttaatcaaatgaatgttgagcatcaattttctccaagagtatttgtagccgctcaccttcgcgattca

SEQ ID NO: 22924 - DNA, 260 bp, Unknown
  Description of Unknown: LeftRegion for integrase B9925 sequence
gctttagaaaatggttacttagggagtgtaagagataatgaattttctgctccttataattaacattagcccttcggggcttctctttttacacaattaccgaacaaatgtatctaaataatcacagatttaatctattaagtgaaaacattactactaattatataaaaatgtgaactaatatttttggagggtttataatgaataaaactgcagcaatctatgcacgtttcagttctaacaatcaaagagaggaatct

SEQ ID NO: 22925 - DNA, 260 bp, Unknown
  Description of Unknown: LeftRegion for integrase B9926 sequence
ctgaaaatattctatctcggagcggatgatcaaatacttgacgatttcagattaatcagtatcgggtatgacacataaaaaactcccgcaccgtgcgccaacacgatgcgggatgaacagtccgcaggaataaccacaagcccacgtctgctacaccattatagcagacgcattcccatttttcaaggagggattctgctatggcaagaaaaaagtctcaggagaaagcggcggcaactgcagcgatctatgcccggtac

SEQ ID NO: 22926 - DNA, 260 bp, Unknown
  Description of Unknown: LeftRegion for integrase B9927 sequence
atcaggcgatgatacggcagagattcgatttcgcttaccgcgattcaaaaagtacctgaaacaccaacgtaatttatatataaaatctcttgctgaagacaagaacatgccaactgtccaaatacagaagataattgagcatgaaaaccatgaaaagctgagtccgaattacatcaggcgcctgcggagaccccagtaatatgaaaacagctgttgtctatgctcgggtgagcgaagcacgcaattcagaggatggtttg

SEQ ID NO: 22927 - DNA, 260 bp, Unknown
  Description of Unknown: LeftRegion for integrase B9928 sequence
gcccctgtaactgacggcaagtaggtcccatgcacttctccccgggcggtctcactgtcccggggagaagtgcaatctgggccaggttgtccaacctccacgaccgcatagggtggtcgtggaggtgcccgccatgaacaaaccaagccagcagaccctcctgagggccctgcgctggctcaagaatgaggtgcactgtcatgggctcggtgatcgtcctgctggtcatgatctacctgcgggtctccacaagggatcag

SEQ ID NO: 22928 - DNA, 260 bp, Unknown
  Description of Unknown: LeftRegion for integrase B9929 sequence
tttttttgtcatgcattcctccatacaggccgggtgcgtacattacgtcagaaaacaatgccagtaagagtaggaaaccacaaaataaaaacgcgtctttggcggaaacaaagacgcgcacgcataatcagccaacaccaattgtccgatctgctatttcattatagcgcggatgatatgtgaaatcaaggagtattcatatgaatgcagtcatatatgcccgctattcctcgcatggacagacggagcaatctatcgaa

SEQ ID NO: 22929 - DNA, 260 bp, Unknown
  Description of Unknown: LeftRegion for integrase B9930 sequence
acgcaataggcgtttttacctccagcggtaaacagttaggcaacgtcagcgccgaccttgccggtgatctgcttaaaaaatacggtaacaatccaatgcaagtaactattgccggaattactggcggcggtgataataactacggctgcaatcttcacgttgtaatatatgcaatgccgcaacaataaggggcgttatatatgaatgacgataaattgacaacgggctatatttacgcccgctatagtccaggcccccag

SEQ ID NO: 22930 - DNA, 260 bp, Unknown
  Description of Unknown: LeftRegion for integrase B9931 sequence
cttgactataacttcgataaagaaaagtatcttgtcagcgctggcgtttctgatattggttatctttctgctgctgccgcaaaggttgtcgaagaatgcggcgaagataacgtttctgtttatgtcgctgccgtatcttctgacgacgaaggaaccgacgaagtatcggtttacatcttcccgaaaaggaactgacagcaatgaagcaatcaacccaacccacaacaaacgcggtcatatatgcccgttattcgtcgcac

SEQ ID NO: 22931 - DNA, 260 bp, Unknown
  Description of Unknown: LeftRegion for integrase B9932 sequence
gacatgtcccggctcgacgccgccggcctcatcctcctcgtcgagcgactccgcggacggctggacgacatgctgcacctcctcgacgaagtgacgccccccgactgacccgaaagccgtcccgcccaatagggggtctcacttcgactcgcgcacgcgaacaccaccagacacccactttaagccgctagggtgacgggatgccgctcgcacccgaatacctccacctcgtcttccccgaccaggtattcaacgccctc

SEQ ID NO: 22932 - DNA, 260 bp, Unknown
  Description of Unknown: LeftRegion for integrase B9933 sequence
gtggaactatattatctaaattccaaatatatactgacaatggagatatagaaaaactgcaataaataaaaaatccccattgctacgccaatagcaaaagggattgatgagtgttatgatataacaccaaaaaccaaatatattatatcataacactccgataaatacaagaaaaatcaaattaaaggagtgtttttttaatgcaaaaaaataataaaagtataggtaacagatgtgtaatttatgcaagatattcttgc

SEQ ID NO: 22933 - DNA, 260 bp, Unknown
  Description of Unknown: LeftRegion for integrase B9934 sequence
cgccgtgccggcgcaggtgagccttgacgatttggcagaagttcacttcctgccgagcgatcagcgcgtgctgatcgaaaagtttatcgcgctgaaacccgccgtgcggcaagggatcctcgattattttctcgaagtcgccgcggtcgtcaacgcgggcaaaactctataacttgacaagttagacgcgggtggtgagcatgatggatgcagatatgcaaaattgcgttatatacgcgcggtattcctcgcacgcacaa

SEQ ID NO: 22934 - DNA, 260 bp, Unknown
  Description of Unknown: LeftRegion for integrase B9935 sequence
tatatcggcctgcattatgtctatgtcggtaggtacggaaaagctatcttatactgttgcaccttaggcctgtgctttttcggttggtggcatgatcttggcttgattctcaaaggaaaatttcaggataatgttggcgattatctgagagcataaaaaatgcccccggcagagccggaggcaagagaggaagtgaacacatggaagtcctaaaacacccaaattatccatgggcggcggagaaaatcaacgcagttatt

SEQ ID NO: 22935 - DNA, 260 bp, Unknown
  Description of Unknown: LeftRegion for integrase B9936 sequence
aatattatcgggaaagaagccgcaaaccaaacacattttgaggtcgggcgaaaagtcagaaaaacgattgctgaacttggaggaacaatgccagaagacttgccaacaccggcgaaaagcattaagcaaatagaaaaagaacagcagcgtctggaacagaaataaaaatcgccccgatgtaatagaaagaaggtgaccccatgaaccgcaaccgcacaaacttaaatcccaacggcctctactatgcctatctacgcaaa

SEQ ID NO: 22936 - DNA, 260 bp, Unknown
  Description of Unknown: LeftRegion for integrase B9937 sequence
agcaaaacgaacaatgttctcgttcatggctcctacctcctaagaatgtgatgcctgtaaatattactaaagtatttcatcacaaattcgactttgttacagaataaccagatgggttatggaaatgcaggtttggagggcaaacttgctgaaatcggagcattttgtacaactacacttgtacgtgagggggcgcgcgcatggccaggaaaaaggcagagaagaccgatggcaacatctgcgtggtgtatgccaggtat

SEQ ID NO: 22937 - DNA, 260 bp, Unknown
  Description of Unknown: LeftRegion for integrase B9938 sequence
tgaagaatttaaagtaatttatcgtaatcaatacggaatagagttatcccttgcagaagcgacaaagcaggcgaactgtttaatccgattgtataaagcggtattaccgccattaaagaatgaaacttcaatagttaaagatactaatcttaaaaatacagcttgatttataatttatcatgtgaataatctacattgttatgatagaaaaggttaaaagtccaataaagtattttctctatgctcgaaaatcttctgaa

SEQ ID NO: 22938 - DNA, 260 bp, Unknown
  Description of Unknown: LeftRegion for integrase B9939 sequence
attagtccgtaagcaatctacagcggaaatgggacaaactataattgcaagaataggtgatgaagtaacctgtaaacgattttatattaaaaacggacttccggtattagaaccagccaacttaaagtataaaacaatagagccaagggaattagagatagtaggaatagtaacaaaaataatcaaggagttggagtagtgtggtgcggggagtaatttatgctaggtattcatcagacaatcaaagagaagaatcaata

SEQ ID NO: 22939 - DNA, 260 bp, Unknown
  Description of Unknown: LeftRegion for integrase B9940 sequence
attggttcgtaagcaacctacagcagaaatgggacaaactataattgcaagaataggtgatgaagtaacctgtaaacgattttatattaaaaacggacttccggtattggaaccagccaactcaaagtataaaacgatagagccaagggaattagagatagtaggaatagtaacaaaaataatcaaggagttggagtagtgtgttacggggagtaatttacgccaggtattcatcagacaaccaaagagaagaatctata

SEQ ID NO: 22940 - DNA, 260 bp, Unknown
  Description of Unknown: LeftRegion for integrase B9941 sequence
tcattcatgggatgcatcctttcttgcatttaggaatatatgttcgtgtttatacaaaaaaaataatgcagaaactactgttaaatatattataatttaataatttataaaatcaactataattatttcacgttttacaagtatttaccaagatagattgcgcatgttgtcgcacgttgtcggaaatgggagatgaaaaaatgtatacaaacaaaattgaaggcttgtccgttgatggaatcataatatatttaagaaaa

SEQ ID NO: 22941 - DNA, 260 bp, Unknown
  Description of Unknown: LeftRegion for integrase B9942 sequence
agaatgcgaaaggtcaatcattaccaacgttaaacgttacctgtccgcattgcaagactgaattaacaatcaaaaaataaaaaaagccccgcaactgtttggagcagtcacggggtcagtagtgttatggaacaccaattaaaaacatatatattctaccataacattacttgaaaatcaagttaagaggtgttatttttatgaaaaaaattaaaaatcaagtacaaagagcggttatatatgcacgttattcgtgtagt

SEQ ID NO: 22942 - DNA, 260 bp, Unknown
  Description of Unknown: LeftRegion for integrase B9943 sequence
cacaagcacgacctcaaggcggcgctcgcctagcgccggcaccgcccgacagcacgaccgaacgcccccaatccatgaggatcacacctcgcgggttgggggcgtttcgctgtctccgcacgctcgacacgcggagtgcgagccgatcacgcgacgactccaatgatgagcgtacactccgtcatgtgaggattcttggagtggtccggctctcccgcaccgacgccgcgagcacgtcgatcgagcgccagcgcgaggag

SEQ ID NO: 22943 - DNA, 260 bp, Unknown
  Description of Unknown: LeftRegion for integrase B9944 sequence
tacgaggggatcgtgcatcgggtcaaggtgctcgaacgcggcttcgagtttgagggctcgttgcaccgtagcctgtcggggatcgcccggcagatcaccggccggagctggaacggctacgtgttcttcctcggccgtgaccagggcgcggcggagtccgaatctgaggcagcgcccgaggtgcacgctgaggtgtcgcgatgaggcgcaggaagccggcgccggtcgccgccgcgcacctcgaggcgaagcgctgcgcc

SEQ ID NO: 22944 - DNA, 260 bp, Unknown; identical to SEQ ID NO: 16040
  Description of Unknown: LeftRegion for integrase B9945 sequence

SEQ ID NO: 22945 - DNA, 260 bp, Unknown
  Description of Unknown: LeftRegion for integrase B9946 sequence
tcaaatttataatagcgagatatgtgtatatttatattataccatatattttattacatatcaagagataaataaaaaaaaacgccccaaaagatgctggaacatctctcggagcgcaggagaatgtggtacattcaccattctttcaatgtgaattataccatatcctcctccaaatgtcaaggagtgataacaaatatatgaaaaccgccgtaatatacgcccggtattcgtccgacaagcaaacggagcagtccatc

SEQ ID NO: 22946 - DNA, 260 bp, Unknown
  Description of Unknown: LeftRegion for integrase B9947 sequence
ctgcaggcggcagcacttgctcatgctcaggtaatacctataactgctcggatttttcaagtcattccagcgcacaggcatgttttacttactgcgttcaacaaggcgcaggcgatatccataagctggatcgagataatgatggactcgcctgcgaaaacaactgatcattaatctccaatctccaatctctgcattttatgaacctcctcccgcctccctccacgctcccgcctggctccaccgtttgggcatacctg

SEQ ID NO: 22947 - DNA, 260 bp, Unknown
  Description of Unknown: LeftRegion for integrase B9948 sequence
ctctcaaaggtgtctaatcgaaaaaaatcttgctttttttgaaagatttttcaatttcttatttctgttgaaaatttgatagttacgtaaaattatagtgtaactccatcgttgtttgttatagcgaatgataataaagttacactataattcaaaattatttcgtatctttgcaccataatttgaaaggagtaaagactatgaaatcaattttaatttgcagaacatcaacaagccgtcaagaaattgacaaccaaatc

SEQ ID NO: 22948 - DNA, 260 bp, Unknown
  Description of Unknown: LeftRegion for integrase B9949 sequence
aacatggaacgttgaaaaaattataaaaaaacttttagagtatgaagagttcaacgggggctgatgcaacgccctttttattttaaaatgcttacggattttagaagcaatctgtgaataaacggttcccaaaatccactggttatgatatagtaacaaacatagtaataccaacgtttttgaagggaaggaaaaaaacaatgacaacaacaaagaaaaaacaaggcgcaatttacggaagaaaatcaagggaaaatgaa

SEQ ID NO: 22949 - DNA, 260 bp, Unknown
  Description of Unknown: LeftRegion for integrase B9950 sequence
tggcactgcagtttgaacggatggtcatagatggttagaggaggatttatgaccatcgaagaccggaaattaattgacaatgaattccataatgctactattaatgagctcgagtttgacaaagatctgattgttcctcagttactagaattcgcagccgtctatgagaaacgaatcaaaatcatagaggagcgccaaaaatgcaatcttcattagaaatccagatcgccgaaaagattgaaactgcccgcaatcataag

SEQ ID NO: 22950 - DNA, 260 bp, Unknown
  Description of Unknown: LeftRegion for integrase B9951 sequence
caagtagggttatttaagactatttgatttttagactctaaacctgtaaccagctccccatacagtttcgatatattgataatttggttctttttgtgtttttattaatgttcctttcgtgtcgtacgtttctacgtattgtacgaaaggaacataacatgttataatatataaaatgttaacctttggaggaattttatttgtctaacctaagaagaaaagctaaaagcattcaaattgatcctaataaagttgctatt

SEQ ID NO: 22951 - DNA, 260 bp, Unknown
  Description of Unknown: LeftRegion for integrase B9952 sequence
cctcttgagaacaaaggagtcaaggcgaatggcttctcaaactcagtccggtctcatcgatgctctcgtcgaaatcggcagagagcggcagcgaatcctcacgaacctgcgaacagcgtacgaagcgcacgacctcgacggggtcctacacttcgtggcggaaattgtgggagtcgaagaaaaaatcgaggaggcgccgcgtgaaaaaagtcattgagctcatccgggtctcgacgtccgagcaggctgccgaggaccgt

SEQ ID NO: 22952 - DNA, 260 bp, Unknown
  Description of Unknown: LeftRegion for integrase B9953 sequence
aatttagagaattataaaattgccatgaatttaataaaaacaatgcaaaacttaggtattttatcagaaaacgacctaaataagatgggtagagttttaagaaaaaaatatagtatcaaaccaagttctatttatgtcgatgatgggttgaattcctagccgtttagagtgatgtatatgactaaggaggtataaagaaaatggaagaaaaaagcattgaaaaaagactcggtatgccgtccttagttcataagaaaaaa

SEQ ID NO: 22953 - DNA, 260 bp, Unknown; identical to SEQ ID NO: 17524
  Description of Unknown: LeftRegion for integrase B9954 sequence

SEQ ID NO: 22954 - DNA, 260 bp, Unknown
  Description of Unknown: LeftRegion for integrase B9955 sequence
cagagaagaatggaaggctgagttaaggaattctttgttttgtctttcggcaaaataccctgcaatcagtttctctggaattggtttccccaatgattggaaagatatcttcctgaatactgatgatattactttgcgtcccgtctccattgagaaaaaggaaatcccacatttagcccctcttccggaaggaggatctcatgattgctgaaactttgaatgcggtcatctacgcccgctattcctcccactcccaaacc

SEQ ID NO: 22955 - DNA, 260 bp, Unknown
  Description of Unknown: LeftRegion for integrase B9956 sequence
taaattaattaataagtaatcatgaacttagaagcaatagatatagcagccgagttatcagaaattagggaaagacaatctatggaaggtgtcatactagtgatgctatcgcaagcgcaaagattaggtgggattaaaatgccccctgaaattgaagaaagacttgcaattgccttcccaagtcatgctaaaatcgactaatgaaatacttcatatattgtagaaaatcaacagaggacgctgaaagtcaatcattatct

SEQ ID NO: 22956 - DNA, 260 bp, Unknown
  Description of Unknown: LeftRegion for integrase B9957 sequence
aaggaatgaacgacgcgcagaaagaagcagttcttgaatacgcgcagcgggtgattgcgtccctgatcgacggcgacgggatcgaagcgaaggttgccgcgtatcgggaagaattgctttcggaaaaagatacccgaacgttatcagcttcacagactggaaacggaacaaccgactgaagtaattgaaggtggcacacaatgaaacagcagtcaaccgttaacgcggtcatttatgcccgctattcgtcgcatagtcaa

SEQ ID NO: 22957 - DNA, 260 bp, Unknown
  Description of Unknown: LeftRegion for integrase B9958 sequence
aagcgtacaacaggcaccctgttttgggttcaactcttcaaccgttaagagttatatttaaattttctaaaaatatatatataaataagccttttagcggttgaaaaaacggttgaaaacggttgaaaccgcttcaaccgctgccaaccgccgaacgatgaaaagcgccagcgctggcgcttatgaaggaagggatgcagatgccgaccgcctatacatacgcacggttttcgtcggaccggcagcacgagtccagcatc

SEQ ID NO: 22958 - DNA, 260 bp, Unknown
  Description of Unknown: LeftRegion for integrase B9959 sequence
attaaaatatcggatttcttagaggtgagtttggattggttgattgatggagataagacagaagacatctcattggatgacttacaaactgaactactagaaattcttaattcgttaagtgtaaaagataaggtgagcttgttatcgtttgcatatgaacttcaaaataataaatctaaaaataaggagtgattcaacgcatgaaagcagttggttatttacgttactcttctgatagtcaaagtgaaggatattcaatc

SEQ ID NO: 22959 - DNA, 260 bp, Unknown
  Description of Unknown: LeftRegion for integrase B9960 sequence
aagcgacttacatatattcggaatcggatcctatataactatgaacttggaataaatgaaaataagccaaaatggtcaccagagacgattaaagtgctgcaccagctcaaccgcattatattaaacagaattcattacagatattatggcacttagtcatctgcttaagtaatcgttgttaaattataggagtgattgcggtgtacaagttgccagacggagaatattgtgcctacctacgaaaatcacgggctgatctg

SEQ ID NO: 22960 - DNA, 260 bp, Unknown
  Description of Unknown: LeftRegion for integrase B9961 sequence
aaatttttttaaggttatgtttttcattttcaattccatcactccctatttttattatagggagatgattcaaaaacataacttagtgttgttcgttcgatatatcgaactaaaagaacaatcccgcccctgcttgatttttggatgaccatatcattattattaaaatatagtcaaaccaaaaagagggagagggaaaaatgtatcagcttccagcgagagtcaaaagaattattttatatgttcggaaatcccgacaa

SEQ ID NO: 22961 - DNA, 260 bp, Unknown
  Description of Unknown: LeftRegion for integrase B9962 sequence
tcgctttttgtgatctatggctgaggggtgagtgagccccgcctgagcgccctccccgccggtgtcccgcaagacgctggtggggagggcttcgtcgttcctgcgtcccgctgcctggtgtcctttagaactaaggtgcatccatggatgcgccttagtcgttacactctgtgtcgagcagtaggcacggaggggtgagcatggccgtactgaccacagctgaggccgtcatggacgaggccgtcactcgggcggcccgc

SEQ ID NO: 22962 - DNA, 260 bp, Unknown
  Description of Unknown: LeftRegion for integrase B9963 sequence
tcctgttctatcaaagtccagcgcaaccggaaatggactaaggagaaggcacggaaaatgagcgaacaggatgtaatagaagtgtaccaggaaaaagattactggaaagtccttgataatctgacaataatgaaagaagacgattccgaggccgattatctactggataaattgaaagtcctgaaggtttggaaaagcctatgaccacagccgccgtctactgccgtgtcagcaccgaggatcaggagagggagggttcg

SEQ ID NO: 22963 - DNA, 260 bp, Unknown
  Description of Unknown: LeftRegion for integrase B9964 sequence
cgaaggcgtctattacatcatggacagcccgtccccggactatgtgaacctgaagcccgtccgcctgattgacggcgacctgtatctgcacatcttcaagtcgcaatatgtgaagttccacaagatgatccaggtggaggccggtgaatgcgtccttgacaccaacatgccccctctggggccgcagggggagtgatcccatgcccgcgaagagcgccgtgcagccctccaccgtcaacgccgtgatctacgcccgctat

SEQ ID NO: 22964 - DNA, 260 bp, Unknown
  Description of Unknown: LeftRegion for integrase B9965 sequence
ttactcatattgacggagaagaatttgtgttgccgaaaaaggtcgctgaatacgcaaataaatactttgatgttcctgccgaagttggtgaaaactgcgaaagcctgatcttttataaataaagaccgcttaagatgtactgaaaacagcccatcataattataaaattaccgaattattttaattaacggagtagatcaatggataatgccgtcatatacgcgcgcttctcgtcatcgaagcaacaggaacagagcata

SEQ ID NO: 22965 - DNA, 260 bp, Unknown
  Description of Unknown: LeftRegion for integrase B9966 sequence
tggatttcgaagcaggatgctccgactgtagccgatatgataaagaagcacgagtgctcgtattctcttcaagtagaaaagggagcgtacaagcatctcgtatatgatgcagatgcagataaatataaggtcgttaccgagtcggattctgaatacttcgcggaagtatttatcatctataaagtcgaggatgctgcagaatgaaagctgtaatatacgcgagatattcttctcacgctcagcgtgaggagtccatagaa

SEQ ID NO: 22966 - DNA, 260 bp, Unknown
  Description of Unknown: LeftRegion for integrase B9967 sequence
ctcacctcctccccgccggtagccacgctgaccacccgcagcgaagggttcgagccgctgaccagcggcgttacaccggtaacgcggtcgccccgccgcgcgatacaggccagcgaagctgacccaacgaggtgcattacaacccggtagtggtcttgcccactcggcggttgtaatgcacatggaggagtatccgcgccatgggcaccaccaccgccgtccgcgccgtcatctacctgcgactttccgatctgcgactg

SEQ ID NO: 22967 - DNA, 260 bp, Unknown
  Description of Unknown: LeftRegion for integrase B9968 sequence
taattattttgtttttctattttattacttaattattacttaattattacttaattaaaaattttctttttatattattttgattatctaaaaaattgaaattaaaaattgatttcaaatattataaataattttataataaataaattacttttatataattttacttttaataaagataatatctagatttactaaaaatggctaataatacaaaaaataatgaaattttaaaaaatgataatgcacaacaaatgcaa

SEQ ID NO: 22968 - DNA, 260 bp, Unknown
  Description of Unknown: LeftRegion for integrase B9969 sequence
ccttcgacagtttaacaaggcactggcggcaacgaaggaagatataacggcactagacgataatctcttcacggcgattgtacgaagggtggttgtaaatagccgagaggaaatcgtctacgaacttaaatcgggagacaatgcaatagtcagcatcgaatatggctacagagacaaagatataataggaggtataaggtatgagtcaagtaaataaagtgcgagtgatacccgccgcgccgaagcataacacctacgaa

SEQ ID NO: 22969 - DNA, 260 bp, Unknown
  Description of Unknown: LeftRegion for integrase B9970 sequence
caggtctcagtcgactttgatgagtcgcgccttgccgcactgtgggagcgatccatgtctcagttagcctccgttcctggctatccggatgtgaccgctgccgtcgagttcggctccgggtatgtcatgcccgtttcctcttataaagatttcgagtgttcgtataatgcgctcacggtctcgtgggaggtgctccccatatgagggccgtcgcttactgtcggttctcctcggatatgcagcgggacgggttctccatc

SEQ ID NO: 22970 - DNA, 260 bp, Unknown
  Description of Unknown: LeftRegion for integrase B9971 sequence
agagattttggcgcatggaggtttggccacaggggcacccagcaaaaagactaattatctggttgtaggcacttatggcgatttcggggatgactacatatccagtaagcaacgaaaagtaatggagtataatgcagcaggtgcgcacattgtcataatcagctacgcagacctgtttgccatgatggaggaaggctctaatgcctaacaccgccgtcatctatgcccgctactcctccgcacagcagcgggatgtgagc

SEQ ID NO: 22971 - DNA, 260 bp, Unknown
  Description of Unknown: LeftRegion for integrase B9972 sequence
aacactctcctacttatcaatttaatgattttaatcatcttattctaattatatcaaaaaagttacgtttgtatacatcttttataataataaatatcaattttaataatttttttagttctaaaaaggataactatcctctcatgtagaatactattctataatattgtgctttgatattttaattaaggagtattttaatgtctaaaattaattcttattcgtccccacagcaaaatatttacaaaataatttgttat

SEQ ID NO: 22972 - DNA, 260 bp, Unknown
  Description of Unknown: LeftRegion for integrase B9973 sequence
ctttcgttgcagctcgggatcagcgaagacaagctcgccgcctatgtcgagatcgtggagcgcgcggcatgaatccggcccttcgagagcttgtcgagctgcttgctcgagccgcctaccaggagctccgggacgcgccgcctccgcccccggacgcgcaaaagttgatcgagagctgcctgtcatcataaggtgacgcgatgcgcgccattatctacgcccggtattcgaccgaacatcagacggaatcgacgatcctc

SEQ ID NO: 22973 - DNA, 260 bp, Unknown
  Description of Unknown: LeftRegion for integrase B9974 sequence
ctctcgttacagcttgggatcgccgaagacaagctcgacgcctatgtcgagatcgtggagcgcgcggcatgaatccggccctccgagagcttgtcgagctgcttgctcgagccgcttataacgagctccgggacgccccgccgccgccccaggatgagcagaagttgatcgagagccgcctgtcatcataaggtgacgccatgcgcgccattatttacgcccgatattcgaccgaacatcagactgaatcgacgatcctc

SEQ ID NO: 22974 - DNA, 260 bp, Unknown
  Description of Unknown: LeftRegion for integrase B9975 sequence
aggaggggcgcggcgggtggactctcgcgagatccatccctggccggaaacccgccgcgccctctccaatctagctggccacctgatcgtgttcccggggaggtaggaaagtaccgtcccgcaagcggctgcccggtatcggccgggcatgcgaccctggacaccaccccctacctcccacgctccgccaggaggccgccgtgcccccccagctcaccgccgaccccatccccaccatcggctacatccgcgtctcgatg

SEQ ID NO: 22975 - DNA, 260 bp, Unknown
  Description of Unknown: LeftRegion for integrase B9976 sequence
cgtttggcgagcacgataccgaggagctttctgactactggcattttttgaggtctgttccgccgcacggaaaagcatccgattaccatttttctttgagcgattacacggcatggccgaaggacgagcttgctatagagccgatgaatggaaagcggcaaaatttgcattttgggatcgctgcaccataaggtgacaggatgaaagccatcgtatacgcccggtattcgaccgaacatcagacggaatcgacgatcctc

SEQ ID NO: 22976 - DNA, 260 bp, Unknown
  Description of Unknown: LeftRegion for integrase B9977 sequence
gtgccaagtgcaaataaggtatcacagtgagtacgctaaattttgcaaaaaattagttaattatttcaactcactaaatgcaccaacgagcgctttagaaattcacaatgaaatcaattactacatcaatgaaatgaatagtaatttagcaagagtaaatgacctgaaagaaaaattgatcatcttacaagacagagtaaatgataatatataacaaacaaaaaagccccacgctctcaaactttggcgagtctgagcgt

SEQ ID NO: 22977 - DNA, 260 bp, Unknown
  Description of Unknown: LeftRegion for integrase B9978 sequence
ataaagcaacgatgtcaaaggcaaaactgatgctaaagcaaggattgattactgccgatgagtatgctgaaatcgaaacaattatagccaataaatacggcttaaattcgtcagttatatatcgttaaaaagtgcctgaaacccttgactttactggcttttagagcgaatatggtataaaccattgtaaggaggtagaaatggatagaatagtacaaagggtgaagtttgaagcacccaagcaagaacggctgttaagg

SEQ ID NO: 22978 - DNA, 260 bp, Unknown
  Description of Unknown: LeftRegion for integrase B9979 sequence
atgttctcccgtgaacgcagtttgggttgaaactacttccggcgaaaaatattcattgaatggaaatgcaatgaatttattaaaaagcgattcaactcataaaggaagcacaaatttgattctaaaaaaaggcaaaaccgatattgaaatattaaacaaaggttttgaattgtgtaaaaataaataattgaggaataataatgactatatacgatgccgtaatatatacaagggtttcgtctgatgaacaaagacggagt

SEQ ID NO: 22979 - DNA, 260 bp, Unknown
  Description of Unknown: LeftRegion for integrase B9980 sequence
gccgctggttcaaccgtagattgattcaggcgagaacccagccatgactgaaccagcgcgtgccggccgctcggcgctgatcgagatcatcgctcgccaaatcgtgagggcgcatctggcggcccaggttgccgggcagccccctcaaggtcacaatcccggccgacccgccctccagccagccgccagatagccaacccatgcttgtcgccgtctactgccgctacagctccgatcgccagcgcgaaacctccatcgct

SEQ ID NO: 22980 - DNA, 260 bp, Unknown
  Description of Unknown: LeftRegion for integrase B9981 sequence
cgtaagcgctcaggcccgcgacgagttcttcgatcagatctcgcgcatggtcgaagagggctggtggatccagaactggccgggccggtagcaacgtagcgaacccgcagccgccgacctgcgggtttaatacggcatttccccgggctccgatctagcaaagcccagcgaagtgcagtgctcttgtgccaggctgaagcatggccatcgacgcacccggcatccccacccgcgccatcatctactgccgcatcagccgc

SEQ ID NO: 22981 - DNA, 260 bp, Unknown
  Description of Unknown: LeftRegion for integrase B9982 sequence
actgatataaccatgcgccaggcccgacgcagccaaatgaaagcctttattaaacaattgaccaagcaggaccagctgctaactgagtttgacgaggggctgtggtcggccacacttaatgcaatggttgtcaaatcagagcaggaggtagtatttcagtttaaagacggaaccgaactaccctggagactggaatcaaaatgagaaacatcaccgaagtcacccgccaaccaaaatctcttttcctcactgacagactc

SEQ ID NO: 22982 - DNA, 260 bp, Unknown
  Description of Unknown: LeftRegion for integrase B9983 sequence
gattatcgatgaggatatgtttagacaagtacaacaaataaggcatgagaatgctatcaggaatcatcgttataaagagcctaagccaataaaggaaattcggcttattacaagctaccagttagaaaaggtagaaaagaaatacgatgatccttatcggcaagcagcatacgcttacagtcaaatcaaggaggtgtaaaatgagtgccaacgttataattattccaccaagaaaaatagcgggaaatacggtagataag

SEQ ID NO: 22983 - DNA, 260 bp, Unknown
  Description of Unknown: LeftRegion for integrase B9984 sequence
cgcgcgaaaagctcgacggcctcggacactcgatctcgggcctgttccttttcctccattgtggatctcctttcatcggaactcgtcgacggcagattcattataacatatcctccgcgccgtgtctcgcaaacggcatataaaatcattctcaagcgcacccctccgctcagggtgtataatgaaaggttggtgagagcgtggcgaaaagaaaacgggatccgaacgccccgaagctcggcgtgatctatgcccgctac

SEQ ID NO: 22984 - DNA, 260 bp, Unknown
  Description of Unknown: LeftRegion for integrase B9985 sequence
cggaatttccccctgaatttcgggagaaaatagaatcgctaacggagtttcaggtatatgtacttctccgccagattaaggcggactggaaatctgaggatgttgtcggggaatcggaaaaattgttttgctgaagatgtgcccgctccgtgcgggcgtttttttcttgacttttgccgatattgggcaatcatgaacgcatgaatcccgccgatattcagcgaaaaatcaattcagcatcagtccccgcgttcgcatac

SEQ ID NO: 22985 - DNA, 260 bp, Unknown
  Description of Unknown: LeftRegion for integrase B9986 sequence
gcacacgatatgttcccgaaagaaatcaacgaacttctggaagggtatcgtccattcatcaacgagaatctagggaaggcaaaaccatacgaaaacctttctttcttctattatctggacatccataaggtcatagaaaatcttccagaactctgcactgttattgcaagctttgtacagaccgtgaaagaggcatcagaatgaacgagaaagtcgcaatatacatccgtgtctccacgaaataccagattgataaagat

SEQ ID NO: 22986 - DNA, 260 bp, Unknown
  Description of Unknown: LeftRegion for integrase B9987 sequence
caacgaagccgccgaggcccggaacgtcaacttctcgcaggtgctccaggaggccctgcgttcccaaatcggcatataaaaaagcccccgcccggctggaccccggacgggggaaacgcaatacacgaaagattgagaagaacctcgggcattgctatacacattttagcatataatcagcccggaatcaaggagggctcatgggaaggatcaaggaaaacgggctatactgcgcctacctgcgcaagtcccgccgggac

SEQ ID NO: 22987 - DNA, 260 bp, Unknown
  Description of Unknown: LeftRegion for integrase B9988 sequence
ttgtaacagtttcaagtattgtttttcttatgtattcaatatattgtttcatgttgcaccatcctttccaagaacatccgttcttgtttcaaaaatacatcattgttgtgatgaaatcatcataaaatcttgaacatttttttacaatattttttatacaaaaaaaatcaagaacaatcgacaaaaaaggggaaaatattatgttatacgatattaaacaaatcaaaattgaagatttaatcatctatttaagaaaatca

SEQ ID NO: 22988 - DNA, 260 bp, Unknown
  Description of Unknown: LeftRegion for integrase B9989 sequence
gaaaagaactatagactggcacttacaattgccaagactatgttaaataatgacctgatttcacctaaggaatacaagaaaatcgatgcgatgttaattgccaaatatcagcctattatagcgagtttgagggtctaattgacttgctatttacctcgaaaagagtgattaatggtgtagttggataggagctgatttaggtgcgaacaataaccaggattgaaccaaaaacttttataatcccaacaaaattaagagtc

SEQ ID NO: 22989 - DNA, 260 bp, Unknown
  Description of Unknown: LeftRegion for integrase B9990 sequence
ttacaaaaatgtaataggtgttcttataagccttgttgtattatggacagttggttatataggaacaattacagagggagaagattatggatatggaataggaacaataatacttattattaacctcccatactggcttttcagtaaacatggattcaaaaaacttttgaaggaatccagaaacaagaaaggatgattaaatgtattacaacgaattaagacactacctaccagaggaaattttagtgtacctcagaaag

SEQ ID NO: 22990 - DNA, 260 bp, Unknown
  Description of Unknown: LeftRegion for integrase B9991 sequence
ggaaaacccggggagctctgggcgcggcggggtgccatgctttcgcctccgtccccctagtatgggttcggacggccccgtgtcttcgacaagttttcgacgctcgggcgcagttggcacggttgcaccaattgtgacggacagggcgagtacggcgcaattttgcgtgcccccgacccccactccgataatcgccgaatgtgagcccctcgccctcgcccgccctccgttggatctcgtactgccgcgtctcgaccgat

SEQ ID NO: 22991 - DNA, 260 bp, Unknown; identical to SEQ ID NO: 16263
  Description of Unknown: LeftRegion for integrase B9992 sequence

SEQ ID NO: 22992 - DNA, 260 bp, Unknown
  Description of Unknown: LeftRegion for integrase B9993 sequence
gggatttgtttatgataatagattcgaatacctttctccgtttggaaatataatagtttatcgttcatagtctataccctaaaccgatatccggccccccaaactgtttctacatattgtacgaaaggaacatatatggtatgcttgtattaagtatttaatgctaattatatcatataaaactttggaggaattcatatatggcaaatttaagagcaaaaacaaaaattataaatattgatcccaataaagttgctatt

SEQ ID NO: 22993 - DNA, 260 bp, Unknown
  Description of Unknown: LeftRegion for integrase B9994 sequence
ataaagaacatcctcgcggattgtgggggggaccttgcaggtgctttcccgcagattatggagaagcagaacacgctcaaggccaagaccgcctctatcctcgacagcctcttgcaggccgacgttgcggccttaaaggatagcaacaagtaacctttcggcctgcgctccggcgcgggcctttttgtttggaggttatcatggagcagtatctcatatacctgcgcaagtcccgttctgaccttgaggccgaggcgcac

SEQ ID NO: 22994 - DNA, 260 bp, Unknown; identical to SEQ ID NO: 16348
  Description of Unknown: LeftRegion for integrase B9995 sequence

SEQ ID NO: 22995 - DNA, 260 bp, Unknown
  Description of Unknown: LeftRegion for integrase B9996 sequence
cgtgacaattgcttatcgcattaactcgcttgattatcctgtcaatctggtgttcaccacacgacgtccgtcggatgcagaaccggcagtctgggtgatcacactgacggaataaacaaccggcgcaactggcaggcgcgccggttgtttattccggttcattactccggatcgttccatatgtcaagaataatcatatcatgaacctctccccattctcccgcggtgacaaagtcgtcgcgtactgcagatattccggc

SEQ ID NO: 22996 - DNA, 260 bp, Unknown; identical to SEQ ID NO: 22989
  Description of Unknown: LeftRegion for integrase B9997 sequence

SEQ ID NO: 22997 - DNA, 260 bp, Unknown
  Description of Unknown: LeftRegion for integrase B9998 sequence
gtgcaagcactgaaggaaagtttattatcatacagacttgcatgaaccaaaaagaagcatcaaagagcagtgccgtataataccgtttaaatctcgttaatctgagattctcagactgtctatataatttctctatatatttaatatataagagactttatagtacctgtctgagattctcagactggaaaggaatttctatgtacgaagatattaaaaaagtctgtctatatgcaagattttcaagccataatcagaca

SEQ ID NO: 22998 - DNA, 260 bp, Unknown
  Description of Unknown: LeftRegion for integrase B9999 sequence
agtgcaagttttatattcaggaagatacagggctcaaacatatcatagaacaaaaaattgactttacagatttgaaagtatccataagattatactatgagaatgaggtaatttgttttccaagtgatagatagtgtgtatactaaatactgtctatcataatggacagtttgcttggtatacattaaaatgggggtactatgaaactaagatgttatgtgcgaatttccacagaagggcagcaagacaattattctatc

SEQ ID NO: 22999 - DNA, 260 bp, Unknown
  Description of Unknown: LeftRegion for integrase B10000 sequence
aacacacaaggccaaatttcggttctcgtgatcgttgattacgccgaggagcagggctggattactgaggagccgaaggtcggcgatgagatcatcgtgatcggcacttacgcaggctttggtgttccgtcgttcatgaataagttctatgtcggccatgatgagtacatcgacggcctgatcccgaaggggaagtaatcatgaaaaaaaccacatctccacgcggcaccgtcgccgtgatctacgcccgctattcctcg

SEQ ID NO: 23000 - DNA, 260 bp, Unknown
  Description of Unknown: LeftRegion for integrase B10001 sequence
gtttaatcactgatgaagaaaggcgagaaatattaaaacgtgttgaagataaactgactgaagatatttaaattggtcgctgacgaaataaagtggtcgcggcagtataagtatgtgaaggcggcaaaaacacttatttttttaccccaacgaatcccaactatatatagggttaggaattataaaaaaggaggaactatatgagaaaaagagctgttgcgtatgcaagagtatcttcaaattctgcaagccaagagcat

SEQ ID NO: 23001 - DNA, 260 bp, Unknown
  Description of Unknown: LeftRegion for integrase B10002 sequence
acctgcccaagatccaccgtctgggatgaagtagaagaacggagggtttctgtagattattgggatgttgaagattacaaactgacaaccctttgcgattattacaagatctatcgcgatgacgcacatcgttctctttctgattgctatgctacagcattgctgtttgaaaacctcatcgaagacaaaatcaataaaccatgaagaaaaagatcgatgattgctctgggaagaatgctgtcatctatgcccggtattcc

SEQ ID NO: 23002 - DNA, 260 bp, Unknown
  Description of Unknown: LeftRegion for integrase B10003 sequence
aaaggactcataaccgaggaagagcgcgacaggctatacgaaaagaatccgtataaaaatctttgagttttggcaatttttcgctggacttgtcaaagtgagcacggtatgatttgtcctgcccacgacgggtaggacaaatttttttaccctacattcaaatccataacggcaacatagtgtagcggaaaggaggcaatatggcaaaacaaagggcggtggcatacatccgagtatccacgaaaagcgatgcgcagtcg

SEQ ID NO: 23003 - DNA, 260 bp, Unknown; identical to SEQ ID NO: 15182
  Description of Unknown: LeftRegion for integrase B10004 sequence

SEQ ID NO: 23004 - DNA, 260 bp, Unknown
  Description of Unknown: LeftRegion for integrase B10005 sequence
gattcttctaaaaattataaaaagataaaaatacataacatagaatatttaagagaaatcgatctaaagtcatttttatttacatacataatgaatgaactagataaaattaaaaataaaaattattgatgaaaataaaaattagctatggtataattatccatagcttttccttttatttcatggaggactgataaaatttgaaaacttgtatttatgctagaaaatccacacataaacttggtcaaaaagaaacaata

SEQ ID NO: 23005 - DNA, 260 bp, Unknown
  Description of Unknown: LeftRegion for integrase B10006 sequence
atcgacatcatccgagtgtatcgttccctggacagacgagccaagcatgagttcatggctactgtttttgagtacgagaaattgggggatggagcaaaaactcagtcttctgctggataaaataaaaaatctacgcatcatcccgtatgagatgtgcgtagaaatccataaactaaaacaagagattgcgaggtgagatgatgataaaggcggttatatatgctcgatactccagccataaccagcgggaggagtccatc

SEQ ID NO: 23006 - DNA, 260 bp, Unknown
  Description of Unknown: LeftRegion for integrase B10007 sequence
cgtttcctgttttgataccatgaacctttcacgttactggcctgaagcggaaaataaaaaactaaccaccctcgcatctgccgccggtatcgaaacggctgaggcccatcgcgcactcggcgatgctcggactgttgccgccctcattgatgctacaaataaacgccgcgccaataagtcaaagaaataaggaggcactcatgcctgagtcccttaacgcggtcatctacgcccgctattcatctcactcgcagacagaa

SEQ ID NO: 23007 - DNA, 260 bp, Unknown
  Description of Unknown: LeftRegion for integrase B10008 sequence
gagcttttaaaactgtctgcttgtttcggtgtatcaattgatgaaattttaggaaataaaattccaccaaaagaagaatatatttccgtttccaaaagacatctagacttaaattttaaaattgcacagttatctggtgaagatttggatttcgttgaaaaagccatcgatatggcattagaaaggaagaataagccatcatgacaaaggctgtagcctacgcccgttattcatcagataatcaaaccgataacagcatc

SEQ ID NO: 23008 - DNA, 260 bp, Unknown
  Description of Unknown: LeftRegion for integrase B10009 sequence
tatggttatttgggaaagggctcggcgttgtttgattatagtaactgtgtaaggggatacagaatacaagttttcaataatgatgaactcgtttccacttcttactgcccacaacatgaactgcaaaaatatttggagataataaagtatgaaatgtctataaaagatagtgtgatcacaggcagtaacttaataataaaatgaaacgagccatcggctatgcacgtatatctgatgaagatcagtccacctggtcgctg

SEQ ID NO: 23009 - DNA, 260 bp, Unknown
  Description of Unknown: LeftRegion for integrase B10010 sequence
tgtttgtggttacacttgtagccctgacctgttatctggtttgggatatcatgcacccaggtgcaggtttgttccattggtaaaaaagccgcccctgtctgactcacaggagcggcaacacaagaaatccacacatccgaaggggattttctatgcccttttatcatagcaaatccctccgcaaattgcaaggaggatttatgagagaacgaattccgggcgctatgataaacgcccgttactccactgacaatcagaat

SEQ ID NO: 23010 - DNA, 260 bp, Unknown
  Description of Unknown: LeftRegion for integrase B10011 sequence
atctattcaggtctctgccaggtatccggtcgtggcaaaacaaaagaagagttagtgtttaaagtgtcagatgctgatgctaagtcattttccgatattcttaccctgtgctttacttatgagattcgtaacaacagtttgtttttgctatattctcaggatgctgtaaaagaggatatttactggtaaggaggctctccatgaaaaagaaaatcgttactccctgccttcctaaaatcgccgtcatctatgcccgctat

SEQ ID NO: 23011 - DNA, 260 bp, Unknown; identical to SEQ ID NO: 16388
  Description of Unknown: LeftRegion for integrase B10012 sequence

SEQ ID NO: 23012 - DNA, 260 bp, Unknown
  Description of Unknown: LeftRegion for integrase B10013 sequence
atcatctctttcagcgagtacgactttgctgatggaaagatgctcgacttcggtatgtatccgaccggaaaaggaaagcggtacaacatcttctgcaccttcagctctttcgggttcgaaatgctgtctgatgaaacctatcacttcacggccacctgcacggagcaggcaaagctcttctgtgaaaagcgaggaaagtaatggacagagccgtcatttatgcccggtattcctccgacaaccagagggatgccagcatc

SEQ ID NO: 23013 - DNA, 260 bp, Unknown
  Description of Unknown: LeftRegion for integrase B10014 sequence
gcccagcagcagaagtccctgcacatgcaccgacttgtgacgctcatcctcttgggtattcttttgctgtgcgcccttgcgcttgtggccgacgcgctcatcccatcgatcggctggatccgcacataaataaaaccgccccggcccagcgccggagcggtatccgtataaccttttgcccttgtggtgagaatctgcctatgaaatttacatctacctggaaaatctccgacccgctcgcgcagtacatcatttacctg

SEQ ID NO: 23014 - DNA, 260 bp, Unknown
  Description of Unknown: LeftRegion for integrase B10015 sequence
gagtgactttgtaaagattgatgagtttgatgaaactaaagtaaacaagtttatagaagaaatcatcatagataactaccaagtaacattctgctttacaaatggtattagcatatcaagaaagtatactaatggaccatcaggtaatcagaaaggttggaaaaataaacaacaaagaaatagttaaggaggaatagaaaatggaagaaagagtaagaaccgttaccgtaatgcctgcaaccttaagggcaaacctatcg

SEQ ID NO: 23015 - DNA, 260 bp, Unknown
  Description of Unknown: LeftRegion for integrase B10016 sequence
gctcagcatcagaagtccctgcacatgcaccgacttgtgacgctcatcctcttgggtattcttttgctgtgtgcccttgcgcttgtggccgacgcgctcatcccatcgatcggctggatccgcacataaataaaaccgccccggcccagcgccggagcggtatccgtataaccttttgcccttgtggcgagaatctgcttatgaaatttacatctacctggaaaatcgccgacccgctcgcgcagtacatcatttacctg

SEQ ID NO: 23016 - DNA, 260 bp, Unknown; identical to SEQ ID NO: 16438
  Description of Unknown: LeftRegion for integrase B10017 sequence

SEQ ID NO: 23017 - DNA, 260 bp, Unknown
  Description of Unknown: LeftRegion for integrase B10018 sequence
ggaacagataggcgccgaaattaaacgtcggcgcaagctgaagaaaataacacaagagaaattatccgaaataaccggaatcgggcggaccgctattgctaaatacgaactcggaacaatagagctcggcatctcccacttttctataatttgcgatgccctgggatgcacgccggcggaattttggcgggggttagacaatgggcaagagtaacgcggtaatatatgcccgctattcttccagcggtcagcgggaagaa

SEQ ID NO: 23018 - DNA, 260 bp, Unknown
  Description of Unknown: LeftRegion for integrase B10019 sequence
attgcacttatctttttgattatggagttgaaatatattaaaaataactgattacataaagccccctgtgctggtaacacagagggcaaaaagtaatataccggcaaggcgccgatacgatataaaagtgcacttctattgtatcatttcgcgacttgtctgtaaagaaatacacaacatttaaaggaggaaatgatacagtgaacgcagtaatatacgcacgctacagcgccggacccggccagaatgaacaatccatc

SEQ ID NO: 23019 - DNA, 260 bp, Unknown
  Description of Unknown: LeftRegion for integrase B10020 sequence
gaagaataccttaaaattgatattggattgaaagaataataaatcttttcatatcttagaaaaaggaaattaggaatagtttccttttttattgattggtaatgaaacagttaagcattattttaatatgtcaccttctttaacggatgacaaattgaattaattgtattatatttgtaatcaaataaataaccatttttatgaaaccaatcgtaatttattccagggtatcgacaacaaaccaaaactttgagtcacaa

SEQ ID NO: 23020 - DNA, 260 bp, Unknown
  Description of Unknown: LeftRegion for integrase B10021 sequence
ttcaatcaattatctcaatactatgtttcagcttagagtaatggcgagacaaggtttaatcactgagaaagattacattcaaattgaagaaaaaatggctaataaatacaatcaaaaagaaacgagtttatatcgtttaaatgacttgataatatccccttttagagtgattaatataatacaagaaaaggagtgatattatggcaaaaataagagtaataacaaagcaacttggacttcaaaagttggtaaatgttgct

SEQ ID NO: 23021 - DNA, 260 bp, Unknown
  Description of Unknown: LeftRegion for integrase B10022 sequence
gagcgctacgtcgcgctggtggaaggcctgccgatcggctgcttcccgacctcggccgaggactatctcagcagctacaccggctttgaagccgcgatcctggacatcaccgagcgcgacagcggcctttacgccgtcagcgtgatcgtcgccccggaataaaaaagcgccccggccggggcgtgaaagaaggtgatcccatgccgaccgtgaagcccgacgggctgtattgcgcctacctgcgcaagtcgcgccgcgac

SEQ ID NO: 23022 - DNA, 260 bp, Unknown
  Description of Unknown: LeftRegion for integrase B10023 sequence
gatcgtctctgcaaagcgggccggatgtacgactgtgtatgaagctgcggagtatctggatgtaccggaggattttttgaaggacgcgatccaggcttaccgatcccgatacggggaacagatcccctatcatggctgtatagtatgcttcgaaccgtatcttgatgtgcttacagaatcagaggcaaagaggagatcacatgactggtaaaaacgaaatggctgtggtatatgcacggtattcatccacgtcccagcag

SEQ ID NO: 23023 - DNA, 260 bp, Unknown
  Description of Unknown: LeftRegion for integrase B10024 sequence
ggcaggaatatatcgaagcgctcaaagcttccgagaagtacaacaacatgttggctatcgtcaactttttctacaacacatcaatcaagagaatgcaaaaggaaataggtcaaaaaaaaaacctttcgaagaatttcaacttgggttttgaggacgggaataaaagaaaaaagggttttacaggtccaaaaagatagcatatgaacttagaggtattcgagcaattcgcgaaaaaggaaaagggcaggatcataggtaaa

SEQ ID NO: 23024 - DNA, 260 bp, Unknown
  Description of Unknown: LeftRegion for integrase B10025 sequence
ttgagattggcctgggcgccggcgccgggatgctatcggggaaggccggatcttcgtttttactgaacggaaatctggcgataagattttagccttcatgaaaacaatccttcgatttaaacctcttgcgagccgtaaaccggctctttttttttcaaaaagtgcttgatgatatcttaatatcggataaaaattcattcatgaatgaattggctcgagatatcgccctgtcccgggataaggggttggttccggctttt

SEQ ID NO: 23025 - DNA, 176 bp, Unknown
  Description of Unknown: LeftRegion for integrase B10026 sequence
ggttgacggtgatccgcttgggcggcagcgaaaggccgatcgcggcaatggcgttgcgcacccattttgtgacggttgtagagaaattcctaacgcaaccgtgacaggatgttgggatgacgcaagcagctataatctatgcccgcttttcaacctcagaacagagcaagggccac

SEQ ID NO: 23026 - DNA, 260 bp, Unknown
  Description of Unknown: LeftRegion for integrase B10027 sequence
atacatactactagaagataaataatttatatgtttttttaaaggtatatagtaagggtggtagatttatggaaaataatcaatatgtagcagagttaaaaaagaatgaagcaattaaagtaatggcacagcttattagaaagtatatgaaggaattaacaaaagaaggataggattaaatattaagggaagggaaaaaaatgaataagaaggtaaaggcaggaatttatataagggtatcaacagaggagcaaaaacaa

SEQ ID NO: 23027 - DNA, 260 bp, Unknown; identical to SEQ ID NO: 22559
  Description of Unknown: LeftRegion for integrase B10028 sequence

SEQ ID NO: 23028 - DNA, 260 bp, Unknown
  Description of Unknown: LeftRegion for integrase B10029 sequence
ttcctcgaagacaataaaaaaccgtttgtctgcggcgtcaaacggttttttaggaggagtatttatgaaaaaactctgttctgtaaataattataccataaataaagaaaaccaccttttttgattggggtgaaggtggttttcctctgatgagatgagactggataaaatggatttacccttatgaaaagtattataccatgattccgaacatttgcccatttaataaaggcgataaagtagtcggttatgccagatat

SEQ ID NO: 23029 - DNA, 260 bp, Unknown; identical to SEQ ID NO: 22583
  Description of Unknown: LeftRegion for integrase B10030 sequence

SEQ ID NO: 23030 - DNA, 60 bp, Unknown
  Description of Unknown: LeftRegion for integrase B10031 sequence
gggacatcattaaataagcgtgaccagtttaatgctatgattgcagatgcaaaacatggg

SEQ ID NO: 23031 - DNA, 260 bp, Unknown; identical to SEQ ID NO: 22667
  Description of Unknown: LeftRegion for integrase B10032 sequence

SEQ ID NO: 23032 - DNA, 260 bp, Unknown; identical to SEQ ID NO: 22665
  Description of Unknown: LeftRegion for integrase B10033 sequence

SEQ ID NO: 23033 - DNA, 260 bp, Unknown
  Description of Unknown: LeftRegion for integrase B10034 sequence
agaccacattggataatatccatacatcctatgcagccgaaatacagaccattcgtgatgaatccaaagaaaaaacaaaccagcttttgacgcagattgaaaggctcagacaagagattgattatctgcgcttagaaaatgacagaaaggccaggattattgataaatttttagacaaataaaagaaagaagtgataaaggtgacagtatttgaagcgcaaaacgccataaagagagcaaagataatagattctaagatg

SEQ ID NO: 23034 - DNA, 260 bp, Unknown
  Description of Unknown: LeftRegion for integrase B10035 sequence
cataacgaatataaattttcggttgaaatgtcgggaaacgtcgcaaatattatattgattcaaccgttagttcgctatcttgattcgcttgaaattccgctcgaacattgcgggcgttctgacgtcgaagacgctgaataagcataaaaaaagcgaccgtccgaagacaagtcgcttaatagcataaggagaatacaaaaatggaacaatgcgttctttatgcgcgcgtatcgtcaaaagaacaagaacgcgagggattc

SEQ ID NO: 23035 - DNA, 260 bp, Unknown
  Description of Unknown: LeftRegion for integrase B10036 sequence
atatagaatacttattgagtaaaggaatagcagaaatgctgttgaatcatggcttaataacaagtgaagaatataaggaattggacaccctaaacaaacaaagttttatttgttaaaaaagtcttatttctttcagatttcgctggacttttgaagttctttgcggcattgtttgattgaccaaaaatggaggtgttaaattggcaaaagtaaaaaggatagataatgcaaacattgagattccttgttgtgcttatgca

SEQ ID NO: 23036 - DNA, 260 bp, Unknown
  Description of Unknown: LeftRegion for integrase B10037 sequence
aaattcgacaaaatttgacaatcgttttgttgaagaaaacatcaaagaaattagaatatctggatacactgcaattgttatattaaatgataaaacgaaaattataaaagaatggaaggttcattcaagaaaagactcgtggactaatgaaatgaaagaaagtgccagaaaacgagaattagaaaggttaggtaaatagtatggcgaagattacagtaatacctcaaacaagaaacactttaacaagaataccaataagc

SEQ ID NO: 23037 - DNA, 260 bp, Unknown
  Description of Unknown: LeftRegion for integrase B10038 sequence
gaaggaagctaagtatcagtctgccatgttgttgttcaggggctggctggagcagggcatcatcacgaaggcagattatgcaaaggcagagcagctgatgcgcgaaaaatatcatccgcaattgggcacattattctcggacacagcgttgacttaattttcaagtagagtgatatatagtagggaaaggaggctacagcatgaagaagatagaacgaatcaagccaagcatcccaaaaattaagcgaaaaaagcgtgta

SEQ ID NO: 23038 - DNA, 260 bp, Unknown
  Description of Unknown: LeftRegion for integrase B10039 sequence
ataaaaattgactatatatactcttttctgtacaataacaataaataaacaaataataataactatataataataattatctttatttattagttatatttagttatatatatactattgttttatagtaatagtatatattattaaataacaatgtctgtaaatagtcaaataacggtcaaataacagtcaaataagccatgagaaaaattattgtcgaaaatttaattgaagccaagaatcagacaaaacctaccgct

SEQ ID NO: 23039 - DNA, 260 bp, Unknown; identical to SEQ ID NO: 22670
  Description of Unknown: LeftRegion for integrase B10040 sequence

SEQ ID NO: 23040 - DNA, 260 bp, Unknown
  Description of Unknown: LeftRegion for integrase B10041 sequence
gtggcattcgtttcctgacgcgcatgaacatggatctccgcgcgatggggtatctgccgcaggagcgcgcggccgcgtgaagcacgtttcgatccccctccagcgatcatcatcgccgccggaactgatcgagttggcgaaggcgcttgcgcgtctcgcagtgaagcgtgacatagcagctgctcgcaaggacagaatcggtgcgaaccctcctctacgcccgctatagtagccagctacagaacgcccggtcgatcgag

SEQ ID NO: 23041 - DNA, 260 bp, Unknown
  Description of Unknown: LeftRegion for integrase B10042 sequence
caaagagatctgcgaaaatcttatattcttgtaaatccaggttcttcagttgaacttgaatttattccgatccgatccggtcaggatccggaaatccgtatgatcgacttgtccggacaataaaaaagaccgctcatcccccgaggcggtcttccttcgatggtctcccatcggatgccaactgatatagatattttatcatgacagtaagcacatctccttttaaaattggcgacaaagtggtcgcatactgccgatac

SEQ ID NO: 23042 - DNA, 260 bp, Unknown
  Description of Unknown: LeftRegion for integrase B10043 sequence
tgaaaaaaactaccttaattctattattcaagcaatatctatggttaaaaaaggaataattgaaattgacgaatttaaaaaaattgaagctaaattggcacaaaaatattgtattaagaaaaccaatttatatcgttcaaatgactggataaatacttaaaaaagagtgatatatatgataccaagtttggaggtgcaaaatggctgaaattaagataattcctaaagaaaaagaaatgccaaaattaaagaaagttgca

SEQ ID NO: 23043 - DNA, 260 bp, Unknown
  Description of Unknown: LeftRegion for integrase B10044 sequence
aatggtcgtttgcaaaaaatctgccgtatggttggaagatgttgaaggcaacaaatatgcacttaacggcattgcaaaaaatatgttaaaaagtgatagtaaatacaaaggcggcacggatctaattttaaaaaatggcatggttgatttatacacgccaaatgacgctttaaaattttgtataagaatggattaaaaaaatggcaatagatgacgcaatattatacacccgtgtttcatctgacgaacagaaaaaaagc

SEQ ID NO: 23044 - DNA, 260 bp, Unknown
  Description of Unknown: LeftRegion for integrase B10045 sequence
cgagactcagggctttgataagtatgacgagatccagtactgggcggttgccgatatggccgacggttcagagtcgaaggtggtcgcgttcactctcgacaaagatctgatcggaaagatcgccgccggatcctttccagcgaacactctcggcgactatgtgaccgacctgtggatcttgccgagcttggagcagtaacgtggctatcaaaaaagacgagagccgccagctgatccgggcggttatatatgcccggtat

SEQ ID NO: 23045 - DNA, 260 bp, Unknown
  Description of Unknown: LeftRegion for integrase B10046 sequence
gaaagagagaaaaattatcaagtatctcttttagttgcaaagaatatgctagaggagaatcttatagatcataaggaatatcagaaaataaacaaggccttagtaaagaaatataaccccataataggtgggttgtatgcttaattaacttgctatgtatcaaaattagagttaacatcgtgctgaagggaggtggggaaatggctagaaacatcataagaatcaaggcttcgaacattaaacagcttgaaagaaaaaaa

SEQ ID NO: 23046 - DNA, 260 bp, Unknown
  Description of Unknown: LeftRegion for integrase B10047 sequence
tctgtggacaacagataaaataaaaaatcccctcaccgactgcaatcagtgaagggattcgctgggagtattgctacccgaacctcgacaggtaaagtatagcatatctccgggaaaatgtcaataattcgttgaaaatcgatgttttcagaccgatttttgcaaaatttctgcaaaaatcgcagataaggaggtattctatgccccgaaaacgctctaccctgccctccggcagcatcggcgtaatctatggccgatac

SEQ ID NO: 23047 - DNA, 260 bp, Unknown
  Description of Unknown: LeftRegion for integrase B10048 sequence
cacaaaatcgacttataacaaaaacaagtatgttctacttctttttgtccgagagtcaaaatggatttagaaaaagcaaaaaaaattgtaaacaaaaacaggaaaaaagaattaacggaagaccaaattaaagaagtactcgcactggcagaaatgttagccagttgcactataactaatcttaaaacaggaaggctaaaatgaaaaatgttatactttacgtgcgcgtgtctaccgatgagcaagcaggaagaggatat

SEQ ID NO: 23048 - DNA, 260 bp, Unknown
  Description of Unknown: LeftRegion for integrase B10049 sequence
tttgcatgaacgtgtgaaaataagttgtgcaatggcatggcaaataatcctttgtaacaaatgtttgatgaggatgaattgaaagtttatgataagaaatttcaagcaataggtattttagacaaagaagaacaaaaaaagatactggagttcttctatacattaggtgttattacgtttaacctttaatttaatgattgatgagtaagaaaaaaagtaaagagaaagtagtagagttttctaaattgacaaataaagta

SEQ ID NO: 23049 - DNA, 260 bp, Unknown; identical to SEQ ID NO: 23007
  Description of Unknown: LeftRegion for integrase B10050 sequence

SEQ ID NO: 23050 - DNA, 260 bp, Unknown
  Description of Unknown: LeftRegion for integrase B10051 sequence
cgaggtcgaggtgatgctgactcagaccaagccggcgcccgagaggcggcagccgaagcggatcggcaaggtgaccaccacgacagaggtgtccggcgacgttctgtagggtgcaagcccctgacctgcgacgacgctgacacaggtaaataggaatccgccggggcggatcctcatttacatggtgtagactcagggccatgaccagcacgaactcccgcaccgcaagaccggcccggcgcaagctctccacctcctac

SEQ ID NO: 23051 - DNA, 260 bp, Unknown
  Description of Unknown: LeftRegion for integrase B10052 sequence
gcaaccttcaaaactctcctggttcgaggcacgataacagccgatgaatacggcataattgatacaaagatgcgggcaaaatactctccattattaggtagtttataccctcaaaatgacttgataaatcaaggaaatgacggtaatatgtgtaacaccgaagatgtatctgatggtgactaataaaggaggtgttccgtatgaaaaagacaatacgggttattgaacccaccataccgcttctcaaaaagaaaaagcgt

SEQ ID NO: 23052 - DNA, 260 bp, Unknown
  Description of Unknown: LeftRegion for integrase B10053 sequence
cagctttggaaattgaacagatgaatttggaattgtaccagcaggaggccaaggcaaatctgttacaacaaggggaatatattgccaagttggtaaaagaaaacgatgatttgcagaagaaaaaggatattcttgaggaaaagatacatgccttagaggcagaagcagcttcaaccgattcggaatcagggagtgattaaatggcgaaaaagcagaagccgtctatggttccgataacagccgccgtttatgcccggtat

SEQ ID NO: 23053 - DNA, 260 bp, Unknown
  Description of Unknown: LeftRegion for integrase B10054 sequence
acagctgagaaaatgcgggactatattctggagtgccagaagccgaagaccgtaatccagcaggttgtcgcaactgctccggcagctcaggttgacacaacagtcgatcagataagacggctgaagtctctgctggatgaagggatacttacccaagaagaatttgatgcgaagaagagaaagattttggggatttgaaaatggaatcagccgtcatctatgccaggtattcatctgataaccagagggatgccagcatc

SEQ ID NO: 23054 - DNA, 260 bp, Unknown
  Description of Unknown: LeftRegion for integrase B10055 sequence
actggcccaagttcctggtcgtcgccctgtccacgctggtctgcggcctgttcgggctgtgcctcggtctcctcgcctccctgcctatgtgggccatttcaatggcgctggacgatatgcatgccatgcgccagtacatgcagggcttcgtcgtcatcggcgataagcaggatattcaatgatcttgactggagggcaatatgggaagcatcaaaccaaacggcctctactgcgcctacctgcgcaagtcccgccgcgac

SEQ ID NO: 23055 - DNA, 260 bp, Unknown
  Description of Unknown: LeftRegion for integrase B10056 sequence
atcgggtcgctatggcgatggcagaagaaatgctgtcccagggcattatcacgaaagaggaatatgataaggcagaagaaaaaatatgtgagaaatatggtatcaatttcagcagtattttccgattatgtggctcgaaataactggatatgtttcggctttagaggtaatatacgactaccctaaacaggaggtgtgaaatggagcgaattgtagagacaatcaaatccagatatgacccgaaaatgaagccgaaacgt

SEQ ID NO: 23056 - DNA, 260 bp, Unknown; identical to SEQ ID NO: 16646
  Description of Unknown: LeftRegion for integrase B10057 sequence

SEQ ID NO: 23057 - DNA, 260 bp, Unknown
  Description of Unknown: LeftRegion for integrase B10058 sequence
atgacgcacgagcagtttcaacgtgaaaagaattatagagtaactttatcaattgtaaaatcaatgctaaaacaaggggtaatctcggacaaagattattgtgcaattgatacaatgttagtggctaaatatcgccctgtaactgcagtttataactaaaaatcacttgatatgtatcaacataagagttaacatagacagtgaaaaggggtgattacatggcacgaatcataaggaaaatagagccttcggtattaaaa

SEQ ID NO: 23058 - DNA, 260 bp, Unknown
  Description of Unknown: LeftRegion for integrase B10059 sequence
gcatataaaaccacaatggcggcttttaaagttatgttgaataaaggtcttatttctgcttctgaatacaaagatattgacacaaaaattgcacaaaaatacgggttatctttgtcggttatatatcgataaatagtgcctgaaacccttgactttacggcactttagagcaaatatatggtaaagaaaaggaggtaaaaatggatagaataattaagcaagtggtgtttgctgcacccacaataataactgcgttaaag

SEQ ID NO: 23059 - DNA, 178 bp, Unknown
  Description of Unknown: LeftRegion for integrase B10060 sequence
ctccgcaggtgcgggaacacctgcagagctggagcgagaacaccgaaaagtgcctctacacacgcgtctattatagcatcttttcccggtgttctcaataaaaagggaggatgctgtcttgaactttgccatttattccagaaaatcatatttcacggatacctctgagagcacaaag

SEQ ID NO: 23060 - DNA, 260 bp, Unknown
  Description of Unknown: LeftRegion for integrase B10061 sequence
cacagacttgaaacattcacaatattatcactcggaactcttagtgtctcctgattataaacgttttgagaaagataaggatattacagagtatactttcactgtaaaagacggagattatattcagataaaaaacgcatccgttatctttacacctaataccggaaagccttccctgggattcaaataaggaggccatcatgtccaccgctaagaagaagctgacaacctgtgaaccgaagacggccgtggcctatgcc

SEQ ID NO: 23061 - DNA, 260 bp, Unknown
  Description of Unknown: LeftRegion for integrase B10062 sequence
acagaaccgatgtcaatatatttgagggagacaaatggttctgcacggaagctgaagccattgcagcaggcttccgaagacctgctaatgccggctctgctgtctgcgaagaatgaaaagaaccgcagatctgcggttctttcaactggatggataaaaagagatgatatgaaaatgtttccctcaacagcaattataccatgatgcaaaatctatcaccatttaaacaaggcgataaagtcgtgggctactgccgatat

SEQ ID NO: 23062 - DNA, 260 bp, Unknown
  Description of Unknown: LeftRegion for integrase B10063 sequence
gacctgctggatgccgtcgccgccaaactcaaccggagaacgtcatgaccgccatggccacgcccgcatgatcgccatcagcccccccgccctggccactcgcacacgcgcccgccccctggtctgccgaggcgtctatggcgtccccggcggggacgggctagactccctggctcgtctcctcctgtccatcgccgaagatgaagccgaccagtccgcttgccagcccgacccatgcctgctgttacctcagaagctca

SEQ ID NO: 23063 - DNA, 260 bp, Unknown
  Description of Unknown: LeftRegion for integrase B10064 sequence
atggtcaaggatctgaagagcaatgtttccactatgcagaattcgttcaatgagctgaaccacgatgagatcacatgcgtcctgaatctgtgcgatcctatcaaccgagatgtcgtttatctctcaatagcacagggagtggccggatacgatgctgtcaacgggatcgacctgctgaacaatccggacggtaacgcctgatgaccaagaagaaagcaccacagccgaagagcggcaaggccgtcatctatgcccgctat

SEQ ID NO: 23064 - DNA, 260 bp, Unknown
  Description of Unknown: LeftRegion for integrase B10065 sequence
attcattaattgattctacgaagggaactgaaatatctttcaacctaagcgaaaataggattacagcttatgtagtgcccactttatatggtcatgtattaaatcttactattactgacattattggcactaaaggtaaatgcacattaaacagaaaatcaattaaaaagctatttaacaaacaagataactaatactcaatgccccaagctgtagcctattgccgattatctgacgctaatgaacgttcaggatctata

SEQ ID NO: 23065 - DNA, 260 bp, Unknown
  Description of Unknown: LeftRegion for integrase B10066 sequence
ttctaattaatttaataattttattattaatattcattatatcagatttttgtgatttttatacctactaaatcaataaaaaatatcaattttaataaattttttagttctaaaaggataaatccctttccatatagaatactactctataacatcactcatcaatcatctctaataacatattaataggagcaaaccacatgaaaaaagatttaatttccgccgtagcatactgtcgggtgtcaactaaatctactgat

SEQ ID NO: 23066 - DNA, 260 bp, Unknown
  Description of Unknown: LeftRegion for integrase B10067 sequence
tccgcaatcaaaacgacgacatcataaaagttcttgattttaagaaccctccctataaggatgtccatggacactcgcaagattatcgtattgcaaaaacggcatataactatgccagggagaaatttcaatatataaaaacactcccctactatgaccatgccagccaatcgtataaaaaatagtcggaggtgtgatttatgtttacaaccatggcaccccaggccgcagcagtatattgccgggtatcgtctgaagcc

SEQ ID NO: 23067 - DNA, 260 bp, Unknown
  Description of Unknown: LeftRegion for integrase B10068 sequence
tattattcgtttctatatggcacttgcacctcttcaagcaatggaacgaaaaggtataatcactcacgctgaatttctcaaagcggaggactttttggctaaaaaatattatctaaaaaaacacaatatttataggcaaaatgacttgataaataattcaaaaagagtgatatatatactaccgcaagaggaggtgcaaaatgatacaaaaaacgataacgacaatagaaccgttaccacagttagaaaggttgattaga

SEQ ID NO: 23068 - DNA, 260 bp, Unknown
  Description of Unknown: LeftRegion for integrase B10069 sequence
gtattttatttccattttgaagtatcattcctcctaaatttattgcatcgatgcgtgtataaattatcatttttattgcattcgggtcaataacactttttgtataaaatgtcattattctaatctagattaaaatatattgcacattggtatcatatattgtatgatgtatatcaaatagttattaggaggaaagacgtatgaagttatttgataacgatggtcctagaaataatagaattagaggacacgtagataaa

SEQ ID NO: 23069 - DNA, 260 bp, Unknown
  Description of Unknown: LeftRegion for integrase B10070 sequence
tcaggccatgaacgcactgtccctgcgaatgctcaaagagggcatcatcacgcagaaggaatacgcccgcatcgagaatggcctgaacgataagtaccagcccattttccgcgcaaaataaagatcattttggcccgggaattgacttgataatttcccttttcagaggtaatatgcaacaccacaaggaggtgacaatcgtggaaagaaccataacaaagatgcccgtgctgcccaagatgcctgtacgcaagcgtgtg

SEQ ID NO: 23070 - DNA, 260 bp, Unknown
  Description of Unknown: LeftRegion for integrase B10071 sequence
gggaagggaagaccccggacgatcagctttccaggatcgagttcgccttgtcaggcgagatcaagcagctctccgacatcgaaaagcaggatatccttgactatatccgtttcaaaaaagcgcagagaaaatgatcgatgaaaaagcaaacaggtgtttgcattttgtcaacaactgaaacttaaaggcgaggaatttctatgaacgccgtaatttacgcccgttactcctcctacactcagaccgagcgcagcatagag

SEQ ID NO: 23071 - DNA, 260 bp, Unknown; identical to SEQ ID NO: 23068
  Description of Unknown: LeftRegion for integrase B10072 sequence

SEQ ID NO: 23072 - DNA, 260 bp, Unknown
  Description of Unknown: LeftRegion for integrase B10073 sequence
tttagaaatgtattacttatccatcacacccgttaaatcaatgtttgaggaggcgattttgagtaaatctgaatatcttaaagcagaagcatttttagcagacaaatattgtatcaataaaggtaacattcatcgtcttaacaacttgactaaaccccctaaaagagtgatatatggtgtaaccaaagaggaggtaaaagatgaaggaaaagaagataaccaaaatcgaagcattatccaaattaccaaagaaaactaga

SEQ ID NO: 23073 - DNA, 260 bp, Unknown
  Description of Unknown: LeftRegion for integrase B10074 sequence
tgacggaacgctctgaatatcaccgtctgccaaatatcaacgtatacgaactcgcatggaatgcctccgcagaatagtcgaatgaataatcccccgcccagctcctgccccggacgggggaacgcaaaaccacatctctgcaaaagcgggtttgctatggctattttaccatagttctcccgcaaatacaaggaggacttatgggtaaaatccgcctgaacggcctctactgcgcctacctgcgcaaatcgcgccgcgac

SEQ ID NO: 23074 - DNA, 260 bp, Unknown
  Description of Unknown: LeftRegion for integrase B10075 sequence
aagttctcctctacagaagcacaatggctgcggtcaaaattatgctcgatcaagggctgatttcgcccgaagaatacgccataattgacacaataattgccgaaaaatatgggctaaattcgtctactatatatcgctgaaaacccttgacttatcgggcttttagagcgaatatatggtaacgaattaaggaggtagatatgaatagaactgtacaaagggtggtcttcaaaaatccaccgaaaccccaggcgacacgg

SEQ ID NO: 23075 - DNA, 260 bp, Unknown
  Description of Unknown: LeftRegion for integrase B10076 sequence
tcatggggattctcctttcggtacggggcagaacaggaacacctgttccactgaattatacaataatagtaaattgtctgacaacgtacaaataataccaagaaatccacaaaaatcatgtcgaatcctgaaaggtggtgatgctttttagatcgagcctgaaacgctcacaactagactaaacataagaaggtgaaaacatgaccgtttttgaaatgaacaggtcaattgaaaatgccctgaatcccaaaatggaacag

SEQ ID NO: 23076 - DNA, 260 bp, Unknown
  Description of Unknown: LeftRegion for integrase B10077 sequence
ttgacgcaggtcttatcaccatcaccccttccatgaaaatctatgtttcgtcatttttgacaaatgcgcctcaggacgattttacggcccgctggctggtctctctgaacggagccttctgcccccccccgatttccgccgcgtaaagagttcttagagtaccacaacgacgaaatttttaggaggtaggcagaaaaactatggacacagtgatttatgcgcgctattctgccggtcctcgtcaaactgaccaaagcatc

SEQ ID NO: 23077 - DNA, 260 bp, Unknown
  Description of Unknown: LeftRegion for integrase B10078 sequence
agatgcgtgctgtgcgaaaataagcctccggcttatggtaaaaatccctgtcctttgataggaaaaagtatgtaaattcggtaaaagcacccggataggtgaagagaatcaaccagataatgttttccatactctcatcctccttggtagtattataactggattttggataaaaaacaatgacatgtttccggtagaaggtgatagcaattcgcaaaacgaaaaaagcggcctgccgcccgaaaacggcggtggcctat

SEQ ID NO: 23078 - DNA, 260 bp, Unknown
  Description of Unknown: LeftRegion for integrase B10079 sequence
ttcaaacatctctgtcggtgtcatacactcgccccctttcaagccaaataatagaacatttgtttgatttgacacaatagtaaactaatggaagtccgatagtacggacagtatagcacagtgctaattaaaagtttgtcgaaatccctgcccaggtagtgcagtcccgggcaggagtctacatcaaaggagtgagcatcatgtatataataccgcaattgacgccgatcgagacgctgttgtactccaggaagtcaaga

SEQ ID NO: 23079 - DNA, 260 bp, Unknown
  Description of Unknown: LeftRegion for integrase B10080 sequence
aagcagaccccgatcttattttggatttacacagtgcggtgcaaagagggttatcagagaatgaagcaaaaaccatggcgtgtgtcatgagaggtctttttgaggggttgaaggaacaccaggaccaggacccctatacatctgagaatatctgtagcttcgacggtcaataatcttacagcggtggacggaggagggcattggctgaaaagagaaaggctctgatctacgcaagagtatccacgctgcgccaggaaagg

SEQ ID NO: 23080 - DNA, 260 bp, Unknown
  Description of Unknown: LeftRegion for integrase B10081 sequence
aagaataacgcgtatgttttgttgaaagatgcgcgtttaacgcacaaatgcgttaattatgcgttaagcgtgcgtttctaagtaaaaaatcccgccagacctattcgcagtaggcctggcgggacttatctcccggaggagcttgtatgatggttatattatatacctccggagtctgaaaatctaccggaggtttttctatgtcagaaaatgccgtggtctatgcccgctactcctccaggcgtcagcaggagcagtcc

SEQ ID NO: 23081 - DNA, 260 bp, Unknown
  Description of Unknown: LeftRegion for integrase B10082 sequence
gaaaagctcattgaaatgacgagcgatattgatatggtgcaagtagaccacattaaggtggaacgaggaaataccattataatcgttctcaaggacggaacggaaatcacaagacaatggcaagaccgttcacgtgcagaaagctggacggacgaaatgcggcaaaaggctgccgagcaaacaagaaagaggtatcaataatgggaaaagttacagttatacccgctacaagagattttcatacgggtgtggttaaaaat

SEQ ID NO: 23082 - DNA, 260 bp, Unknown
  Description of Unknown: LeftRegion for integrase B10083 sequence
gcctctggggtccgatatgccgcttgtcgtcggtcacttccgtctccacctgcccagcctggacgattcgcccttcgccgttggcggtgaagcactcatcgttggagaattgaactcggcctattcaacctggatcgtgccgtggcttatgatcgaagaagtcaacggctacgacagcgacgagtattgatggggatactatgaacaacctcaaccccaatggcctctactgtgcctatctccgcaagtcccgccgggac

SEQ ID NO: 23083 - DNA, 260 bp, Unknown
  Description of Unknown: LeftRegion for integrase B10084 sequence
ataagatcattacgtatcaaaccacagtttcgattttgaaaagctggatgcgtgctggattggtcacgccggaggaattccaaaaaatcaacaccataattgccgaacgttccggcttatctttgtgcagtatattccttgactcctgcccgatcgtacggtaatatgtcatcggaaagggggagattatcacggcacgagtgatacaaaaagttgcatttccacagaaaaagccgttcctgttgaaacggacggcagcc

SEQ ID NO: 23084 - DNA, 260 bp, Unknown
  Description of Unknown: LeftRegion for integrase B10085 sequence
gagaagtaacgcgcatgttttgttaaaagttgcatgtttaacgcacaaatgcgttaattatgcgttaagtgtgcgtttctaagtaaaaaatcccgccagacctattcgcagtaggcctggcgggtctatctcccggaggagctcgtatggtgtctttattataaccctccggtgtctgaaaatctaccggaggtttttctatgtcagaaaatgccgtggtctatgcccgctactcttccagggttcagcaggagcagtcc

SEQ ID NO: 23085 - DNA, 260 bp, Unknown
  Description of Unknown: LeftRegion for integrase B10086 sequence
catacagaaggctggacgattatgcaaagaagatcatccggctgacagctcacctggatgaataaaagaagggcgccgactgcgggaacagccgacgcccaggagcgagaacactgcaagaagtgtctctacacgtgcacattatagcacatttttggcagtgttttccacaatatccacagttataggaggacactgccttgaattttggaatatacacaaggaagtcatacttcacggacacatcggactctgtgaag

SEQ ID NO: 23086 - DNA, 260 bp, Unknown
  Description of Unknown: LeftRegion for integrase B10087 sequence
agaaagttttaatgcatcattatttatagctaaaaagctactagctaataacgatatttcgattgaagactatataaaaattgaagataaattagcatcaaaatattgtatcaaaatatcatctatttatcgccaagattcgttgataaaggggagtcaaagaggtaatatgtgtcatgaaaaagaaggtgattttatagatggaaatcgagaagattgcagcattacctaaacttaaacgaaagataagagtagctgcc

SEQ ID NO: 23087 - DNA, 260 bp, Unknown
  Description of Unknown: LeftRegion for integrase B10088 sequence
cagaaaataacttttagcttatgcttgtccgctttttccagcatctgtttaatttgttctttgtactgctcaactgacatttcaagacctccaatatagaacatatgttcgagttatttctatggtatatcattttactaatacattcaagtattattttaataaacagttattccataaactatgaaaggaaacaataaatgagatttgcaagctataccagaaaatctatctattcagataaatctgactctgttgat

SEQ ID NO: 23088 - DNA, 260 bp, Unknown
  Description of Unknown: LeftRegion for integrase B10089 sequence
gaccagctaagtgctgaggagcagaggctcatcgcctactatagaaagctgagcgagccggagaaggacatgatctgcagatccatggacctgaatcgtggatattaaaaaaaaaaaaaaaaaaagaaggcccagacgcgggaacgactgggcctgcagaacaccggcaagccggcaatcaaacacaaggagattatagcatgaattttggaatttacacaaggaagtcatacttcacggacacatcggactctgtgaag

SEQ ID NO: 23089 - DNA, 260 bp, Unknown
  Description of Unknown: LeftRegion for integrase B10090 sequence
atagagaaactacctataacaataataggtaaagtaattaaattaataggtaattattaaaaaagcaaaagataatgtaatcaagtttggtaaccaatacattatctaatattatcatacactttgaaaagtgttatattagtattatatactatttaacaactcttttcaagtattttaatgaaaggagtaattttattgtggaaaattttatatctgatgataacaggccttatgctatgtatttacgtaaatcacgt

SEQ ID NO: 23090 - DNA, 260 bp, Unknown
  Description of Unknown: LeftRegion for integrase B10091 sequence
aagaatagcgcgcatgttttgttgaaagatgcgtgtttaacgtacaaatgcgttaattatgcgttaagtgtgcgtttctaagtaaaaaaatcccgccagacctattcgcagtaggcctggcgggtctatctcccggaggagctcgtatggtgtctttattataaccctccggtgtctgaaaatctaccggaggtttttctatgtccgaaaatgccgtggtctatgcccgctattcttccaggcgtcagcaggagcagtcc

SEQ ID NO: 23091 - DNA, 260 bp, Unknown
  Description of Unknown: LeftRegion for integrase B10092 sequence
aagcggtattccggtatcacgcatgcatggcgctgatgagatgcatggtggctaaagggatccttgacccgcaggatttatccagtgtatcggacactctcgcccaaaagtacggtttatcattgtgcagtatattcctcgattcggacttgcaatacccagcaaacagagccaatatgccatgatgacaggagggcattatgggcagaaagataacaaaactggcggtctcggagccaataccgactcggaaaagggtg

SEQ ID NO: 23092 - DNA, 260 bp, Unknown
  Description of Unknown: LeftRegion for integrase B10093 sequence
ccgaagtcgcggcgcggtggagcagcccccaagaccggggtggacggcggcgcgccacctgacccatggtcgccgtttgtggcattcctctgcgagctgtatcgggattgggaacgagagcgcgcatgcaaggacaacgagtagccgtctacgcccggttctcgacggacaagcaaaaccctcgaagcatcgaggatcaggtgcgggtttgccgcgactatgtcgagcgcgccggaggccgcatcgctgacgacctggtg

SEQ ID NO: 23093 - DNA, 260 bp, Unknown
  Description of Unknown: LeftRegion for integrase B10094 sequence
  modified_base (116)..(144): a, c, t, g, unknown or other
cttccatgaaaatctatgtttctccgataattttggatagccctcaggacgcttttacagcccgctggctggcttctcttgacggaatggttttaccccccccccccccccccccnnnnnnnnnnnnnnnnnnnnnnnnnnnnnccgccgcgtagagagcttctggagtaccataacgacgaaatttttaggagggtcacatgaatacagtaatttatgctcggtattctgccggcccgagacagaccgaccagagtatc

SEQ ID NO: 23094 - DNA, 260 bp, Unknown
  Description of Unknown: LeftRegion for integrase B10095 sequence
attttgactatatctactgcttcattttgtgttgcagatgttatcaaatattattatgagagcaacgcgaaagaaaaaaattacagtgcatataaacagcttaatgctggaagtccttacataatatcgttctgttattccaatggctattattttcaaatttcatttgacgattcaataaaataacaggaggcctcgccatgtccaccgccaagaagaagctcacaacctgccagccgaagacggccgttgtctatgcc

SEQ ID NO: 23095 - DNA, 260 bp, Unknown
  Description of Unknown: LeftRegion for integrase B10096 sequence
taagatattccgctatcagacggttatgtcatgggttcgctccctgctgaaacagtctcttatcaccaaagcagagtacgccaaaattgatacaatgatagcagagaaatacggcgtatcttcgtgcagcatatttcgctgaaaatccttgactttatgcggttttagagcgaatatggtaagcgaggaggtggtgctgtgtggagaataaagaacgcatcgtagagagggttcagttccccgacgcacaaaaagtaaag

SEQ ID NO: 23096 - DNA, 260 bp, Unknown
  Description of Unknown: LeftRegion for integrase B10097 sequence
ctgacctcaaacggatcgctgacttctatggcgtaggcttagactttttcgacttagcttcggctgatgatgtccaggacttactggcacgagccagagatgtctttatgaatgaagatatttcgcaagagataaaggacgacctctatcgagagatcgtcaaactttacttgaaaataaacagataggaatgaagcaccatgaagaaaacaaacaaaaagacgagagcggttatctatatccgctactcttctcacaaa

SEQ ID NO: 23097 - DNA, 260 bp, Unknown
  Description of Unknown: LeftRegion for integrase B10098 sequence
atctcccacctgcttgaaatattcatcgaagctaacgcaattaaagccaagcaggccatcgaaaaggctgctgttttggaagagcagaaaaaacaataaaattaaaatcccggcaaagcataaaaatgtttacatcttcacattctatagtataatatagttgtaccagatagatacttaatatatatgagaggtaagttatgaatatcgctgcttattgccgggtctctaccgataaaactgatcaacttaacagtttg

SEQ ID NO: 23098 - DNA, 260 bp, Unknown
  Description of Unknown: LeftRegion for integrase B10099 sequence
ttattcgcgagatcgagatactggcagcccttgaagctagcggaatgattactaccagagaacacgccgacctatacgcggatctatctgctgtttactgcccggtttatcagccacgcacccttggggttctaactggataaatcaggcttttagagcgtgtatagacatgagctaatcaggtgagacgaggaggaatagtggcgaaaatcaagcagataacacggctacctgtttccagaccaaaactagtgaaagtc

SEQ ID NO: 23099 - DNA, 260 bp, Unknown
  Description of Unknown: LeftRegion for integrase B10100 sequence
gtcgcgcaattcgggaagcgtctacaattagaaatacaaaatcgggcaagtgaagaaagtaatccttcgcgtttgcttgaacaaatgaatacattgtttagtaatgtgtccgaattatccgaagcagatcagagagttttttatactggccttatagaaggtataaagcgctgggaagaagagcagaaggggaaataatcatgcagcaagcattaaacgcggtcatatacgcccgctattcctcccatagccagcaggaa

SEQ ID NO: 23100 - DNA, 260 bp, Unknown
  Description of Unknown: LeftRegion for integrase B10101 sequence
ttttgacagcggccttattacagttgatactaagtatataatatatgtatcagatgtagtaaaagaatatagttataatgaatttacgcgccaatggctcgtaggcctcgagggcaatcaaattataaggcctgaacgctttgctcctcagagggagtttttggaataccacaacgatattatatttaggaggtgttagcttgcgagcggttatctatgcacgatacagtgcgggtccgagacaaacggaccaaagtatt

SEQ ID NO: 23101 - DNA, 260 bp, Unknown
  Description of Unknown: LeftRegion for integrase B10102 sequence
ctttgcgaggttttagggttggagaagtatgacgacgacgcagttctgaaatatattcggcaaattattgttcccgaaccaaacgaactgatttttatcttttataatggtaaacaggttcagaaacattgggaaaatccgtcacgttctgaaagctggacggaagaaatgaaacaaaaagcaaaggaaaggagtttacaatggcacgaaaaatcacaatgattccgcagaccattaatccgcagacacgaacggcaatg

SEQ ID NO: 23102 - DNA, 260 bp, Unknown
  Description of Unknown: LeftRegion for integrase B10103 sequence
agaaaaagtgaacgtcattacttccgagaatgatcttctccgaattaaacttgaacacaaagaggaaattatctcactacataactattaccgttctgttatgggaaagtttaaagaataacagcctgcgataatagtataatactgacatcaactgacatacaatgtcatttacacaaaaaaagaaaggaagtgagaatatgtttacttatcacggcgtaacaatatcagcaaacgagatattaaaatattcccgaaag

SEQ ID NO: 23103 - DNA, 260 bp, Unknown
  Description of Unknown: LeftRegion for integrase B10104 sequence
aaacgtggatacataaaaatcctagttgttttattgtctatttgtattcttgtcatctgcggcgcattgatcatcgacagaatgaaccctgatattggtttcttctggcgtgaagttgcagaacacttcacagaatcagaaaatggcacaaatgaagcagatagtttgatgaaccgaattataaattggaggttgtaaagatgataagtgaacaaacgaaatcagaaatatcaggtaaatatgtaggaagtccagaccaa

SEQ ID NO: 23104 - DNA, 260 bp, Unknown; identical to SEQ ID NO: 23101
  Description of Unknown: LeftRegion for integrase B10105 sequence

SEQ ID NO: 23105 - DNA, 260 bp, Unknown; identical to SEQ ID NO: 22619
  Description of Unknown: LeftRegion for integrase B10106 sequence

SEQ ID NO: 23106 - DNA, 260 bp, Unknown
  Description of Unknown: LeftRegion for integrase B10107 sequence
gtgcgagcgtatagacgtttggacgagtacggccagaggctcacgcgtatggccgcgcacgtagaaaaagaataaaagaaggacgccagctgcgggaacagctgacgcccaggagcgagaacactttgagaagtgcctctacacgcctaaattgtagcacttttcgcggttctcgtccatataaagaggaggagaacgccatgaacttcggcatttatacgaggaagtcatacttcacggacacgtcggacagcgtcaag

SEQ ID NO: 23107 - DNA, 260 bp, Unknown
  Description of Unknown: LeftRegion for integrase B10108 sequence
tgataaatccgatcttatcgaagaatatgttccccgttttccagttcttcggaagcaggaaatcagccggttccttgaggagctgaatggcatgtcatatgacgatttgactgatgttctgcaagttatgaccaaatacttaaacgcagatgacaagacgaagcgcatggtgcgcatgctcctggatctggaggacgatcatggataagacccctgccgtaatctacgcccgcttctcctctgagaaccagcgccaggaa

SEQ ID NO: 23108 - DNA, 260 bp, Unknown
  Description of Unknown: LeftRegion for integrase B10109 sequence
atatcaaattacaatgaattatttaaaagatatgcttgaaaagaagattatttcaattgaagaatacaatcaaatgatggttgaatttaaaaagaaatatacaccaaaagttagccatttattctttgaaatagcccaataacacttgatatatacatcatttagagtgatatatagtaatggaaaattggaggtgtatgatgcgtaaaataacaaaattagaaacaaaaaaaatagaccttcctaaacttaaaagagta

SEQ ID NO: 23109 - DNA, 260 bp, Unknown
  Description of Unknown: LeftRegion for integrase B10110 sequence
gtgcaagcactgaaggaaagtttattatcatacaaacctgtatgaatcaaaaagaagcgtcaaaaagcagtgccgtataatatcgttcaaatctcgttaatctgagattttcagattgcctatataacttctctatagaatagatatataagagactttatagtacctgtctgagattttcagattggaaaggaattatcatgtacgaggatataaaaagagtctgtttatatgccagattttctagtcataatcagaca

SEQ ID NO: 23110 - DNA, 260 bp, Unknown
  Description of Unknown: LeftRegion for integrase B10111 sequence
cgcgcagcgtgacgcgcgggggagcagcgcttgacgtcctccgcgcagtcggccatcgtcgccacgaaatcaagagaggagtggcgacccatgctgacctttgtccagctcgaggatccggatccggcggcgcgatggacccaggcaatcgcgctgctcgtcgccgccggcgagcgcgcccgggcaggggagcgcgcgccgtgatccccgccgcgatctacgcccgcgtgtcgacggaggaccaggcggagcgctatggg

SEQ ID NO: 23111 - DNA, 260 bp, Unknown
  Description of Unknown: LeftRegion for integrase B10112 sequence
gaatgggagaacgggaacgttgtcagcgtgaacgtggatgactgcgacatgataaaacgcatatatcgcacattcgacggaggaattgatctgcgctcagataacccgacctttgaaccgcttcatttcaccaccgaagacctacagaatgaccgcgtccacgttctgggacgtgtcctgatcccgataggcaaggaactgtgaacgcttcaccctttcaacccggtgacctcgttgtcggttattgcagatactcaggc

SEQ ID NO: 23112 - DNA, 260 bp, Unknown
  Description of Unknown: LeftRegion for integrase B10113 sequence
cccgcagtatagccggacgcagatccgaccgtccgaaggtgaccgctggttctgttccgtagagcaggccatcgcggcaggttttcaggcgccgtccaattctccggtctgcatacaataaaaaagaccgcctcattccccgcagcggtcttcattcggcaaggcaattgcctctattcaactgttgaatatattataccatgaccccgaacaattcaccttttaaaattggcgataaggtcgtcgcatactgccgttat

SEQ ID NO: 23113 - DNA, 260 bp, Unknown
  Description of Unknown: LeftRegion for integrase B10114 sequence
acccgccagtgggcgcccaacgacgtgtacgccgaggtgcgcgtgggcaggcccgccgacgccaggctgaaggccatggcgctggcgcagctgcagccgccggccgggcggccctttgccgcctggacctgagccttggtgacacacggcccgcttctcacgcgacacggccgcgccagcggcctacagtgggcgctgccatgaagcgggccgtcatctacgccagggtcagcaccgagcgccaggccgacgacggcctg

SEQ ID NO: 23114 - DNA, 260 bp, Unknown
  Description of Unknown: LeftRegion for integrase B10115 sequence
caacgaaaaaatgtgcggtgatataaaatttcaaaaacattttgttgaaaatcatcttactaagcacgtagtccgaaatcgtggtgaacttcctatgttctatttgtcaggtactcacgagggtatcgtttctaaagaaacgtgggacagcgttcaagctgaaatattgcgaagaagcaaaaaaggggagataaattaatatgccagcagtacaagtaataccagcaaaaaagaccaaaatagctgtcgctggtattaat

SEQ ID NO: 23115 - DNA, 260 bp, Unknown
  Description of Unknown: LeftRegion for integrase B10116 sequence
aggatttcgaagctgctgtccgatcgctgatcgtaaagcaaaaataaaaggatcagctgttcccgcagctgatcccctgatttccctatccgcaccgcttcgtggtagaaataggcttcgcacctctcattctatcacggaaccgtgcgactgcataggtttcttttttatactcttttttaggaatggaaggtgatctgatgtatatgacacagtcagccccggaactgtacggcgtccgcgtcgtcaaatacatccgg

SEQ ID NO: 23116 - DNA, 260 bp, Unknown
  Description of Unknown: LeftRegion for integrase B10117 sequence
atttttatcacatcaggcatggttaatgtttctgttgctgaaaacaatggccttttgtatcttgccgacagcaacggtaattatgtaacggctttttatgatgaaaacggaaccgatttatggatttatcttgaaaatgtatattttcgcatgactcctgttccttctttttctatgtttaatgattggaagtctcagccatgattaaaaataaaattccgtcctgttctccgcggaccgccgttgcttatgctcgctat

SEQ ID NO: 23117 - DNA, 260 bp, Unknown
  Description of Unknown: LeftRegion for integrase B10118 sequence
cggcaacaagttcttgcaggtgtttgacaatgctaaagaacgtaaggatgcctaactctaaattatccggcaattccgccgcataactcgggacgctacgccgcataacccggcttgccaatctcaagttcttgttctatatatgtgtggcaccggcaaacgcggcgccaaataaaatgaaggcatacggagcgagaaacatgacccccgctatctacgcccgctattccagcgacaaccagcgcgaaacctccattgag

SEQ ID NO: 23118 - DNA, 260 bp, Unknown
  Description of Unknown: LeftRegion for integrase B10119 sequence
ctggaacggtggccgcggtctattacctctaccggagccgcgacgcctacgacgccgacctctatcagacctacaacatggtcaaggactacgagggcgacgtggccgtggtggagcgggaggagctccccacgggcggcctgatccgcgtgacggacaaggtcgtcctggagccctacggcgggaaaggggcttgacgcatggccagaaaaagagaatcctccacccgggcggtgatctacgcccggtattcttcccac

SEQ ID NO: 23119 - DNA, 260 bp, Unknown
  Description of Unknown: LeftRegion for integrase B10120 sequence
gagttcgacgtgtcgctcgactacctgatggggcggacgcagatccggggcctcgcctcagagtccacggacagcaccggcaggcgcacgctgcccagaccgatcgccatgtactacgccctcagcgcctcggatcagagacgggtggacgcgttcatggaagggctcctggcgtctgacgagtacgagggggagccgtgatggcaggcaggatacgggccgcggtctacgccagatactcgtcccacagccagacggag

SEQ ID NO: 23120 - DNA, 260 bp, Unknown
  Description of Unknown: LeftRegion for integrase B10121 sequence
tgtacgaaggttataaaagagaatgcattcgacgatataaggtttcgggacaaagtggagagaatcacagcagcagaagacatactcacctttcattttaggggaaataggaaggtgaatattacatggagcaatacgtctcgaaaagaagtctggaccgagagcatgaaagactcggcaaaggaaaggagtctaaagcagtggcaacaccggaaaagcaaataacgataatcccaggggtcataaaatacaccgaagga

SEQ ID NO: 23121 - DNA, 260 bp, Unknown
  Description of Unknown: LeftRegion for integrase B10122 sequence
cgatcatccactacaggacggcaatggtggtttttggaaaatggcttgccggtggcgtcatcaccgaggaagaactgacaagaatcgatgcggcaatagcctgtaaatacggcctttctccgtgtagcatatatcgctgaaagtacttgatattacgggcgtttagagcgaatatgttataaacggaacggaggccttttatggggcgagtcatcacaaaaacagtccctgcggcgccatcccttgcaaaaagacagagg

SEQ ID NO: 23122 - DNA, 260 bp, Unknown; identical to SEQ ID NO: 22982
  Description of Unknown: LeftRegion for integrase B10123 sequence

SEQ ID NO: 23123 - DNA, 260 bp, Unknown; identical to SEQ ID NO: 22625
  Description of Unknown: LeftRegion for integrase B10124 sequence

SEQ ID NO: 23124 - DNA, 260 bp, Unknown
  Description of Unknown: LeftRegion for integrase B10125 sequence
atgtagtttgcatagatgggcaatattacacctctcctgagtataataacatgatatataacgaagaaattgtatatgaacatgatgtcgccccagaaccagtgaagaacagatttggattagctgatatgcagttttaaaaatctgtcaaaaaaccgtccggtgctaccaacaccgaacggctttacatagattttctcttgccggacgaaccggaagataaatcaccttcaacaagtgaattatatcatttctggtac

SEQ ID NO: 23125 - DNA, 260 bp, Unknown
  Description of Unknown: LeftRegion for integrase B10126 sequence
tcccatctgctgaaacttatggaaagcggcggggttatgggtatcgactgcaagatgggcggcggcaagttcaaacgcctttatgaagaatatgacgatgaaaaggacgaggacgttttcgtactggaaaaggacgatataaactattttgttcatttggaaattacagaacgggcctaacctttggaaggggtgattttgtgcgggcgtttatatactgccggttttccagccacaagcaacaggaacttagcatcgaa

SEQ ID NO: 23126 - DNA, 260 bp, Unknown; identical to SEQ ID NO: 22776
  Description of Unknown: LeftRegion for integrase B10127 sequence

SEQ ID NO: 23127 - DNA, 260 bp, Unknown; identical to SEQ ID NO: 22625
  Description of Unknown: LeftRegion for integrase B10128 sequence

SEQ ID NO: 23128 - DNA, 260 bp, Unknown
  Description of Unknown: LeftRegion for integrase B10129 sequence
cccgggccattactataaataactaatgccagaaaccccaaccataccaaccattaaatccatatgtttgcaacccgcaaaagttgtaacattacaacccgcaaaagttgtaacattacaacccgtcccgccccttaccgaaaacgaaaaaaaaatcctaaccctgatggcaactgtttatgtaagtaaaattgtaaaccatgcaggcaatagcatacatcaggataagcactaaagaccaaagcaactttagtatagaa

SEQ ID NO: 23129 - DNA, 260 bp, Unknown
  Description of Unknown: LeftRegion for integrase B10130 sequence
aagggaaatgtacagatgttggagaagtctttggatattctcttgatattgatgaaatagaataaataataaaaaagccggctcctgcgaccaacaggaaccggttttaataaataagataatccggagaaaatcttacctacaccataattatatcatctcctggattatcacacaagtaaaaaaaggagaatgataaaatgaatgaatcagtatgcatctatctaaggaaatccagggccgatcgggaagctgaggca

SEQ ID NO: 23130 - DNA, 260 bp, Unknown
  Description of Unknown: LeftRegion for integrase B10131 sequence
ctgctcctgcaattatgattattacatcgactactttgtttccggcgcgcacgaatttgtatatctgattgcggaagaacgcaaataagaaatgcccgccccggtttcccaggacgggccgcaaaatcagccaacaccacttgtccgatttgctattttattatagcgcggagaacgtgaaaagtcaaggagtttcgcgcatgaaagctgtaatttacgcacgctattcttcccacggccagacggagcaatccatcgaa

SEQ ID NO: 23131 - DNA, 260 bp, Unknown
  Description of Unknown: LeftRegion for integrase B10132 sequence
cagcacgtctatttttccggcgacgatgagcacgacgacgtcgtctggatcgtggacagcaccggcgaccggctcggacgcctgccgaaggacgccgccgcgcagtatctcgcggaaggcgcccgcggcgcatttatcaagagccttgaggacgaggatcagaacacgatcccctttgtccgcgtattctggaaaaaagcatgaacggcgtcatctatgcccggtacagttcagagcggcagacggagcagtcgatcgag

SEQ ID NO: 23132 - DNA, 260 bp, Unknown; identical to SEQ ID NO: 16840
  Description of Unknown: LeftRegion for integrase B10133 sequence

SEQ ID NO: 23133 - DNA, 260 bp, Unknown
  Description of Unknown: LeftRegion for integrase B10134 sequence
tacggaggcgcctctcttggagaatactggatcaatacgaaaaccggagaaattgataacttagaataaaataaaaaaagccgtcaggtgttgcagcacctgacggttctgatcctgcccttgcgggtggactcgttattggtagatatattgtagcataccgcatggatatctgcaagggcttagacttggaggtatctatgcgtttttttaattatggacggaagtccatctactcagacagctctgattctatagac

SEQ ID NO: 23134 - DNA, 260 bp, Unknown
  Description of Unknown: LeftRegion for integrase B10135 sequence
gttatcagatggtcatgtcgtgggtacaatctctgctgaaacagtctcttatcagcaagaaagagtataccagaattgatacaatgatggcaaagaaatacgacgtatcttcgtgcagcatatatcgctgaaaactgcgtaaaatcgttgacttatggctcaatagacggtaacatggtaagcgaaggaggtggtgctgtgtggagaatagggagagaatcgtagagagggttcagttccccaacgcaccgaaaataaag

SEQ ID NO: 23135 - DNA, 60 bp, Unknown
  Description of Unknown: LeftRegion for integrase B10136 sequence
gccggtcagcgcgaggagtccatcgagggccaggtgcgcgagtgtcgagcttatgcgaag

SEQ ID NO: 23136 - DNA, 260 bp, Unknown
  Description of Unknown: LeftRegion for integrase B10137 sequence
gactattattactcggaaagtctcaggcttgccggtgccgacgattactccggacttgatgaaatggattacgatttcaaggatggcgcttatgtcatcatcaattatggtgacgtgatcttcacgccctatgcgggcaagccctcgctggggtttaagtgatacacaaggcgcttcggcgccttttttgaggtgtgactatgaacagattggacccctctggcctctacgccgtctacctgcgcaaatcccgcaaggat

SEQ ID NO: 23137 - DNA, 260 bp, Unknown
  Description of Unknown: LeftRegion for integrase B10138 sequence
cggcccttcgcgcgcagcttgcccagcagcagaaatccctgcgtatgcaccggcttgtgacgctcatcctcttgggcattctttcgctgtgtgcccttgtgcttgtggccgatgtgctcatcccatcgatcggctggattcgcacatgaaaattaccgccccggcccgatcagccagagcggtatctttggaggatttttttggataatttgaatcttgccaacgtcgtgatctacgcccggtattcttccgccgggcaa

SEQ ID NO: 23138 - DNA, 260 bp, Unknown; identical to SEQ ID NO: 16827
  Description of Unknown: LeftRegion for integrase B10139 sequence

SEQ ID NO: 23139 - DNA, 260 bp, Unknown
  Description of Unknown: LeftRegion for integrase B10140 sequence
ggctatcaggtacacttcgcagaaaatggaaccaagggaaccggccaccgtccggcgtggtatatccgattccaataaaaaatccgcccaggctgctacctgtgcggatcaaacgcaaggaaaatgcaaacaccactaagcactttccgtagtcagtatatcacaagctgcctgcgttgtaaagtcggaaaggattaagattgaacgctgtaatctacgcccgtttctcgtcgcacagtcagcgggagcagtccatcgaa

SEQ ID NO: 23140 - DNA, 260 bp, Unknown
  Description of Unknown: LeftRegion for integrase B10141 sequence
taagaacatgtatgagactgcagaatatctcgatgttccacagaactttctcagagattgcttggaatgctatcacgataaatacggcacgcacgttaaatatcaggactatgtgatcttctttgatccgtacatggatgtcctgacaatgcaggaggcgttgaaattacaaaatgactggtaagaagacagatggagaaatggctgtcgtatatgcccggttctcatcagcaaaacagcatgagacctccattgaaggt

SEQ ID NO: 23141 - DNA, 260 bp, Unknown
  Description of Unknown: LeftRegion for integrase B10142 sequence
aaatgaatcgtaatatcatcatctatcaggttatggttgaaattatcaaaacttggcttcgttcaggaaagatctcaagaaaagattatgcggaaatgaacacaaaaatggctgaaaaatacggcatatctttgtcgggtatattcgttgataaatctgaaaatccatgctaatatggtatctgaaaggaggaggtttacatggaacgtttgatacaaaaaatagaaccttctgttgatatttcacataaattacgaaac

SEQ ID NO: 23142 - DNA, 260 bp, Unknown; identical to SEQ ID NO: 23125
  Description of Unknown: LeftRegion for integrase B10143 sequence

SEQ ID NO: 23143 - DNA, 260 bp, Unknown
  Description of Unknown: LeftRegion for integrase B10144 sequence
aaggccgcgtacgctgaaccgattgtgcttcataattcggatattaagccgacgcttctctgcattcttgccgggcttttgattggcggcgcgattcttttcggcctttatatctataaaaccctgccgggctacacgaaggaaaacaggatcccgccgcccccggcccgcgccgaacagacggaaacggaggcgacgccgtgaccgcgcccgtcacgctctcccggatcgtcgcgtacctgcgcaaatcgcgcgacgac

SEQ ID NO: 23144 - DNA, 260 bp, Unknown
  Description of Unknown: LeftRegion for integrase B10145 sequence
gcatccgcgagcgaagctgccctacggagggcaatgatgcgaacccctgaccggccactggacctcctgatcgacgccctgaccgacatcatcgtcgaggaatatctgcgggagacagcggccaacgacgcggcctcaccgcgcgacggggaaaatcccgtgcttcccgctgcgcgcgacgccgcataggatcgcccgccatgcgcatcgccgcctacgttcgctacagcagcgagaaccagtccgccgccagcctgcag

SEQ ID NO: 23145 - DNA, 260 bp, Unknown
  Description of Unknown: LeftRegion for integrase B10146 sequence
agaaattaattatgccttatccctgaccttcctaaagggcttgcgtcaaagccgtcttttgacggctgaagaatttagaaatgcacagctgaaactgaagaccaggtacaagccgtttttgcggtataaattagaaaatatagcttgatacaatcttacatcagagctaatatacaacactgaaagggggacgtgccaagatgaaagtagatattatagcaccgacaaaacacaaaaaatacagactcataaatgttgct

SEQ ID NO: 23146 - DNA, 260 bp, Unknown
  Description of Unknown: LeftRegion for integrase B10147 sequence
cgaccaggagcggagggcgctggtcgtatgacctcgcccgacgacctcgcccggcgccgcgcgcgcatccagcgcctggctgcgaagcgccccgagggcctcacgatcgaggtgacgcacgcgccggagccgggcgcgctcgagcgcctggccgacgtcctagccgagctgctggacgcgcggcgccgctccggacgaaggtgatcgccgtgcccgccgtccgtgccgccctgtacgcacgtgtttcgagcgccgcgcag

SEQ ID NO: 23147 - DNA, 260 bp, Unknown
  Description of Unknown: LeftRegion for integrase B10148 sequence
ggtcagtgttgagtcatcgggtcgttcaacgttcacttaggcgagggtaaccgggcggtcggcgcgacggaccgggaccaaagtcaccgtttccgcaggtcagacggcctttcctcacatacgcagattgggccaatacggcaacccgtacgggtgggagtaacatacgttccgacacagcaaggggagggaacaaacgcatgtcgcagcgcagaggtccgcgcgtgttgggcgcaacccggcttagccgctacacggac

SEQ ID NO: 23148 - DNA, 260 bp, Unknown
  Description of Unknown: LeftRegion for integrase B10149 sequence
aatccctaccgcgtgggcgatgtcgtcgcgggactcggaactgtgtatggcgccgccgacgccgtgagcttcttccggcgctactgcctgccgcctgccgggcgctcgtacgaagagctgcgcgggaagaacctggcttgttggtgccgacttggcactccctgccactcagacgtgctgctcgagctggccaaccgctgatgcgtaccgccgcctacgcccgctacagttccgaccagcagagagacgccagcctcgag

SEQ ID NO: 23149 - DNA, 260 bp, Unknown
  Description of Unknown: LeftRegion for integrase B10150 sequence
aggccaaaggcattatccgctttgaaaaagagtttacggatgccatcggcatgcaaaaacaggtattgccagccatcaaacggggtgcacagtcttttcgtgtccaccatatccaaaaagcctgtgagctgtataaagtaaacgccaactggatatttggtttacaaaacacgccttttagggcaaaaaccacttaagccatggatgccatcggctacgcccgcctttccgacaaaaacgagtcttccaactccatcaaa

SEQ ID NO: 23150 - DNA, 260 bp, Unknown
  Description of Unknown: LeftRegion for integrase B10151 sequence
agtacacatcttcgaattcttccgacgggtcagaaacccgcggcgctgggtgattctcatccagcgaagtctttttggcaaataaaaagagccgccagcgctggaacgctgacggccgctgcctttatttctaaagggcttccacctgtatgcatcttctattttaacgcggaatgcccttttttacaaggagggtatttatgcgctttttttgttatggcaggaaatctgtttattccgatcactcggattctgtcgat

SEQ ID NO: 23151 - DNA, 260 bp, Unknown
  Description of Unknown: LeftRegion for integrase B10152 sequence
cattaaatgtagtatatattgaacctgaaatttcagaatcaaaagatgaagataaaaaaagattaacaaaatttatttctttgtttgctcaaatcggctataaagaattagcattaaacaaagattttcaaaatgaattaaattttgcaattaaataatttcatgtataatgttttcataaatagattgagccataactgatgaataaaaaaagatgtattatatatgtcagagtatcaaccgaagaacaaatcaaaggt

SEQ ID NO: 23152 - DNA, 260 bp, Unknown
  Description of Unknown: LeftRegion for integrase B10153 sequence
catcgccggcgcaggctggttccgctttgggctgttaaagtagcttgcatccgcgtctattgcgtggtaatataaagaaaagccggaggctgcaacctccggcatacttgaaagtgtctggtggagcagacaacttcccaacagttgtattatagcaccttccagtcctcctttcaagtgttcgaagggaggattcttttatgcgtgtcgggatctatatccgtgtctccaccgatgaacaagcaaaggagggtttttcc

SEQ ID NO: 23153 - DNA, 260 bp, Unknown
  Description of Unknown: LeftRegion for integrase B10154 sequence
tgtaccaggattttttctccaagtcttttaggcacatcatggtcgccaaagtatatcactgatctgataatttactattatgaaaacatcaatgataattattcttacgcttataacgttatagactcggataataattttattctttatttctttggatccgataacggatatatatttgaattaaccgggagcaaagaatgaaaaaacagtctttaccctcctgtcctccgcgtaccgccgtcgcttacgcccgttat

SEQ ID NO: 23154 - DNA, 260 bp, Unknown
  Description of Unknown: LeftRegion for integrase B10155 sequence
cttgcagatgctcctttttcttttcgttctccggatacaatgtttaacaatcttccggaagaagaaaaagtttttcttgacgcttaccgtgctgccgatgaccgcgcccgcgctgatgctctcgctactctgctgcagcatcctgcagctaaaaaataggaggtttgttattttaaaacttctttaatttggaggtttccatgaaaaaaactgttgccccttcctgctctccgcggaccgctgttgcctatgctcgctat

SEQ ID NO: 23155 - DNA, 260 bp, Unknown
  Description of Unknown: LeftRegion for integrase B10156 sequence
tcgttgagcattagaaagcaagccgaaatgattcaatatctcttacgcttgcaaagtgaagaaagtgaataataattgcttttttctataaagtcccttatagatacatatttatagaacactttatggaaaaacactaaaatcattcacttttatcactctctatatattatatataatgtttaggacaggggtttactatggaagtagtattatatttaaggtatagttcagatagacagaacgaacagtctattgag

SEQ ID NO: 23156 - DNA, 260 bp, Unknown
  Description of Unknown: LeftRegion for integrase B10157 sequence
aggcctaccgtttggccagctatgacacgaagctggccgcctgcgcggttctccgcgtaaaagaataaaaaaaaagcccgccgctgcgggaacagcgacggacatgaagcgagaacactgcactcttgcgagtgcgctctacacggccacattataacatttttgtgcagggttctcaatatagaagggaggactctgccttgaattttgggatatatacacgcaagtcatacttcaccgacacgtctgacagcgtcaag

SEQ ID NO: 23157 - DNA, 260 bp, Unknown; identical to SEQ ID NO: 17197
  Description of Unknown: LeftRegion for integrase B10158 sequence

SEQ ID NO: 23158 - DNA, 260 bp, Unknown
  Description of Unknown: LeftRegion for integrase B10159 sequence
ttggattactttgacctggccgcggccgatgaggcacaggatttgctagcgcgcgctcgtgatctatttatgagcgacgatgtatgccaagcgactaaggacgatatttatcgtgaaatcgcattgttatatcttaaattgaaaaagtgaggcttcggcctctgtaaactgttatatctgtagaaaaggaatgttatatcatgaagaaaactaaagctgttatctatattcgttattcatctcataagcaaagggagtca

SEQ ID NO: 23159 - DNA, 260 bp, Unknown; identical to SEQ ID NO: 17179
  Description of Unknown: LeftRegion for integrase B10160 sequence

SEQ ID NO: 23160 - DNA, 260 bp, Unknown
  Description of Unknown: LeftRegion for integrase B10161 sequence
cccggccttgcccgctatgaaatttgcatccttgatgtcgatcttcacgatggcggttatactcacacctatatgatttcttccgatggttccacagaaattggaaaaatctatcttccttatggtgccaccgtaaacgtgttaagtggcccgatccgctttttcccatatacgggccttttccattgatcggaggcagtatgcccaaaacgaaaaaaacggcctgccgcccgaaaacggcggtggcctatgcccggtat

SEQ ID NO: 23161 - DNA, 260 bp, Unknown; identical to SEQ ID NO: 22632
  Description of Unknown: LeftRegion for integrase B10162 sequence

SEQ ID NO: 23162 - DNA, 260 bp, Unknown
  Description of Unknown: LeftRegion for integrase B10163 sequence
taatgtaatcgcctgtatcactgctcttggtggatttcttaaagaagggggtattgctactgattttgagatatttagcctttaatctgcgaacttatctaaattggtgcatcagttacatatgctgattctttttagataagtttgcatttctgcttttatcttcatatctttgccctatatataaatataaggaaggtatgaaagcaattgcagtactgagggtatctaccgaaacacagcagattgaagaccagaaa

SEQ ID NO: 23163 - DNA, 260 bp, Unknown; identical to SEQ ID NO: 17197
  Description of Unknown: LeftRegion for integrase B10164 sequence

SEQ ID NO: 23164 - DNA, 260 bp, Unknown; identical to SEQ ID NO: 22629
  Description of Unknown: LeftRegion for integrase B10165 sequence

SEQ ID NO: 23165 - DNA, 260 bp, Unknown
  Description of Unknown: LeftRegion for integrase B10166 sequence
ccgggagatcgcgtatcagatgactatggcggctgcccggaaaatgctcgaacaaggccttatctcaagggatgaatacgagaaatttgatacaaaaatgatacaaaaatacgagcccgttttcggcagattattctctgatctcaacttgatataggggaaacaccacgggaatatgtcatcggaaggaggtatggcatatgccgacaataaaaaagataaagccccgtgccgcaattcccacggcaaggaaacgagtc

SEQ ID NO: 23166 - DNA, 260 bp, Unknown
  Description of Unknown: LeftRegion for integrase B10167 sequence
gaacccgattatcttgtccccggctacgattcgacgcaggtcttcaaccccgagaacgaatactacaacggcatgatcgccgaagacgtcatcgaactgcacgacggcgattatctgttggtcagtaaagacaacgcccccgccgtcttcatgccctacagcggcaagccttccctgggctttaagtgatggaggttcccatgtcagacctggacccccgcggcctttactgcgcctacctgcgcaagagccgccgcgac

SEQ ID NO: 23167 - DNA, 260 bp, Unknown
  Description of Unknown: LeftRegion for integrase B10168 sequence
acgggagatgaaatatcgcgtttcgatggcggccgcgaatagtatgctccgccaaggattaatcaatcaaaccgaatacgatggattcaatcgactcatggccgaaaaatatcggccactgatcggcggtcttttgttaaaatcttccgttgataaacaccgcgaatcgagctaatatgccacatgacaggagagcggatatgaatcgtgtggttcgtaaattaaagccaaagattccggcaatcccgcaacggatgcgg

SEQ ID NO: 23168 - DNA, 260 bp, Unknown
  Description of Unknown: LeftRegion for integrase B10169 sequence
gacgatggattataacgtatgctttgtgcttattatcacagatttcgtagttaaaatgcaaattcaggaataatatcgtttaggaattgtattataaaagccgcccggtgctgcaacaccagacggcaacggtcattgtaccccgatgcattatacgggcaatctctgacctttttcattatatcacaggaggtgattctgtgcgcttcttctgctatggacgaaaatctgtattctcagacaaatctgattctgtggat

SEQ ID NO: 23169 - DNA, 260 bp, Unknown
  Description of Unknown: LeftRegion for integrase B10170 sequence
aaagtccaagcctacctgtccgctatggcacaggcgcagattatgctcaaaaatggcatcatcggcaaggatgacattgtatcaattgagcacaagttagccgagaaatatgggcttaaaatcggcagtatatatcgcgaaattgacttgataaatgttgctttgagagcgaacatggtgtaaggcgaggaggtgatattatgcctaaaaaagtaagaaaaatgccgcagaagccgcgattggaacagccaaaaaaggtc

SEQ ID NO: 23170 - DNA, 260 bp, Unknown
  Description of Unknown: LeftRegion for integrase B10171 sequence
acgggagatgcgttatcgcgtttcgatggcagtggctaattgtatgctgcggaaagggctgatttcgcaggctgaacacgaaaccttcgatgctcttatgatcgagaagcaccaaccgccgatcgggaatatcttgctcaaaacatctgttgataaatcgccgagtgagagctaatatgccacatgataggagcataggtatgaatcgagtgatacacaaagtacagccaacgattccggcaatcccgcaacggatgcga

SEQ ID NO: 23171 - DNA, 260 bp, Unknown
  Description of Unknown: LeftRegion for integrase B10172 sequence
tggctacgtaccggtgaaggcgaaatgtttaaaaatgatgattttgcttatgaccttggtacttatgcagctaaagcaactgatcttgatagagctgtgatcaccgagtggatgaagctcaatgatgataccaagaagaacttatatgagtttatgaaaaaagttgttgatgcctctaataaagaataggatgtgttgatatgaaggctgttatatatgccagatattctagcgacaaccagcgcgaggaaagtgttgaa

SEQ ID NO: 23172 - DNA, 260 bp, Unknown
  Description of Unknown: LeftRegion for integrase B10173 sequence
gaagagacagcccgacgtattgaagcggagcgggcccgaagagcgaaagccctgggcagggataacagaggcagaaaaaaacagcctaagccgacgatttataagaacttttctatccccagggtgccggaaaaataccaggaccccatcaagcaggccgagtatgcatatagcctgattcaaagcgaggtgagcggataatggcattagcacaaaacatcacagtgattccggccagacgtaccatcggaacacagaag

SEQ ID NO: 23173 - DNA, 260 bp, Unknown
  Description of Unknown: LeftRegion for integrase B10174 sequence
attgctgtttatcgttcgttaggaatagccgagcaagccgactttattcaatatttattaaaattgaaaagtgataaaagtgataaataataggctttttccataaagtcctctatataattacttttatagaacactttactgaaaaacactaaaattactcacttttatcacttaaaatcacttttgagaggctgaaaatggaagttgtattatatttaaggtatagttctgaccgtcaaaacgagcaatccatagag

SEQ ID NO: 23174 - DNA, 260 bp, Unknown
  Description of Unknown: LeftRegion for integrase B10175 sequence
tcctactgagcctttggctacaatcaatttcgccaatacctctgtcgctcttccggtgagcttcacggcaatactcttatccaaaggaaattataccacagaaaaagaaaaccaccctttatgtgcggcaacacaggtggtttccataacagatgagatagatcggtataatcatccttaaatgctaaaaggattataacatggcttcaccatttcaacaaggagacaaggttgttgcatactgccgatattcggaaggt

SEQ ID NO: 23175 - DNA, 260 bp, Unknown
  Description of Unknown: LeftRegion for integrase B10176 sequence
catctttgtcgcattgtaaaataccataacgatcctgcatgttatgcttttgttggtgatcattttattggccagcttccggatgaggctttttcttttgctgatcgtttggatacgtcccccgaattcctcatttcaattgtcggaaaagttgaaaacggcgatatttacatttatatcgcagaataaaaggaagtattatgaaaaaaccaaccactcccacctgctccccgaagacggcggtcgcttacgcgcgttat

SEQ ID NO: 23176 - DNA, 260 bp, Unknown
  Description of Unknown: LeftRegion for integrase B10177 sequence
tggaaaaacagaatgctgaattattagaaaaaaatgaagagttgatttctaaattatcagccattgacgaattgcacaggaatgatattcgggcgataaaggccgaatatacagaagaaatcgccttcctgaaggaacagcttcgggcctggcaacgccatgaaggtataaaataaccatttttgaaagaagtgaggaaattgacagtatttgaaaaaaacaacgcaatagaagctgcattcagcaaagatatatatgct

SEQ ID NO: 23177 - DNA, 260 bp, Unknown
  Description of Unknown: LeftRegion for integrase B10178 sequence
ccgagcttcaccatccggtcgtggaccgcccctgctttggtgatgtacgaggcgcgcagcatgccggcgttgttgcgttgggccaggacatcggaataggcgaggtactgaagaatctgggcttggatggctttttctgggacggagcgttctttagacattcaattgggctattggcacattatactctcttgggtcaattgatcagcctcaagagccagcgcgaggctatccagaaatactgcaaggagcaaggctgg

SEQ ID NO: 23178 - DNA, 260 bp, Unknown; identical to SEQ ID NO: 17281
  Description of Unknown: LeftRegion for integrase B10179 sequence

SEQ ID NO: 23179 - DNA, 260 bp, Unknown
  Description of Unknown: LeftRegion for integrase B10180 sequence
ctgaccaccgcacacgaagcccttgtggcaaagatgcagaccgtggaagaagttcaccggaaggacgttgcagccatccgtgctgaataccgggaacagattgattttttgaaggagaataacgcattcttgcgcgaacgcttccagtgggcgcaagaacacgcaaagaaggattaacccaataaaaggacgtggaaaacgtgacagtatttgaaactaacgacataatagaaacatccatgccgaaaatggatgtatac

SEQ ID NO: 23180 - DNA, 260 bp, Unknown
  Description of Unknown: LeftRegion for integrase B10181 sequence
attgatgaggatacctaccgtaaggcacaggaagaacgtaagcgcagagctaccgcccttggtcgcaacaataagaaaacacaaaagaggcaaatacagataccgacctttttccatgtgggcgaggtcactgccttctataatgatcccatcaagcaggcagaatatctgtacaaccttatagaaagcgagatgaaataatgggaaatgtaatgctgattcctgcaaggcgtcaggttggaaacaccgcgcgaaagcag

SEQ ID NO: 23181 - DNA, 260 bp, Unknown
  Description of Unknown: LeftRegion for integrase B10182 sequence
gatttcgagtatgaaatggcggaaaagttcacgcagtcactctttgaaaaagggcttatttcggaagaggaaaaggccagaatatccacgttaaaccgggaaaaattctctcctttttacggcgatattatggagaaataacttgctatatgtggcctttagagtgatgtatagtatcgacctaataaggaggtgagacggtggtaaggataacaaaaatagaagctacacaaagctttgctacacaacaaaaaacacga

SEQ ID NO: 23182 - DNA, 260 bp, Unknown
  Description of Unknown: LeftRegion for integrase B10183 sequence
tctgaactggtacgcacagcagcaggatccgagcatcgagtcttcgtcttcggattcctacggcgggctctatgaccgttacaatgctctcgtcggagtatcgactccaagcaccgtcagcgatacggataaatggctgatctacgacggcatcacgacctcgacgcagttcgtcgaccttaaataataaggaggacatcatgcgtatcttcatctacgcccggaagtctgtcttttcggataagtccgactcggtggac

SEQ ID NO: 23183 - DNA, 260 bp, Unknown
  Description of Unknown: LeftRegion for integrase B10184 sequence
  modified_base (117)..(129): a, c, t, g, unknown or other
aacttctttcaggcgcagaagatcgctaaaaatatgctggagcttggacttatttccttgtcagaattcaacaaattaactgagataaaccgtaaaacattctccccgttttgggtnnnnnnnnnnnnntgcccaaaattccttgatatataagggattcagagctaatatgtgacactaacgaagggaggtgaactaccgtgaaaaagataaccaaaattgatggtgtacagaataatagcaccataaagaaggagctc

SEQ ID NO: 23184 - DNA, 260 bp, Unknown
  Description of Unknown: LeftRegion for integrase B10185 sequence
attaaaagatgatgagataaccgatatattgcgccagcacaatataaaatttgaagttgataaaccagaattattattttcttcggctataaaagttaacacttcatcatgccagcttccactctggaaagttgttcttttaatcattttatggccacttggtttgtattatttgataagcaaaaaaaataggagtaccaatggctgatactcctaaattaaatgctgcattttatggtcgatactctgctggaccaaat

SEQ ID NO: 23185 - DNA, 260 bp, Unknown
  Description of Unknown: LeftRegion for integrase B10186 sequence
tccggcacatggaaagctgtaggatctgtgctttccctttataccaaagataaatcaagcatgataacgctcgaatatgacgatgattatctctggtttgaacttgaacattaccgaattggcatgtcaaagacacctgacttttcgctttcacaatttcaatttttcggtgattgacttattggaaaggatcttgctcaatgaagaaatctgctgccccagcgtgcaatccgaagaccgctgtggcctacgcccgatat

SEQ ID NO: 23186 - DNA, 260 bp, Unknown; identical to SEQ ID NO: 15028
  Description of Unknown: LeftRegion for integrase B10187 sequence

SEQ ID NO: 23187 - DNA, 260 bp, Unknown
  Description of Unknown: LeftRegion for integrase B10188 sequence
attatgactttttactagcacagaaggtctcagaacagatgatgaagcttggacttatttccttgtcggaattcaacaaattaactgaaataaatcgtaaaacattctccccgttctgggttgagattatgcccaaaattccttgatatataagggattcagagctaatatgtgacactaacgaagggaggtgaactaccgtgaagaaggtaaccaaaattgacggtgtacaaaagaataccgccataaatagcaagctt

SEQ ID NO: 23188 - DNA, 260 bp, Unknown; identical to SEQ ID NO: 22746
  Description of Unknown: LeftRegion for integrase B10189 sequence

SEQ ID NO: 23189 - DNA, 260 bp, Unknown
  Description of Unknown: LeftRegion for integrase B10190 sequence
agaacaatcgatgcagagggtcgtgcgagaattattcaggatataatgaatacatccgatgcaaaagaaaaaagacatttaccggagaataaagcatttgtcggatgagtttatccatacaaaagttataccatttgaaaaagtagtagaatataaccacttactaaatttgttaaatagaccgagaggaaaatgatattatggatgttgttttatatatgagatatagttctgacagacaaaatgaacaatctatagag

SEQ ID NO: 23190 - DNA, 260 bp, Unknown
  Description of Unknown: LeftRegion for integrase B10191 sequence
aggtcgccgtcgtcctgatcgacaaccaggactccaccgtgaagcgcgttttcaaatcgcaggacggcatcacgctggtcgcggataatccggcagtgttcagcccgagattcttttcaaatgaagattgcctttccctgccggtcctgatcctcggcagagtgatttcgattcagcgcgagatgtgaggaggtctttatatgatagtggcactatatgcccgctacagctccgacaaccagcgagaggagagcatcgtc

SEQ ID NO: 23191 - DNA, 260 bp, Unknown
  Description of Unknown: LeftRegion for integrase B10192 sequence
atattatcactttgataatcggattctttgtcggaaaacaggtcaataagaagaaatctgataaggatgcacctggagaaccagaagatgctcaaattatagattaataaaagtgacgcttttaatattcgcctggccctgtccaggcttttttatttgtaaattctacgtaaattcaaagccccctaatatatttacaaatgaaagccatcgggtacatacgactatcagacgaggaccaaagcaactattcaattgaa

SEQ ID NO: 23192 - DNA, 260 bp, Unknown
  Description of Unknown: LeftRegion for integrase B10193 sequence
tactaaaaatgaatctgaagcgaaagggaaatagctatgaaggatcataaggatcatgctgctttaatgctgatagaaattcttgccgagcgggatctggtgaataaggaaacgctggatgctgtcagagagaagatcaagagtacaaatcatatacacaagatggctcatccagaagacttgaagattgagggaatgccatgactaatttgcacatgcctattggtagtgcacgggtctaccaggaccgaaatcgccca

SEQ ID NO: 23193 - DNA, 260 bp, Unknown
  Description of Unknown: LeftRegion for integrase B10194 sequence
cgatctcgactatcgccgggcgcaggacatcactaaaaagatgctcgatgacggcctgatttctgtggctgaattcaacaaattaaccgccatcaatcgggaaactttctctcccttgttcgcggaaataatgccaataataccttgatatgtagtcgctttagagtgatgtatagacgtacggaaaggagggacttcccttgaaaaaagtaacgaaaattgcggaaacagcgagctcgaaggtcaagctcaaaaagatc

SEQ ID NO: 23194 - DNA, 260 bp, Unknown
  Description of Unknown: LeftRegion for integrase B10195 sequence
tgaatacggttatattgttgcctccaagttgctcagggaaatgctggatcagggcctgattaccttagaccaatatcacaaaattgaccagaaaaaccgcgaaactttctctccgcatctggccggattaatgccaagtaatcgttgatataagtgggaagtagagccaacatgtcacctaatgaaaggaggacgagaccttgacaacgataacaaagattgaagcaaaaaagcagaaaaccgattgcaagctcagggtc

SEQ ID NO: 23195 - DNA, 260 bp, Unknown
  Description of Unknown: LeftRegion for integrase B10196 sequence
gcgaagttgattatgtgagagcacagcaaatactcacttctatgcttgagaaagatttaattaccttgtcggaattcaacaagataaccgaattaaatcgcaaaactttctcgccgctattagccgagattatgccttgaaatcgttgatataacttcgtttcagaggtaatatgtcacactgactaaggaggtgagaatttgaaaaaggtaacgaaaattgctcaaaacacggccaatttaaccgaacagactaagttg

SEQ ID NO: 23196 - DNA, 260 bp, Unknown
  Description of Unknown: LeftRegion for integrase B10197 sequence
gcgaagttgattatgtgagagcgcagcaaatactcacttctatgcttgagaaagatttaattaccttgtcggaattcaacaagataaccgaattaaatcgcaaaactttctcgccgctattagccgagattatgccttgaaatcgttgatataacttcgtttcagaggtaatatgtcacactgactaaggaggtgagaatttgaaaaaggtaacgaaaattgctcaaaacacgaccaatttaaccgaacagactaagttg

SEQ ID NO: 23197 - DNA, 260 bp, Unknown
  Description of Unknown: LeftRegion for integrase B10198 sequence
gctgcacggcggccgggtcttccttccacttcttctcccaatcgtcgagcgagggcacggttacttcggcacgtttcgagtaggcgtgatgcaccgccattgacttgtgccccagggcctgctgcgcaaaacgctcggggtagccgcacttaagggcacgctcagcccagacataattgacttctgcaaatgagcttgatatggtactgggtatgaaaacgcaagccattgcaactcacaggcaagcaatcatctggggc

SEQ ID NO: 23198 - DNA, 260 bp, Unknown
  Description of Unknown: LeftRegion for integrase B10199 sequence
tttgaatagatatgtgaatggcatcaaagttatggaaacgatgtttattaggaacatcatcgatgaagaagatttcataaaagcggagacgcatttagccaaaaaacattgtatcaaacctaatagcatttttaagcttaatgacttgataattgaagccaaaagagtgatatatagtaatacaaaaaaggagtgatacagtgagaacaagaatcaataaaatcgatgctgatgaacagatacttaagttgcaaagagtc

SEQ ID NO: 23199 - DNA, 260 bp, Unknown
  Description of Unknown: LeftRegion for integrase B10200 sequence
gcgcgcggaagctgatcgcgcgggcgtccgcactggcctggaatgccgcgattgccgtgttcgtgtcgataccaatttgcgttgccagttcggtgatttcgtcaattgagagcgtcattgcagtaccctttctctgtgtcctatcccgatgtattgaataatacactactaatcaaataatgtcaagaggggatttgacgatggcccacgcacgcatctacatccgccgctcggacgacgatcaatcgacctatagcccc

SEQ ID NO: 23200 - DNA, 260 bp, Unknown
  Description of Unknown: LeftRegion for integrase B10201 sequence
agaggttgattactggcgggcatataaaattctgcagaagatgcttaaggcgggactgatttcagaggaagaattcgacaaaatcgacaagttgaaccgcaaaactttctcgccgatgtatgcacagcttatggcctaattagcttgctattagcggcacacagaggtaacatgtcacatgcccaaaggaggtgaaaacagtgagaaaggtaacaaggattgatggaaacaatgctctccaagctttcaaaccaaaggta

SEQ ID NO: 23201 - DNA, 260 bp, Unknown
  Description of Unknown: LeftRegion for integrase B10202 sequence
tgaagcatagttgtttttgacctgaaaactttgccggatttgaagctaaaacaagctaagctaaaaattttctattgccttttcgtgaacgaaaaagagtaataaaaataaacaaaataattttttataatcaacactactatgcaattattttatgcacataccgacataaaaattaatcctgataaataactttaattatgatcgcagtaggttacgcaaggttaagcgataaagatagtagcagcaacagcattaaa

SEQ ID NO: 23202 - DNA, 260 bp, Unknown
  Description of Unknown: LeftRegion for integrase B10203 sequence
tagatctgctggcgcgactgcgatccgtagatcggagagtcggtctgagacggcctcattggtgatgtggcgcaactcacaccgagggagacgggtcatcatgggtagccatgtacgaaatgcccagtgatggtggagatggatatcccatgttggtccagacgaacacaggattttagaacctttctcagattacgatcatggacgtgaacagcacatcccccacagcagtaaccaagatcgatgtaatgctggtagtt

SEQ ID NO: 23203 - DNA, 260 bp, Unknown
  Description of Unknown: LeftRegion for integrase B10204 sequence
ccaatacgtggcaatcttagcaaaacagatcataaaagatgacaatggctggagacaaagatttcccgatggagttaatctaaatttattgacttattcagtcaatggggattatccataccaatcgttaactgactttgaaacgcttttggatgttgacaataagaaaatatcatatcaggagtgggtagaagcctcaaatgcaggtttcaaataaccacccattctcccttaactcgccggtcgttgcctacctgcgc

SEQ ID NO: 23204 - DNA, 260 bp, Unknown
  Description of Unknown: LeftRegion for integrase B10205 sequence
agaatttgattattatagagcagaaaaattgcttagaaagatgctcgaaaaaggcttaataacggaagtggaattcaacaaaatagacgcactaaatcgccaaactttctctccatttttgaaggagataatgccctcaaatcgttgatatataagggtttcagaggtaatatgtgacctaccaagaaggaggtgagaggatgaaaaagataacgaaaatagaaggaaatacggccaactcttttattaagccaaaaaca

SEQ ID NO: 23205 - DNA, 260 bp, Unknown
  Description of Unknown: LeftRegion for integrase B10206 sequence
cgaaggcatcaacctcgccaccgccacgcgcgcggagatggcgctggccttcgagcgcatccgcggcgccctcgccgacgtcatccgcatggaactggaacatcatccggagccctgagggcctccgagcagcagtgattacagacgcctactggtacccctaagcgaccatagggagccacaaagtaaccaaagcactcatgtggggacgccacagtcgctaccgtctccccatgagcaccctggctgacaccaccccc

SEQ ID NO: 23206 - DNA, 260 bp, Unknown
  Description of Unknown: LeftRegion for integrase B10207 sequence
attataacttctttcaggcgcagaaagtggctcaaaacatgctggagcttggacttatttccttgtcagagttcaacaaattatcgctgaaaaatcgtgagacattctctccattttgggtggagattatgccagaaatccgttgatatataaggctttcagagctaatatgtgacactaacgaagggaggtgaactaccgtgaagaaggtaacaaaaatcgaaagtgtgcagaatgcgaaaactgtaaaacagaaactg

SEQ ID NO: 23207 - DNA, 260 bp, Unknown
  Description of Unknown: LeftRegion for integrase B10208 sequence
agactggaacgctacctggcatctatgctccaggcaaaaaggatgctgtcgatggggattttaaccccagaggattacgccataattgatacaatgcagggcgagaaatttggaatatcttcgtgtagtttatatcgcgggattgacttgatatatagtggtttcagaggtaatatgtcacactacgaggaggtgacaaaatgccaagagcaataactattgtaccaaaaccaccgaaactggagcagaaaaagcgagtt

SEQ ID NO: 23208 - DNA, 260 bp, Unknown
  Description of Unknown: LeftRegion for integrase B10209 sequence
ggaacattataatttctatctggaaatacactataatgtaatgattgagagtctttttgatataattgatttctttgtataattttatatttattcatagttataaatatatatgtgtttcatttttttatataaaaaaaattgattatttttttattatgatatttgtttttataaaatgaatataataattatttacaatgagtaaaagaaatattgaaaaacttactgaatcatttgaaaagaatactattaaaaaa

SEQ ID NO: 23209 - DNA, 260 bp, Unknown
  Description of Unknown: LeftRegion for integrase B10210 sequence
tccctcctagttccatatgaagtgccttagcgatgcagtctgcgtactgttgttgagtcagaaaagagttgcccgtttttgtgaacatttttccctccccggtcttctaccttgtttagagccactttctaaaaaacgagatgctgatcgcggtctccgcgttgtttccagcggctgttgatcagaatgaggacatgtcgatgcaaactctcattggcgcgtataacactagcaatgcctcaaccgcagccatggcggcg

SEQ ID NO: 23210 - DNA, 260 bp, Unknown
  Description of Unknown: LeftRegion for integrase B10211 sequence
tgatacaggccgatagactcctaaaatataggattattagtgaggaagttcatcagcaatttaaggaaaagatgcttgaaaaatatcaaccatttattagtagattatcgacctaaagacttgataaatgaggcctttagagtgatatatagtagcgaaaggagtgtatcaaattgagaacagttagacgaattcaaccaatgatgacaccgcaaaaacctaagttgcgtgtagcagcatatgcaagggtctctgatagt

SEQ ID NO: 23211 - DNA, 260 bp, Unknown
  Description of Unknown: LeftRegion for integrase B10212 sequence
cacaatgggaccgggcagcgttcgatgcggctcttcacagagaggaggagggatgaagggcggaggcgatcaagtccagatggatgacgagatcgtcaactgttactgttgtttgcctgccgggcttgcttgggcgcaaccgatgtatgcagcattcatcgaccttcttcgggcgcgatgcagattcctaggcacttgccatgatgcggtcaggagcgatgatacgtaaggtcttccgctacatgcgagtctcgaccgac

SEQ ID NO: 23212 - DNA, 260 bp, Unknown
  Description of Unknown: LeftRegion for integrase B10213 sequence
aatgcgtacaacaggcaccctgttttgggttcaaccgttcaaccgttaaagataataattttcttttctaaaaataattatattattaagcctttaagcggttgaaaaaacggttgaaaacggttgaagccgcttcaaccgctctcaaccgctcacgacgaaaagcgccagcgccggcgcttttgagaggaagtgatgcgatgccgaccgcctacagttacgcccggttctcatctgaccggcagcacgagagcagcatc

SEQ ID NO: 23213 - DNA, 260 bp, Unknown
  Description of Unknown: LeftRegion for integrase B10214 sequence
gctcggaacgctcgagacgccggagcagctcctcgagttctggaccggcgaccgtatgcggtacctccgtcagatgcacctcgagggccgctatcgggagatcccggagtgccgtcaatgcgtcgacggaggatgcaggactaacgagtagcgcgcgcccggagtttacggtcagccgtaacaccggatagactcgcgtcatggcagccgtaatttacgcccgattctcgaccgagcatcagtcggagtcgacgatcgtc

SEQ ID NO: 23214 - DNA, 260 bp, Unknown
  Description of Unknown: LeftRegion for integrase B10215 sequence
ttgatgaggagacattcgaaaaagctaaaatagaaaaacaaaaacgagcagaaaagcttggaaggatatgggaacctaaagatgaaccagagacggattatcctgtaaaattcaaagcaaaacctctggtgcaaaaatatgacgatccatataagcaggcagaatatgcttacagtttgatagaaagtgaggtgtaaccagtggcagttagcaggaatgtaacagtaattccagcaattaaacgaatcggaaataataaa

SEQ ID NO: 23215 - DNA, 260 bp, Unknown
  Description of Unknown: LeftRegion for integrase B10216 sequence
cataaaggatgtaattctgcaagtcttcgtgatgatttgctgcgtactatggcagcacaggttctcagcattgatgcatttaatgaagaggagtttgaacggagaattgaccatatcgatgtggaagaagacagactgaagttctattttcgagatggtcattctgtaacggagcattggccaataccaaggaggaaaaaatgccaaaaataacgaaaatacctgcatcaatcagccgatacacatcagcaccgattgat

SEQ ID NO: 23216 - DNA, 260 bp, Unknown
  Description of Unknown: LeftRegion for integrase B10217 sequence
cataaaggatgtaattccgtaagtcttcgtgatgatttactgcgtactatggcagcacaggttctcagcatcgatgcatttaatgaagaggagtttgaacagagaattgaccatatcgatgtggaagaagacagactggagttctattttcgagatggtcattctgtaacggatcattggccaataccaaggaggaaaaaatgccaaaaataacgaaaatacctgcatcaatcagccgatacacatcagcaccgattgat

SEQ ID NO: 23217 - DNA, 260 bp, Unknown
  Description of Unknown: LeftRegion for integrase B10218 sequence
gatgatacagacgccgccatcgacgcggcgatgcggcgggagcagacgtgacgcccgccctccgcgaactcgtcgaactgctcgcgcgcgcggcatacgaagagatgaccgcgactcgccgaccggagacggaaccgccggtcgaggtcgagtcgcgcccggagtttacggcagtccgtacaacggactagactcgcgtcgtgcgctccgtaatctacgcccgattctcgaccgagcatcagtcggagtcgacgatcctc

SEQ ID NO: 23218 - DNA, 260 bp, Unknown; identical to SEQ ID NO: 23181
  Description of Unknown: LeftRegion for integrase B10219 sequence

SEQ ID NO: 23219 - DNA, 260 bp, Unknown
  Description of Unknown: LeftRegion for integrase B10220 sequence
ggaatttctgattttgatgaagatatttttcggtcggaaattcaacaaatcaatgttcctgcaccgaatcagctggagttcattttccacaatgacacaacgaaaactgtggaatggcaggatcgctcacgctcggaaagctggacggatgagatgcggaaacaggcaggtcggatttcaaaagaaaggagatggcacagatgcccgtagtaaccaaaattccagcaaggctgcaccctgcgacctttgtacctcttgaa

SEQ ID NO: 23220 - DNA, 260 bp, Unknown
  Description of Unknown: LeftRegion for integrase B10221 sequence
catccttaagaagctactgggcatcaagggcaagggaaaataaaataaaaagcccctgccatatcgtgaaatatgacaggggaatgcagccaggcattaccagtaccgggttgcggttataatccactcttgtcggaggcagattatgtatatattatatcataaagcctccaaacaccctagaaggaggctctatttttatgcctaaaacagaagaaaagcaagccgtaaaggccgtaatatatgccagatactcgtcg

SEQ ID NO: 23221 - DNA, 260 bp, Unknown; identical to SEQ ID NO: 22549
  Description of Unknown: LeftRegion for integrase B10222 sequence

SEQ ID NO: 23222 - DNA, 260 bp, Unknown
  Description of Unknown: LeftRegion for integrase B10223 sequence
gattacgactactttatggctcaagaaactgcaaatgcactgctatctgctggacttatttccttggtggaattcaacaaattaacccagataaaccgcgacacattctctccgatgctccgcgatattatgcctaaaatcacttgataaatgcagcatttagagtgatgtatatacactgacgaaggaggtgaattaccgtgaagaaggttactaaaattgataaaatacagccttccaaagcagctaagagaaaactc

SEQ ID NO: 23223 - DNA, 260 bp, Unknown
  Description of Unknown: LeftRegion for integrase B10224 sequence
gcgcagatcggactggctctgaaacgcgctcgacgcaagaagcatctgactcagcaggacatctcagacaggacaggaatctctcgctcagtaatcggaagatatgagacagggatgattgagatcagcatctccaatttcattagcatctgtgaggcgattggatgcgatcctagcgtcattctcgaagggaggagcgaatgaccaccgctgtcatttacgctcgttattcgtcctcaaatcagcgcgaggagagcatt

SEQ ID NO: 23224 - DNA, 260 bp, Unknown
  Description of Unknown: LeftRegion for integrase B10225 sequence
gggtttttccgtgtcagcgcgagggcaaaaaagcgcgactgtttcgagttcagcaaggggacccttgtatcaggcatcacagacccctctgaagtcaaaaccattgatttttccctgaccctttccccgcccaaaggcaaggatatatttgttcagaaagattatacccattatgatctgccctgatcatggaggccgatatgccaaaaacaaaaaaagcgacgtgcagcccgaaaactgccgtcgcttatgcccgttat

SEQ ID NO: 23225 - DNA, 260 bp, Unknown
  Description of Unknown: LeftRegion for integrase B10226 sequence
gcgcagatcggactggctctgaaacgcgctcgacgtaagaagcatctgactcagcaggacatctcagacaggacaggaatctctcgctcagttatcggacgatacgaaacaggaatgattgagatcagcatctccaatttcattagcatctgtgaggcgattggatgcgatcctagcgtcattctcgaagggaggagcgaatgaccaccgctgtcatttacgctcgttattcgtcctcaaatcagcgcgaggagagcatt

SEQ ID NO: 23226 - DNA, 260 bp, Unknown
  Description of Unknown: LeftRegion for integrase B10227 sequence
actacaactattttatggcgcagagggtagctaaggatatgcttgaaaaaggacttatctcgttggaagaattcaacaaattaacaaagaaaaatcgtgatacattctctccgtttttagccgagattatgccaaaaacaacttgacaattgtgacatttagagtgatgtatatacaagtgaaatgggaggtgagttatcatgaaaaaggttacgaaaattgacaaaattcaacctgcaaaaaatgccgaggataaactg

SEQ ID NO: 23227 - DNA, 260 bp, Unknown; identical to SEQ ID NO: 23183
  Description of Unknown: LeftRegion for integrase B10228 sequence
  modified_base (117)..(129): a, c, t, g, unknown or other

SEQ ID NO: 23228 - DNA, 260 bp, Unknown; identical to SEQ ID NO: 23187
  Description of Unknown: LeftRegion for integrase B10229 sequence

SEQ ID NO: 23229 - DNA, 260 bp, Unknown
  Description of Unknown: LeftRegion for integrase B10230 sequence
tgatgagatcaactatttcagggccgagaagctgacaaagaagatgctggaacagggcctcatcaccgctgaagaatgtgacaaaatcctggccgaagcccgcaaaatctttgtgcctattatggcggaacttatgtgagatgcaacttgatatgtgcccgacagtattggaacatcggactacgaacggaggcgagaccatgaaaaagataacaaaaattgaacctacagtagtccagacagctgcttctaagatcaga

SEQ ID NO: 23230 - DNA, 260 bp, Unknown; identical to SEQ ID NO: 23229
  Description of Unknown: LeftRegion for integrase B10231 sequence

SEQ ID NO: 23231 - DNA, 260 bp, Unknown
  Description of Unknown: LeftRegion for integrase B10232 sequence
gcgaagtggactactaccgagctcaacagatcttaggcatcttgctacaaaacggactcatttctaagtctgaatacaatagaatcacccagctgaatcgcgaatccttctctccccttttagccaaaatcatgccaagtttgacttgatataagtaggcattagaggtaatatgacacactaacaaagggggtgaaagattgaaaaagataacaaaaattgagagaaatacttcagttgcttcagaacagcccaaactt

SEQ ID NO: 23232 - DNA, 260 bp, Unknown
  Description of Unknown: LeftRegion for integrase B10233 sequence
caatcgcttacgttagttgtatttttagttgactaattgagcattttagttgactaattgagcaaaaatataagaaaagacaaaaaccgcccggcctgcggcaacaggtcgagcggtcgttttctccacagaaggagcttcgcaaattgtattattaattatagcctccttctgtgcgcattgcaacggaggctttttctatgtccgaaaatgctgtggtttacgcacgctactcttcccgtggccagaatgaacagtcc

SEQ ID NO: 23233 - DNA, 260 bp, Unknown
  Description of Unknown: LeftRegion for integrase B10234 sequence
ccgcttgtcctgattatctgcgtcattctctatttcgttttgtagcatacaaaaaaggcgcgccgcgccccgacgtgccttttctgcgtagaacattctattccaatgggaatttagaggaaaccgttactcatggaagttttagtatcggttcactttctattgtacccataaacgacattctgtaaagggggaggaatatgattgcagccctttatgcgcgctattcgtccgacaatcagcgcgcggaatccatcgtg

SEQ ID NO: 23234 - DNA, 260 bp, Unknown
  Description of Unknown: LeftRegion for integrase B10235 sequence
ggtcaaacccagtaaacatatggtattgttgtaagttgttataatatattatgtgatttattatatagatggattgttgacaatagtcaactcgtagtaagtcgtatgatttttgatgtaaacaactttgaatttgcaatttacatcgttttttcgacagtttgcaacaataggaggactaggaattgagtgtagcaggcgtgtattgccgtcaatcaattgagaaacgtgacagcctttcaattgacgcacaggcagaa

SEQ ID NO: 23235 - DNA, 260 bp, Unknown
  Description of Unknown: LeftRegion for integrase B10236 sequence
gaaaaaatcggcgccgaacttaaacgacgccgaaaagaaaagaaactcacccaggaaaaattggcggaaataaccggcattgggcggactgcgattgcgaaatatgaactcgggacaatagagctcgggttgtctcacttttcgatactctgcgacgctctcgaatgtactcccgccgagttctttcaggagctcaactcatgaccaacgccgttatatatgcccggtactcgtccagcggtcagcgtgaggagtcgata

SEQ ID NO: 23236 - DNA, 260 bp, Unknown
  Description of Unknown: LeftRegion for integrase B10237 sequence
cgaggagctggagcgcgaagcggcgcaacggattgccagccagcggggccagccatgaaggcgctgtggttcgttggcatgatcgtagccctatcggtggcgatcgcggccgggcagcacggcggcgttgtcggctggctgatctgcgccctggcggtcttcgccttcatggtcgccggcggatacatgatgggcagcaagtgaccgacctaccctgggcgatctacacccgcgtcagcaccgacgaccaggcgaagaag

SEQ ID NO: 23237 - DNA, 260 bp, Unknown
  Description of Unknown: LeftRegion for integrase B10238 sequence
tcacgcataaagcgtacaataggcaccctgttttgggctcaaccgttcaaccgttaaagataataattttcttttctaaaaataattatattattaagcctttaagcggttgaaaaagcggttgaaaacggttgaaaccgcttcaaccgttatcaaccgcaaaaccgccagcgctggcgcttttgagaggaagtgatgcgatgccgaccgcctacagttacgcccggttctcatctgaccggcagcacgagtccagtatc

SEQ ID NO: 23238 - DNA, 260 bp, Unknown
  Description of Unknown: LeftRegion for integrase B10239 sequence
tgcaggacaagagatggcaagggtgttgaggcttgtctaggacgtaccgttacagaagaacaactctttcaagcctttggtgagagcataaatatagaagacattcaccatatttcttttaatagcgtgaccaatgaagctaaagtaacctatagaaatggagaagaaaaacacgtcatcattcagaaaggacggtagacatgaaaaaagttatcacgatagaaccagccaaacaagtcacccataaggttgaccttccc

SEQ ID NO: 23239 - DNA, 260 bp, Unknown
  Description of Unknown: LeftRegion for integrase B10240 sequence
aagacaccgatctggagacggcagagacctagcacgaagatcaagcgtaaggttgcgaagttcacagggatcccgacaaccaagagcggacgcaaggcgaagatccgcagagcgtgtatgcctggatgcgtcgtgtcgatcgcagcggtcggagctgcggcctatctgattgcacagatgttttgaaggagtgatgcagtatgttcttgctgccagagctgaaaccggaagagattctgatatacctccgcaagagccgg

SEQ ID NO: 23240 - DNA, 260 bp, Unknown
  Description of Unknown: LeftRegion for integrase B10241 sequence
agatcagtgatcttgacatcaagtgcagctgctatcgcttcaagctggcgcagtgttggcgatgtgatgccgttttcaatcgtgttcagtgttgacttgctgattcctgtcagggcttccagctgcttcaaagtcaagtgtctgtctgttcgtgcctgccacgttaggatttccattgcgtcatcctcctagttttgattatgtacacgcttcaggcactctatacaaataaaaaaggaagccgtgaccagcgacttccc

SEQ ID NO: 23241 - DNA, 260 bp, Unknown
  Description of Unknown: LeftRegion for integrase B10242 sequence
gtgactataaatattgtatagcacaaaaaatgacaaaagcactgcttgataaaggtctgatttctgtggatgaattcaacaaaataagcgaaagaaaccgccaaactttctctccatatttagctgagattatgccctaaatgacttgatatatatcgattagtacgggaatatgtccataccgaaagtgaggtgagttgatgaaaaggataacaaaaattgaagaaaatagagccttatcagttaagaagaaaacccgt

SEQ ID NO: 23242 - DNA, 260 bp, Unknown
  Description of Unknown: LeftRegion for integrase B10243 sequence
tctgtatctgacggctggattgtcaataatcaagacaatgtaattgatacaagcatttcaataagtggagattctgaatcttcaatttgccttgttaaatttttaacaccaaacgaagattattacacccctacatctagtcaatccaacattgttgttgaatctattactggtcaagtgatagttaaataggagtaagtatgaaaaaagctgttatatacgcacgatatagttctagcagccaaacagagcagtctatt

SEQ ID NO: 23243 - DNA, 260 bp, Unknown
  Description of Unknown: LeftRegion for integrase B10244 sequence
atatacaaaattatacaaaggtgctaaacacgaaggatatgctgtatttcaagtaagtgttaaagactcgaatccattaataacatttggtagggattataaaggtaatggtggatgttggattaaaacattttaatatacctactgcctagtatttactttttttatactaggcagtttttagttaaaaggagagttatatggaaaaagtagtaatatatttgaggaaatctcgtgcagatgcagaagctgaattaatg

SEQ ID NO: 23244 - DNA, 260 bp, Unknown
  Description of Unknown: LeftRegion for integrase B10245 sequence
gttagcttttaacaaagctgcggaacttttccctaaaagaatcgaaagttataacgatttggccagaatatatgctcttctgaacaacaaggccgaatgtgttaagaatataaagaaaatggcagctatagacgttaattcaaaaggatttataataaacgacaacaccctaacatctttgctgacaatgattgagatagatgatttatatagttaaaggagattatatgaaagcggcaatatatgcaagatactcaagc

SEQ ID NO: 23245 - DNA, 260 bp, Unknown
  Description of Unknown: LeftRegion for integrase B10246 sequence
gtctgatgtgtcctcaatgagaacatggactttcaaagggaatgtttatttcgctgtcgaaacaaaaacgaacaatgaatataaattttcattcggaactgtcgatttttggttgaaagctgtcgagaattacgcaaaagaatttgacattccgtttgaatattgcggggaatcagaggaaagttcggaagacgacgacaatgacgaataaagcaataatttatgcaagagtatcttcaaaagaacaggaaacaggcggg

SEQ ID NO: 23246 - DNA, 260 bp, Unknown
  Description of Unknown: LeftRegion for integrase B10247 sequence
gataaggctgaagaaataaggatggaaaggattcgataccttaatcgatgcaaggaacttaagccgaaagataaaccttccatcccttgcaatttcaaaatggcaaagcctatggagaagagatgtgatccatacaaacaggcagagtacttgtacagccttctggaaagtgaggtgtagaagtgggaaaaacaataactatgattcctgcaaaaagacgtgtaggaaatacagtaaaggaagaagatcggccaaaactt

SEQ ID NO: 23247 - DNA, 260 bp, Unknown; identical to SEQ ID NO: 15538
  Description of Unknown: LeftRegion for integrase B10248 sequence

SEQ ID NO: 23248 - DNA, 260 bp, Unknown; identical to SEQ ID NO: 16973
  Description of Unknown: LeftRegion for integrase B10249 sequence

SEQ ID NO: 23249 - DNA, 260 bp, Unknown
  Description of Unknown: LeftRegion for integrase B10250 sequence
gtaaaagaaaagcatgatcatctaaaatcttttgaaaagggacgcaatttctggcgcggctgtgccgtttttttgggcggtgtggcaatttgtatggctatttggcttgtgtgggagttctctaatctggatcttggccttaccggctatctgctcaggcagtctggcattatttccaaaatcggcgggggtgtgtgaaaatggcattttgcgcatatgtgcgccgttcgcgtttggattatgaggccgaacgtatcagc

SEQ ID NO: 23250 - DNA, 260 bp, Unknown
  Description of Unknown: LeftRegion for integrase B10251 sequence
tgttctgtttatccgattcaccttacccaaaagtagagatttccctaacaagaaaagagaaaatccttattgacgcataccgtgctgctgatgacatgggacagttgaacataatctatgtctgcctggatgaaatgaaaaaagcaaaaggggacagcgaaagtgccgtgtgattgattttgtagagtggaggaagaaccatgtatgaggatataaaaacagcctgcctatatgttagattctcaagccataaccagact

SEQ ID NO: 23251 - DNA, 260 bp, Unknown
  Description of Unknown: LeftRegion for integrase B10252 sequence
atatcgaaagcctaacaagacgatatattggcgatgccctaactgcttaggaacagctatcgatgaatcgaaaattgtcaaggcatataaaatggtatcttctgagccgtttgaggaaacaatagattatatattgaaaggggaatttcttgagttttatttttacgacaataacgtaacgatagtggaggtttaacgctatgccaacagtaatagcaatacccgctactagacgggaagtaagaaaaacaaattcagtg

SEQ ID NO: 23252 - DNA, 260 bp, Unknown
  Description of Unknown: LeftRegion for integrase B10253 sequence
aatgacatggttgcagtccttaagcggttgaaaagtgcgactatgatggaagcaggtaacttccttggaggaacttcaatgaaggatgcagctcttctaaacgcgacatttcagcgcatgattgttcagcaaaacatcgttatcattaggcagcttgatcgtcttaccacgttactatcaaaaaaggatcaatcgcagcaatgatcccggctgtgatatacgctcgttattcgagtacaaaccagcgtgaggaatccatt

SEQ ID NO: 23253 - DNA, 260 bp, Unknown
  Description of Unknown: LeftRegion for integrase B10254 sequence
gaacacatcagaaacggtgactttgataacatcgtggacaagaacgtaggcttcattgagaacagagcgcacaaaaaaagaccctgagaaacatgataaaaactcagagtctttccgctcaagtcgcatggggatgcaactcaagcacacacacaagagtattgtagcatcccctctttctcttttcaaggggaatctatatgtacaaatatctgatgtatctcagaaaatctagggctgaccgggacttctccgatgaa

SEQ ID NO: 23254 - DNA, 260 bp, Unknown
  Description of Unknown: LeftRegion for integrase B10255 sequence
gctgtattgcttattgcgatatactactatgaaaacatagctatagctgcgacagcgtttgctgcagcaatattttttacttacatctctatagcttgcggggtttatgttatgcttataattccggctggctgtttaatttatggaattattgcaattaaagacaatcctccaaagcgtaaaaggaggactgataaaaaatgaagaaggctgtaatttacgctcgatttagttctcatagccaaacagaacaatcaatc

SEQ ID NO: 23255 - DNA, 260 bp, Unknown; identical to SEQ ID NO: 13029
  Description of Unknown: LeftRegion for integrase B10256 sequence

SEQ ID NO: 23256 - DNA, 260 bp, Unknown
  Description of Unknown: LeftRegion for integrase B10257 sequence
tcgatgctccgcttccttttgaataatggaaaacccgccgtactgttagcgcagtaaggcgggctggtcatgccgtgtatgatatgagcgatatgtaaccgcaagccgccgcaggcttccggtcggagcatatcaacacttccgagcgaacttattatacaccgaatggccgcaattcacaagcaggaggtgtattttttatgcgtttctttacctatggcaggaagtccgtttacaaggataattccgattctatcgac

SEQ ID NO: 23257 - DNA, 260 bp, Unknown
  Description of Unknown: LeftRegion for integrase B10258 sequence
gacagtaattccatcaaaacccggacattttcgcgtaaacctggaggcagtacgacaacgaattgaaactgaatatggaattgatgtccaagaggttgagcaacttgtcatccaggtgtccgatattgaagaaatattgcaaatgaatccatatcgctaatatcttccgaaacaagttataatcatggggaggtgatcacatgaaccgccctacccatttggacgtatttgtttaccttcgcaagagccggaaggacgtt

SEQ ID NO: 23258 - DNA, 260 bp, Unknown; identical to SEQ ID NO: 23251
  Description of Unknown: LeftRegion for integrase B10259 sequence

SEQ ID NO: 23259 - DNA, 260 bp, Unknown; identical to SEQ ID NO: 23195
  Description of Unknown: LeftRegion for integrase B10260 sequence

SEQ ID NO: 23260 - DNA, 260 bp, Unknown; identical to SEQ ID NO: 23196
  Description of Unknown: LeftRegion for integrase B10261 sequence

SEQ ID NO: 23261 - DNA, 260 bp, Unknown
  Description of Unknown: LeftRegion for integrase B10262 sequence
tagagtggtggttctgggtctactatagccctatgccctcagtcttgacgagcttccgccacactcagtacgcgccttacgcctccgcgcgcgcgttcgggctggtgaggggccatagatcttccccgatatgtgcgacagcgagcgggccaggccccaccgggcgcagggcggggtcatcgggcgggcccaggggtagcgtgaccgccctgcacgaggctcgtctgggtgcagccggcatgtccggggtgaggatgccc

SEQ ID NO: 23262 - DNA, 260 bp, Unknown
  Description of Unknown: LeftRegion for integrase B10263 sequence
gcgaagttgattatgtgagagcacagcaaatactcacttctatgcttgagaaagatttaattaccttgtcggaattcaacaagataaccgaattaaatcgcaaaactttctcgccgctattagccgagattatgccttgaaatcgttgatataacttcgttttagaggtaatatgtcacactgactaaggaggtgagaatttgaaaaaggtaacgaaaatcgatgaaaataaggctgatatcacggagcgttcaaagcta

SEQ ID NO: 23263 - DNA, 260 bp, Unknown
  Description of Unknown: LeftRegion for integrase B10264 sequence
catttcctcaccgccttatgtatatattatatattataatacgtgttttgtcaatacgtattatagcattattttaaaaaaatccccgccggtattggcgtaccgacgggggggaaaaaatcctccgaatattgctattcgaacctgagcagttctattatagcagtattcgctccggaaatcaagagaggagtgatattatgtcatactgtatatatctcagaaaatcccgtgcagattcagaagcagaaatgcgtgga

SEQ ID NO: 23264 - DNA, 260 bp, Unknown
  Description of Unknown: LeftRegion for integrase B10265 sequence
tgacaaagacactttcaacactgccgaggcggaacgaattatgcgggcggaaagactcggccgtaccaaaaagtttagacaagaaaaagaggtcgtttatcctaccaccttccgcatgaaagaaggaacagaggaattcgacgacccattcgggcaggcggaatacgcctacagtttaattgaaatggaggtgaacaagaatggcagtcagtaaaaatgtcaccgtgattccggcaaggaagcatactcgcaagagcaag

SEQ ID NO: 23265 - DNA, 260 bp, Unknown
  Description of Unknown: LeftRegion for integrase B10266 sequence
aacgataaaattataacactagctaaatgcagtatatgtgggaaaatgtttaaagtgcctctaactcctgatacagcaagagcattagaaaattcaaaagagcttggttttatctgtccaaactgtgctgtaaaagagatatataagaacaaaagagtctttaaacctgtaaaataaaccttaaagcgaggtgttatacaatgaaagcagcctcttacgcacgtttttcaacagacatgcaaagagaagaatcaatagaa

SEQ ID NO: 23266 - DNA, 260 bp, Unknown; identical to SEQ ID NO: 23194
  Description of Unknown: LeftRegion for integrase B10267 sequence

SEQ ID NO: 23267 - DNA, 260 bp, Unknown
  Description of Unknown: LeftRegion for integrase B10268 sequence
gaaaagataatcatggaacatggcgggaaatgtacacagaaatcatccgccgcgacagactatctggtcatgggctcgttcccgaatcttccgcagacttatgtttccagcgctgttatttcagccaggaagatttcccaggaaggcggaaagattcagatcatctctcctgatgacgtcctgaaaatgctggaggaatcatgaagaagaagcaatcaccctcctgccgtccgaagaccgctgtggcctatgcccggtat

SEQ ID NO: 23268 - DNA, 260 bp, Unknown
  Description of Unknown: LeftRegion for integrase B10269 sequence
ttaatttttttaaatttttaaacaaatattcttaccttctaaatcaatttattcattttaaattcattatatacttactatattcaccttattcataaataacacatatttttaataaattttttagttctaaaaggataatctatacttaatatagaatactaatctatatattactatatgaaataggagtagattatatgactaaagacttaattcctgcggttgcctattgtcgggtatcaactctatcagacgac

SEQ ID NO: 23269 - DNA, 260 bp, Unknown
  Description of Unknown: LeftRegion for integrase B10270 sequence
ttcggggacccagctttgttccttcccaagtcaaccacgaagaacccgcccgatgggcacttcaattatcgcacagaagggttgatgaaaatagtcgaaattaatggaagacggtgaacgaaaagcgccccggcgggtgctgcaacacccccagggcatggtccagccacctatcgggtcaggaaggacggttagattatatggccgacgcggtcatctatgcacgctattcgagcgagcggcagcgcgacgagtccatc

SEQ ID NO: 23270 - DNA, 260 bp, Unknown
  Description of Unknown: LeftRegion for integrase B10271 sequence
atcacaaaaaaaagaaaagaaaaccggcttgaaattggatatgacgacggtgtctggattggagacaaagaccagctatccatccgtgtcggcaaggatgtattccaagccaacatagatgatgccggattcctgtatgtttcaaaggatgacataaccgttcgcttctttcggatagaagaaccggatggtgataacgcatgaagaagaagcaatcaccatcctgccgtccgaagaccgctgtggcctatgcccggtat

SEQ ID NO: 23271 - DNA, 260 bp, Unknown
  Description of Unknown: LeftRegion for integrase B10272 sequence
acgaaaaaatggaacaggagagggagcagtggtccaggagcatcgacttcctgaaaaaccaggtctctcttaaggacaagagaatagatgtccttttggaagcggttcaagctaaggactctaagttcgatcaagttttggatcttgtactctcctgcccttgtcgaaaggctcacgaagagagctgagaggaggtcgttatgagattttacacttacggtcgaaagtccgtgtataaagacaactcagattccatagat

SEQ ID NO: 23272 - DNA, 260 bp, Unknown
  Description of Unknown: LeftRegion for integrase B10273 sequence
gataagaacgagcagacctatgcgtatacaggagattactgcgtcttgtttttgagatcaagtgtagaataacagaaaaatccgcccacggctggaaccgtcggcggatcaaacgcaaggaaaatgcaaacaccactaagcactttccgcagacagtatatcatatactgcctgtgttgtaaagccggaaaggattaagaatgaacgcagtgatctacgcccgtttctcgtcgcacagtcagagagagcagtccattgaa

SEQ ID NO: 23273 - DNA, 260 bp, Unknown
  Description of Unknown: LeftRegion for integrase B10274 sequence
caacatcctcatcgccgcgacgtgtgtgctcctgcttaccacggcggcactgacatcgattttcgtctgggaaatcaagaatatcaaaaacggatcgttttgcacggcatgggttcagcatgtagacccgtcgtgaagacatataaaacccctgtccggcgtttccggacaggggcaatacaaatccggaggtgtttactgtggcagcaaagccgtctgatcgatatgcgatatacctgcgcaaatcccgcgcagatgta

SEQ ID NO: 23274 - DNA, 260 bp, Unknown
  Description of Unknown: LeftRegion for integrase B10275 sequence
attctcacactttggaagacaatacccccatctacaaagatcctgaatctaaagtggagataccgaacataaaagttgtgtccgtggtggatgaaatccgtggtttgaagcagctgctggatgagggaatcctgacagaagaagaatttgctgccaagaaaaagcagcttttggaaatttgaaatgggtggtgatggtcgatggcccgaaaaaagaatatcgctgcgggtcaggatgccgtcatctatgcccgctactcc

SEQ ID NO: 23275 - DNA, 260 bp, Unknown
  Description of Unknown: LeftRegion for integrase B10276 sequence
tatattccaacaatggaagcgatgcaggaataaatgaagtatttggaaagaaagctacaatggaatctaaaaacatagtactttcttctaaaacaacaacactaacaataaaaggggacgtaaaagttaaattaattgagcaaaaataactaagggctctacattgtagggctcttaataattaataagggggataaaaaatgcaagtagcaatatacacacgtaaatctatctacacagacaattccgagagcatacac

SEQ ID NO: 23276 - DNA, 260 bp, Unknown
  Description of Unknown: LeftRegion for integrase B10277 sequence
gcctcaccggcatgtggctgcgctagagcggcaaatccgcagtcgcctgcggaaataaaaaaatccacacccgaccgccatcaggtgtggacatgcaaaccgtcacgattgatcatccgtggatctgccctcatattatagcacgtccacggattttttacaacatccgcaacgtgctatttttttgaggagtgatcgatatgagcgccgtccagcccaacaaatatgccatctatctgcgcaagtcccgcgcggatctg

SEQ ID NO: 23277 - DNA, 260 bp, Unknown
  Description of Unknown: LeftRegion for integrase B10278 sequence
atgcatacgacaaagataataaagttatgatggctgaaaattttggtgatgatgaaagaaaaataaaatactttactaatgcacaacttaaaaaagatgttgtgttaagaatttcgggggttaaagttagactaattaataaaaaataactaagggctctacatagtagggctcttaataattaataagggggataaaaaatgcaagtagcaatatacacacgtaaatctatctacacagacaattcggagagtatacac

SEQ ID NO: 23278 - DNA, 260 bp, Unknown
  Description of Unknown: LeftRegion for integrase B10279 sequence
tgttctgtttatccgattcaccttacccaaaagtagagatttccctaacaggaaaagagaaaatccttattgacgcataccgtgctgctgatgacatgggacagttgaacataatctatgtctgcctggatgaaatgaaaaaagcaaaaggggacagcgaaagtgccgtgtgatagattttgtagagtggaggaagaaccatgtatgaggatataaaaacagcctgcctatatgttagattctcaagccataaccagact

SEQ ID NO: 23279 - DNA, 260 bp, Unknown
  Description of Unknown: LeftRegion for integrase B10280 sequence
acgatctcgactaccaacgggcgcagaggactgccagatgcatgcttgatacaggccttatttccgatgacgaattcaacaaattatgcgacatcaaccgcaaaacattctcacccctgtttgcggaaatatatccgaaaactgcttgctatgtgtccgaaaaagagtgattgatagacactaacaaggaggcaggccaattgaagaaaatcacaagaatcgaacaggcaagcaagggaaaaacagagccaaagaagctg

SEQ ID NO: 23280 - DNA, 260 bp, Unknown; identical to SEQ ID NO: 23184
  Description of Unknown: LeftRegion for integrase B10281 sequence

SEQ ID NO: 23281 - DNA, 260 bp, Unknown
  Description of Unknown: LeftRegion for integrase B10282 sequence
aatctttccaatcctgccgatcgggaatccgtgcgcaaaattgtttccgaattactaggcaccggaatgatggaaaccgggatgaaattgcaattggccaaggcggaggttgctttgcctgtttactatcagcgggcaatccttgagcagaatttcatcatgatccgtcaactcgatcggattgcacaattgctggaaaaatgaccccggcagtcatttatgcccgttactcatccagcaaccagcgggaagaatccatc

SEQ ID NO: 23282 - DNA, 260 bp, Unknown
  Description of Unknown: LeftRegion for integrase B10283 sequence
ctaaattactatgcgtaggttatacattttccaataaaaataaattagaaaaacaagctaattactttgcttttaaattaagtgatctgcattttgatgaaattgaattgtatgaaatgtccctggaacaaatatgttgctctttagaaataccctataatgttgttaatcaattagttaatctgtaagaaggtgaatgtatgttaagagctgttgcttactgtagatatagttcagataatcaaagagaagaaagtatt

SEQ ID NO: 23283 - DNA, 260 bp, Unknown; identical to SEQ ID NO: 23226
  Description of Unknown: LeftRegion for integrase B10284 sequence

SEQ ID NO: 23284 - DNA, 260 bp, Unknown; identical to SEQ ID NO: 22683
  Description of Unknown: LeftRegion for integrase B10285 sequence

SEQ ID NO: 23285 - DNA, 260 bp, Unknown
  Description of Unknown: LeftRegion for integrase B10286 sequence
caggaagacgcggaccggccaggcaagtatgaagtgctctataacggcagccgaatcggctatctgcctgcggcggctataaaatatgccgaagaatcaggatatgatccagaagagctgaccgcttatatcgccaatgtcgaatatgatgatgaaaaagagcgcgatatcatcagcgtatacatctccggtaaacgagcatgacccccgccgtcatctacgcccgctattcgtcgcacaaccagacggagcagtccatc

SEQ ID NO: 23286 - DNA, 260 bp, Unknown
  Description of Unknown: LeftRegion for integrase B10287 sequence
aagatatcgactattaccgcgcccaaatcatcacaaaagccctactcgatgcggaactgatcagcttggaagaataccacaaattgagcgaattgaacgcgcaatctttctctccgtttctcgtggatatatttcctaataccgttgataatactgcggttcagaggtaatatacgacactaccaaagggaggtgaaacagtgaaaaaggtcacgaagatcaaggcaaagcagactcctgcagcggaaaaagctaaactg

SEQ ID NO: 23287 - DNA, 260 bp, Unknown; identical to SEQ ID NO: 23222
  Description of Unknown: LeftRegion for integrase B10288 sequence

SEQ ID NO: 23288 - DNA, 260 bp, Unknown; identical to SEQ ID NO: 23193
  Description of Unknown: LeftRegion for integrase B10289 sequence

SEQ ID NO: 23289 - DNA, 260 bp, Unknown
  Description of Unknown: LeftRegion for integrase B10290 sequence
acacgtaaaattctgaccaacggtcttctgatcggcatcatcattgtcatcatcgcctgcgtgccggatggttttgagcgtgtcgcgtcctggttctttccgccccggctctacattgccatcgctgctgtcatcatcgtgatccttttgaagatcctttttgagcttcgcaatcgtaataacgggaatggtgatggtcagtgaaaaagcccgtctccccttcctgctctccccgcacggctgtcgcttatgcccgctat

SEQ ID NO: 23290 - DNA, 260 bp, Unknown
  Description of Unknown: LeftRegion for integrase B10291 sequence
gcagatctcgcggcgctgatcgacgggagcatgtacggtcactacgcactgctccttcgcaggtcgtagacgtgcaaccgcttttcaacagcggtgcaacagatgtgcaactggtcagccgggtgactggggtatggtctgaccgatcatccgtcggcgcggtcgccgaccgaataagcgccatgctcgaaaggcacgccatgccgcccaccgacccctccgagggaagcacaccgctgacgcccgcggctcagtacgtc

SEQ ID NO: 23291 - DNA, 260 bp, Unknown
  Description of Unknown: LeftRegion for integrase B10292 sequence
actgagtgggtggtccagctaggggaggaacgtcctagccgagtgtggaactggaccgacagccggtactcaccccacgacagtgaggcagccggacagcaacacctagcgtggctggctgtccaccacggcaccgacgcgacgcgcttccgtctgttggtccgcgtgacctcggaaacgatcattgctgaggtgaccctgtgacccgccggacagccgtactcaaccccgtggccaccgcgcgcattgcggagcttgtg

SEQ ID NO: 23292 - DNA, 260 bp, Unknown
  Description of Unknown: LeftRegion for integrase B10293 sequence
gaaccgttcggtatcactccctctttgtttgaatcttgggaataccgaggaatagattataatgtatacctctatataaaggaaggcgatgtagagtacatcgacatacacaaactgaccgaagacggggaacttaccccctctcaacaagaactgcgaatcgcccgtagagtcattgaggcggtcgtgaaggagtcacaatgaagaaagccgttatatatgctcggttctcttgtggaaggcaaaccgagcaatccata

SEQ ID NO: 23293 - DNA, 260 bp, Unknown
  Description of Unknown: LeftRegion for integrase B10294 sequence
acagaggcctgtgtcattgcaggcatagccatgttcgtcatcttcctggtcgtccgcagcatcgtccctacgccaggttgcgaccagtggcagcgaaggtatgacgcagcactcatcaacatggccatctccacggacagccagaccaccacagcagtggaacaactccagaactctcgtccggaaggttgccactgaccatggccaaaccacctcgtccctctgatgacatcgactatgggtcagagatacagcaactg

SEQ ID NO: 23294 - DNA, 260 bp, Unknown
  Description of Unknown: LeftRegion for integrase B10295 sequence
tcaactcagctcggatcgatcctggacaactgccttgcgcaggacgaggaaatttgcgtttcctgtccttatgctccgaaatgtatcgaccgcgattctgaagtgatttatgacggcgggctggatatcgacaaccgtccgctgttcaaggatctttatgcttacttccggtccatcggattatatggtggtgatctgcgatgctgaaaaaaccccgcatctcctgtcagccccgtaccgcggtagcgtatgccaggtac

SEQ ID NO: 23295 - DNA, 260 bp, Unknown
  Description of Unknown: LeftRegion for integrase B10296 sequence
gcatcttgtgtgtgttgcccgcaagatttcgcttcgagctttccagaactccaattcgtttttcggtctaacggtaatcccgtgaattccgatacctttaaaattaaacataacattacctcctttaaatatgaattattgtcctataatacccgttgtaatgcatgcgaatatgttacaatcaaagaaaggaggtacttatgcctaaagaaaaagctgttgtgtatgctaggtattcatcgcacaaccaaacagaacaa

SEQ ID NO: 23296 - DNA, 260 bp, Unknown
  Description of Unknown: LeftRegion for integrase B10297 sequence
gccatgctggatgcgaacatacaggaaaacaaaaccaaacagcagatccgtgaccagcagcatcaggatgtgcttgaactcggaaagatttatgagtcgctcacacaggaaggacaggcgtatctcatgcagcaggcgagaatcgcaaagaatatgtttcctaagaaacgataaagtgtcatcagaaaggaaatcgtatcatgaagaaaccagcagcgcctcagtgttccccgaccgcagctgtggcctacgcccgttat

SEQ ID NO: 23297 - DNA, 260 bp, Unknown
  Description of Unknown: LeftRegion for integrase B10298 sequence
attttagaataaggtcgagcaggtccgcatcgttggcgtcttttactgcttcaataactatattttttaagtggttgatgtcttgcatttgtggacccctctcgaacgtttgtttgtaacattatactacaataacattgtcgaaaaatgcaatactttctgtaatatcaaaaattttcaaaaaatggaggcacatcaagatgggagcatataaaaacacgggcgccctgtgggagtactacctcgtatatttgaggaag

SEQ ID NO: 23298 - DNA, 260 bp, Unknown
  Description of Unknown: LeftRegion for integrase B10299 sequence
tgttgaggaaactcaccataacattatcagcagaagcaagaacatcattaacgatagccctcacgcaaccttgaccatcaatgatacagacctgtccaagcaggagcgtgagttgattaaaatgtatcgtgagttctctctcgaagagcagcttgcactcatcacctatgcgttgaaggtgaagaatggcgaggtgtgatatgcgagtcgttttatacatgagatatagtagtgaccgtcaaacggaacagtccatagag

SEQ ID NO: 23299 - DNA, 260 bp, Unknown
  Description of Unknown: LeftRegion for integrase B10300 sequence
tcttgcattatgtgaaatatataaaagcaaggatattctctgtgattttggatataccgctcatgattccggctttgattttgaggagattgttctctttgaggatgaatacactccggagaactggcaaatgctcaagaattttatttccctggtaccggccaaggataaaaaatgatattaaacttaggggataagctatgaatgcagtaatatatgcccggtattctccggggccaaggcaaacagatcagagcata

SEQ ID NO: 23300 - DNA, 260 bp, Unknown
  Description of Unknown: LeftRegion for integrase B10301 sequence
atggtaaaaactcacgatggtgtgcatatcggctggcttccaaagggcgacaatctgcaaatcgacatatttgaccgccttgtaaaagggcagacggtctatgctaaaataaaggaaggctacgaacttgcgaccgctcccggcaatatcggactctgcatcgaggtcgctcgttatgcttcgaggtagggggtgcgtggatgagagctgctatctatgctcgtttttcctcacataatcaaaccgagcaaagtatcgag

SEQ ID NO: 23301 - DNA, 260 bp, Unknown
  Description of Unknown: LeftRegion for integrase B10302 sequence
attataccttcctgtttaccttcccggaggatcagccgtgagcacataccggccaggcatcctggagcgcatcggcttactcatctggaaaatgaaatattacgatcagatcgtggctcaattggaagcggaactggaagcggtggaggaagaaatcgcccgcttaaaatatcggatcgaaaagctggaaggaaaacagcatgactaacgccgtcatctacgcccgctactccagccacgggcagacggagcagtccatc

SEQ ID NO: 23302 - DNA, 260 bp, Unknown
  Description of Unknown: LeftRegion for integrase B10303 sequence
tctgttagcgtttacccgtctataacaaaaacccgcactattgaccaaataaccagcgtccataatgtaggatatacaagcagttgccaatccttcaaaaccggaaaaatcatattgcaggacgggtggatcgtcgaaatagttcaaggccccgcgataattaaaccgttcgccggcgtgtttaactaacggaggcagtaatggcaaaagcaaaacggccgacatgcagaccgaaaacggcggtagcttatgcgcgttat

SEQ ID NO: 23303 - DNA, 166 bp, Unknown
  Description of Unknown: LeftRegion for integrase B10304 sequence
ctctttgaggatgaatacactccggagaactggcaaatgctcaagaattttatttccctggtaccggccaaggataaaaaatgatattaaacttaggggataagctatgaatgcagtaatatatgcccggtattctccggggccaaggcaaacagatcagagcata

SEQ ID NO: 23304 - DNA, 260 bp, Unknown; identical to SEQ ID NO: 23155
  Description of Unknown: LeftRegion for integrase B10305 sequence

SEQ ID NO: 23305 - DNA, 260 bp, Unknown
  Description of Unknown: LeftRegion for integrase B10306 sequence
ctaattgttaaaaattgttaaattatcattaacaatccagcaccttagtttataaaaaactgtaacttattaaaaaccaatcaaaaacaattgcttattcttcctatccaatatagttgcataaaatagttagaatatacaataaaattaaattcctgacgttatgatacaaaaaataaattgaaattaatttaatagttatgagtaaaaagtgcatcatttgggtacgttgcagtaccgagcgccaggaaattgaatcc

SEQ ID NO: 23306 - DNA, 260 bp, Unknown
  Description of Unknown: LeftRegion for integrase B10307 sequence
agcgtccgcagcatgatagcattgccgatagtctcgtcaagatcgaattcctcgcagaaaaactgccagaacatggccatttctcctgtccccgctaccctcattcggtgccctctgaagagatagtgggggacgtggcagaaatgccttgccttccggcgaacaccgagtaactgactgggacgcgaaaggagcgcaacatgggcaatgagaagcggggcgaagaaaccggcccgagccgggtcgcattctacacgcgc

SEQ ID NO: 23307 - DNA, 260 bp, Unknown
  Description of Unknown: LeftRegion for integrase B10308 sequence
aaaaaacaaactatctgatcgtcgggaacgaagggaatccgtgttgggcgtattcctgctacggccgcaaggtggatgctgcgatcaagctgcgcaaatccggtatcccgattgtgattgtgaacgaaacggatttttgggatatcctcgaagatctgtagcaacgctgatcgaattttaaaagagttggaggactatatatgagaattgcaatctatgctcgaaaaagtgctttttccgataaaagtgaaagcgtgcac

SEQ ID NO: 23308 - DNA, 260 bp, Unknown
  Description of Unknown: LeftRegion for integrase B10309 sequence
aggttgcccttggtgttgcctgcggaatttgtgcctattttctcttcttttctgacaatcccctttttcttcgtatcgtcggttgtcttattctttctgttggttctcttggtattatttttggtgaaggcattccgcatgttgcgagagctataaaagcaaataacatgatgcgtgatggcacattataaggagattccatgaaaaaaacgcttaccgcctgcccgccccggacagccgtcgcctatgcccggtattcc

SEQ ID NO: 23309 - DNA, 260 bp, Unknown; identical to SEQ ID NO: 22782
  Description of Unknown: LeftRegion for integrase B10310 sequence

SEQ ID NO: 23310 - DNA, 260 bp, Unknown
  Description of Unknown: LeftRegion for integrase B10311 sequence
ggcgccttctccctcaattatccggcagtggacggtctctggatggcgaccgatgcggatcatatcaccatccggaccatgaaccgcacccttccggcccgcctggatgatcagggccgtctcctcgtctactttgtcgaggatgtcccctatccctttatcaaaatcccgtcttacgattatattgaagagacaagaaaatgagcataaaaacaaaaaagccgtcctgttctcccaggacggccgtcgcctatgcccgc

SEQ ID NO: 23311 - DNA, 260 bp, Unknown
  Description of Unknown: LeftRegion for integrase B10312 sequence
ggaaaacgaaggtgacaaaatcactagcgatgaacgcgaaatcgtcgataactaccgtgacagctcgccggaatggcaacagaacatttcgatgaccgccagagctgcggcatctgaatcaaaaagaaaataaaaaagccccagcgctaccgtccaaagtctcgcaggggcatacctagaaaaggcaaggtgattttatcatgccaaagggcacacgtgccgccatctatgcacgtttcagttcgcataaccagcgaagt

SEQ ID NO: 23312 - DNA, 260 bp, Unknown
  Description of Unknown: LeftRegion for integrase B10313 sequence
agctttctgttgtagaagcggaaaatgaaatgctgaaggcacggcttcaggatgtggacaagctgcttcggaacattgacgagcaacaccgcaaggacatccgtgctgtcaaagaagaatatcaggagcagattgcttttctgaaggaagaactgaaagcttggagatccatgcaccaaattaaataaggagtgatttatgtggcaccagtaaaccgaaatctttacgctatttatttgagaaagtcaagaaccgacctg

SEQ ID NO: 23313 - DNA, 260 bp, Unknown
  Description of Unknown: LeftRegion for integrase B10314 sequence
aacaattatggaggaacaatgcgagaaaaattagagcttatattgctgcctccgcaagaaaaaaaagaagtatctgaagaagaaattgcgaaggcatatatagacataatgaacttattattaaataacgggtaaaaggcccgttatttttttatttacatttttattcattcattcattttttgtgttagaatctcattatgaaaacagcagtaatatacgcgcgtgtatcgtcgggccgtcaagagcgtgaaggcttt

SEQ ID NO: 23314 - DNA, 260 bp, Unknown
  Description of Unknown: LeftRegion for integrase B10315 sequence
taatatgaattataagattgcaaaagggataattgatatgctattagcagaccgaattataacccttgcagaatatgaagaaatagataagaaaaataagctgagttttagttaaaaactcggcttttttatttcgattttcactggactttgcgtagcgtttgcggtatgtttgtgtctaacaaaaggaggataaaaaagtggaattttatagagtgtgtgcttatgccagagtaagtacaaaagctgaaaagcaagaa

SEQ ID NO: 23315 - DNA, 260 bp, Unknown
  Description of Unknown: LeftRegion for integrase B10316 sequence
tccgccatggtaagttaaacgtacaaagggaggtaagactcttatgatgcgtgacggtacctaaacgtaagctgtctgtaaggcagtcatcatagcagaaacgctccagcaaattatacactcatggttggatcatttaatgataagccatgagtgttttgttttatacgattgcaccagtgcaatagaaggaggctcacatggatcagatcaaagctgttatatatgcccgctactcttccagcggacagcgagaagaa

SEQ ID NO: 23316 - DNA, 260 bp, Unknown
  Description of Unknown: LeftRegion for integrase B10317 sequence
cacacaaggagaattttaaacttttttggtattggttttgcaatgtggagtttgcaatttcgcacatattatgtggtgattataaaaaagtctataacgttacaacgtttttaccaaaaatataaccacaaaaatttgcatgtttagatgatttcctgtaactttgccaatgaaatttaaatcttaattcatttatagttatggcaaaggttatcttattggtcagagtatcgaccgcacaacaggaagttgaagcacag

SEQ ID NO: 23317 - DNA, 260 bp, Unknown
  Description of Unknown: LeftRegion for integrase B10318 sequence
tgtttactcagaagatgagcgaactttcacaaatatgaaagagaaaaaagacgatattgttctaaaattggtttgcaagtgcttactagactatgattatttagatattaaagagtatgaaaaattatataaattagttgattcatttatgaataagcacgatgttaaattaagagcttttcaggagttactagtttaaaatgagagcagtaggttattgcagattttcatctgaaaatcaaagagacggattctctatt

SEQ ID NO: 23318 - DNA, 208 bp, Unknown
  Description of Unknown: LeftRegion for integrase B10319 sequence
catggtcggaacatactctacgccacctcagagagcgagatttttctggcgaacgtccccgatgacctgctcccacttgcttttggcaccaaaggctgctccctactttatactttaccacacaatctcccagcggcataaatagctcatgcataaggcctattcgtatttgaggttttccactgctgaccaaatacacggagactcc

SEQ ID NO: 23319 - DNA, 260 bp, Unknown
  Description of Unknown: LeftRegion for integrase B10320 sequence
tcgctatccttggcgtatgataaatcccataattctctgctgggccgcccgaagcttggcactcagtcatggcgtgcaatttagcgccgcgctactttcggacaacgatgtgccaatcgagcttgcactgagattcctgacacgtccgctgaaagagttatcctgtcgctgctatccattgattccaccggagaaaaatgatgagcggtttgctggaaactactatcctgtcgccggttcgtcgagctgcggcctatgtg

SEQ ID NO: 23320 - DNA, 260 bp, Unknown
  Description of Unknown: LeftRegion for integrase B10321 sequence
ctggtggaaactttacccgtgtccgcgcacagctcattaactacggatttcagccagaggacttactcttcgtttgtttggcttgttcaagcgaatcatcgttcaagccagattattgcccagtgatctttgatgggactaacacgatggttcacttctggtgggaatgtaaaacaactaagtttgcataaggagcagatatgagtacttacatctacgcgcgggtttcgaccttcgaccaatacgtcaacggtaactcc

SEQ ID NO: 23321 - DNA, 260 bp, Unknown
  Description of Unknown: LeftRegion for integrase B10322 sequence
ccctggatgttcggtcatccggagacaaaggcgacctgcctttggcttcacaatcttcctaagctgaccccgacaaacattgttgaaggtcgcgaaggtcgtattcacaaaatgggtccctctgcggacagagggaaactgagatcaattacgtacgctggggttgcaaacgccttcgcagaccaatggagtattctactatgagaacatggatctacgcacgagtcagtacctttgaccagtatctcaccggtcactcg

SEQ ID NO: 23322 - DNA, 260 bp, Unknown
  Description of Unknown: LeftRegion for integrase B10323 sequence
acgatgggaatgtccaatctggtttggaaaaaggcgaaaggcgaggagaagtctgtcaccaagaacgcaaaagtctgcatctgccagaactgcggttattcctggcagatcaaataaggccatcttatcacggcgggagggaggcgagcagtattccagcagcgaaaaagaaaagctctaagagcgaggggaaacgcgctgtgatctatgcccgctattcctcccacaaccaaagagaggcttcaatagagcagcagatt

SEQ ID NO: 23323 - DNA, 260 bp, Unknown
  Description of Unknown: LeftRegion for integrase B10324 sequence
tgatctgactaccagttattacacagaaaatcatttattaaacaaagaccaaatagaagttcaagcaaataaattcgctgctgaacttctcatacctgataatgttgaaatttatgaaggtatgactacaaaagaactagcttgctacttagaagtttcagaagaattagtaaagttaaaatataaggatgtgatttaagatgtattgtatgtacctaagaaaatctagagcggatttagaagctgaacaaagaggagag

SEQ ID NO: 23324 - DNA, 260 bp, Unknown
  Description of Unknown: LeftRegion for integrase B10325 sequence
acaacaatgatataatagaatacgaggaatacaagcaattcattcagaataaggctaatccatccactgttcagtaccaacctaataagtttgagtattcctattctatcgatctctctgttctcatcgccattggaatggtttgtctcactgcaatcatcatcacgataatccgaaggaaataatggagctgatccaacatggaacgtttacctcacggtgaatacgtaatataccttagaaaaagccgtgctgatctg

SEQ ID NO: 23325 - DNA, 260 bp, Unknown
  Description of Unknown: LeftRegion for integrase B10326 sequence
atgagcggccccgccttctttcagacgcacatggggcagcgcttctacgaggggacgatgccggcgctcgtccgtgagctgaagcgcctcaacgacaacatggagcgactggtggccatggcggagcagctcgccgggcagaaggagtccacgagcgccgagccagtgcatccgacaacgccagccgggacggaggggaaatgaggaagagcaagccagcgccctcggacgcgaagcgctgcgccgtctacacgcgcaag

SEQ ID NO: 23326 - DNA, 260 bp, Unknown
  Description of Unknown: LeftRegion for integrase B10327 sequence
gaagtgccttctccctcaactcttgcaggagcgacacatcgatccagtcgtgttctaccatgaatatttatcatccaagtatggcaatcataccagatttcacaagattatcaagtgaaatcgcttccgtaattggaatggtttgtctcactgcaatcatcatcacgataatccgaaggaaataatggagctgatccaacatggaacgtttacctcacggtgaatacgtaatataccttagaaaaagccgtgctgatctg

SEQ ID NO: 23327 - DNA, 260 bp, Unknown
  Description of Unknown: LeftRegion for integrase B10328 sequence
gccactgctcgtcagtaggtggaaacaaacaggcgttccgctcacccgttctaatacccctgtagcgcgtccagaagcctgccagggcgcgcagcgggtgaacaatgtcaaaagactcgtccaacccaaacggccacctgcctgcgcctgcccacgatgcagcaggcggggatacccacgcttcggtggaaaaagaacgaatgcccgtcagggcattgagactcctgcgcgccgccatctacgcccgcgtctccaaagac

SEQ ID NO: 23328 - DNA, 260 bp, Unknown
  Description of Unknown: LeftRegion for integrase B10329 sequence
gccggacaagcgcgttcctatgccgggcgcggtcatcacccgcgaatacaagggccgcatggttgtggtgacggtgctgccgaacggcttcgagtacgaggacaaggtttaccggtcgctctccgccgtggcgaaggccgtcaccgggacacactggaacggctaccacttcttcaaccttgtgaaggacggaggcgtgcatgcctgaaaaacactccatccgatgcgcgatctatacgcgcaagagcaccgaggaggga

SEQ ID NO: 23329 - DNA, 260 bp, Unknown
  Description of Unknown: LeftRegion for integrase B10330 sequence
gatgaactgcaagtcctacggcaacgcgcggcgctggatcgaagagcgcctgtgatctccctcgccgagtgccgcgagatacttgggcccgacgcccaggacgcgaccgacgaggaagtcgagctcgcgcgcggcgcgctctacctgatcgccgaggcggcgctagagtccgaagagaagaagctccaggaggacgccgcgtgaagcgagccgtcgtgtacgtgcgggtctcgtcgcaggaccaggtgcacaacctgtcg

SEQ ID NO: 23330 - DNA, 260 bp, Unknown
  Description of Unknown: LeftRegion for integrase B10331 sequence
attgggagttgaaaagtgacggcgttcatgtttctgttgttgattattccatgaaacgaaaagaatatgtgttttatctgacccaggctcattatctcgcttttgagatgtccggtgaatatatgctgtttcagaagatggtcctgccccgtgctattaatgatattcacattgtaacttcatgggattgatttcgtattatgaaaaagaattctgttccttcctgcgccccgcggacggctgtcgcatatgctcgctat

SEQ ID NO: 23331 - DNA, 260 bp, Unknown
  Description of Unknown: LeftRegion for integrase B10332 sequence
gcgaatgggaattaaaaagtgacggcgtccatgtttctgtcgttaattcttccatgaagcggactgaatatgtattttatttgacccaggcgcattatctcgcttttgaattgtcaggcaaatatatgctgtttcaaaaaatggttcttccccgctcttttgatgatatccatactgtgacctcatgggattgatatcgtatgaaaaagtattctgttgcttcctgcgctccgcggaccgccgtggcctatgcgcgttat

SEQ ID NO: 23332 - DNA, 260 bp, Unknown
  Description of Unknown: LeftRegion for integrase B10333 sequence
gaaagcgatacagggtttcatggattcggcaagaggccgctcatcgatggatgacgaggcctattccaaaacctgaggttctgccgtgagaacggcctgacctgcatggaataccacaggcgacaccgccatttccctcccgtggaggtacgggtgaaggaaggtggcaggaaggtaatagaggggaggttcaatcggacatgagggtcgctacttataaccggaagtcggtttattccgaccacagcgactcggtaaag

SEQ ID NO: 23333 - DNA, 260 bp, Unknown
  Description of Unknown: LeftRegion for integrase B10334 sequence
ggctgcaaaacgctgcggattgctcacggaataaccttgatttttcttaaattatggtgtaaaaatggaatacaaacacagacaatattttgaaaaactggcgggacgaccactctctgattgggaattggtggatgcatgccgccggattgtggcattcaatgattgtcttgtgaaaatgcaaaaggaaattgacgacaatggacgctgtgattctggcgcgggtatcatccaaagaacaagaggacgggttatcactg

SEQ ID NO: 23334 - DNA, 260 bp, Unknown
  Description of Unknown: LeftRegion for integrase B10335 sequence
tggatataccatgacatacacaggggggcagatgactgaatcgaagcacacgacgacgatccgcataccgaaggaacttctcaaggctgcccgagcgaaagcactcgaagcagaagcctccctgtccgaagtcatccgcaagtttctgacgctctgggtatctggggagatcgaactacccaagcgggaggagatgggagatgagagccattctatacgccagggtctcaggtgacgaccgagggagcgaggatcgcaac

SEQ ID NO: 23335 - DNA, 260 bp, Unknown
  Description of Unknown: LeftRegion for integrase B10336 sequence
cctctgaacttggttttccctctaactggcatgagcttatcaaataatcatctataaagaatccccggcagctctgtacgatagagccgccggggccagatggggaatctgtctgtcggagaataatcataaaataagaaaacacgcctgctgagcaatttcattgtaccatgatcctgctcagcgcacaaggagcaatcatggcaagaaaaaagaaagtatctcccgggaaccgtctggttgcctactaccgttacagc

SEQ ID NO: 23336 - DNA, 260 bp, Unknown
  Description of Unknown: LeftRegion for integrase B10337 sequence
aatggatccgctgggaatttgcactgatctgcgccctgatcaccttcctctgcattatcctgctgatcgatgtgctcaacccggacgtcggctggatccgcaaagcgctgtctgacattttcgccttgaactatgtataataaaaaatccccctcggtgccgcaacaccgaaggggatttatacgaaggagtcttttgatatgcgtgctgccttatacgtccgtgtttcgaccgatgagcaagccaaggaaggtttctcc

SEQ ID NO: 23337 - DNA, 260 bp, Unknown
  Description of Unknown: LeftRegion for integrase B10338 sequence
aaggcctcaccggcatgtggctgcgctaggcgcggcatatccgcaatcgcctgcggatataaaaaacacacccgactgccatcgggtgtgtacaaggcaaaccgtcacgattgagcatccgtggatctgcacctcatagtatagcacgtccacggattttttacaacatccgtaacgtactactttgaggagtgatctgtatgagcccagccccgaccagtaaatatgccatctatctgcgaaaatcccgcgcggatctg

SEQ ID NO: 23338 - DNA, 260 bp, Unknown
  Description of Unknown: LeftRegion for integrase B10339 sequence
tttctgtaaattattatcgtaaaaaaaagggagtgtgattagtcacactccctaaatttatatcttatttttcgacaagaaaataattatttctacaaacaataataatcttgtatttattgcttgtcaaggtgaaatctttatgatataatgaatttacaaagtaaagataattttgaacaacatagaaaggagaaataatggcaaacgttaaactaaaaaacattcttacattatcaccctatatgaaaatagctata

SEQ ID NO: 23339 - DNA, 260 bp, Unknown
  Description of Unknown: LeftRegion for integrase B10340 sequence
gatgctcgccgaggtcgaagagcgccgccagcagtacaagcgcgaaggcttccaggtcgggttcgaaatggcgaagcgcggagtcgccgccgaaacgctcaccgaaggcgcaacagtgatccacctgcccgtcggcacgtaccagcccaccacactgggcgaaggggcgctctaccaccgcaactgatcgggggacagtcatgcccaggcaacctccagcaggcgacctcatccctgccatcggctacgtgcgcgtgtcg

SEQ ID NO: 23340 - DNA, 260 bp, Unknown; identical to SEQ ID NO: 15851
  Description of Unknown: LeftRegion for integrase B10341 sequence

SEQ ID NO: 23341 - DNA, 260 bp, Unknown
  Description of Unknown: LeftRegion for integrase B10342 sequence
tctctgccaaaagaggaaatgctcaagagacttgcagaggctttagactgctctgtaatagatttctttatggacgattacgactatacctttaagattgacgataatatcgttatgctcgagagaggatataaaggactgtcggagagtcaaaaacaccgcctgttggcgtattattactctctcatagagggtaaagaatgaacgccgtaatttatgcgcgatattcaagcagtaaccaacgtgaggagtctatcgag

SEQ ID NO: 23342 - DNA, 260 bp, Unknown
  Description of Unknown: LeftRegion for integrase B10343 sequence
agagttcgacctatgttaagatctggggccatactatcgacgactactccgctggcggcggcctggtgtatgactttatcgtcaagcaggaaagacctgtattcgggaaggtcaacctcagggccggttatgtggtcgatatagatgagcctgtgatctttgctccggccgtctccctgggcttctgaggtggatccagcatgaacgtcgtgatctatgcccgcttctcatccagcgcccagcgcgacgagtccatcgac

SEQ ID NO: 23343 - DNA, 260 bp, Unknown
  Description of Unknown: LeftRegion for integrase B10344 sequence
acataaatgaaaaccttgacgattatatttgcgtggatgaaatagaaacttatatcgaagaatgtacagactacatcctgataagcaactctcaggaaacagaactcataaacatcttccggtctctatcggaaacagataaatcaaaagccctgctgtacatagcagagctttacgagtaaaatataaaggacacaaaaatgaacgcagtaatctacgcccgcttctccagcacagcccagcaggaacaatccatcgac

SEQ ID NO: 23344 - DNA, 260 bp, Unknown
  Description of Unknown: LeftRegion for integrase B10345 sequence
cgtgtcgccggaatatgccgacgcggtgaaaaaggcggtcagtggactcaccggctcgagtatgatcgagctcggcactgcactctccggatctgcccaggacgtcgcaaagctgacgctcctccgggcgattgttgaacagaattttattattattcgagaacttgacaagattgcaaagaaataagaggtgtttagaaatgaccggggttatttatgcaagatatagcgagggccctcatcagaccgatcaaagcatt

SEQ ID NO: 23345 - DNA, 260 bp, Unknown
  Description of Unknown: LeftRegion for integrase B10346 sequence
tctctgccaaaagaggaaatgctcaagagacttgcagaggctttagactgctctgtaatagatttctttatggacgattatgactatacctttaagattgacgataatatcgttatgctcgagagaggatataagggactgtcggagagtcaaaaacaccgcctgttggcatattattactctcttatagagggtaaagaatgaacgccgtaatttatgcgcgatattcaagtagtaatcaacgtgaggagtctatcgag

SEQ ID NO: 23346 - DNA, 260 bp, Unknown
  Description of Unknown: LeftRegion for integrase B10347 sequence
ataaatgttgggaaattaaattgggccaacgattggcttgattttatatggcaaaggtggcacagtgatgatgaaacttgaacgcaaattgacaagaatggccagcgcaaatggttattctgtatcggataccgaattgtattcggcatctggtcatcttgtccgctttttgcgcgctgtaaccgaattaaaaaaagaacatgacgacaaaatgcgtgattttggctcggatcagttccgaaaaacaagacaaagaatac

SEQ ID NO: 23347 - DNA, 260 bp, Unknown
  Description of Unknown: LeftRegion for integrase B10348 sequence
cttgaggttactttatagataatatagcacagcatttttgacaaaaacagacttttcgtagttcaaatttcgacagtttctcattccctttgcttactttatgatagcataatacgaacggatgttctatatttttagaacatttttctttaaaaaccctggtgtatggggattttaacagttggatagaggtgaaatgtatgtacagaccaaaaggattagatgtcgatatttatttaagaaaaagccgtaaagacatt

SEQ ID NO: 23348 - DNA, 260 bp, Unknown; identical to SEQ ID NO: 23246
  Description of Unknown: LeftRegion for integrase B10349 sequence

SEQ ID NO: 23349 - DNA, 260 bp, Unknown
  Description of Unknown: LeftRegion for integrase B10350 sequence
  modified_base (172)..(183): a, c, t, g, unknown or other
acacgaacatggcaagaaactccaccacagttttagatggttctgttacacctacaatgatagtgcctattgttgaaggttcagaggaatataaactttcaacatatgccttcaagttcgctgttgaaagcggcaagatggcgaaagcaaaggcaaagaacaaataaaaaannnnnnnnnnnngataaggaaaccacacaatgaatagtttaaaagctgtaatatacgcaagatactcatctgataagcaacgagatgaa

SEQ ID NO: 23350 - DNA, 260 bp, Unknown
  Description of Unknown: LeftRegion for integrase B10351 sequence
tatatagagcttcagatcaaatacgatgatctgtataaggattacgatgatctgtgtgatttcatatatcacataggcgaccccatgagtgacctttatctttattttgaagaaaaagaaatatcatttgatgaagcgtataaagcatttattttgttggatggttattatcgtccatttaacaactgaccggaggcaccatgaaacataatccttcctgcgccctgcgcaccgcggtcgcctatgcgcgctattcctcc

SEQ ID NO: 23351 - DNA, 260 bp, Unknown
  Description of Unknown: LeftRegion for integrase B10352 sequence
agctcgaagcgaacaaatttgcttctgagctcttaatccctagtgcttgcagttttcaaacttgcccaaaggatatgatggaaggtgtcgatatttcagttttaaaggacattattttttataagtcagtagaaatcactgaagagtttgtgaagctaaaagaattctataatagggcaaagggggcgtaaattttgaatgtggcgtgctactgccgctattcaagcgacaaccagagagaggaatcgattcacgctcaa

SEQ ID NO: 23352 - DNA, 260 bp, Unknown
  Description of Unknown: LeftRegion for integrase B10353 sequence
caatggtaaaacattaagaaatggcaagcataacccaccaaaacgagttgagttgcaacaaaatacatatggttatttagaggccatgattgcactaggtaatgcgcaacgtgttggcaaatttacaccaccaactgcaaaataaaaatagcccccttgatagggggctttacttatacaatttgaaagggaatcacacaatgaatagtttaaaagctgtaatatacgcaagatactcatcggataagcaacgagatgaa

SEQ ID NO: 23353 - DNA, 260 bp, Unknown
  Description of Unknown: LeftRegion for integrase B10354 sequence
atcttgcatgttggacagatagcgtatttgatgctcatgtttttactgatgatgaagcacgtctcgttgctgtgtatcgtggattgtctccacgcgggaaagagctttttcgtgaacgtcttgaagaacttaaactattgtatggaaaaaaatctgaagatcattcagctgagtctgtttatagaggtgagtaattaaatatgccgcgtgcaaagaagcaagccagctgcccgccgcggacagctgtcgcttatgcccgg

SEQ ID NO: 23354 - DNA, 260 bp, Unknown
  Description of Unknown: LeftRegion for integrase B10355 sequence
gtatatgtattcttcgggtgtcatatggtacaggctcctttcatccgggacagttatataatacatcgcacctgtgaaaaaaattgtcggaatttgtggcgatttcatgaaaaaatgcgaacaggcgttctcattaaaggaggtggtgcttatgtaatattcgccatacaccacagaacacacagaaaggggacagaattatggataacacacatctaaatgttctttcgacggacgcttatattatttatctgcggaaa

SEQ ID NO: 23355 - DNA, 260 bp, Unknown
  Description of Unknown: LeftRegion for integrase B10356 sequence
aggcatataaaaaagatttggacagcttttctcttcaagacgtttccgaattatgcggtgtttttcgtgacgatgcacatagaagcctttctgactgtttcgcaaccggcattgtgttcaaaaactgcgttgaagatatcactggcaggtaagccctccgggtgtacggttgtcagtttcgaatctgaacgggggacagtatgcgggcatttatttactgccgattttccagccataagcagcaggaacttagtatagag

SEQ ID NO: 23356 - DNA, 260 bp, Unknown; identical to SEQ ID NO: 23099
  Description of Unknown: LeftRegion for integrase B10357 sequence

SEQ ID NO: 23357 - DNA, 260 bp, Unknown
  Description of Unknown: LeftRegion for integrase B10358 sequence
ggacaagctatctaatttattttgagccgcttggcgtgatccgtttgtttgacgaataaaaaaagaacccctggtgttggtagcaccaaggattctttttagatacattcagcctaataggcggtgaaatgcatctgcgcagtataattatagcattttcgccgtctttagaacaataaattgaaaggcggtattttattatggaagccaaagtcattcgcgctgtagcctatgcgaggtacagttcagataatcagaga

SEQ ID NO: 23358 - DNA, 260 bp, Unknown
  Description of Unknown: LeftRegion for integrase B10359 sequence
actatgaaaaataccttcaaaaaacagaagaaccagaggtctaagatctctggtgggccccttctacactcggtagatggactatcattattatacattttttaacattttttgcaataaatttagacaattattcaagaattcacaatatctttacaggatagcctcttgtccaggaggcagaaccacaacatattgatatgaaggcagtaatctacgctagatattcttcacacgctcagcgtgaggagtcgatagag

SEQ ID NO: 23359 - DNA, 260 bp, Unknown
  Description of Unknown: LeftRegion for integrase B10360 sequence
atctgcatgatcatttctatcatatacttgatatataattctctattcatgctatcacctccctttgaagacgatagcataaatagaaaagctccagctgccttgattcagctggagcggtgcgaaaataatatttgctcagataatatttttgcgcttccattatagcaaattttttaatgaatataaaggagctaattatgaatgcagttatttatgctagatattctagcgatagtcaaagagaagaatcaattgac

SEQ ID NO: 23360 - DNA, 260 bp, Unknown
  Description of Unknown: LeftRegion for integrase B10361 sequence
gaatcaattggtgatgaaataaggtttgcacgattgcggaaaaggatgacacaagaacaacttgcacaaaaaaccggtcttggtcggtcaacaatcgcaaaatatgaatctggtcaaattgaaatgagtatgccggtattcattgaactatgcaatgcaattggtgtcagctacattgatattttgaagggtattgaattatgacaacggcagtcatatatgcaagatattcaagttcaaatcaacgtgaggaatcaatc

SEQ ID NO: 23361 - DNA, 260 bp, Unknown
  Description of Unknown: LeftRegion for integrase B10362 sequence
tgacggcggttgcgacgctcggaatgtcgaaccttgtatggaagaaagcaaagggaacagaaaaaagcgtggcgatcaaagagaaagtctgcctctgccagaactgcggaaactcctggataatcaagtgattctttgataagagaagggaggcgggcaagatctcaaaaaagaaacagaaaatcgaagggaaacgggccgtgatctatgcccgcttctcttcgcacaatcagagagaagcgtctatcgagcagcaggtc

SEQ ID NO: 23362 - DNA, 260 bp, Unknown
  Description of Unknown: LeftRegion for integrase B10363 sequence
attacccttgctcacgctcttggttgttccgtaatggatttctttgccgatgaagaagacctcaaggctgactacgtagtgtttgacgatgatgaaacagatataatcaccatttatagagaaatgccccgggaagaaaagcataagttcttagcaagaatgtacgcataccgggataaattacaggggttatcggataaatgaaagctgttatatatgctcgatattcaagtagcaatcagagagaagaatccatagag

SEQ ID NO: 23363 - DNA, 260 bp, Unknown
  Description of Unknown: LeftRegion for integrase B10364 sequence
gcagaagacgcccgacgggcgccagggtaagacggggatcaagttcggcaaccagccggacgattttgagccatgcggcccggtggtcgttcattcgaatacctcttcacacgaaagcaatcgttcattggttgtagtttcccccgttacttcttaccctacctgcttgctcgtttgagcaactttctctccaacttgcgatggaccccaaaacgctgtatctgtactcccgaaagtcacgtgccctcggcgatcctgac

SEQ ID NO: 23364 - DNA, 260 bp, Unknown
  Description of Unknown: LeftRegion for integrase B10365 sequence
acatatgccttcaagttcgctgttgaaagtggcaagatggcgaaagcaaaggcaaagagcaaataaaaaaaggccctattaagggcctctatttgtatataaaaaagaaaaaccgccatgaattggcagcatggcggaatttctttgatttacatttgataattcttatttaattatatcaccaacaaggaaaccacacaatgaataatttgaaagctgtaatatacgctagatactcatcggataagcaacgagatgaa

SEQ ID NO: 23365 - DNA, 260 bp, Unknown
  Description of Unknown: LeftRegion for integrase B10366 sequence
agaattccacctcaataagtggaaaaacaaccgggtaacgtttgtgcgtgtgatgactgcaaatgatagttatgtgtgcgaatattgcaaatcgatgcacaaaaaggtaattccaatcgaaacagcccaggacggaattcctcatgcaaactgcaccgcactcaaagggtgtagatgctatcatcagcccgcgaaagccgatgcgtcctagctccgccttcccccccggtgcgagcgtggttgcctacctgcgcgacagt

SEQ ID NO: 23366 - DNA, 260 bp, Unknown
  Description of Unknown: LeftRegion for integrase B10367 sequence
gacagaacaggcaccacccccggcttcggctccacttctgcttttcttgaactcggatcacccggctttagtgccttcggtgaagttaaccctgaaaccttagatcttgatatgaaagacgggtggtatttgttccttggcggtgctgttgtctttactccttataccggaaagcctgatttcggctttaaaaaataactatgaaaaagatcaaagctccgtcttgcgctccgcggacggccgttgcctatgcccgctat

SEQ ID NO: 23367 - DNA, 260 bp, Unknown
  Description of Unknown: LeftRegion for integrase B10368 sequence
gaacaattattgaccctttctcgggctttaaattgctcggttatggatttcttcgaggatgaagaaaaagacgctcctacggtcgattatgtgtatcaaaacgaggacgagcagatattgattgaggggtataggaatatgccaaaaagccaacagtataaactaatggcttattattacgctctaatggagggtaaggaatgaaggcggtaatatacgcccggtattcaagttctaaccagcgagaggaaagtatcgag

SEQ ID NO: 23368 - DNA, 260 bp, Unknown
  Description of Unknown: LeftRegion for integrase B10369 sequence
aagtaataccaataaacaggaggcgtaataatgggcattaaaggttttagtcttaaccgggccacgggcctgtcggacgccaaaacaaaactggcgaaggcaacagggataccaacaacaaaagccggacgcaaacgcaaggccgagcaccttgtagcgcaggccatattaggcaccagcaaaaaagggaaaaagaagtaatggatacgacaacaaacgcggtcatatatgcccgtttttcgtcgcacagccagcaggag

SEQ ID NO: 23369 - DNA, 260 bp, Unknown
  Description of Unknown: LeftRegion for integrase B10370 sequence
gctctggatacggcgagagccccggtgacttcatctggaacaacgctccgtatgccggtggtctgacccagaccaggactggcggtgcgggcttcggcccaggaggtggcggtgcccaaggaggcatcttgttagcttccggtcacggcgccgcaggcggtgtgttcatcacagctcgacagatatagcaaagaacccccgtgggggtcttcggactcctgcgggggcttttttgcgtttcacagagtgttgtgcaatac

SEQ ID NO: 23370 - DNA, 260 bp, Unknown
  Description of Unknown: LeftRegion for integrase B10371 sequence
aatattcacgattcctataaggcagaactgcaagcaatccgggacgaagcacaggccaaaatatccgatatgcgcagtgaactggacaggctgaagcggaacaatgactacctgtgggcagagaataaccggaaatccaaaatgattgatatgtttattgaaaagaaaatggttgatatctaaaaaaggagtgatattggatggcaccagtaaacaagaaatatgcaatgtacttaagaaaatcccgtgctgacttagaa

SEQ ID NO: 23371 - DNA, 260 bp, Unknown
  Description of Unknown: LeftRegion for integrase B10372 sequence
tttggagcaacaagggcttcgtgggaggtgtgcccgtaaacaccgaaacagccgccgtgaatacctgcgggtgcgaccgaaaaccggtggcaacggttttgatctttctgctatgcgcggtccgaggcccggcctgcggggtgggcaatcgctccaaaacatcccgcaggcatgcccggcaatcccctccaacaatttccatgagtgatgtcgaaaattctcaactgatccgtgctgccgcctacgtgcgcatgtccaca

SEQ ID NO: 23372 - DNA, 260 bp, Unknown
  Description of Unknown: LeftRegion for integrase B10373 sequence
aaagccccatctttctctgtcgaaaaaggcggggctttgatgaacgagttctgctttttaatgcaactccacttctataaatagttgaaaactatgatatttttggaatgagtttaactttttcatctcaaatggttgcttttgtctcaaatccgtgactgattagacgaaagtttttaccgcttgaaaggtggtatagtatgccaaagaaaaatccatccggcggcaagcggcttgttgcctactaccgctacagcggc

SEQ ID NO: 23373 - DNA, 260 bp, Unknown
  Description of Unknown: LeftRegion for integrase B10374 sequence
taggaatcttccagaaaacataaaagaagatattagagattatatagatatgaagtacaataaattcaatgaacagtgtgccactgtagaagatgattatataattaaacgagcctaaaatataatatacataaaatgtagaaaaaaataggaatagaggtattattgtacctcttattattatatagagaggtgattttatgttaaaggtagcaatatatagtcgtaaatctgtggaaacagatacaggtgaaagtata

SEQ ID NO: 23374 - DNA, 260 bp, Unknown; identical to SEQ ID NO: 15412
  Description of Unknown: LeftRegion for integrase B10375 sequence

SEQ ID NO: 23375 - DNA, 260 bp, Unknown
  Description of Unknown: LeftRegion for integrase B10376 sequence
gaccaaggagagacaaatggcaaaaactataattaaaaaatattctaataacactacggtggttattacatacaacaacgaaccttctttagaggctatcaagcagtatgcccaaaaattaaagcagacaattgacagcaaaagtattcagagttaacatatatttataaaatcaatagagagggtgatattcgttggaaatgcgaaatgaatacaatccaattattataaaatatgttgcagaatatttgagaaaatct

SEQ ID NO: 23376 - DNA, 260 bp, Unknown
  Description of Unknown: LeftRegion for integrase B10377 sequence
gaggggctggtgacgcccggcacgctgaacgagcagtacggcacgcccgagccccaggagcccgtgtaccgcgtgatagacaagcgtctggagtccatagagcgggcctacgagtccatgaacgagaacgggcgccacgtgctccacagcgtggccgtcagcctctcgcgcgaccccgcgaacgcgccggaggtcgagtagtggccgtcgccgcgatctacgcgcgctacagctcggcggggcagcgcgaggagtccatc

SEQ ID NO: 23377 - DNA, 260 bp, Unknown
  Description of Unknown: LeftRegion for integrase B10378 sequence
aagtaataccaataaacaggaggcgtaataatgggcattaaaggttttagtcttaaccgggccacgggcctgtcggacgccaaaacaaaactggcgaaggcaacagggatccccacgacaaaagccggacgcaaacgcaaagcggagcacctggtagcgcaggccatattaggcaccagcaaaaaagggaaaaagaagtaatggatacgacaacaaacgcggtcatatatgcccgtttttcgtcgcacagccaacaggag

SEQ ID NO: 23378 - DNA, 260 bp, Unknown
  Description of Unknown: LeftRegion for integrase B10379 sequence
ccatttccacagcatccgcttccagtactggtctgctgggtggtgaccgaatccaggctacaatggtttttgaaagaatataaacaaagaaccgccccggtgcggcaacaccgagacggttcagagggtagtaaacgtatgccaggattactaccctttcattttaccacggattggcaaaaaatggaaggagaattacaatggatttatacgccgtctatctccggaaatctcgaatcgatctggatgcagagcgcgcc

SEQ ID NO: 23379 - DNA, 260 bp, Unknown
  Description of Unknown: LeftRegion for integrase B10380 sequence
aagaaatactatcaaacattgaccggcgcggacatcattatagctgattgataaattttattgaatttattttttcttcagccgattctcgctggacttgtcgaaagttatcaatataattgtgttgaaaaaagcgaaagaggaatcgcatacattttggtacgaaacctcccaatcacgtaagaaaggagataagcggtatggcacaagtaaaactgatatcccccttaacaaagcaaggaatacaaaaactgcgggtt

SEQ ID NO: 23380 - DNA, 260 bp, Unknown
  Description of Unknown: LeftRegion for integrase B10381 sequence
caaggctaatggctgtttggaatttggctcaatgccaccggctgagtatcaatcggcgaacgattgccagtcctgggacgttatcccgttttagattccgatgaccgaccaacgacagaacatatccacacgatccgttggcgcaccgtccgcagacggactatcctcaatcgccagactactactcagccgagccgccaatgacagccgccgccatctacctgcgaagcagcaaggacaggcacgatctgagcatggac

SEQ ID NO: 23381 - DNA, 260 bp, Unknown
  Description of Unknown: LeftRegion for integrase B10382 sequence
aaattgaacgatcgagtgatatacaacaaaaagggaaaacgcttatacgaagggatgttttatgattttcgctatatcaacagacattttgtaattaaactagatggattcaatttcaacggaacaaacaaaatcgtcctgtcaaccggtaataccagcaaaacatatatcgtaaatgtcaataataccggaggtacaacatgagcaaacttccatccggagaattctggttatatctccgcaagtcccgcgccgatctt

SEQ ID NO: 23382 - DNA, 79 bp, Unknown
  Description of Unknown: LeftRegion for integrase B10383 sequence
atagtaaaggacctttgatatgaacgtagtattgtatttgagatattcgtccgataagcagacagagcagagtatagaa

SEQ ID NO: 23383 - DNA, 62 bp, Unknown
  Description of Unknown: LeftRegion for integrase B10384 sequence
cttattgtaggtttagtagtagagggcaacgggaagagtcaatagaagcacaaataagagag

SEQ ID NO: 23384 - DNA, 260 bp, Unknown
  Description of Unknown: LeftRegion for integrase B10385 sequence
aaatggagatgatccgggcagatgcacagaagaagattgacttcctgcttagccaagtggcgcagctgcgttcggacaacgacaacctttgggcagaaaacaatagaaagtccaaggtcgtggatatgttccttgaacgccagcatttcctgcttgtaggcgaaaaagaaaaaacaacataacacaagggagacataaaaatggcaataaactacctaacagatgaggcatacattatgtatctacgaaaatcaagggca

SEQ ID NO: 23385 - DNA, 260 bp, Unknown
  Description of Unknown: LeftRegion for integrase B10386 sequence
ctcggcggaatcaatgccgacagcgttacaaagaaaaccaacttccttgttttgggaaataatgacctgtgttcctcaatcaaagacggcaaaagttccaaacataaaaaagccgagaagtatattttgggcggcgcagacttgtctattatcccggaaaatgttttttatgatatgttagacgaataaagggtgattgtatgcgggcttttatttactgccgattttccagccataagcagcaagagcttagcatagaa

SEQ ID NO: 23386 - DNA, 260 bp, Unknown
  Description of Unknown: LeftRegion for integrase B10387 sequence
aaatggagatgatccgggcagatgcacagaagaagattgacttcctgcttagccaagtggcgcagctgcgttcggacaacgacaacctttgggcagaaaacaatagaaagtccaaggtcgtggatatgttccttgaacgccagcatttcctgcttgtaggcgaaaaagaaaaaacaacataacacaagggagacataaaaatggcaataaactacctaacagatgatgcatacattatgtatctacgaaaatcaagggca

SEQ ID NO: 23387 - DNA, 260 bp, Unknown; identical to SEQ ID NO: 22841
  Description of Unknown: LeftRegion for integrase B10388 sequence

SEQ ID NO: 23388 - DNA, 260 bp, Unknown
  Description of Unknown: LeftRegion for integrase B10389 sequence
ctcggtgaagtcatgcgcaaacaccgggaagcgaagcacctttcaacgactcaagtcggcgaactgctcaacgtttcgaaagtttctgtgcattattgggaaaccggaaaaagacaaatcaatgcaagcatgttgaagaaatactgcgacgtcgtcggcgtccgtgtgcaggcactgtttgatgaaatggacggtatcatatgaaaaccgccgtcatatacgcaagatactcgtctagcggtcagcgtgaagaaagcata

SEQ ID NO: 23389 - DNA, 260 bp, Unknown
  Description of Unknown: LeftRegion for integrase B10390 sequence
acgaaccgggaccaactgctgaggctgatcgcacgggaccggcgcaggcgcgaggtcgtcccgccgcctccgacgcgaccggtgcctgctaccggcgaacccgcaggtcagtggcttgggggccacgattcttcaacagttggtttgcagtgagtccagatcccacgacttcctgcaagcaatctgttaccttggcggacatgacgacgttggagtggttggtcggggcctacgagcgcctgtcgctcgacaagcgtgac

SEQ ID NO: 23390 - DNA, 260 bp, Unknown
  Description of Unknown: LeftRegion for integrase B10391 sequence
gctctagcgcaacttcaatagctatccctgcctcaaatagaaacgccgccgcgcttcttaccccatgagcgcgctgcagcgcgatcgccgtagcgaggaccgagcggctattgccaatttttgtggcgtctctactcatcctcatatagtctcccagaacaatcggggcgtattgcgccacatcaaacactggaggctttatggtcaaccgtgctgtcatgtacgtgcgcatgtcgaccgagagccaggactactccaca

SEQ ID NO: 23391 - DNA, 260 bp, Unknown
  Description of Unknown: LeftRegion for integrase B10392 sequence
tggcagaaaacgccaagctaaaaagggatatagaggcgtacaaagctatagttgaatccctgaaaaagaagatggacgaggctaaagcaaaattagtttattaaaacggaagttttatttaaggcgaccttcgggtcgtctttttttttatgtcttgatttaattgcgttcttaacgtacaataatttcgaggtgacgttatgaacataaaagacgtagctatttatttaagaaagagtcgtggagatgacgaagatgta

SEQ ID NO: 23392 - DNA, 260 bp, Unknown
  Description of Unknown: LeftRegion for integrase B10393 sequence
caaccgtggcagtatggccacggggagacaaaggctacttgcctctggttaaagggtttgccaaagctggaaccgacaaacatcgttgaagggcgtgaggcccggatacatatgatgtcaccggggaaggaccggggtaagaagcggtctgagacgtatcaaggtattgccgacgcgatggcggcacagtggggcagtttatgagcacatgggtctacgcacgagtatcaaccctcgaccagtacgtcaacgggtactcc

SEQ ID NO: 23393 - DNA, 260 bp, Unknown
  Description of Unknown: LeftRegion for integrase B10394 sequence
ctgcacctgctgcctgggcaccggcgtcggggagtcgttcgcgagcgcgtacgcgaacctatgggacgccatcaacggcgcgcgcggcccgtgggcgagcaacccgtgggtctgggtcctcaccttccaccgcatcgaggcaccatgaacggcttcgaccgcctcgcgtacctgctgctccccttcctggacaacgagccatgcgacaccgagacgcccccgaccgccccgcccgagtcctcggctacgtgcgcgtctcc

SEQ ID NO: 23394 - DNA, 260 bp, Unknown
  Description of Unknown: LeftRegion for integrase B10395 sequence
tctataacaaagaaaatgcaatgcgtaatattcacttgataaaaccggagggcaacaatgaaagaacttgaaattgaattgctgccaccggaacaaccggttgaagtatcagaagaagaaattgcttttgaacttgcaaaacttttatattattttacatatgattaacatatgttttttctttgtgctattatctttttatgaagcaagttgtcatctatgctcgtgtatcgtcggacagacaggaaaaagagggcttc

SEQ ID NO: 23395 - DNA, 260 bp, Unknown
  Description of Unknown: LeftRegion for integrase B10396 sequence
acaacgccgataagccacggttcctcgtctggggcgagcagtgcaactttcgaacacacgctgcgctacgcctccacccgttgctcgagtggcagctcgagagctcggatttgccgtgaagatcacggtgctagactccgcgccgggacctgacccggagatcgcagccgcggcagcgatgccgctcctcgaggccttcattgaacgagaagaagccgaacgcggtcctgtacctgcgcagcagcaaggaccgtcacgac

SEQ ID NO: 23396 - DNA, 260 bp, Unknown
  Description of Unknown: LeftRegion for integrase B10397 sequence
ttctgtctaagggtgatgaatttgtatgaatttgtcaccctctactttacaattttgattttaatagtataacaaagggaactacgctgtgacatagtgctctttgttatacttttttaacaaaacttcagactctataatttaagaatatggttaaaattgcagtacaagtaataacaacatcaattaaattatagattatggcaaaatgcatattactttcacgagtttcaactgagcaacagagcttagatgagcag

SEQ ID NO: 23397 - DNA, 260 bp, Unknown
  Description of Unknown: LeftRegion for integrase B10398 sequence
cagccgtggcagttcggccacggggagaccaaggcaacatgcctgtggttaaaaggcttaccgaagttggaaccgacgaacattgttgaagggcgtgaagctcggatacacatgatgtcgccggggaaagaccgaggcaagaaacggtcagagacgtaccaaggcttggctgacgcgatggcggcacagtgggataacttatgagcacatggatctacgcacgagtctcaacactcgatcagtacgtcaacggctactcc

SEQ ID NO: 23398 - DNA, 260 bp, Unknown
  Description of Unknown: LeftRegion for integrase B10399 sequence
ggggcgcagcgacgcgctctacaacctgattgccggagcgattgggctgcttgtcattgcggccgttgtccgcttcgtctaccggctgatcgtgggcgcggcgtgagcacgggcggcgtggcaatcctgtgcttcgccgccagtcttttcaccggggtcgccttgacgctgctctacgcgtggagcggcatgctcttcccatgaccgaacgccgccgcgccatcggatacataaggcaaagcgaacagcgcccgggtgaa

SEQ ID NO: 23399 - DNA, 260 bp, Unknown
  Description of Unknown: LeftRegion for integrase B10400 sequence
agaccgttgaatatgttctgaacaccagcagcaaaaagattcacaagccgacctgcaacgacgtgaaaaagatcaagccggagaattattcgaccaccaccgacattgattcatacctctcacaaggttatacaaaatgcggccattgctggtaaaaagaaaaaagcccgcctcaaagagacgggccgagggaatgagctatgaaagcaaatcaagcggcggcgcagaaaaacgccgtgatctacgcccgcttttcctcc

SEQ ID NO: 23400 - DNA, 260 bp, Unknown
  Description of Unknown: LeftRegion for integrase B10401 sequence
ttaacatatgatttacatacagtaattaaagaaaacggtctaatattttaattaaaaataataaatatataagcatatagaaagaccttgaacacattgaacgggaatacccttcaatccgttgtgctgcaacggtttgacgggtgttcaaggtaaaattgaccttgaacatcacattgaacagaaagaagggatgagaaatgacaaagtatattgaatatctgcgaaaatcgcagatggacagggattttgaagatgtc

SEQ ID NO: 23401 - DNA, 260 bp, Unknown
  Description of Unknown: LeftRegion for integrase B10402 sequence
tatgcccctattacatattcaggggagcagctgaatgaaataaggatcctcggaaaggcagtgatgctgcagcgcgtgatctccagcaagcggaagttttgattacatggaccgaagaccaggaggagatggataatctcagcagttatgtggaatcctggtcttaccgaataacaaaaagtcggtagggtgagaaagaaatgaagaacgcagttatttacgcgaggtattcctccctcgcgcagaatgagcagtcgata

SEQ ID NO: 23402 - DNA, 260 bp, Unknown
  Description of Unknown: LeftRegion for integrase B10403 sequence
ccactcgcaaaggttctgaggtgcgccccggaatatttgcttgggctcgacgagacgcaggacagcaatgcaccgagcgttccggccgttcccgttctctcccccgctgagcaagacctccttgatgcttaccgcgccgccactcctgaagcccagatggcggccatgttaacattaaaagcaaacagaaaggaacagccatgaacgccgccatatacgcccgcttctcctcctccggccagcgcgaagagtccatcgaa

SEQ ID NO: 23403 - DNA, 260 bp, Unknown
  Description of Unknown: LeftRegion for integrase B10404 sequence
ttatagataatagtatatatgtatttagatatatcgatagtatttatgttaaacgcctagtgcaaaatgtcgaccaaattattgttaaatcagataataaagagtatcaaccacgctatataacacttgaaaattgtgataatttacaaattataggtaaaatagttggtttaatgagagaaatatattaagggattaccatgcctgcgatcaaaaaaacaacatcaaacacaataaaaaaatgcgtaatatatgcccgc

SEQ ID NO: 23404 - DNA, 260 bp, Unknown
  Description of Unknown: LeftRegion for integrase B10405 sequence
tatgcccctattacatattcaggggagcagctgaatgaaataaagatcctcggaaaggcagtgatgctacagcgcgtgatctccagcaagcggaagttttgattacatgaaccgaagaccaggaggagatggataatctcagcagttatgtggaatcctggtcttaccgaataacaaaaagtcggtagggtgagaaagaaatgaagaacgcagttatatacgcgagatattcttccctcgcgcagaatgagcagtcgatc

SEQ ID NO: 23405 - DNA, 260 bp, Unknown
  Description of Unknown: LeftRegion for integrase B10406 sequence
gctacggcgggcgctgaggcgcagcctgggcagcaggtgcggggctacccgctgggcacccatcgccgccgcacgggcacgctcgaccgcatccttgacggctgggctgcctacgtctggacgaacccagaccgcaacgatcacgtgcggctcgtgatcatggacctgtcgacgctcgaagtgctcgacgaggcgtcgaagtgaccgccgcccgcaacctgcacgaggcgcccgctacggcgggcgctgcggcgcgtaag

SEQ ID NO: 23406 - DNA, 260 bp, Unknown
  Description of Unknown: LeftRegion for integrase B10407 sequence
attacccaaacaagaaacgctgattagattagcggatgaattggattgctctgttatggattttttcgctgacgaagacgatattgaaaagagaatccctgaaaacgaagatgaggctgatattttaaaaatttatagaaaactatcacgtaaacaaaaacacgccttcatgacaatggtgtatcagtttgcggatgaaaatggagtgtgatcttatcaatgctgtaatttacgctagatattctagccataatcaacga

SEQ ID NO: 23407 - DNA, 260 bp, Unknown
  Description of Unknown: LeftRegion for integrase B10408 sequence
gctatatatgatttcattaaagctgtagcaacagaaactgattcttctactgaaaaaaagaaaatctacgaaacagaagatgcataaataaaaaccccgccactcatagagaggcagggagcaaacaaaaagaatttaatatgatattctacactgctattatacaccattaatagcaggaaagcaataaggagtagtaaatgttttcaaaagaaattttagtatatttgaggaaatctcgtgccgacgatgtctatgag

SEQ ID NO: 23408 - DNA, 260 bp, Unknown
  Description of Unknown: LeftRegion for integrase B10409 sequence
gacctcctcgcgctgcccgtgcgcggagagttcggacaacgcgaaatcctgctcggcggcaagcgagtgatcattccggtcgcgccgcagccggcgctcgctttctacaccgaaccggacacggttttctgcgcaaccgacgcgcagggcgagggatggattctgtcgatggacgccgacggcttgcaccgccgccgcgcatgacggtcgcccgcatctacgcccggttctcgaccgagcggcaggacatcacatcgatt

SEQ ID NO: 23409 - DNA, 260 bp, Unknown
  Description of Unknown: LeftRegion for integrase B10410 sequence
atagcgtaatagctccaatatttgataggaggacagcgaatgaaagttatcatctgcgacctagtagagactggtgcacgttggttattcatcggggacaaagttcttattagtcaaggttttattgatgatttcgtaaaggaacatccagaaataaaaatgacggctaaatagccgttttgacatcaagggggttacagatggaatctgttgcaatttatatacgagtatcaacgaaaaggcaagttgataaatattcc

SEQ ID NO: 23410 - DNA, 260 bp, Unknown
  Description of Unknown: LeftRegion for integrase B10411 sequence
gtgcccggaggtgacttttgtggattctccgcgaccctccggagccacccctgcggcgaagccgccaacctgcacacagtcataccacctggtgaaatctgaccctgtcctagtgttaattcagttgaagagtgaataaaatctaggatacggacttgtaacacgcctcaagcccggggcagtgagtccgacatccgaagatgcgcgcctactcctatgtccgcttctcgtctgagaagcagtcgctcggtgactcacac

SEQ ID NO: 23411 - DNA, 260 bp, Unknown
  Description of Unknown: LeftRegion for integrase B10412 sequence
atctcccacctgcttgaaatattcatcgaagctaacgcaattaaagccaagcaggccatcgaaaaggctgctgttttggaagagcagaaaaaacaataaaattaaaatcccggcaaagaaaaaagatgtttacattctcgcattctatagtataatatagttgtaccagatcgctacttaatatatatgagaggtatactatgaatatcgccgcttattgccgggtctctactgataaaactgaccaacttaacagtttg

SEQ ID NO: 23412 - DNA, 260 bp, Unknown
  Description of Unknown: LeftRegion for integrase B10413 sequence
tagacatgaccatcagattatttttagacctgattcacatgattcaagattcactgattacatagtatcagatgaaaatgaaagtctaaaaatacatggaaaagtggttctttacactgtcgaattagattaaatctctagctagatatttaaccaataggtgggtcgctcccacctattttctttagggaggtatttacatgagggttgccaactattaccgagtttcaaccaagctgcaagaaaagaaattcagttta

SEQ ID NO: 23413 - DNA, 260 bp, Unknown
  Description of Unknown: LeftRegion for integrase B10414 sequence
ttccctcggtagaatacaccagctatgggccggatcggagccagccgacacggaaagacaaggagcgaccttaaagggggtgatgcttcaaaaaacgcaaaacattctatataaagggggtgaaactttcaacattgccagcaaacattgcaactatactttgaaactatgttgcaatcacacacaggaggaaagacatcatgccagtcaacgtattatcggatgaagcatacatcatctacttgcgtaaatcacgggcc

SEQ ID NO: 23414 - DNA, 260 bp, Unknown
  Description of Unknown: LeftRegion for integrase B10415 sequence
tatgcctacttctactgtcaataaaatatgtgcagtcttgaatatcaaaccatcagagttgttaggacttacccaaaataactcatttgagtatgatttaaaggacattctgacttcagttgatgatttaccctatgaagcaaaaaaagacttgctagacctattaaaacaacaaataaatctatgtaggagattatacaatgataaggcgaaaaatcataatgtacttgagaaaatcaaggactgacaatcaatctgaa

SEQ ID NO: 23415 - DNA, 260 bp, Unknown
  Description of Unknown: LeftRegion for integrase B10416 sequence
gtctggcggaaaattttcccgatgccgtattattccgaatgttattgtcatgttgagagcgtcaggaagttttctgaattgtcccacggcgaagatttcgatctgccgccccgtgattttgccgaccccgtgaaaatcctggaatcatggcaaaacgaccccaatccattgatcccattaccaaaggaggatctcaccccatgaaatacatgctctatgctcgggtaagtccgaagggatccgactggcacgcggaagaa

SEQ ID NO: 23416 - DNA, 260 bp, Unknown
  Description of Unknown: LeftRegion for integrase B10417 sequence
aacaaataattataaacttgaaaagtcatacataagcaaattgggacttaaagtgaagagttatgtgatttgctatgatagcgaagaaagtaaagtatctgtacgtgaggaaataactaaatcttgcttaagaatttttgataaaattaaaggataacaaaaatgctctttaagtttacattcaaacgtgatataatataatgtatcaaaagaaaaaaggacgagtattaaaaatgatagcaatttattgtagacaatcg

SEQ ID NO: 23417 - DNA, 260 bp, Unknown
  Description of Unknown: LeftRegion for integrase B10418 sequence
gaaatatttcaggaaatgggggacgattacaacagcctgtcaccgaaagctcggcagctgttcggaattttcgaacagctgaacgatgccggtcaggacttcctgatcgcccaggccgaaagcatcctctcgcaaccggtttttcgaaaagacggcgctgcaaggttggcagaataaattatttataatgtgagtgaatgatgaatgatgttttaattggatatgcccgcgtatcctcggaggaacaggcccagcacggc

SEQ ID NO: 23418 - DNA, 260 bp, Unknown; identical to SEQ ID NO: 23306
  Description of Unknown: LeftRegion for integrase B10419 sequence

SEQ ID NO: 23419 - DNA, 260 bp, Unknown
  Description of Unknown: LeftRegion for integrase B10420 sequence
acgcccgcaaggcgctgggaggcggcgatgggcgcggctgagaaattcccggctgcattcctcgctctgctggacgccctggcggtggctgaagtcgaggattacatgacagcccaggccgcgccgggcaacgattctgacccggcccgaccaaatcactccgctaccggcgacgaacgagaggcggcatagtctcggccatgcgcgttgccgcctatgcccgctatagctcagaccagcagcgcgatgcctcgctggat

SEQ ID NO: 23420 - DNA, 260 bp, Unknown; identical to SEQ ID NO: 23203
  Description of Unknown: LeftRegion for integrase B10421 sequence

SEQ ID NO: 23421 - DNA, 260 bp, Unknown
  Description of Unknown: LeftRegion for integrase B10422 sequence
tgaccagccactaggatattcagctagagattcacctgactattttgtgggagtaggggctgaatatcgttggtgatcattaattatttaatttaacaaatttacaactttacacttagtgtaaacattcaattttaaacagcttgcattttgagtatgagggggcatacactctcgctatcctacgctcaaaggtgaatatgcaagctgctttatatctcaggtcttcaaaagaccgttcagacgtcagtatcgatgcc

SEQ ID NO: 23422 - DNA, 260 bp, Unknown
  Description of Unknown: LeftRegion for integrase B10423 sequence
tcgaagctgttcacggggcgaatagcagacccgacatggcaaaaggctctcacgatgattaaggctctcggcatgaccgctgatgagttcagagaggtagaagctcaattagagagcgaccaaaacaaaaaagctcgctgagtggtcaagactcagcgagctttagtccagtcccaaacggcagaacggacaatcacattatggcagaaaaagcggtaatttacgcgagatttagctcagacaagcagcgcgaggaatcg

SEQ ID NO: 23423 - DNA, 260 bp, Unknown
  Description of Unknown: LeftRegion for integrase B10424 sequence
ataactgctccgatagatgtgaaattgcaaaatatttaaacgtaactcttgattatttaaatgaagcaattagctattatgaacataaatatgggtctatttatagaatagatgattatattatatatttttcccctaaattttatataggtaaattcttttaattaatatatttaaattaaagtgaggtggcgaaacttatggatacagatattttcgcaatatatcttagaaaatcaagaaaagatttagaaaatcaa

SEQ ID NO: 23424 - DNA, 260 bp, Unknown
  Description of Unknown: LeftRegion for integrase B10425 sequence
gagcgcggcatcatcgtcaacctgaagcgggacacaatcgagaaaatggcagattatttcggagtcctgccgagctacatcatgggaatgtccgaagagcgtgtccgtctgacagatgaggagacatctctgatcattgccttccggaaggctgatccggatctccagaaagcgatcagactgatgctgaaggtggaagcatgacagccgacctgatccccgctgtcatctatgctcgttactcctcttccggacagcgt

SEQ ID NO: 23425 - DNA, 60 bp, Unknown
  Description of Unknown: LeftRegion for integrase B10426 sequence
gacaccgaggatcggcaagtgagatcccttgccgaccagctctccgagttgcgcgagctt

SEQ ID NO: 23426 - DNA, 260 bp, Unknown
  Description of Unknown: LeftRegion for integrase B10427 sequence
tggtggaaaggaattttagcttatgtagtggcgagaataattctcactttgtttgaagtttgggtatctaattttataaccggatttatcgtttatagatataatagatcgaacaatgagtatattgatatctaatcaaattaatttgccttgtaagcaaatttaaattaacaaggaaaggcgttgtaacaattataggcatggaacggaccgctatatacttacggaaatcgcgcacggacatagaagctgaagcacgc

SEQ ID NO: 23427 - DNA, 260 bp, Unknown
  Description of Unknown: LeftRegion for integrase B10428 sequence
aagatttgctctgctttgcaaatcaaagaatttgacgtggaaattgtgaaaagcaaaattgaaaacattctggtgtcaccgaattggctgactttccttttcaaagataatacggagaaagccatttcttggaagaattattccagaagtgaaagctggacaccggagatgcgacaggctgccgcagaaaggagcagaaaatgccaaaagtaaccgtcattccgccgtctatcaatcggacaactcggcagtccacaacc

SEQ ID NO: 23428 - DNA, 260 bp, Unknown
  Description of Unknown: LeftRegion for integrase B10429 sequence
cgtcatcgtccgggtgctcgcgtgaccgccgagcgccagcagcagcgaccgcacctggtgatcgtgccgtccgaggcggaacggccgatcgtcgacccgttcctcctggcgctcgccggtctcatccggtccgcccacgagaaccgctacgcccgccgcgctacgctgaccgccatggacggcgggaaggcacgcgaacggtgaagcgactgccgcgctccgtcgacgcactgcgcggcctgcgcgcggcacgatgggtg

SEQ ID NO: 23429 - DNA, 260 bp, Unknown
  Description of Unknown: LeftRegion for integrase B10430 sequence
taagacgatcagcccggtaacgctggccgtcgtgccctagagactcccggcgttttccgccgcgcaagggtcctgcggcgggccggtcgagagcccccggcgtccccgcttcccggacgccgggggcattcgctttccccggtcagagtgtgtatgctgctttatggttcgcgttgacaacaccgaaaggaccatacacaatgcaagacatgccaacttgcgtgatctacctgcggctttccgactcccggaccgaggag

SEQ ID NO: 23430 - DNA, 260 bp, Unknown
  Description of Unknown: LeftRegion for integrase B10431 sequence
ccaataaaacttattttatagtaaaaaacaaccgccctgccggcaagcagaacggatgttaataaataaggtgcatttatgatatacacccaaaaaccaattaaagtatatcatattgcactctgatttgtcaagtgtaaatgcggtaagtatatcttcccgcttatgcttgcatacaattaagtaaaggagaatgcaatatgacagaatacaatataatgtatttaagaaaaagccgagaagacgaaaaagatccaacc

SEQ ID NO: 23431 - DNA, 61 bp, Unknown
  Description of Unknown: LeftRegion for integrase B10432 sequence
ttattgggggggggcggtcatggcagcgtacatttatgcacgggtgtcgacagtggagcag

SEQ ID NO: 23432 - DNA, 260 bp, Unknown
  Description of Unknown: LeftRegion for integrase B10433 sequence
atatctgtacagagggaatctggtagatgtctgtgatacagtaaaggcggcagacggaaaagcgtggtattatatccgcattgcaggaaaatactatggatttgtttcttcagattatatcgtgaaggcataggaatatggctgatggtcagtaatggctgtcagccgtatttttttcagtttatgccaaggaaagaaaggtgaaagggtatccaagaaaacacttgctattattggctttcagagtgatatatagacta

SEQ ID NO: 23433 - DNA, 260 bp, Unknown
  Description of Unknown: LeftRegion for integrase B10434 sequence
gaagaaaacgggattaaaattaccccaatatctaattgaaacaaaataaaaaaaccgccctgcgccaacaggacggtgtcaggcatgagatcgtaatcccttacccccagatatgttaaaattaacacaccttgatatcatcgttaattttagcatatcctttttgaattgtcaatattttatacaaaaggagtgctgaaatgaagatagcagcggcatacattcgtgtatcaacagacgaccaaattgaatacagtccc

SEQ ID NO: 23434 - DNA, 260 bp, Unknown
  Description of Unknown: LeftRegion for integrase B10435 sequence
tggacatgagaagacaggttacagttataccagcaactggaggcggcagaaccaggaaaaagagcagcgtaaatcaaaatagaaagatccgcgtagctgcttactgtagagtatctacagaacaagaggagcagctcaattcgtttgagagccaggtagaatactacactaaatatatcggagatagacctgaatatcagatgattgacatatatgcggatgaaggaattagtggtacaaataccaaaaaacgtgaaggc

SEQ ID NO: 23435 - DNA, 260 bp, Unknown
  Description of Unknown: LeftRegion for integrase B10436 sequence
ataccgaccgtgctcggtgggtgtcgatagacgcggaaccggccggattatctgcagacgatccgcgctttgcagcgcagaaaaataaaaaccagcgccattggaaagcgtcgctccgtgacctttccgagctggccggctttgatgatgcggtcgtggccgcgtgtcagtacatagaaagctattaaggagggatatatttgaacggtgttatatatgcgcggtattcggaagggccgcgccaaacagaccagagcata

SEQ ID NO: 23436 - DNA, 260 bp, Unknown
  Description of Unknown: LeftRegion for integrase B10437 sequence
agaaattgccacactttgcaatgtgtccatgcaggcggcagaaattcgctccagaaggatgcaaatcttgcttgcaagaaataaatttctgacgcatccgctggaacggcaggtatttgaacagtttcaacagtttatcaacaatcagtaaaaaaaccgccctgcaaggaattgtggggcggtacaattaaggagcgattatgaaaagagcagtgttttatggtcgttattccagcgacagacagaccgaacagagcatt

SEQ ID NO: 23437 - DNA, 260 bp, Unknown
  Description of Unknown: LeftRegion for integrase B10438 sequence
cgctatgttctttaatgtagatcttaattacatgcttggaaatacagatgtgcgcagatcttatggaggtctgcaggaatactttgatgctaagctagaagaactgctgactgatgatgagcttactcttgtttttgcttttagaaaagcgtctccagaattgaggcaggcaactctgcgtatgctgggtgccaaataagatggtaaaagtagataagaaaataaatagaggagttatatatgcgagatacagcgaaggg

SEQ ID NO: 23438 - DNA, 260 bp, Unknown
  Description of Unknown: LeftRegion for integrase B10439 sequence
tcatgcggcagtgttgtcgtcagcgaacggtctgtcccttccttaactgacgttgaatccgaactactccagcagttacgcagactggatgaatatgaccgcggcaaagtctccggatacatcgacggtctgcttgcttcgtcaaaatatataaaaacagacgcagccatttctgagactgcttaaatgagtttgtgagtatggaaaataatagagctgctatatatgcccggtattctgctggatccggacagacggat

SEQ ID NO: 23439 - DNA, 260 bp, Unknown
  Description of Unknown: LeftRegion for integrase B10440 sequence
aaagatagcgttatcagcatgatcaccgcgaaatattacaatgaaacctatcagatggacgattccgatctgttcaccctgacaacaaaccagcctgagattggcaagatcgatctgagcaaatacaccagcatcgagatcaccgggcctgttgtgttcatggcttataccggcctgttcaactgatcggagattccaccatgaacgccgtaatctatgcccgtttctcctcctccgcacagcgagaagcatcaatcgaa

SEQ ID NO: 23440 - DNA, 260 bp, Unknown
  Description of Unknown: LeftRegion for integrase B10441 sequence
gctgccgcacgcgacctacgggctggccgtggacggcggcaaggtggtgaccgctgcgccgattggctggtgggcagtgggcaaggatgagcagtacgtcgcggactacctgcggcgccggggcgcccggctggttccgctggacccccgcgaaggtgttgcacctaaatagcaccccaccgtagagagacgctatataggtgcaatacagtcggggcatgaccgagaccgggtacgacgccaccacgtggcagcagatc

SEQ ID NO: 23441 - DNA, 260 bp, Unknown
  Description of Unknown: LeftRegion for integrase B10442 sequence
aaaccagaggcatgagattgcttgacgcatttccaggcgcggctcggccactccatccggcggtccttgaaatgcttgaacctcgtaagagccaaacgccaaaagaagacgccgaaatggttgtactttggcgtaatgctaccctggctgcaaaacgagctgctatcgctgtccttaaatctatggaggaactcaaataaatgaacgcagtcgtctacgcccgcttctcatcctccgcccagcgtgaggcatccatagag

SEQ ID NO: 23442 - DNA, 260 bp, Unknown
  Description of Unknown: LeftRegion for integrase B10443 sequence
gttcagaaaatagctgattttttaggaactacaacagactacttagcaaaaggatctgaatctactgaagaaaactcttcttttgttgaacttgaacgagtatatacaattctgccagtaaagcaacaacatgagttaatgaactttgcttattatcttctagacaaaattgaagatgaaaaatctggaggattcaaaaaatgaacaagtctgtattatatattagatacagcgacgagaagcaaaatgaacagtctgtt

SEQ ID NO: 23443 - DNA, 260 bp, Unknown; identical to SEQ ID NO: 18323
  Description of Unknown: LeftRegion for integrase B10444 sequence

SEQ ID NO: 23444 - DNA, 260 bp, Unknown
  Description of Unknown: LeftRegion for integrase B10445 sequence
taaaaaaatttaaatggaagaattataatattacagctatttttaatgggaattttaatgtagatcgattagcgaaatcaattattgaaactgtagatgagtttgaagcaaaaaagaatctcaaaagaaggccttcctaatatggctttctttttttataataaaatgtatacaagttttacttgaggagatgtcatgtaatggatacaaaaggaaaaatcgaacaaattaaagacgttgccattctcctaagaaaaagt

SEQ ID NO: 23445 - DNA, 260 bp, Unknown; identical to SEQ ID NO: 18323
  Description of Unknown: LeftRegion for integrase B10446 sequence

SEQ ID NO: 23446 - DNA, 260 bp, Unknown; identical to SEQ ID NO: 18323
  Description of Unknown: LeftRegion for integrase B10447 sequence

SEQ ID NO: 23447 - DNA, 260 bp, Unknown
  Description of Unknown: LeftRegion for integrase B10448 sequence
tcgttttatgctttttgttaatgtctttattttttatgtattcttttgtactttcaagattatggcgtaagaaaattgcaatacgattattgttgtatattcaagataatgtgaccttaattgtctttttaaataaaaattaaacaaaaattatatcccaccactaaggtttataaaagcatacgttagcaggtgtcaccatgaaaaaagccatagcatatatgcgattttcatcaccaggtcagatgtctggcgactca

SEQ ID NO: 23448 - DNA, 260 bp, Unknown
  Description of Unknown: LeftRegion for integrase B10449 sequence
tcatattaatttactcttaacacgcaatgtaacttacactatgcaacggctacggttgagttctattagtcgttagcacgcttgaccatgcgtctacccattctatcacatatagaacctttgtgctagtagacacgcacgattgaccagggatttgcccgattcttttaacgcttctcacttgatgagaattaccgcccatgcccgacttctccaccctcacccgcttcgccctgtatcgtcgtgtcagctcgcaggag

SEQ ID NO: 23449 - DNA, 260 bp, Unknown; identical to SEQ ID NO: 17848
  Description of Unknown: LeftRegion for integrase B10450 sequence

SEQ ID NO: 23450 - DNA, 260 bp, Unknown
  Description of Unknown: LeftRegion for integrase B10451 sequence
ggtaggacgatcagcccggtaacgcttgacgtcgtgccctagactcccggccttttctgccgcgcaagggtcctgcggcgggccggtcgagaggtcccggcgcccacgcttcccgggcgccggggccattcgctttccccggtcagagtgtgtatgctgcttcacaggtcgcgttgacaacacctagaggagcatacacaatgctagacatgcccacaacagacctttacctgcggctttccgactcacggaccgaggaa

SEQ ID NO: 23451 - DNA, 260 bp, Unknown
  Description of Unknown: LeftRegion for integrase B10452 sequence
gaatagttgcactggtgcaatttatcccattgtggaataatgccgaataagtgggattgataacgaataagtacgatttgatgacgcatttcaagaaaaacgggcatttttcgggatgagttgtacatttttcatcccaaatgtgcatttcatttcaaaagtgggacattgtacccacattgtgctacgcggaggaaattatgatcggagtgatttacgcaagatattcagaagggccgaaacagacggatcagtccatt

SEQ ID NO: 23452 - DNA, 260 bp, Unknown; identical to SEQ ID NO: 18276
  Description of Unknown: LeftRegion for integrase B10453 sequence

SEQ ID NO: 23453 - DNA, 260 bp, Unknown
  Description of Unknown: LeftRegion for integrase B10454 sequence
ctgggcgcgaaatgggagcgaccgatccgagattggatcgacccggtcgccgtggacgaggccttcgacgccgccggggcgatggtaaccgccgacccggatagcggtccttacgtgcttcgagtgatggagatgctgaagctcgcgacgtccggcccggacttccgtcccgccgccgcgccgacggctgatcagtagccatgcgcgtcgccctctatgcccgttttagcgattccgagctgcagaatgaacgctcggcc

SEQ ID NO: 23454 - DNA, 260 bp, Unknown
  Description of Unknown: LeftRegion for integrase B10455 sequence
taaaagaagcggatggagtgggagcatccaaatggggattcttaaaaagcaaagccggatggatttcccttgattacgcaacaaaatgctgataagcagccggaagaaatagtgcttccggctttacatatatcagcaaatatagcttgcaaattttgccctttagagtgatatatagacatacgaaaggaggccaaagtatgcaggtaaatgtaataaagcccgtagaaaagaccaagaaaaaactcaaggtttgtgct

SEQ ID NO: 23455 - DNA, 260 bp, Unknown
  Description of Unknown: LeftRegion for integrase B10456 sequence
acgatgagctttttagacctgcttatcagcgctccgcaatctctcgatcagggtattgttagcgctctccgcgatcgtacaagaccgcagaccccaaaggaagattctcagatggtggtcctgtggcgcaccgcgtccatccaggctaaacgcgcagccatcgccgtactggagtccatgaaggaggcggatctcaaataatgaacgccgtcatctatgcccgcttctcttcctccgcccagcgcgaggcatccattgag

SEQ ID NO: 23456 - DNA, 260 bp, Unknown; identical to SEQ ID NO: 23403
  Description of Unknown: LeftRegion for integrase B10457 sequence

SEQ ID NO: 23457 - DNA, 260 bp, Unknown
  Description of Unknown: LeftRegion for integrase B10458 sequence
cgaagtgcttagattataaaactatatgctgagaaataagatgatgctagaggaatgttttttatcttaaattttccgtgtaacaaatatggaaacgataattgtgtaccgcttttctaaaaataacacaagaaatatttttctggtatttatattttttgtaattttgcaacataaagacttataatatgagcaaaattatgaaagcaattattctagcacgtgtcagtacagaaaatcagtcgctcgattcacagata

SEQ ID NO: 23458 - DNA, 260 bp, Unknown
  Description of Unknown: LeftRegion for integrase B10459 sequence
tgtcgacgctaataacatacacacacaaaagagactgcagaaaatgtattttttgcgtagggcaaaaagacggttattacattgacggtcgctgcgcattgcctgactgcccgcagttaatccccgccagccggctgaaagcgatttccgaacgtgcgcaagcgttgcgcgctgacacgtgtgatcgttaggaggcttttatgttacgcgcagccatttacgcaagatattccagcgacaaccagcgccacgaatccata

SEQ ID NO: 23459 - DNA, 260 bp, Unknown
  Description of Unknown: LeftRegion for integrase B10460 sequence
attaaatctaatttaataacatcattaatttaatcatcttattctaattatatcatttttgttaatttttatacatactaaatccataataaatattattttttttaaatttttttagttctaaaaggatattctacactctttgtagaatactatatctatccctattctccataacatcattataaggagtaaatatcatggaaaataaattatcagaaatcataaaggatatagcaatatatcttcgtaaatcaaga

SEQ ID NO: 23460 - DNA, 260 bp, Unknown
  Description of Unknown: LeftRegion for integrase B10461 sequence
attaatccaggtgatgctcgttattgtgaacactgtggggaagaaacattattaacaagacttgggctattaatggcatgggaggaagttctagcggctaggaaagaaatagcagcaggattgcaaccaactatcatcactaagttagaagatgatatcccgttttaggaactattaaagcttaaacaggaggtgaaaccatggaatcggtcgctatctatatccgtgtttcaactcgtaaacaaatggataattactcc

SEQ ID NO: 23461 - DNA, 260 bp, Unknown
  Description of Unknown: LeftRegion for integrase B10462 sequence
gctgcttataataatgatttgattattaggagtaaatttgaacttcaagctgattattttgcccttaaactgctagatatatctatagacaagtattactatgaaggatgcacctttgagcaagtagctaagagcttgtgcgtttgtgaagctattcttgaatgtttgtatagttagttattgagagaggaggttttgttatgcaaactgctgttgcttatgctagattttctagtgataaccaaagagaagaatcaatt

SEQ ID NO: 23462 - DNA, 260 bp, Unknown
  Description of Unknown: LeftRegion for integrase B10463 sequence
ccgatccttcgatgatctggattctttcgcctccgagttcacctaccaagtatccgggcaggcatatcgtatcatcgacctcatggcacagcggggctatctctccttctctgacgccgggaaactctcggatgagattgaccgaaacttgagcaacgagcatttcttcgtgttctgcgctggagatcggggtgattcggttgagtaaacagagcaatgctgttctgtacggcagggtcgccacgaaagaacaaatttcc

SEQ ID NO: 23463 - DNA, 260 bp, Unknown
  Description of Unknown: LeftRegion for integrase B10464 sequence
taaaagagaggtaaagattgaagagtattacatatttgatttaaagactaaagaacaacttttttcaactaagaaaccatctaactggacacctattgaaaaagattcgccagttgaaatagttgttacatatatattccaacatcatccagaaacaaaagatatcaaacattaatttgagatatttaacaggtgataatatgagagtcgcaatatatactcgcgtttcaactgaattacaagctgaaaaaggttactcg

SEQ ID NO: 23464 - DNA, 260 bp, Unknown
  Description of Unknown: LeftRegion for integrase B10465 sequence
cgctttttgacctaggataacttgcaacataacttgcaacctacttgcaatctgattgcaacctaggataacttgcgattatcttttgaattcgcacggattaacgaaagtaaatgcccgcccgctttaattggagattggtttttcgtctccaattaaaacaatctttagtcaatccaaaaccaatggaggcttactatatggatcaatacgccctataccttcggaagtctcgcgcagacgtagaagccgaggcgcgg

SEQ ID NO: 23465 - DNA, 260 bp, Unknown
  Description of Unknown: LeftRegion for integrase B10466 sequence
gctggcgcagtgttggcgatgtgatgccgttttcaatcgtgttcagcgttgacttgctgattcctgtcagggcttccagctgcttcaaagtcaagtgtctgtctgttcgtgcctgccacgttaggatttccattgcgtcatcctcctagttttgattatgtacacgcttcaggcactctatacaaataaaaaaggaagccgtgaccagcgacttcccttgcgaaacattgaaacaaaatatatcgcggaagaccgcccac

SEQ ID NO: 23466 - DNA, 260 bp, Unknown
  Description of Unknown: LeftRegion for integrase B10467 sequence
gtctgcattgtcacgcttattttctgtattgttgacgtaaacaaacacaacaaaacagcagaaaacctttttccggattctgccgtccaggaagaatatcgcaagcgcaagtcattaacgattgagatgtatcctttttactttcttcttctcgctctgatcggtacatttatcacaaccatactgtaaagggatttactatgaaaacagccgtcgcttacgcccgttattcctccgccggccagcgcgatgtatccatc

SEQ ID NO: 23467 - DNA, 260 bp, Unknown
  Description of Unknown: LeftRegion for integrase B10468 sequence
aaagtcctcctcaacatcttcaaaggcacaaccgaggagggaagattgttaatgattcaaagtatattaaacatccgagacgatatagaaaaaaaccatacgggagaaaatacggcttctgttggatgaatcaccaagcaaaaaggtcataccttttgaggtggtacaactgtatggaagattgaaggagttagaataatatggatgtatgtttatatatgaggtacagtagcgaccgacagaccgaacaatccattgag

SEQ ID NO: 23468 - DNA, 260 bp, Unknown
  Description of Unknown: LeftRegion for integrase B10469 sequence
acgcctggcgtagatttcaccatcgtcgcacggcttgagtcggccgcaggggcgatcgtcgattacttcctgctcgccgccgcagacctggccggcggtccaatctacctcaaggcatccaacctggagcgttacagatcgatcaggtaccttgtcctgcgagagatgttcggccctgtcggcgcgccggtggcagaaccatgctgaaggcttattccgaccgggccgctctctacgtacgggcttcgaccgaacaccag

SEQ ID NO: 23469 - DNA, 260 bp, Unknown
  Description of Unknown: LeftRegion for integrase B10470 sequence
taatgatttcttattaataaaatcattttacaagttggtgattgttagtccagaagagctggttttcgttatatctggtagcaaggataccgaagagctgtcttcttgcattgatgagttgaacattataccctcgttgttttcgaagttgtacatcgattacgatctgcaaaaaggtattaagtatcgggtggtttatcatgtctagtgtcagtgtcatcccagttgatattgggtctgttgttcgcaaagtgagagtc

SEQ ID NO: 23470 - DNA, 260 bp, Unknown
  Description of Unknown: LeftRegion for integrase B10471 sequence
tgttcacagctcggctcctggtaggtcaggtgtcgggatgggccctgtccggcggtcgaatcgccgtgatggggccgtgtcatgaaaaaagtctgttcttaagacttcatccaggacggcatgaagagatagtaccgcacttctgcggctaccataagcccatggcgactgaacccccatcctcccgcgcccttgacttgatgtccggccgcgcctggctatatgcccgtgtcagcaaagacctgcgcgaaggctcctcc

SEQ ID NO: 23471 - DNA, 260 bp, Unknown
  Description of Unknown: LeftRegion for integrase B10472 sequence
caaggaccacattttctgcggttcatgcggttcgaagctgaccagaatcattggtaagcatggcgacacagtgtggacctgcaatgggagaaagcacaaaggaagggccttctgtgagggagtccgcatctcagatgatgtgatccggggctggggcgaaattaaaaaggatatttttatcagaatgaaggaggaccgtcatggccagagaagttacagttattcccgccacaaagacgccacaggcaaatggcaaaaag

SEQ ID NO: 23472 - DNA, 260 bp, Unknown
  Description of Unknown: LeftRegion for integrase B10473 sequence
tggcacaatcacgcctacgcctatagttccaatcgtcgagggttccgacgagtacaaaacagcaatatatgcttttaatttcgccgttcaaagtggcaaaatggccgaggcgcaagcaaaatataatagtaagcataagaaataaaaaaagccccctatcaagggggctatacttatacaatttgaaaggaaatcacacaatgaataataccgatttacaaacaggcgtgatatatgcacgctactcgtccgataagcaa

SEQ ID NO: 23473 - DNA, 260 bp, Unknown
  Description of Unknown: LeftRegion for integrase B10474 sequence
taatgttgatgattataaaacattattaaatgctgcgttaaacgacataaattcaaagattgaaaagggctatgtatataagcccagaggaaagagtaggaaataaaaaatccccgcccggcgctggaacaccgaacggggaagaagctgtgatacaatcacaaccttagacaagtttattgtatcatagctccctgaaaatgtcaaggagtgatttaaatttgaaaaccgccgtaatatacgcccggtattcgtccgac

SEQ ID NO: 23474 - DNA, 260 bp, Unknown
  Description of Unknown: LeftRegion for integrase B10475 sequence
attatcaaaacgatactatcaactaatcccgtaaggagatactatggagataaaagagattgtcgccaacaatcccgccgataaggagacagtagaagaacagctctacaacatctttataaagtattgttgactaatggctgatggtgtgctataatataaaggctaccatcagcctcttattatataggaggtatgatatgattgcaatatatgcaagaaaatctgtttttagagaggactctatctcaattgagtct

SEQ ID NO: 23475 - DNA, 260 bp, Unknown
  Description of Unknown: LeftRegion for integrase B10476 sequence
gcatcctcgaagtgcttagattataaaactatatgctgagaaataagatgatgctagaggaatgatttttatcgtgtaacaaatatggaaacgacattgtactttcatttccataaaagtaacacgagttaaagtatgtaaaatcttgttttaattaaaatataatatataattttgtatcataatcaaatgtttaagttatgaacaaagttattttattttcaagagtttcgacattaggacaggatttaactcagcag

SEQ ID NO: 23476 - DNA, 260 bp, Unknown; identical to SEQ ID NO: 18150
  Description of Unknown: LeftRegion for integrase B10477 sequence

SEQ ID NO: 23477 - DNA, 260 bp, Unknown
  Description of Unknown: LeftRegion for integrase B10478 sequence
caaacctgaaataagaataaacttaaagaaataaaaaaatcccgtcccctgttgtaacaggaaacgggaatgacggcaggatcgcgactcctccgccacttttgtaaatcgtttgtagatgcacaactatgtgcggggctgatttacgtatttattataccataatcagcccttttttgataatgaaaggattgatttttatgtcaagaaatgcagtcatatacgctcgtttttctagcgacaaacaaagagaagaatct

SEQ ID NO: 23478 - DNA, 60 bp, Unknown
  Description of Unknown: LeftRegion for integrase B10479 sequence
agccacagtcaaagagaggagtctatcgaaggtcagcttcgagagtgccatgagttcgca

SEQ ID NO: 23479 - DNA, 260 bp, Unknown; identical to SEQ ID NO: 23390
  Description of Unknown: LeftRegion for integrase B10480 sequence

SEQ ID NO: 23480 - DNA, 260 bp, Unknown
  Description of Unknown: LeftRegion for integrase B10481 sequence
gtctgcaaatgccatagtcgctgctccataaagatgagtcagcttagcattcgtgaaggaaattaacgccatgcccgaacttttccaaatggcaatgtgtcgcatctataagacggctacaggttgtcttacagtagcaggcgaaatgcgcgtactctgacacttgaggcaccacaattgtttgcgcaaaggacatgacgatgcgccagcccactcgaactcgtgctgcgatatatgtacggatgtcgaccgaaaatcaa

SEQ ID NO: 23481 - DNA, 260 bp, Unknown
  Description of Unknown: LeftRegion for integrase B10482 sequence
agaccccagcctgggatcgacttcatcattgctgcccggctgagcggcgatacccacgagatcatcgatttcttccttatcccagcggcctggctcagtgacggaccgctctacttaaaggagtcgaacatggatcgctttgcgtccctccgctatcagtcgctagcgccgatgttcggcatcccatcagcggagcggagatgaaggcgcccatgctggacacggcggcactctacgtgcgtgcatccacggaacatcag

SEQ ID NO: 23482 - DNA, 260 bp, Unknown
  Description of Unknown: LeftRegion for integrase B10483 sequence
ggcttcaatgaatggctgaagggcagaacgcctgattcttccatagcaaagacaaacatcacctacgcgatggttctggaggaggcagtgaaaaacggaaacgccgggcgcgctgcttgggtctaccgggaatggcgttccaacgaattaggcctcatacaagcggggcaaacgggcgttcccgccagaggcggttactaatggggcgctcgctccgcgccgcgctctatcttcgtgtcagcaccacgcgccaggccgaa

SEQ ID NO: 23483 - DNA, 260 bp, Unknown
  Description of Unknown: LeftRegion for integrase B10484 sequence
aacaggtaccagtgccgcaccacaagtaactaatttcttagtttactaaataaaaaatccccggtgttaccagcaccggagagcatgagtatgttaccagcatactcaaggatacataaaaagtatgaccgctaatcatataactttttatgtacccattttatcagatttaccaataaaaagaaaggatgggtacttttatgaattactacattatgtatttaaggaagtctcgtgcggaccgaccggacgagtctgtt

SEQ ID NO: 23484 - DNA, 260 bp, Unknown
  Description of Unknown: LeftRegion for integrase B10485 sequence
gctgtgcaaagtggcaaaatggccgaggcgcaagctaaatataacaaaggtaagaaataaaaaaagagcccctatcaaggggctttatttctacctaaaataaaataaccgccatagatagcggcctaggcggttattttaagatatacattttattattattactaaattaattatatcattaagaggaacattacacaatgacaaaagacttacaaacaggcgtaatatacgctagatattcaagcgataaacaaaga

SEQ ID NO: 23485 - DNA, 260 bp, Unknown
  Description of Unknown: LeftRegion for integrase B10486 sequence
acgaacccgacctgctcgccccgctccgcgggaagaacctcgcctgctggtgcccgctcagtgggccgtgccacgcggatgtcctgctcaatctagcaaacgaatgaccactcgcctcaccctcctcccttccgccggcgcgcccgcgatcaccgagcgcatgctaaagtccgcggagcacctcctggaaccactcctcgatgttcaacaacgccgccgccctttacttgcggtcgtcgaaggatcgcagcgacgtctcg

SEQ ID NO: 23486 - DNA, 260 bp, Unknown
  Description of Unknown: LeftRegion for integrase B10487 sequence
aaacaggcaaagatttttatgattgtgaagaagtgaaggatatttataatcgcatttatgatattgttgatgaatcagcaacagcagacctgcttgcgtatgacgaagatatcaaatcaaaatatgggaataatgctgattttaaagcaagtgacttatattcaatatttatacagttcttaggaaatgaggaatgatacatgagaaaatacattctgtatttgaggaagtcacaaatggacaaagacttcgaagaagag

SEQ ID NO: 23487 - DNA, 260 bp, Unknown
  Description of Unknown: LeftRegion for integrase B10488 sequence
tgacggacaaatatggtatgccaattcaagataagatttttgttgacagtgaccttacacattggtcgcaatggcagaatgagtcaaccattattgatctactccttcaggaaaataatgtcgaaaacaaactgagtcttacttataccagtcgcacggtattaaagaatattcccattccttcgggcttatgagattaaatgaattctccggtctcttcctccaattcacgcgctattggttacttccgcgtctctaca

SEQ ID NO: 23488 - DNA, 260 bp, Unknown
  Description of Unknown: LeftRegion for integrase B10489 sequence
actgatagctgtaatcgctatcatactcatcatgtcggtgactcatatctctgctaaatgtgacgaaatttccgagaacataaaaaagctcgtagagctgaaagaaaaagagcagaaaaaagaagaataaaaacaatcccctgctccgtgcaggggatatttgcgaccgacatctttgtcgaccgcagaaaggaggaactatgtccgataaatacttgatgtatcttcgtaagtcccgagccgacggcgagcatgagacc

SEQ ID NO: 23489 - DNA, 260 bp, Unknown
  Description of Unknown: LeftRegion for integrase B10490 sequence
ctacaagctcgcggacatctgcgaaatcaacaacatttatatgtgcaatgctcacgacgcactgtatgatagctttgcggctggtgagctattcaagtgcattgtggctgatatcaaagaaattgatattgatgatttgtttgtcaatgaataaaatatcccctgctccatgcaggggatacttataggaaggtgaagctatgtctgagaaatatttgatgtatctgcgaaaatcgagggcagacggcgagcatgagacc

SEQ ID NO: 23490 - DNA, 260 bp, Unknown
  Description of Unknown: LeftRegion for integrase B10491 sequence
gaagtacttacactgtgcagaatgcggctcggtactgactcgccacatccagggaacaaacaaaaaggttgtatggatctgcagcagatataagcgcaagggaaaggcattctgcagcggtgtcagggttccagatgaagttgttagaagagcaagtgcaaagataactcaaaacatttatatcagaaaggggatcggacatggagagacaggttacagttatacccgcaattggaggcagaaggaccaggggacggaat

SEQ ID NO: 23491 - DNA, 260 bp, Unknown
  Description of Unknown: LeftRegion for integrase B10492 sequence
gaagtacttacactgtgcagaatgcggctcggtactgactcgccacatccagggaacaaacaaaaaggttgtttggatctgcagcagatataagcgcaagggaaaagcgttctgcagtggtgtcagggttccagatgaagttgttagaagagcaagtgcaaagatcacacaggatatttatatcagaaagggaaacggtcatggagagacaggttacagttatacccgcaactggaatcaaaaaggccaggggaaagaat

SEQ ID NO: 23492 - DNA, 260 bp, Unknown; identical to SEQ ID NO: 23165
  Description of Unknown: LeftRegion for integrase B10493 sequence

SEQ ID NO: 23493 - DNA, 260 bp, Unknown
  Description of Unknown: LeftRegion for integrase B10494 sequence
cagtcaactactctacggctttgactctacttatagttgctgcagctctcgagactcaagatgagaacggctggagtcaaaataccacagaaggattaaatcaattgctcaatgaccggacaagcgtcccatcgatcattgcgaacatagatatgaaggcagtaatggcagatattacacaaaggtgagggtagtaaaaaatgagaatagcgatatattgccgagtatcaacggaagaccaagaacgggaaggcactagc

SEQ ID NO: 23494 - DNA, 260 bp, Unknown
  Description of Unknown: LeftRegion for integrase B10495 sequence
gattaataagggaggaattggatatgttggcaatcggaatcctgctgttggtgttcagcgtcatttgtctggtgtccggcatgaacgcgttcggcgacatcggcatatcgatgatctacacggccgtcacggcactgctgtccggccttggcttcgtcatcggcagccgccgcaaaaaggcataagcgcgggaggagaacatgaacacatatgccctttaccttcgcaagtcccgcgccgatctggacgcggaagcgcgc

SEQ ID NO: 23495 - DNA, 260 bp, Unknown
  Description of Unknown: LeftRegion for integrase B10496 sequence
aaactaattcagatgaagctttgctaattgaaatagactcattcgtaaatggaatgataaaatcggtgaatgactggctgaatatcattaaaggagataagaactatgagaaaaacaaaaatgatctgattcagcctcgtcctgcgtcaactataaaaatattaaaaggagatatcgttatatattgattggaggtatatatgtgcgagaaatatctggtatatctccgcaagtcccgagctgacggtgagcatgagact

SEQ ID NO: 23496 - DNA, 260 bp, Unknown
  Description of Unknown: LeftRegion for integrase B10497 sequence
cgcagcgccgaaaacatcagcttgcagacgctgaagaaactgtccgaatatttcggaatcagcatcgaagagcttgtctacggtgcgaagccacggcatgagattgtatttacaagcgacacatataccagcgaggaattggcacagatagaacaatttgcacgattcctgataggacaacgagaaaggacatgatatgaatgacatacgcgatttacttacgaaaatcaagaaaagacgatgagacaggatatgcggat

SEQ ID NO: 23497 - DNA, 260 bp, Unknown
  Description of Unknown: LeftRegion for integrase B10498 sequence
gttacagatctggacttgccaggggatgacatgttgacacgccttgacgaaatcatggccgacaagcaagagcacacgtacaacgggttcacctacaggtacatcacaacacagccattcagcaacgtcgtggcactggaagtcacccctgcttaaccgggcgcacactgcgcccatctttatacccttggaggaacaatatgagcctgtatgccatatacctgcgcaagtcccgcgcagactttgaagccgaggcaaga

SEQ ID NO: 23498 - DNA, 260 bp, Unknown
  Description of Unknown: LeftRegion for integrase B10499 sequence
aacgccgtatatgacggcgatgtattcaccatcacaaatcttactcccatacataaagacgacagaccggaaaagaaacgacagattgagaaatccttatatgccgtctttagcaaatacttcaaccccaagaacaagcgataactaattctgcaggccgcctcatgcagggcagtcctgcacatcgaagggagtaaaacatggattttatttacacaagacaatctgtggatcgtgaagatagtatctccatcgaaagt

SEQ ID NO: 23499 - DNA, 260 bp, Unknown
  Description of Unknown: LeftRegion for integrase B10500 sequence
taagaaaagatcataagtccgtaactgggcattgcaaatttctataaaaaaatcccccaccgtgcaggaacacgatgagggacgcgcagcaggtattaccagtaccgctgcaacagtctaaaccatccaccacaggaggtcgactatgctaatagtatatcacgtcggcctccatctagccatagaaggaggctattattatgcaaaaaaacaccactattgaaaatacaacaaaggctgtcatttatgctcggtactct

SEQ ID NO: 23500 - DNA, 260 bp, Unknown
  Description of Unknown: LeftRegion for integrase B10501 sequence
ggcaatgtacttgcgcacagtcgttcctttcgttggtcaggtgaaggtgaacacatggtgctcggcgtggacattacatgagatgatcgggttcgtgtgtggcgaacacatctttctatccacgtcacgtcctattgcgtcttctgacgtggataggttatggtcggtcgacctactcaccacgaaggaaggacgggccaatgaccgccgtaccggaaaccgccccagccaccacccccctcggcctgatcccggccgcg

SEQ ID NO: 23501 - DNA, 260 bp, Unknown; identical to SEQ ID NO: 22666
  Description of Unknown: LeftRegion for integrase B10502 sequence

SEQ ID NO: 23502 - DNA, 260 bp, Unknown
  Description of Unknown: LeftRegion for integrase B10503 sequence
gtacacgactggagaacacagataccagaatttgctccagagcgcaaaaaactttattttattagtagttaataataaaacgctcaccagagtgagatttgaaaaatgtaaatttttggaaagtttaataagtaaaaagttccaataattcacattgtaataaaataataatattactacaatattattggaggattacaatgaaatacgcaatttacgctagagttagtactagtctagaagcgcaagactcatcattt

SEQ ID NO: 23503 - DNA, 260 bp, Unknown; identical to SEQ ID NO: 23292
  Description of Unknown: LeftRegion for integrase B10504 sequence

SEQ ID NO: 23504 - DNA, 260 bp, Unknown
  Description of Unknown: LeftRegion for integrase B10505 sequence
tcaaaaatatgggcatgaagtgttggcggagatcgaggaaatgaagtcaaaagagaatacgaatgagcagtgagatgagccggttgcatttttttgtaatcggctcattttacccgctgacgcaatcgaaaaagtgcgttatattttagatccaaacatgaaagacgaacaatcattgagcaaccgaaaagggggatatgatgagaaagaaaaaatgttatatatacaccagagtatccacgatggctcagacagagggt

SEQ ID NO: 23505 - DNA, 260 bp, Unknown
  Description of Unknown: LeftRegion for integrase B10506 sequence
tttttctccgtcgatgttaattttttagtaggatcatcccagaaggtcacacggctcaccggaacccacgccgatgatgaaagcatgagctccacctatgtgatgctaaacgacgaggagcgtgctgtcatgaaagcgtacagactggccagcgaagagatccgcgctgctgttcgtgcagtcttgggaggtgtggaagtttgaccggtgtgatatatgcaagatattcagaaggaccacgccagacagaccagtccatc

SEQ ID NO: 23506 - DNA, 260 bp, Unknown
  Description of Unknown: LeftRegion for integrase B10507 sequence
ttctgccgcctcttttcgtagctgccgaagaagatttctgcctgaagcactacggcgacacctatcgcgaatatatgaacagaacaccaagatggataggaataccgaagtcggggggaaagtgagaaatatgccccctcgtttacttaattgtttcggtaatttcttttatcctaaaattgctattataggaagatgaaatgaaagccgccgtctacataagagttagcaccccgggccaggccatcaacggcgaaagc

SEQ ID NO: 23507 - DNA, 260 bp, Unknown
  Description of Unknown: LeftRegion for integrase B10508 sequence
ggccaaatccatcaacgccctggtttcccgttacggtggggaggtctacgatgttctcggaatttcaccagcctttgaagtagatacagagatcaatcactcagtagccgaattggctaagctgatcaatagtctgtccccggaagaccaaaaagagctaacgtccatcatccgttcgatggtgaagaagcgcacgaaagatggcgaataaatcgccctttcagcccggcagcctggtcgccgcctatttccgtgatagc

SEQ ID NO: 23508 - DNA, 260 bp, Unknown
  Description of Unknown: LeftRegion for integrase B10509 sequence
aaagaattgattatatcgatggatttacagttactaataatttcccagattatacgcctgaagaacaagtaattgtaaatgaaagatttctacaaaaattatatgatatattattcaatgacaataaaaagagttgacataaaagtaaaatcctctataattatattaacataaaaatatgaatataaaggatgataattatggcagtggctatttattccagacaatctgttgataaaaaagattctataagtattgaa

SEQ ID NO: 23509 - DNA, 260 bp, Unknown; identical to SEQ ID NO: 18725
  Description of Unknown: LeftRegion for integrase B10510 sequence

SEQ ID NO: 23510 - DNA, 260 bp, Unknown
  Description of Unknown: LeftRegion for integrase B10511 sequence
tgaactacttgctgggcttcaccgataagatcgagaagccggccggcgacgagacagatcccgctgccaataagttcctggccgtcacgctggccgagatcgacctgatcgaagcataccggcacgccggcgctgagactcaggcagcgatcagagcgatcctgcacatctaacagatccccagagaggagcgtgaggccatgcgtggcgttatttatgccagatactcaccaggcccccggcagactgagcagtccatc

SEQ ID NO: 23511 - DNA, 260 bp, Unknown
  Description of Unknown: LeftRegion for integrase B10512 sequence
tcggccgaagtgcgcttcgtcttccactgcgagcggtgcgggcggatcttgccggggccggaagtgcagccctctaaaccgtggccgcgttgatccattgagtgacgccgtgaccgaacgcattacaatgctgccgaccaaggggatgccggatgaggatctcgccctcggcctggtcatggacgcactaaggggaaaaaatgaaggccgccatgtacctacggagctcaaaagaccgcagcgatgtgagcctcgccgct

SEQ ID NO: 23512 - DNA, 260 bp, Unknown
  Description of Unknown: LeftRegion for integrase B10513 sequence
ctacctgctgggatatactgataagattgagaagccggcaggcgatgaaacggaccccgccaccaataagtttctggccgtaactctggccgagatcgacctgatcgaagcataccggcacgccggagctgagacccaggcagcgatcagagcgatcctgcacatttaacgggagaaccccgggaagggaggacggtgccatgcgtggcgtcatttatgcgagatattcaccaggcccgcaccagacggagcagtccatc

SEQ ID NO: 23513 - DNA, 173 bp, Unknown
  Description of Unknown: LeftRegion for integrase B10514 sequence
gaagataaagaacgtgtagaatatgaaggagaagattacacaaaatagaaataaataatataataaacatcagggcagttagcagctgctctttttaattaggaggaaggaaaatgaaaacatgtatataccttagaaaatctagagctgatgaagaactggagaaaaaagaa

SEQ ID NO: 23514 - DNA, 260 bp, Unknown
  Description of Unknown: LeftRegion for integrase B10515 sequence
ctatttgctggggtattctgataaaatcacgcggctgtccggggatcacaccgaccccacatccggcccctgtgttgaagttactgctgcggagctggagctgctgaaggctttccggcacgccggagctgagacccaggcagcgatcagagcgatcctgcacatttaacgggaggaccccgggaagggaggacggtgccatgcgcggcgtcatttatgcgagatattcaccaggcccgcaccagacggagcagtccatc

SEQ ID NO: 23515 - DNA, 260 bp, Unknown
  Description of Unknown: LeftRegion for integrase B10516 sequence
tttaacgttccccttgcctctattgttaccaatgacgagcggctggaaatgaacctgcagctgtttaatgaaccttccgcgcacgatcagcaaatacgcctggttgttgatatgatggagcccatgacttacgagcaaaagcagcaggttgttgccattgttcgcgcctttgccagcacctgccagcctgacaggaagggttgaatattgctatgattttcggttattgccgcgtatcctctgacgagcaggctgcgcat

SEQ ID NO: 23516 - DNA, 260 bp, Unknown
  Description of Unknown: LeftRegion for integrase B10517 sequence
acgctacagcacgtctgttcttttcatagtatgtttaccctatgaggggcaggcgcgtcaaaaaaagggcgtttttgatgtaaaaagaaaaatcccccacggtgctggtaacaccgcaggggatcacaaggagatatgtttattgaatccgtttccattatatcatatctccgccgaaaaatcaacaggagagtgagaatatggaaggatatctcgtctatctccgcaagtccaggtcagacggtgagcacgaatccgtt

SEQ ID NO: 23517 - DNA, 260 bp, Unknown
  Description of Unknown: LeftRegion for integrase B10518 sequence
acgggcagatctatgccgttgttttcggggcggacgatgaggcagtgttaaaaaaggtatatcgatccggtaataaggtgatcctgcagtcctgtaattcagaatatgccccgatcatattggaccaggttgacgtccgtttaattggcaaattgacgtgggtctgccataaggcgcagtgatagaaatgaggttcacctatgacaggagtgatttacgcgcgctatagtgaaggcccgagacagactgatcagtctata

SEQ ID NO: 23518 - DNA, 260 bp, Unknown
  Description of Unknown: LeftRegion for integrase B10519 sequence
caaccgatgatcaggagagaacgggtcactctagagatcgaatacaacgactacaacgagtcgatcaaaaagccgagtgaatggggatgggaagggatcctgcacaccctcatccgttcgggtgacgttgtgagcgttgaagttgttcacgatcacattgcggcgccggcatcttggtcttcgcctcggatcgaagttccatgacggcccgcgtaaccctctgcgggtacgaacggatcagtcacgacccgaccggagcg

SEQ ID NO: 23519 - DNA, 260 bp, Unknown
  Description of Unknown: LeftRegion for integrase B10520 sequence
tttttctccgttgatgtcaattttttggtgggatcttctcagaaggtcgcaaggcttaccggcacccatgccgatgaagagagcatgagctccgcctatgtgatgcttaacgacgaggagcgcgctgtcatgaaggcgtaccggctggccagcgcagagatccgcgcagctgttcgcgcagtcctgggaggtgtggaagtttgaccggtgtaatatatgcgagatattcagaaggacctcgccagacggatcagtccatc

SEQ ID NO: 23520 - DNA, 260 bp, Unknown
  Description of Unknown: LeftRegion for integrase B10521 sequence
gggtacgaaacggctgagcaattaattgaagacgtcgaaaagaaaactggctacaagataagcagaatatcgatttatcgtatcgagcgaggcgagcgagccctccccctcgaggcgtacctcgcgttccaggaagtcatgccgaggttcttcaacgccgacatgttcaagccggcactcaagatctaccaggacgagaaatgagccgagcggtcatatacgcgcgctactcctcggacaaccagaaggagacgtcgatc

SEQ ID NO: 23521 - DNA, 260 bp, Unknown
  Description of Unknown: LeftRegion for integrase B10522 sequence
gagaactattctatcttgggagcaaaaggtgtaatggagctaatgggagagaatcgctctgaggagcaaataaaaaaaatggcatatagaatgaatctacagcgagaagataaatcaatgatgtgggaacaaacagatataaaactggtcaataataatattttttcagttgaagcaacttacaaaggacggtgactctggtgaatgaatttcaaacatataaaacaactaggaatattttagaatcgattaaaaatgta

SEQ ID NO: 23522 - DNA, 260 bp, Unknown
  Description of Unknown: LeftRegion for integrase B10523 sequence
gtgtccgtttcgcaccccaaccttggaatcgaaggcgcactcgacaggctgcgatcagagccgcaaacgtgcaggtcagagggacggacgtgtgtcttacacggtcgccccggcacagattccggcaggggtgtcataggccatgttccgggttcccgaacccatgacaaagacacccttggtgacggacactcgggaacatgaagaccagccgcacgcccacggggcagcgaacacgcgcagtgatctacgtccgcatc

SEQ ID NO: 23523 - DNA, 260 bp, Unknown
  Description of Unknown: LeftRegion for integrase B10524 sequence
tttctggagcacgcgcgatgcgcaaatgctctcgaaggccgagcatcaggcggagatgttcgcctatttcgtcgcgttgccgtcgaatgagctggcggtgctcctgcgcgggcgtgtcgagatcgaggagatcgcgagccgctatacgcggaccgaggaatgggtccgcgaacgcatccgcctcgagggctaacactgagatggggatcgcccgcggctatgtgcgcgtttcgacgcggaaacaagaggccggtgtctcg

SEQ ID NO: 23524 - DNA, 260 bp, Unknown
  Description of Unknown: LeftRegion for integrase B10525 sequence
cgccgcgtgttcgtggaagcccgcccggctgcccagtttcgcctcatcggctagggccctgtgtcgccagggtgacgccgggccgcactatggctgcacggaacatgagcgcgacgtgttcatgccccgcgcttttgtggacaggtgccgcgcgatgtgtctacggcggcgacagatagcttaactggagtataaggatcgtgagcagccgccccttgcgtgtcgccatttgggccgccgtctcttccaggcgccaggcc

SEQ ID NO: 23525 - DNA, 260 bp, Unknown
  Description of Unknown: LeftRegion for integrase B10526 sequence
ttgtttttccataattgtaaacgtcaacaaattttcaatcaagtgtgatatttactaaaaaaatatttttttatacatttattcaagaattattaattatcaaaacccctagtgaggggtttttcttatcttaggagggatatcatgcgcatagcttgctacatccgggtagatgtctttataacatggaggaaaattttatgaaagtagctgtatatgtaagggtttcgacaactgaacaggctcaagaagggtattcg

SEQ ID NO: 23526 - DNA, 260 bp, Unknown
  Description of Unknown: LeftRegion for integrase B10527 sequence
ttttgtggcagatacagaagaaaagccttgcagatatgttgaacctccgttgtccgacgaattcatggaaattgccgctgaaaaagaaatgctcatgccgtcattcctgtcatatgatgaagcacgcctgtttttaaccaatggagaatggagaaaagatttatagtagctatttaagaagcgcattgcaaggggaggtcatgaacgcagtaatttatgcacgctattcatccgccaaccagacggagcagtccatagag

SEQ ID NO: 23527 - DNA, 260 bp, Unknown
  Description of Unknown: LeftRegion for integrase B10528 sequence
gcttcgagatcaggtgggcgcatccctgggcgtggacctcgtaggtccatttcttgtcgttgtatgcgatggcgaacttgttcatgtctgcccttctcgctcgtcccccgtacagttcaattatcccacggcatgccccctacccccaaattatgcagttggcgtgccaactgtacacttttggggtacaggccacgagcatggagggcagcatggcaccaaggcagaaagccaagcagggcaacaggttaccggccatc

SEQ ID NO: 23528 - DNA, 260 bp, Unknown
  Description of Unknown: LeftRegion for integrase B10529 sequence
  modified_base (175)..(195): a, c, t, g, unknown or other
aatttaaaatgtgctctatatattagagtttctacttttcatcaaattgataaagactctcttcctttacaaagagaagatttaatcaattatgcaaagtatatattaggaatagatgactatgttatttttgaagatgctggttattcaggtaaagatactgatcgaccaagtnnnnnnnnnnnnnnnnnnnnnaaaatatgatgacaagaataagaatgggcgagttttctcatttgcttgtttggaaaatagatcgt

SEQ ID NO: 23529 - DNA, 260 bp, Unknown
  Description of Unknown: LeftRegion for integrase B10530 sequence
ttatagtcgaaagtgtccaagcaatacttccagaagaagaacaaaaaaagctaaattacaaactattaaaaaaggcaattgaagcaaaaaacagacctaattaagattgaccttttcattcatacatattataatgttagtaaacaataaactatatttaaatggtttattgtttactatttttactaaggagattaaaaatgattgctatatacgctagacaatctatagataaaaaagatagtatctcaattgaaggt

SEQ ID NO: 23530 - DNA, 260 bp, Unknown; identical to SEQ ID NO: 23214
  Description of Unknown: LeftRegion for integrase B10531 sequence

SEQ ID NO: 23531 - DNA, 260 bp, Unknown
  Description of Unknown: LeftRegion for integrase B10532 sequence
aaaaaacatacaccctacatttgccacagaacaagaaaaaaataaacaagaaaaaaatataaaaattcaattatatgacatatttaaaaaatattaataaataagacagaaaaattcggtaaagtattgaaaaaagagggttgctgtggtataataatactattagcgaccttctttctattttagaaaggaggaacacaatggatgcaatatatggtagacagtctatagacaagaaagacagtattagtattgaatcg

SEQ ID NO: 23532 - DNA, 260 bp, Unknown
  Description of Unknown: LeftRegion for integrase B10533 sequence
taaatcagtcaatcatatgaatggttttacaattaaaaactgtcaaccaaatatggacgagctagaaatacaaaaaattaaaacaagaatcatcaaacaactacaatttattttttccaatgacactaagtcgtttgacacataagtaaacttaatggtataattctcctgtgatataaaacatcaaaggagagagatacatgaaagcagtatacacaagacaatcattagacaaaaaagacagtatatctatcgaaaca

SEQ ID NO: 23533 - DNA, 260 bp, Unknown
  Description of Unknown: LeftRegion for integrase B10534 sequence
ggataagattttttgtgcattgtgtggaagcagacttgtaaggtatgtagagactaaaaaccataaagttacatggatatgcaacggaagaaagcggaaagggaaagacttctgcgatgggacaaggattccagaccacatcctgaagggatggggagaaatcaaaaaagatatttatattcagagaaaggatgataagaatggcaagaagcattacagttataccagcaagaaaccgtcaggcatcggggcatagggca

SEQ ID NO: 23534 - DNA, 260 bp, Unknown
  Description of Unknown: LeftRegion for integrase B10535 sequence
atcttcatttagtgtttcgatcagttcaatcaattgggatttgttgtctttcatggtgaatgctcctttcaaaatgagaacaactgttcctattcactaatttacaacgtacttttgttgcaaataaaaaataaatgtgaattatatgtgacagtatagcaccggaaaagtaaaaaaaatgtagaaaaagaggattggacatgggaaatttacaaaaattggcaaatgcatatcatcaggatccggaaacacgaataatc

SEQ ID NO: 23535 - DNA, 260 bp, Unknown
  Description of Unknown: LeftRegion for integrase B10536 sequence
tggagaaattagctacgaagcatccgctttgggcacgaccaagaccatccgtttgaaaaaacaggactaaacataaaaaatcccgccctggtgttggcgcaccagaacgggacggggcagatataactttccaacggtcatttctgcccctttattttactatacattgtttgaaaagtaaataaaggagtgtagataacatgagacgagttgatgcaatttacaccagacagtcgattgagaaaaaggattccatttcg

SEQ ID NO: 23536 - DNA, 260 bp, Unknown
  Description of Unknown: LeftRegion for integrase B10537 sequence
gtttcttcaaaaacaaactatgtaattgtaggcggatatggaagttctgattgggctcatggcaattacggcagtaaagtaaaaaaagcacttgaacttcaagcacaaggaatagatgtaaagataattaaagaaaacgacttttttaaataaccctcccctgctctgtgcaggggatattcataggaaggagtaagcctatgtatctgatctacctcagaaagtcacgagctgacggtgagtatgagactgttgaagat

SEQ ID NO: 23537 - DNA, 260 bp, Unknown
  Description of Unknown: LeftRegion for integrase B10538 sequence
atatgattattccgcagtacagaaaagggtaaatgaactcctgaaataaggatatggctgatggtcagtaatggctgtcagccgtatttttttcagtttatgccaaggaaagaaaggtgaaaggtatcgcagattgtacttgctattattggctttcagagtgatatatagactacccaaagagaaaggagtggcagagcttggagattcagatcagggaaggaaacagggaacagaagagaaaattaagagtctgtgct

SEQ ID NO: 23538 - DNA, 260 bp, Unknown
  Description of Unknown: LeftRegion for integrase B10539 sequence
gtaagggttactgttgaagttaacaacgcgggtgatttagaaatgctaaaacacatgaattataagatttgtggcgatatgggattaagtcaagttgaatatttagacttttataagtttcttatcgctgtagatgaagcttacgaactgggggataactcaattattgaaaactatgacgattgggaggatgatttagaatgattgctgctgcttatgcaagatattcaagtatgaaccagaatgatgagtctattgat

SEQ ID NO: 23539 - DNA, 260 bp, Unknown
  Description of Unknown: LeftRegion for integrase B10540 sequence
ggaattttattgacgaaatagttatggaccattttatcgtactttatgattccataaaaattgaacgtgatacaaaatggaagtccgcaatgtagcgggcttttttcgttgtccatttattcgcctacttcatcattgacttatatcgacgaatggttgtataatctaattgtaaacttgttttcgaaagggtgaacgaattggataatatagaaaagaatgcgtcgattgcggtatatttacgaaaatcacgtgaagac

SEQ ID NO: 23540 - DNA, 260 bp, Unknown
  Description of Unknown: LeftRegion for integrase B10541 sequence
cgtaaggagcgtgtcatcagacgagtatctcagcaaagaatcgcagaccatctcggtcttgccaagaccactatctccgcttatgaattgggcaaagtctctccggcaattgacacgcttgacgagtattgcgcattccttggagttgattacttggagcttctccgggaggtcactgaggaagtgagacggctagacatatgaaagccgtcatatacgctcgttttagctcctccagtcaacgagaggagagcattgaa

SEQ ID NO: 23541 - DNA, 260 bp, Unknown
  Description of Unknown: LeftRegion for integrase B10542 sequence
agtatgaaagacaagcaaatgaattcgcaataagattaatatcgttccatacgaaaatacagcccacagaatctatcgaacatttttttcttcgaaatagtataccaaccgtaatgattaaatattttaaaatgaggtgaacgctaatgaaacttacgaaaacccaagaaaacttcagaaaagaaatgaggtaattaaacatgaatgcaaaaagagcagctgcatattgtaggtacagttcagacaatcaacgagaagaa

SEQ ID NO: 23542 - DNA, 260 bp, Unknown; identical to SEQ ID NO: 22603
  Description of Unknown: LeftRegion for integrase B10543 sequence

SEQ ID NO: 23543 - DNA, 260 bp, Unknown
  Description of Unknown: LeftRegion for integrase B10544 sequence
  modified_base (1)..(2): a, c, t, g, unknown or other
nncttttattcgttgctttctgcaacacccattatagaacaaatgttctaattttgcaataacaaattgtggatatgaatatataaatacgtcattgaaccacagggggtatctcgtggcggaaaaatccgccgccaaatatccggaatgaactgaacgagattttccgttcaccccaaaacccacatggaggtgatctcatgtcagaaaagtccgctgttatttatgcccgatacagcagccacaaccaacgggaggaa

SEQ ID NO: 23544 - DNA, 260 bp, Unknown; identical to SEQ ID NO: 18853
  Description of Unknown: LeftRegion for integrase B10545 sequence

SEQ ID NO: 23545 - DNA, 260 bp, Unknown; identical to SEQ ID NO: 23189
  Description of Unknown: LeftRegion for integrase B10546 sequence

SEQ ID NO: 23546 - DNA, 260 bp, Unknown
  Description of Unknown: LeftRegion for integrase B10547 sequence
gtttcaggtgaaaaagtcaacacaagtggtatttaccatcgaatgcggtgcgactcctgacgaactaatgcaggccattcaagatatcgtgctttcaaagctgcttgccggccgagcggaggtagcatcttgaacgagctggatgcgcgtggtataatcgaaccagcagaatttggctggcatcgaaaggaggccggcacatgagaatgtgcggatacgcacgagttagcaccgacgaggaacggcaattagatagctta

SEQ ID NO: 23547 - DNA, 260 bp, Unknown
  Description of Unknown: LeftRegion for integrase B10548 sequence
agccttcgaccgaggccttataactatcactccttccatgaaaatctatgtttctccgataattttggatagccctcaggacgcttttacagcccgctggctggcttctcttgacggaatggttttaccccccccccccgatttccgccgcgtagagagcttctggagtaccataacgacgaaatttttaggagggtcacatgaatacagtaatctatgctcggtattctgccggcccgagacagaccgaccagagtatc

SEQ ID NO: 23548 - DNA, 260 bp, Unknown
  Description of Unknown: LeftRegion for integrase B10549 sequence
tccctgaatccggagtatgacgatatctaccccgaaaacggcgagatcataccgtgcggtatcatcgtcgggaaagctgtaagataaaaaaaatcccctcacggtaccggaaacaccgcaaggggataaggatatgctataagcacaaccttgacaattgtattatagcatatcctttattaaaatgcaaggagaatgttatgaaaaaagcgataatctatgcccggtacagctccgagcgtcagaccgagcagagcatt

SEQ ID NO: 23549 - DNA, 260 bp, Unknown; identical to SEQ ID NO: 23468
  Description of Unknown: LeftRegion for integrase B10550 sequence

SEQ ID NO: 23550 - DNA, 260 bp, Unknown
  Description of Unknown: LeftRegion for integrase B10551 sequence
tgcttgaccgcagggcaaagcacgagtttatgtcaatggtctatgagtacgaaaagcaagcggaatatcagggggatagagaacgcaatagcacaactgcgtgaccgttggagaaaagaaaaagtcatcccattcgatgtttgtcaacacctgagtgagatgattaagcgtaaaaaggaattggaaaaggaggtgcgaaaatggtaaaagcagtaatctatgctcgttactcatctcataatcagagagaggaaagtatc

SEQ ID NO: 23551 - DNA, 260 bp, Unknown
  Description of Unknown: LeftRegion for integrase B10552 sequence
cgcaaggagcgtgtcatcagacgagtatctcagcaaagaatcgcagaccatctcggtcttgccaaaaccactatctccgcttatgaattgggcaaggtctctccggctatagacactctggacgagtactgcgcattccttggagttgattacttggagcttctccgggaggtcaccgaggaagtgaggcggttagacatatgaaagccgtaatatacgctcgttttagctcgtccagtcaacgagaggagagtattgaa

SEQ ID NO: 23552 - DNA, 260 bp, Unknown
  Description of Unknown: LeftRegion for integrase B10553 sequence
aaccggccggctagaggccgtggagtcggaggaggacggccccgagggaatcggcttggtcaatcatcccaccggcacccttcctgactagggcttccttactattcgttggctgctcgtgtgcggatcctcgggcagccaccgaatactgccgatagggtggggcaaggtccgatccgctagcccggaaggttgccccgatggccgaggaacgtccccctatcgcatacgaaatcctccccgggaagaggccccgcaag

SEQ ID NO: 23553 - DNA, 260 bp, Unknown
  Description of Unknown: LeftRegion for integrase B10554 sequence
ttcacggccggctccgggagggccggagcctggttacgccacttcttgatccactctgcacgggacatcttccctgctcacagcccttcggtaggggtgcgtttcacgctccttctcccaagggaacgaacgcaagaagcaccaactacctctatgatgcctgtagcacgcctcgcgtgcaaccacatcggggaggaactgtgggggacacacgtccacttgccggctatctgcgcatgtcagatgccgacctggcagag

SEQ ID NO: 23554 - DNA, 260 bp, Unknown
  Description of Unknown: LeftRegion for integrase B10555 sequence
atcttccggccgcgccgcccttaccgccgcctatgccaacgttctcactgacgcgcgccagagaggccgatgccagccaggccgaactgactgagtcgcgcgtcactgaatctggacagcagacaaccgatggtcaatagcagcgtggcgcgcgctcgtcgccgttattgtacacggcttgaccgagtggggtcaataacatgaagatcatcagcgccgactaccggcgggtttcgacggacgaccagcgcaagggctat

SEQ ID NO: 23555 - DNA, 260 bp, Unknown; identical to SEQ ID NO: 22981
  Description of Unknown: LeftRegion for integrase B10556 sequence

SEQ ID NO: 23556 - DNA, 260 bp, Unknown
  Description of Unknown: LeftRegion for integrase B10557 sequence
cgatgcaggaccccagcggccccttgcctgacctcccgtttatcaggagggcgcggcaatggaagcagtaacgctgcgggtgctggagtgccgggcgctggaggcgcgggcgatctaccacggaagggcgccggtgctgctcctgatacgcgaaccggacccgccggccgtgcgctgggcggagcgattgctggcggaggatgagcgggccgtgcgggtctggcggggggagtgacgcgctctatgcccgtgtctccagc

SEQ ID NO: 23557 - DNA, 260 bp, Unknown
  Description of Unknown: LeftRegion for integrase B10558 sequence
gggactcgccgagggcgttccatcgatccgatgcacggcggccctccaggggctctctgacgggttcgcgccgcacggcgggcacgcggcggttgccgacttcgtcggggccctggccgtcgcagggcgctgaatttcctgctcccggacttctcgcgggtgaactgcggagagtaagtgtgtagttcttacgctctcgagtggtcaaggacgcgtacagtacccacatggtgggatcccacaagcacccggtcaaagcg

SEQ ID NO: 23558 - DNA, 260 bp, Unknown
  Description of Unknown: LeftRegion for integrase B10559 sequence
tcggtcaggacatcatggtcctggtgccgctcgctaaagaatccggcagcgagccaccgaagtgaccacggcctacctcaatagccccggaacgccatgatggacatcctcacctacgacaatgtcatgggcgtcgtcgccgcgatctgggcgcttgttctctgctgggcgatcttccgcaaaggatggttcctgcgcccatgaccacccccaagcccgggactcccctagcggccatcgcctactaccgctactccgag

SEQ ID NO: 23559 - DNA, 260 bp, Unknown; identical to SEQ ID NO: 18885
  Description of Unknown: LeftRegion for integrase B10560 sequence

SEQ ID NO: 23560 - DNA, 260 bp, Unknown
  Description of Unknown: LeftRegion for integrase B10561 sequence
tggcacaatcacgcctacgcctatagttccaatcgtcgagggttccgacgaatataaaacagcaatatatgctttcaatttcgccgttcaaagtggcaaaatggccgaggcacaagcaaaatataatagtaagcataagaaataaaaaaagccccctatcaagggggctatacttatacaatttgaaaggaaatcacacaatgaacactacagacttacaaacaggcgtgatatacgcacgctactcgtccgataaacaa

SEQ ID NO: 23561 - DNA, 260 bp, Unknown
  Description of Unknown: LeftRegion for integrase B10562 sequence
ggcaggtggtcagacacttccagaaatttattctgaccacgccttaactggaaattggagtggttatagagagtgtcatattgagcctgactggttgttggtctataaaaggattgacgataaattgattttatctttaacaagaacaggaacacacagtgatattttttagttataaacagtgaaatgtggagaatgatatgaaaaaagcggtaatctatgcaaggtacagctctgaccgacaaacagaacagtccatt

SEQ ID NO: 23562 - DNA, 260 bp, Unknown
  Description of Unknown: LeftRegion for integrase B10563 sequence
aaataataatgaatcaacaaacagatagtatcgaaaaaatcctaacaaagatattactagcaaaattacaaaaaaatggcttaattactcaaaaacaacaagaaataattatacaaaaatattaacttttcttttcaaataaccctggactttaagtctcttttacggcttaattgtattagcaaataggaggataaaaaatgctagatttacagcgaaaaccaagagcatgtgcctatgtcagagtaagcacaaactcc

SEQ ID NO: 23563 - DNA, 260 bp, Unknown
  Description of Unknown: LeftRegion for integrase B10564 sequence
tagagagaaagactcacagaaggtactggaggcgtattttgccgaaaggaaagaaatttttgagccgtaccggcagtttatcgcccgaggtctcagcctgctgaagggagacaccacaactagctttgccctgggtgaatccagctcaactggaagagacgcctgggaaaaggtatttcgattacttacgggaggagaaaatgatggaaaagagagcagcagtctataagcgggtttcaacagccgcgcaggatgaagaa

SEQ ID NO: 23564 - DNA, 260 bp, Unknown
  Description of Unknown: LeftRegion for integrase B10565 sequence
gaaatggttgaagcttttgaaaatattaatggtttttataaaatacctagttgggttaatgaagtgtaaggagattgagagaatgaagaaagaaaaaacgataaaagtaacttttacagaaagtgatgatatgctatataataactttattgatatattaataaacagttttttagaagaaatataaaggagtaagtaaaatgattaatgttgtaggatatgctagatattcatctgataatcaaagagaagaaagcatt

SEQ ID NO: 23565 - DNA, 260 bp, Unknown; identical to SEQ ID NO: 23481
  Description of Unknown: LeftRegion for integrase B10566 sequence

SEQ ID NO: 23566 - DNA, 260 bp, Unknown
  Description of Unknown: LeftRegion for integrase B10567 sequence
gcaccaatgggagcgactatcaagtcagacctgcatgagcatattgacggattaacaaacaaaaaacctaaatgatctaaaaacactctctgcgccacgtcagagattgcttcactgacaaactgcacaaaaacgcccctcacacgctcgtacagaccgcatgaggggcatataaataattaccacaaaggagtgagcatatgtacagcatctacctcagaaagtcccgtgccgatgcggaactggaacggctcggagag

SEQ ID NO: 23567 - DNA, 260 bp, Unknown
  Description of Unknown: LeftRegion for integrase B10568 sequence
gcacaagattcgcatagggatgactacccaacaagtcagggaatcttggggctggcccggccatatcaataccacaatcacacgctgggggcgtcacgaacagtgggtgtatggtcgattcccatacagtgagtatgtgtacttcgagaagggcatagtcactacgattcaacagtgaaccatcttgagaatgaggtgctatggctagcggtgtgatgagcggtcccgtccccgccgtcatctacgcccgggtctcgacg

SEQ ID NO: 23568 - DNA, 260 bp, Unknown
  Description of Unknown: LeftRegion for integrase B10569 sequence
aaaagaatagaaagagaaaaagtaatgttaccaatagacgaaaatggaaaccttaatcatgaatacatggagaagttcacaataaacatgattattaataagacagaattaatacatgaagaaaaaaagtagtaataaactaaaaaggactccattatcaaaaactctgctttaataaatagcagaaaggaataatgaatatggatgaaaaagttacaatattgtatgttagaaaatcaagaatagatgaaaaaggtgga

SEQ ID NO: 23569 - DNA, 260 bp, Unknown
  Description of Unknown: LeftRegion for integrase B10570 sequence
ccggaatattcgaacaattccttttttccattcgccggctgcccggcacggtggtttcttccggtctgaatcgctttgtgcggaatcaatgcatgccttttgtgcttaacatctttgagtattatcaaaccgcgctccctgcggatggttccgctgctgttgatttcggttcttttatggacggatacgaggaataaaccatgatttacggatactgccgtgtgtcgtccgatgaacaggcggcccacggcatttctatt

SEQ ID NO: 23570 - DNA, 260 bp, Unknown; identical to SEQ ID NO: 13096
  Description of Unknown: LeftRegion for integrase B10571 sequence

SEQ ID NO: 23571 - DNA, 260 bp, Unknown
  Description of Unknown: LeftRegion for integrase B10572 sequence
ttcgtttaatcacagttatgatgactctcctgccgtggaaacctattatatcggaaatagctctacaaaaaagtttcatcgttccagttgtagttatttgccctctcaacagaatcaggtcgccctttcatccagagaagaagctatttcgtccggttataatccttgtcaacgttgcgatccttagaaaggagcctcccatgcgcacctacgccgcctatctccgtaaatcccgcgccgatgccgataaaaccattgag

SEQ ID NO: 23572 - DNA, 260 bp, Unknown
  Description of Unknown: LeftRegion for integrase B10573 sequence
gcttctcaccctctatcgcggcgtgaatcctgacgggcagcgctacattttgaagcaggccgaatttgccaattctcaggaagaataccgtctttcccccgcccctaccgcaaagtcgggcgcgtgattcacgttgacttccgcggaaaagattaaagtcccgccactggtgaaaattcccagcaaaggagtgacctcttatgaccccgccgaaaggctttacttcttccgtccccgcaccgctgcctgatcttcgcatc

SEQ ID NO: 23573 - DNA, 260 bp, Unknown
  Description of Unknown: LeftRegion for integrase B10574 sequence
actgaaatccggtgcaggctggatttcacttgattatgtaaagagattataaaattctgccgggcggtaaaattctgtccggcagaatttttttacgttatttcccatcatagaaaacaaacggtatcggaaaaaagacttgctattcttgggggttagagtgatatatagactaccaaaaaagaagggaggagaccattatgcaaattgaagtcagaaaagctgagatgggaaaagagaaaaaacgtttaaaagtctgc

SEQ ID NO: 23574 - DNA, 260 bp, Unknown
  Description of Unknown: LeftRegion for integrase B10575 sequence
gtgtgcccaaaaagcaaagcgctgtaaaatatttatatgaaaaaaacgacggcatacataaaggccccgaatctggaaaaagaccgtaagcagatcgtcgaggagaccaagcgcgatctcgacgaaatgctgaatgagccctcccctatcggtaatcttgccgagctggtgaaggccctgaaaaaagccaagaagaagaaatgaagggcgtaatctgggtccgtgtttcgtcgatcgaccaatcagccggttacagcccc

SEQ ID NO: 23575 - DNA, 260 bp, Unknown; identical to SEQ ID NO: 23550
  Description of Unknown: LeftRegion for integrase B10576 sequence

SEQ ID NO: 23576 - DNA, 260 bp, Unknown
  Description of Unknown: LeftRegion for integrase B10577 sequence
tccgtacagaaagaagatattctgcggactctgcggaagcagactggtccgccatgtaaatccgaaaagccataaggtcatatggatatgcaacggggcaaaacgaaaaggagtggcattctgcagggggacaaggatacctgactccgttatcaggggatggggagaaatcaaaaaagatatttatattcagagaaaggatgataagaatggcaagaagcgttacagttataccagcaagaaaccgacagcgtgaaaca

SEQ ID NO: 23577 - DNA, 260 bp, Unknown; identical to SEQ ID NO: 23002
  Description of Unknown: LeftRegion for integrase B10578 sequence

SEQ ID NO: 23578 - DNA, 260 bp, Unknown
  Description of Unknown: LeftRegion for integrase B10579 sequence
agcaccatttgataaacaattattagatttaatgcttcaacttaactctaatgaaaaaattgaattgtataatatgttaataagtaaggtaggtaataagtaatgaaaccatttgtaaaaggaataatagcaattttattaggtattgtaataggtatattgttatacatcattattaagtattggggttttattagataatgactaatgttgttttatatttaaggtattcaagtgctaaccaaacagaacaaagtatt

SEQ ID NO: 23579 - DNA, 260 bp, Unknown
  Description of Unknown: LeftRegion for integrase B10580 sequence
ctcggcctggacgacggggttccggtcattgaggtcataccacaggacggcggcagggccgaggtgtacgccgctgaccagtggcaattgcactggcccacctgactgggtgctttgcgccattgatgacgtaactccctaactcgacatgcgttcagcccgaggtttgtattacgggttgccgttgttagcgtgaccgaatgcgcaccgacctgtacgcccgcaagtcctccagtgaccttgggcgttccgtggcccgc

SEQ ID NO: 23580 - DNA, 260 bp, Unknown
  Description of Unknown: LeftRegion for integrase B10581 sequence
ttattgatgattttcgtctatgcatttataatccttacaataaagcagataatgacaaaaacttactaatttttgaggattatattaggcttacacaattgccaaaaaatattttgaaaaggttaaatgattactatataacaataaactcagagttttaggggctatgcccctttaattttttaattaggagcgaacatatgagcgaaattactcaaataggtgttatttatgcccgatattcctcagacaagcaacgg

SEQ ID NO: 23581 - DNA, 260 bp, Unknown; identical to SEQ ID NO: 13018
  Description of Unknown: LeftRegion for integrase B10582 sequence

SEQ ID NO: 23582 - DNA, 260 bp, Unknown
  Description of Unknown: LeftRegion for integrase B10583 sequence
tatgagcatgaagtgatgcacattgctaatgatgatatgttcgggggtaaggacatacatgaaattgaaccgcaactgagaaagggtgcttaaacatagccaaaaagagccgaaaacagaataacaaggctgtcatatatgcgaggttttccagtcacaaccagaaggacgcatccattgaacaacaggtcgaatggtgcatggcaatggcaaagcgggagaatcttgaagtcatagaagtctatccagactatgccgtc

SEQ ID NO: 23583 - DNA, 260 bp, Unknown
  Description of Unknown: LeftRegion for integrase B10584 sequence
cagctttgccacctgatatgcgtgcaattttaatcaatactcttgtacagcttatcgaaacaagcagaaaaataagaaaagccactgatgaattcgtaaatgttgatacggatgaggagaagaaatcagactaatttcatctgcaaaaaaatccgtccagctttatgactggacggattcactaaaaggaggttttgaacatgagaaaagcagtattttacggtcggtacagttccgtgaatcagaccgagcagagcatt

SEQ ID NO: 23584 - DNA, 260 bp, Unknown
  Description of Unknown: LeftRegion for integrase B10585 sequence
gtgctgaccacgattccgaatctctgctcagcaccttccttcaggaacaggatgagcgcatttcccatatgcgcatcccgaatccattgcgccccggggatttctttcactgtatggacgagcttgaggaatattccgaagcgctgcgagaggcagaggctaaaaggaacgtatatcattaatcgaaaggagcccccgccatgtccgaacttcatatcgccgcggtctatatccgcgtgagcaccgacgaccaggtggag

SEQ ID NO: 23585 - DNA, 260 bp, Unknown
  Description of Unknown: LeftRegion for integrase B10586 sequence
tctttttgtttgtcaagtctctgcccctgctccgtgtaggggctttgttgaatttgtttattctgccctgttttttctcaacagtttattatccgtaattgcgattatacaataggtttttcaatgtgtacagttatttattaactgttgattttcaaatatggctattttttagaagaggagtatgctttttgtttttgatgtatttgcgcaagtccagagctgacggagaacatgagaccgtcgaagaggtacttgct

SEQ ID NO: 23586 - DNA, 260 bp, Unknown
  Description of Unknown: LeftRegion for integrase B10587 sequence
gcgacgccgaaggcttccacactctgatcatgtacaagtaaagggcggcggacttaccacccgccacccagaaaacaaaaaagccgccccggtgttaccagcaccagagcggcagacatacagttcccccgtatcaccacaatataggggctttatgcccttttattgtaacacacgtgtcacaaaaaaggaagtgcaaaatgcttgatttatcagctttcggcgtcctgaaggctgcggagtatatgcggtactcgacc

SEQ ID NO: 23587 - DNA, 260 bp, Unknown
  Description of Unknown: LeftRegion for integrase B10588 sequence
aaagaaacttcacctgtccgatgagcaatggaattccctgattcatgatgctcttggcgagttgaaattaatttggaatcagtcaactggtaagtaattttgtgggggcttcggcccccattattttttttgtctaaattttgggcttgacaaatgtacaaaatatggtataatggttcaaaattttaggagggacttttgtgaaacaaacagaatttattaaagacgtagggatatatttgaggaaatccagagcttca

SEQ ID NO: 23588 - DNA, 260 bp, Unknown
  Description of Unknown: LeftRegion for integrase B10589 sequence
gattccgtcaaggagatctccgcttcactcgccggctcgaagctgtactcctttggctcgcttctctccggagacgcgaatcagacttttctcatggagatggagcgcgcacaggtcgaacaaaatatgatcctcatgcgacagaatgaggaaatcatccgccttcttcagataatctatggagcaatagtcaataaccaatgagaaggtctgtaatttatgccagatactccgccggcccgagccagactgatgtctcg

SEQ ID NO: 23589 - DNA, 62 bp, Unknown
  Description of Unknown: LeftRegion for integrase B10590 sequence
gtgccttcgctgagcgcttcggcatcgtcattgtcgcagaatactgcgaccgggctctcacc

SEQ ID NO: 23590 - DNA, 260 bp, Unknown
  Description of Unknown: LeftRegion for integrase B10591 sequence
tgaagtgcctgttcatgaggcttttcctattgaatacggagaccgtctggatttcagagatgatgttgatttggaaatcgatgaaaaacttgctatgctgaatcgtttcggaaagcagaaagcacttgaatacatcactgatttatcggaacagcagaaatatacgaaacaagattaaattatcagggaggttttttcttatgaagaaagtagctttttatgggcggtacagttctgtaaaccagactgagcagagcatt

SEQ ID NO: 23591 - DNA, 260 bp, Unknown
  Description of Unknown: LeftRegion for integrase B10592 sequence
tctttctgtttgtcaagtctctgcccctgctccgtgtaggggctttattgaatttgttcattctgccctgttttttctcaacagtttattatccgtaattgcgattatacaataggtttttcaatgtgtacagttatttattaactgttgattttcaaatatggctattttttagaagaggagtatgctttttgtttttgatgtatttgcgcaagtccagagctgatggagaacatgagaccgtcgaagaggtacttgct

SEQ ID NO: 23592 - DNA, 260 bp, Unknown
  Description of Unknown: LeftRegion for integrase B10593 sequence
gtcgccacggaaccgggtgtgcgggcggtcaggaacgccttgttcaggcacctccgcagggaaggcggcggatcggaggctgccgcaacgtcacgcttgccgtttgcgctggtcacaggcactcccctgccgttgacatttgctagccctaccggtaacaacgacctcacactagcagatgttgaactagactggcccgcatgtcccgcgacgagaacggccggcgtgccgcagtgatttacctgcggcaatcccttgac

SEQ ID NO: 23593 - DNA, 260 bp, Unknown
  Description of Unknown: LeftRegion for integrase B10594 sequence
gatgatggcactaaaaaggcattggacaattggcaagcacaaaacgatatacacagaacatcaacagtagacactcaacaaacgcaacaaacacaacaggaacaaaagaaaaaacattggtatgatgatgttttagacggaacattttaataaaaaagagccacctacataggtggctttatttgtagagaggattaactatggaattgtcaaaaggtgtaatatacgctagatactcgtccgataagcaacgtgatgaa

SEQ ID NO: 23594 - DNA, 260 bp, Unknown
  Description of Unknown: LeftRegion for integrase B10595 sequence
tacgaggatgccagggcattttgtgcggtaggcgaggggctggagatccacgagaacgaagacggtgacggatacgtggtcgaaggatatggagatccggtcggcaccctgccggaaagcctcgaattgaacgagaaccgcgtctgggttgccgaggtccttgaggacgatccggacgacttccacatccggatctacacatgaccgccgtcatatacgcccgctactcgtcagccggccaacaagaaacatccatcgag

SEQ ID NO: 23595 - DNA, 260 bp, Unknown; identical to SEQ ID NO: 18262
  Description of Unknown: LeftRegion for integrase B10596 sequence

SEQ ID NO: 23596 - DNA, 260 bp, Unknown; identical to SEQ ID NO: 15967
  Description of Unknown: LeftRegion for integrase B10597 sequence

SEQ ID NO: 23597 - DNA, 260 bp, Unknown; identical to SEQ ID NO: 18292
  Description of Unknown: LeftRegion for integrase B10598 sequence

SEQ ID NO: 23598 - DNA, 260 bp, Unknown
  Description of Unknown: LeftRegion for integrase B10599 sequence
tcacgtttcccatgcggagatgaaccctgctgccatgctaccggttgtaggactttttgccaattcgcacaatgtgcaatccacttccctaatcgttatgtttggcgatgatggtaaggttcaaaaattcgccttcacagagcctcagcaagccaaagaggtgacacctcctcggaagcaaccatttaagtaacttgtctatgattgccagcatcacatgcgccatctacataagaaaatcccgcgaggacaaggacaag

SEQ ID NO: 23599 - DNA, 260 bp, Unknown
  Description of Unknown: LeftRegion for integrase B10600 sequence
cgcagaaatcgagagtggctgtattgccgtggtcgtggtagacggtacagacgggtttttaaaacaaatcgagttcggtgagaactccacctcgcttcactcgtttaatccgtattatcccgacatggagtttgtagatgccgaccagaaacgtttgcactttgtcggtcgcgtccgggaaatgaagcggaggttctgatatgcgccagaagtttaagatcgacctctctatgctgaccccggaagaacagcagcagttt

SEQ ID NO: 23600 - DNA, 260 bp, Unknown
  Description of Unknown: LeftRegion for integrase B10601 sequence
ccagccttgccacactggatagccaaactcttactctatccgcagaggaagtgcgcttaatcctcaagtaccgtgctttagacaaagagggacgaacgatggtagagtctacccttattcaggaaacccgcagaatggatacggagaaaggggaaactgtaagtgccgggtaatcagccttgccgaatggaggaagaaccatgtatgaagaagtgaaaaatgcctgcatctacgccagatattccagcagcaatcaaacc

SEQ ID NO: 23601 - DNA, 260 bp, Unknown
  Description of Unknown: LeftRegion for integrase B10602 sequence
gctttcaatgccctgctagacgagcgcggcatgtcgcaggcagactttgcccgcatgtctgggtggcagaccagctacgtttctcagatttcgcgcggcgcgattaaagaccccagcttgtcgaaggccatggttattgcgcgcgtgcttggcatctcgctgcaggagctgcatgaccgcagctttggggatgatgtcgaatgaacgccgccatctacgcccgctactcaagccactcccagcgcgaggagtccatcgac

SEQ ID NO: 23602 - DNA, 260 bp, Unknown
  Description of Unknown: LeftRegion for integrase B10603 sequence
tcgcaacgctagtggacctctgctcgaagctgaaccccgagcagatcgacatcctcgtcatgaccgcgcgtaacttcgtcgcggcaaacgaaaaatatggagagggcgataagcgagatgtggagggagctgggctcgctctgaccgtcgattaattagttacgcgcacgcgcggcatatataaggaaggaaggtggcccatggaagggatgtactgcgcttacctgcgcaagtcgcgggccgacgaggtccgggagaag

SEQ ID NO: 23603 - DNA, 260 bp, Unknown; identical to SEQ ID NO: 19085
  Description of Unknown: LeftRegion for integrase B10604 sequence

SEQ ID NO: 23604 - DNA, 260 bp, Unknown
  Description of Unknown: LeftRegion for integrase B10605 sequence
cgcaccggcttcggaacctcttacgtttcccaggtctgccggggcgtcgtcgatgatccgtccctgagccggtgccaggtgatggcggacgtcctgggcgtgacgctccaggacctctacgaccgatcgtttaaatgaaaaatggcccccgcgaacaccgacgacgcgggggccggaaccggagcgacgggaggccgctcatgaagaaggataggttatcggcggctgtttacgcgcgttacagctcgcacgcccagcgg

SEQ ID NO: 23605 - DNA, 260 bp, Unknown
  Description of Unknown: LeftRegion for integrase B10606 sequence
cctgcctccgtcaactacgtcggcaacaagaacaccggcaaattccacctccccagctgctccagcgtgagcgacatgaatgagtccaacaagctctactggaccggcagccgggacgagctgatcgcccagggctacgtgccctgcgcccgctgtcatccgtgacggtgcccgaatcgggcacgaagggagtgacccccatggacgccgcccagtacctgagaaaatcccgcgtggaggagggcctggagaccgacgag

SEQ ID NO: 23606 - DNA, 260 bp, Unknown
  Description of Unknown: LeftRegion for integrase B10607 sequence
taaccgaatatacgttctgtgttaataattaaaattaggaattagaaatgaaatatggacaaacaatattttcatatcctcctatagggaggattgatatttcatgaaaattatcgttattagaggaaagaatatttctaaaaacatacaaaattgctatgattatatattgaaaatgtacggagggggatgcagtaataatgattgcaatctatgcaagagtgagtaccgaagaacaagcgttaaaagggagcagcata

SEQ ID NO: 23607 - DNA, 260 bp, Unknown
  Description of Unknown: LeftRegion for integrase B10608 sequence
ccgaccccagtcgagcgccctcgctcgcatcaggggatgccgactaggcaaccatgaagatgagacattcctaacccttcccgcccaaaaagaggaagaacctccctccggtatcgcccttctccgcccgcacgcgcccgactaacgcgctaacatcccgccaacccctaactcaccgcaccaccctcggaaacgcgcccgtgaacgccactcctgccgcccgcacccgaccgaagcgcgccgtcctctacctgcgccag

SEQ ID NO: 23608 - DNA, 260 bp, Unknown
  Description of Unknown: LeftRegion for integrase B10609 sequence
aggaaatcacggaaaaatggatgggttatttcggacagattgaatactattgctaaaataaaaaaatcccctctcctgttggcgcaggaaagggaatttcataaagcggtcgtaagatacaaccacatgtcgcaactgtattgtatcataagaccgctctttttgctataccctaaatataggaaaaggaggtcttttgtatggtagctatttacgcaagacaatccatcgacaaaaaagacagcatcagcatcgaaagc

SEQ ID NO: 23609 - DNA, 260 bp, Unknown
  Description of Unknown: LeftRegion for integrase B10610 sequence
cggaaccagcggcggcagttaggcacggcgcagcgacgtccggcgagctgggcgcgggacaggccgctcgcgcagatacgcggcagggcagcagtggtcatcggatcccccctcaaaaggcccgtccccgcagatcagacctagactggcctcacctgtcgggcgaacctgcgactgcatgtgtatgacatcataggggaatggacagcgtcccgccccgcgaatacgccctttacctccggaaaagcaacggccccata

SEQ ID NO: 23610 - DNA, 260 bp, Unknown; identical to SEQ ID NO: 22873
  Description of Unknown: LeftRegion for integrase B10611 sequence

SEQ ID NO: 23611 - DNA, 260 bp, Unknown
  Description of Unknown: LeftRegion for integrase B10612 sequence
tatatagtatataaaaataaaatatataaggagttagagatttttttgttattttgttatatttgctattttcacacgaaaaaaaccgcctcgataggaccgagacggcgtaccaagttaacccccggcaagaggttaaaccttgacaatagaattatatcacacctccccggggaaaataaaaagggagttgttggaaaatggatttagaaatgatgaaagctagaaacgtgttaagagtagcgctttatgtaagggta

SEQ ID NO: 23612 - DNA, 260 bp, Unknown
  Description of Unknown: LeftRegion for integrase B10613 sequence
actgcagcaacgacgaggagatcatgtactcaatccagtgcgttgccgcataccttgcgctgaacaacggcgacgatgcgctcgatgccatcgacgaccttagatatgcactcggcaaagaagactactagaccccaccgccttatggtgcgagggatggggtctgccagatagccgcccgttggaggggcgattcgattatgccagaagagataaagactgcggttatctatgcccgcttctcgtgctcgaagcagcgc

SEQ ID NO: 23613 - DNA, 260 bp, Unknown
  Description of Unknown: LeftRegion for integrase B10614 sequence
atgatggaatcgcagctgtccaaagcgagacaaatcagccggatggcatcatcgaacaacctggcaacgagcatgtcgaaaagcaagcaagcaccgacaatcaaggtaacgagcacaaccaagacaaagaattaaaaaaagcagaataactatctcaggccccgtctgcaattagcagatggggcttttttgttgagcacatgactgcagctatctacatccgcaaatcacgcgaggacaaaaataaacccgcgcaccgg

SEQ ID NO: 23614 - DNA, 260 bp, Unknown
  Description of Unknown: LeftRegion for integrase B10615 sequence
tttcactttaaccagttatccccgtggaaccctaaacttatgaaaaggagggctgaaaatggaagcgataagaacggaaccggcggttcgcgagtatcatccgaagctgaaggcggaggaccgcgaacggatcagcgcggagatctcggaggaattcctgaatatactcagggaacattttaaacgtaagggtgagcccgttgacaggtatatatgtaagacaaagtgttgaccgcaaagagagcgtaagtattgaggca

SEQ ID NO: 23615 - DNA, 260 bp, Unknown
  Description of Unknown: LeftRegion for integrase B10616 sequence
tgcatccgcatgaaacttgacgagcttggactcgctcctgcgcagcttgcgaaaaaggcaggtgtgtctcgccagtacgtcaacagcctgctcaatggcgatacgaaacacttcaggctcgacaaggcgtggcggatagcgcacgccctcggcatgaccgccgacgaactcgccgatgccctctatgggggtgacgtggcatgaacgccgccatctacgcccgatacagcagccacgcccagcgcgaggagtccatcgac

SEQ ID NO: 23616 - DNA, 260 bp, Unknown
  Description of Unknown: LeftRegion for integrase B10617 sequence
aaataaaaaaacttgaaactaaaaatttttaaacatcattgaataacaaaattaaatctagtaaaataaaaaagactccgagcgaaggattcttttttattatgacaataactttattttaaaaaacactttcaccattgaaagcttaaaaatatattactattttttctcggtgaagtcaagaaagggaaggcagtaatatgtattgtatttatcttagaaagtctagaaatgatgaaggaactattgaagaaactttg

SEQ ID NO: 23617 - DNA, 260 bp, Unknown
  Description of Unknown: LeftRegion for integrase B10618 sequence
gtcgataaaattatcttgattgccggagatagcgactttgtccctgctgcgaaactagctcgtcgtgagggtatcgattttgtcttggacccaatgtggaaaaccgttaagcccgacttgctggaacatattgacgggatcaggactacaataaaaagaagaggccccaagcagaaagcagaactgcaggcagaccccaaatgacctgcgccatctacatccgcaaatcccgcgacgataaagacaaggccagccaccgc

SEQ ID NO: 23618 - DNA, 260 bp, Unknown
  Description of Unknown: LeftRegion for integrase B10619 sequence
cagtggaacttcaacagcgaaggtttttggatcgaactttattacaaaaatacacggtttgcattcaatccggtttttcaaacatggaccagaaatcgtaaaatattgacagatgatgtcaacatggagaaagccattctgcagcagatattacccaattatcctgcatggagaaaatatcaacggcagttagacagagcatgaaggcgactaccgctgccatctacatccgtaaatcgcgcgaggaaaaagacaaaccc

SEQ ID NO: 23619 - DNA, 260 bp, Unknown
  Description of Unknown: LeftRegion for integrase B10620 sequence
catgggcaattccaattcccataaactgcacttttctgactgtcgttgggcagaaaaaaccagtccagctaatagggtctactttaatacccgagaagaggctataaatgctggatacgtgccatgcaaggtatgtaatccctaattcaataaaacagttacccggtaccgacgccgggtattatttttgaggtgaaaacatgaagcgcggagcagtttatattagggtttcccacctaaaggatgacggagtaagtccg

SEQ ID NO: 23620 - DNA, 260 bp, Unknown
  Description of Unknown: LeftRegion for integrase B10621 sequence
gtgtcatttggcagtgttgacgttggcgattgctgtaaactacccctatgccgcgccagcgtaagcccaaggtcatgatcgatcttccgtcgcccgcgccgcacccccacccagacggttgcagctgtgtcctgactcagccctacatccgagtctccagggtcggcgatcgaaaattcttgatctcgcccgagattcagatgcgcgcgatggacgagtgggcagtcaggaacaacagacggcttttgcccccagtgtgc

SEQ ID NO: 23621 - DNA, 260 bp, Unknown
  Description of Unknown: LeftRegion for integrase B10622 sequence
ctatcgcacaataacagtagttacaaataaaaacgccccagtgttaccagcactggggcattgagaaaactatactttgcaaggaacttgcggtataatcctctccctcacagagactattatatcacaaattcctggcaccgtgtaggtgttatttttgtacccatttttacgtacacttaagaaggaaaggtgatacaatgagcgtaaaatatgcatacggctatatccgggtatccacacacgatcaggaagaaatc

SEQ ID NO: 23622 - DNA, 260 bp, Unknown; identical to SEQ ID NO: 23035
  Description of Unknown: LeftRegion for integrase B10623 sequence

SEQ ID NO: 23623 - DNA, 260 bp, Unknown; identical to SEQ ID NO: 19293
  Description of Unknown: LeftRegion for integrase B10624 sequence

SEQ ID NO: 23624 - DNA, 260 bp, Unknown
  Description of Unknown: LeftRegion for integrase B10625 sequence
caaaagataaaaatgtattaaataaaaaccgtccctgctaccaacaggaacggcctaatgaatactatacggtgtcaaggcacgatataatactccctgaacaagaatattatatcacatttcctcgacacctgtataggtgttatttttgtacccatttttgtgcgacatcgcacatataattacaggaaggtgatacaatgagcgtaaaatatgcatacggctacatccgggtatccactcatgatcaggaagagatt

SEQ ID NO: 23625 - DNA, 260 bp, Unknown
  Description of Unknown: LeftRegion for integrase B10626 sequence
gtcatacatacatttttgtcaatttaaaaccgccctgctctaccaaagcaaggcggtaagctcccgaatgatacgaaagccctaagcaagcatattgtatcattctcggagcagcttcgcaagcggaacacccgtttgacgcaggctgttatttttgtacccaaaaaccaatacaatatagagaaagaggtgcatatgctatgaaagaaaaggtttctgaacgcaaaaccggcgcgatctacatccgtgtatccaccgac

SEQ ID NO: 23626 - DNA, 260 bp, Unknown
  Description of Unknown: LeftRegion for integrase B10627 sequence
catcacgtgctgcggcaccgggatctcgagcactacacctatggccccgacggaccactgttcgactccccactcgaagccgcggaggctgaccacttcgccggagtgttcatccagcactgccgcggctacaacgggtcgcgctttacgcggttcgttgatgtagattccgcgcggtccgctcggcgctaggaacctccgtgagggctgccggctactttcgggtgtcgactgagcagcaggcatcggccgaccgcaac

SEQ ID NO: 23627 - DNA, 260 bp, Unknown
  Description of Unknown: LeftRegion for integrase B10628 sequence
tatgtagagaaatcaaagtatgaattttataaggcgttcgccaaagaacatggtatttcatttgccgaactcgtgcgccgtgcggtgtattacagcatggaaaagcatggatttgacccggacgacccatatttaaagaattaaaaatagtccctgccggaaaggagaaatcggcagggactattcaggaggtatgcaaaatgacaaccaacacttatagtataccatgcaaagaagaaaaagtcaagtgcgttttctat

SEQ ID NO: 23628 - DNA, 260 bp, Unknown
  Description of Unknown: LeftRegion for integrase B10629 sequence
ttccatccggatgtaatggaagcgatagagtctgccattcaggaaaaagaaacacagcgccagatccgcgaccgtgaacgtcaggacgaactaaagttgataaagattttcgactccctcacttcagaaggaaagcagtatttgttgcaacaggccgacatcgcaaagaagatgttcgggacgaaataggaggtgaacgaatgaacgccgtcatctatgcccgcttcagctcctccgcccagcgtgaagcctccattgaa

SEQ ID NO: 23629 - DNA, 260 bp, Unknown
  Description of Unknown: LeftRegion for integrase B10630 sequence
tttgtgccttcaagattattgcgtaagcaaattgcaatacgattattgttgtatattcaagatagtgtgatcgtaattgtctttttaaataaaaattaaacaaaaattatatctcaccactaaggtttataaaagcataagttagcaggtgtcaccatgaaaaaagccatagcatatatgcgattttcatcacaggtcagatgtctggcgactcattaaaccgacagagaagacttattgctgaatggttaaaggtaaat

SEQ ID NO: 23630 - DNA, 260 bp, Unknown
  Description of Unknown: LeftRegion for integrase B10631 sequence
tctctgagtaaatgtcctctcgatcaactccgtttggaatgttggatctccctatcgttgcgagaatccatgggcgaatggcttgaagtatcggtgtgattgcttctctgtcaccgtttgtatattgtctgacaagggcagtgacggtatgcttgtccatagggcgtgatgctagttgaatcaattcgaggggcttctcaatggcttggtacgtttacgttaggatgagtcatcgatcttcggcgtattctggaatcagt

SEQ ID NO: 23631 - DNA, 260 bp, Unknown
  Description of Unknown: LeftRegion for integrase B10632 sequence
tgaagcaaaaatcacagggacaaaagatgctccaaaagttattagctttgacatatattagctatctctaattttaaaaataaaaaccgcccctgcgctaccaacacagagacggctacatatccgaagatatgcaactattaatgaacaaatatattgtatcatcttcggaaacagcttgcaatcggaacatattttcgatggctgttatttttttacaaatttctcatacattttacaaaggagatgatatcatggaa

SEQ ID NO: 23632 - DNA, 260 bp, Unknown
  Description of Unknown: LeftRegion for integrase B10633 sequence
taataatataataaaaaaatatataaaaataaaaatatatagtaactttcaactttttttgttattttgttatgaagataaaaaaaccgcctcgatttatagtcgagacggtaactgatataatcctcctgggagaactataatagccgacaatttattatagcacacctttccaggttgagaaaagggagactataattatgaataagcctatcgtacaccgattacgagtagcgttatatgtccgagtatcatctcac

SEQ ID NO: 23633 - DNA, 260 bp, Unknown
  Description of Unknown: LeftRegion for integrase B10634 sequence
aacgaccgcttgctgctctacgccctggacgttttgatgatgcagaacggtttccggacggactacactccagacggcgatgttcttctgatccgcggcgacgttgcgaagccagtcacggaagaagaactcctggcgatggcgcgggacatctcacaacttgccggaggacagctccgtcgtctctttgggggtgcatcatgatcagagcagtgatatatgcaagatactccgccggaccgcgtcaaacagaccagtct

SEQ ID NO: 23634 - DNA, 260 bp, Unknown; identical to SEQ ID NO: 19365
  Description of Unknown: LeftRegion for integrase B10635 sequence

SEQ ID NO: 23635 - DNA, 260 bp, Unknown
  Description of Unknown: LeftRegion for integrase B10636 sequence
ctggctactgctcatggcgggcttcaagcgagtatccgctctgttcttggctccatggccgcggctgaggtggacctttgcatcaatggcgatatccccgcagcgacaacccgcatggatgaaatcaccgttggtgtgcgcggcatgaccagttggctgcaagtcatgaccgagaagatgcagtaggagccgtctaccccatgccgcgccgccgcaactcccgctccgctcgcgcgaccgtccggcccctgcaggccggt

SEQ ID NO: 23636 - DNA, 260 bp, Unknown
  Description of Unknown: LeftRegion for integrase B10637 sequence
aaattgaaaaaatagtatacaaactcgaaaacattataaatgatattgcagttattgactatacaaattctgccgcgtaaaaaattcccctgcctgttggagcagacagaggaaaaagaataaagtgcatttatacacatatgtcacgctccccacggagtgtgtgagttgaaatataacacaagaaaggaagatttacgatgaatgtagccctgtatttacgaaaatcgagagcggacgaaaacaatccgcttgaaaca

SEQ ID NO: 23637 - DNA, 260 bp, Unknown
  Description of Unknown: LeftRegion for integrase B10638 sequence
agcatgccggcgaacgcccctatttcgcctgctgccaaaagcgagaaggtcacgacggctttcccatatggagggtgaccgttgtctatctcggaagataaaagagccccgtcggctaaagcggtaccagcgctgccgacggggcatctaaccagtgcacccatgcaaactcaacttgaaggaagggtgacatatctattatgccaaagagggcagtgatatacgcgagattctcgtgcaacaggcagcgcgaggcatcc

SEQ ID NO: 23638 - DNA, 260 bp, Unknown
  Description of Unknown: LeftRegion for integrase B10639 sequence
ggcctcgtgctggctgcgctgcggcgcggcgggcctggtcggccttggctactgctgggcctcgccgcttcggtcgccgggaatgtgctgtcgcactatcccgcggctgtcgtgacggtcgcccccgggatctccgcttggccagcggtcgccctctacggctgccactgcctcgtgaaccggcccgatgaggtctcgtcatgacgtcaccgatgacccgtgccgtcgtcctcgatgccgtagtgcgcgtctcacggcgc

SEQ ID NO: 23639 - DNA, 260 bp, Unknown
  Description of Unknown: LeftRegion for integrase B10640 sequence
ggagaggcgcttaggtttggccttcgggccggtgccgcgcttgagcggcttcgagcgctgctgccaggcgcggttctgctccagtgagctacgtttcaaccccgcagaccgcttcacagtgcgatctccggggtggcacccctaaaggtgagagctattagactctcacctttaggggggagttctgacgaggagagagaatgcgagttgtgggctatatccgcgtgtcgcgggtcggcaagcgcgacggggagcgattc

SEQ ID NO: 23640 - DNA, 260 bp, Unknown
  Description of Unknown: LeftRegion for integrase B10641 sequence
gttctggtcaaaatagctgatattttaaatacaactacagatttccttcttggacgcacagatactaatccacccgatgctgcaacaatcaaacaactacaaggaattaatgaattaccgcaagacaagagaagatttgtaataaatataataaattcgattatttcagaaataatcgaagaggctaaggaggaataggtatgcatggaatactatacctgcgcaaaagcagagaagatgagcaatatgaaaaaaatact

SEQ ID NO: 23641 - DNA, 260 bp, Unknown
  Description of Unknown: LeftRegion for integrase B10642 sequence
caatggcaaaattgttcctgtggcaacagatccagttgaagcaatcagcattgaaagcattttggaagaaacaaagcaaaagattttgaatgcagataatctgaccattggtgacagatttgcagatgcagctgatgtgactgcaatattaaacacatttgaaatagtattagaaatgcaaaagaaaaggatgatttaaaatggttatgactaaaacaacaaattatattaaaaaagtccgtgtagcaatttatgttcgt

SEQ ID NO: 23642 - DNA, 260 bp, Unknown
  Description of Unknown: LeftRegion for integrase B10643 sequence
aattgtttccctcctgtgttttttatgtacttattttaccacagaattacgaactcgtgttcttattatttttaataaattgcatattaacaattcatatatatagacgtttgtatttataaaatgttacgtgacataagtagctaaaaaaggtggtgcataagacttatttttaaattaaccgaaaagggtgaaatagcatggacaaagctgtaggttacgttcgtcaaagtaaagaaagaaaggatagagattcaata

SEQ ID NO: 23643 - DNA, 260 bp, Unknown
  Description of Unknown: LeftRegion for integrase B10644 sequence
ggcaaccaagcacacccgggccaatcgaattgcagagacccgggccaagctggtggttgcttacaccgagatgttctcactgtcccggacccgtgtggctgtcactaaggacaacccgctcggactaccggggagacgacgagatgacgtttggctcgggccgcctatggagccggacatgacgtggttaggagacgacgatgccccgtcaagctgatcttcatgtgcccaagcgagcccgtatcctggcccggctatca

SEQ ID NO: 23644 - DNA, 260 bp, Unknown
  Description of Unknown: LeftRegion for integrase B10645 sequence
atattgagaatttttttgagaacagcaaaaagcaggagggtattgccgaaaagcttgcatctgtttttaataaagaatggtttgactttaagcccgacaagaacggcataatgacggtgagcatgaatgttggaacaaaagattaatgctattaaatatgaatcttcatacaaaaaagataattatttccgcctgacggggtgaaggagcgtgaacagaaaatgagctattgtatatatctaaggaaatcaagacctgat

SEQ ID NO: 23645 - DNA, 260 bp, Unknown
  Description of Unknown: LeftRegion for integrase B10646 sequence
aacccgtacctgtatcttccactcggcatcatcgcagccacgtcatacctcgtgctccaccgtgagcactaccagcgtccggaccgcttcgaagccgaactcgccctcctccattggctaatcgggatcttcttctggccactaattccgccgttgatcatccttgaagtggtgatcaacttccttcgctccctccgaaaatgaccactccccctcccccccgcatcgccatctggaccgccgtctcctccaaaccccag

SEQ ID NO: 23646 - DNA, 260 bp, Unknown
  Description of Unknown: LeftRegion for integrase B10647 sequence
gggcgagaacgcgaacaaggtcaggattgtcgggcgagtggttgaagtgcggcacaaaacgatataggcaactgttcgggatttccgacaacttgcaactttgatacaacttcgatacaactttgatacaacaaaaaaagaaccgcctcaagggcggctcattgtcatgtcatgatattttattgtgaaagcgtgatttcatgcaaaccgccgccatatatgcccgcgtgtctactgattggcaagctgaacacgggtac

SEQ ID NO: 23647 - DNA, 260 bp, Unknown
  Description of Unknown: LeftRegion for integrase B10648 sequence
ctaccttttgctgatgattatcatacgagactcatacgctctaaaaacgaatttaaagcatttaaatggttacaaagtaatcttattccacttggtatagaaaattcaaaatttgacaacatatgggatattgcggacaagtttcaagtcccacctgaatttgttgttaaagtattagaatatagaaaggagaatttcatatgaaattagcatgctattgcagatattcatctgatatgcaaagagaagaatctattgaa

SEQ ID NO: 23648 - DNA, 260 bp, Unknown
  Description of Unknown: LeftRegion for integrase B10649 sequence
ctgcccgttacgattatcggcttggtcatcgaggttcgtcataagcttatctaactggaatattttggagcagaattatggaatattttttatataacaaaaagcccgcaagcgttagcgcacttgcaggcagaaagaaaggaattcgataaaatgaatatttcaagtagcattatagcacatacggagtccggactctaatgaatgtcgcaatttatgcccgtgtcagctcagagtggcaagctgagcacggttactct

SEQ ID NO: 23649 - DNA, 260 bp, Unknown
  Description of Unknown: LeftRegion for integrase B10650 sequence
ccgtccttgcggaactttcctttattgacaaaatggataatatcctgaaaatgcacattgcttattattacaacagaagaaaataaaaaaaaaaaatcccccacggtactcgcaataccgcaggggacaggaattgtgatgtacacaatcctcacataattagtatatcacgattcccccaaaaaatcaaggaggaatttatgaaaaaagtagttttttacggacgctacagctccgtgatgcagaacgagcagtctatc

SEQ ID NO: 23650 - DNA, 260 bp, Unknown
  Description of Unknown: LeftRegion for integrase B10651 sequence
tttgaaaaacgaagattttctatttaaaaaactcttattgtattattttgtaatagtaagccctatttatttctttgcaaataatattctttatgatttttttccatatgtaattacatctttaggtctctttgtattaacaatatttgttactactcatgttttttggttgcacttaaaaaaaatcagaggacaaaaaaatgaataaagctgtaatatacgcaaggtactcatcggataaacaacgtaccgaatcgata

SEQ ID NO: 23651 - DNA, 260 bp, Unknown
  Description of Unknown: LeftRegion for integrase B10652 sequence
gaaaccccctgccaggccctccagcctggtcgggggcccctttttttgtgtctaacacatgcagacattagtatgtgtgcttgaataatcctgccccatcgcggactcaaacgggctgcattgttcaaacgtgatacggtctctacatgcgtgtattgggaagagtgagactttctcggtctaccgaggagagtaccagcgtggagcgccagcgcgagatcatcgaggactgggcccggcgcaacgaccacgagatagtc

SEQ ID NO: 23652 - DNA, 260 bp, Unknown
  Description of Unknown: LeftRegion for integrase B10653 sequence
ttatgggaaaatagaaaaaaatatttatgcagaatatttagaagaacttataaagcatcttgaatataaaaaggatcaagttatatctatgtcaaatgttgattttacttttaaatgtaatgtatgtgaaaacacttatgttatacccaagagggatttatataaaaaaaataattgtccgtactgtgaaggagaactaaatgaaggtagcaatttatattagaaagtcaagagaagataaagatgaatataaagaagat

SEQ ID NO: 23653 - DNA, 260 bp, Unknown
  Description of Unknown: LeftRegion for integrase B10654 sequence
tagtaatatctttctctggtgagaattttaaaagcatcgtgaaagaagcggagtttatgttgcaggaccttgaaaaagaggccgttgccaagcctgtcgatagcgataatgaaaaaattaagctacagcttgagctagaaaagaccaaactggaactggaaaagctcaagctccaaaacaggacccattctccataacacatgaatgcagccatctacatccgcaaatcccgcgaggagaaggacaggccatcccaccgc

SEQ ID NO: 23654 - DNA, 260 bp, Unknown
  Description of Unknown: LeftRegion for integrase B10655 sequence
gggacgcgcggcgctcgcgctaacagcgggattcgcgagatcagccccgagcactacgaccgctggtcccggcgctcgcgcccgcgtggcccgcgtatcggcgtcgcgtctcgcaggatcgttttccacgaccccgacctggcggtgctcgacgtgcccagcacgcacaccgtcaccgtgcgacgcctggcgagcgcatcatgaggaccgccgtcgagacttacgagctgatccccgcctacgcgcgcctgtcgcgcaag

SEQ ID NO: 23655 - DNA, 260 bp, Unknown
  Description of Unknown: LeftRegion for integrase B10656 sequence
aattcaatgaataaacaagttgatggagcttttttatcgaaggatcatgatgcaacattaaaagctaaaatatcagcaaagcgggcagattgcgaaaacaagattaaaagagccaacatggattattataggggagttattagaatttatatgcgcaatatgagcgtttcagagcatggatatgcactagattggtctttgtgactcgctgtgccatctatatacgcaaaagccgggaagaaaaagacaagccttcccac

SEQ ID NO: 23656 - DNA, 260 bp, Unknown
  Description of Unknown: LeftRegion for integrase B10657 sequence
atcattagagactgttgaagaaggtgaagaggaagaagattattattgggatgatttagaggatgaagatttcttcaatagattaaaatagatttatatgggcaagcattgtaattctttaagaggaattaaaattctctataaaaaattacaatctttagactaaaatcattatatttacatcataaaaatgtaagtatatgaaagtcattggattagtaagagtttcaactcaagcacaggaatttgaaagccaatca

SEQ ID NO: 23657 - DNA, 260 bp, Unknown
  Description of Unknown: LeftRegion for integrase B10658 sequence
ttatcataaatcaaataaaaagtcaaggaaagtccgctgaaaaaagcggatttttttattgacaaatatatttttctgtattatagtaaatatagaaaccgtcctgcaatcaggtcacaggacggaataattgggggaatgtgttatatccaacaatgatattataacagattcttcccataatgtcaaggaggaatttcatgaaaaaatgtgtattttacgggcgttacagttctgtcatgcagaatgagcagagcatt

SEQ ID NO: 23658 - DNA, 260 bp, Unknown
  Description of Unknown: LeftRegion for integrase B10659 sequence
accccgcccggaccgttggcgcggtcttggtgggcggggcggcttggtgccatgtatataatacactccgagcaagtgtaattatagcatggcccggccaaaaacacaagtagaaaggcaagggctatttttgcgccctttttggtgctgctataatgaaaacgaagaaaacgaaaacaccggcggccgctcctctatctgtggccgatctggaaaatgtaaccgatctgtatatccgggtatcaacggcggaacaggcc

SEQ ID NO: 23659 - DNA, 260 bp, Unknown
  Description of Unknown: LeftRegion for integrase B10660 sequence
gcagggcggaatttcaggagatacaaatatttggattcatctatcaaaattattatatcacaatataaaataaaagtcaagaaaaagccgcccgattttgcataaatcaggcggctttcccgaaaggaagtacaatatgtcaatccaacagtatagtaatattttatcataaaccaaataaaaagtcaaggaggaatctcatgaaaaatgcagtaatatatgcccgattttcttctgatttacagcgtgaagaaagcatt

SEQ ID NO: 23660 - DNA, 260 bp, Unknown
  Description of Unknown: LeftRegion for integrase B10661 sequence
tactagaatttataaaaatgaataaagattttattattaataaaaaataaaaaaagatctagagcggctactctagatccaaaatgaaaaacccaaaagactactaatctataacaaaaataatgagacatacactataattgtatatgagtttttctatacaattatagcacattaaacatagaaaggaaagtgctataatgacagaattaaatgaaaagaaagcagcagtttatataagagtttcaacagatgatcaa

SEQ ID NO: 23661 - DNA, 260 bp, Unknown
  Description of Unknown: LeftRegion for integrase B10662 sequence
ctagacttactaccgactgtactggaacttgtccttctagtgcagtcactcgcttttcaagttgagttagtctttgcttcagttttttcaccacctctataaattatttagttaaattatactaaatatagtcgctaaagtacattacgaattttcataatcccggcctggtttcgggaataattttttgaggtgacaacatgaaaaagcagaataacaaaataatcaacaaccgggctattgccatagtcagagtgtca

SEQ ID NO: 23662 - DNA, 260 bp, Unknown
  Description of Unknown: LeftRegion for integrase B10663 sequence
tccaagccgaggtagatttccaatatgatggggggtctgcaatgcgtggatgtagctaaactgtactttaaccgaatacttaataataacatgatttaaagtaagtggcgccaagggatcgggcaatccttatggcgccacttacttttattattaaaataattccggccagcgccgggaatactttttgaggtgacagcatgaaaaagcagaataataaaaccatcaacaatcgagccatagctatcgttcgtgtatca

SEQ ID NO: 23663 - DNA, 260 bp, Unknown
  Description of Unknown: LeftRegion for integrase B10664 sequence
aatttgagcaagtaatagatgattaagtagaggattaaattcctctactttattgttatattgaatattttatactataatttatctaggggtgtaatttatgggaataaaatttgagatattaacagaaaataaatctagcattttaaatttattaattgatattttagtacaagcagaagaaagaggtgtacaaatttatgaagaagatgaatgtggtactacttagaatttcaacagataatcaagaaactttatca

SEQ ID NO: 23664 - DNA, 260 bp, Unknown
  Description of Unknown: LeftRegion for integrase B10665 sequence
gccatcaccgttcaacgcccgtacatacttccaagcaatttcataaagccgattctttgcaatcatcttccgttctttctttaacataattacaacccctctcttgtttattatacttctacccttgcttgagtttattataattcaacgctaggcataagtcaagtattttcttaaaaatttttttgggagtgctggaaatgccaaccgccgcaatatatgcccgggtcagtaccgacaggcaagccgaacaaggctac

SEQ ID NO: 23665 - DNA, 260 bp, Unknown
  Description of Unknown: LeftRegion for integrase B10666 sequence
tgcctcctctcgcgtctcgtagatagtgtacttgcaaaaccaatgcagataacccacaacctccccgtttttgatgatgccaaccgccatttgtaaaacctccctttgtttattgtgtttcttcccttgttcgagtttattataattcaatcataggcataagtcaagtattttcttaaaatttttttggagtggtcgaaatgcctacagccgcaatatacgcccgcgtctcaaccgacaggcaagccgaacagggctat

SEQ ID NO: 23666 - DNA, 260 bp, Unknown
  Description of Unknown: LeftRegion for integrase B10667 sequence
gtaggtccggccgagaggtccggcctacccgagtttttcaaaatatatttatgatttacccgggatccgtggtcatccgaaagaccacggatcattttttatactgagtggtatggatatttttgtagttttagaatgtgaaaaataatgattatatccaaaattattattatctttgtccaaaccaacaacattgagttatgtttaagataatagttttcagccgggtatctactgagaaacaggatctggatcagcaa

SEQ ID NO: 23667 - DNA, 260 bp, Unknown
  Description of Unknown: LeftRegion for integrase B10668 sequence
gtgtttcaatggaagaaatagttaatggaaaacctaaaaaaacaaagactttaatttttacagaaaaagattatacaaaacacgaattaaatgctattattgattttagtaaatttttaaaatcaaatagatcagtttacgaatatgaaattgctgaagaactgactaatataaataaatctaaaaaggaatgataataaatgaatgttgcaatatatataagaaagtcaagggaagacagagaagaaacaagagaagaa

SEQ ID NO: 23668 - DNA, 260 bp, Unknown
  Description of Unknown: LeftRegion for integrase B10669 sequence
gtacatggtcccaaaaaagtttatggaagtattacttttacagaaaaagattttacaaaatatgaacttaatattatattagaatttagtaaatttttaattgctaatagatatattgaaaaagaaattgaaatattagattttaaggaattagaaaaaataaaaagaaaaaataaaataggttagaaggaaatgacaaaatgaatattgcattatatttaagaaagtcacgtgaagaagaaatagaaacacgtgaagaa

SEQ ID NO: 23669 - DNA, 260 bp, Unknown
  Description of Unknown: LeftRegion for integrase B10670 sequence
ttatgttggctaaagccatagtggaaaaactatggcttaaaggccacattactgaagaacaaaaaagaaaaatcgatgaaagaaataaagttaaaattctttcaactaatcactagatattaaaaatggtttgcggtattgttttgttgcattcgagtccgtaaacgatttgggtgtataaaacaaggaggtaaactactatgaaaagagcagttgcatacattagagtatcaacgaaatcagatgcacaactacacagt

SEQ ID NO: 23670 - DNA, 260 bp, Unknown
  Description of Unknown: LeftRegion for integrase B10671 sequence
ggatcggatggactagcaaatgccaacaatcacgaaatggaaaagaaatttgcggcaacgcaataaagacagtgctttttttctcaaaatgcttgacctcaaaattcttgacgaaataaagcgtatagatttcaaatgaaagtcaggatgctgcccagccacaatttgccatcggcgcaagcggtgctaggattgatcgtatgcgggcagcactctacctccgaagcagcaaagaccgacacgatgtcagcctcgacgcc

SEQ ID NO: 23671 - DNA, 260 bp, Unknown
  Description of Unknown: LeftRegion for integrase B10672 sequence
tattcaataaaacacagaaaattcagtctgattttgataagagcgtcaaggaaatgctctctcagaaaggaaaataaaatttccgtccagtaccgaaatactgaacggattcagggtgttatgctataatacacaactctcacaagttttactattttattatagcatattctccctgaaaagtcaaggaggaatcgaatttgaaaaaagtagtattttacggacgctacagctccaataaccagaccgagcagagcata

SEQ ID NO: 23672 - DNA, 260 bp, Unknown
  Description of Unknown: LeftRegion for integrase B10673 sequence
acgtatagatagagatttataatattactacctacgatagaagtagaacgggggtgatgcctttggccaaaagaaggagaaatgctgccaatacggacagcgggcggataggcgtcatctatgcccggtactcttcccacagccagagggacgtttccatcgagcagcaagtcaacgaatgtcggaagttcgccgaggaaatggacatcccgatcacgaaggtgtatgccgaccgggccatcagcggaaggacggataag

SEQ ID NO: 23673 - DNA, 260 bp, Unknown
  Description of Unknown: LeftRegion for integrase B10674 sequence
gcttgatgcgttcacaaagcaaagggagatagatataaacaacgacatcatagaaaagcaaactagaatcgcaaaagaagacgttgttctttacgtggtcatcatcattgtcggggccttcgtcctgttttcgtggtcgctatgacccgcctctactggacgaagcgcttttactggtggctgttctcccgactgctgtcatggatacgatgatccccgccgcagcctaccgccgcgtgtctacagatgcgcaggtagag

SEQ ID NO: 23674 - DNA, 260 bp, Unknown
  Description of Unknown: LeftRegion for integrase B10675 sequence
caaaagggtgtgaaaatgtatcattaagcacattaagaaaaatatgtaatttatttcatattactttagatgaattgatttatggcgaaattaaaaaagaaatgatagtaaaatttaacttaactaattattcagaagaagaattaaaagttataaaaacagtattcaattatattcattcatcaagaaaggaaacgtaaatgaatgtagcaatctatttaagaaaatcccgtgacgaccaagaagaaacaagagaagaa

SEQ ID NO: 23675 - DNA, 260 bp, Unknown
  Description of Unknown: LeftRegion for integrase B10676 sequence
ggatgatgagtgaaaaaccaccttacgtcggcgtggactttgggggtggaaggcgagccgtgttcaatctggcgacgatgatggtcatctatgccgactgaggagtgccgggcttccctgggggtaatcatctcgcctgcaacgaccctttgtctcccatctctgggccggaacgagagcgatcgatacaaggagagagaatgagcggcgaagcgaacggacctttacgcgtggccatctggtgcgccgtctcgagccgg

SEQ ID NO: 23676 - DNA, 260 bp, Unknown
  Description of Unknown: LeftRegion for integrase B10677 sequence
accggcggatctattcgagtgaccgcctcggacatcctcactcccgacgatgcggcggccctcttgaaggtgcccggatgagcacccgacgggtacctcagtccgtggaggttactcccgtgccggccactcctgccgacgttgacagggtggccgctgcgcttgtacggctgctctccaccccgccgaagaggtagcccatgcgagccgccgcgtactgccgagtctcctcccttcaacagaaggagtcccagaccatc

SEQ ID NO: 23677 - DNA, 260 bp, Unknown
  Description of Unknown: LeftRegion for integrase B10678 sequence
gaactggatcctcatccagcagaacgagctcatagcgaggttgctcggggaaggtaagtaagagggtttacttactcccgaaaagaggttgcgcccctgcgaaagtttggcgactggacaggggcgcggcgtcttcccaggcataggaaggacggtgcgattctaccatgcgcgaattgcctgcgggcggcaggtacgccatgttcctgcgcaaatcccgagaggacgtcgaggccgagcgcgccggcaagggcgagacc

SEQ ID NO: 23678 - DNA, 260 bp, Unknown
  Description of Unknown: LeftRegion for integrase B10679 sequence
ccaatcacaagaattattccgcaaccaaagagaattgaagacatcattggaaatgcaaagcaggaattattaaatggtaactatttgacattcgataatcagccagcatcagaagatgaaatcaatgatattgtgctgatgatggacatggcattggaattacaaagaaggaaaagactaaaaacaaaggatgaagtaaaatgactgattacattaagaaaaatatacgtgttgcaatttatgtaagagtatccacacaa

SEQ ID NO: 23679 - DNA, 260 bp, Unknown
  Description of Unknown: LeftRegion for integrase B10680 sequence
cgtggtattctaaagggtgcgataatgtatctttaagtattttaagaaagatatgtaatttatttcatattacattagatgaattgatttatggtgaaacagaaacaattacttttagtgttaaaaattattcaaccgaagaattacaggtaataagaactgtgacacagtttattcaatcatcaagaaaggaagcataaatgaatgtagcaatctatttaagaaaatcacgtgacgaccaagaagaaacaagagaagaa

SEQ ID NO: 23680 - DNA, 260 bp, Unknown
  Description of Unknown: LeftRegion for integrase B10681 sequence
tccaaatattgagggcgaggcacggtgcatcggtcttgtaatcggtaccgcagaaaaggtataaaaaagccacccggcatctggtaccgggtggctttgcacgagagaaatgtcatgtccggaggtatgtaatgcacgaacctcgacaggttaagtataacatatcctccggcaaatgtcaagcatcaggaggaatttaaatgaaaaaagtcgctttttacggacgttacagctccgtcatgcagaccgagcagagcatc

SEQ ID NO: 23681 - DNA, 260 bp, Unknown
  Description of Unknown: LeftRegion for integrase B10682 sequence
gcccacgctcgtcaactcgatcgtattgaagacaaggtcactcatcacgatattaaaatatctatcttagataaaactaaatcgaataaacgtattgctaaagtaaaatagagtaaataataaaaacacgctaaataaccacgatacaatataaatatcgtggttattttataactttttattagtttcaggaggtacatatgacaatatcagcagctggatatttacgagttagtacggatgaacaagcagagcatggt

SEQ ID NO: 23682 - DNA, 260 bp, Unknown
  Description of Unknown: LeftRegion for integrase B10683 sequence
ctgcggtactgtcggcgaagaactcgaacgccgtgccagacaaaaagataccgcataagaatgtatcggcacaagtaaaaaaaatccgcccagtgcaggaacaccggacggattagggagttatgatataatcacaaccttagacaggttcattatatcatattctccctgaaaaatcaagtatcaaggaggaatttattttgaaaaaagcagtattctacggacggtacagctctgtgaatcagactgagcagagcatt

SEQ ID NO: 23683 - DNA, 260 bp, Unknown
  Description of Unknown: LeftRegion for integrase B10684 sequence
attaaaagtgcaaaatataaagatattttaactattcgtataacaaaagattaagttttaacaataaaaaaccactcaagcgactggtcctcgcctgagtggtagtggataaggtgatagaatgctcaattccccttccttagccgttttctattctatcaccttttccttgaaaaagcaagaaaaaaggtgatttttgtatgcttaacgaacaaaagcgggcagccgcatatatcagagtatcgacagacgaccagctt

SEQ ID NO: 23684 - DNA, 260 bp, Unknown
  Description of Unknown: LeftRegion for integrase B10685 sequence
ttctgtctgacgtacaagaaataattaagaatcctccggcatggttaataaaaagccggagatactttaatccaataaaggaggagaaatgattaaggcaagagctaagtttttgaatattaaagaaacagcagaaaatgatttctggaagatttatcaaaaacccgtcgaaagaagaataaacaaaacaagcaaggttaatgaaaacaagcaaagcttacatacgagtcagcactcttgaacaagctcgggaagaccgc

SEQ ID NO: 23685 - DNA, 260 bp, Unknown
  Description of Unknown: LeftRegion for integrase B10686 sequence
cactagccgccgcactcccgccgcccccgctgtctggttcacgccaggcggtgggggcggtttttttgcgtttcctcgccggccgtacggctcggtgcgctggtcggcgaccacttcgcacagccggcaacctacccccataagtagtattcgcggtcgggacacatgtataagggggtaggtcgcagtacgatcggcggatgctgagacccgctgccgcaggcgccgaaccgctgcgcgccttcatctacgaccgcaac

SEQ ID NO: 23686 - DNA, 260 bp, Unknown
  Description of Unknown: LeftRegion for integrase B10687 sequence
taaatatgattatgaaggtgaagatgctttcaaagttcttaataaaaataatgaacaaataggaagtattagaaaaagcgatattccaaaaatgaatgaaatttataataatattaaaaaagttaatgttttaggaacatcacattttaccaatgaagaaggaaatactgttctttcttgtcaagtaggtgttacttattatgaatgatattaaacgtggtgctttatatattcgtgtgtcgactgatgatcaaacagaa

SEQ ID NO: 23687 - DNA, 260 bp, Unknown
  Description of Unknown: LeftRegion for integrase B10688 sequence
taaatatgattatgaaggtgaagatgctttcaaagttcttaataaaaataatgaacaaataggaagtattagaaaaagcgatattccaaaaatgaatgaaatttataataatattaaaaaagttaatgttttaggaacatcacattttaccaatgaagaaggaaatactgttctttcttgtcaagtaggtgttacttattatgaatgatattaaacgtggtgctttatatattcgtgtgtcgactgatgaccaaacagaa

SEQ ID NO: 23688 - DNA, 260 bp, Unknown
  Description of Unknown: LeftRegion for integrase B10689 sequence
tcttttgaagtagtccctgaataaataaaagattgttttcagcaggtcaagcggtaatttttcaacatttcggatgataaattgctcatattcccatcgttccatatgttcgccccctttcggattactatgataaaacaaacggatgttcgggtcaacaaagagaaaaattgacgggtaaataaaaggacagggctaagatgctaaaccaaaaaggaatatatgcggcctacctccgcaagagccgcgcggacgcagag

SEQ ID NO: 23689 - DNA, 260 bp, Unknown
  Description of Unknown: LeftRegion for integrase B10690 sequence
taaatataaatatgaaggtgaagatgcatttaaggttcttaacaaagataataaacaaattggaagtattagaaaaagtgatatttcaaaaatgaacgatatttataacaatattaagaaagttaatgtgttaggaacatcacattttaacaatgaagaaggaaatactgttctttcttgtcaagtaggtgttacatattatgaatgatattaaacgtggcgcattatatattcgtgtgtcaactaatgatcaagtagaa

SEQ ID NO: 23690 - DNA, 104 bp, Unknown
  Description of Unknown: LeftRegion for integrase B10691 sequence
ctctcggtccccttcttgggcgcacaccccatctaggaggccccatgaagatcgttggctacgtccgtctctcccgtgcgtcgcgcgaggagtccacctcgata

SEQ ID NO: 23691 - DNA, 260 bp, Unknown
  Description of Unknown: LeftRegion for integrase B10692 sequence
gaaagaaaagtaagagaacaatttgatgatttcatcagaaattatcagaaataaataaaataaaaaatcccctctcctgcgccaacaggaaagaggattcatatagtggtcgcatgatacaaccaccactcgcaaaagtattgtatcataagaccgctttatttgctatacatttttataagcaaaaggaggtcttttttatgattatcgcagctgcttacgtccgcgtttctacggatgagcaaaccgattattccccc

SEQ ID NO: 23692 - DNA, 260 bp, Unknown
  Description of Unknown: LeftRegion for integrase B10693 sequence
ttaccgtttacatcaccaagaccggaaccaagtatcacagaagcggatgttcgtatctcagcaagagcaagatccccatttctctttctctcgcaaaatcctatgggtacacaccttgctcccgctgctggtaaaacgagacccactccccgccggtctgttccgcggcttcgtgaaccgcaattgaaaggaggcccgtcatgccagaactgaaaatcgccgcggtctacctccgcgtgagcaccgacgaccagaaggag

SEQ ID NO: 23693 - DNA, 260 bp, Unknown; identical to SEQ ID NO: 22864
  Description of Unknown: LeftRegion for integrase B10694 sequence

SEQ ID NO: 23694 - DNA, 260 bp, Unknown
  Description of Unknown: LeftRegion for integrase B10695 sequence
tatgctataaatgaaataagaaaactattaaataattataaaaaaagattaaaatatagatttagcccagatgaagatactaaaatttatttagtaaaatgtaaaaagtgtaataaaactattatggtatatgcttatgaaccattatcgcatattgatgaatgtcctaaatgcaaaaaattacaacaggagaatacagaatgaatgtagcaatatatttaagaaaatcaagagaagaagataatgaaacaagagaagaa

SEQ ID NO: 23695 - DNA, 260 bp, Unknown; identical to SEQ ID NO: 19742
  Description of Unknown: LeftRegion for integrase B10696 sequence

SEQ ID NO: 23696 - DNA, 260 bp, Unknown
  Description of Unknown: LeftRegion for integrase B10697 sequence
cgggtaccttatctgggacttccggctgccgaacgcaggcctcatcatcggtggcaatatgtcgcttgccgcgtggctggtcctgctgctggtcatcgcagccgcctacgtcatgggccgctgtctgcttcgtatgtcctcccggtatacgaagcgatcccacaccgtttttatcgaccacgagccgggaggtgacgagcatgactgatttgaaaatcgccgcggcctatatccgcgtttccaccgatgatcaggtggag

SEQ ID NO: 23697 - DNA, 260 bp, Unknown
  Description of Unknown: LeftRegion for integrase B10698 sequence
ttatctcagcaaaagcaagatacctatctcgctcagcaaagcaaaggaacagggatatacaccatgttctcgttgttggtaaacttcgggataaatcggtagattccggtttccgtcatgctttcaggtggcgcggaacttgaagcccgtacccgttgccgcccaagagcggcgtaataaacgaaaaggaggtccccgtcatgtcccccaatccccgcatcgccgccatctacatccgcgtcagcaccgacgaccaggcg

SEQ ID NO: 23698 - DNA, 260 bp, Unknown
  Description of Unknown: LeftRegion for integrase B10699 sequence
atatcacaaaaactttctgttatgaaatgagtttttgttatggtttttgttatggcaagaatggcttatttacgccatttttcggccctatataacagaataacattatttttattaatttctataataaataaatatatatagatatatataagtatatatagagaaaaataaaaatatataaggagtaggcgatttttttgttattctgttatgcccgaagaaatgaggacagaatgagagtaattatctatgtgaga

SEQ ID NO: 23699 - DNA, 260 bp, Unknown
  Description of Unknown: LeftRegion for integrase B10700 sequence
gacggagagatcacctgcgtcggcagagtgatcggcatcgcagagctgccggagtgaggtggcgttttactttacaaacaaaaaaatccgctccggcgctaccaacaccgggacggatatggaggtaaagtggtatacttgaacctcgacaatatcagtataccacatcctccgaaaaaatgcaaggaggattttttattatgagaaaagcagttttctacggacgctacagctcagcgaaccagaccgagcagagcatc

SEQ ID NO: 23700 - DNA, 260 bp, Unknown
  Description of Unknown: LeftRegion for integrase B10701 sequence
atgggaaaagctgcgatgagccaagcagatgagcacaatgcttctataaggtgtcccactgcatgcatctttagttatactccctgctcccccacccagatacctatatcttagcaattataccacaaacctcttaacggactgcttaacaactggtaaagaaatccttaaaatgccgtaactattgaggcaggcaggcaatgaaaacccgcgtggcaatctgggccgctgtgtcaagcaaacctcaagcggccggcgac

SEQ ID NO: 23701 - DNA, 260 bp, Unknown
  Description of Unknown: LeftRegion for integrase B10702 sequence
tgaataaaacatgattgacacaaccaatacgcccccgaccattgcccccttcgctcagatcattttcccagacgaaatactggaaccagacaccgacgcgcttgatgcggtcacgccgctacagcgtcagttggtcagcctaatcatttcgattgtcaacaaaaatgagagcagcaatttacctccgtgtctcgtcagagatgcagcacgagaatttcagcattgattcgcagcgccgaatctgtgctcaattctgcgaa

SEQ ID NO: 23702 - DNA, 260 bp, Unknown; identical to SEQ ID NO: 22849
  Description of Unknown: LeftRegion for integrase B10703 sequence

SEQ ID NO: 23703 - DNA, 260 bp, Unknown
  Description of Unknown: LeftRegion for integrase B10704 sequence
attctattagaattttgattagatcatcatatttcataattcaaccacccctattatagtataaaaaaaattcagatgatttcggcatctgaatcccataaggacatagaaatgtcttatgtaagaaaaaatttaccaaccacgatagactttttctatgtcctaattataacataaaagtttagttaggagcaaataaaatgaatgaaaaaaataataattttttaaatattgagaaattatataatgattactatata

SEQ ID NO: 23704 - DNA, 260 bp, Unknown
  Description of Unknown: LeftRegion for integrase B10705 sequence
gatcgtgaaaaggatctccggcgcagattaggatattacaaatagttattaagccgaagaatactacactaaataaaaagagctttccgctagatgcctgccccacaggcaccatacagaaagctctcatataggtatgttataataccctctcgcaaatcgtattatagcatacctctcatagatggaggtataaatatatgaaaaacgtagccgcctatgtcagagtatcgacacaagagcaggctgacgaaggatat

SEQ ID NO: 23705 - DNA, 260 bp, Unknown
  Description of Unknown: LeftRegion for integrase B10706 sequence
aagatatctccacaagatataatctcgtgatattgtacaattttgttttcccggataacagctgtttgttattcatattgaccaaaaacaaaaactccccggcgctggaacaccggagagctctcataacaggtatgatttgtgataccctttggacataagtattatatcataccttctttcaatggaggtataaaatcatgaaaaaagtggtaggctatgttcgtgtgtctacccatgagcaggcggatgaaggctat

SEQ ID NO: 23706 - DNA, 260 bp, Unknown; identical to SEQ ID NO: 23000
  Description of Unknown: LeftRegion for integrase B10707 sequence

SEQ ID NO: 23707 - DNA, 260 bp, Unknown
  Description of Unknown: LeftRegion for integrase B10708 sequence
ctggtcgctggaagagcatggatcgttgctcaatgacttcctgaaagaggttcgtgaccgccagggcgtaccgccgaagaagtagaagcttgcgacgtttaggcgtacgatgagcgatctgcttgctctccaaaacgtagctattgacgagaggggcagcacccctcataatcaacagccagtaagcggagaaacccctgatgaaaccccaaattggagcctattgccgtatctcgtatgaccgcgacggtcgagagctt

SEQ ID NO: 23708 - DNA, 260 bp, Unknown
  Description of Unknown: LeftRegion for integrase B10709 sequence
aatatatataaatatataagaaaaagagataaaaaagaaaatatataagaaattcaatatttttttgttattttgttatctggataaaaaaccgtccgagcggcaactcggacgataaaaagaaagtataagcctcgggagacttacatctaaataattatatcatatctctcggggatgaaaagggagataattttaaaatgagtattaaaaaaatcagtaataacagagtgatcctatacgtccgcgtatccacccaa

SEQ ID NO: 23709 - DNA, 260 bp, Unknown
  Description of Unknown: LeftRegion for integrase B10710 sequence
ttatatcaaatcgaagtctttagtcaatatataaaaaagagccagccactaaggaccagctccacagaatgattaaatcatccctagacaagttgtattttatcattctttggagcacccggtcaatcagaactgttgttcttcggttgggtgttatttttatactcatttttcataaaataaacaaaggagtgatagaaatgaaaacaggtgcattatacgtcagagtatcaacagatgatcaggtagagtattctcct

SEQ ID NO: 23710 - DNA, 260 bp, Unknown
  Description of Unknown: LeftRegion for integrase B10711 sequence
tgggcgttgcgccttctacggtcaatagctggttcaatcgttctgctgaaaatataacgttaaagactttgagaaagctcgcagacttcctcgaatgctcgattgattcgcttgtatatggagacgataaagactttgagttcgagagattttttatgcaagcattagcttcatatatggaaaagaggaaataaaagacgatgaaaaaagtgttattatatctgagaaagtcaagagacgacgaaaacgaaagtaaggaa

SEQ ID NO: 23711 - DNA, 260 bp, Unknown
  Description of Unknown: LeftRegion for integrase B10712 sequence
gaaatattataaatatatataatatatagatataaaaataaatatataaggaatttaaaatttttttgttattttgttatggacgaaaaaatccgcctcgaaaaagagacggatcacacataaaccccgagaggcttatataaactagacatttatattatagcatatcccccgggtacaaaaaagggagttgttggaaaatgaacgagacaagagtagcattatatccacgagtaagtacacaagagcaagctaaagag

SEQ ID NO: 23712 - DNA, 260 bp, Unknown
  Description of Unknown: LeftRegion for integrase B10713 sequence
atattttttcttggaggtcttttctttgagcaattacagcgaacgtgataaagccgttctggacagtctggacgagaacattcgtcttgcaccgcgtctcggagtctgcgccgataccttctatgccctgaagcaggagttcctgcgtgtcatgcgtgaacgcgacgaagccatccagaagctttcggaggtgcaagcgcatggcaaacactgatttgaccgtcgcggctgcctatatccgcgtctccacagaggatcag

SEQ ID NO: 23713 - DNA, 260 bp, Unknown
  Description of Unknown: LeftRegion for integrase B10714 sequence
ttggcaaaaggaaatattgtaacagtcagtgtgccagcacagctgaccagaattgaagatatctttgaacagacaaaacaaaagctgcatacctgcagccatcccactttaaatgaccatcctgtgaatgctgacacaatagcatccatcattgatggtctggatcttttattggaaatacagaaaagaaggatagaaaaatgaataagaaggtaagagtggctatctatgtcagagtatccacacaggaacaggcaaaa

SEQ ID NO: 23714 - DNA, 260 bp, Unknown
  Description of Unknown: LeftRegion for integrase B10715 sequence
aaaaaatcagcacctataaggtcacacttgctgttctgaaaaagtggcggaaagacggcattatttcggaacatgaatttcgtaaatgcgagttaaaaattgccgaaaaattcgatatatctttgtgcagtatatatcgtgaaactgcttgactttaggtcgcttctgatttaatatgtaacactgaggagggatactatatggcacgcaccataaaaaaggtcgaatttctgcctaaaatgccaaaactgctgaacgtt

SEQ ID NO: 23715 - DNA, 260 bp, Unknown
  Description of Unknown: LeftRegion for integrase B10716 sequence
caggtgctggcggtcgagcgggagtggtggcggcaccccggcgccaagctgaaggccatccactcgctgggcgtcaccgagacgcgctactaccagctgctgaaccggctggtggacaagccggaggctgaggcgctggagccggtgttggtgcatcggctccgcagggtccgggctacggcgaagcggagggcggcctgatggcccgtctgcgcccggttccgcaggctcagcctcgagcactcgcgctgatccgggtg

SEQ ID NO: 23716 - DNA, 260 bp, Unknown
  Description of Unknown: LeftRegion for integrase B10717 sequence
atctccagcttgatggtcaggacctttttgacgcccatacggcctccctcgccagtggaggactagtctgctcagccaaacgggtgagccgctggtgatctcggaagtcggggtcagaaaccctcaagtggatacgtttgagtgaacccgtggtgaagcaacttctgtcttaccccccaaccccgatatcgtcaggcgctatgaagaccccctccagggcccgcagggccggtctgtacatccgcatctctgacgaccgc

SEQ ID NO: 23717 - DNA, 260 bp, Unknown
  Description of Unknown: LeftRegion for integrase B10718 sequence
tcataaaagggtataacagcggcatagacataataatagacggcgcataaaatgccgaaatatggaattttgccctttaaggactggaaaaagctatacagccttgaaacttcaaaaaaggcttgtatgttaaaaaatggatttccaagaataggataagcctctccgtcaataaaataatttgacagggggcttttattatggaaacggcaatttatggcagagtttcgactgaagaacaagcacaagaggggtattca

SEQ ID NO: 23718 - DNA, 260 bp, Unknown
  Description of Unknown: LeftRegion for integrase B10719 sequence
tcaaagagaaatttaatgttatgacatctagagaagacggtataattgaattagatttagaatttgatgaagacaaataaaaaaagccccacgctcaaatttggcgaggagagcgtaaggcgaatctagtatagtaaaaacctgctttttgggaggggcttttaccatacccattttaacagaaaaatgaggtgaaaacaatgaataaagttgctatctatgtgcgtgtgagtacaactatgcaagcagaagaggggtac

SEQ ID NO: 23719 - DNA, 260 bp, Unknown
  Description of Unknown: LeftRegion for integrase B10720 sequence
tccttacagaggaagaatttatagctaagaaaaaaataattttaggaatttaaggtgtaaagttaaccgttaaaaaaataaaaagccccacgctcaactttggtcggtgcgagcgtgaggcaaatctagtatagtaaaaacctgctttttgggaggggcttttaccatacccattttaacagaaaaatgaggtgaaaacaatgaataaagttgctatctatgtgcgtgtgagtacaactatgcaagcagaagaggggtac

SEQ ID NO: 23720 - DNA, 260 bp, Unknown
  Description of Unknown: LeftRegion for integrase B10721 sequence
cctcagcccactcggcatagaggacgtcatcctcgcgtgcctgcacaatgggatcggtccccacggccgtctcgtacatgacacagactgtgtcatgtatcgcacatgacacgcaagcggcgacacgctcaccagcccaaacacaccccacagagagttcaagtgcattctgcaattggtaaggagaatgtccggagtaggtgaactatgctgacctggtgattggtgacctgtacgcgcggaaaagcaccgtcgaccag

SEQ ID NO: 23721 - DNA, 260 bp, Unknown
  Description of Unknown: LeftRegion for integrase B10722 sequence
atataaatatataaaagaatatatataaaaataaaatatataaggaattacaattttttttgttattttgttatatcgtaaaaaatccgaccaggcggccacctgatcggacagttaaatattataagcctcgggagacctataacaactaaataattatatcatatctcccgaggtaggaaaaagggagataataaatcatggtaataaaatccattaacaaaacacgagtattactttatatccgagtatcgactcac

SEQ ID NO: 23722 - DNA, 260 bp, Unknown
  Description of Unknown: LeftRegion for integrase B10723 sequence
ctggcatactggacgcgattacgcatgaagaatcgcggcttgggtgatgacgacggcaagatgacaatcacggttgagtcgttcaaggggagtctgcagaaggcgtatgggcagggatcgtcagaccggaaagatgtcgagacatctcttggtggtgtgagtggtgatttgtttggtgacttgtttagagaaaggcaaccatgagctacgcatggatatactgccgcgtatcgaagaaggaacaggctgccgatggcacg

SEQ ID NO: 23723 - DNA, 260 bp, Unknown
  Description of Unknown: LeftRegion for integrase B10724 sequence
tatgaaaacgccgatgatgaaacggaagaaatccgcctcgcatagcacggataacccgctatatttacggcggaaaataaaaaacaccgtaaacggcggcacttgtaaaaagcactgccgtttacggcgaaaggaggatcgtgaaaatttatcataagtctattatagcataaccgcaaagaaaaatcaaggaggaaaacatgaaaaaagcagtattttacgggcgttattcgtccgccaatcagaccgagcagagcata

SEQ ID NO: 23724 - DNA, 260 bp, Unknown
  Description of Unknown: LeftRegion for integrase B10725 sequence
cgatgactcagacatcactccggagtttttggagtctggtaaaaaagtatatgtctgtgtcgtcgatcgaaaatccggtgagatcgactatctccccgatgacgccatctccggggactgataaaaaggtccccgggggaccatgaggggtctcccggggaggatgttgagtatatagtaggggtttaaaagattataccatgagcgatgtgaaaagggtagctatctatacgagagtgtcgacgcaggagcagtcccag

SEQ ID NO: 23725 - DNA, 260 bp, Unknown
  Description of Unknown: LeftRegion for integrase B10726 sequence
gggtagtgctcaacgtcgatgcgggtgacctgcggccaccagtccttctcttccgcatgcttgcggaatcggcgctgaccggagcgtgtaatgcccgcgtagagcagtcggccgtcggcgtccaagaagcgatagacgctcacggccagacttgtaggcgaaccggcgttcgtagtgtttcggtcggtcattcgcctattatgctccgcgcgatggcggaatgggccggaatcgtccgcgtcagccacatgggagcacga

SEQ ID NO: 23726 - DNA, 260 bp, Unknown
  Description of Unknown: LeftRegion for integrase B10727 sequence
gagtacgccccatctgatgagaatgtgccgggcgggcacgggataggcggttacatcaaggcggaccagctatattattttaagcgtgatcttattgaatactatgtcataggcagcgtttccccggagctttttatccgcctaaaggaatttatcaacaggcttgattccatagaacgcattacggataatcttgagccatgtcgatgaagaaggcggctctctacatccgggtctccaccctcgagcaggcgcaggag

SEQ ID NO: 23727 - DNA, 260 bp, Unknown
  Description of Unknown: LeftRegion for integrase B10728 sequence
ctcacgctgctgctacgccacacacagggaccgatggaggtttgacctcggaaagtacgggacgtgccctaaatgtggttccagcagccggagaaatgcagtagaatgggaatacgtcgctaaggtgaatgggtactcccctgaaccgatggacaatcaaccttattccatccaaccggaattattctagggggaacgacatgcgcccagctttatacgttagggtatcgacagaggaacaggcggtaaagggtaattcc

SEQ ID NO: 23728 - DNA, 260 bp, Unknown
  Description of Unknown: LeftRegion for integrase B10729 sequence
aacgttccccgagctacgcccccgagccctcgaaacgggccccccgtagctccccctcgatgggccagattggcccatctaccaggggcgatgcgtgttcccccttgggcgggattggtcacagtgccaaccaagggggaacatcgggtaggctcccccgtggcactagaccggtgccgaatatgagaggatataaaatcatggctcgctcacgattcgataagaccgaatcacaaaccaataacgatgaggaaatccga

SEQ ID NO: 23729 - DNA, 260 bp, Unknown
  Description of Unknown: LeftRegion for integrase B10730 sequence
tattaacgcttggtatactaaagactataaagggataacccttaaaaacttgataaaattaagcaattgctttgatattactatagaggatcttgtaaacggagatattaaaaaccttagctttacctctaataactactcggactcggagctaagagctattaaagatttttcggagtatcttaagaggagccgcgataatgagtaacacggtcgccatctacttaagaaaatcaagagacgaggataacgagactaga

SEQ ID NO: 23730 - DNA, 260 bp, Unknown
  Description of Unknown: LeftRegion for integrase B10731 sequence
atgattatgaaaaccgagaggagttagagggggataaagaagattctgcggcaatctaacattatcccgatagagttattaagaaggaaaaagctattggaggtgagattatcaaagcggtaatctatgctcgatactcgagccacaatcagcgagaggaatccatagaggggcagattcgagagtgtaccgagtttgccatgaagaacggatttatcatcgtagacgaatatattgacagggctatatcgggtaagacc

SEQ ID NO: 23731 - DNA, 260 bp, Unknown
  Description of Unknown: LeftRegion for integrase B10732 sequence
gcgtagctccttctacggtcaatagctggtttaatcgctcggctgagaatataacgctaaagactttgaaaaagcttgcagacttccttgattgctcaattgattcacttgtttatggagatacgaacaaaaagaatctggaagaatattttttacaggcgttaacatcatatatcgaagaaaagaggaaataaaagaaaatgagaaacgtattattatatttaagaaaatcgagagacgacgaaaacgaaagtaaggaa

SEQ ID NO: 23732 - DNA, 260 bp, Unknown
  Description of Unknown: LeftRegion for integrase B10733 sequence
accagagcgtgatatgatctggccttagtaagattattgttagggcaataatcagccagataatcacacgtggagaaatccacacgggcgtcacctcctctattcagtttgggagagcttatccctctcccaaaaaccattataacagcagccggttggaatatccaactggcttttattttttctatgaggatgattatatgaaagtagcagcttatactcgcgtcagtaaagaggaacaagccgagaaagacttatcc

SEQ ID NO: 23733 - DNA, 260 bp, Unknown
  Description of Unknown: LeftRegion for integrase B10734 sequence
gaaggtattggcattactttgatgagatattatagactccaaaacactttagtattagagccagatagttataatcatcaaaattcggctcttacttttgattggaataatgagattagcacgaaagtaaatatattaggtaaggtagtgtggtacatgtcgccattcaacacaaaatactaggcaaggaggaatataatatgcagatacttggttatatacgagtgtcgactgaggaacaagcaaatgacggaaactcg

SEQ ID NO: 23734 - DNA, 260 bp, Unknown
  Description of Unknown: LeftRegion for integrase B10735 sequence
cgactcacttgtctctcaaaaattaaatggagacatggaagtaaaagttaaataaaaaaagccccacgctcagaagtttggcgaccgagagcgtgaggctggtaattacaagaaaggattttcatggagataacctcgcatgatgtcttttcttgtacctattttatcattttttaggaaattttgaaagaggtactactatgataactacaaataaagtggctatatatgtcagggtatcaacgacaaaccaggttgag

SEQ ID NO: 23735 - DNA, 260 bp, Unknown
  Description of Unknown: LeftRegion for integrase B10736 sequence
aaaacaagacgatggttctttcttgttgacttctaaagtcagctcaggtctagaataaaaaagacaacaaaaaaaaccccacgctctcggtcggcaaacttctgagcgtgaggcatgtgacaggaaaagattttcatggagataacctctcatgatgtcttttcttgtacccattttatcaaaaaagaggtacaaattcaatgataactacaaataaagtcgcaatctatgtcagggtgtctaccacatctcaggcagaa

SEQ ID NO: 23736 - DNA, 260 bp, Unknown
  Description of Unknown: LeftRegion for integrase B10737 sequence
acattttcttgacataaactaagaaaatcgttatttagtgaaagttttagttgcatttagtaatagttgaataaatttcccataaaccttattcaattgtttcaagatataagaatattttatatatttgcattaaataatgcaaaggcgttcaagcaagcttgaatatatttgcattatgaaacacaaaacataatgcgatgagtaaatgtatcattttgagtagagtatctacagctaagcaagagcttgattctcaa

SEQ ID NO: 23737 - DNA, 260 bp, Unknown
  Description of Unknown: LeftRegion for integrase B10738 sequence
gcaggccgtccgcttggagtgcgaccactacaagcgtgagatcgagctgtataaacgctcccttcgcacgcaccgcatcgtcactctcatcctcgttcccatcctcgcccttgtcgtgatctcgttggtcatcgatctcctcaacccctatgtcggctggattcgcgataccatgtccattttacgggaggtttccgtctatgcctgaaccacgcattgcagccgcctatatccgcgtctcaaccgatgaccagatggag

SEQ ID NO: 23738 - DNA, 260 bp, Unknown
  Description of Unknown: LeftRegion for integrase B10739 sequence
gaaagcattgcctacatgaagaaaaaagaaaaaagctatctgcggttgatctgcactttgtccattgcgctgtcggttacgcttgtcgttatcattgcggcgctggtgatggatatgatgaacccggataaaggctttttctggctacggagtatgctatagcaacacgaaaaacggaggaacaaagggagagaaaacacatggaaacagggaaatttatgggcggagaaaactatatcgaagaggtggcggcctatatc

SEQ ID NO: 23739 - DNA, 260 bp, Unknown
  Description of Unknown: LeftRegion for integrase B10740 sequence
gtggctgttcctgtccattccccgtgtcctgctgcacatcggcagaaagaagaagtatgtaggcgattccaaaagcacaaccaagaacaaggtacagtacaagaccgtctgtgtctgccagaattgcggtcataactgggtgaagtaatcagaccattttcgtgacctcacgaaaatgataggaaagagaggtggcatctttggcagctcctaggaatacaaagcgtggcagaaaagccgaggccgaaaccattggtgtc

SEQ ID NO: 23740 - DNA, 260 bp, Unknown
  Description of Unknown: LeftRegion for integrase B10741 sequence
atgaatttgaaaacagaaaagaattagagggggataatgacacagctacggcaatctaaagtcattccctttgagttaattaaaagaaagaagcaactggaggtggtactacgaaagcggtaatctacgctcgttattcgagccacaaccaaagggaagaatccattgagggtcagcttcgagagtgccacgagttcgccatgaagaacgattttgtggtgatagacgaatactgcgacagagccatttcgggtaagaca

SEQ ID NO: 23741 - DNA, 260 bp, Unknown
  Description of Unknown: LeftRegion for integrase B10742 sequence
taaagcagaagaatcgcagtaaacaaaaaaaccgctcccggtactgggaataccgagagcggaaccatacacacgggcgcatatggtacgcataacgcataaatattgtaccatacccctgtgatatttgcaagcacaaaaaacgcaacacaggggatttttgcgcccttttttgagtatatcttaaaaagggggatgttatgaacaccgatttaaaaacagccgcggcgtacatccgcgtttcgactgacagtcaaaca

SEQ ID NO: 23742 - DNA, 260 bp, Unknown
  Description of Unknown: LeftRegion for integrase B10743 sequence
gtctcgttatttttctcaggcttgcattgtggaatcaaccgagctgtatttgaatatttgttccgaaaggaagaagaggcagaaaacgagctgagacctcttagaaaacagctgtccgctattgaacgcaaagaaacagacgagcttattgagaaattggagcgagagagaagcaccaagaaaaaggggaattaacgaaaatggaaatgaaagaattaaattcggaagatttgcaagtgaggaacgtgctgagcgtcgag

SEQ ID NO: 23743 - DNA, 260 bp, Unknown
  Description of Unknown: LeftRegion for integrase B10744 sequence
tatggcagataatatatgaagcaattttaacaatagcatcaggaattatttctcttgtttatacagttatttgggaaaaagatcaaaaatcaaaattgaacaaagtaacatatacctatgaataattaacaggccatactcaaaccgggtatggtctttttgttacccctatcctacaatacagacaaggagtgatatagatgaagatagacggcacaaccagcagtggtttacgagttgcaatctatacccgcgttagt

SEQ ID NO: 23744 - DNA, 260 bp, Unknown
  Description of Unknown: LeftRegion for integrase B10745 sequence
cgggatttggtgggcgcttttgcacaaggtctcttgcaaaatcgcaaaccatagctttttccgcgtctgtcagttggtcaaagattgcttttacttcttcgatggtcattgtttataactcctttttgttttcggctgtcgccgtgtttatagcgtaccaaaaacagacgggagattttgtaaaaaataggaggtaacaaatgggcggcggttttaaggtcggcgcggcctacatccgcgtgagcacggtagaacagact

SEQ ID NO: 23745 - DNA, 260 bp, Unknown
  Description of Unknown: LeftRegion for integrase B10746 sequence
ctttctaaaggtaacatagtacctttagaagacattaaacctatagaacaaaataaagatatgagtcatcttaaagcttatatgaaggctttttacaagttagataataaagaattaacagactcagagaaagagcttataaatataagtatagatattatgctagaacaaattagaaaacagagggagaaaatagcaaaatgacaaagaaaacaaaagtagctatttatgtaagagtatccactcaggaacaggctaag

SEQ ID NO: 23746 - DNA, 260 bp, Unknown
  Description of Unknown: LeftRegion for integrase B10747 sequence
gaaatcacgctggctcccggcactgtcttggttcgtgaatgggccgagcgtgaccactacgtgaaagtaaccgccgaggggactttcgaatacgagggcaagtacttcaagagcctatctgcggtggctcgccacatttctggcagctcgtggtctggcccactgttttttggcctgcgccgtccagcggagagtgtgctgtgaacgacaccccgagcaaaaaagcgcgccagcgctgcgcggtgtattgccgcgtatcc

SEQ ID NO: 23747 - DNA, 260 bp, Unknown
  Description of Unknown: LeftRegion for integrase B10748 sequence
cagcagctcaaagagatgggctctgacgcagtgtttattcagtcgctgggctggaaatctactaagccggtgttcactgcgaacgcgaagcatgtgtcagctcgtcagtaaaatccgaggtcaatttaaggaagggtggagccttgtcaaaagcgtggatctattgcagagtcagttcaaaagagcaagcaataaatgggatgtcattgacatctcaattcgaagagtgccgcaaacatgtcgacttcaagggcctgcaa

SEQ ID NO: 23748 - DNA, 260 bp, Unknown
  Description of Unknown: LeftRegion for integrase B10749 sequence
ttgacggcgaggaggctgttgttaaaaagattaactacggcgataactggatagaacttgaatcattcaatccttattatccaccgcgccgctttgagggttcggacgttcaacagatccgcgtcgtcggtctcgtccgtgaggttagcaaagaattgcagtaaaggagaagttatttatgaaaaagaaagggggatgttatgaacaccgatttaagaacagctgctgcgtacatccgcgtttcaactgacagtcaaacg

SEQ ID NO: 23749 - DNA, 260 bp, Unknown
  Description of Unknown: LeftRegion for integrase B10750 sequence
agatccataacgtgatggtagccgtatttgatacggctacttttctttttatctagcaactgtttccattttggaaacaactcaaaaaagccccacgctcagaagtttggcgaccgagagcgtgaggctaggagcaagaaaaaagcattaaaaagctgtttttcttgtacctattttatcaaaaaaggggtacaaattcaatgaaaacaatgaataaagtggctatatatgtcagggtttcgacgacaaaccaggttgag

SEQ ID NO: 23750 - DNA, 260 bp, Unknown
  Description of Unknown: LeftRegion for integrase B10751 sequence
tgatacggctacttttctttttatctagcaactgtttccattttggaaacaactcaaaaaagccccacgctctcggtcggcaaacttctgagcgtgaggctagcaattacaagaaaaacttttcaaaagatattaccttttgagatgttttcttgtacccattttatcattttttaggaaattttgaaagaggtactactatgataacaacaaataaagtagctatatatgtcagggtatcgacgacaaaccaggttgag

SEQ ID NO: 23751 - DNA, 260 bp, Unknown
  Description of Unknown: LeftRegion for integrase B10752 sequence
gcaggccgtccacttggagcgcgaccactacaagcgtgagatcgagctgtataaacgctcccttcgcacgcaccgcatcgtcaccatcatcctcgtctccatcctcgcccttgtcgcgatctcggtggtcatcgatcttctcgttcccaatgtcggctggattcgcgataccatgtccattttacgggaggtctccgcctatgcctgaaccacatatcgcagccgcctatgtccgcgtctcaaccgatgaccaaatggag

SEQ ID NO: 23752 - DNA, 260 bp, Unknown
  Description of Unknown: LeftRegion for integrase B10753 sequence
cttcaacaacacttatcgaaagaataaaaccaactgtttccaaaatggaaataactcaaaaaagccccacgctctcggtcggcaaacttctgagcgtgaggcatgtgacaggaaaagattttcatggagataacctctcatgatgtcttttcttgtacccattttatcattttttaggaaattttgaaagaggtactactatgataacaacaaataaagtagctatatatgtcagggtatcgacgacaaaccaggttgag

SEQ ID NO: 23753 - DNA, 260 bp, Unknown
  Description of Unknown: LeftRegion for integrase B10754 sequence
tattttaagttatgaagcctctgctatgggtgtaactaaaacaataaaaatggaaaaaaaataaaaaaaagactaaccgctgcaacgattagtcaaaggtacataaaaaattatatttatctcacaacagacaaatcttttttatgtacttcaattttactatatttttttaaaaatgtaaatattggaggtaattaattatgaatgaaaattttttagattttgatagtctatataatgactactatttaaaatcaaat

SEQ ID NO: 23754 - DNA, 260 bp, Unknown
  Description of Unknown: LeftRegion for integrase B10755 sequence
tcgttttagatgctaatgcgaaagtcattgcacaggagcaaaacggtaaaatggttttagataaataaaaaaagccccacgctctcaaactttggcgagtctgagcgtgaggcaatgcaagacaaagaaaggtttcaaaatgaatattttgaaaggtgtctttctatactctattttagcagaaaaggagtatagaaacaatggataagatcaataaagtcgctctatatgtgcgcgtttctaccacttctcagatggag

SEQ ID NO: 23755 - DNA, 260 bp, Unknown
  Description of Unknown: LeftRegion for integrase B10756 sequence
aacttgtaaaatatgagaaatttactcaggaagaggcagacagcgctgtttctaatctaaattaataaaaaaagacctcacgctcacaaagtttggcggctttgagcatgaggcatatgacaggaaaagattgtcatggagataacctctcatgatgtcttttcttgtacctattttatcaaaaagggggtacaaaatcaatgaaatcaataaacaaggtggctatttatgtcagggtatccactacctcacaggctgag

SEQ ID NO: 23756 - DNA, 260 bp, Unknown
  Description of Unknown: LeftRegion for integrase B10757 sequence
gcgcgtcggcgtcgacgacgcaaccccaaccgtggcgagtggatagacctcctggtgccgctggcgttcctggtgctgctgattcgcggccgaacgattcaagtcggcgcctgactcgctaatagctattcaaactgtcacgcgattgcaacgcctggttaccgtcatatcgcaccgctgccgaatagcatacgcaccatatgacagtaaccagtgtgcagacccgcgcccgcgccggtgtgacctacgccgtcggcgtg

SEQ ID NO: 23757 - DNA, 260 bp, Unknown
  Description of Unknown: LeftRegion for integrase B10758 sequence
aataaatgcatggtacacaaaagactacaaaggaattacattgaaaaatctgagcaagctggcatcatattttgatgtaagcatggaggctcttgtgtatggagaaaagccatcattgacattcactctggagaatttctctgaggctgaattgaaagccatttataaatattcagaatttatcaaggaaaacaggtctgatgagtaatgttgcaatatacctgagaaaatccagagatgaggagaatgaatccagagat

SEQ ID NO: 23758 - DNA, 260 bp, Unknown
  Description of Unknown: LeftRegion for integrase B10759 sequence
cgtcgaagccgcagggtacgaccccgccgaggatcgagcggcggacgtcgtagctgcgggccctctcggcctcgtggtcgatggttgtgttttgcatgaccattacaacgtccccccaggtcagggtacctcccgggcaacctgaataaatggttatttgtccccatggcgcacacgatcgatacggaaaccctcttatcatggagtgcatgaccaggacctccaccctcggcggggcgcctcgctgcgccgccgtgtat

SEQ ID NO: 23759 - DNA, 260 bp, Unknown
  Description of Unknown: LeftRegion for integrase B10760 sequence
gatgcttgcggtcggtatcacgtccgttgttggaaggagatcccgcggcgtgaatattgccatcatgattctctgcggcattggaatgatattcggcttctcgatggccggagaatatacggacctgatcatctggacctgctggcttgcggttttgttcgtaatggcgctgattgcccttctcagattcaagaaagcaaatggacgttaagatagccgcctgctatgtccgtgtatctacggacgaccaacaggaatat

SEQ ID NO: 23760 - DNA, 260 bp, Unknown
  Description of Unknown: LeftRegion for integrase B10761 sequence
gagacgaagcccgaaaataaaggatttctttttcacaaaaccaccgcaccaaaatattattttgatgtggtgtttgatgtgaataatgaaaatcgattcgcccggtcgatggattttcacatcaaaatttttcgttttgcggtgtttgatgtgaatttgatgtgaaagttttgtgaatgaaaaaggagagacaacgaaaaatgaaaagagttgctttatatgtaagagtttcgactcaagagcaagccgaggagggatat

SEQ ID NO: 23761 - DNA, 260 bp, Unknown; identical to SEQ ID NO: 22754
  Description of Unknown: LeftRegion for integrase B10762 sequence

SEQ ID NO: 23762 - DNA, 260 bp, Unknown
  Description of Unknown: LeftRegion for integrase B10763 sequence
actataaagagactattaactcagtatttgaggttaagcctagagacttgagcgagatacttaatatgagtatagacctactcactcaagacgatattataattgagggtaagccagttaataaagataatattaacgctttaatacattatatggagtttattttagagttagctaaaaaagataaggaggactaagagatgttagtaggtatttacactagagtatctacccaagagcaagtcgagggttatagttta

SEQ ID NO: 23763 - DNA, 260 bp, Unknown
  Description of Unknown: LeftRegion for integrase B10764 sequence
aaaaacatttctaataaaactgaactcaatgaaatagttgagcatactccagagaacattgaaaaatttagattcctaacaattgatggaaagccaatgaacaatgaggaaattgaattgttattggactgtttgaatttgacaattggactaattagaaaacaaagagaaagaaaaagtatttaaggagtagatgaaaaatgagagttgcattatatgttcgtgtatcaactcaagagcaagcaagagagggatattct

SEQ ID NO: 23764 - DNA, 260 bp, Unknown
  Description of Unknown: LeftRegion for integrase B10765 sequence
tgctcgggcgatgctaagagcgtttcaaattataaatttgataaaataactaaatggtaataaaaaagactagaactgctggaacagtctagtcaagcacataaaaaatataaaatccgctcggaaaataggattaatctttttatgtgcctctattatatcacttttatataaaaaagtaaattggaggtaagaaaaaaatggataattttttagaatttgacagtgtttataacgattattatttaaaatcaaatgaa

SEQ ID NO: 23765 - DNA, 260 bp, Unknown
  Description of Unknown: LeftRegion for integrase B10766 sequence
ctgctagcggttcagccgcttgtcgttgcgtacggcctggtcactgaccaacaggcggcgctgtgggttggcctgggttcggctgtgctgggcctgaccctggcatcggccaacaccaccaccaaaaagggtgaccacgccgcgtagcgtcggcagtgtgaactaggcaagcaacacgctcgtgtagtagtttgcagtgcatgaccacacaagccgccctgtacgtacgtgccagcctcgacaagaccggcgagggtgag

SEQ ID NO: 23766 - DNA, 260 bp, Unknown
  Description of Unknown: LeftRegion for integrase B10767 sequence
ggcgaacacctgcgagccgatggtggccgagtagccgaccgggacgtgtggccggtcgctggtggtgaagtcctcgttgcagacgatgcaggcgagcccgttcgcctgctcgttgttcaggtcgtggaagatcgcgttcacggacggtccttagtgtgattcaacatgtctctcgaacgagaggttatgctaatcacactatgactggcaatggtgtacgcgcggccgtttactgccgtatcagccgcgacagcgaagga

SEQ ID NO: 23767 - DNA, 260 bp, Unknown
  Description of Unknown: LeftRegion for integrase B10768 sequence
gagcggatcaccatatccgatgatgaggtcatatttcaactcaaagaaggaggcgcataccgatggcaaagacagtgagggtgattcctgcaactcccagagtgtttcggtcagaagttgcggcagaaccaagacggcgcaggacggcagggtacgccagagtttcgaccgaccatgaagaacaggcttccagttatgaaatgcagatggcgcattacaagaactacatcgaaagccgcgctgactgggatttcgtcggc

SEQ ID NO: 23768 - DNA, 260 bp, Unknown
  Description of Unknown: LeftRegion for integrase B10769 sequence
acttgctgaagaaagtggcgttgtaaacaaatctatgaaagtaaaagtaaacaactaaaataaaaagcccctgctctcctcgaccaaaatttgagcatgggacttaaaccaatttgaaaagcaacctaaaacactaagggtataggtcttttttctataccctattttaccataaaacttacaaaatagggaggctaacgatgaataaagttgctatttatgtgcgcgtgagtacaaaaggacaagcagaagagggttat

SEQ ID NO: 23769 - DNA, 260 bp, Unknown
  Description of Unknown: LeftRegion for integrase B10770 sequence
acttgctgaagaaagtggcattgtaaacaaatctatgaaagtaaaagtaaacaactaaaataaaaagcccctgctctcctcgaccaaaatttgagcatgggacttaaaccaatttgaaaagcaacctaaaacactaagggtataggtcttttttctataccctattttaccataaaacttacaaaatagggaggctaacgatgaataaagttgctatttatgtgcgcgtgagtacaaaaggacaagcagaagagggttat

SEQ ID NO: 23770 - DNA, 260 bp, Unknown
  Description of Unknown: LeftRegion for integrase B10771 sequence
tttgcattcaaaacctcaccccaaaacaccacctggccccagatgctggcggtctggcaagcggccgacgacatcgacgtctacgactcggggtggaccttcgaccacttctacccgatcttttccgacagcagcgggtgcctggagggctggacgacgttgactaggcttgtgccggtgtcaccactataatacaaggtgtgcataccgcgctatattcccgcgtgtcgcaggacgcgaccggtgaacggctagccgta

SEQ ID NO: 23771 - DNA, 260 bp, Unknown; identical to SEQ ID NO: 23769
  Description of Unknown: LeftRegion for integrase B10772 sequence

SEQ ID NO: 23772 - DNA, 260 bp, Unknown
  Description of Unknown: LeftRegion for integrase B10773 sequence
tgtactcttctttcatagcttggccccctagcagtgagaacgaatgttctgaatatagtataatatactattatattcaaaacaatggaaattgtttacaatattgttataactccgggggcgtgtcgaagtatatcaaaattagtatatgtataaaattttttttaaaataataaaaagggtataaaggagatggtttcatgtatacagtttataaacaattagaggaatacagacaagaaagaaagcaggtccgggtg

SEQ ID NO: 23773 - DNA, 260 bp, Unknown
  Description of Unknown: LeftRegion for integrase B10774 sequence
agaaggttgaccaaataatagaaagtaacaaataaaaaaaatcgccctctagtgctggaacactagagagcgacaccattacacagggtgcaatgatacatcaaaatgcaagtaatattgtatcatacccttgtaaatttttcaatataatttacaagggatttttgcacccttttttagataagaaaggagcaaaataaatggatgatttaaaaatcgcagctgcttacatcagagttagcacggatgatcagacagag

SEQ ID NO: 23774 - DNA, 260 bp, Unknown
  Description of Unknown: LeftRegion for integrase B10775 sequence
acgctagtctacttctttgaaaaaagcagttttccgaatatctacacattcgatacgccgattccggtggaaatctatgacaggaatctgacaattaccatttctgaattgctgtaaaaactaattgcaagacaagatgaaaaataaaaaaatccgtccgctggaaaacggacggaactatttttaaagggggtatttttatgaagacagccgcagcatatatcagagtcagcacagacgaccagacggagtattctccg

SEQ ID NO: 23775 - DNA, 260 bp, Unknown
  Description of Unknown: LeftRegion for integrase B10776 sequence
ctacctgctgggatatactgataagattgagaagccggcaggcgatgaaacggaccccgccaccaataagtttctggccgtaactctggccgagatcgacctgatcgaagcataccggcacgccggagctgagacccaggcagcgatcagagcgatcctgcacatttaacgggagaaccccgggaagggaggacggtgccatgcgcggcgtcatttatgcgagatattcaccaggcccgcaccagacggagcagtccatc

SEQ ID NO: 23776 - DNA, 260 bp, Unknown
  Description of Unknown: LeftRegion for integrase B10777 sequence
ctatttgctggggtattctgataaaatcacgcggctgtccggggatcacaccgaccccacatccggcccctgtgttgaagttactgctgcggagctggagctgctgaaggctttccggcacgccggagctgagacccaggcagcgatcagagcgatcctgcatatttaacgggaggaccccgggaagggaggatggtgccatgcgcggcgtcatttatgcgagatattcaccaggcccgcaccagacggagcagtccatc

SEQ ID NO: 23777 - DNA, 260 bp, Unknown
  Description of Unknown: LeftRegion for integrase B10778 sequence
cgacggcgataccgttgtcggcagcgtcggcgatgagacgtttgtgaagacgctccgccagaagtccgatcacttcgtcctgcaggggacgaacggcaaggtcgtgcaggccgcggacgcgacgatcgccggcgtggtgatccaggtcgtgcgggatgtgccgcgggggtaggagagttctccccgctcagggaggcccgatgcgagccgtagcctacatccgcgtcagcaccgaagagcagtccggccccgggcacgtc

SEQ ID NO: 23778 - DNA, 260 bp, Unknown
  Description of Unknown: LeftRegion for integrase B10779 sequence
tgaggaagaagattgcctttgggaagaagaacagcgcaaaaaggaaaacccgccgaccgaataaaacagtcggcaggcaataaaaaatccgcccggcgttaccagcaccggacggattgaaaagaggaatgcggtatacattcactccctacaagctaagtataccacattcctcctgaaaaatcaaggaggaattttttatgaagaaagttgcattctacgggcggtattcgtccgctatgcagaccgagcagagcatt

SEQ ID NO: 23779 - DNA, 260 bp, Unknown
  Description of Unknown: LeftRegion for integrase B10780 sequence
tgttctgtctctcttgaagcgtgccaaaattaagtatatttccgcttttgtccgtggtggtaaatactgctatcttgggaatcttgataatatccttgaagaagaggtttctccgagcatcactgtccgtattgcttatagcaagtaataaaaagtccccggcgtgatccgccggggacgctttgcaaagaggtgaaccgatgaagaatgcagctgcctatctccgtgtcagcacagagaagcaggacgaatacagcctg

SEQ ID NO: 23780 - DNA, 260 bp, Unknown
  Description of Unknown: LeftRegion for integrase B10781 sequence
cttgaaaataaaggatttctcttgtgacctctttgtgactgaatgtgaccgcaaaattattttgaagtcacaaaacgagtcacaaatcaatcgcccgaaaatttttgtgacctcaaaagtgaccgcaaaagtgaccgcaaaaatcactttcggtcacattgaagtcacaaacaagtcacaaaaggaaagagagacaaccaatgaaaaaagtcgttttatatgtcagagtctcgacaaaagagcaagccgaggagggatat

SEQ ID NO: 23781 - DNA, 260 bp, Unknown
  Description of Unknown: LeftRegion for integrase B10782 sequence
gggcatagccatcgggaccatccgcagcgccatggccaacctgcgcgagcgcgggctcatcgtgtccaccctcggcaaggggacgttcgtcgcgggcgcgcccagcgcgggatgactacctggccaggaggagacatgagaccatccaagcatgcactcacccgggtatcatcagacggtgaccactacaggtaaccgtcatgccgccgcgtcccgctgttaacgcggggccggtcagggccgggatctactgccgcatc

SEQ ID NO: 23782 - DNA, 260 bp, Unknown
  Description of Unknown: LeftRegion for integrase B10783 sequence
gaaaataaaatccccctcctttgaaccttgtgatatccttgatatcatagggttttttaatacaattaaggtggtgcccaaataggaagttggatgaatccatttttctaagtggacacataggacaatccttgatataattgggtttcaggtggtttactacctgaacacaacaattattgagagaaggaaatcacatcatggcagaccatattgaaacatttaaaaagattaaaaaagtagcaggttttttgaggata

SEQ ID NO: 23783 - DNA, 260 bp, Unknown
  Description of Unknown: LeftRegion for integrase B10784 sequence
acttgctgaagaaagtggcattgtaaacaaatctatgaaagtaaaagtaaacaactaaaataaaaagcccctgctctcctcgaccaaaatttgagcatgggacttaaaccaatttgaaaagcaacctaaaacactaagggtataggtcttttttctataccctattttaccataaaacttacaaaatagggaggctaacgatgaataaagttgctatttatgtgcgcgtgagtacaaaaggacaagccgaagagggttat

SEQ ID NO: 23784 - DNA, 260 bp, Unknown
  Description of Unknown: LeftRegion for integrase B10785 sequence
tgtgcatgatacgaacgaggtacagcttgcacacgaagaaaatggcgtgatgatttacgacaaataaaaaaagccccacgctctcaaagtttggcgacttcaagcgtgaggtttgaaaagataaagaaaggatttcaaaatgtttattttgaaaagggtctttctgtactctattttaccagaaagagggtacaaagacaatgaataaagtagcattatatgtacgagtctccacgacttctcagttagaagaaggctac

SEQ ID NO: 23785 - DNA, 260 bp, Unknown
  Description of Unknown: LeftRegion for integrase B10786 sequence
gacgatcacgagcagggccgtgcgaacggggtgggacttcttcggggcgggcttgaagttctgcgggccctcgaacggcgggtggttggacggctggttcgggtactgctggttcatggtgccccttgcgtaggattgtgtaggtgtcatcctgcggaaccagccgcgcattgtcaagcccgcacgtatatagtgctgccatggatactccgaagagtgcgggcgtctactgccgtctcagctacagccccgacggttcg

SEQ ID NO: 23786 - DNA, 260 bp, Unknown
  Description of Unknown: LeftRegion for integrase B10787 sequence
tgagacattgtgtgttaccagtaacacattctgtaaactcgggtttacattttgtgtccccggggacacattttgtcttgtcgacaagacattttgtcaccccggggagacattttgtgccatcaatggcacaaaacgaaaaaaccgcccggcataagcaaccgggcggcacgcatacgatatgaaaaggaggcatcgccatgaaaacagcagcggcatatatccgtgtatccacggaagatcagaccgagttttcaccg

SEQ ID NO: 23787 - DNA, 260 bp, Unknown; identical to SEQ ID NO: 23786
  Description of Unknown: LeftRegion for integrase B10788 sequence

SEQ ID NO: 23788 - DNA, 260 bp, Unknown; identical to SEQ ID NO: 22818
  Description of Unknown: LeftRegion for integrase B10789 sequence

SEQ ID NO: 23789 - DNA, 260 bp, Unknown
  Description of Unknown: LeftRegion for integrase B10790 sequence
ggacagaatcgttcctgtggagtcggataagtctcgaattgcagacatagacaggatcttggagaataccaaaagcaatatccaaggttatgattatctgacgataaacggagaaccaatgtcccagaatgagatcgatatgctcctggatgcaatcgacatcggcatcgagatcattaaaagaaacaggatcagacaaaatgaacagtgagaaaagagtctttctatacgttcgagtatcgacacaggaacaagcgaaa

SEQ ID NO: 23790 - DNA, 260 bp, Unknown
  Description of Unknown: LeftRegion for integrase B10791 sequence
cccccatggcggacgacggagcgcccaagctgagcccccgccccatcagcgggggctcagtgctatttggcgcccgcagcctgcacgatcgcaaggactacgcccgcgttgcatagttatactcacatccctgatggaccttcgcgcccgaccgcgcggcgtagacatagtaataacgctagcctgacgccatgacatccatgcccacccagccaccggaacagcccctgcgcgccttcatctacaaccgcgcctcccgc

SEQ ID NO: 23791 - DNA, 260 bp, Unknown
  Description of Unknown: LeftRegion for integrase B10792 sequence
gataagcgcatagaagctttctacaaggacggattcgctgttatatcaggcttcctgcactccatcggttatcttgtaggcatcaacatcccgaagcgttacagacggcatatggatgttctgagtaaggatatatattaaaaaaacagcccccacggtacatgctataccgtaggggataattttaagggagggattttatgaaaacagcagccgcttacatcagagtctcaacagacgatcagatagaatactctccg

SEQ ID NO: 23792 - DNA, 260 bp, Unknown
  Description of Unknown: LeftRegion for integrase B10793 sequence
atcgtaaaatgaaagaaccccaccacttcgtcaagtgatggggtctttacaaggaaggtatgaaaaaagtacaacaacgaaaaaaggagaacaataaaatgattaaaggagtacaactaaaaggggtgatttatggcaattggaggttttgccatgctttattttaccattgaaaagtcatttactgaaagcaggtcattatgaatgtagcaatctatacaagagtttccacacaacaacaagctgaacatggatattca

SEQ ID NO: 23793 - DNA, 260 bp, Unknown
  Description of Unknown: LeftRegion for integrase B10794 sequence
atctcctcgacctcgaacgaggtctcagccatcctgatctcctctcgatgctcgttttcacgcacgacagcccagccgtcaccgcgccgcctccgcaccctctcggtggccgtgccccgggcgatcggcagtcgcgccgattcacggcgaggcttccccgtcatgatacgggatcttcttcgccgtgtacactcccggccgtgaagccgtgggcaggctacatccgcgtcagccacgtcggcggccgaaccggcgacaga

SEQ ID NO: 23794 - DNA, 260 bp, Unknown
  Description of Unknown: LeftRegion for integrase B10795 sequence
ttagaaaaatataaaataaaaatagaaaaatgcatcaatgaaaaatgtatttattttcaagtaataggaaataagcatgaaaatcctgaactgttaaatttgctggaggaaaaaaatgactaaaaaagaaagtataaaactagctgcagtaaaaataagacagctggaacaaaaaataaaactgaaaaaaggtgcttaatatgtttgaaagttatggaaatgaaataaagcaggctataaagtacacaagagtttccact

SEQ ID NO: 23795 - DNA, 260 bp, Unknown
  Description of Unknown: LeftRegion for integrase B10796 sequence
ttgtctctcaaaagatgaacggagagatgaaagtcaaagtaaaataagaacaaaacaaaaaagccccacgctctctaagtttggcgactcagagcgtgaggctagtgacaagaaaaactttttcagaagatagtatcttttgagaggttttcttgtaccaattttatcatttttttggaaattttgaaagaggtactactatgatgaacagaaataaagttgctatctatgtacgtgttagcacacaggggcaagttgat

SEQ ID NO: 23796 - DNA, 260 bp, Unknown
  Description of Unknown: LeftRegion for integrase B10797 sequence
cgttttagatgttaatgcgaaagttattgcacaggagcaagacggtaaaatgattttagataaataaaaaagccccacgctctcaaactttggcgagtctgagcgtgaggttttgaaaagataaagaaaggatttcaaaatgttttattttgaaagggtctttctgtactctattttatcaaaaatggaggtgaaagacaatgaataaagtagcactatatgtacgagtttcaactacttcccagttagaagagggctac

SEQ ID NO: 23797 - DNA, 61 bp, Unknown
  Description of Unknown: LeftRegion for integrase B10798 sequence
tgtgcttgtctttaagctctcccgatttggcagaaatgcagccgatgttctgaactctttg

SEQ ID NO: 23798 - DNA, 260 bp, Unknown
  Description of Unknown: LeftRegion for integrase B10799 sequence
tcattgcattgattcaataattcaacaattctaattatgtattcttctttcatgcgaaaactcctttcaaccggggaagaacaaatgttctgaatatattatacaaaattactaaattctgaacaatggtaattgttgcattattgttatagcacaaccaaaaaatatattttgtcgaaaaatagaaggtggttaaaaaaatgttaaaaaaacgtgtattcgtatatgtaagggtgtcaacggctcatcaagcagaagaa

SEQ ID NO: 23799 - DNA, 260 bp, Unknown
  Description of Unknown: LeftRegion for integrase B10800 sequence
cttcgccgcgagactgctcatcgacgccgccgagtacgccgagctcgagcgcatcagtcccgatcctcactacctcgccgatgagctcagcgtcacggtcgacctgatccacgccttccgggaacattgcctcaccgctctgcgaggcgtcggctacgcccacgcgcgcatgggtaccggtcaggggtacaggagcgcccatgcgtaacctccgccccgtcgccgacacgccaccccgcgcgatcatctacctccgacag

SEQ ID NO: 23800 - DNA, 260 bp, Unknown
  Description of Unknown: LeftRegion for integrase B10801 sequence
caaggcaagattgtgcctgtggcacgttcggaaccggatccagtcaaaatagaatacatatttgatgaattgaagcagacactgctgaatggtgacaacttgaccatagatgacaagcctgccactgctgcagagatcatgacaattgttacaatgattgatgccacgcttcaaacaatcaaaaagcaaaggatgatgtgatgatcaaaacaggcttatatgtgagagtatccacgcatgaacaagcaaaagaaggttat

SEQ ID NO: 23801 - DNA, 260 bp, Unknown
  Description of Unknown: LeftRegion for integrase B10802 sequence
caaggcaagattgtgcctgtggcacgttcggaaccggatccagtcaaaatagaatacatatttgatgaattgaagcagaccttgctgaatggcgataatttgaccattgatgacaagcctgccactgctgcagagatcatgacaattgttacaatgattgatgccacgcttcaaacaatcaaaaagcaaaggatgatgtgatgatcaaaacaggcttatatgtgagagtgtctacacaggaacaggcaaaagaaggttat

SEQ ID NO: 23802 - DNA, 260 bp, Unknown; identical to SEQ ID NO: 23767
  Description of Unknown: LeftRegion for integrase B10803 sequence

SEQ ID NO: 23803 - DNA, 260 bp, Unknown
  Description of Unknown: LeftRegion for integrase B10804 sequence
agaatgcccaaaggcggatgccgcgattgttcccgttgcactgagaccggcgcgcaggggtgtctcgccatgccctggcgcatcgtctgggcaatctgcttctcgtggtgggctggcgcgtttacgaagaagtgcccccagtgcggccaccccatacgtaaccatcaccgccgcaaagacgggagtttccaggattgaccatgcgtgccgtcatcgtcgccgccgtctctaccggcgctcaggccagtgaagagcgttac

SEQ ID NO: 23804 - DNA, 260 bp, Unknown
  Description of Unknown: LeftRegion for integrase B10805 sequence
acactttgcactaagtaaaccctgtatgaggtatagtaaatctatatctgtgcagccagctaatagctcgctgattgtttctagtaaatagtctttttccatagctacacctcaatcgaacaaatgtttgttttataacaataataatattactataacttttctaaaaattcaatagtaaaattataggaggtctgaatatgtcgccaaaaaataaaaaaattgagcgtatagcctgttatatccgtgtttcttctcag

SEQ ID NO: 23805 - DNA, 260 bp, Unknown
  Description of Unknown: LeftRegion for integrase B10806 sequence
gtagctctaagtcattgcagttttggagtaattctttaatagtttcaattaaaacagttttttcatccatagcattacctcgctaacaaaataaagtagagaacacctgtttgtattttacgacataatataaacgtttgcaatatagtatatttttagaattgtaaaaatatgacaatttatttaaaggaggtcactatatgtcaccggtaaataaaaaatatcagcgtatagcctgttatattagagtgagcagccaa

SEQ ID NO: 23806 - DNA, 260 bp, Unknown
  Description of Unknown: LeftRegion for integrase B10807 sequence
tcaacactctacactaagcagatttttaattatgtacagcgtttcaatgtctgtacattctgccagtaattttttgatagtttcgattaaatattctttttccatagctacacctcgcaaatagaacaaacgttcgtgttacatgattatattactataattgtttaaaaatttcaatagtaattttatggagggttataatgtcaccagtaaataagaaaatagagagaatagcctgttatatacgtgtatctactcag

SEQ ID NO: 23807 - DNA, 260 bp, Unknown
  Description of Unknown: LeftRegion for integrase B10808 sequence
acttacgccctgttctgcgacggcaggcaggtcggcatggtcggctccatgcacgggttctacgagcatgcgttccgcgtcgggctccgcgtgttcgtcggcaccacgtgccatggcatgtacgactccgtaacgccggacatgtacatagacgggtggagctacgacgagtggaaggcgttcttcacggagctgggcaagtgaagcgcgccgccatctacgcccgatacagctcccacaaccagagggacgtgtcaatc

SEQ ID NO: 23808 - DNA, 260 bp, Unknown
  Description of Unknown: LeftRegion for integrase B10809 sequence
tagttttttgtacagatccggggatattttcagattcaattgcttcaaatttttggttatccatgcctgcgtggcttggtattttctctctttagcatccccctcatatgtcctaggtcttgccattttcacaccccctaactgtatattaactgtataattataacatggtagcaatgccattgaaaggatattttaaaatgaatgtagcaatatatgcaagggtatctacagaacagcaggctgaaaaagggtactcc

SEQ ID NO: 23809 - DNA, 260 bp, Unknown
  Description of Unknown: LeftRegion for integrase B10810 sequence
aatagtcaaaattaaattatatacaaaaaccgcccggtgctggtaacaccgaacggccttgcatagatttctcttaccggatgcccggaaagatatattcaaacctgaacactttgaattatatcattctttcgggcacctcgcaagaggtgtattttttatacccttttttaatatttttatacgaaaggatgatcgaaatgagaataggtgcagcttatatccgtgtcagcacggatgaccagctggatatcagcccg

SEQ ID NO: 23810 - DNA, 260 bp, Unknown
  Description of Unknown: LeftRegion for integrase B10811 sequence
aaattaaaggttctctggctagttcattagataatagtgatgaatattatgtcagagaagcttcggtctatataaaataaaaaaaaaacactccaagccgtccaaagttgggagtgttcgatctgatattacaaatatccacgctgtcgtgtggtgctatttgttatatcctattctatcacaaaataggaggaaaaaatatgataacagccatttatgtacgtgtaagcacggaagaacaagcaaaagaaggatactca

SEQ ID NO: 23811 - DNA, 260 bp, Unknown
  Description of Unknown: LeftRegion for integrase B10812 sequence
agatgatttgtatattataacctatatattttattataaaggcaatacaaatcatctggtgtgcctctttttgagatatatactttatatacttatttataacgactttgatgaaaatataaaaaagtataaaagtctaaccgtttttattcttgataaacaaataatatataaatttgtaacgtcaaaatattttgtgtatgaaagcaattctattgattagagttagtacagaggcacaggaccttgtacaacaaaga

SEQ ID NO: 23812 - DNA, 260 bp, Unknown
  Description of Unknown: LeftRegion for integrase B10813 sequence
gtagatcagataattcttgtctcaggagacagtgatttcgttccagctgcaaaacaaggcagacgtgaaggtcttgatataattcttgctcctatgggagctacaataaagccagatctacatgaacatattgacggtttgatcaatactgtcagaatgtataccgatgaagaacaaactgaaaagtaaggagtgattctatgcagacagctgccgcatacataagagtctcgaccgatgaccagatagaatactccccc

SEQ ID NO: 23813 - DNA, 260 bp, Unknown
  Description of Unknown: LeftRegion for integrase B10814 sequence
gaagcgacacttaaacgaattaaaaagcaaggagatacgttatttctaatgcctgaaaaccctaagtatactccatatattgttgatgaaaataacccagcgagaattattggaaaagcaataagctacgaaatgatattgtaaaaaagagctagacaaaaagtctgctctttctttatatcttgggaggagaattataaatgactgtaggaatttacattcgagtatctacagaagaacaagcaaatgaaggttattcc

SEQ ID NO: 23814 - DNA, 260 bp, Unknown
  Description of Unknown: LeftRegion for integrase B10815 sequence
tagagcctatatgtgaaaatatggagattaccatagaactggcacgacgtaaaaataagtagacacttgaaataataccagttagttttatgatagccaagtcttaaattttggtaaaagacgtggctattatatagattaaaaagtggctatttgtccatgttaaaaaataattaccagacaaaaggagacgatttaaaatgaaacgagaaataaaagacgataactataccaaactaggacgtaaagaccctaaacga

SEQ ID NO: 23815 - DNA, 260 bp, Unknown
  Description of Unknown: LeftRegion for integrase B10816 sequence
atgacgacatccgaactattggggaagttgtcagtgtgtatagagataaataaaccaactgtttccattttggaaacaactcaaaaaagccccacgctcagaagtttggcgaccgagagcgtgaggctgtagacaagaaaaaagcattaaaaaagctatttttcttgtacccattttatcaaaaaagaggtacaaattcaatggtaactacaaataaagtggctatatatgtcagggtttcgacttcatctcaggctgag

SEQ ID NO: 23816 - DNA, 260 bp, Unknown
  Description of Unknown: LeftRegion for integrase B10817 sequence
ccagcgccaggcccacggcggcgattagccccgtaagcaggtaagcgattctgcgcattttccgtcctctttggtgaggtttcgcgggttttcccgcagcggggtcgctgcggttagtgcatgtgagacgcctgagaggcgccattggagtacgtgctacgtaaatttatcggatgttcccttgcgttaccctgggttacatgcaagccggcccgcagaatctcagcgccgccatctacacacgcctgtccaaaggcttt

SEQ ID NO: 23817 - DNA, 260 bp, Unknown
  Description of Unknown: LeftRegion for integrase B10818 sequence
aagccgtcgagaacgcacagcgaatcatgggagccttggatgttattgtccataattcataaataaaaaaatccccacactcgcaaaagtttggcgactctgagtgtgaggttggtaattacaagaaaaacttttcaaaagagattcccttttgagacgttttcttgtacctattttatcaaaaaaggggtacaaattcaatgaaaacaacgaataaagtggctatatatgtcagggtttcaacttcttatcaggctgaa

SEQ ID NO: 23818 - DNA, 260 bp, Unknown
  Description of Unknown: LeftRegion for integrase B10819 sequence
acaataagcactgctagtggcggtagttctggttttggtggtggtgaccgtatccaagcgactatggtatttgagaaaatttaaaaaagccccacactcagaagtttgcagaccgagagcgtgaggctacgagcaagaaaaaaagcattaaaaagctctttttcttgtacctattttatcaaaaaaggggtacaaattcaatgaaaacaacgaataaagtagcaatctacgtcagagtttcaaccgcttcacaagctgag

SEQ ID NO: 23819 - DNA, 260 bp, Unknown
  Description of Unknown: LeftRegion for integrase B10820 sequence
tgcctcacgcactccagcgcccaggttttcgtaagcagtgcccttgctgctgagcagctccagcagagtgctgcgggtgatcggctgagcagtcagttctgaggtcgcagtcatggtgcggctttacgggtggtggcaggtaccaaccccgtccaaacgtggttggctagccactaccgtagccgaaggaggtgtgctgaatgcgcatcgggctttacgccagggtgtccaccggctctgacgagcaggaggcggcgctt

SEQ ID NO: 23820 - DNA, 260 bp, Unknown; identical to SEQ ID NO: 23433
  Description of Unknown: LeftRegion for integrase B10821 sequence

SEQ ID NO: 23821 - DNA, 144 bp, Unknown
  Description of Unknown: LeftRegion for integrase B10822 sequence
tgcaattcctctccagttgacatttgcttcgcaccagtcacatagggactcggtgaaaacatccctccttttcgacgtttacccatgaaagcattcctttacaatcgcgttagccataaggactccaaagcctctgacatcagt

SEQ ID NO: 23822 - DNA, 260 bp, Unknown
  Description of Unknown: LeftRegion for integrase B10823 sequence
aacctcgtagatttgagaaagaaaaaaggcgtcagtcaacttgacatttcgatagtagttgataagaaaagctcgtctgtcgcatcgtgggaacaagggatttcgcttccagacgtgacgacactctatcgactcgcgctatattatggcgtaatcatggaatatttttatcaaaaacacgacaaggtaggtgaagacgaatgatagctctttattgtcgagtttcaactcgtgaacaaacaaaagaaggttattcaatc

SEQ ID NO: 23823 - DNA, 260 bp, Unknown
  Description of Unknown: LeftRegion for integrase B10824 sequence
tttgttaaataatatttaatatttttgagtaaaagtattgactttgttaaattatgtttcgttttatacttttgatataatttgtttgaatttattatactaaaattataaaactattttgtcgaatgaaaaacattttttaattttgcaactgtaaactacactactaacgtaacaacagtcaaaaaattgttcacactatgtacaaagtcatttcattcacaagagttagttctcagcagcagaacctagaatctcaa

SEQ ID NO: 23824 - DNA, 260 bp, Unknown
  Description of Unknown: LeftRegion for integrase B10825 sequence
agacatgaactcaaaatatccgcagttgagactgaataaatccatgttgtccagatgggagaatgacttgaatgagccgaccttggagaatgccaagtatctatccatgtactttgatgtcagtctggattatctgattggactgaccgacacaagaaccccatcaagactactggcaaggagaaagaggacagaatcaaatgaatagatgtgccatatacgtcagagtctccacacaggagcaagcaagagatggatac

SEQ ID NO: 23825 - DNA, 260 bp, Unknown
  Description of Unknown: LeftRegion for integrase B10826 sequence
gcgcacgtctgtctcggccaccgtgacgcgacaccgcgccaggagcttcaggccgaccgctgggccgcgcgcaagctcgtccaccccgacgaactgagacaggccgcccggcacaaccccgatccggggatctggtgccacgacctcaacgtctcggcgtcgctcctcgaccgctacatcaaggaccacaggaggatctagtgcaaccccgacttgtgccagacaccccgccgagagcggtgatctacctccggcagtcc

SEQ ID NO: 23826 - DNA, 260 bp, Unknown
  Description of Unknown: LeftRegion for integrase B10827 sequence
tgtgccacacccggttcgggttggcttccgcgtcacggaaggtagcggcgtgcgtgacagaatgtgcagtcatggcgggaacctctcttcccgtctaggccccgtctggtgcgtgagaccaccagacgcgggccgcctaaactggggccattagcgagaggactggtcgcagaccgttcgctagtggcacactctaccgcatgacggtgaccgcacacagttacgcgaggatttccactcgcaaacagcgctccatcgag

SEQ ID NO: 23827 - DNA, 260 bp, Unknown
  Description of Unknown: LeftRegion for integrase B10828 sequence
tcagcgtttcgccaaagtcgtgccactcagtgaggcgcccctagccaagctgcaccgacttaggcgcgagctgtcgcgcatctctttggaaatggatgagtgcctggctgagctggagcgcggcaagtcttagaacgtcataagcccaactgctgccagcagctgtcaggctcataacgttttcctgtagactgcgtgtcatgacacacacactgacagcccacccagaccctgccatcatctacctgcgtcagtcgctg

SEQ ID NO: 23828 - DNA, 260 bp, Unknown
  Description of Unknown: LeftRegion for integrase B10829 sequence
aaaattcaaaaatcacacacaaaaatatggcggtatgccaaaattgtggatatagttggggaatataactttacgcaagcatattatataaattttcacatttttcataacaaaaaggggtataaatttcacattttcccctttactttactaaagataacgtataaacacgttatctttttattcataggaggtatataatgttaagagctgcagcatatataagggtttcaactgatgagcaaacagaatttagccct

SEQ ID NO: 23829 - DNA, 260 bp, Unknown
  Description of Unknown: LeftRegion for integrase B10830 sequence
gattacttgaaagatcagctaaacaagcaagaacaggaagcacagaaaaagaatgataatttgaatgaacagattgccaggcttcaaagggataatgattatctttgggcagaaaacaatcgcaaatccaaagtgatagatagtttcattgatgatgtttttaagaataaaacagaataaccacaaaggggaaatgcacaatgtacaaacagttggaacgatacagagcggaaaaaggtcgggtgcgcatagcaaaatat

SEQ ID NO: 23830 - DNA, 260 bp, Unknown
  Description of Unknown: LeftRegion for integrase B10831 sequence
gttagaaagaacattgttttttcttttaatcttaaatgatttgagttttgcattgttcttttctgcaactaaaatacctaatgtttcaaaaaatttttcaatattcatagcaacacctctatttgtttgttatactatatttattatattgtataaccttatatgttactatgagaaaaaattggtaagggatgatgcgtatgaccacatttgacaaagaaagaaaaatcaaaagagcctttgacacaagtaaagtaatc

SEQ ID NO: 23831 - DNA, 260 bp, Unknown
  Description of Unknown: LeftRegion for integrase B10832 sequence
cctaaaaaaatgattattctacatctagtcattggatgacctatatcgtgatattatgtattctagaaaaatattacaatagggggaaattataatgacagtaaaagtacaaaagaaaaatctaccagacgcggtaaaatattttactattgagaatgacgatatattaactgtggtaattaataaaaggggctgtaagcatgaaacgagtagcaatatatataagggtatcaacacaggagcaagctgacgagggttat

SEQ ID NO: 23832 - DNA, 260 bp, Unknown
  Description of Unknown: LeftRegion for integrase B10833 sequence
attattttggtgtatccgttgggtttttgataaccggggaaaatcagccgtttatggcattgtcatttgaagaacaacaattgatatgggcattccgaaagctaaacagcaacggaaagtctatgttgttggcacaactccgcatgatatccaatgatgaactttatacaaaagataccgcacaagcggcaggataatttatgtggattttgggcagtaaaaaaccctgccgggtaaagcggcagggcgatgaaatgaaa

SEQ ID NO: 23833 - DNA, 260 bp, Unknown
  Description of Unknown: LeftRegion for integrase B10834 sequence
gtattttattttttataaacaacataacattagtagggataaagatttgtccctactttttttggaggaaattgtactatgaaaaatattaaaataacagtaaaatgtaatacaccaagcgaggaagcactaaaacgctttgcagataaaattatgatgatatataatgtatctatgtcaaataagaaaggagcttaaaaatgggtacaattatatatttaagaaaatcgagagcagacgaaacaaaagctgatagctta

SEQ ID NO: 23834 - DNA, 260 bp, Unknown
  Description of Unknown: LeftRegion for integrase B10835 sequence
cttcatcgtggcgaccatttctggctggaggttcagggcttccggtactgtcacctcaccggccttgatgcttgctttcagttgcgctctagccagtctgatttcgttggcccggtcaagagcctctaggtgctgtggtgtcatttctcccgttctgcccttctgcgtggctgcttagtagatgctacggtgatgtccggatgaagaatctggcgggatatatccgcgtgtccagggtggccggtcgcagtggcgagcga

SEQ ID NO: 23835 - DNA, 260 bp, Unknown
  Description of Unknown: LeftRegion for integrase B10836 sequence
gacctactggcaggtaacccccacagagcctcaggagccgtcagcagggccaggggtgctgctggtgcccagaacagccctacggctcccctggggcatcctgagccgtctggtggcagcctgatgggtgtcctgagccagagctagcccagggtggctcagtctcagagcatcgtcccaggtcagcagggttaccgctggtgtacctgtgcaagcagtggtcaccctgtggtaacctggtggccatggcacatcacaca

SEQ ID NO: 23836 - DNA, 260 bp, Unknown
  Description of Unknown: LeftRegion for integrase B10837 sequence
gccggcaagaataacgtagagccgacgcttcagagttctgcgacaaagcgttagagtcggcccccatgcgaacggccgcctatgcccgcttcagttctgatcaacagcgcgccgcgtcgatcgatgaccagctgcgaaatataggcgagcgctgcaggcgcgagggctggccagcaccgcgggccttcgaggatcgcgcgatgacaggcgcgcgccacgatcgtccgggctaccaggcgatgcttgcggcggccgaggcc

SEQ ID NO: 23837 - DNA, 260 bp, Unknown
  Description of Unknown: LeftRegion for integrase B10838 sequence
cctcacggacgcccgctcccaggttttcatgggcctggccgtcgctactgagcagctccagcagagtgctgcgcgtgatcggctgagcggtcaggtctgagatcgcagtggtcatgcggcttttcggctgtggtttcaggccaagcagctctggcgcggctaagcctgtaaccacagaatagcctggagcgaattgaacgatgacgacggcgatttacgcccgcgtcagcaccgaaagcgaggatcaggcccacgcctta

SEQ ID NO: 23838 - DNA, 260 bp, Unknown
  Description of Unknown: LeftRegion for integrase B10839 sequence
gaagacggtgaaatcgcagctgttctaattaatgaaattgtttatttaaagagagtatttaaaaatgatggaatgttagtccttcaatcagaaaaccctaattatgcacctatttttaaaacagacgaggaccaggattccataaaagttctagggaaattaaaaaaggtcgtcattaacttatgagtgggtgagatgatatgtatgctgctatttatgtccgcgtatcgacagaggagcaagcagaacaaggatattcg

SEQ ID NO: 23839 - DNA, 260 bp, Unknown
  Description of Unknown: LeftRegion for integrase B10840 sequence
tcttggtatgctcgcggctctgaaaaagttaacattaaggttttaaaagatatagccgcgttttttaatatttcgttagaggtacttataaacggcgatactcttacgtctttatactttagcgaatacgaatatactaagcaagagttagagctaatagctaactttagcaaattcttaaaagaaagtaggttgaaataatgataaacgacgtagctatatacttgcgtaaatctcgtgaggacgaagagcttaaagag

SEQ ID NO: 23840 - DNA, 260 bp, Unknown
  Description of Unknown: LeftRegion for integrase B10841 sequence
tcaaatcaaatgaaacgttaattgcagaaataaaagacgttaccgaaaaaagaattgcagacattataaagtgttgtgaaacacgaattgcagatatgaaaagtaattatgatgaacgaattgcaatttacagggaccttttacaaaaagcatacccaacaatgtatagattggattaaaaacataaggggattaatgatatgtacaccaattataaacaattagaacgataccgacataatgataaagttatacgcatt

SEQ ID NO: 23841 - DNA, 260 bp, Unknown
  Description of Unknown: LeftRegion for integrase B10842 sequence
atcttttggatatattcttctttcatgggcaggctcctttcaccggggaacgaatgttctgaatttattttataacacgaatatatcaaagacaatggtaattgttagcacttggaaccggaagaattatttactaaaaaacatatttttttactgaaataatttttttcattgaaaaacataaaaaggcggagaaatacatgtataaacaactggaacggtatagaaaagaaggtaaaccgattcgcattgcaaaatac

SEQ ID NO: 23842 - DNA, 260 bp, Unknown
  Description of Unknown: LeftRegion for integrase B10843 sequence
atccgagtacaatacccaactaaaaaagacggagccgcaagccccgtccccgtcactcgttcagcttgagcaggagcaggatgaaccgcagtagcttttcatcctcacaccgccgcacgagttcagcgatctgatctttgatattcaatgcccttccctcctttctcatgggatgggacaattatatggagaatcacacaatgctacaaaaagacggcatctatgcaatgtacctacgcaagagccgggcagatgtagaa

SEQ ID NO: 23843 - DNA, 260 bp, Unknown
  Description of Unknown: LeftRegion for integrase B10844 sequence
acgtcaaattacaatgaagcgttggaaatcacatcgaaacttgaaatgatctttaagagtgatgatataggagagagtaaaaaagatgagatataccgtgaaatcatgcgcatttatcttgaaagcaaaaaataactccttgtgagtttttttaatttgaatgctacacatagaaaacattgaaaaggaattgatacttaatgaaactcgttaaaaatggtaaaaaggtatttatttatgtgagggtgtccacgcaagaa

SEQ ID NO: 23844 - DNA, 260 bp, Unknown
  Description of Unknown: LeftRegion for integrase B10845 sequence
agctggtacgctagaggctcggaaaaagttagtattacaatactcagaaaaatagcactatactttaacgtttcgttagaggtgcttattaacggcgatacaataacgtctttatactttactgagtacgaatacactaaggaagagctagagcttatagctaacttcggtaaatttataaaagaaagtaggttaaataaatgataaatgatgtagctatatatttacgtaaatcacgtgaggacgacgagcttaaagag

SEQ ID NO: 23845 - DNA, 260 bp, Unknown
  Description of Unknown: LeftRegion for integrase B10846 sequence
cctcgcggacgcccgctcccaggttttcatgggcctggccgtcgctgctgagcagctccagcagagtgctgcgcgtgatcggctgagcggtcaggtctgagatcgcagtggtcatgcggcttttcggctgtggtttcaggccaagcagctctggcgcggctaagcctgtagccacagaatagcctggagcgaattgaacgatgacgacggcgatctacgcccgcgtcagcaccgaaagcgaggatcaggcccacgcctta

SEQ ID NO: 23846 - DNA, 260 bp, Unknown
  Description of Unknown: LeftRegion for integrase B10847 sequence
gcccccggcacggtgatggtacgcgaattcaacggcatcaatcatcgcgtcacggtactggatgatggtcgcttcgaataccagggacggccctacaagagcctgacggcagtggcgcgcgccattaccggaaccacctactcggggccggtgttctttgggctcaaaccgtcgcaccgcgaacgtcagaaggggaacgtatgaaaccaaacatgacacgttccaccatcacgccgaaacggcgctgcgcggtatatacc

SEQ ID NO: 23847 - DNA, 260 bp, Unknown; identical to SEQ ID NO: 23843
  Description of Unknown: LeftRegion for integrase B10848 sequence

SEQ ID NO: 23848 - DNA, 260 bp, Unknown
  Description of Unknown: LeftRegion for integrase B10849 sequence
aatcagtttttgttatgtttttgttatggcaaaaagcctttatttatgggctttttcggctatatataacaaaatctctatttttttcttattttctaagaaaataaaatatataggtatatttatataaatatatagaaaaagtaattatatatagaatttcgcgatttttttgtgattttgttatggtgaggaaaaaaatgaagaaaaagaccagagtgcttttgtatgtgcgggtgtcctcacaggagcagatgatc

SEQ ID NO: 23849 - DNA, 260 bp, Unknown
  Description of Unknown: LeftRegion for integrase B10850 sequence
tgtttttaagtacaatggcaaaacttgctatactgcttgccgtatactgggcgatagcaagtatatgctttcggttgatgatacaatatacgatattccctctgaagaagaattcaattcagtaattgaaaagctgaaaatagcaccataaaaaagcccatcagtaaatctggtgggctaatctataaaggagtgattgaatgaaaatagcagccgcatatatccgtgtatcaaccgatgatcagacggagttgtctccg

SEQ ID NO: 23850 - DNA, 260 bp, Unknown
  Description of Unknown: LeftRegion for integrase B10851 sequence
aatgcaataaaagttgtaattttctacagaaaaattgacaaatttgttgatttttttatacaaaaaatctataatataagaacaaagaggttaagcctcaaactaaaattattataagcggtttagccgcaaaaaagataaggtcttgttcttatacgttcaaggccttatcttttttatttgtcataaggagcgaacatatgagcgaaactactcagataggtgttatttatgcccgatattcctcggacaaacaacgt

SEQ ID NO: 23851 - DNA, 260 bp, Unknown
  Description of Unknown: LeftRegion for integrase B10852 sequence
ggatggcggaggttttacaaaatcagaagtcaactacgctattaaacatttagaagacgaagattaaaataaacaaaaaagcccacgctcaaatttggacgaggagagcgtgagctaataattggtagtatagtaaaaagcctgcttttagtaggtctctttactatacccattttaacacagaaatgaggtataaatcaatgcaaacaaaacgaaaagtagctatatatagccgtgtctctacactacatcaagccgag

SEQ ID NO: 23852 - DNA, 260 bp, Unknown
  Description of Unknown: LeftRegion for integrase B10853 sequence
gcggatcgcttgctgcctggcaccatgctcagccgctactttgacgaccaagagcacaaggtggtcgtgcgcggcgtgcgcgactttgagtaccgtggccagcgattcaagagcttgtcggcgatcgcacggttgatcgctggttgcccatggtcggggcctgccttttttgggttgaagtccaccaagaaggaggtcgcatgagaacctcccgcacctcagtggcaagcgcgccctcgttcattcccaaaaagcgatgc

SEQ ID NO: 23853 - DNA, 260 bp, Unknown
  Description of Unknown: LeftRegion for integrase B10854 sequence
cccacccgggacccgcggttgccgccaccaggcacgaccctcacccgagtattccagggtgaggcgcacgacgtcgtcgtggaggcggtcggcttcacctaccgcggggagcggtacgcgaccctgtcgcaggtggcgaaggtgatcaccgggacggcgtggaacggattcgcgttcttctacctcgaacggcgcgtggcatgaagcggctcacctccgtgtcgacgtcggcgaccggccccgtgcgctgcggcatctac

SEQ ID NO: 23854 - DNA, 260 bp, Unknown
  Description of Unknown: LeftRegion for integrase B10855 sequence
tctcccccgttgtagctcccgttgcttgcgccgttctaggcccccgtacgaggcctcccgagcttgcctcgcatggcccgtgaccagggacgatgccagttgcacctagtgcccgattccaagcaatcggggagtgactgcaactggtggtaccctagggtttcggtagtttgacctttgtaaaggagaaagtttcaaccatggctagcaagcgtaaatctcaacaaacgattgactcggaaattaagcgagtcgctatt

SEQ ID NO: 23855 - DNA, 260 bp, Unknown
  Description of Unknown: LeftRegion for integrase B10856 sequence
cggagcccccggaccaacgcatcatcacgctatgatttcgcctacatccgggtcggctcgaaaggcaccgggggctactcgttcggattgaatcaaaaagccggctcttggccggctgcccgttgcggacttccacaactcaatttcggtataattgcaccaaccaccgctcaaggtcaatagtgcctggaggatagaccgtgtctggaactgaggtaagcgtacccaaaatattgcgttgtgcgatttacacccggaaa

SEQ ID NO: 23856 - DNA, 260 bp, Unknown
  Description of Unknown: LeftRegion for integrase B10857 sequence
aactcatggtttaaccgctcaagtgatggcgtagcccttaaatcgttggttaagatctcggaatacttcaatatttccttggacaacctagtatgtgacgatttagctctctctaaacccgcggagaataagctaagcgaggaagaagtagcccaattaaagagacttctcgcatattacgagaaaataggcggtaagttatgattaaagtagcgttatatttaaggaaatcccgagacgaagaaaacgaggataaggaa

SEQ ID NO: 23857 - DNA, 260 bp, Unknown
  Description of Unknown: LeftRegion for integrase B10858 sequence
gatcgcctactgccgggcacgatcctgacccgcatctatgatgatgtcgaacaccatgttctggtgcgcggcgtgcgcgacttcgaataccgagggcagcgcttcacgagcctgacggcagtggccagggtaatcacaggatgcccatggtcaggtccgctattttttggactcaagacgcgcagcaagcaggaggcaccatgagagcgaaccgcaccatagcgacgccttcgtcgacgatcgtccccaaaaaacgctgt

SEQ ID NO: 23858 - DNA, 260 bp, Unknown
  Description of Unknown: LeftRegion for integrase B10859 sequence
ctcggaaaaggaggaagtttcaatgcttgaaaatgaggttgattaccgtttggcgaagatgctgcttggctgtctttaccatgatggattacttacagaaaaacagatgcagaaggtctgggataaactgctggaatattatcatccgccgtttcagtcggttgaggtcagaaaagaaatcggagatggggtgacggtcggtgaaagataaaatagtcaaaaaggtagaacaccttccacagctaacggatgtgaaacga

SEQ ID NO: 23859 - DNA, 260 bp, Unknown
  Description of Unknown: LeftRegion for integrase B10860 sequence
gatcaccggcggcgacaacggcaggagctacggagtaaatatcaaattatttatgtaatcagcagtataaacaataaaaattccccgtcggtactggtaataccggcggggacggagctgtgcaactccaaatatgttttgaaaaaatccatgtatatattatagcacggctccctcaatttttcaaggagggattttttatgaaaacagcagcggcatacatcagagtttccaccgacgaccagattgaatactctccc

SEQ ID NO: 23860 - DNA, 260 bp, Unknown
  Description of Unknown: LeftRegion for integrase B10861 sequence
tttgttacgctttttgttacggcgaaaacccttgtaaatactgaccttttgagccttatataacataatctatatttttcttttaacttttaaggaaaaaagatatataggagtataaggtaataaaaaaataagagtatataaggaatacgcgaaaatttctttgtttttgttattctgttacgcgaggaggttaaatcatgatttcaaatactgtcgtcgcgctttatattcgcgtcagtacacaagagcaagcgtcc

SEQ ID NO: 23861 - DNA, 260 bp, Unknown
  Description of Unknown: LeftRegion for integrase B10862 sequence
tttttgttactcattttgttacccccgaaaccctcggaatattgggacttttgggaatgttcgcaacataataataaaattattttcaattctaaagaaaaataatatatatgatgtatatggatataaaataaaatatatagagagttaacagcttttttgttattctgttacgttcgtatcagaaaggaggtctttctgtgaaaaataaaaatgtcgtgggattgtatgtccgagtatccactcaagaacaggcgaaa

SEQ ID NO: 23862 - DNA, 61 bp, Unknown
  Description of Unknown: LeftRegion for integrase B10863 sequence
cctcgaaaaagagttcaactccctcgatgcccagcgtgaagccggcgaagcctacatcgcg

SEQ ID NO: 23863 - DNA, 260 bp, Unknown
  Description of Unknown: LeftRegion for integrase B10864 sequence
gtgtggagtatgacgtccgcgatgcctgaccggcaccgggaaaagccgctcagcctacgccttggggctgagcggcagccggtagaggaagccgccgagcgggacggcgtcccggtgcggcagtggatactcgccgcgatccgcgagcggctggcgcggcagtccccgcagtagcgtcatccaccgcagcacggcggggcgtgtgtgctagcatcacgcacgtgagagcagttctttacgcgaggcagagcctcgacaag

SEQ ID NO: 23864 - DNA, 260 bp, Unknown
  Description of Unknown: LeftRegion for integrase B10865 sequence
atttgatgtcccaatggaaagaaccacattttcctttgatgagcttttaaaacttgatgatatagaagtaagtaacagagattttgtattatcaatggacgaattatcaagggatatgacagttccacaaatggacaaagtcatgttgtatgcaaaatttattaaagaacaggacaaggataagaaggatggtgattgacatgattgccatttatacccgcgtttcaacaactgaacaggcacaggaaggatattcactt

SEQ ID NO: 23865 - DNA, 260 bp, Unknown
  Description of Unknown: LeftRegion for integrase B10866 sequence
ttatgggatttttaggagaaaaagggaagaagcaatggcactgtaacgagtgcagctgtatatttgagacaaaataaaaaaagccccacgctctcaaagtttggcgactctgagcgtgaggcgaatctagtatagtaaaaacctgctttaagtaggtctctttactgtactcattttaacaaaaaatgaggtaaaaaacaatgagaaaagtagctatttactctagagtaacaacaataaatcaagccgaagaaggatat

SEQ ID NO: 23866 - DNA, 260 bp, Unknown
  Description of Unknown: LeftRegion for integrase B10867 sequence
gccgatcgcctgctgcccggcacgatcctcacgcgcgtctacgacgacgtcgagcaccaggtgctggtgcgcggcatgcgcgacttcgaataccgtggccagcgcttcacgagcctcacggcggtggccaaggtcattaccgggtgcccgtggtccggtcctctgttcttcggcctcaagaccaagaagaaggaggaagcatgaaatcccatcgcaacacgccggcgccaccgacgcttgcgcccaggaagcgctgcgcg

SEQ ID NO: 23867 - DNA, 260 bp, Unknown
  Description of Unknown: LeftRegion for integrase B10868 sequence
gccgatcgcctgctgcccggcacgatcctcacgcgagtctacgacgacgtcgagcaccaggtgctggtgcgcggcatgcgcgacttcgaataccgtggccagcgcttcacgagcctcacggcggtggccaaggtcattaccgggtgcccgtggtccggccctctgttcttcggcctcaagtccaagaagaaggaggtcgcatgaaatcccatcgcaacacgccggcgccaccgacgcttgcgcccaggaagcgctgcgcg

SEQ ID NO: 23868 - DNA, 260 bp, Unknown
  Description of Unknown: LeftRegion for integrase B10869 sequence
tttacaaaagccgaggtgcgtgacctgccagtgaagatcgtgggagttgtgcagaggctggtgagggattattttgcataaaaaagaaccgcacccgaaggtgcggtcagaaagaaggtttaatgagaacaaacctaatgaaagattacaattattatatcatagccttcttttgattttcaacaaacggaggtggttttttgaatgttgttatctatacccgggtatctactgccgagcaggccaacgatggatattcg

SEQ ID NO: 23869 - DNA, 260 bp, Unknown
  Description of Unknown: LeftRegion for integrase B10870 sequence
aatatgagacgcataccggtcgatgtgctgaccagagtggcagctctgtataacgtcagcgtcgatgaattgctgggaaactctgtccgaccggatgcatctacaaacattatacacggaaatttcacaaaagagcagttacagaaaattcaaaaatatgcagagcttgtcagcaatgacgaattataggaggaaccataatgaacaacgtaatggaggaatataaaaaatggcaacgcgtaatccgcgtcgcgttctat

SEQ ID NO: 23870 - DNA, 260 bp, Unknown
  Description of Unknown: LeftRegion for integrase B10871 sequence
gtatttgagaactaaggtttcagagcttaccaaggacgctgggcttaaatcagtagagatcccttttgattttatatacaaaagcagttcaaaaaatgagaatcaatctaaatagggatactcaataattcaaatgaccattttgctttcagcaaagtggtcaaatactagtctctagtatttgattggaggaacatgtaatggaaaaaataagaaccggcgcgctatatatccgtgtcagtaccgctgatcaggccgaa

SEQ ID NO: 23871 - DNA, 260 bp, Unknown
  Description of Unknown: LeftRegion for integrase B10872 sequence
tcagggtttcaatgagttctatcagttgggccttgttgtcattcatggggagcactcctttcttccagggagaacaaatgttctgaatttattataataaaatactaatttcagaacaatgggaattttttacaattataattatgttatagcacttttcgacggcggatgttgtcgaaacaaggggaggatgaaaaaaaatgtataaacagctagaacggtacagacaagagggcaagcctatcagaatggcgaagtac

SEQ ID NO: 23872 - DNA, 260 bp, Unknown
  Description of Unknown: LeftRegion for integrase B10873 sequence
ctgatttcatcatatacattgacaatggggacattgaaaagattgttgaagaataaaactaaaatgccccggcagtgctgggaacactaccggggcggcgcacaatatattataccagatacaacataccatccgcaccattatactatcacttacggtgcgggaaataaaaggaaaaccgcagaaagtaggtgatttttttgataccagccattgaatacacaagggcttccacggaccatcaagaatattccgtgggg

SEQ ID NO: 23873 - DNA, 260 bp, Unknown; identical to SEQ ID NO: 20552
  Description of Unknown: LeftRegion for integrase B10874 sequence

SEQ ID NO: 23874 - DNA, 260 bp, Unknown
  Description of Unknown: LeftRegion for integrase B10875 sequence
gcaccgggcacaacactggtgcgcgagtacgacggtgtcacttaccgggtcaaggtcatggacgacggtcgattcgatctggacggccgcccatttcggagtctatcgaagttggccaaggagattacggggagcacccgctccggacctgtgttcttcgggttgaagcccgccagccgcgacagaaaggcggcacgagcatgaagcgtacaaccaaagaggcgccgacgctgaccccaaagaagcgctgcgccatctac

SEQ ID NO: 23875 - DNA, 260 bp, Unknown
  Description of Unknown: LeftRegion for integrase B10876 sequence
cgcctgttgcctggctccatcctgacgcgcatctacgatgacatcgagcatcgcgtgctggtacgcggcacgggcgatttcgaatacgaagggcaacgcttcaagagcctgtcggcgattgcgggtcgcatcaccggtactcactggtctggcccagcgttcttcggcctcaaatcccccgcctcgaagaaggtggcagcatgagttcgccgcgtgccaccccgcaaccggcggtcacgcccaagaagcgttgcgccgtc

SEQ ID NO: 23876 - DNA, 260 bp, Unknown
  Description of Unknown: LeftRegion for integrase B10877 sequence
cgtctgttgcccggctccgtccttacacgcatttacgacgacattgagcatcgtgtgctggtgcgtggatcgaatgatttcgagtaccaagggcaacgcttcaagagcctgtccgctgtagccaaacgcatcacgggcagccactggtcaggcccggtgttctttggcttgaaggcacctgcctccaagaagggggcggtatgagctcagtgcgtcgaaaccaaactcccgcaatcacgccaaagaagcgctgcgccgtc

SEQ ID NO: 23877 - DNA, 260 bp, Unknown
  Description of Unknown: LeftRegion for integrase B10878 sequence
gttgaaataattggaaaagttatagaagctagaaaaagaaaacaatttaaataaaaagagaaaatgttcctgtttggcgacacgacattttctctactcataaccactattgaaagtgattacttttatattatacactataaaagcctttattttcaatagtaaattaaaaatttataaaaaaatggaggttttttattatggataaaaacatatctttaaaatataagcaaaataaaaatggtataatctttgttgca

SEQ ID NO: 23878 - DNA, 260 bp, Unknown
  Description of Unknown: LeftRegion for integrase B10879 sequence
tctcctggtacgaccctggtgcgtgaatacgacggcatcacttatcgggtcaaggtaatggacgacggccggtttgacttgaacggccgtccattcaaaagcctgtcaagagtggcacgcgaaatcaccgggacggtgtattccggccctgtgtttttcggcttgaagccgtccagtcgtgaacgaaaggcggcccaggtatgaaaacgccagcaacacgttcgccggcactgacgccgaaaaagcgctgcgccatttac

SEQ ID NO: 23879 - DNA, 260 bp, Unknown
  Description of Unknown: LeftRegion for integrase B10880 sequence
actttattcttgatccgatgtgggccgacatacggccaaatctgtttgaacatattgacggactttactcgatgtggaaaaagaaacccgacgataaataaaataaccgctcccggtgctggcacaccaggagcgacgggaaggcgtagaccacagagcggcggctacccttctattatcggaataggaggattttgtcaatgtccacgttccccgacgacgcgacgtgcaagagcattcgtgcagcgctgtacgtccgg

SEQ ID NO: 23880 - DNA, 260 bp, Unknown
  Description of Unknown: LeftRegion for integrase B10881 sequence
cgcatagaatacacccgcccggagcaaagcaaagagaccaccttccgggcccaccagaatgccctctttctcgcgctcctggatgggggcgttgacctggacgggatgaagatcacccaggaggaagccctcctggtcgatgactgcctgacggccaccgtggagatcctccggcgccgtcgtgaacgtgaggcccggtcatgattgcgctctattctcgggtttccacccaggagcaagcggcagaaggctactcgata

SEQ ID NO: 23881 - DNA, 260 bp, Unknown
  Description of Unknown: LeftRegion for integrase B10882 sequence
cggatcgaattctgcaagccgcaaccggagaacgtcacggattttcgctctcatcagaaccggctccttctccgtctcatggagcagaccgtcaccatcgatgacgtccccatcacccaggacgaggcgctcctcgtggacgatttcctgaccgctgcagcggacaccatccgccgccgtcgtgaacgtgaggcccggtcatgatcgcgctctattctcgcgtttcgactcaggagcaggcagcagaaggctactcgatc

SEQ ID NO: 23882 - DNA, 260 bp, Unknown
  Description of Unknown: LeftRegion for integrase B10883 sequence
tgtttttgttactcattctgttacgccctttcgcccgataaatcaaggcttttcggctcctctgtaacataatctatatttctcttttaactcttaagaaaatatataagatatagagtaagagagataaaaaaataaatgtatataggagttgcgaataattctgttatttgttacgcgaccggagaggaggtcaatctatgaatgagaaaacggtcgtcggtctctatatccgagtcagcactcaagagcaagcctcc

SEQ ID NO: 23883 - DNA, 260 bp, Unknown
  Description of Unknown: LeftRegion for integrase B10884 sequence
actgacaaaaagaattgtgttacatgcaaaggtgagctatttcatactgacctcagatgcagttgtttaaggtcagagatgcaaagcggcgagcctttgagatgcatatctattaaagacgcaaaagcgaaaaaaatgacatattgcgccgactgctccagagtgcaatatttaattgatcatggaagggcggacgaggtttgaaacgtgcatttttatatgtccgagtgtccactcaggagcaggccaaagaaggatat

SEQ ID NO: 23884 - DNA, 260 bp, Unknown
  Description of Unknown: LeftRegion for integrase B10885 sequence
tattctttaaaaataaagaaaacttgatatttcttatattataccctaataaacagaaaaagtaaacttgcttgcataatttttttcttccaaaatttaatatctatgatcttattattgctaaatacattttgacatcgcgaacgtataataatataatccttataacgacgtttgttttataaaaaggagatatttatatgcttgagaaaatcttaagagtagcgttatatatacgtgtttccactcaggaacaagtt

SEQ ID NO: 23885 - DNA, 260 bp, Unknown
  Description of Unknown: LeftRegion for integrase B10886 sequence
ctaggggcaacgtcattgaggccaacgcgtctgccccggtcggcggcctggtcctgatgaccgccttgaccgccgcgatggtcgagaaggcttggagcctctacgaccagcggcggcgatcctacctgtaggcggcacgattaaacgtgtcgttattcatcctttgacacagcaaagacgaggccgtaccgtgtctagacatgacgccccgacgcaagcgcgcagccatctacgttcgcatctcccgcgaccgggaaggc

SEQ ID NO: 23886 - DNA, 260 bp, Unknown
  Description of Unknown: LeftRegion for integrase B10887 sequence
aaaggacgttagaacgacatgcctgaccgtcaaggatggctcatcatcgctgctactgccctgctcgtcgcggtcgggttcctcccgccctgctagcccggtacccactagggcccgtcctctccccgagggcgggcccttcgtcattctccagacacatgcaactaacgtttgcgctgcaggaagagtaagttacatgcatgacccctaacgcagcgatctacgcccggcagtccatcgacatagccgagggtatcgac

SEQ ID NO: 23887 - DNA, 260 bp, Unknown
  Description of Unknown: LeftRegion for integrase B10888 sequence
ccagatcaagcgggtctaccgtgagcccggcggcaacctggaacttcggtctgaaaacccggacttccctgtgaagacctacggggaaaaggacctggcaagcgggtgggtgaggatcgttggcaaagtcaaggccgtcatcaccgttccgaaacgcaaatcctgaagcggccgccatctacgccagggtcagcacggcgatgcaggtggaggggggcacgtcgctcccctcccagctttccgagtgccggtcgatggcc

SEQ ID NO: 23888 - DNA, 260 bp, Unknown
  Description of Unknown: LeftRegion for integrase B10889 sequence
ttaatccgtgtaatgcacctgacgtgattagtttattcattttatataattttatttattgaaatttaataactttttaaaatttatttttatacttaaaaaattgatttatttataataaaaaaattgatttttattatttaatagtataattaaattacaaaatttttgttaatttataaattcgttaaattaataaaatgaatcctatttataatacattacaaaatatgacgcaacaacaaggtaatcaaggtatg

SEQ ID NO: 23889 - DNA, 260 bp, Unknown
  Description of Unknown: LeftRegion for integrase B10890 sequence
acgccgcgataaacggcggattgtgtctgtccggaggaatccacccaagcctggaacggtggcaagggtcggagagaatagcccgccgcatcgaaacgcatcagtcggcaccgttctgggatcgacgaaacgttgatctggaggtaactgacttgcggtagtacgtttttttttttttttttttttttttttttttttttgtgggtgttgtgttgggtgcggctaccaattgcgacaaagccggcgtgattctggacggc

SEQ ID NO: 23890 - DNA, 260 bp, Unknown
  Description of Unknown: LeftRegion for integrase B10891 sequence
tggcgggcctcccacacatatacacgcaccattaccccctacaaaagcaaaagggccgcccccgtgttggcgcacgggaacggccaaagaacgcgctgcacggcaaaaactgccatacttcacgccccacagcacaaagtatagcataaaaacgccgcgcggcatagtacctttgtacaatttcgcggggtgtttttattatgttgtacggtaaaccgcaaaattattcgtggtatcgtgcgcgggtggttctttatatc

SEQ ID NO: 23891 - DNA, 260 bp, Unknown
  Description of Unknown: LeftRegion for integrase B10892 sequence
ctggcctcccacacaaatatgcgcaagcactgcccctctcttaaacacaaaaaggccgcccccgtgttggcgcacggaaacggccaaagaacgcgctgcacggcttttgtgccatacttcacgtcctcacagcacaaagtatagcacaaaaacgccgcgcggcatagtacctttgtacaatttcgcggggtgtttttattatgttgtacggaaaaccacaaaattatgcgtggtatcgcgcaagagttattttatacata

SEQ ID NO: 23892 - DNA, 260 bp, Unknown
  Description of Unknown: LeftRegion for integrase B10893 sequence
ttatttccggggcaaacaagcgtttggtcttgttgtaaaacagtatacttgtttgccttgtcaaataatacaggaatttgttgtattcaaaattacttcacaattcgcacatattttattcaaaaggtggtgatgccatttagagaaactttagagaagctttagagtaacaacaagaataaacaaaaggagatggcagcatgagagtagcattatatccaagggtatcggggcatgagcaagaagataactattccata

SEQ ID NO: 23893 - DNA, 260 bp, Unknown
  Description of Unknown: LeftRegion for integrase B10894 sequence
ggcgggcctcccacacatatacacgcaccattaccccctacaaaagcaaaagggccgcccccgtgttggcgcacgggaacggccaaagaacgcgctgcacggcaaaaactgccatacttcacgccccacagcacaaagtatagcacaaaaacgccgcgcggcatagtacctttgtacaatttcgcggggtgttttttattatgttgtacggtaaaccgcaaaattattcgtggtatcgtgcgcgggtggtgctttatatc

SEQ ID NO: 23894 - DNA, 260 bp, Unknown
  Description of Unknown: LeftRegion for integrase B10895 sequence
gcaaatgagtattgaagaaataaagaagatcaaaatccactcggaagttatagatcgcgcggttgagtcagtaaataaaaaactgagaaagcccgcaattccttgttgagccatttctaacatggtataatataggcagggcttaacagctctgccttatttttttatacaaaagaaggtgtgatgtggcaaaatcaaaaatgagaaaaccaaaagagaccaaagctacggagagggttgtgatagctaaatacatcaga

SEQ ID NO: 23895 - DNA, 260 bp, Unknown
  Description of Unknown: LeftRegion for integrase B10896 sequence
ggaaacagtttaaaaagagaacaaaaaatgaaagagtattttattttgctgaaaatatagaagaatataaactagatacaaatggaaatattattttagaaaatatatagttaaggaggtggggaagatgatatataaaaatgaaataattgaacttttatataaaataagaaataaacagttacaaagagaggcaacaaatggagaaattgaaagcagtagcatattgtagagtatccacaataatgcaagaagaaggg

SEQ ID NO: 23896 - DNA, 260 bp, Unknown; identical to SEQ ID NO: 20575
  Description of Unknown: LeftRegion for integrase B10897 sequence

SEQ ID NO: 23897 - DNA, 260 bp, Unknown
  Description of Unknown: LeftRegion for integrase B10898 sequence
ttctggattgtaaggatatttttcgaaaggtaatctggggaattacctgcctgatgttagaataaggccccagctatcacgctggggtcttacctcgtaacaccaaagccttataggcatgtggagaaacagcctatgtttattatatatcgctccacatgctttgtctcacaatcaaacattttatggaggattttataatgacaaaaacagtaaaacgtgctgccctttatatccgtgtaagcaccgacgagcaggcg

SEQ ID NO: 23898 - DNA, 260 bp, Unknown
  Description of Unknown: LeftRegion for integrase B10899 sequence
aatggctatacctaaggctaaccaaagagccgttgctaaatatacaaaatcgcattacgatgatattaaggttcgtgttcctaagggcgagcgagagaagatacaagttcacgctgaaaaaagaggagaaacagtgaacggtttcatcaagcgtgcaataaaagaaacaatagaacgagataatacagaggtataatgtaatgaaaataggcgctgcttatattcgtgttagtaccgacgagcaaaccgagctttcgcca

SEQ ID NO: 23899 - DNA, 260 bp, Unknown
  Description of Unknown: LeftRegion for integrase B10900 sequence
ttatgcaataactgcaaagaaatagggcccgatgccttacccttaccaaaataaagcaccgaaccctattccctttttcttcagtcaaaccattcagagaatattctgaaaaagattcgcgagaaaaacagcctagatatattatacatcctcccgcgaatcttgtccttcggtcaaaaaagattttgggaggtatttttatgtctattattaagcgtgctgcattgtatatacgggtaagcactgaagaacaggcccgt

SEQ ID NO: 23900 - DNA, 260 bp, Unknown
  Description of Unknown: LeftRegion for integrase B10901 sequence
cctgacctgcggccggtattttaccggcccgcgcaggtggcggtgcgacctcgcatacccggaccgacctgcggggacgtgaacgtacaagctgtcatgttactgaccaacaactatagagctggtacgttcaatctggtaccctctgtagggggggctatccgggcggaacccgggccttagtcggaagggtaacagtgatgggacttaagcctgcgggcggttggctgcgcgtgtcgaccacggcgcaagatgagcag

SEQ ID NO: 23901 - DNA, 260 bp, Unknown; identical to SEQ ID NO: 20626
  Description of Unknown: LeftRegion for integrase B10902 sequence

SEQ ID NO: 23902 - DNA, 260 bp, Unknown
  Description of Unknown: LeftRegion for integrase B10903 sequence
gaagtcctatgcggacaagcgtaacggttggatttctctcgattacgcaaccaagctgtaaggttttgcccggtggcatgagctgccgggcttccttttttacacacaaaaattcaccgaaaaatagcacggctattgcttgactaatcggcggcgtagagtgatatatagactaccacaaatggaaggaggaacagagcatgagaatcaaagtaatcaagcccacgaaggcagtacaccagcagaagaaaaaggtctgt

SEQ ID NO: 23903 - DNA, 260 bp, Unknown; identical to SEQ ID NO: 23490
  Description of Unknown: LeftRegion for integrase B10904 sequence

SEQ ID NO: 23904 - DNA, 260 bp, Unknown; identical to SEQ ID NO: 23491
  Description of Unknown: LeftRegion for integrase B10905 sequence

SEQ ID NO: 23905 - DNA, 260 bp, Unknown
  Description of Unknown: LeftRegion for integrase B10906 sequence
ttgtccgcaatcctgattgtcatttccgctgtttttctggctccgccgttttcaaacgtcaataagatttcaaagggtacacgggttgctgttataatcgttacatttatagcagcgttctgggtatcgataaaatagattgtatttccccggtgctgcccgcagttgccggggaaaattgtataaaaatggagatagcaatggacaaggcagtatttatttatacccgcgtatccacgcgtgagcaggcagacgagggc

SEQ ID NO: 23906 - DNA, 260 bp, Unknown; identical to SEQ ID NO: 23576
  Description of Unknown: LeftRegion for integrase B10907 sequence

SEQ ID NO: 23907 - DNA, 260 bp, Unknown
  Description of Unknown: LeftRegion for integrase B10908 sequence
gccccgatgccataattacgatgaggcaaaagctaaaggctttaaaccttgccgtatatgtatgcctgacagaaaatagccacaaacgcatttaaacaccccatacagccgtttttaaaataggggtatagatatataaaaatcagtcaaaaacgccatacacggcattttggtgcataatacgataaaggagtgatgatatgaaaatagcagcggcatacataagggtatcaaccgacagtcagaccgagttatcgcct

SEQ ID NO: 23908 - DNA, 260 bp, Unknown
  Description of Unknown: LeftRegion for integrase B10909 sequence
gtaaaaattctcggtgtggcaaccgatagtttcaaaaaaataaattattaaaaaaaagacctactgctggaacagtaagtcaaatttgaaaaatcacatttagtcggcaaactaaaaaaacaaaataaagttataatgttttggatttttccattatattataacactattttcaaaatttgaaaagagaggttataaaaatgaataaaaaaatacttagagcaggtatttatattagggtttctactgaagaacaagct

SEQ ID NO: 23909 - DNA, 260 bp, Unknown
  Description of Unknown: LeftRegion for integrase B10910 sequence
gaaaataatatcagcggagaacttaccaacagccagcttatccagaccaatcacggtgatgtagtggtcggcaaccatgccctatctcccgaatccgccgaacttctgcgtatctatgagtcgctttcaggccgggaacggctgaagttactcaactttgccgtggacatggaagataaaagcaaggacggtgcatcatcatgaaacgcgcagccctctacatccgcgtctcgacacaggaacaagctcaggagggctac

SEQ ID NO: 23910 - DNA, 260 bp, Unknown
  Description of Unknown: LeftRegion for integrase B10911 sequence
tagcgagaaacaaattaaatgcacccaccactcgactgtaaaagcacagaaacataaaatcgagttgaagtttgatgaacctcgcattcaacacggcggattcgattgagactgtatacaagattgagatgcgtgtaaagtttcgccctcaactttacatttcgcccattttgatgtaaaggaagcacctaagaggtcaaatgaacgttgccgcctatttaaggatgtccacagataagcaagacgatagcattgaaacc

SEQ ID NO: 23911 - DNA, 260 bp, Unknown
  Description of Unknown: LeftRegion for integrase B10912 sequence
gaggcagaaaacgagatgctgaaagacaaacttcgtaaaatagacgaacagcatcgtgaggatatccgggcgatcaaagaagaatacaaggaacagattatgttcttgagagagcagttaagagcatggcaacagagaccataaaggaggtgatgctgtaataggtttccgcaacaccaatacagaaaggggagtttaatatgagagtagcactatacccacgagtatcaggtcatgagcaggaggacaattattcgatc

SEQ ID NO: 23912 - DNA, 140 bp, Unknown
  Description of Unknown: LeftRegion for integrase B10913 sequence
aagaaaacaggtaagaaataaaaagtatataagagttggcactttttttgttattctgttatgtttttggtttttgaattatgagagcgatcatttatataagagtatcgacccaggaacaagcgcgcgacggttactcg

SEQ ID NO: 23913 - DNA, 260 bp, Unknown
  Description of Unknown: LeftRegion for integrase B10914 sequence
gacagaaccgaacatgggcatgattgaagagatgtgcaagattttcggatgtacaaagacagaactgattgacggcattattccagaatcaccacaagacaatgatgaacttatggcaaaaattcagaagttgtcacctgaacagagaaaagatgtacttctgtacattgatttcattttgacaagggagtgattgagccatgaaaaacaaaacaatagagcgagtagcgggttatgtccgcgtgtcttcagataaacag

SEQ ID NO: 23914 - DNA, 260 bp, Unknown
  Description of Unknown: LeftRegion for integrase B10915 sequence
atcgggccggccttgtcctcccggccctgggcaacgcggtcccggccgaggcggtcgagctcgtcgaggatctcggcctgggtgccctctgtgactctgtagtgcctcatggggacagggtagggcggcaacttcggcgacgacagaagactgtgtgcctttcgcatccacttcgtggtgtgaagctctaacatgcacacatgtcgagtactgacaaaggccccacccgagccgcactgtactgccggatgtccgtcgcc

SEQ ID NO: 23915 - DNA, 260 bp, Unknown
  Description of Unknown: LeftRegion for integrase B10916 sequence
ttggttcggagacaggactgggttgacgacggcaagattggtgtcgtccttatcaatggcgatgaggcgacgcttaagtatgtcttccacgaagattcttatttcatacttcaggcggccaatgcaacatatgcaccacgcaaggtgcctgtggaagaaacacgtattctcggccaagtcaaagaagtcgtgtggtccgtatgacggtcgctctttatattcgtgtgagtacggatgagcaggcaaaagacggattctcc

SEQ ID NO: 23916 - DNA, 260 bp, Unknown
  Description of Unknown: LeftRegion for integrase B10917 sequence
gctagaaaaaaagtaagtgacattgaataaaataatataatttatagcacaaaaaaagacttactgcaggaacagtaagccaatttgaaaaatcacaattagtcgacaaactaaaaaaacaaaataaggttataatgtttttggatttttctattacattataacaaattttcactaaaaagaaaagaggttataataaaatgaataaaataattagagtcgcaatttacattagagtatctactgatgaacaagcaaaa

SEQ ID NO: 23917 - DNA, 260 bp, Unknown
  Description of Unknown: LeftRegion for integrase B10918 sequence
tatgtgagaagaaacatagatgcctatgatgatctctgcatagatggcaaagagttgtctagagatgaatggatagacttgctagatggtgcagagatagtggttgaaatgatcagaaaaagaagagaacgatgatagactaaccaacactaaaagagtgccagtctgatcacattctaataatctcggagggaagaaagatgattgtagcgatatatgcaagagtatccacacaggaacaagcattgcatggatactcc

SEQ ID NO: 23918 - DNA, 260 bp, Unknown
  Description of Unknown: LeftRegion for integrase B10919 sequence
cggcggtatcccgcagcagaccgtctcgctgtacctgcgaggggaacgtgccttggacatggacctgttcgtgaccatgtgcgatgtgctcagcctcgacccgatagttgtgttcacggccgcgctgcgctctgtgaagtaggcctgcacctgcacggcttgggagaaaagaatctcggcgccggcgcacggggtaagtcatgagtgaacgcgcagtcttgtacctccgccagtccgtcgctcgcgaggattcgatcagc

SEQ ID NO: 23919 - DNA, 260 bp, Unknown
  Description of Unknown: LeftRegion for integrase B10920 sequence
gccaaaagcagaaaaaaggccattattgttttaggcacctgtcttggattgaccctgacgctgattatcgcggcgctgattatggacagactgaatcccgacattggcttcttctggctggggcagttgtttgcgcccagaggtttctctttcgcggatttatggaaatcactataactactaatggaaggatggtataaatggcttatgactacatagaggaggttgcggcttacatacgcgtgtccacccaagaacaa

SEQ ID NO: 23920 - DNA, 260 bp, Unknown
  Description of Unknown: LeftRegion for integrase B10921 sequence
ctttcctccttctgtatttgggatgtggttttgctgttttgtttgctgtggttttgctgtgttcttgatgttattataccagaaacaaggaagaaagcaacacggcataatgcacaaattatctcgtttatgtttgtctgaatcttaattcttatgggataatagggaatagtaagtattgatggaggtttgcaaagattatgaaaaaagtggttatctacataagagtgagcacagcgcgtcaagatcaggaagggtat

SEQ ID NO: 23921 - DNA, 260 bp, Unknown
  Description of Unknown: LeftRegion for integrase B10922 sequence
ggaaagtggacgatcaacgccagttatggcgatctgatcatccagcaatttgtcagcccagaagcgactatttacaaatatttcgatctcgttgactatggtgaaaatctcactgtcaacctgcaggagggctggatcgtaaaaatatcaaccagcaaagccgtatttaccccatacaccggcgcggcgctggggttcaaatgatcgccctgtacacccgcgtcagcacacaggagcaggcccgggaaggatattccatc

SEQ ID NO: 23922 - DNA, 260 bp, Unknown; identical to SEQ ID NO: 20675
  Description of Unknown: LeftRegion for integrase B10923 sequence

SEQ ID NO: 23923 - DNA, 260 bp, Unknown; identical to SEQ ID NO: 23471
  Description of Unknown: LeftRegion for integrase B10924 sequence

SEQ ID NO: 23924 - DNA, 260 bp, Unknown
  Description of Unknown: LeftRegion for integrase B10925 sequence
cggattcatattgtaccgccgccgctgattttctgtatcagcataaagggcatcgcgttttgttcgagctcatcaaggctgtgccggaggagaatattgaccgagtagcaatcgcattggaactcatgatcaaataagaaaagccccgagcgcgggaatcgctcggggctcctgtaacctccaaggagagattacaatgtatggtcaaatacagtatatctctcccggagaactattgcaaggaggatattcgaatgaaa

SEQ ID NO: 23925 - DNA, 260 bp, Unknown
  Description of Unknown: LeftRegion for integrase B10926 sequence
atgttttacacctccttacaggtttgggctgtgagttttctgtgtttcttctgtgcctacattttaccacttttctggggaaaatcaaggggttttctgcattttttctgttttctctgttttgcacaaaaacaaggattttgctctgtctattttgctaaatatgagataatggtcgaaaagcaaaaaggatgatggacatgaaaagggtagcgatatatgtaagggtttcgacgtcaaaacaggatgaggggtattcg

SEQ ID NO: 23926 - DNA, 260 bp, Unknown; identical to SEQ ID NO: 20730
  Description of Unknown: LeftRegion for integrase B10927 sequence

SEQ ID NO: 23927 - DNA, 260 bp, Unknown; identical to SEQ ID NO: 20754
  Description of Unknown: LeftRegion for integrase B10928 sequence

SEQ ID NO: 23928 - DNA, 260 bp, Unknown
  Description of Unknown: LeftRegion for integrase B10929 sequence
ccagggggtagcaccggcgggccagggggtgagggataaggcggcagcggcgagagcggtaagggcgatgcggattcgcatggtgggaagctttcgtctgcggcactcggtgccgggttgatctacatgactggtaacgggcattggagcacgccaatgcttgaaaccgttcatgtacgataccgcaggtggaagcgattttgtatgcccgagtgagcagtgacccctccggttacggcgtgtcggtctccaagcaggac

SEQ ID NO: 23929 - DNA, 260 bp, Unknown
  Description of Unknown: LeftRegion for integrase B10930 sequence
atttatttagtggaatacgagaaagatatattgataagaaagatattttataatgaatataatattaagttggttccactcaacgaaaaatatccggtaataacggtcaatttgccattggatattcattttaaaataataggtaaaataataggtaaaataacaagcccttaacttagggcttgttttgaaaggaaaaaatgaaaaaagtagcaatttatgttagagtatcaactcaagaacaagctgaaaatggcaac

SEQ ID NO: 23930 - DNA, 260 bp, Unknown
  Description of Unknown: LeftRegion for integrase B10931 sequence
gattatggatgtataaccaaataaccacaggtgccccatgaaacgccaaccccgcaaaatgatcgtcaaagtcctgtctatccctgagcatgagcgccacttcttagagcaaaggttgaatcagcttttggctcaaattgcccgtgaactgggagagcagcgccgtgcgggttgatatctggatcagggtttcgtcagacatgcaagttgagagcgatagccccgccatccatctcagtcgtgccatggactattgcagg

SEQ ID NO: 23931 - DNA, 260 bp, Unknown
  Description of Unknown: LeftRegion for integrase B10932 sequence
aaaaaacatataaatgttttaaatggggcatggagtaaaaaatatgaatgttgcattaactgtggttcaactacagttaaacataaaggcaatggcttatgtgttaactgctacgctacaatgttgcgccacaaaaaggaggtgatgccctatgtcgaacattagagccgcactctatgttcgcgtttaacgcaagcacgatggaacaagcgaccgacggatattccataggcgagcaaaaggataaattactgcactac

SEQ ID NO: 23932 - DNA, 260 bp, Unknown; identical to SEQ ID NO: 22603
  Description of Unknown: LeftRegion for integrase B10933 sequence

SEQ ID NO: 23933 - DNA, 260 bp, Unknown
  Description of Unknown: LeftRegion for integrase B10934 sequence
taattaggagacttttcttcgaaaattacaaaatattgttagtgccgttaaacgataatcacccaacaacaactataattttacctttaaaagatcacttcaagataataggtaagataataggtaaaataaaaacaagcccttaatatagggcttgttatcacagtatataggtatattataccagaaaggatattaatatgcaacgagtagcaatttacgctcgagtatcaactcaagagcaagctgaaaacggtaat

SEQ ID NO: 23934 - DNA, 260 bp, Unknown
  Description of Unknown: LeftRegion for integrase B10935 sequence
ccgcgcgagttcgatttcgcgccgggcacgatcctgctgcgcgaatggggcgagcgcgaacatcgggtgacagtcaccgccgaggggctgtttgagtaccaggggcgcaacttcaggagcctgacggcggtggcccgccacatcacgggcgcgcactggtcggggccgctgttctttggcctgagcaagggaggtgcgcgatgagcgatattgccagcaccaaggcccgcaagcgctgcgccgtctactgccgggtgtcc

SEQ ID NO: 23935 - DNA, 260 bp, Unknown
  Description of Unknown: LeftRegion for integrase B10936 sequence
caacatctgtcacgggcaaatacgtggatgctcccgaaagttggggtccgcaattgctcatggaaggcatgggcggcggtgcagtcatcaacggattctacctgtttgatatattgcccgatgccaccggacttaaattacttgtaaagggatggtcctggacggaaaagcaagaaggctatatcaatctcggtatatagatgaaaaccgccctcggctacatccgcgtctcccgcgaccgcgagggcgacaagctctcc

SEQ ID NO: 23936 - DNA, 260 bp, Unknown
  Description of Unknown: LeftRegion for integrase B10937 sequence
ttacgacaaataaaaaaagccccacgctctcaaactttggcgagtctgagcgtgaggcaatgcaagataaagaaaggtttcaaaatgacaaattttgaaaggtgtctttctatactctattttatcaaaaaaggagtattaagacaatgaatgaaattaataaagtggctctatatgtgcgcgtgtctaccacttcccagatggaagagggctactcgatagaggaacagaaagcaaagctggagagctactgcgatatt

SEQ ID NO: 23937 - DNA, 260 bp, Unknown; identical to SEQ ID NO: 23533
  Description of Unknown: LeftRegion for integrase B10938 sequence

SEQ ID NO: 23938 - DNA, 260 bp, Unknown; identical to SEQ ID NO: 20929
  Description of Unknown: LeftRegion for integrase B10939 sequence

SEQ ID NO: 23939 - DNA, 260 bp, Unknown; identical to SEQ ID NO: 20881
  Description of Unknown: LeftRegion for integrase B10940 sequence

SEQ ID NO: 23940 - DNA, 260 bp, Unknown
  Description of Unknown: LeftRegion for integrase B10941 sequence
cattgatatggacccgcgggtcaagggatttgttaaggaaagtccagacgggttttacaacatttacatcaattcgtgcttatgccatgaggcacaggtggaaacgtaccagcatgagcttgagcacatcgaaagagaccatctttcttcctgcagaggggtaatggaattagaagacgaggcagagaggaggcgaggcaatggttaatgtagcgctctatattcgcgtgtcaacgatggaacaggctacagagggttat

SEQ ID NO: 23941 - DNA, 260 bp, Unknown
  Description of Unknown: LeftRegion for integrase B10942 sequence
gctccggggagtttgcatctaacctgcgctggacatcattgcacggcatattatctatatgcataacccccgattcatgtggcaatacctgtggttcccccaatgaatacttctatgcagtttcagccaatcagcttatattaacgtgccgcacaacggacagaacggttacttatacccgctagacagaggtgattaccttgaaaacagccgtagcctacattagagtttcaacagaaatgcaaacggaatacagcccc

SEQ ID NO: 23942 - DNA, 260 bp, Unknown
  Description of Unknown: LeftRegion for integrase B10943 sequence
ttttggcatccggaagcggaaggcaggctgaatttgatacaaaataaaaggatcagccgttcccgcagctgatcccctgatttccctatccgcaccgcttcgtggtagaaataggcttcgcacctctcattctatcacggaaccgtgcgactgcataggtttcttttttatactcttttttaggaatggaaggtgatctgatgtatatgacacagtcagccccggaactgtacggcgtccgcgtcgtcaaatacatccgg

SEQ ID NO: 23943 - DNA, 260 bp, Unknown
  Description of Unknown: LeftRegion for integrase B10944 sequence
gatctgcctgatcagagcgttagcggtgaaatctttccccgaacctttccgaccgatcagacctagcagcggggcagaatctggatacatgggaactcctcaaggtagacatcgggaacacccgtagagagcgcctacagccgtcccgctacccatctacactgttaggtaagttcgtgcaggcgtagtaacctaaaagtgtgaaagccgccctgtacgtccgcctctcctcctaccggggtgccgccgacccatcgact

SEQ ID NO: 23944 - DNA, 260 bp, Unknown; identical to SEQ ID NO: 23115
  Description of Unknown: LeftRegion for integrase B10945 sequence

SEQ ID NO: 23945 - DNA, 260 bp, Unknown
  Description of Unknown: LeftRegion for integrase B10946 sequence
aatcgactattgatctttagccctgaatcaaccttcaaaaagtatcatgatattgttgttccatatgacacagttaatgatcttaaaatctatgctaaagtcatatggtatgccgtgttattagattgagtctttagcgctaaagatttaatcagggcgggcgacggctcgcccaatttttttctaaggggggttgactaatgagagtggccatttacgtgagagttagcacagacgaacaagcaaaagaaggtttttct

SEQ ID NO: 23946 - DNA, 260 bp, Unknown
  Description of Unknown: LeftRegion for integrase B10947 sequence
gatcgcgacggccttggcgccgcgcgggtcagtctcgggaaggcttatcgttgaactggtcatgcctgctaactccaggtattggcctcgggcaggtcggcggcttcaacgctggcctgccctctttgcttgctgagactatacaccatactagctagaattgcaattgtaagagacctctgtccgctacaattctagccatgcaggacagggtcccggcgcggctccgtgccgtcggggtgatacgtgtctccgaggtc

SEQ ID NO: 23947 - DNA, 260 bp, Unknown
  Description of Unknown: LeftRegion for integrase B10948 sequence
gatttcgaagctgctgtccgatcgctgaccgtaaagcaaaaaaataaaaggatcagccgttcccgcagctgatcccctgatttccctatccgcaccgcttcgtggtagaaataggcttcgcacctctcattctatcacggaaccgtgcgactgcataggtttcttttttatactcttttttaggaatggaaggtgatctgatgtatatgacacagtcagccccggaactgtacggcgtccgcgtcgtcaaatacatccgg

SEQ ID NO: 23948 - DNA, 260 bp, Unknown
  Description of Unknown: LeftRegion for integrase B10949 sequence
agtgggtgggactcccctccctgacctaggtggcgtgcactacggcgagtggtactgtacggcacctaggtcaacggcgagtaaggctaaactccatgaacgatctagctccggccttccgtgcacgacgcctgagggcagtaatctacgcccgcctgagccgctccactgaggaaagcacgagcatcgagcgtcaggtgatggcctgccggtccttcgctgaggcccgcgggtacgaggtggttcttgtctcagatgtg

SEQ ID NO: 23949 - DNA, 260 bp, Unknown
  Description of Unknown: LeftRegion for integrase B10950 sequence
gccgatcatcccgatcgaacccgacgctgacctcgaaccctgaccccggtcacggttccacctagatcgtcgccgcctgctgcccggcgacaccgtgaagagcccccgcccggtcacctccgccgggcgggggccttccgtcgttttcggccccggtatcaggtgacatatgcgaaccctgcccacgggagcgcttgctattgttactcgacgtgaggaccgtgatctacgcccgtctgtcgcgtcgttccgacgtgaac

SEQ ID NO: 23950 - DNA, 260 bp, Unknown
  Description of Unknown: LeftRegion for integrase B10951 sequence
tacttataccagacaattcactccatgaatatcggaacatgaattactctatatacgatatagctcgtattcatggagtgcctcccgagctatgcagtttgaaaaaactgtccaataaagggggtgttgaaaatgtgatcatgaaaagaaaaattttttaagctcgaaaccgaacgtatgtttctggagaggtggtttttatgactgtaggaatctatattagggtaagcacagaagaacaagcaagagaaggattttct

SEQ ID NO: 23951 - DNA, 260 bp, Unknown; identical to SEQ ID NO: 17746
  Description of Unknown: LeftRegion for integrase B10952 sequence

SEQ ID NO: 23952 - DNA, 260 bp, Unknown
  Description of Unknown: LeftRegion for integrase B10953 sequence
tatataataacagacggtgaaaactgcgtgatctgcaatagcgctttctatcatacaagccttgactgcgaaaaccttttgtatgaaggcagaaagtttatagccaaaaagattaaggacgccaaaaaagaaaaaatgacttattgtgctaattgctcacggcagaattatttatataagcacgggaggtttgatgagttatgattgcatgttatgcccgtgtttccacaactgagcaagccgttaacggccactccata

SEQ ID NO: 23953 - DNA, 260 bp, Unknown
  Description of Unknown: LeftRegion for integrase B10954 sequence
gcatattataaaagacgccggacaaaaatatacttaaagcaacgcatgtatactttctcttgcaggtatgtataaatacgcgataatagtatttcaacctgaaaaatatttaaaattatggttgaaattgcttgaataatgtgatatgataggagcaggcaaaagtctgctcctattttttttgcgcgcggaggtgtgctatggagactgatctgaccgctctctatgtaagggtatcaacatacgcacaagcagaagaa

SEQ ID NO: 23954 - DNA, 260 bp, Unknown
  Description of Unknown: LeftRegion for integrase B10955 sequence
cgtgatttcaactttgcgccgggcacgatcttgctgcgtgagtggggtgaccgggagcacaaggtggcggtcaccgcagaggggctgttcgagtacgagggcagcgccttcaagagcctgaccgccgtggcgcggcacataaccggcacgcactggtcggggccgctgttcttcggactgaatggcaaggcaggtgcgcaatgagcgacgccgcacagattgcctctcccaaggcgcgcaaacgctgcgcggtctactgc

SEQ ID NO: 23955 - DNA, 260 bp, Unknown
  Description of Unknown: LeftRegion for integrase B10956 sequence
tatgcagtattgatcgagatgcttatgttcagtaaccaccagctgagcaattttgacggtgtattcaaagtgtacatcgatggcgaatggattcccatctcagacgaaaacgtaagatttcttgagaatctgtccacagacttctgttcgactctcggagagctggcagcgaaacttgtgaagaaagacggtgaaaaataatgaaggctggattgtatgttcgtgtttccacaacagaacaggcgaacgagggctactcc

SEQ ID NO: 23956 - DNA, 260 bp, Unknown
  Description of Unknown: LeftRegion for integrase B10957 sequence
ggtaaaaaaatgattataaacttactaaaaatgatataaaaaaaaccaccctacgccaatagaatggttttcgctgataggttcacttagaattctctaccgctaaacagtacgccaatactgtttgtatagaaaagattaacccaccaagttaatactttttctataccctattttacacgaaatggaggtataaagcaatggcagttaaaaaaataagggtcgcttcttacttgcgagtgtccacagaggaacaaaaa

SEQ ID NO: 23957 - DNA, 260 bp, Unknown
  Description of Unknown: LeftRegion for integrase B10958 sequence
ttatgaaatcagaacaaaggttatgaacattctcattgaatgtcgtaaagaaaaaggcatatcgcaaaaggaacttgccaaaatactcgactccaaagaaacgaccgttgcttcttgggaacagggcaagtctttaccctctattgatatgctttacagattagccaagtactataacaaaacaatggattatatgtacggtgaagccgatgatagccatatacgttagggtcagcacaaacgaacaagctgaaaacggt

SEQ ID NO: 23958 - DNA, 260 bp, Unknown
  Description of Unknown: LeftRegion for integrase B10959 sequence
agaggtttttgccaaatattttggtgttgaactttctgatctgctattagatggagaaaagaacgcaaagagtgaacagaaaaaattgctgttcaaacaatgggaagcgcgtttcccggatgttatttggacgaaagaagaggtaaaagaaatattgcaattcgcggaattcgtgcttgcaaaaaggagagagtagaagaatggaagatctatacaaggccccaaacgttttaagggccgctttatacattcgtgtaagt

SEQ ID NO: 23959 - DNA, 260 bp, Unknown; identical to SEQ ID NO: 21101
  Description of Unknown: LeftRegion for integrase B10960 sequence

SEQ ID NO: 23960 - DNA, 260 bp, Unknown
  Description of Unknown: LeftRegion for integrase B10961 sequence
ctttgttgacttcgtgaaaggaaggaacaacgccagaatagttttcggagtggatgaaaagttcgggttctgctggtatgcggctgttcttgatgatgatatagcagggatatttgtccgtcaggcagacgagatagagtatcttctatacggaaacaatgtatcgtgtgagccagagtttaggaaggaggaaggaagggttgtttgcgacttcatcctcacatttacggaaagaaagaagcgagatcggtaaagtgaaa

SEQ ID NO: 23961 - DNA, 260 bp, Unknown
  Description of Unknown: LeftRegion for integrase B10962 sequence
gatcaccacggacgacatcacggtgatgaccttccctgacgaaacagccgcggagcatgttgcggaagtctatggcgaagacggtgcataccgctctggactcgtcgttctttcatacctcggggctcgtacgccggacgatgcgcgtcctgaatatgaggacatcgtgactgaactgcaggagcagtgatcacttcctcatgagcaatcacacccgcgctatcttgtacttgcgccagtccacgtaccgggaagagtcg

SEQ ID NO: 23962 - DNA, 260 bp, Unknown
  Description of Unknown: LeftRegion for integrase B10963 sequence
ataagtttttctgtggtttcaatggtaatgggtggtaagtcccattttatggacaggggagtgtcgaatacagtcgcattcaagtaacaaaataaaaaaacctgcccagtgaggacgcaccgggcaggctgcgctgaatcttctgtcctttcggacgggggaataatcagcgcatggattatatcatagggggaataattatgcaacaagaaaaggtactgcgtgtcgctctgtactgcagggtcagcaccgaggagcag

SEQ ID NO: 23963 - DNA, 260 bp, Unknown
  Description of Unknown: LeftRegion for integrase B10964 sequence
aatctcagacaggtaaaagaatctctcgattctgtatcattagaataataaaaaccgcccctgctggcaacaggaacggctttcatgtgttttgcagttgtaagtaaacatactatacacacttcatacatatatagtatagcatatttacttacacctgcaaaggtgtattttttatacctttttttaaggagaaaactatgattgagagatgtgcgatttatataagagtctccactgcagagcagtccatgaaagga

SEQ ID NO: 23964 - DNA, 260 bp, Unknown
  Description of Unknown: LeftRegion for integrase B10965 sequence
attttcaattatttgctattatttttatacttttgctattatttttatactttatgtatttaatttaaataacttttaaaaatttatttttatacttaaaaaattgatttatttataataaaaaaattgatttttattatttattggtattaataaactataaagtttgtgttaattcataaattcgttaaattaataaaatgaaccctaattataacaacttacaaaatatgatgcaacaacaaggcattcaaggtatt

SEQ ID NO: 23965 - DNA, 260 bp, Unknown
  Description of Unknown: LeftRegion for integrase B10966 sequence
acgcggcgttgcccacgaacttgaggtgaccgtcgaagtcctgcagcagcgcctcgaacaccttgtcgccgatgagcgcagctggcttgagcagagactggccggctgcgatgacgcggcctgaacgtcgcttgcggcccgtcccaaacacggcgccgcgagtgctggcgctcgtacgtgtctccaaggagcgcgagggtatggtgtctccggagctgcaggacatcgcgatcggcgactactgcgatcgcagcggctat

SEQ ID NO: 23966 - DNA, 260 bp, Unknown
  Description of Unknown: LeftRegion for integrase B10967 sequence
tcgatttacgagtatgcttaaatgcgagtattgtgggtcaaccctcaaacgccaggttacctacaagaaacaaatagtttgatgttgttccaagtatattaaagaaggtaaggcttcctgccgaggcatgcgcgtgcctgagaaagctattgaagagtggaaacttaggacacctgtaacagtgatagaaaggaacgaatatgggcaaaaacattacagttattccagccaagaaagtgcagctgacggtcacccatcag

SEQ ID NO: 23967 - DNA, 260 bp, Unknown
  Description of Unknown: LeftRegion for integrase B10968 sequence
gtcggctcgtctgggaccacgacgaataccacccgtttgggtatgctgagacacgttcgactccttagacagtcggacttggctcgtcgcgacttgtcctcgcggcgggccgtttttgtgggcctgcggcgagtgagtccgatcaatatcgaaatctgacgttgaatggaatcaacgccgcataaccatattgataccatgtggtggtgaaagccgtcatctacacccgcgtttccgcggaccgcgctggcggccgttcg

SEQ ID NO: 23968 - DNA, 260 bp, Unknown; identical to SEQ ID NO: 23051
  Description of Unknown: LeftRegion for integrase B10969 sequence

SEQ ID NO: 23969 - DNA, 260 bp, Unknown
  Description of Unknown: LeftRegion for integrase B10970 sequence
agtttacggatggtgaacttgacgcaatccaaagcatagcagacctatccgaagatgtgcgtgatagcattctccatcaaatcgaatacgaacgggaaaaggaaataaaacgccgtttacaaggcgcgtaacacaacatatcgcgttaagtcgcgtaacgatttctcaattaacgcaacatcttgtggtaggaggtgtctatggacgtaaaaacggtcgcggcttatgtgcgtgtctcgaccgatctccaaatggagcat

SEQ ID NO: 23970 - DNA, 260 bp, Unknown
  Description of Unknown: LeftRegion for integrase B10971 sequence
ctattcggatcacgtcatgctgaccagcgacaatcagcagtacgagccgatgatgtacagattcgatgagcactcgatccggatcctcggagtgccggtcggattcctgcggatgtacaaatgacattgtacaatgtacaaacaaaaaagaccccgatcagcgttgcagcactggtcggggcgttaggagatggtgcagtatgaaccaaaacaataataccacatccgctcgcgttttgcgagtggcttgttacgagcga

SEQ ID NO: 23971 - DNA, 260 bp, Unknown
  Description of Unknown: LeftRegion for integrase B10972 sequence
gtgatatacctgatgaagaaaaagacaaactacatagaactattttagaaatttacattaatagcaagaaaagttagccatttgaaacatctttgtttaaaaaaataatttcatagtcaatttttattttttcttgttcttcatataaagaaattaataaattgtaaaatttgtgaatgtccataatatcacctcccataatgatattatggttttttattactaaatatacattaaaaggaatgattatagtgaaaaaa

SEQ ID NO: 23972 - DNA, 260 bp, Unknown
  Description of Unknown: LeftRegion for integrase B10973 sequence
aagcgtgagttcaatttcgcgccgggcacagtgattctgcgcgaatggggcgaccgtgatcaccgggtgacagtcaacgtcgagggccgtttcgagtacgagggccacacattcaagagcttgacggcggtggcccggcacatcaccggccagcactggagcgggccgctgttcttcggcttcggcaagggaggtgcgcgatgaacgaaatcgccgctacccgcgcccgcaagcgctgtgccgtctactgccgggtgtcc

SEQ ID NO: 23973 - DNA, 260 bp, Unknown
  Description of Unknown: LeftRegion for integrase B10974 sequence
ttctaatgacgctcttcccgggctgggtggaatcacggcggcggagggtattactgcggcggcccccttggctggcgcggccggccctgacaccatcacgtttttctcaggcgggtcaacctcttccggggtctcaaccgttgacaccgtcctggggtagcccttacggctagagcccagttgtagcaagggttctgactatgtgcgctttagttacattctctaaagagaatgtagacatagcgcagaataggtgggga

SEQ ID NO: 23974 - DNA, 260 bp, Unknown
  Description of Unknown: LeftRegion for integrase B10975 sequence
gaactccttgacggctgtgacgagatggatatacagctcgacaaagttaaggagcatatagtgccgatggacaggcaagaagtaatcgacaaaatcatactggcgactcctgaacagttttcacagataaaggtttacgttgacttcgtgatgcaatcatagcacatttcaatgaatatttaaggccataaaggggacatatgcaaacagcctacgtatacgcgagattttcttctgataaccagcgcgaagagagcatt

SEQ ID NO: 23975 - DNA, 260 bp, Unknown
  Description of Unknown: LeftRegion for integrase B10976 sequence
actcgcacatccaagcagggcgagcgccgagggcagcatggacggcaaggtcgagccccccgatcccagagaagacggatccggcgacagcggcaccatcggccacgtcaccacggccttctcactagttcgggtttacttgcacctcgacctctcgatgtactactattcccgtaatgggaatccacgagagggcgggcatgaacacagcaacgatcgagggtctgaacgtcatcggtgtcgcgcggcagagctcgagc

SEQ ID NO: 23976 - DNA, 260 bp, Unknown
  Description of Unknown: LeftRegion for integrase B10977 sequence
gttggtgtagccatgtgattcccctttttcttgtgctgctgatgcttttgatgttctttcgatttgtcggcgagctcgcctgtcagaggcccagggtgatggccgccaggcccgggaaaacggcgaagacgaccgtcaggggcaacacgccgaagacgagcggaaccccaatagttagctataccccttactgttagggcatgaaacgcgtagcggtttacgtaaggcagagcgaggacaagaccggcgagggcgccgcc

SEQ ID NO: 23977 - DNA, 260 bp, Unknown
  Description of Unknown: LeftRegion for integrase B10978 sequence
ccgcgcgagttcgatttcgcgccgggcacgatcctgctgcgcgaatggggcgagcgcgaacaccgggtgacagtcaccgccgaggggctgtttgagtaccaggggcgcaacttcaagagcctgacggcggtggcccgccacatcacgggcgcgcactggtcggggccgctgttctttggcctgagcaagggaggtgcgcgatgagcgagattgccgctacccgcgcccgcaagcgctgcgccgtctactgtcgggtgtcc

SEQ ID NO: 23978 - DNA, 260 bp, Unknown
  Description of Unknown: LeftRegion for integrase B10979 sequence
gataaaatccattgtgtcatcagccaaggcaagtattatcacaccaatctgaactgtgaaaatctccaatgggagattgaccaaggctttccatccaagcagatcaccatcaaagaggcaaaatctcaaaaaatgatttattgtgccaattgctcaagggatgattatctctataggcatggcagagaggatgaaatcagatgattgccttatatacgagagttagtacccaagagcaaaaagagcatgggcattccata

SEQ ID NO: 23979 - DNA, 260 bp, Unknown
  Description of Unknown: LeftRegion for integrase B10980 sequence
gacattgaactggcacctggcactgttttgctgcgcgaatggggcgaccgtgaccacaaagtgacggtgaccgccgagggcacttttgaatatgaaggcaagtttttcaaaagcctgtctgcggtggccaggcacatctctggcaccccatggtctgggccactgttttttggtctcaaaacaaaccgcaaggaggcagcatgaacgccgccacccaaattgcatcacccaagccgcgcaagaggtgcgccgtgtattgc

SEQ ID NO: 23980 - DNA, 260 bp, Unknown
  Description of Unknown: LeftRegion for integrase B10981 sequence
cgcccgcgcaagttcgacttcgcgccaggcactgtgctgctgcgcgaatggggcgagcgcgagcatcgggtgacggtcgacgccgacggtcacttcgaatacgaaggccgccgcttcaagagcctgaccgccgtggcgcggcacatcaccggccagcattggagcggcccgctgttcttcggcctgaagggaggtgtctgatggcggagatcgcatcctcgaggccgcgcaagcgctgcgcggtctactgccgggtgtcg

SEQ ID NO: 23981 - DNA, 260 bp, Unknown
  Description of Unknown: LeftRegion for integrase B10982 sequence
aaacaaaaatacaacgtggaaataacaaaatctcatttatcacgttgggaaaatgggaaagttgtaccatctgtacgctatgcagggtatcttgctatctattacggggtaagcctcgattatttaatggggtttactgatagccgtgtgcccacggctcttttagcacaggtaaaaagcaagaagggtaaaagcaaagaatgaatatagcaggttatgcccgtgtatcatcagaggggcaattggatggctacagcatc

SEQ ID NO: 23982 - DNA, 260 bp, Unknown
  Description of Unknown: LeftRegion for integrase B10983 sequence
aaacaactactcacaatgagtcacaaatggagaaagtaccgcaaaataatcaaaatcaaggtgtagatcgtagaagttttaaagaaccattaccacgttcaactacaaatggagtggcaaatgaggcgtgggacggaaaaatataataattcatgggtagtccacctacccttattatttttttacttttttaaggggtgatgaattatgaacgtagctatttacgttcgtgtcaggtcagtacattagaacaaaaagag

SEQ ID NO: 23983 - DNA, 260 bp, Unknown; identical to SEQ ID NO: 21194
  Description of Unknown: LeftRegion for integrase B10984 sequence

SEQ ID NO: 23984 - DNA, 260 bp, Unknown
  Description of Unknown: LeftRegion for integrase B10985 sequence
aggaacaaatagaatgggcagaagaaaatggtaagttagaagacaactaataaaatcgtctactaacgatttaaatgacgaagcattgatagtgtataaattacttcttattaattaataatatctaggttggttatagtttaatattttttggggtagcacgactacccttattatttttttaccttttttagggagtgatgaattatgaacgtagctatttacgttcgtgtcaggtcagtacattagaacaaaaagaa

SEQ ID NO: 23985 - DNA, 260 bp, Unknown
  Description of Unknown: LeftRegion for integrase B10986 sequence
aaactccagtagaattaatccttgaaaatatagcaaccggtgaagtttacggttctcacacatatgaaataaattaatccaataaaaaaaacacaccttccccactcgccaaagtagaaaggtgtgtttgctacaataaaccacaataggcatggcttatttgttatgccttattatatcacagataaggagtatttcacatgaaaaaagtagctttatattcaagagttagtactttagaacaaaagaatgaaggacac

SEQ ID NO: 23986 - DNA, 260 bp, Unknown
  Description of Unknown: LeftRegion for integrase B10987 sequence
ataagcgttgaggaagtcgcccgtgggaatatcgcccctgcggcacttgaagcggccgaggacgctccacggaacataagggacgtactcgccgtgaatgagcatacgcttcttgacggtatcgccctcacagaaaaggaatgcgccgttctgcgtatggcgtttgatattgccatagccgccataagggaaaacaggaaatgaacgtaggcatatatgcccgtgtgtccacgcaggagcaagccgccgagggatattcc

SEQ ID NO: 23987 - DNA, 260 bp, Unknown
  Description of Unknown: LeftRegion for integrase B10988 sequence
ttgaaaaattggaggttttgaaatgattaaaataacaataaatggaaacgagataaaagcagaggatgtaactttatctgccgatattgtaaaaatcataacatcatgccttgattgacattatattttaaaaaggttagaatgtgtcgtaagtacgataaatgcggcacattctttttatataaaaggaggatttgaagatggaatgtgttgcgtacatgagagtatcgacagaaaaacaagcagaagatggaaacggg

SEQ ID NO: 23988 - DNA, 260 bp, Unknown
  Description of Unknown: LeftRegion for integrase B10989 sequence
catggaaggaatcatcggcagtggagtccgccggttaaccccagtggaatgtagtcgccttcagggattccctgacgattggttcgacggactggatctaagcgattctgcgaagtatcgaatgctgggcaacgcggtcacggtttcggtgatcaagtggattggagaacggcttttctcattagagttgtgagggcgacatgacacgagtctttggttacgtccgggtaagccatcaaaaatccgcggactctgggttg

SEQ ID NO: 23989 - DNA, 260 bp, Unknown
  Description of Unknown: LeftRegion for integrase B10990 sequence
cttacaaaccccaaagatattgaatccgttaggagaatctcaaatgaacttttaggttcaggaatgatggaagctggaatgcgattatcaatgggagcaaagactgaagatcaacttcaggtgacttaccaacgtactattatggagcagaattttttgattattagaaaactttgtgagatttctgaggctttaaaaaaatgattgcattatatattcgagtttcaacagctgttcaatttgaaaaaggaaactccgtt

SEQ ID NO: 23990 - DNA, 260 bp, Unknown
  Description of Unknown: LeftRegion for integrase B10991 sequence
aaccgggttattttgatactttcgacgctgtatggcatctgtttgagcttgattattgccgcgcttgtcgtggatatactaaacccggaaattggctttttctggctgcgcgggctgttttacccgcagggcgtccaagatttcggccatattacaggggagatattgagacatatacacacataaaaggggaaatttacatgacaattttaagagctggattatatgaacgcgtttcaacggatgaacaagccttgcgg

SEQ ID NO: 23991 - DNA, 260 bp, Unknown
  Description of Unknown: LeftRegion for integrase B10992 sequence
acactgttcacccgcgagtaccacggcaaggtgcaccaggtgatcgccacggccgacggccagtacgagtttgaaggtcgcccctaccgcagcctctcgatgattgcgcgagagatcaccagcagccgctggtcaggtcccgtcttttttgggctcaaggacgacgcagccaaatcttcagccaagaaaggcggctccaaatgagtgaagtattgaaacgccgcatgcgctgcgcggtttacacgcgcaagtccagcgaa

SEQ ID NO: 23992 - DNA, 260 bp, Unknown
  Description of Unknown: LeftRegion for integrase B10993 sequence
ttgtgagctagtgttccgccgcccccgaaacgggcccccgtagctccctctcgatcgagccgattgggcccgtgagcagggacgatggtcgtttcacgatggtaccgaacgcaagcgacccgtaacaggatgaaacggggtaggatggcgtctcccctactagacccgtgtctagtaccaacgaaaagaaagtctcaattatgaataccaagaccatcccgaaacgaacgggaatgcaaaatgccaaacggcgagtcgtt

SEQ ID NO: 23993 - DNA, 260 bp, Unknown; identical to SEQ ID NO: 21331
  Description of Unknown: LeftRegion for integrase B10994 sequence

SEQ ID NO: 23994 - DNA, 260 bp, Unknown; identical to SEQ ID NO: 21331
  Description of Unknown: LeftRegion for integrase B10995 sequence

SEQ ID NO: 23995 - DNA, 260 bp, Unknown; identical to SEQ ID NO: 23746
  Description of Unknown: LeftRegion for integrase B10996 sequence

SEQ ID NO: 23996 - DNA, 260 bp, Unknown
  Description of Unknown: LeftRegion for integrase B10997 sequence
gaggatggttggtactaccgcctagcaacctggcaccacggcccctggccgctgtacaacacccccgccgaagtgaaagcgccgttcacgcccgatgcccgtggtctcgttgccttgatggatcgcatgtacaccatcgtggatcacgtctacgatccttggcttgactggaagcgaacgcacccaatctttgaggggctgtgatatcccctgtccgtgtcgtcatctatctccgcatctcccttgacgctgtagggctg

SEQ ID NO: 23997 - DNA, 260 bp, Unknown; identical to SEQ ID NO: 23996
  Description of Unknown: LeftRegion for integrase B10998 sequence

SEQ ID NO: 23998 - DNA, 260 bp, Unknown
  Description of Unknown: LeftRegion for integrase B10999 sequence
aaaaactccaataacaaagtgtttgttaaccatattgatggtaataaaaaaaataatatagccgacaatttagaatggtgcacacatagtgaaaatattcaacatgcctataataataacttaatttctaggacaaaaaataggttttattattctcgtcataaaaaagacataaaattaatcgaaaaggaagtgttataatgaaagaaataaagagagttgcattatatataagagtgtctactgaacatcaagttaaa

SEQ ID NO: 23999 - DNA, 260 bp, Unknown
  Description of Unknown: LeftRegion for integrase B11000 sequence
gcacacgatcatgctcaaggaaggcaacctggacgtgaccgttgtcggatacgaaccaagggtgaccgtcgatgagggtgtggtcgaactccactagcatctacaaaacatcccacatgattcctcatgcgctactctttgtagatgactagaagcgtagcttcggcgtccagcgtcggactcctgaaaggagtcctagcgtgcgagtcttagggcgaatcagattaagtaggttgaccgaagaatccacttccgctgca

SEQ ID NO: 24000 - DNA, 260 bp, Unknown; identical to SEQ ID NO: 21405
  Description of Unknown: LeftRegion for integrase B11001 sequence

SEQ ID NO: 24001 - DNA, 260 bp, Unknown
  Description of Unknown: LeftRegion for integrase B11002 sequence
tttctactatattaatttataatcttgcatcttctataagcttttatttttacttggttggagctattattgctgttgtttttgggtatggttataccggtaaaacagaaagcaatatagatgaatacgtaggaaactacagacaattttttattttagaagatgaatatattgaaaaataacacgaaggaggtatacatatgaaggctgcaacatatttacgtgtatcgtcagaagagcaggcacaacaaggcttttcc

SEQ ID NO: 24002 - DNA, 260 bp, Unknown
  Description of Unknown: LeftRegion for integrase B11003 sequence
tatgagctgattatttctgaacatccggattcttggctttccttggatgtatcttttggccattatgcggaaatcgtgcgaaatccggattatgattgcgagtttgatgatgaaagtgaacgtaatatggtggagtatgattgtcttgatgaaccgcatgctacattgtccatacattataccacggaaaggagttattcatgaaagtcgcattatatatccgcgtttccactgcggtgcaatttgagaaaggcaattcc

SEQ ID NO: 24003 - DNA, 260 bp, Unknown
  Description of Unknown: LeftRegion for integrase B11004 sequence
actgacaaggtgaattgtgttgtatgcatgggaaagtattaccacacaagccttgattgtgacagtttgaaatgggaacttaaaaatagtgatttaaaacttaaaggaatggatgtgaaagaagctaaaaagcaaggaatgatatattgtgccgattgttcaagtgacctttatcattttaaaaaaggagatttacagaaatgagagtattcttatacatccgagtaagtacctcggaacaagcaaaagaaggctactct

SEQ ID NO: 24004 - DNA, 260 bp, Unknown; identical to SEQ ID NO: 22791
  Description of Unknown: LeftRegion for integrase B11005 sequence

SEQ ID NO: 24005 - DNA, 260 bp, Unknown; identical to SEQ ID NO: 21430
  Description of Unknown: LeftRegion for integrase B11006 sequence

SEQ ID NO: 24006 - DNA, 260 bp, Unknown
  Description of Unknown: LeftRegion for integrase B11007 sequence
gctccaagcagtcgagggcagcccaggtgccagccaaaggcgaggcatcatcgccgcagagcaggtgctcctcgatctggggcagaggcagcaaaaccttagtcatagcaatgggttctggcgtcaggtctctcggccactacctctggaagtagtggccaagtgtccttagggtacccacaagggagcccaggggtccagtgcagacggccatctacgcccgcgtcagcaccgcctccgacgatcaggccaacgccctt

SEQ ID NO: 24007 - DNA, 260 bp, Unknown
  Description of Unknown: LeftRegion for integrase B11008 sequence
ttgattttgtgaaatgagaggtgagcatatggcaattgttacgattgatggaaaagaaattgatatcgaacaaattgaactgccagaagaaattattaaaatcataattgaatgcttaggttgaccgcaaaaatattgtagtgtaaaatgtgtcgtaacatgatatgtgcggcacatttctacacaaaggaggaatagtcatggaatgtgttgcgtatttgcgtgtatcaacagaaaaacaggtcgaagagggaaatgga

SEQ ID NO: 24008 - DNA, 260 bp, Unknown
  Description of Unknown: LeftRegion for integrase B11009 sequence
gcggaacgatctgtatagtgacgggtcggctaatgagatcgaaaaagaagtggacgaaatggttcgttctattacacccgaaaaggtataaacaagacattgaatgtattgtttgatacagatcgggtataaaatgagcagaaaacaagacattggatgagcagattctacggttttctacactataatgaggtattccgatgaagtgtgctatttatatcagagtcagttcgcaagagcagaccatgcatggatatagt

SEQ ID NO: 24009 - DNA, 260 bp, Unknown
  Description of Unknown: LeftRegion for integrase B11010 sequence
tacaagaagatttgaatgatgtcaattcaaagttagataaattaacaagtgaatataatgaagctactgacttaataaatttattgagagatcaacttgaagaaaacgggattgaaccatatgaactataattaaattactaatgacaaagtgcttttattagcacttaaatttttaaaattattgcgaacggaggttttatgaaaaaagttgcatgttatgctagagtgtctacagatgaacaagctagatttggtttt

SEQ ID NO: 24010 - DNA, 260 bp, Unknown
  Description of Unknown: LeftRegion for integrase B11011 sequence
cagagtatcggaggaaaaacagatgaatgttgtggttacgcaaagtggtaaaaaagtgaatattgctgatattgttttgcctgatgatgtggcaagaacaatagctagcatgattggttgacaagtacataaatgacaagtagaatgtgccgtagaatgtagtgtatatgcggcacattttacgtaggagggtaataaaaatggaatgtgtggcatatataagagtgtcaacagaaagacaggttgaagagggttacggc

SEQ ID NO: 24011 - DNA, 260 bp, Unknown
  Description of Unknown: LeftRegion for integrase B11012 sequence
tgaactgatcttggaactccacacgatcatgctgaaagaagggaacctggacgtatacacggtgcaaggctgcggctgctgtgatggtcactcagaacccgaagtcaacatgcgtgaggataagcactacataacaggctacggtcccgcaggcatctacataacgtagcctgcgacaaatcagggtgtaccctgtgtagatgcgagtactaggccggatacggctatccaggttgaccgacgaatccacctccgctgca

SEQ ID NO: 24012 - DNA, 260 bp, Unknown; identical to SEQ ID NO: 21492
  Description of Unknown: LeftRegion for integrase B11013 sequence

SEQ ID NO: 24013 - DNA, 260 bp, Unknown
  Description of Unknown: LeftRegion for integrase B11014 sequence
cggagtatcggaggaaaaacagatgaatgttgtggttacgcaaagtggtaaaaaagtgaatattgctgatattgttttgcctgatgatgtggcaagaacaatagctagcatgattggttgacaagtatataaatgacaagtagaatgtgccgtagaatgtagtgtatatgcggcacattttacgtaggagggtaataaaaatggaatgtgtggcatatataagagtgtcaacagaaagacaggttgaagagggttacggc

SEQ ID NO: 24014 - DNA, 260 bp, Unknown
  Description of Unknown: LeftRegion for integrase B11015 sequence
atagaatcggaggtttaactatatgacagttgtgcttacacagaatgggaaagaaattaatccagaagatgtagttttgccgtcagaagtgctaaagctgattgcagaactgattaattgacgaaaaattgataatagtgtagaatgcgtcatgtgtagtgaatatggcgcattcttttatatctgatggaggaataagaatggaatgtgtcgcatatatgcgtgtttctacggagaaacaggcagaagagggaaacgga

SEQ ID NO: 24015 - DNA, 260 bp, Unknown
  Description of Unknown: LeftRegion for integrase B11016 sequence
ttcagttattagtttgatagtattttcacgttctgtcatactataatacctccatttttaatttttacgaacatctgttctaataactatttatataatagtatttttagtataaatttgcaagcactttattatattcaaataatttaatttacaaataagaaaaacatatcaaggaaatgtaaaaaaggagtaaaattatgtcaataataagagtagcctgttatattagggtatcaacacaagagcaaaagttacac

SEQ ID NO: 24016 - DNA, 260 bp, Unknown
  Description of Unknown: LeftRegion for integrase B11017 sequence
ataaataaactggggggattgacatgattaaaattactattgatggcaaagaagtaaaggcagaagatataaaactttctgctgatgttgtgaaagtcatatcatcatgccttgattgacattatagcaaaaagaggttagaatgtgtcgtaaagtacgataaatacggcacattctttttatataaagggggatttaagatggaatgtgttgcgtatataagagtatcaacagaaaaacaggttgaagaaggctacggg

SEQ ID NO: 24017 - DNA, 260 bp, Unknown
  Description of Unknown: LeftRegion for integrase B11018 sequence
gggctctgcaataggtgaagcgccgttggattctgtacacccgggtcagcaccgacgagcaggtatctggcgcatcgctggaggctcaactcgccgcctgccagtcattcgccaacgccaagggatggggcccggttgaagcgatcaccgatgccggtgccagtggaaagaatcttcatcggccaggagcggaacggatcatggctggggcgaatgagggtaacgtcgccggcctgatcgtctggcgtctcgatcgttgg

SEQ ID NO: 24018 - DNA, 260 bp, Unknown; identical to SEQ ID NO: 22560
  Description of Unknown: LeftRegion for integrase B11019 sequence

SEQ ID NO: 24019 - DNA, 260 bp, Unknown; identical to SEQ ID NO: 23198
  Description of Unknown: LeftRegion for integrase B11020 sequence

SEQ ID NO: 24020 - DNA, 260 bp, Unknown
  Description of Unknown: LeftRegion for integrase B11021 sequence
aatatgttatttgtatattaaaaaaagacaacgtggataaaataaataaagtaactataaaaacatcaccagtctataacagtgaaacgtatgacgaaattactaaatcgatgactatcaatattgaatttaaataaaagagagcctcagggcttttctttttaccgaaaaaagaacgtatgtgcgaaaggagaacggaaatgaaggcagctatttatatacgcgtatctactcaagaacaaatagagaattactctata

SEQ ID NO: 24021 - DNA, 260 bp, Unknown
  Description of Unknown: LeftRegion for integrase B11022 sequence
acccgcgagtaccgcgatgttgagtatcgggtcgtcgtgacacaggatgatcagtacgaatttcaggggcgtctgtaccccagcctgtccgtcattgcccgggagatcaccggcacacgctggtcagggccgctgttcttcgggctcaaggcaccgtcggcgcggaagaccaagaccaaggccaagaaaggagcacgcccatgagcgagaccctcaaacgccgcatgcgctgtgccgtctacacacgcaagtccagcgag

SEQ ID NO: 24022 - DNA, 260 bp, Unknown
  Description of Unknown: LeftRegion for integrase B11023 sequence
cctagaggatgcgagacgggagttggtgaggcttgccatgacggcagaccttgagaacgtaaagacggcattgatacttctcaatgctttggaacaaaaaaatgccacgcacaggtgagacggtcgtgcgtggcaaaggggcgctttggattgggacaagcaatccagagacagtttcagattatcagcgggggcgcaaaatgtcaataaaaagagtggcaatgtacataagggtaagcagtgataaacaggcacaggaa

SEQ ID NO: 24023 - DNA, 260 bp, Unknown
  Description of Unknown: LeftRegion for integrase B11024 sequence
tagcagctgctaaaaaagtacaggtagcagcatatgcgcgtgtttcaactgatagtgatgaacaatacacatcctttgaagctcaagtcagttattacacgaagaaaattcaagaaaatcctcgatgggaacttgttaaggtttatgcggatgaaggcatttccggaacctcaacaaagaatcgagaagccttccaagacatgatcaccgatgccaaaaacggcaagataaacatgatcatcaccaaatcggtatcaagg

SEQ ID NO: 24024 - DNA, 260 bp, Unknown
  Description of Unknown: LeftRegion for integrase B11025 sequence
cccttagaggatgcgcggcgggagttggtcagacttgctatgaccgcagaacttgagaatgtaaagacagcgctgattcttctcagcgcattggaacaaaaaaatgccccgcacgggtgagacggtcgtgcgggacaggggcgctatggattgggacaagcaatccagagacaaattcagattatcagcgggggcgcaaaatgtcaataaaaagagtggcaatgtacataagggtaagcagtgataaacaggcacaggaa

SEQ ID NO: 24025 - DNA, 260 bp, Unknown; identical to SEQ ID NO: 21704
  Description of Unknown: LeftRegion for integrase B11026 sequence

SEQ ID NO: 24026 - DNA, 260 bp, Unknown; identical to SEQ ID NO: 21741
  Description of Unknown: LeftRegion for integrase B11027 sequence

SEQ ID NO: 24027 - DNA, 260 bp, Unknown
  Description of Unknown: LeftRegion for integrase B11028 sequence
gtgctcacccgcgagtaccagggtgtcgagcaccgcgtcatcgtgacccaggatggccagtacgactaccagggccggatgtacccgagcctgtcgatgatcgcccgcgagatcaccggcacgcggtggtcagggcccctgttcttcgggctcaaaacgccagccactcccaagacagcggcgaagaagggagcccggcgatgagcgaagttctgaagcgccgcatgcgctgcgcggtctacacgcgcaagtccaccgac

SEQ ID NO: 24028 - DNA, 260 bp, Unknown
  Description of Unknown: LeftRegion for integrase B11029 sequence
gtatcataaacgatgaagaaaaggcgaaaatatgcgacttaattttgtctaaaattctttcgtgatttggcgctgtttcgctgggctcaattaaagttttacggtatgtttgtcctacccacttcaccatgggtaggacaaatttttttaagctacattcaagtccgaaaattaaaagatgtagttgaaaggaggtaagaatggcaaagcaaagagcagttgcatactgtcgagtatcaagcaaaagcaaagcacaaatg

SEQ ID NO: 24029 - DNA, 260 bp, Unknown
  Description of Unknown: LeftRegion for integrase B11030 sequence
acggtgctgacccgcgagtaccagcgcgtcgaataccgggtcgttgcgaccgccaatggccagtacgaatttgacggacggttgttccctagtttgtcgatgattgcccgcgagatcaccggtacgcgctggtctgggccgctgttctttggcctcaaggcgcaggccaagccaaaagccaaaaaacagggagcccagcgatgagcgaagtcctgaaacggcgaatgcgctgcgctgtatatactcgcaaatccagtgag

SEQ ID NO: 24030 - DNA, 260 bp, Unknown
  Description of Unknown: LeftRegion for integrase B11031 sequence
cctcgtcaggccgatcggtgtgcgctgccgccggccgcggcatgttcattggcggcggcgttcgtcccacatgcggccgagcttcacgagcccgaggagctgtccgaacagccagatctcgccgattatcaggatcatccagatcatgcgttagatgatggtgggcactccgaccatagtcaactgcatatactccggtcatgaccaaagagggcgtcgggtacctgcggatcagtgatgaccgggagggcctggagcgt

SEQ ID NO: 24031 - DNA, 260 bp, Unknown
  Description of Unknown: LeftRegion for integrase B11032 sequence
cttcctagatgcccttgcctcccgagggctactgaccctcagtcaggtacgcgccattcaccgtcagctcgccgcctcctgggatgggaccagggtggggtttacccgcgccaggacttgataaaccttgcctgtagagcgttcatgtcacacacgagaccaccaccggcgagacccacgcgggcagaaaggagcagtagatgagcccagattttaagaccatcacaccacgacgcacacccaccagccgtatccgcgtg

SEQ ID NO: 24032 - DNA, 260 bp, Unknown
  Description of Unknown: LeftRegion for integrase B11033 sequence
cgcggcgacgatatgccaatcatcggcacgcggctgatccgcgagtaccagggcgtgcagcacagcgtcaccgtactgcacgacggcttcgagtatcagggccacccctacaaatcgctgtcctccatcgcgcgcgccatcaccggcacccgctggaatgggtggctgttctttggcctgaagaaccggagggcagcagcatgaagcgcaagccagccgccgaggccgcgatgccggccacggtccggaaaatccgtgcc

SEQ ID NO: 24033 - DNA, 260 bp, Unknown
  Description of Unknown: LeftRegion for integrase B11034 sequence
tggtttcaaaaatgtcatgagcgtcctatgcaatgaatttgatagatgtattgctcaggatagggaaaaagaaagcaatatctcttgaatctcaataaactgaaatgaattaaactttttacctttaaaatctttaattcatttcagtttttcactatttcatttcgctttttacatttgaatttcacttaggaggcaatatgcaaatagcagcatatatcagagtcagcaccgacaagcaagctgacaagggttattct

SEQ ID NO: 24034 - DNA, 260 bp, Unknown
  Description of Unknown: LeftRegion for integrase B11035 sequence
gcactgcggcatatttacggcgatgactggaataaagatgatgttcaggaaatcgaattatctgcacacaaaaaaaggcactccgcaattaacagagcgccttttaccgagagagggaacaattagaacatccgcatgcaagccggaatgaaccgcacactaattttatcatattgaccgatacagtcaagaggtatcacatgaaaagagttgcattatatatgagagtgagttccgaaactcaggtgaaggaaggtgat

SEQ ID NO: 24035 - DNA, 260 bp, Unknown
  Description of Unknown: LeftRegion for integrase B11036 sequence
tttagatagttctgataattaattaactatttgaaacttcttgatctaaaaaaataagttcatattcaattttaagattttcctgctctccatagagtttaaacaacatatcataaaattttttaaaatccattttatcacctccttgtatctgatattatggattattttttaaatttaaacaaaaaggtgtgatatttttgaaaaaagttttaagaataggtggttatgtaagagtttcacatgaagaacaaaagaaa

SEQ ID NO: 24036 - DNA, 260 bp, Unknown
  Description of Unknown: LeftRegion for integrase B11037 sequence
tctgacaaatcaagtgttccggcagcagttgaagaagagatctacagtatgaacgagaaacaagtggatgaagcggctaatgcagaatcgccatacatcaggatgcttttagctgctgccctcaacgcttccgaccacgatatagccatggtcacggatatcttgctccgtctgtccgaaggatcaggaaggcggcaggcatgatacgggcggcgttatacgccagggtctcaacagacaggcaggcaaaagaaggcgat

SEQ ID NO: 24037 - DNA, 260 bp, Unknown
  Description of Unknown: LeftRegion for integrase B11038 sequence
cgaggcgacgacaagccaatcaccggcacgcggctgatccgtgagtaccagggcgtcgagcacagcgtcaccgtgctgcacgaagggtacgagtatcagggtcgcccctaccagtcgctctcctccatcgcgcgggccatcaccggcacgcgctggaatggctggctgttcttcggcctgaagaaccggaggggcacggcatgaagcgcaagccagccgccgagactgcgatgccggccaccgtgcggaagatccgcgcc

SEQ ID NO: 24038 - DNA, 180 bp, Unknown
  Description of Unknown: LeftRegion for integrase B11039 sequence
gccgcgggacagctcagccgggggcgagcacgtcgcactcatcggtggcatcgcatcagacgttgaagcggaactccaccgaattacgttgcagaaagacatgactgctagggtacgcccgtgcaccgccgctgcggcctctacgcccgccaatccaagggagatctcgacgggatcgac

SEQ ID NO: 24039 - DNA, 260 bp, Unknown
  Description of Unknown: LeftRegion for integrase B11040 sequence
tatatgtttcacgtggaacattatttaattttttaatttctatttgaaactttttctatagtatattttattttcaaatctttttgtttggaataaagagtaataagtaattcataaaacttatttacatccactttatcacctctttttgtttcattatgaaacattattctaaatttttcaactaggaggaactttttatgaaaaaaactttaagaattggtggataccctcgtgtatcaaaagatgaacaaaaaaag

SEQ ID NO: 24040 - DNA, 260 bp, Unknown
  Description of Unknown: LeftRegion for integrase B11041 sequence
agagtggataaccgaccaatcgcaggcacccgactgattcgggaatggcagggctgcccatatgaagttgttgtaggggtggaccactttgaataccagggacgaccctacaagtcactttccagtattgctcgctctattactggcaccaaccgaaacggttgggccttctttggtctttgctcagcaaggggagccgcatgagcaacgaacagaagcgcttgatctgcgcaatctacacacgcaagtccaccgaggaa

SEQ ID NO: 24041 - DNA, 260 bp, Unknown
  Description of Unknown: LeftRegion for integrase B11042 sequence
gcacggactcccaaaatggcgaacatagacatgctgtgcgattattttaatgtgccccggagcgcgctgatggaagtccataagaaaagaacgcaagaagatgtctcgaaagaacaggcagaacttatacagctcgccatgcactcaaatgcagacaatgtccgacttgctcttgatgttctaaaaagattggagcagaaatgactcgcaccgccatttatctccgcgtgagcagtgaccggcaggcccgcgagggcgac

SEQ ID NO: 24042 - DNA, 260 bp, Unknown
  Description of Unknown: LeftRegion for integrase B11043 sequence
tgtgtcagtcaaccctccgcagacatgcttgtggccatcgctatgctgtaccatgtgtccctgtctgatttgtgcggcgtagattatctggttgaatacagtccagaagagaaatacatgattgagtcttacagaaaagcagacgattccgaaaaattagtaattcagaaaattcttgccctgaataaagaggataaaaaatgaaaagagccgcaatctatatgagagtatccacggagaaacaggttaaggaaggtgat

SEQ ID NO: 24043 - DNA, 260 bp, Unknown
  Description of Unknown: LeftRegion for integrase B11044 sequence
catgccgaaattaaacagttcccgaaaaaagataaccgtcagaagatagcaagtctccgcagacagattgccagaatcaatacatccattcttaatatagattttcaagataaagacgcacaaaccaaatacgataaatataaagccaaactgagagaagccgaacaaaggttgtcctatctcactgaggaggtgatgtaatgccaattatcagagccgcactctacatgcgtgtaagtacagataaacaggtgaaggaa

SEQ ID NO: 24044 - DNA, 260 bp, Unknown
  Description of Unknown: LeftRegion for integrase B11045 sequence
aacggaagagcaaaagaaaatagtagagtatattttgaagatcaatgaaataacaatgagtatagaagaatagaaaacgcccgacacaaggccgggcgcgttagggggagaataccatgaaaaaatgattggtgcttctctttggggtaacaatattctaaacgacgcggacgggttccgcaacatgggggaaaagaaacatgaaaagaacggcgatttactgccgcgtatcgacatcgcgccaggaaaaagaaggggat

SEQ ID NO: 24045 - DNA, 260 bp, Unknown
  Description of Unknown: LeftRegion for integrase B11046 sequence
gaagacgcagaaagcggagaagtcgtaatcgcatccgtcaacggagatgacgcgacttgtaaaattcttcgcaaatacaatagtgggatcgaattgattccgataaacccaacatataaaccaatgtttttctcaaacgaagaaattcagaaccttcctgtaaccatcattggcagagttatcgagttgagggcgaaattatgaaaagggctgcaatatacatgagagtatccacacaaattcaagctcaggaaggcgac

SEQ ID NO: 24046 - DNA, 260 bp, Unknown
  Description of Unknown: LeftRegion for integrase B11047 sequence
gagtcaggtgcgatcgctgctgtaatagtaaatgacgacacggaagcgacactaaagcgcataaaaaagcagggtgatatgattatcctcatgccggataaccccgagcacgagccgattgttattacaccggacagccctgctcgcattattggccgagcggtccaggtaactcaaatactgtaaaggaggtatagatgatgagagcagctctttacttgagagtatccacacaagaacaaactgaaaactacagcatc

SEQ ID NO: 24047 - DNA, 260 bp, Unknown
  Description of Unknown: LeftRegion for integrase B11048 sequence
ccactcaaagcggtggccatgcccggcgcaacactggtgcgggaattcgacggcaaggaataccgggttcaagtgctggccgacggtcgctacgaatacaaccgccagatttacggcagcttgtctgccatcgccaagaccatcaccggcactcagtggtcaggacctgccttttttggcctcaaaaccaagggggaagcatgagcatgctgacgcccaaacgctgcgcggtctattgtcgtgtttcctctgacgagcga

SEQ ID NO: 24048 - DNA, 260 bp, Unknown; identical to SEQ ID NO: 21820
  Description of Unknown: LeftRegion for integrase B11049 sequence

SEQ ID NO: 24049 - DNA, 260 bp, Unknown; identical to SEQ ID NO: 23108
  Description of Unknown: LeftRegion for integrase B11050 sequence

SEQ ID NO: 24050 - DNA, 260 bp, Unknown
  Description of Unknown: LeftRegion for integrase B11051 sequence
atttagatagtagaaaaagttagctatttgaaacgttatcgcctaaaaaaataagctcatattcaacttttacattttcttgttcttcatatagcttgattaataattcataaaatttttctacgttcataatttattctcctttcattgctattattatgcaacaaatttcatttttattctaaaaagaggtggtaaaaatgcaaaaattaagagtagtaggatatgctcgtgtttctcacgatgagcaaaaaaaatat

SEQ ID NO: 24051 - DNA, 260 bp, Unknown
  Description of Unknown: LeftRegion for integrase B11052 sequence
ccactcaaagcggtggccatgcccggcgcaacactggtgcgggaattcgacggcaaggaatacagggttcaagtgctggccgacggtcgctacgaatacaaccggcagatttacggcagcttgtcggcgatcgccaagaccatcaccggcacacagtggtccggacctgcctttttcggcctcaaagccaagggggaagcatgagcatgctgacgcccaaacgctgcgcggtctattgccgtgtttcctctgacgagcga

SEQ ID NO: 24052 - DNA, 260 bp, Unknown
  Description of Unknown: LeftRegion for integrase B11053 sequence
gactaccgccgcatattatgtttctatttgaaacatagtatttaaaaatttttgcttttcacaacatatttaatttttaacttctcttgcttcccgtaaagttcaaaaagcaatttataaaagttgtcaatattcacgttatcacccctttaaattgactataaggggcttttaataaaaagtaaaggaatgtggtataaatgaaaaaagcgttaaaaatcggcggttatgtgcgtgtatcaacggacgaacaaaaaaag

SEQ ID NO: 24053 - DNA, 260 bp, Unknown; identical to SEQ ID NO: 21887
  Description of Unknown: LeftRegion for integrase B11054 sequence

SEQ ID NO: 24054 - DNA, 260 bp, Unknown
  Description of Unknown: LeftRegion for integrase B11055 sequence
aacaatgactgaagaaaaaattagacagatagctttctacggcaagggcggtatcggtaaatctaccacttctcaaaatactttagccgctatggctgaaatgggtcaacgcatcatgatcgtaggttgcgatcctaaagctgactctaccaagatatattgtatggtacatatagattattctactgtgagattattttatgaaaattggatataccagagtatcaacacgagaacaagcacaagacagcagcgcatta

SEQ ID NO: 24055 - DNA, 260 bp, Unknown; identical to SEQ ID NO: 21885
  Description of Unknown: LeftRegion for integrase B11056 sequence

SEQ ID NO: 24056 - DNA, 260 bp, Unknown
  Description of Unknown: LeftRegion for integrase B11057 sequence
agatagccgccaaagatgaccaattgtaccaccgggctatggccatgatggaacgttggaaagtagtccgccatttgagtaaagaagtcgatgcgcagaaattgtttcttctggcgtatcgtctcatcattgctgcctgtctggttctggccgctgtcggttttgccacggataaattgatttttataggagggtagcccatgccggacaaaagactgccggaaggcaagcgcaattgtgccatttatacccgcgtcagc

SEQ ID NO: 24057 - DNA, 260 bp, Unknown
  Description of Unknown: LeftRegion for integrase B11058 sequence
gcaattcatgaataggtggagaacaactaaaaagcgtcccggtgtgagcagcaccgggacgctcgtgcgcagagaaaggagtcaaaactgcgcacgtcaatatggaggagggtcaagtaacccttgcggacttattgtaggattttttagcaaaaatatcaacccattgcatcttttatgtgtatagggggcgataaaacttgcgggtcgcgctatattgccgcgtcagcacagatgagcaggcgcgtcacggacaaagc

SEQ ID NO: 24058 - DNA, 260 bp, Unknown
  Description of Unknown: LeftRegion for integrase B11059 sequence
catgcgattacaatgaccaaaaggatgcgattctgaaggacataaagccatgcgcaaacaagctgaagtgggacgaaaaacaaatcgagaaaattatccacatcatctccaaagaatgtggaaaattcaatgcggaaaaagttaccaaggaatatcggaaaataatccggtgaaaatctgggaattttgggagaaaagcaatgaaacgaacagcgatatatctccgggtcagcacagacaagcaggcacaggaaggcgat

SEQ ID NO: 24059 - DNA, 260 bp, Unknown; identical to SEQ ID NO: 21887
  Description of Unknown: LeftRegion for integrase B11060 sequence

SEQ ID NO: 24060 - DNA, 107 bp, Unknown
  Description of Unknown: LeftRegion for integrase B11061 sequence
cgccgtcaggaatcccctggcggcgtgatcttaggaggtgcgcatttgtgaaacgggctgcgttatatattcgagtcagtacagaagagcaggcccggcacggccta

SEQ ID NO: 24061 - DNA, 260 bp, Unknown
  Description of Unknown: LeftRegion for integrase B11062 sequence
aggcaatctgtagtccaaaacggcgaaatagccgcagttatcatcggagacgaggccacgctaaagcgagtgtttatctttgatgataagctgatccttcaagccgagaaccccaagtatcctccgctcgttttcgtgaaagaggaattgaacactatcagaatattaggcaaagcaatagctttccagagtgatgtcaaatgaacgtttttgggtattgtagagtttcaacaacaatgcaggctgaagaggggtattca

SEQ ID NO: 24062 - DNA, 260 bp, Unknown; identical to SEQ ID NO: 21966
  Description of Unknown: LeftRegion for integrase B11063 sequence

SEQ ID NO: 24063 - DNA, 260 bp, Unknown; identical to SEQ ID NO: 23057
  Description of Unknown: LeftRegion for integrase B11064 sequence

SEQ ID NO: 24064 - DNA, 260 bp, Unknown
  Description of Unknown: LeftRegion for integrase B11065 sequence
acctttcggctcgaaatgattctcgttgaaacattctgccgtaaaaaaaatatcatcaacaacataatcgatctgtatgtcttcctgtgatgcgtacagattgaatagcaatgaatagaatttgtctacgtccataatgtcaccgcctttcaacgatattatgggcatttttctgattttatacgcaaggatgtgattttatgaaaaaaagtttgcgtgttgccggatatgctcgtgtctcgacagacgaacagaaaaaa

SEQ ID NO: 24065 - DNA, 260 bp, Unknown
  Description of Unknown: LeftRegion for integrase B11066 sequence
gcaagggaaccagcattccatctgattaagaatttctgcgagttttacggagtaagcgcagattatctgcttggtcttgttgatgatccgcaagcgaagtatggacaagtttggaatccggcatcgatacctggaccacgaaaagtcaaagctcgtgccgcccgtcttaaagacaaaccgcacaaattaggaggcgcagaatgaaaaatgccgtaatctatgcccgatactccgccggaccgagacaaaccgaccaatcc

SEQ ID NO: 24066 - DNA, 260 bp, Unknown; identical to SEQ ID NO: 23167
  Description of Unknown: LeftRegion for integrase B11067 sequence

SEQ ID NO: 24067 - DNA, 260 bp, Unknown; identical to SEQ ID NO: 23045
  Description of Unknown: LeftRegion for integrase B11068 sequence

SEQ ID NO: 24068 - DNA, 260 bp, Unknown; identical to SEQ ID NO: 21997
  Description of Unknown: LeftRegion for integrase B11069 sequence

SEQ ID NO: 24069 - DNA, 260 bp, Unknown
  Description of Unknown: LeftRegion for integrase B11070 sequence
aatgtgaaaaatctgatcttattgaagaacattcctacgatagtcaatattacttgaagaaagaagtatcaagtctttttaacgatctttcaaatgaccctgaagctgtagagatatatcagaccataaaaaaactatctcccgatgaacgagagatagtaaaatcactgatgaaaaaatttataaaggaggaataataattgcaccaaaaagtaaaaagagcagccggatatatcagagtttcaacagtcgagcaatct

SEQ ID NO: 24070 - DNA, 260 bp, Unknown; identical to SEQ ID NO: 22030
  Description of Unknown: LeftRegion for integrase B11071 sequence

SEQ ID NO: 24071 - DNA, 260 bp, Unknown; identical to SEQ ID NO: 22087
  Description of Unknown: LeftRegion for integrase B11072 sequence

SEQ ID NO: 24072 - DNA, 260 bp, Unknown; identical to SEQ ID NO: 23170
  Description of Unknown: LeftRegion for integrase B11073 sequence

SEQ ID NO: 24073 - DNA, 260 bp, Unknown
  Description of Unknown: LeftRegion for integrase B11074 sequence
gttattatgccagaattgtggggaaaagcaagaggatttctgttttttttctgttttctacgttttgaacaaagacaccatttttttcttaagcacatttacttgctggtgtgtgataatagttacggtgatgaaaggtgaaaaaagtagcaatttatattcgggtgtctacagcccggcaggatcaggaggggtactctgtgccgctccaaaaggaaaggctgatagcttattgcaaagctaagggatgggtagtagca

SEQ ID NO: 24074 - DNA, 260 bp, Unknown
  Description of Unknown: LeftRegion for integrase B11075 sequence
acgcttgttgctatggccgctcttttcgatgttgatatagacgatctggcgaacaagaatcttgaatatgattcaagcaagaaggaattgtccgaacaggaaatgactgttttatccatttttgaaaaactggataacaacaaaaaatcagccgctatcgactatctcgatttcctatctagaaaaagaaggagtgaggaatgaaaagagttgcaatttatattagagtctctacttcactacaggcccaagaaggagac

SEQ ID NO: 24075 - DNA, 260 bp, Unknown
  Description of Unknown: LeftRegion for integrase B11076 sequence
tattctgaaaatattacgcagtaccagctaacgatggcaactgcaaaaaaactccataaattgaatattattaatgatgacgacttcagtttaattgaggaagaaacagcaaaaaaatattgtatcaaaaaagatagtctttatcgcattaataacttgatataaaccctctttttagtaaatatggtagtggctagattatgagtaaaaatgatacaaagattaagcgtgtaagacatcgaagcacactaccacgtaaa

SEQ ID NO: 24076 - DNA, 260 bp, Unknown
  Description of Unknown: LeftRegion for integrase B11077 sequence
tattctgaaaatattacgcagtaccagctaacgatggcaacagcaaaaaaactccataaattgaatattattaatgatgacgacttcattttaattgaggaagaaacagcgaaaaaatattgtatcaaaaaagatagtctttatcgcattaataacttgatataaaccctctttttagtaaatatggtagtggctagattatgagtaaaaatgatacaaagattaagcgtgtaagacatcgaagcacactaccacgtaaa

SEQ ID NO: 24077 - DNA, 260 bp, Unknown
  Description of Unknown: LeftRegion for integrase B11078 sequence
tattctgaaaatattacgcagtaccagctaacgatggcaactgcaaaaaaactccataaattgaatattattaatgatgacgacttcagtttaattgaggaagaaacagcgaaaaaatattgtatcaaaaaagatagtctttatcgcattaataacttgatataaaccctctttttagtaaatatggtagtggctagattatgagtaaaaatgatacaaagattaagcgtgtaagacatcgaagcacactaccacgtaaa

SEQ ID NO: 24078 - DNA, 260 bp, Unknown; identical to SEQ ID NO: 24075
  Description of Unknown: LeftRegion for integrase B11079 sequence

SEQ ID NO: 24079 - DNA, 260 bp, Unknown
  Description of Unknown: LeftRegion for integrase B11080 sequence
tattctgaaaatattacgcagtaccagctaacgatggcaactgcaaaaaaactccataaattgaatattattaatgatgacgacttcattttaattgaggaagaaacagcgaaaaaatattgtatcaaaaaagatagtctttatcgcattaataacttgatataaaccctctttttagtaaatatggtagtggctagattatgagtaaaaatgatacaaagattaagcgtgtaagacatcgaagcacactaccacgtaaa

SEQ ID NO: 24080 - DNA, 260 bp, Unknown; identical to SEQ ID NO: 24076
  Description of Unknown: LeftRegion for integrase B11081 sequence

SEQ ID NO: 24081 - DNA, 260 bp, Unknown; identical to SEQ ID NO: 23095
  Description of Unknown: LeftRegion for integrase B11082 sequence

SEQ ID NO: 24082 - DNA, 260 bp, Unknown
  Description of Unknown: LeftRegion for integrase B11083 sequence
gcttgcgccaaccaccacagtcttatgcagcgatcaggttcagattaattttttctgacctcaacatcataccggaatagcaagcagctggtgctatgaatagagaaggccagtcgtggccttgcttttcttggctgtgcgctatgccgtcgttttcattggatataggttagttagcgcatagccaccacgacagcccattggaaatcattggatacgctcgcgtcagtacggacgagcaggaagaagccctttcagca

SEQ ID NO: 24083 - DNA, 260 bp, Unknown
  Description of Unknown: LeftRegion for integrase B11084 sequence
cagaccgaggaccgtcttgaagtgtggcctcttggccccattgatcttggccagcaggcgctggagaatctcggcttgaatgtgtcctgcctggttggatggcatatcggctcgttcccttcgctacacgatggtgcccataactggacactcttcgtcaacagtagctgactttgggcaccgaggtctagagtgagggcatgcgcagcctcctgtacaagcggatcagcgaagatcagaccggcgaagaggtcggaatc

SEQ ID NO: 24084 - DNA, 260 bp, Unknown
  Description of Unknown: LeftRegion for integrase B11085 sequence
accaagaatggataaaattgatgcactctgtaaatattttaattgttcccgtatggatattatggagccttacggatcaaaacgggaaacaaaggaaataacagatgaccaagccgaattgatccgtttgaccatgaaagcaagcccggataacgttgccctggctcttgcattgctccgaaagttagaaggtgaatgatatgaaacgtgctgcaatttatgcccgtgtcagttccgatcggcaagctaaagaaggtgat

SEQ ID NO: 24085 - DNA, 260 bp, Unknown
  Description of Unknown: LeftRegion for integrase B11086 sequence
catttacggctgactataccgtcaggctgttgtcgcctaatctccgtccagccatttgcagacgcagtagctaactacgcccgccgcgacggagatcagaaagttgagcaggatatccacaagccatcaccccctcccatcgcaagatggtcggtttggcgacagaggcatcatagcacaaagacaggaggcgcgtcaacgtgaacgtcgctctttatatccgcgtgagcaccgaagagcaggcgcagcacggcctgagc

SEQ ID NO: 24086 - DNA, 260 bp, Unknown
  Description of Unknown: LeftRegion for integrase B11087 sequence
gctgaccagcgacaatcagcagtatgagccgatgcagtatgctttttccgagcacgacatccggatcctcggtgtgccggtgggatttttgaggatgtacaagtgatcggtacacttaggtacacttaggtacaaaccggtacaaaaaatccccggccagtgttggcagcaccggtcgggggaaagtgaggcatatacaaatggattatagcatacgcgtcgcctgctatgaaagagtcagcacggaagaacagtcaaaa

SEQ ID NO: 24087 - DNA, 260 bp, Unknown
  Description of Unknown: LeftRegion for integrase B11088 sequence
aaactgaggctcaccacaagaaaggagaatgacatggcacagaagaagaaaggcaccaacacgggcattcccggactgtccttcagtttgaacaaagcgctggggatcacggatgcgaaaaaaaagatcgctaaagctaccggcatcccgaccacaaaatcggggcgtcagaagaagcttggaaagattctgggcatcaaatgaaacacgccgccatctatgcccgcgtaagcagtgaccgtcaagcaagggagggagac

SEQ ID NO: 24088 - DNA, 260 bp, Unknown
  Description of Unknown: LeftRegion for integrase B11089 sequence
ggtttggtctcgtccatgtcaacccctttagtcagacaactatagcagatgctcgcgcgatgtttgccggggtcagttacagatttcaagacccagaccccctcgagccctggctcatccccgaacaggagtgggtgctgatcccggtcatgcctgtagagccggacgaagagccgaagccggagggcgactgagaaaccatgtctcaacttgctaccaaagcaacccccgccgccttcttgggccgagtctccacacaa

SEQ ID NO: 24089 - DNA, 260 bp, Unknown
  Description of Unknown: LeftRegion for integrase B11090 sequence
agctgcgatgcacatcgtgtaaatgcttgggacagggggaatttgtcgtgtaccgggcacggagatagacggtctggacatcacggataggcgtggtaagttcgagcggtcgccccacggcgtggtttgaaacgaaatcctgaatttgctttgcaaagcggcactcagccgcatgtcaccccatgcaaacaggataaaccatgcgctgcgcgatctatacccgaaaatcatcagacgagcggctcaacgccgaatacaac

SEQ ID NO: 24090 - DNA, 260 bp, Unknown
  Description of Unknown: LeftRegion for integrase B11091 sequence
taacggaaaacaataaactaagggttgccgcatactgcagagtctcaaccgataaatatgaacaagaagatagctatgaattacaatgtgctcacttcaaagaattcatagaaagcaaaccaaactggacactggtaaagatatatgccgatgaaggcaaatcgggaacacataaggcaaatagaaagaatttcctagaaatgatagaagatgccaaaaatggtaaaatagatatgatattggtaaaaagtatatcccgt

SEQ ID NO: 24091 - DNA, 260 bp, Unknown
  Description of Unknown: LeftRegion for integrase B11092 sequence
ctgtcagatccggaagaccttgcgagcgttaaaaagatcgcgcaggaacttgttggctccggcatgatggaggccggcctcaagctttccatggcgaaagcggaaatccaattaccgatcagctatcagcgggccatcatggaacagaattttatcatcatccggcagttggataagattgccagactgctcgaaaagtcatgaaatccgcggcgttatacctgcgcgtctcaagcgacaagcaagccaaagaaggcgac

SEQ ID NO: 24092 - DNA, 260 bp, Unknown
  Description of Unknown: LeftRegion for integrase B11093 sequence
gacataagcattgacggaattgcccggggaaaaattgaaccaacgaagcgatactcatttacggacctcgaacagctccgggatgacatcaacaaaaatccttttataagccttggctcaaggcgattaaccaaaaatgagctattccttttaaatgaacttttaacggcttgtatcaacgttttaaatgggtgtgagaaatgatagcgttatatgtgagagtatccacgcatgaacaggcagaaaacgggtattcgatt

SEQ ID NO: 24093 - DNA, 260 bp, Unknown
  Description of Unknown: LeftRegion for integrase B11094 sequence
gcaatgcagtaactatattaaaaatggaaaagacgcctgcagtggaacatcaattgatgatgaggttataagcaggcttaatatagaagaaccgataattgtgagggaggaattaagagatggcaagaaacattacagttatacctgcaagagcaaacagaaacaatctggcagagcagatacagccgcagaaaaagaaaatggcagcttattgcagagtatcaacagaccaattagaacagttatcaagctatgaagca

SEQ ID NO: 24094 - DNA, 260 bp, Unknown
  Description of Unknown: LeftRegion for integrase B11095 sequence
gactgttttgtgtttaccgccgtgttgccctccactataaacggattcattacggagaacgcggacgggcaaagcataatcatcataaactgtttgctgtccaaatcggaacagcttaaagcgttccgccacgaattgaaacatttgaaacggtgcgacttgcataggacagaaccggccagagtattggagagcgctatatgatcgccgccttgtatatccgcgtttccaccaccgaccaggcccagcacggatacagt

SEQ ID NO: 24095 - DNA, 260 bp, Unknown
  Description of Unknown: LeftRegion for integrase B11096 sequence
gatccccgcaatccggtggtggggaccaagcttatccgcgaatgggacgggattgagcacacagtcaccgtgctgaaggacggtttcggctggcagggctgcaaattcaaatcgctctccgccgtggcgcgtgaaatcaccggcacacgctggaatggctatcgcttctttggcctgcgcgagcgcaagcgggaggaagcatgatggacatcaacacccgccagaaccgtcgcctgcgctgcgccatctatacccgcaag

SEQ ID NO: 24096 - DNA, 260 bp, Unknown
  Description of Unknown: LeftRegion for integrase B11097 sequence
aagatatcgactattaccgcgcccagaagatcacgaaagccctactcgatgcggaactgatcagcttggaagaataccacaaattgagcgaattgaacgcgcaatctttctctccgtttctcgtggatatattccctaataccgttgataatactgcggttcagaggtaatatacgacactaccaaagggaggtgaaatagtgaaaaaggtcactaagatcaaggcaaagcaggctcctgcagcagaaaaagctaagctg

SEQ ID NO: 24097 - DNA, 260 bp, Unknown
  Description of Unknown: LeftRegion for integrase B11098 sequence
taacggaaaacaataaactaagggttgccgcatactgcagagtctcaaccgataaatatgaacaagaagatagctatgaattacaatgtgctcacttcaaagaattcatagaaagcaaaccaaactggacactggtaaagatatatgccgatgaaggcaaatcaggaacacataaggcaaatagaaagaatttcctagaaatgatagaagatgccaaaaatggtaaaatagatatgatattggtaaaaagtatatcccgt

SEQ ID NO: 24098 - DNA, 260 bp, Unknown
  Description of Unknown: LeftRegion for integrase B11099 sequence
gccgatccgcgcaatcctgtcgcgggaacccgactcgttcgtgaatggaacgggatcgagcacaccgtgacggtcatgaacgacggcttcgaatggcagggccgcaggttccgctctctttctgccgtggctcgggagatcaccggcacccgctggaatggttaccgcttcttcggcctgcgtgagcgggagggtgcctgatggagggcatggtcaacccgaaacgccgccttcgttgcgccatctatgcccggaagtcg

SEQ ID NO: 24099 - DNA, 260 bp, Unknown
  Description of Unknown: LeftRegion for integrase B11100 sequence
tgtccgttttattggacatagagaaaccgccccgtagtagcagtacggagcggctctctgaaaggaggtgacaaatgagcaaggacggtatggaggtctgaaagatggtatcttcattatacaaaaggtaatctgaaatgtcaagtattacacggagtatttttgaaaggtggtggtgtggggcatgaacatagcaatttatgcccgtgtttgttagtacagacgagcaagcaatacatggtttaagtatagattcgcag

SEQ ID NO: 24100 - DNA, 260 bp, Unknown; identical to SEQ ID NO: 22221
  Description of Unknown: LeftRegion for integrase B11101 sequence

SEQ ID NO: 24101 - DNA, 260 bp, Unknown; identical to SEQ ID NO: 22216
  Description of Unknown: LeftRegion for integrase B11102 sequence

SEQ ID NO: 24102 - DNA, 260 bp, Unknown
  Description of Unknown: LeftRegion for integrase B11103 sequence
ccgccagaccactcggccgccacgggccaccacttcccaggtcggcaggtcgctcatgggataggttgccgtcccagccctgagacccgctgcgccgcagccgttctgccctactgcctcagatgtgcgctttgttgccggcatctaaggaaaacgtgctcatagcgcaggctagtgtccgcaggcgttctcggcactctatggcgcccctggtcgtcggctacgcccgcgtctccaaagaagagcaggcagatgcactg

SEQ ID NO: 24103 - DNA, 260 bp, Unknown
  Description of Unknown: LeftRegion for integrase B11104 sequence
ggagaggaagagcagaagtactactttgatgaagaaagtgcaaggatcgcacagcgaatatgcgagaatcccggtcttcgtgttcttttcgatgcggcagaagacgtaccgcctaaagacttggaagttgttgccgatatgattaagaggctgaagaagacatacagacaatagaagcaagagcgcataggagatgaactatgagagttggaatttatgcgagggtttcaacagatattcaagccaaagaaggagattcc

SEQ ID NO: 24104 - DNA, 260 bp, Unknown
  Description of Unknown: LeftRegion for integrase B11105 sequence
tttttttacaaaagagaaaccgccccgtgttcgcagcacggagcggctctctgaaaggaggtgactttgagcaaaaggcggtagaaaatggaggtctgtttgatggtgcgatacattatacagaaagcaatcgtagctgtcaagtattacatgaggtattttttgaaaggtggtggttcgggacatgaacgtagcaatttatgtccgcgtttgttagtacagatgaacaggcggtgcatgggttaagcgttgacgcgcag

SEQ ID NO: 24105 - DNA, 260 bp, Unknown
  Description of Unknown: LeftRegion for integrase B11106 sequence
gcggacggcttggaacaccgccttgaaaataagcggctgaccatcggcctgatggagacagagctgaataacctacgtcattccgtaaaactatacaggtggatcatactcggtttgtcgctattgatcgtcggtctcttcgtctggtgcgtgtgggtagatattcgttgcgccaattacggcttttggaggggataatattgaatgttttacgcgcagcgctttatccgcgcgtcagtacggaagagcaggcgaagttt

SEQ ID NO: 24106 - DNA, 260 bp, Unknown
  Description of Unknown: LeftRegion for integrase B11107 sequence
tcggtcatcaccgatccgcgcaacccggtcatcggcacccggctggtgcgcgagtgggatggcgccgagcacgtcatcacggttctgaaggatgggtttgactggcagggccgccgatacaagtcgctgtcggccattgcccgcacgattaccggcacgcagtggaacggctaccgcttctttggtttgcgggggatcgcatgagagacggcactgcacccgtccgccgcctgcgctgcgccatctacacccgcaagtcg

SEQ ID NO: 24107 - DNA, 260 bp, Unknown
  Description of Unknown: LeftRegion for integrase B11108 sequence
gccgaccgcgaccttcccatcaccggcacgcgcctcctgcgcgagtggcagggcgtcgagcaggtcgtcacggtcaccgccgacggcttcgaatggcagggtcggccctacaggtcgctgtcggccatcgcgcgcgcgatcaccggcacgcgctggaacggctgggtcttcttcggcctcaagaaccatagggcgcggacatgacgaaaccgcctgaaaaatcgaaggtcgtccgcaagttgcggtgcgcggtctacacc

SEQ ID NO: 24108 - DNA, 260 bp, Unknown; identical to SEQ ID NO: 23042
  Description of Unknown: LeftRegion for integrase B11109 sequence

SEQ ID NO: 24109 - DNA, 260 bp, Unknown
  Description of Unknown: LeftRegion for integrase B11110 sequence
tgacaaaaaaacagtttgaagcagaaaaggattaccggattttagcttattttgttgaagatatgatggaaaacgggatcttaacaaagaaggaagcaagccggatgaaggcccaattacttcgggaaatatctccagttatatcttcaatttaacccaaaacaacttgattatccgggggagtagagctaacatttgacatgcgaaaggaagagaagatggagcgcattattcataaagttgaaacctcccccggcaag

SEQ ID NO: 24110 - DNA, 260 bp, Unknown
  Description of Unknown: LeftRegion for integrase B11111 sequence
gaccacaagatagctgtagtccgcaagtcaaagagaagagaagagtacgaaagacgaatcgaggcgaaaaagagaagaaaggaactcaacaagaagaagatgctggaacagcagaaaagaaaatctgcaagaaaggcaggttacaagaagaacaggtctgaaggaagtaagacagctactccagagaaagctgtggaagaatgaggatagcaggctatctccgagtctcaacgctgaagcaggcggaagatggcgtatca

SEQ ID NO: 24111 - DNA, 260 bp, Unknown; identical to SEQ ID NO: 22754
  Description of Unknown: LeftRegion for integrase B11112 sequence

SEQ ID NO: 24112 - DNA, 260 bp, Unknown
  Description of Unknown: LeftRegion for integrase B11113 sequence
gctgttatcgtgggatatatcttttttgactaccgtattccccaccaggggcttattcagggtggagaggccagcatattcgcatggatcgtctttttgctgcttgccgtcggcatcggcatttttgccgctattttgatgatgtatttgcgctatgcaaaaaagtatacattgtcgccagataatggaggagatgaacaatgagtgtagtattgcgggcagcattatacccgcgtgtgtccacagaagaacagaaaaag

SEQ ID NO: 24113 - DNA, 260 bp, Unknown
  Description of Unknown: LeftRegion for integrase B11114 sequence
ccaaacgaaaattttcgaaagccacaggaattccgacaacaaaagctggacgcaagcggaaagcccaaaacatcctgtggaaagctctatttggcaagaaatgaagtgttcgccgcccggtctgatcctttggattgggcggcatgtgtattttttatacatatttttacaaaactttggaatagaaaggagcaaaaacaatgattaactgtgcgatatatccgcgaaaatcaaaggccaacgacaattcgcaatcaatg

SEQ ID NO: 24114 - DNA, 260 bp, Unknown
  Description of Unknown: LeftRegion for integrase B11115 sequence
gacgtgcgagcaagaacaaaaaagggaaaagcacgtctccggcttgactgccggacgctgcacactgcggcttctcgcatgtcaacgcagtggttttttatatactggctaagtcgcagctcagaagctgccaagaggttgaaaagaaatatatattattatagcacaaaacagacgagaaaaagaagagcaggaacaaaatgaatgtaattttatatgtcagagtatcaacggaagaacagagtcgctcaggattaagt

SEQ ID NO: 24115 - DNA, 260 bp, Unknown
  Description of Unknown: LeftRegion for integrase B11116 sequence
gatccccgcaatccagtggttggcacgaagttgatccgcgaatgggatggtatcgcccacaccgtcaccgttctgaaggaaggcttcgaatgggacggccgccgctacaagtcactttcagcagtggcgcgcgccatcaccggcacgcgttggaacggataccgcttttttggattgcgcgaacgcaagcggggtgaggcatgaaggatgtgtccacaaaacccgcccgccgtctgcgctgcgccatctacacgcgcaaa

SEQ ID NO: 24116 - DNA, 260 bp, Unknown
  Description of Unknown: LeftRegion for integrase B11117 sequence
agacggtctgaaagcagttgtagcttgccagaatgaagaactgtcgcaactgtaccagaccaaggaatttttgcaagagcgaatccgattcatgcaagaccagattaccaagaaagatgacagaatcgataagctcatggagaaagtattataagtcaagccacggaataaccgtggcttttgtttaaggtggtggcagtatgcgtgtagcattatatgctcgcgtaagtacggaggaacaggcaaggcatggaatcagt

SEQ ID NO: 24117 - DNA, 260 bp, Unknown
  Description of Unknown: LeftRegion for integrase B11118 sequence
gtcaagaagattgcggactatttcggcgtggatgtttcgttctttgatgaaccattcccagaagcacctctgccggaagagccgaagtacatccctgttcaagtcatcacatcggaagagagccagatgctgacgctgtacggcaagctgacggagcaggagaaagccgccgtgttcacgctgatcgagatgcttgcaaaatgagagccgtaggatatatccgcgtaagcacaaccgagcagaaactgcacggatacagc

SEQ ID NO: 24118 - DNA, 260 bp, Unknown; identical to SEQ ID NO: 23134
  Description of Unknown: LeftRegion for integrase B11119 sequence

SEQ ID NO: 24119 - DNA, 260 bp, Unknown; identical to SEQ ID NO: 23086
  Description of Unknown: LeftRegion for integrase B11120 sequence

SEQ ID NO: 24120 - DNA, 260 bp, Unknown; identical to SEQ ID NO: 22977
  Description of Unknown: LeftRegion for integrase B11121 sequence

SEQ ID NO: 24121 - DNA, 260 bp, Unknown
  Description of Unknown: LeftRegion for integrase B11122 sequence
cggcggtggcgtgagcagcagggctggacccactcgtggatgaggcgtttgatgtgccggtcgctgcagccaagagcctcggccgcctccgcaacagtcagcagcggccggccttttttgctctgcgctctgctgccggtgtctaaggaaaacgaatccatagcgcagggtagtgtgagtggccgttctgggccgatcctatggccgtcatcggctacgcccgcgtcagcaaagacgatcaggcaggcagcctcccagcc

SEQ ID NO: 24122 - DNA, 260 bp, Unknown
  Description of Unknown: LeftRegion for integrase B11123 sequence
aactacgcagtatttgctcactggtgaggatgagccggcggagacgcaagaggtggcggagatcatgcgcaagtccaacgactcggagcgtaaacagatcttatcttttgcgcggtatatccaggctttccgcgactctctcccagatgatgcggtagtcttccagcagaccaaggacgcacccaaaaaggagggcacaaatgattagggccgccatatatgccagggtgtcaaccgatcagcaggccaatgagggcgac

SEQ ID NO: 24123 - DNA, 260 bp, Unknown
  Description of Unknown: LeftRegion for integrase B11124 sequence
atgaccgcatggacaggaaagacagagttctcgatcagaaagacgatgaaatacgccaactgcggaacaggatagaccaactggtagaccaactgcttgccgcgaatagtcgttaactgtctgtgatttgtggtttctactctgtttgcgagtataatagagatggtgtccaataaaacggatagtggaacattagtaaggtggtgatttttggatatgaaggtagcactttatgtccgggtctagtcagttccgaagaa

SEQ ID NO: 24124 - DNA, 260 bp, Unknown; identical to SEQ ID NO: 22988
  Description of Unknown: LeftRegion for integrase B11125 sequence

SEQ ID NO: 24125 - DNA, 260 bp, Unknown
  Description of Unknown: LeftRegion for integrase B11126 sequence
aatgaggtcgaaatcaagaacaagcacaaagggattttctggtggatttttgtcggctggtggtggcttccgatcaaatggcttgtttttacgctcccggcgctgatcttcaaaatcttcggtcgcaaaaagcaaaaggccgtcaacaagcaaaaaactgtctgcgtttgccagaactgcggatattcttggacgttgtaatgaatgtcgcattgtacgcccgcgtctcgacggaagaacaggcgaggcacgggatcagc

SEQ ID NO: 24126 - DNA, 260 bp, Unknown; identical to SEQ ID NO: 23055
  Description of Unknown: LeftRegion for integrase B11127 sequence

SEQ ID NO: 24127 - DNA, 260 bp, Unknown
  Description of Unknown: LeftRegion for integrase B11128 sequence
ttctattacgatggctccgccgtgcagctcatagcagaaaatccaaagtttcccccgcaggtatttgcgggggagaacatcaaccggattaaagtcattggtctggcagtagcatatacccatgtgattcattaagatgttggcaaataaaaacccgcccccggtgatgatacaccagaggcgagaaaggagtggtatttatggaaagagcggcattgtatatacgtgtcagctcagaagagcaagccatacacggactt

SEQ ID NO: 24128 - DNA, 260 bp, Unknown
  Description of Unknown: LeftRegion for integrase B11129 sequence
aaagggagtcaaggcatgtaaagggataaggattgatgatgccgaattgcagggcttaaacattgcggaacagacagtgattgaggaggtggttaaaaatggcaagaagcattactgttataccagcaaagcagatttcgaatgcggaatcaggaacagcacagtcagtgcagaaattaaagatggcagcgtactgccgagtgtcaaccgaccaagaagaacagttattaagctatgagaatcaggtcaattattacaca

SEQ ID NO: 24129 - DNA, 260 bp, Unknown
  Description of Unknown: LeftRegion for integrase B11130 sequence
ctgcaagaagcgcaaaattgacttgattattacaaagtcggtttccaggttttcgcgcgatgtgaggaagttcgaaaagataatgagcattttgaaaaaatgcggggtaggcgttttcttcgagcttgaaaacctatattcccttgatgcggaagcggctctccggtttgatatgcttttggcagattgaggagggtgaaatggaaaggacggtacagttagtaagacctacgcttccgaaggcagcgcaaataaaaagg

SEQ ID NO: 24130 - DNA, 260 bp, Unknown
  Description of Unknown: LeftRegion for integrase B11131 sequence
gagttccgctatcgggtcgccctggccttggtccaggagctcaagggtgaagggctgattacggaagatgacttcacagtggtccaagcgcgcctgatccatcgttttcatcctgttctggagggtttatatccccagaattgactggatacaatgcgctttcagaggtaacatgcgacctgccagggaggtgatgaagcatggcaagcgtaaagcaagtgctgcccgcaaaggccccggagctcaagacggtccgcgtc

SEQ ID NO: 24131 - DNA, 260 bp, Unknown; identical to SEQ ID NO: 22701
  Description of Unknown: LeftRegion for integrase B11132 sequence

SEQ ID NO: 24132 - DNA, 260 bp, Unknown
  Description of Unknown: LeftRegion for integrase B11133 sequence
ctttttcttttgtttgagagtcagtaacaaatgatgcactcatgctgtttatacgattaaattttagaacatacgtacatatcaagttatttcgtctgtcgccttgtatttaaccattcataggagtggttttacagaaggcgacggaagaaactagattgactagcacgtatgtaagtacaatatcctagttgagtgtaatgtcaaacacgcttcttcctcaaatagttggctacgcaagggttagcacaaagaatgga

SEQ ID NO: 24133 - DNA, 260 bp, Unknown
  Description of Unknown: LeftRegion for integrase B11134 sequence
cttttgttgaagagtcagtaacaaatgatgcactcatgctgtttttacgattgtatgaaaggcacatacataagtacttggttcctttttgctcttgtcgccttctagatgcctaatcctatgattagttaacagcaaggcgacgaaagcctaaagtaatgacttacgtatatatgcttaatctagcctagcgaggtctaatgtcaaacaagactttccctgatgtagtcgggtatgcgagagtcagcacagaacaaaat

SEQ ID NO: 24134 - DNA, 260 bp, Unknown
  Description of Unknown: LeftRegion for integrase B11135 sequence
tttttcttttgtttgagagtcagtaacaaatgatgcactcatgctgtttatacgattaaattttagaacatacgtacatatcaagttatttcgtctgtcgccttgtatttaaccattcataggagtggttttacagaaggcgacggaagaaactaaattaactagcacgtatgtaagtattattgccataagtttttgtaatgtcaaacacgcttattcctcaaatcgttggttacgcaagggttagtaccgcctctggc

SEQ ID NO: 24135 - DNA, 260 bp, Unknown; identical to SEQ ID NO: 23051
  Description of Unknown: LeftRegion for integrase B11136 sequence

SEQ ID NO: 24136 - DNA, 260 bp, Unknown; identical to SEQ ID NO: 23067
  Description of Unknown: LeftRegion for integrase B11137 sequence

SEQ ID NO: 24137 - DNA, 260 bp, Unknown; identical to SEQ ID NO: 23072
  Description of Unknown: LeftRegion for integrase B11138 sequence

SEQ ID NO: 24138 - DNA, 260 bp, Unknown; identical to SEQ ID NO: 23141
  Description of Unknown: LeftRegion for integrase B11139 sequence

SEQ ID NO: 24139 - DNA, 260 bp, Unknown; identical to SEQ ID NO: 24023
  Description of Unknown: LeftRegion for integrase B11140 sequence

SEQ ID NO: 24140 - DNA, 260 bp, Unknown
  Description of Unknown: LeftRegion for integrase B11141 sequence
acaaccttcaaaatcctcctggttcgaggcgcaataacagccgaggattacgccataattgatacaaagatgcgggcaaaatactctccattattaggtagtttataccctcaaaatgacttgataattcaagggaatgacggtaatatgtgtaacaccgaagatgtatctgaaggtgactaataaaggaggtgttccgtatgaaaaagacaatacgggttattgaacccaccataccgcttctcaaaaagaaaaagcgt

SEQ ID NO: 24141 - DNA, 260 bp, Unknown
  Description of Unknown: LeftRegion for integrase B11142 sequence
aagaaactccttgcagactatttcggtgaagatgtgtccatcttcgacaaccctattccagagccgccgcctttagacgagccgaagttcattccagttcacgttataacaagcgaagaaagtcagttgatccatctgtatagcaagctgacggagaaagagaaagttgccgtgttcacgatgatcgagatgttagcaaaatgagagccgccgcatatatcagagtcagcacagccgagcagaaactacacggcttcagc

SEQ ID NO: 24142 - DNA, 260 bp, Unknown; identical to SEQ ID NO: 23091
  Description of Unknown: LeftRegion for integrase B11143 sequence

SEQ ID NO: 24143 - DNA, 260 bp, Unknown
  Description of Unknown: LeftRegion for integrase B11144 sequence
tttagagatgtattacttatctattgcacccattaaatcaatgttagaggagggtatattaagtaaatttgaataccttaaagcagaggcatttttagcagaaaaatattgtatcaataaaggtaacatttaccgccttaacaacttgactaaaccccctaaaagagtgatatatagtgtaaccaaagaggaggtagaagatgaaggaaaagaagataaccaaaatcgaagcattatccaaattaccaaagaaaactaga

SEQ ID NO: 24144 - DNA, 255 bp, Unknown
  Description of Unknown: LeftRegion for integrase B11145 sequence
cggccaggacaacgatcaacggggtaagcgcccagaacaggacgcaggagatagaggtgagcattgctgtccccaggggccgatctgctggcctcgcctggggtgagcagaccgtagcaccttcgcagcgctatgggtcacctatctaaggaaaaggtggacatagcgcacaatggacgggcacttcccgagcctatggccctccgcctcggatacgcccgttgcagcaccgatgaacaggccgacgccctcgcc

SEQ ID NO: 24145 - DNA, 260 bp, Unknown
  Description of Unknown: LeftRegion for integrase B11146 sequence
catgatttttttaagcaagaataccttgatggtattgaggctatgacacctgcatcatgtacaggtaaggaaactttcagcgaaatagttcgtcgcattatatccggtgaagattactctggattactgccacaaaagatgtcattacgtgaaggtgagctattagaggaagctttggaagaattagaaaggcggaagtaatgaaacgagccgcaatttacgtccgtgttagcacggcggaacaacgagacaaaggttta

SEQ ID NO: 24146 - DNA, 260 bp, Unknown
  Description of Unknown: LeftRegion for integrase B11147 sequence
ccacgacgagggctacaagggccctcagggcaacgctcactggcgaggggtggtcgtgttgcatcaagtggagaacggcgggttcgacccgatgttcgtcagcctcgactacctgtgccgcaagtacgaaggtgtggatcttggtacattccgcgacttgaccaaggagaacatgtcaggcgtaccatgacgccgtgcatgtgatctacacccgcatctccaaggaccacgatggcagctccacctccccccaggcgcag

SEQ ID NO: 24147 - DNA, 260 bp, Unknown
  Description of Unknown: LeftRegion for integrase B11148 sequence
gaggttcttgagcggaacattgctgtgtcgcaagctgtattagctgaaagacggcttcacgctcggattcagacagagaagaaagaaaatcagtaaccatgtcgtgggcggtcattggctcacctccatgatcagatgataccacaccgggagggcgaaatatcacccttccggtcgaattttagcttgtgaggcgaattatgattgcattgtacgcaagagtctcgacagaggagcaggcggtgcatgggctgtcgatt

SEQ ID NO: 24148 - DNA, 260 bp, Unknown; identical to SEQ ID NO: 23169
  Description of Unknown: LeftRegion for integrase B11149 sequence

SEQ ID NO: 24149 - DNA, 260 bp, Unknown
  Description of Unknown: LeftRegion for integrase B11150 sequence
tgaaaaagcctatcgcgctgcgatttccatcgccaaatcgatgctgaaaagtggattgattactgaacaagaataccaggaaatcgatgtttcattgctcgaaaaatatcgtccggcacaggggtgtttagggtgctaaatgagttgctataagagcaaatccagaggtaacatatggtctgggaaaggagggttcacgtgtggagcggattgtaaggaagataaaaccgcgggcgtcaataccgtccaagcaaaagcgg

SEQ ID NO: 24150 - DNA, 260 bp, Unknown
  Description of Unknown: LeftRegion for integrase B11151 sequence
tgaaaaagcctatcgcataacactttctatcgccacatccatgcttaggagcgggctgattactgaagaagaatacaagaaaattaatgttttaatgtatgaaaaatttcgcccgatacaaggctgtttgggctgctaaatgagttgctattagggcaaatccagaggtaacatgtggtctgggaaaggagggttccagtgtggagcggattataaggaagataaaaccgcaggcgtcgatggcgtccaagcgaaagcgg

SEQ ID NO: 24151 - DNA, 260 bp, Unknown
  Description of Unknown: LeftRegion for integrase B11152 sequence
cggcctgctgtgggaatgggtgccccgtgatcgcggctcaggggccaggccgacgcctctcttgtccggcgcggaggatcggggccgtgcatcccgcttgtggctgaggccattatagcctcagtgtgcgcttagtcacccctatccaaggaaaaggacgacatagcgcagctaaggtctggagccggttctcggatcctatggccaccctcggatacgcccgtgtctccaaggacgagcagtccgacagtctccccgcc

SEQ ID NO: 24152 - DNA, 260 bp, Unknown
  Description of Unknown: LeftRegion for integrase B11153 sequence
atcagtcgaaacggagagaatataatgaatcgctcaaacataaccgatatatccacgtcgaaagacaagtcgcgcgtgttgcggaaactcatactaaaaacaaaactccgcttattcggcgcttatgcaaggcgtgagtatgccaaagttgctatcaaataccatgagtggagaataaagaagataaagggggaatgactatgcgagttgcactctatgaaagggtctcgacggaggaacaggcaaagcacggaatcagc

SEQ ID NO: 24153 - DNA, 260 bp, Unknown
  Description of Unknown: LeftRegion for integrase B11154 sequence
gggggaagcccgtgacaaatacgtcggggctgtgctgttggcactccgggcaatgtgtgaagccggaaagaaatgacgggcgttttttgcatcttaaatgtgggtatttgcacaaaaagtgcagttttggacgtttaaacggagatttttccgttttttgaaagaaggtggtttaatgaaacgagcggctttgtacgttcgtgtttagcgcaagcaccgcagaacaaaaaaagcacggcctgtccgtggatagccaaata

SEQ ID NO: 24154 - DNA, 260 bp, Unknown
  Description of Unknown: LeftRegion for integrase B11155 sequence
gattattgcgtccgtgtaatcaacttccctacctatattggtggggcggtagtggtagatgaggacgggttctacaacgtgtacctcaatgcaagatgttcgtgggagaagcagaaaaaatcccttgcccatgaacttatgcacttggagaacaacgatttctacaacggggaggatatttccgtaattgaaagaaggtgatgcccaatgcgagtgtgtttatacgctcgtgtctagcctcctcagacgagcaagccaag

SEQ ID NO: 24155 - DNA, 260 bp, Unknown; identical to SEQ ID NO: 23058
  Description of Unknown: LeftRegion for integrase B11156 sequence

SEQ ID NO: 24156 - DNA, 260 bp, Unknown
  Description of Unknown: LeftRegion for integrase B11157 sequence
atcgagaagggccgctggcgcttcgccgggtccaaggagacggcgatcctcgatcgactcgacatctcggcgacgcggttctaccagcacctcaacgtcctcatcgactcacccgccgcgctggctgcggagccgatgctggtgaaccggttgcgccggcagcgggacgctcgtcgacgagagcggactcggcacagcgcatgacccgacgcgggctcaggccggtccccgacgtcccgctgcgcgcggtcgcctatgta

SEQ ID NO: 24157 - DNA, 260 bp, Unknown
  Description of Unknown: LeftRegion for integrase B11158 sequence
cgtatggccttaccatgacgcagtttcggaaagatatcaaagaagcaatgaaaacagaaaagtaagtgaaaaatctgccgcaggcttaatctctgtggtagattttttttagacaggagcaatttgcgcagacggatttttaacactttgaaacagccaaaatgcttgactttaggcggctttagagtgattaatgtattatggaaaaggaggtaaaatcgatgcaaattaaagttatggaaccgaagaaaaaagccggc

SEQ ID NO: 24158 - DNA, 60 bp, Unknown
  Description of Unknown: LeftRegion for integrase B11159 sequence
acccaagagcagaagttgcatggtatatccctcgatgcacagagagagaaactgacggag

SEQ ID NO: 24159 - DNA, 260 bp, Unknown
  Description of Unknown: LeftRegion for integrase B11160 sequence
ctgggtctgcagcaagtatatccgagaagggaaggccgcttgcattggtatgcgcgtgccagacagtgcagtccaggattggagtatttatgaacccacagtggtaaaggaggagaatatcagtggcaaaaaacattacagttattcctgccaagaaaatgatacaagtcgagcaggagcaacacattcagaaaatccgaatggcggcctattgccgagtgtccaccgaccaagacgaacagctatcaagttatgagaac

SEQ ID NO: 24160 - DNA, 260 bp, Unknown
  Description of Unknown: LeftRegion for integrase B11161 sequence
agaaaaatgcgtacattgttacgatgtctttggctaaatctatgcttgaaaaaggcataataaacgaagaagagtacgacaaaattgatacaattatgctcaaaaaatacggcttaaattcgtgtactttatgtttgtaatttactggataataatagataacagaggtaatatgtgtcataccaaggaggtgatttttgatggaaagagtaattgaacgggtagcgtttgatacattgagcattgcaaggctaaagaaa

SEQ ID NO: 24161 - DNA, 260 bp, Unknown; identical to SEQ ID NO: 23714
  Description of Unknown: LeftRegion for integrase B11162 sequence

SEQ ID NO: 24162 - DNA, 260 bp, Unknown
  Description of Unknown: LeftRegion for integrase B11163 sequence
gcaggacaggcaggagcagcagggccagggcccaggcgatggtggtcatggtggtgaatgctgtggggtgatcagccaggggtcagcgaccgcgcctggttgatgggatcaccctacatcgccgaagcgcttatgcgtcggtatctaaggaaaacgtcgccaaagcgctagggtccagatcactgcagcgcagcctatctatgaagctgggatacgcccgtgtgtccaaggaggagcaggccgattctttgccggcccag

SEQ ID NO: 24163 - DNA, 260 bp, Unknown; identical to SEQ ID NO: 23020
  Description of Unknown: LeftRegion for integrase B11164 sequence

SEQ ID NO: 24164 - DNA, 260 bp, Unknown
  Description of Unknown: LeftRegion for integrase B11165 sequence
cccgggggctttttcatgcctgccctagcatcacctcgccaggtcgtcccatcttccgcaaggggggagccgtggccagcttcgatggggctggactgaaacggtaccgaaggcctggctctttttgttgcgctttcagaccgctatccaaggaataggattccaaagcgctaccctgtcgcagtccggcttctcagcctatgcgactgggttacgcacgttgctcaaccgatgaacaggccgatgccctcgctgctcag

SEQ ID NO: 24165 - DNA, 260 bp, Unknown; identical to SEQ ID NO: 23207
  Description of Unknown: LeftRegion for integrase B11166 sequence

SEQ ID NO: 24166 - DNA, 260 bp, Unknown; identical to SEQ ID NO: 22952
  Description of Unknown: LeftRegion for integrase B11167 sequence

SEQ ID NO: 24167 - DNA, 60 bp, Unknown
  Description of Unknown: LeftRegion for integrase B11168 sequence
gaaatgcaaaaacttctgaaagcagtatcgaaaaggcaatacaaagcagtacttgtcgtg

SEQ ID NO: 24168 - DNA, 260 bp, Unknown; identical to SEQ ID NO: 23074
  Description of Unknown: LeftRegion for integrase B11169 sequence

SEQ ID NO: 24169 - DNA, 260 bp, Unknown
  Description of Unknown: LeftRegion for integrase B11170 sequence
cgctatggaggtttccggtgcctacatgcgcaagctgtacaacggcacagagcacaccgtctacagcctcggcaaggggcgtttcagctacgccggaaccgtgtacagctcgcttaccccggtagccaaggccatcaccgggtataaggtgtccggtcgccgcttcttctcaaccacaacaaccatcttcccccgtcccaatgcgtaattccaaacacattcccgccccggttccgctccgccgctgtgccgtgtatgtc

SEQ ID NO: 24170 - DNA, 260 bp, Unknown; identical to SEQ ID NO: 23145
  Description of Unknown: LeftRegion for integrase B11171 sequence

SEQ ID NO: 24171 - DNA, 260 bp, Unknown
  Description of Unknown: LeftRegion for integrase B11172 sequence
tcagcaacatcgtcaggatcgccgcaaaacgatagatcggataattggtcgcataaatgccgaatttgcatacattcttccccgcagctgtcagcgacaagtgaaaggcgttccaggacagttgatttcaagctttttcctctgagtgcaaggtcacaatatcagcccattagaagaagacaagggggtattgtttaaaaatggcaaaaccaattcgcattggatacattcgtgtatctaccgatacagatgaacagttg

SEQ ID NO: 24172 - DNA, 260 bp, Unknown; identical to SEQ ID NO: 23069
  Description of Unknown: LeftRegion for integrase B11173 sequence

SEQ ID NO: 24173 - DNA, 260 bp, Unknown
  Description of Unknown: LeftRegion for integrase B11174 sequence
gaagatgggccgaagaagcggaagaactcggttactatcgtggatatgaggatggttacgaggccgggggaaaagacgctgcccgttttgtcgatatgccggccgacctggaatctgcgtataataacggttacgacgacggttattatgatggctatcaggacggtcactacaccggcacccacgggatggagtagattatgagagtagcattatatgcccgcgtgagtacggaggaacagacgcacggcctctccata

SEQ ID NO: 24174 - DNA, 260 bp, Unknown
  Description of Unknown: LeftRegion for integrase B11175 sequence
gcggactattgtgtgcgtttggttgacctacccatcggtgttcacggatgtgtttcaaaggacgcagacgggtatttctccgtctacatcaacgcaaatgacagctatgaccgacagcgtaaggctgcggatcacgaaataaaaaagcacatcgccaatgatgatttcaccaaggacgatgtgcgtgagattgaggacttatgagggttgcattatattcccgtgtcagtacacaggaacaggcagagcatggcctgtct

SEQ ID NO: 24175 - DNA, 260 bp, Unknown; identical to SEQ ID NO: 22350
  Description of Unknown: LeftRegion for integrase B11176 sequence

SEQ ID NO: 24176 - DNA, 260 bp, Unknown
  Description of Unknown: LeftRegion for integrase B11177 sequence
cagcagatacagacatgaggaaccttacgcaaagagaaagaaaaccaagaaggcatctcattactggcagaagagaaaaaagagaagagataccattacatcatggtctcttgacgaaaagaaacagtcatagggggtggaaatcatttccaccttttttttataatagagcatatgttttcagagaggagagaatttatatgagaattgcaggatatctgagggtatcgacacagaagcaggcggattttggagtctct

SEQ ID NO: 24177 - DNA, 260 bp, Unknown; identical to SEQ ID NO: 24157
  Description of Unknown: LeftRegion for integrase B11178 sequence

SEQ ID NO: 24178 - DNA, 260 bp, Unknown
  Description of Unknown: LeftRegion for integrase B11179 sequence
gtttagagtagttggttttataccttttgacaagtaaaacaaaaaaagaattagaaagtgtttgagttttcgcacagcacaaccacttatctaattccgacaatcactattgaaagcgatttctctaatattatacattagagttacctcgttttcaatagtttaataaacaaatttattgaaaagtgaggttttttattatgaaatatgtagcttgctactgtagagttagtaccgaagaacaaaaaaaattcggtttt

SEQ ID NO: 24179 - DNA, 260 bp, Unknown
  Description of Unknown: LeftRegion for integrase B11180 sequence
aaacagtccgccgtttcaggcgccagttccgcgtcagacaagcggtgaagtagacgcactagctcggcagcctcgttcacacactcctccgcaaccgccgaaatgcgctgtggcgcaatgaaagtcacgtgtgttcctgtagagacagggtgagagtacctactccccacagaaagtcaagacgttttagcgtcagtcccatgggtccgtccgtgcgcctcggttacctgcgcgtgtccacggacaacgaagaacagctg

SEQ ID NO: 24180 - DNA, 62 bp, Unknown
  Description of Unknown: LeftRegion for integrase B11181 sequence
tccagaaaagagatattgaaaattattgtagaaaaaatgagttagtaataacagactggtat

SEQ ID NO: 24181 - DNA, 260 bp, Unknown
  Description of Unknown: LeftRegion for integrase B11182 sequence
tattgaatgctactacaattcattatccatcataaaaacgatgaagcaaagaggcttaattaacgataatgaatttgctactgcagagaagattttagctaaaaaacattgtatcaaaaaaggtagtatttatcgttcaaataacttgataaattccgactttagagcgatatatataatgcaaaaaaaggaggtagaaaatgcaagaaagaacgataatgaaaatagatgcgttaccacaattagaaaggaaaactaga

SEQ ID NO: 24182 - DNA, 260 bp, Unknown; identical to SEQ ID NO: 23121
  Description of Unknown: LeftRegion for integrase B11183 sequence

SEQ ID NO: 24183 - DNA, 260 bp, Unknown
  Description of Unknown: LeftRegion for integrase B11184 sequence
aaaaaatctaagcctggtgaagtacatcaggctttttctttttgattttttcttaaaaccggaaaaatctatcttgaaagtacctatttaggtaagaggacaataaagacattttgttaaagtacagggttgctgattacttgactaatatagcgtttagagggatatatagtgtgtaaaaacttcttctaggaggaaaaatgaatataagaaaaattgaagcaaagaataacaaaagaaaaaagagaatttgtgcatat

SEQ ID NO: 24184 - DNA, 260 bp, Unknown
  Description of Unknown: LeftRegion for integrase B11185 sequence
aaaaaatctaagcctggtgaaatacatcaggctttttctttttgattttttcttaaaaccggaaaaatctatcttgaaagtacctatttaggtaagaggacaataaagacattttgttaaagtacagggttgctgattacttgactaatatagcgtttagagggatatatagtgtgtaaaaacttcttgtaggaggaaaaatgaatataagaaaaattgaagcaaagaataacaaaagaaaaaagagaatttgtgcatat

SEQ ID NO: 24185 - DNA, 260 bp, Unknown; identical to SEQ ID NO: 20886
  Description of Unknown: LeftRegion for integrase B11186 sequence

SEQ ID NO: 24186 - DNA, 260 bp, Unknown
  Description of Unknown: LeftRegion for integrase B11187 sequence
gtatctatggcggttttgcgaaatttcctaaaatccggactgctgacccagtcggaatttgtgcaatgtgaacaaactctcgccgagaaatgcgggttatctttgggcagtattttccgagaaagtgcttgactttctgcccccagtagagggaatatgttagcaagcatacgcttaatacaaagaaacaggtgatgaaattggagcgaaaagtacatcgggtgcagcagcgaccgtccaagccgaagctgctaaaagtc

SEQ ID NO: 24187 - DNA, 260 bp, Unknown
  Description of Unknown: LeftRegion for integrase B11188 sequence
ggagcatccagcaggttctgaccgtggccgcgactctggtggccgctgctgccctggccatcacgttggttgaccgcaacccgcctgatccgccgcacctgcagaggtttggacaacagcgctaaacctgcgggatcgcgcactatgacccgtagtgaactgacctgagggctagtgtcctaggggttacacccctcgaaatgctgttgcgggttggatactgccgggtttccaccgcctctgctgagcagcagcaggcc

SEQ ID NO: 24188 - DNA, 260 bp, Unknown; identical to SEQ ID NO: 22549
  Description of Unknown: LeftRegion for integrase B11189 sequence

SEQ ID NO: 24189 - DNA, 260 bp, Unknown
  Description of Unknown: LeftRegion for integrase B11190 sequence
acggacgcgacttcgagcgttgacgagttggcgtcatggatcgtggtgcatctcgtgcgcgctgcccgggagccggactggcgtcgcatcgccatccgctgctgggagttggatggccgcgaggagatcagccggcagctggagccgggccagttcggtgcactcatggcggccgtgaaagccgagcaggggccacgagcgtgaacaccaccactgtccgccgatgcgtgctctacgcccggatcagcctcagcaaagaa

SEQ ID NO: 24190 - DNA, 260 bp, Unknown
  Description of Unknown: LeftRegion for integrase B11191 sequence
ttaaagaagagtttaataaggctattcctgatgaaacagttaagaaattatatgaagcaatgaaaaaactatagatgtattagttacacgttctattgagcgtgtttttttattgtaaaaaagtagaaattttaaagattccaattacttgatataatagttgtatattatattaattttagcaatggtaggaggacaatatgcagaaaaaacgtggtgtactatatgtgcgtgtatctactacgaaatttgaacaagaa

SEQ ID NO: 24191 - DNA, 260 bp, Unknown
  Description of Unknown: LeftRegion for integrase B11192 sequence
aaaaatctaagcctggtgaaatacatcaggctttttctttttgatttttttcttaaaaccggaaaaaactatcttgaaattacctattaaggtaagagggatatatagacattttattaaagaacagggttgctcattacttgactaatatagtgtttagagggatatatagtgtgtaaaaacttcttgtaggaggaaaaatgaatataagaaaaattgaagcaaagaataacaaaagaaaaaagagaatttgtgcatat

SEQ ID NO: 24192 - DNA, 260 bp, Unknown; identical to SEQ ID NO: 22583
  Description of Unknown: LeftRegion for integrase B11193 sequence

SEQ ID NO: 24193 - DNA, 260 bp, Unknown
  Description of Unknown: LeftRegion for integrase B11194 sequence
gactattgcgttcgtaccgtaccgttgcctatcggtgtccacggatgcgtgtctaaggatgccaacgggttcttcaacgtgtatgtaaatgaacgtgatagtcatgagcgtcagcttgaagcattagaccatgaagtaaaaaagcacatccagggcgatgatttctcaaagccggatgtgcgtgagattgagggattgtaatgcgtgtagcattgtactgccgcgtatcgacagaggagcaagcgatgcacggtttgtcg

SEQ ID NO: 24194 - DNA, 260 bp, Unknown; identical to SEQ ID NO: 23083
  Description of Unknown: LeftRegion for integrase B11195 sequence

SEQ ID NO: 24195 - DNA, 260 bp, Unknown
  Description of Unknown: LeftRegion for integrase B11196 sequence
tgctctctaaaagttaagccttcgtcagcgtcagaaagccggtgaagatttgtaacaatttgagaggcaagttgaacgcaggattctgcagtgatttggctgagatgaggcggaggagcaacgattgtcacgtttttcttgtttgggcctgctcaagataccagctggctacggtaaaagcaagtaatcagagccctgccatgaagatcgggtatctacgtgtgtctacagacacagaggcacagcgatccgccctggaa

SEQ ID NO: 24196 - DNA, 260 bp, Unknown
  Description of Unknown: LeftRegion for integrase B11197 sequence
ctattttgtgtacgttgttccgttcccgccgaatgttcatggtgcagtagtaaccaacgaggacggcacgttctctgtttacatcaacgcaaacgatacaagagagcgtcagcggaaagccggggaacacgaaatcaaacggcacatagagaataacgattttgccaagtcggatgtggtcgaaatagagggcttataaaatgcgagttgcactttactgccgtgtcagtacagaagaacaggctttgcacggcctgtct

SEQ ID NO: 24197 - DNA, 260 bp, Unknown
  Description of Unknown: LeftRegion for integrase B11198 sequence
ttttataagttcattataacatacttgtatctcagcgtgttgaaatagccacgctttttctttttgcttttttcaaaaactgcggaaaatttgtttccaaatttacttagtaatatggagggagtaggtttgcgaaaagcttgacttatcttccctttagagtgatatatggtgtacaaaagttataggaaggagcctgaatggcagtaaggttaattaagacaaaaagtaatcgtaaaaaacaacgtgtctgtgcttat

SEQ ID NO: 24198 - DNA, 260 bp, Unknown
  Description of Unknown: LeftRegion for integrase B11199 sequence
cagcaacgaggaggctgcggaatgagcgacgttcccttctaccgcacgcagatgggccaccgcttcttcgaagccaccgtgcccggcctggtgcgtgagctcgcccggttgaacgacaacctggagcgcctcgccaaggtcctcgagcgcgaccctcgcgcccccgagccaccgccgccgcccctgcccgaggagccccgatgacgcgcaagaagcccgcggccgtcacgccgcccccggaggtgcggcgctgcgcgatc

SEQ ID NO: 24199 - DNA, 260 bp, Unknown
  Description of Unknown: LeftRegion for integrase B11200 sequence
acgccattggtcatggtgtccatggggaagcctccttccggtgtggtggatgtgcctgatgggcccggagcgcaactcaggcgctcaacggcaggcgtgaaaagggttgcgagaacaggcgtggcccgccctcacttcatcactataacccctatggaactaaagcgagcatcagttccataggggttacattccctcacatggaacggctccgcctgggttactgccgcgtctcgaccgccagcgacgagcagcagcag

SEQ ID NO: 24200 - DNA, 260 bp, Unknown
  Description of Unknown: LeftRegion for integrase B11201 sequence
tagagtgtattgccgatttttttaatgtagatacggactacttgcttggaaggactaattacaagccagaatattcattagaagaaaaatggattatcgaatgttatcgaagagcaccaaccaatatgcaagatggcattaaaaacattcttaggacttttgatgaaaaaagtatatcgcagaaggtcgtgtgatcccatatgaaaagagccgctttatacgcaagggtaagcactgatgagcaggcaaggcatgggtac

SEQ ID NO: 24201 - DNA, 260 bp, Unknown
  Description of Unknown: LeftRegion for integrase B11202 sequence
gcagcaaagaagatagatgtggtggttaccatgagggctgccacgattgcacgtaactggggacagtttatggagttcatgctgatttgcagtaagagaaatgtggaagtggtgtgcattgacaaggtagaagatgcacaggccattttccaaaggattcaggagtttaagaaaaggttttttgaaggaagtgatgtaacgtgcgagtaaaagtaattaacaaacgaccagcttcggtcttacaaaagaaaagggtttgt

SEQ ID NO: 24202 - DNA, 260 bp, Unknown
  Description of Unknown: LeftRegion for integrase B11203 sequence
ctcgatgcacaggcccatcccgcacacccgccagaccagctggcccccgcgggggatcacttcccaggtcggcaggtcggtcatggctcaggttgccggtctcaacgggtgagatcggctgcagtggctggcatctgatccgctgtatcctgtggggaactaaggcgagggtcagttctccacgggctacattcccgtgcatgacgctcaccgtcgcctacgccagggtatccaccgcctcgggcgagcagctctcggcg

SEQ ID NO: 24203 - DNA, 260 bp, Unknown
  Description of Unknown: LeftRegion for integrase B11204 sequence
ggacttcctgctgcggctgagcgacccggatgccaccaagcgcgtaccaggcgagatcaggaaggaagcacgggccttactgcgccacttccccatcgctgagaagcttcgccctgtcctgcaggagggactccagaaacaggaagaacctctattgaactaaggcgagcgttggttcaataggggatacactgcctggcatgcggttgcgcgtcgcttacggccgggtctcaacaacgtcgggagagcagctctcggcg

SEQ ID NO: 24204 - DNA, 260 bp, Unknown
  Description of Unknown: LeftRegion for integrase B11205 sequence
ggacttcctgctgcggctgagcgacccgcaggccacccggcgggtgcccggggaggtgaggaaggaggcgcgcgccctgctgcgccatttccccatcgctgagaagcttcgccctgtcctgcaggaggggctacataggcaggaaggacctctattgaactaaagcgagccttggttcaatacgggatacactgcctggcatgcggttgcgcgtcgcctacggccgggtctcaacgacatcgggagaacagctctcggcg

SEQ ID NO: 24205 - DNA, 260 bp, Unknown; identical to SEQ ID NO: 24204
  Description of Unknown: LeftRegion for integrase B11206 sequence

SEQ ID NO: 24206 - DNA, 260 bp, Unknown
  Description of Unknown: LeftRegion for integrase B11207 sequence
gaccttcagcgtgccttgctggggcatacggtttccaaggaaacatgggaaaagatccgtactgctgcgagggaaatcgcttcttctgaagaaaacgccagaggctccaattccaaacctacactcgccgaagtaaaagaaatgttacaaagtttaaatgactactttgattcgcagaagaccagctgagaggggcgcctatgagagttgcattgtattgtcgcgtatccagtgaggaacaagtacgcaacggactgagc

SEQ ID NO: 24207 - DNA, 260 bp, Unknown
  Description of Unknown: LeftRegion for integrase B11208 sequence
tatagaacagtactattcatcgcttgtacatattattgcaatgaagaataaaggaatattaaacgatgctgatttcctaaaagccgagtctgttttggcaagtaaatattgtatcaaaaaagatagtctttatcgggctaatgacttgataaataatcgttttagagtgatatatatactaccaaagaaggagggccaaaatggatcagaaacggataaccaagatagatgcgttaccaaagttacaaaagaaaactaga

SEQ ID NO: 24208 - DNA, 260 bp, Unknown
  Description of Unknown: LeftRegion for integrase B11209 sequence
aaaaaatctaagcctggtgaagtacatcaggctttttctttttgattttttcttaaaaccggaaaaatctatcttgaaagtacctatttaggtaaggggacaataaagacattttgttaaagtacagggttgctgattacttgactaatatagcgtttagagggatatatagtgtgtaaaaacttcttgtaggaggaaaaatgaatataagaaaaattgaagcaaagaataacaaaagaaaaaagagaatttgtgcatat

SEQ ID NO: 24209 - DNA, 260 bp, Unknown; identical to SEQ ID NO: 23037
  Description of Unknown: LeftRegion for integrase B11210 sequence

SEQ ID NO: 24210 - DNA, 260 bp, Unknown
  Description of Unknown: LeftRegion for integrase B11211 sequence
ggatcgccgagaggaggtcctcggtgacctcaaccagctcttcgacgatggccgtgatcctgaagcaattccgctgcattgcagggtgtgtgcagttacctggctagataatcaggtcaatacagggactgcaagcccctcgtcgcaaatttggggagtcttctgtgtcgcaacccgcgaggcagcagcgcgttggctacgtgcgcgtgtccaccgccagcggagaacagctcgccgcactcgaaaaccagcgcgcccgc

SEQ ID NO: 24211 - DNA, 260 bp, Unknown
  Description of Unknown: LeftRegion for integrase B11212 sequence
atgcttgacagtatttgccgtttcttggtctgcacacaggaagaccttatgacagaccacagtaagccggttccgatgctaccgcaggacatcatagccgaagagatagagaacgatcctaaactaatgcggatcatgttcttatgcatcaagatgactgaagaagaaaaagacaagctcatagaaaggttatcaagaaaatgaaggtctttatttatgaaagagtatcaagcgaagaacaggcgaagcacggctattca

SEQ ID NO: 24212 - DNA, 260 bp, Unknown
  Description of Unknown: LeftRegion for integrase B11213 sequence
gatgagatatgcagagtattaaggtgtagcagagaagatttgatggtggatcatgacagacaggtgattcttgcaccagaagatgtgttagctgaagagatgagattaagggaagacctctatacagttttcaatgcgctaatcaatatgaatgattcagacctcaagttggtcaccgatcttatcaagaggttgtcaatatgagagtatttctatatgaaagagtatcaagtgaagagcaggtcaagcatggttattct

SEQ ID NO: 24213 - DNA, 260 bp, Unknown; identical to SEQ ID NO: 17928
  Description of Unknown: LeftRegion for integrase B11214 sequence

SEQ ID NO: 24214 - DNA, 260 bp, Unknown
  Description of Unknown: LeftRegion for integrase B11215 sequence
cggcacaatcatacgccgcctgtacaaaggcaagtaccacgaggtcacagtcatcggcaaaaacatgttcgcatacgatggcgtgaagtacgacaacctgaccgcgattgcttggaaaatctgcggctacgccaaaagcggcaactacttctttaacctccccatgactcccagaaatgatgacaacaagtaatccagtaatgccaacaaagcggtgtgctatctacacccgcaaatccattgccaaagggctcgaccaa

SEQ ID NO: 24215 - DNA, 260 bp, Unknown
  Description of Unknown: LeftRegion for integrase B11216 sequence
ctgcagcctgtagacgccatggcaggcccagcggaacggcacggcccaatgggtggccacaaggtcaagcgcacggtgcctggggtcgtccacgcatggccgcagccccagttgctgcagcagccattcaaggctctcttccgtgagggttagagggaagtccaccttggtagtgttcgctttgaccacactaggacgccatgcgggtgggctactgccgcgtcagcaccaagactgccgagcaggccgcatccatcgcc

SEQ ID NO: 24216 - DNA, 260 bp, Unknown
  Description of Unknown: LeftRegion for integrase B11217 sequence
gcagtggtttatcgccgttttgcaagcaacattagctgataaacgatttcaagctcgtcagggtcaaggctctgaagaaaagcggtaaattcttcttcggtcattggtttgtcctccttatgcttgaagtatagcacatcggaagtccgtattttgtcgcttccggtcagaaattcgcctattaagcgaaaaggtaaaacatgagagtagcattatacgcaagagtatcaacggaagaacaggccatccacggcctgtcg

SEQ ID NO: 24217 - DNA, 260 bp, Unknown
  Description of Unknown: LeftRegion for integrase B11218 sequence
caatatgatgctttatcagacggctatggcaatggcaaaaaatatgcttgataaaggcattataaccgtggctgaattcaacaaaatcgaggcggaattttgtaaaaaatattgtattaatatttcctcaatttttcgcagaatagctggataaatacctgcttatgcggtaatatggacataccaaaaaggaggtatttatggaaagaaaaatcataaccgtaacgccctcaaaagaccccaccttgcaggtgaaacgg

SEQ ID NO: 24218 - DNA, 260 bp, Unknown; identical to SEQ ID NO: 13002
  Description of Unknown: LeftRegion for integrase B11219 sequence

SEQ ID NO: 24219 - DNA, 260 bp, Unknown
  Description of Unknown: LeftRegion for integrase B11220 sequence
aagccccaggagaccccgcgggtgcctggagacgtgcgtggcgaggcgcgggccctgctgcggcattacccgctaccggagcggctgcggccgatcctggaggatgggttgaaccggcagggcggggtcgatgccccctagtgctttagggaccttcttcaaccagtagtactcttaagcactagcccctggttgcgtggatggcagcgcctgagatcgtcggctacgccagggtttcaaccaagaccgacgagcaggcc

SEQ ID NO: 24220 - DNA, 260 bp, Unknown
  Description of Unknown: LeftRegion for integrase B11221 sequence
gcgccttggggttgagtgggcagcctagaaatactgccgtacaaccagtacagcgtttagagaggtagaccaaggtaggaacaccgggaaacctgttccccctcgtctacatgacgtatcgtattgtttccacctagtgcgtgcctacttgtaactagcaccagcacaagatacaatctggcacaatcccgcacaggagcgtgcccgtgaccagttacggctacatcaggcagagcaggagagcagacctagacgttgct

SEQ ID NO: 24221 - DNA, 260 bp, Unknown
  Description of Unknown: LeftRegion for integrase B11222 sequence
tatcaaagaaggaaaaaattcctgtaaaggtatgagagtccctgaaagggatattgaagattggaaactaagttcaccagtaattgtgttagaaaggattgaagatggagaaaaacattacagttataccggccaaaaaggtacatcaaacagtcatatctcaaattcagaaaaaaatcagagtagccgcttattgtcgagtgtctacagaccaagacgaacagctatcaagctatgagaatcaggttaattattaccgt

SEQ ID NO: 24222 - DNA, 62 bp, Unknown
  Description of Unknown: LeftRegion for integrase B11223 sequence
aagacgctcttactcggtacgtgctagacaaaccggattatgttctggcaggagtttacatt

SEQ ID NO: 24223 - DNA, 260 bp, Unknown
  Description of Unknown: LeftRegion for integrase B11224 sequence
cgtgagctcgtgagcttcttgggcgaggtcgcgctccgtccaaccgaacagggcggtgtcttctgtaatgcgttgcatttctgcagaggatctgtcgtgtgtcttaggtggtactcgtttctggaataccgtcgacctactgctgcgtagccccagcaggggtcgccgcaagtgtgcctcctgcagcgcgtgtgtcaaccatggttttgagaatcggatacgcccgcacctcgacggcccaagaggagcaggacaagtcg

SEQ ID NO: 24224 - DNA, 260 bp, Unknown; identical to SEQ ID NO: 23098
  Description of Unknown: LeftRegion for integrase B11225 sequence

SEQ ID NO: 24225 - DNA, 61 bp, Unknown
  Description of Unknown: LeftRegion for integrase B11226 sequence
aagagtatcaagcgaagaacaggcgaagcacggctattcactcgatgcacagcacgatgcc

SEQ ID NO: 24226 - DNA, 260 bp, Unknown
  Description of Unknown: LeftRegion for integrase B11227 sequence
attcaataagtcataagggattaattaagaaaataacactaatggaatatcttgaaaaagctagtgaacctaatgttaatagattatatgattatatgaaatttttaatcatgcaagagaaggaaggtgataaataatgaaacgagcagctttgtatgttcgtgtcctaagttagtacaatcgaacagcgtgaaaggggtatgtctgtagacacccaaataacggccctagaggcctattgtaaggcgaataacctcata

SEQ ID NO: 24227 - DNA, 260 bp, Unknown; identical to SEQ ID NO: 24183
  Description of Unknown: LeftRegion for integrase B11228 sequence

SEQ ID NO: 24228 - DNA, 260 bp, Unknown; identical to SEQ ID NO: 24191
  Description of Unknown: LeftRegion for integrase B11229 sequence

SEQ ID NO: 24229 - DNA, 260 bp, Unknown
  Description of Unknown: LeftRegion for integrase B11230 sequence
aaaaaatctaagcctggtgaagtacatcaggctttttctttttgattttttcttaaaaccggaaaaatctatcttgaaagtacctatttaggtaagaggacaataaagacattttgttaaagtacagggttgctgattacttgactaatattgcgtttagagggatatatagtgtgtaaaaacttcttgtaggaggaaaaatgaatataagaaaaattgaagcaaagaataacaatagaaaaaagagaatttgtgcatat

SEQ ID NO: 24230 - DNA, 260 bp, Unknown; identical to SEQ ID NO: 24208
  Description of Unknown: LeftRegion for integrase B11231 sequence

SEQ ID NO: 24231 - DNA, 260 bp, Unknown; identical to SEQ ID NO: 24184
  Description of Unknown: LeftRegion for integrase B11232 sequence

SEQ ID NO: 24232 - DNA, 260 bp, Unknown
  Description of Unknown: LeftRegion for integrase B11233 sequence
tatcaaagaaggaaaaaattcatgtaaaggtatgagagtccctgaaagggatattgaagattggaaactaagttcaccagtaattgtgttagaaaggatagaagatggagaaaaacattacggttataccggccaagaaacttcagcaaacggtcaaatctcaaactcagaaaaaggtcaaggtagccgcttattgtcgagtgtctacagaccaagacgaacagctatcaagttatgagaatcaggtcaattattaccgt

SEQ ID NO: 24233 - DNA, 260 bp, Unknown
  Description of Unknown: LeftRegion for integrase B11234 sequence
gcggactactgcgttagacttgttcctctcccggctggagtgcatggatgcgtttcggaggattgtgacggtttctataacgtatatataaatgtaagagacagctatgaccgtcagcgcaaagccggggcacatgagataaaaaagcacatcgaacgaggagatttctccaagtctgatgcgtgtgaggcagaggatatatgagagtagcactatactgccgtgtgagttcggaggaacaggttcgccacggcatatcc

SEQ ID NO: 24234 - DNA, 260 bp, Unknown; identical to SEQ ID NO: 24197
  Description of Unknown: LeftRegion for integrase B11235 sequence

SEQ ID NO: 24235 - DNA, 260 bp, Unknown
  Description of Unknown: LeftRegion for integrase B11236 sequence
ttttataagttcattataacatacttgtatctcagcgtggtgaaatagccacgctttttctttttgcttttttcaaaaactgcggaaaatttgtttccaaatttacttagtaatatggagggagtaggtttgcgaaaagcttgacttatcttccctttagagtgatatatggtgtacaaaagttataggaaggagcctgaatggcagtaaggttaattaagacaaaaagtaatcgtaaaaaacaacgtgtctgtgcttat

SEQ ID NO: 24236 - DNA, 260 bp, Unknown
  Description of Unknown: LeftRegion for integrase B11237 sequence
aatcctataaggacaagcgaaatggctggatttccctcgattatgtcagcaaaatctaaggctctgcccggtggcaaaacgctgccgggcacccttttttacctatgaaaattctttgagaaatagcccttttattgcttgactaatcggcgatagtacgggaatatacgataacccccaaggaaaggaggaaacgacctatgcgaatcaaagtcatcaagcccacagtggcagcggaaaataaacggttgaaggtatgc

SEQ ID NO: 24237 - DNA, 260 bp, Unknown; identical to SEQ ID NO: 23264
  Description of Unknown: LeftRegion for integrase B11238 sequence

SEQ ID NO: 24238 - DNA, 260 bp, Unknown; identical to SEQ ID NO: 24232
  Description of Unknown: LeftRegion for integrase B11239 sequence

SEQ ID NO: 24239 - DNA, 260 bp, Unknown
  Description of Unknown: LeftRegion for integrase B11240 sequence
tccgtatgcttgaccgcaggacaaaacacgagtttatgtcgatggtatatgagtacgagaacagggccgcattacagggggataagggagaaacaggctcggctgttggctgagattagaaaagaaaaagtcatcccatttgaggtcgtacagacctatcacgagatgactgagcgtagaaaagtattggaggtgaaattatggtcaaagcggtagcatatgcccggtactcatcccacaatcaacgtgaggagagcatc

SEQ ID NO: 24240 - DNA, 260 bp, Unknown
  Description of Unknown: LeftRegion for integrase B11241 sequence
gttattttttaatgaaataacttttcaggtaacgataaatctggcaaggaaaatgttgaatgataaacttattaccaagaaggagtaccagtccttcaagaaggaaatgcttcataaatatcaaccgtttttcggagggctatacacttgataattctactggttagagtgatatatatagttggaaggagggctcaactatggaaaagaaaatgtggaaaatagaacagaaggttaccgaaatttccaaacggaagcgg

SEQ ID NO: 24241 - DNA, 260 bp, Unknown; identical to SEQ ID NO: 23902
  Description of Unknown: LeftRegion for integrase B11242 sequence

SEQ ID NO: 24242 - DNA, 260 bp, Unknown
  Description of Unknown: LeftRegion for integrase B11243 sequence
ttaaacaatacatacatagaaataatagacaaaaaactttttaaataaaaaagacctcggctggcaccgaagtcaaaatataaaatacagaaaacaaaataatctatctaccacgataagaatatatctttttctctgctatttcattatagcataagaaaaagaacttttcaataaaatttaaggaaggatgtgctataatgtacgaaacaaatttaactatttttgatgtcgatgacattttaatatatctaagaaaa

SEQ ID NO: 24243 - DNA, 260 bp, Unknown
  Description of Unknown: LeftRegion for integrase B11244 sequence
atggaattgagaatccggatttgatttaccctggccaagtactgcggattgaataagcaaacagagtctgtttggaacccttcatgcaggctctttacatagacagcatttcaagtagaaaagtgcttgaatgagtgggctgaatacttgataaatttggcctttagagtgatatataataaggaagaaaggagagtgggatgaagccagaaaagaaacgagtttgtgcttatgcgcgtgtttcaaccatgactgaaaag

SEQ ID NO: 24244 - DNA, 260 bp, Unknown
  Description of Unknown: LeftRegion for integrase B11245 sequence
atggaattgagaatccggatttgatttaccctggccaagtactgcggattgaataagcaaacagagtctgtttggaacccttcatgcaggctctttacatagacagcatttcaagtagaaaagtgcttgaatgagtgggctgaatacttgataaatttggcctttagagtgatatatagtaaggaagaaaggagagtgggatgaagtcaggaaagataagagtttgtgcttatgcgcgtgtttcaaccatgacagaaaag

SEQ ID NO: 24245 - DNA, 260 bp, Unknown
  Description of Unknown: LeftRegion for integrase B11246 sequence
atggaattgagaatccggatttgatttaccctggccaagtactgcggattgaataagcaaacagagtctgtttggaacccttcatgcaggctctttacatagacagcatttcaagtagaaaagtgcttgaatgagtgagctgaatacttgataaatttggcctttagagtgatatataataaggaagaaaggagagtgggatgaagccagaaaagaaacgagtttgtgcttatgcgcgtgtttcaaccatgacagaaaag

SEQ ID NO: 24246 - DNA, 260 bp, Unknown
  Description of Unknown: LeftRegion for integrase B11247 sequence
ttgtcaaacagtacattacggacggagtcaacatctatctccgttctctaaacagagagcggaaagacctcgatgtcgatatatgggatagcggaaacgatactgttgtcggatacggcacagtcatttataagaagattccgcttgtaaggcaatgagagggcctttctggccctctttgatagaacggagtgattctattgcgcgttgcgttatatgcgcgtgtaagcacacaggaacaggcacaacatggcctctct

SEQ ID NO: 24247 - DNA, 260 bp, Unknown
  Description of Unknown: LeftRegion for integrase B11248 sequence
gctcggagggcgggccaatatgagcgcgatcgtgcaggccgtgccaaagcttcaggtgagcgttatgcctgccgcagtagaccccgcccgtgagctgctggccctgcgctggctgatcgaccgcgccaacgaacacgctcgcaagaaagccgccgaatccaatgaccgagaggcagcctgaagctttataatactcgcccatggacacggtacttatctacgcgagggtttcgactgaagaccaactggaaaagtatggt

SEQ ID NO: 24248 - DNA, 260 bp, Unknown
  Description of Unknown: LeftRegion for integrase B11249 sequence
ttaatggaattgaaaatccggatttgatttatcccggtcaagtgttacgaattgaataatccatcaaggtctgtgtggttgtctatgcaggccttttacatagacagcatttcaactagaaaaagcttgaatgagtgggctgaatacttgataaatttggcctttagagtgatatatagtaaggaagaaaggagaatgggatgaagccaggaaagataagagtttgtgcctatgcgcgggtttcaaccatgacagaaaaa

SEQ ID NO: 24249 - DNA, 260 bp, Unknown
  Description of Unknown: LeftRegion for integrase B11250 sequence
tgcggagctggatgagctttcatctctaatacaatatctaagatatcgaaaagttcgtgaactgtctgagggtcaaggctcaaaagatactccttgatttcttcactggtcaatattaccacctccatgattggagactaccacaccatgtgtccgttctaaaggactgtcataaagtttttagcttaataggagaaattatgcgtgtagcgttgtacgcccgtgtctcgacagaagaacaagcattacacgggctttct

SEQ ID NO: 24250 - DNA, 260 bp, Unknown
  Description of Unknown: LeftRegion for integrase B11251 sequence
gctataaaagactttcgcaatttttaaaaaatttacaatcggcggtttttgaggagcgtcgtggaggtttttgggaaaaggggcacttgttcaaggaatttccgaaaaaattgatcccgtactcttttccaaaacttttttgaattttgaaacgcaacccccaattcaaagagcgggtttgccgtgagggggagtgatgcgtggtgagcgtggaagtgggtgaaagcgggcgtgctgagaccgaaacgccgatgcgggag

SEQ ID NO: 24251 - DNA, 260 bp, Unknown; identical to SEQ ID NO: 23902
  Description of Unknown: LeftRegion for integrase B11252 sequence

SEQ ID NO: 24252 - DNA, 260 bp, Unknown
  Description of Unknown: LeftRegion for integrase B11253 sequence
gccgaaatcgttaagctcaccacccgtgttctggaagccgaagcctccgcctccacgcttgacgaagcccacgaccaacactgccgcgatatccaccgccgctatcgcttgctttcctggggctgcattgctgttgtgatcgttgccctcctgctgggctggtttattcctccaccctggatgctataaggagtgatcccatgtactgcatctatctgcgcaaatcccgtgcagactatgaagccgagcagcggggcgag

SEQ ID NO: 24253 - DNA, 260 bp, Unknown; identical to SEQ ID NO: 23210
  Description of Unknown: LeftRegion for integrase B11254 sequence

SEQ ID NO: 24254 - DNA, 260 bp, Unknown
  Description of Unknown: LeftRegion for integrase B11255 sequence
acccggtctgcacttttattgtagcatgatccccctcagaacacaatccgacaaaaaagaatccccggcagctctgtacgatagagccaccggggccagatggggaatctgtctgtcggagaataatcataggataagaaaacacgcctgctgagcaagttcattgtaccatgatcctgctcagcgcacaaggagcaatcatggcaagaagaaagaaagtgtctcccgggaaccgtctggttgcctactaccgttacagc

SEQ ID NO: 24255 - DNA, 260 bp, Unknown
  Description of Unknown: LeftRegion for integrase B11256 sequence
caacaagaacttacctaccaactgactatggcacaggccaagcagctcctgtctcaaggtctgatttctgaagccgtcttccaagaatttaaggaaaaaatgctcgaaaaatatgagccatttctgagccaattagtggcctaaaaacttgataaataagggctttagagtgatatatagttgcgaaaggagatgtatcaatgaaacaaatcaaaacgatacaagcccaaaaggtaactaccatcaaaaggttaaaggtg

SEQ ID NO: 24256 - DNA, 260 bp, Unknown; identical to SEQ ID NO: 23434
  Description of Unknown: LeftRegion for integrase B11257 sequence

SEQ ID NO: 24257 - DNA, 260 bp, Unknown; identical to SEQ ID NO: 22981
  Description of Unknown: LeftRegion for integrase B11258 sequence

SEQ ID NO: 24258 - DNA, 260 bp, Unknown
  Description of Unknown: LeftRegion for integrase C1 sequence
aagcgtggaccgaagcgcccgcacaagctcaccgaggagaatcttgctgtcctggcgcaggccatacgagagagcgaacagatgccaggcggtgcggagttggctgccctactcgtcgaacgatgcggcatcagtgcccacccccggagcatcctgcgaagactgcttccctatctgaaccagccggaaaaaaaactgctgtgaccgtcgatgcgctcccgctcgataccatgcagttcaccgcgcaatacgagctgatc

SEQ ID NO: 24259 - DNA, 260 bp, Unknown
  Description of Unknown: LeftRegion for integrase C2 sequence
acgcccggaagcctgcgcgccctggttcggttggtcaaagcctgccgcacgtccctgcctgcggaggctcgccatgccaaccccgatcccgatgttgtggaacattctgccgccggaggcccagagccccatggttgcgctgtggagcgatctgcttcggcgccggctgacgggccggatggcttgcaaggaaacgccccatgaccccctcgcccaagatcgaaccccgccatcagcgactgcaggcgatcgtctacatc

SEQ ID NO: 24260 - DNA, 260 bp, Unknown
  Description of Unknown: LeftRegion for integrase C3 sequence
cttcttgaacggcgcggcgagtcgccgcccgatgacaaggaggagcgacatgcaactgaagctgagattcgccgaggaagaccgcaagcggcctcccgacccacccacctgggagacgctggacgccgaggcgcgggcggaggcgttgcgccggctcgccctcgtgatcgcgcgcatgctgacagtgagggaggccggtcatgactgaacacagcaaaatcgccgccggtcaccaggcccggctggctgtcgtctacctg

SEQ ID NO: 24261 - DNA, 260 bp, Unknown; identical to SEQ ID NO: 24260
  Description of Unknown: LeftRegion for integrase C4 sequence

SEQ ID NO: 24262 - DNA, 260 bp, Unknown
  Description of Unknown: LeftRegion for integrase C5 sequence
cttcttgagcggcgcggcgagtcgccgcccgatgacaaggaggagcgacatgcaactgaagctgagattcgccgaggaagaccgcaagcggcctcccgacccacccgcctgggagacgctggacgccgaggcgcgggcggaggcgttgcgccggctcgccctcgtgatcgcgcgcatgctgacagtgagggaggccggtcatgactgaacacagcaaaatcgccgccggtcaccaggcccggttggctgtcgtctacctg

SEQ ID NO: 24263 - DNA, 260 bp, Unknown; identical to SEQ ID NO: 24260
  Description of Unknown: LeftRegion for integrase C6 sequence

SEQ ID NO: 24264 - DNA, 260 bp, Unknown
  Description of Unknown: LeftRegion for integrase C7 sequence
acgcccggaagcctgcgcgccctcgtccggctggtcaatgcctgccgcacaacctcgtccgcggaggccccccatgccaaccccgatcccgatgctatggagcattctgccaccggaggcccagaggccgatggtggggttgtggagcgatctgctgtggcgccggctgacgggccggatggcccgcaaggagacgtcccatgatcctctcgcccaagatcgaagcccgtcatcagcggttgcaggcggttgtctacatc

SEQ ID NO: 24265 - DNA, 260 bp, Unknown
  Description of Unknown: LeftRegion for integrase C8 sequence
gtcgccaaaatagaggcaaccgaatcaccctcagaggacgctctaccatgcccgagcgatacgagcccccccgtctgcttgcccgctgaatcagagtcggtgggcacgcctgccccacccaaatcgccaacgtctaatttgtgtggtcagccagatgttggagcagcacctgagcgcccaatccaagccggaggtgcctcatgactcctcccactaatcctggattcgggctgtcagacaaaattcaatggccgcatctc

SEQ ID NO: 24266 - DNA, 260 bp, Unknown
  Description of Unknown: LeftRegion for integrase C9 sequence
ccgcttatggcccgtagcggcctgatgctctttctgcgccggggcatgtggggatgggctcaggcgctgacagcaacagcaagcaccccgcgagaacagatttacccatcgtcaatggcttggccgctgcacggcgggcacagcgccgttgttcacgtccttgcgacaatcgccatgagcatcaacgatcggagatcaccatgaatgtacatctcaaagtccagcctcatcacctcgaacgcggcgcctacctgtacatc

SEQ ID NO: 24267 - DNA, 260 bp, Unknown
  Description of Unknown: LeftRegion for integrase C10 sequence
tgcaatggttgctcatgcattagcacttcggatggcggtatctcttccggaggccaacgttccactggtaaggatcaagcgagactcgcccaatctttggaacgatctcccaccggtatgtcagcaccaactcgcgcagatgcttgcgactctgatccgccggatgccgccgaccgcgccggcggtgagggaacagtttgatgttggccgtcccgggtaattctgacgagcggctcacggccgtccggcgttcaaagttc

SEQ ID NO: 24268 - DNA, 260 bp, Unknown
  Description of Unknown: LeftRegion for integrase C11 sequence
gcgaatcacctttagtaactcaatggcgagttgcgatggttgctcatgctttggcgcatcggattgcggtgtctctaagccagatacgcccagcctttggaacaatctcccaccggtatctcagcaccaagtcgcgcagatgctcgcgactctgatccgccggatgccgccgaacgcgccagcggcgagggggcggtttgatgttggctattccgagcagtcctgacgagcggctcacggctgtccgacgttcaaagttc

SEQ ID NO: 24269 - DNA, 260 bp, Unknown
  Description of Unknown: LeftRegion for integrase C12 sequence
agctctcgtccttcgaggaagaaggagaagggtgatgcgaaacaggcgacatcaaaatcgcgaccaactcgttttggagttggagcgtcaaaatcgtcaggttccggtggtcaagaacgtcaaaggactggtggagacgctggcggatcttctgttggaggctttggaagcgagcaaaacggcgaagacgggaggcgtagatgaacacgaagatcacgtctgaccatctgggccgcgccgcggttgtctatgtccgccag

SEQ ID NO: 24270 - DNA, 260 bp, Unknown
  Description of Unknown: LeftRegion for integrase C13 sequence
ggcctgcgccaaggacaagggcgccattgttttccacggcctgtggcaagggctggcggtgctgatcgcgagcccccagccttccccgccgacgcatcggcggccggaaccaccgcccacggcctcggccgcagtgcacgatcgccagctcgtgcacatgctcgccaacatggtgctggcagcagagacccgagggaaccatgtctactgacatcgccatgaaggttgacgccgaccatctgcggcgtgatgcattcctc

SEQ ID NO: 24271 - DNA, 260 bp, Unknown
  Description of Unknown: LeftRegion for integrase C14 sequence
tgccccttgcccggagggtatggcggcaattcgttatcacggcatgctgcatggactttccatgcttgcgatgacggtcccggcgaccagcgacgctcccgaatctcgcaaagaggaacgcatgggcgcactcccagccagcgacgaattggtacgtctgttggccaatctcgttctgcgcacccattcggagctcgcccatgtctactgaccggtaccagaaagtcacggctgaccacttgcgccgcgacgcctttcta

SEQ ID NO: 24272 - DNA, 260 bp, Unknown
  Description of Unknown: LeftRegion for integrase C15 sequence
cgcccggctgatcaccggatcaggactcgtaaccctgcaccgtcaaggcatggtcgcctggatcaaggccgcaacgacaactcccaactttacgccgccttgcccggtacatcgccccccgtcggcaggcgcgatcgccaccagcgagctcaccctcatccttgccagccttgttgtcacgctaaccgcggagccagcacatgcctgacctcaaagtcaccgccgatcacctgcggcgcgacgcctacctctacatccgt

SEQ ID NO: 24273 - DNA, 260 bp, Unknown
  Description of Unknown: LeftRegion for integrase C16 sequence
gagaaacgcaatgggcaatctgccaaacgtcgttccagcaggtcaacaatcgtcgcagtcgataccgcagcagatgagcataacgttcgatgcgcccgaactccaggggatgagcatggtgcaacgagcaaacgcactcagtcatcttgcgattctgctgatgcgggccgccggcatcaagactgcgaaggagtgtgacgatgacgaacgttgatcgtttgcccgcagatcttctcaaacgcaaggccgtggtttatgtc

SEQ ID NO: 24274 - DNA, 260 bp, Unknown
  Description of Unknown: LeftRegion for integrase C17 sequence
cgagatcatcgaggagatctgcgagatcaatcgcgaactattacgccgccgcgaggcgctataaggggcgtcggtgagccagtcgccgctgtcgctcaccaactccatcgacctgcaatcggccggcgtactcatcgccaacatgctcgaagcctggctcatcgcagagcccgcgctggagttgaccgaggaggccgtcgatgaacaccaagatcaccccccaacatcagagcaagccggcgtacatctatatccgccaa

SEQ ID NO: 24275 - DNA, 260 bp, Unknown
  Description of Unknown: LeftRegion for integrase C18 sequence
gcctcgcgaggaggatgtgatcatgcgaccacgatacgaccagcagagagacttgttcgaggtggatcgaacgctgacggagtttccagttgcgcagaggcgcgagcttgtccgcctgatcgagtgccttctgatcgaggcagttgccgcttgcgaggcaaacgtgccatccgacggccccgagacgaaggaggctgcgcatgagcaagatcacgcatgagcacctgggccgtcaggccatcgtctacattcgtcagtcg

SEQ ID NO: 24276 - DNA, 260 bp, Unknown
  Description of Unknown: LeftRegion for integrase C19 sequence
cgaggtggacgtagaatcactcaggaggaagatgatgagatcccgcaatacgctggtgccggcgtcgggccgacagctcgacctgatattcaagacgcgaacactcgacggactgagcgacaaagagcgcaagcaggcgacatcaacactggcttgcctgctgatgcaggctgccggtctggtcgtcgaggagctcaacgatgagcagcactgacttaattccggcagcgctcctcgcgcgcaaggcagtcgtttatgtg

SEQ ID NO: 24277 - DNA, 260 bp, Unknown
  Description of Unknown: LeftRegion for integrase C20 sequence
cgaggtggacgtagaatcactcaggaggaagatgatgagatcccgcaatacgctggtgccggcgtcgggccgacagctcgacctgatattcaagacgcgaacactcgacggactgagcgacagagagcgcaagcaggcgacatcaacactggcttgcctgctgatgcaggctgccggtctggtcgtcgaggagctcaacgatgagcagcactgacttaattccggcagagctcctcgcgcgcaaggcagtcgtttatgtg

SEQ ID NO: 24278 - DNA, 260 bp, Unknown
  Description of Unknown: LeftRegion for integrase C21 sequence
accttgcttcgcgacgattcccgttgcgaaggaggagacaagcatgaagcatcgtcaatcctgtcaccgccaactcgatctctttgtgcccaagaccccgccggcaccgatagcaccggccgagcggacgaagctattgccactggtgagcgcgctgctgtcggaagcacgcggcgcagccgcagcgacggaggccggtgatgaagatcacgtctgaccacctggcgcgcggcgcctacatctacatccgccaatcgacc

SEQ ID NO: 24279 - DNA, 260 bp, Unknown
  Description of Unknown: LeftRegion for integrase C22 sequence
cggggtggacgtagaatcactcaggaggaagatgatgagaccccgcaacacgctggtgccggcgtcgggccggcagctcgacctgatattcaaaacccggacgctcgacggactgagcgaccacgaccgcaagaaggcgatattaacgctggcttgcctgctgatgcaggcggccggtcaggtcgtcgaggagctcaacgatgaccagcactgatttgtttccgacagcgctgctcgcgcgcaaggccgtcgtttatgtg

SEQ ID NO: 24280 - DNA, 260 bp, Unknown
  Description of Unknown: LeftRegion for integrase C23 sequence
ctacgttttctgcagagcgactcacgccagccaggagacgaccatgcagcgcaggcaatgccgaaccgaccagccagacctgttttccacgaaggctccgccatcgagtcttccaggcgaagtccgggaacgcaccctcccgctgatcgagaccttgctgagggaagcggtggtgagccagacggaacgggaggcagatcatgaagatcaccgctgaacatctcgcgcgcggcgcctatgtctatgtccggcagtcgacg

SEQ ID NO: 24281 - DNA, 260 bp, Unknown
  Description of Unknown: LeftRegion for integrase C24 sequence
cggagagatgttcatgcctcgccagcccatgacatgccagttcgatctgttctcggccccgcagcgggggaagacggcagggacgccgcaatggtcggagttgccggaggagacccgccaagcgttgacggtgctcatcgtgcggctgttcgtcgatcacgcaaagtgcggacatgcctgccaacagaaggaggccggtcatgatgcatgagaagatcgcgccgcatcatctggagcggaaggccatcctctatgttcgg

SEQ ID NO: 24282 - DNA, 260 bp, Unknown
  Description of Unknown: LeftRegion for integrase C25 sequence
cggggagatgtccatgccacgccagtccatgacatatcagttcgatctgttctcggccccacaccgggggaagacagcggcgacgccgcaatggcaggagttgccggaagagacacgccaagcgctgacggctctcatcgtgcgactgttcgtcgaccacgcaagcgatgcgagcgcctcccagcagaaggaggtcggtcatgatgcatgagaagatcggggcgcaccatctggagcggaaggctatcctgtatgttcgg

SEQ ID NO: 24283 - DNA, 260 bp, Unknown; identical to SEQ ID NO: 24282
  Description of Unknown: LeftRegion for integrase C26 sequence

SEQ ID NO: 24284 - DNA, 260 bp, Unknown
  Description of Unknown: LeftRegion for integrase C27 sequence
cggagagatgtccatgcctcgccagtccatgacatgccagttcgatctgttttcggctccgcagagggggatgaccgcaggcatgccacaatggccggagttgccggaggaaacccgccaggcgctgacggttctcatcgtgcggctgttcgtcgatcacgcaaactgcgagcgcacctcccagcagaaggaggccggtcatgatgcatgagaagatcgggccgcaccatctggagcggaaggctattctctatgttcgg

SEQ ID NO: 24285 - DNA, 260 bp, Unknown
  Description of Unknown: LeftRegion for integrase C28 sequence
gccggcctatcgttggtctccggttgggatcagggagggcgccatggcacgaggcggagtatccgcgcaacgggaactgttcgggacgacggagctggcggccagcctgccctcggaggtggcgaggcggctcctgccgctgctggagcagctcctgacggaggtcatggcggccgaggccgcagcgacggaggggagcgatgagcaagatcacgcctgaccacctggcgcgacaggcctacgtctacgtgcgccagtcc

SEQ ID NO: 24286 - DNA, 260 bp, Unknown
  Description of Unknown: LeftRegion for integrase C29 sequence
ccagaaccccatcgtcagcgtcgagtggcgcaaggccaggtggaccccggccgagcgcgaacgcctcgcccgcatcctcctcggaccggtcgccaagaaggactgacttcagctacagttacatacggcgcgagacgccccccgagccttctggccggggggcttcggcgtttctgtgtaagtggaactggagggggaccatgcgtaccaagacactgcctcgcaagaccaagacgctgcgggtggccatctacctgcgc

SEQ ID NO: 24287 - DNA, 260 bp, Unknown
  Description of Unknown: LeftRegion for integrase C30 sequence
gccgtgagcgacagccccatcgtgagcgtggagtggcgaaggacgaagtggaccccggccgagcgggagcgcctggcgcgcatcctcttcgggccggtcgccaagaagaagtaaagtcgttacacttgcatacggcgcatgacgccccccgtgccattccggccggggggtttcgtgcgtcctggatcaggaggggaatcatgcgaaccaagacgctgccgcgtcagcgcaaggccctgcgcgtcgccatctacctgcgc

SEQ ID NO: 24288 - DNA, 260 bp, Unknown
  Description of Unknown: LeftRegion for integrase C31 sequence
agcgagagccccatcgtgagcgtcgagtggcgccgcaccaagtggacccccgccgagcgcgagcgcctcgcccgcatcctgctcggaccgatggcgcgaaaggactgagttaggtacagttacacacggcccccacgccccccgagtcttctgattcggggggcttcgacgtatccagatgcagtcaagagagggagatcatgagcaagaaggccctgccgcgacagcgcaaggtgctccgcgtggccatctacctgcgc

SEQ ID NO: 24289 - DNA, 260 bp, Unknown
  Description of Unknown: LeftRegion for integrase C32 sequence
gagccgctgaaccatccggaccggggtccgtctgtgccgacgcagacgggccccttttcgtgcctgaaaactctctgaccaggggtattgcagcctgccccaactgggagatagcttggcctcacccagttaggacaggctgttaaccggcacgctccctgactggggaagacacctcagtcccggacggagcggcccccttgaccccgcacattgaagagatcccccatatcctcgcggctggatatgacaggcagtca

SEQ ID NO: 24290 - DNA, 59 bp, Unknown
  Description of Unknown: LeftRegion for integrase C33 sequence
tcgtcaatcagaagcggatgttgacacagtatgcagaacagcatgggtatgagaatatc

SEQ ID NO: 24291 - DNA, 260 bp, Unknown
  Description of Unknown: LeftRegion for integrase C34 sequence
ttatcaggaggaaaaattttggaacaaacagttgtaaaatatagtctgcagttatcaatgcttaattttttatactctaaagaattgttatctaaaaatgaatatgaaaaaatcagaaacagactgcgtattgagtacacaaaatagctgacctttttattagaacgcggtaatatagaatcaaaaggaggggtttcagtatgaaaacaaataatgttgaaataataaaagctgattctttagttcgacgtagaggtgtc

SEQ ID NO: 24292 - DNA, 260 bp, Unknown
  Description of Unknown: LeftRegion for integrase C35 sequence
agcgctgccccggtcacgcttacgtcccaggcacccgccctctcctgggacgagctcaccacttgcgtggccgaggccagcgcgatcctctgggccgtcaaactgcgccgtgaggctcgcctggccgatcttgcagaagcgcagaccctcatagaggccacgcaggaagagcgcggccctagcccgaaaggtctagggctatgagaaaacccaacacaaagaagcctacgcgcttcgcctcttatcttcgctgctcgaca

SEQ ID NO: 24293 - DNA, 260 bp, Unknown
  Description of Unknown: LeftRegion for integrase C36 sequence
ccaaaagggcaagtacaaatgattatcagtcgagaatatatcggcacacagaccgttgcagaagcgtttgtcccgattatctccgaggatattcggaagaagattgccgagggcgacaccttcgacaatgaggggctgtccgcttagaatgtacgcaatggaacatgaaaacgttaggacagatatggaggttttacagtatggcaggaataagaacggagaacaagatttatgaagtcggcatttactgccgcttatca

SEQ ID NO: 24294 - DNA, 260 bp, Unknown
  Description of Unknown: LeftRegion for integrase C37 sequence
ttatcaggagggtaagttttggaacaatcagtagtaaaatatagtatgcaactttcaatgcttaattttttatattccagaaatatgttgactaaaaaggaatatgaaaaaattaaaaatagactgcgcattaagtacacaaattagctgaccttttgatttgaacgcggtaatatagaatcaaaaggaggaatttcagtatgaaaaaaaataatgttgaaataataaaagctgattctttagttcgtcgtagaggcgac

SEQ ID NO: 24295 - DNA, 260 bp, Unknown
  Description of Unknown: LeftRegion for integrase C38 sequence
tccgaacgaggtgtgcccatgccgcgaaccagaagcccgccggcggcgcgggactggacgatccggtcggtcttcgtccgtacacgcgacggctccgcccgtctcgcccgcgcctatcgccatctgctccagactgatcagcccgaaccgccaggggacggctccgacagtcccgattcgatcattgaaggaggagcgccatgcgcgccgccatctatgcccgtgtctccactgagcgccaggaacgccagcaaaccatc

SEQ ID NO: 24296 - DNA, 260 bp, Unknown
  Description of Unknown: LeftRegion for integrase C39 sequence
aactacctccccgacttcgggaggtcttaaatggatgagttagcaagattttatcgaagaaatgcttgaaaaatatggtaataaaatagatgaaaaaaaagaagcagaggacccaagtgaaaaattgagtattgaagaataaaagtatataatacttagagaacgtgaaattgtgtccaaacttttttaggaggaaacaaatgataaaaaagagagcgtatatctatacccgtgtttctacaggtatgcaagttgaaggt

SEQ ID NO: 24297 - DNA, 260 bp, Unknown
  Description of Unknown: LeftRegion for integrase C40 sequence
gccagcaagcgttagcgcggtagcttaataagtgtacagatagagagtgcttaaaatactggtgttaatactatgtcgagaaaaacttgacacatacggagaaaaataagagttgtaattgaataccaaaagtcatacaataggtatagcgaaccgaaattgctatacctatttttttatataaggagaggattgaatttatgattaataaagatagaaataccatgaaatggactgctggaatttatgcacgagtatct

SEQ ID NO: 24298 - DNA, 260 bp, Unknown
  Description of Unknown: LeftRegion for integrase C41 sequence
taccggctagcaaggatcggagcgccgaaaccggcgcagcagtaaggagaggggccctcggtgggagaccgccgggggcccttttcgctggtcatggctgaggttattagggtgcacaacttccggggaagttgcatcacctaatcggctcggctgataccctgtaggggtcctaacggccctaacccgagggtaggcgagtgagcgagattgtgtggtccggcaccgatgaccggtccggcgagatcaaatacgttgac

SEQ ID NO: 24299 - DNA, 260 bp, Unknown
  Description of Unknown: LeftRegion for integrase C42 sequence
cgacggcgagcaagacagctcagcggctccggttggccccgtccgtgctggtctagcgggcggggctttttcatgtcttcccgcaggtcagaggggaggttattgtgttgttcaacctccggggtggttgtcacacctaatcggctcacttagccaacccacctcgggggtcctagacgacctagacccgaggtgtacgcgtgagcgagatcgtatggaccggcacatctgacgatgcgtcagagatcaagtacgttgac

SEQ ID NO: 24300 - DNA, 260 bp, Unknown
  Description of Unknown: LeftRegion for integrase C43 sequence
aaaaaaatcgcccgtctttaaaagtccagggcttataataattcacaatacatatgcctaaatctaaaactagatagatcaacattcaaagaatacaaatctttcaaattattttgttgttttcgtattcaatgttagatagaatgtttttacagatacttctgttttgacattaaacacaataaagaggtgctaaatttttggagttaaaaaacattgtcaattcttacaacatcacaaatattttaggttatcttaga

SEQ ID NO: 24301 - DNA, 260 bp, Unknown
  Description of Unknown: LeftRegion for integrase C44 sequence
gcagtgctggatgaccgcagccgtgtgctggtgccgagcccgacccgctacacgcgctaccagcgaaacatcctgatcaagcagcttgacgagcaagggaaagcgccgcgcgaaatcgtcggcgagatcaagcggctgttgggtgagcagatcaacgagaaccacgtgcagcggctgctgcacaagcttagggtttgaccatggaaccgaccgccgtcatctatgcccgcgtcagcgatcgcaaacaggccgagaacgag

SEQ ID NO: 24302 - DNA, 260 bp, Unknown
  Description of Unknown: LeftRegion for integrase C45 sequence
cgtcgcgccgtggctggtcgccgcaattcgcaccgcagcccacgacgccgcatatctcacctaccacgccgaccgcgagtacgaccgcaccgttcgcaccgcgccgacccccgaccgccggacccggtaacacaggcccgcgccccaagccccgagcatcctgcccggggctgatctgtaccccgagagaagggaaacccgtgctcccacgccctcgaccacccgcagacgacgcccccgcctacatcggctacatcaga

SEQ ID NO: 24303 - DNA, 260 bp, Unknown
  Description of Unknown: LeftRegion for integrase C46 sequence
cgtcgcgccgtggctggtcgccgcaattcgcaccgcagcccacgacgccgcatatctcacctaccacgccgaccgcgagtacgaccgcaccgttcgcaccgcgccgacccccgaccgccggacccggtaacacaggcccgcgccccaagccccgagcatcctgcccggggctgatctgtaccccgagagaagggaaacccgtgctcccacgccctcgaccgcccgcagacgacgcccccgcctacatcggctacatcaga

SEQ ID NO: 24304 - DNA, 260 bp, Unknown
  Description of Unknown: LeftRegion for integrase C47 sequence
aatgaagcgagagttcgttagatttgtaaacgaacaaaaaggatttacgtacttaaccattaaaaagaagtagctttttctgcctttatagttaatttgttaaagttgtgttatattagaactaacaactatcaaaaatctaacagtaagtgatagtaattctgatataatacagctttttctctataaaggaggctactatgaagatcggcgctatctatgcgagagcatctacagataaacaaggtgatacagtagaa

SEQ ID NO: 24305 - DNA, 260 bp, Unknown
  Description of Unknown: LeftRegion for integrase C48 sequence
taaaagagcatttttccgaaaagggcaaaacaatggaagaacttctaactgatgtcatgctggaaaaagcaaagcagacaatcgcataaaatcggtgcagttgtaagaaatagattgaatgacaaaaagtacccgtgttatactttacttgcaagcaggtattgtaaacacgggttagttataaaggaggataactgacaatgaaacaacagatttacaatactgcactttatcttaggttaagccgagatgatgaatta

SEQ ID NO: 24306 - DNA, 260 bp, Unknown
  Description of Unknown: LeftRegion for integrase C49 sequence
ggtagtgcgcgccggtggggagtcgcggtgactccccaccggcgcggagtgtggatcagtactcggcgatgaagaccggccagtgggggccggggcgggtggtccagcggaggatcggccgccagtaggtggtggtccggtagccgaggttctgtaaacgcacctacctctcgatgagagctaggaaggcggtggctgagatgagccacgatcagcaggaacgaaccgcaggcaatgagccgaacgaccaggcgacggcg

SEQ ID NO: 24307 - DNA, 260 bp, Unknown
  Description of Unknown: LeftRegion for integrase C50 sequence
cagctctctctcgagttcgcagcgcgcatgagaagccgactggctgccgaacttcttcctgtacacagcctcacttctgaatttgaagccgcaaaatcagtcatggtcggcgaccacgtaaccttgcgctgacgctcgaatctatttccatgcatcataattgaactgtgcagggaaatatcaaaatgtaagaactcatcatggaggatcttatggtcgcgtccgtctttccaggcgctgcactttatatgcgagcatca

SEQ ID NO: 24308 - DNA, 260 bp, Unknown
  Description of Unknown: LeftRegion for integrase C51 sequence
ctctcgctggtcctcgggcagggccaagaccgactcggccaggcgctccagggtctgcccgttcacgggtgttcccgcaggtcagagctctgccggacagtgagcgggagcatcttcccgccagtcggtgccagttgtggccatgtgtccatctgggggcagatggatgcaaggtcacatccagtggtaggttcctcaccatgagcaaccgactacatgagtacgacgtcgaggcggagtggagtccagccgacctcgcc

SEQ ID NO: 24309 - DNA, 260 bp, Unknown
  Description of Unknown: LeftRegion for integrase C52 sequence
cctcacgctccacctcggacgccgactccagcaccttggccagatgctccagcactcccccgctcatcgacgttcccgcaggtcaggggcctgtcggaccgcgagcgggagcatcttcccgccaggtggtgccagttgtggccatgtgtccatctgggggcagatggcaacggggtcacatccacgctacgctgctcaccatgagtgatcgagcagctacctacgacatcgaggcggagtggagtccagccgacctcgcc

SEQ ID NO: 24310 - DNA, 260 bp, Unknown
  Description of Unknown: LeftRegion for integrase C53 sequence
gcaccaagcacgtctacaagtgtgtccgtcactgcggcggaggccgcggcaaggtcgagaccaccgatccgtggtgatctaacctcgcataccaagaaaccccctacccggcccgcgaaggctaggtagggggctttttcgcgttcaggggacctgatcgctcagcgacccatctccgatgggatcgcgtttgcgtttcagtgggtgtggccgtgatgacctgtgtcttcgtggtttgtctggtcaaccaccgcggtctc

SEQ ID NO: 24311 - DNA, 260 bp, Unknown
  Description of Unknown: LeftRegion for integrase C54 sequence
gaaccccgtgttcaacgacgacggctcgtacaagaccgttcacaaaaacggcaaagaccacaaggtctacaagtgcgttcggcactgcggcggaggccgcggcaagaccgagaccaccgatccgtggtgatctaaccccgcataccaagaaaccccctacccggcccgcgaaggctaggtagggggctttttgtgtttcagtgggtatggccgtgatgacctgtgtcttcgtggtttgtctggtcaaccaccgcggtctc

SEQ ID NO: 24312 - DNA, 260 bp, Unknown
  Description of Unknown: LeftRegion for integrase C55 sequence
cggcaagctgaagaccgtgtacggctgcgaggtccgctgcggcggcggtcgccacgccaaagaggtcaccgaaacctactgacctcgcataccaagaaaccccctacctagccttcgcgggccgggtagggggctttctcgcgttcaggggacctgatcgctcagcgacccatctccgatgggatcgcgtttgtgtttcagtgggtatggccgtgatgacctgtgtcttcgtggtttgtctggtcaaccaccgcggtctc

SEQ ID NO: 24313 - DNA, 260 bp, Unknown
  Description of Unknown: LeftRegion for integrase C56 sequence
gcaatccgcaccaccgcttacgatgccgcctacctcgcctaccttgccgaccgcgaacacaaccgcgccgccgccgcgacgacaccgcccgcacttgtccgcagcataggccgccgtgcccggtagaccgggtccgctactaccaggccccggccgcaccaccgcgccggggccatgccatacccacagaaagggcagaagtgatatctgagccagagccgtacatcggctacatacgcgtcagcatgtggcgcgaggaa

SEQ ID NO: 24314 - DNA, 260 bp, Unknown
  Description of Unknown: LeftRegion for integrase C57 sequence
tgactggacctacgccaagcacgccgacggctcgtacaagatggacggcaccaagcacgtctacaagtgtgtccgtcactgcggcggaggccgcggcaagaccgagaccactgatccgtggtgatctaaccccgcataccaagaaaccccctacctagccttcgcgggccgggtagggggctttttgcgtttcagtgggtgtggccgtgatgacctgtgtcttcgtggtttgtctggtcaaccaccgcggtctcagtggt

SEQ ID NO: 24315 - DNA, 260 bp, Unknown
  Description of Unknown: LeftRegion for integrase C58 sequence
taaatgatctgcggacgcttgcaacgttttacggtgtcggcttggattatttcggcgtaactcccccggatgaaataacggaactaatagcacgcgcacgcaaattatttaataatcctgatctaagcgaaacacaaaaagatttattatataaagatttatcaaaactatatttcaaaataaaataaagggtgtaaaacatgaaaaacaataataaaaatattcgcgccgctgtttatgtgcgcttttcttcacaacgt

SEQ ID NO: 24316 - DNA, 260 bp, Unknown; identical to SEQ ID NO: 24315
  Description of Unknown: LeftRegion for integrase C59 sequence

SEQ ID NO: 24317 - DNA, 260 bp, Unknown
  Description of Unknown: LeftRegion for integrase C60 sequence
gattatcgatgaggatatgtttagacaagtgcaacaaataaggcatgagaatgctatcaggaatcatcgttataaagagcctaagccaataaaggaaattcggcttattacaagctaccagttagaaaaggtagaaaagaaatacgatgatccttatcggcaagcagtatacgcgtacagtcaaatcaaggaggtgtaaaatgaatgccaacgttacaattattccaccaagaaaaatagcggggaatacggtagataag

SEQ ID NO: 24318 - DNA, 190 bp, Unknown
  Description of Unknown: LeftRegion for integrase C61 sequence
acaccacgcagtcaataaaaaatgacatacctactgtgttttttaaaataagtatggaaactcctgataaaaagtggtattctctagttagttaaatatagcaccatgtacggagaaagggaatacgccgatgattaagaatcttgagaacatacaacatgtagctatataccttaggattagtcaggag

SEQ ID NO: 24319 - DNA, 260 bp, Unknown
  Description of Unknown: LeftRegion for integrase C62 sequence
cacccgcagggtgcgaataagccttgccgccccacagggcggtgcgcggtgatatcaccgcgcctatcctgccacaacacgacaggtgaaaaaccgacaaagatcgacagactttgacaaacatcgacaaacttcgacaaaggtgcacagacgcacggcctagttgcctgaggggccttcagcagtcataagggcgggccatgaccatgatccgcccccttcgcattgccatttacgcccgctattccagcgatttgcag

SEQ ID NO: 24320 - DNA, 260 bp, Unknown
  Description of Unknown: LeftRegion for integrase C63 sequence
gacctacgccaagcacgccgacggctcgtacaagatggacggcaccaagcacgtctacaagtgccagcgccactgcggcggaggccgcggcaagaccgagaccaccgatccgtggtgatctaaccccgcataccaagaaaccccctacccggcccgcgaaggctaggtagggggctttttgtgtttcagtgggtgtggccgtgatgacctgtgtcttcgtggtttgtctggtcaaccaccgcggtttcagtggtgtacgg

SEQ ID NO: 24321 - DNA, 260 bp, Unknown
  Description of Unknown: LeftRegion for integrase C64 sequence
gacctacgccaagcacgccgacggctcgtacaagatggacggcaccaagcacgtctacaagtgccagcgccactgcggcggaggccgcggcaagaccgagaccaccgatccgtggtgatctaaccccgcataccaagaaaccccctacccggcccgcgaaggctaggtagggggctttttgtgtttcagtgggtgtggccgtgatgacctgtgtcttcgtggtttgtctggtcaaccaccgcggtctcagtggtgtacgg

SEQ ID NO: 24322 - DNA, 260 bp, Unknown
  Description of Unknown: LeftRegion for integrase C65 sequence
ctacgccaagcacgccgacggctcgtacaagatggacggcaccaagcacgtctacaagtgtgtccgtcactgcggcggaggccgcggcaagaccgagaccactgatccgtggtgatctaaccccgcataccaagaaaccccctacctagccttcgcgggccgggtagggggctttttgcgtttcagtgggtgtggccgtgatgacctgtgtcttcgtggtttgtctggtcaaccaccgcggtctcagtggtgtacggtac

SEQ ID NO: 24323 - DNA, 260 bp, Unknown
  Description of Unknown: LeftRegion for integrase C66 sequence
tacgccaagcacgccgacggctcgtacaagatggacggcaccaagcacgtctacaagtgccagcgccactgcggcggaggccgcggcaagaccgagaccaccgatccgtggtgatctaaaccccgcataccaagaaaccccctacccggcccgcgaaggctaggtagggggcttttcttgtttcagtgggtgtggccgtgatgacctgtgtcttcgtggtttgtctggtcaaccaccgcggtctcagtggtgtacggtac

SEQ ID NO: 24324 - DNA, 260 bp, Unknown
  Description of Unknown: LeftRegion for integrase C67 sequence
ggattttcgttttgaaatagccgaaaaacttaccgtttcactctttgaaaaagggcttatcagcgagcaagaaaaagaaaaaataagccgtcttaacagggaaaaatttcacccgttttacaaggaattattgggttaaaagcttgataaacactgcttttagagtgatgaatagtattagctgaaagtgagggggaatagtgaaagagataataaaaatagactctacaatacgaaaaactggttttgagaaaaagacg

SEQ ID NO: 24325 - DNA, 260 bp, Unknown
  Description of Unknown: LeftRegion for integrase C68 sequence
tgataaagagatatttgataaagctgaagaagttagagataaacgtgcaaaggatttaggacgagtggtagagcttgccgctttcacctctccccctcccaaagaacgattcaaaatgaaaaaggcagataataagatgccagtggatccttttgaacgagcagaatacttatacagtctgatagaaagcgaggaataaagtgacagagaaaaatataatggttattcctgctcgtaaaagagtaggaagtacagccgca

SEQ ID NO: 24326 - DNA, 260 bp, Unknown
  Description of Unknown: LeftRegion for integrase C69 sequence
tgacaaagaagtctttgaacaggcggaaattgaaaggcaaaaaagagccaggaagctaggcagaatttatggaagtaaagagcaagaaaagccagagcaagagtttgattttactataggttctatagatgaagattatgaagacccttttgctcaagctgaatatgtttatggcttaataagaagaaaggagtgttcaaatgatacctaataggaatgtagttattattccggcaatgaagcgagctggtaataacggt

SEQ ID NO: 24327 - DNA, 260 bp, Unknown
  Description of Unknown: LeftRegion for integrase C70 sequence
ctacgccaagcacgccgacggctcgtacaagatggacggtaccaagcacgtctacaagtgccagcgccactgcggcggcggccgcggcaaggtcgagaccaccgatccgtggtgatctaaccccgcataccaagaaaccccctacctagccttcgcgggccgggtagggggctttttgtgtttcagtgggtgtggccgtgatgacctgtgtcttcgtggtttgtctggtcaaccaccgcggtctcagtggtgtacggtac

SEQ ID NO: 24328 - DNA, 260 bp, Unknown
  Description of Unknown: LeftRegion for integrase C71 sequence
tgcaggacaagagatgccaaaggtgttgaggcttgtctaggacgtactattacagaagaacaactttttcaagcttttggcgagaccttaaaggcagaagatattcaccatatttcttttaatagcgtgaccaatgaagctaaagctacctatagaaatggagaagaaaaacacatcatcattcagaaaggacggtagacatgaaaaaagtcatcacgatagaaccagctaaacaagtaagccataaggttgacctgccg

SEQ ID NO: 24329 - DNA, 260 bp, Unknown
  Description of Unknown: LeftRegion for integrase C72 sequence
gcatcatcatgtccatgtaggacgctaggagaaaagcgacttttggcctcgtttaaaagcaagttaggtattgttccatataaagagtgggttgaaaataatattaaacacatcgagtatgactttggtcatcgtatcatcagggttacaccagtaaaaggaaggaaatataccatagaaattagagaggggcgatattagtgaagaaagtaattactattgaggctacaccaactattattaggtcaagttcagatgat

SEQ ID NO: 24330 - DNA, 260 bp, Unknown
  Description of Unknown: LeftRegion for integrase C73 sequence
gcctcatcatgtccatgtaggacactaggagaaaagcgacttttggcatcgtttaaaagcaagttatgcattgtcccagataaagagtgggttgaaaataatattaaacacatcgagtatgactttggtcaacgtatcatctgggttataccagtaaaaggaaggaaatatcctatagaaattagagaggggcgatattagtgaagaaagtaattactattgaggctacaccaagtattattaggtcaagttcagatgat

SEQ ID NO: 24331 - DNA, 260 bp, Unknown
  Description of Unknown: LeftRegion for integrase C74 sequence
gggtttcccatgagttgaaagccatggtttccaaagcgcaaaggaaacgggcatacccgctgatctcaacggccgatatagttgcgcacggatggatgcggccgacggctcgcattcgaagcaaactcgacatgttttcctaaccaaatcgcaggcggtacaggctcctattatcaggtctgagtaccatggcccgcgcgatggacaaagcaaccacaccccccgagtttgaaaggcgaagggctcgcgctgctcaatac

SEQ ID NO: 24332 - DNA, 260 bp, Unknown
  Description of Unknown: LeftRegion for integrase C75 sequence
agttgaaagccatggtttccaaagcgcaaaggagactggcatacccgctgatctcaacggccgatatagttgcgcacggatatatatatatctggatgcggccgacggctcgcattcgaagcaaactcgacatgttttcctaaccaaatcgcaggctgtacaggcccctattatcaggtctgagtaccatggcccgcgcgatggacagagcaaccacaccccccgaatttgaaaggcgaagggctcgcgctgctcaatac

SEQ ID NO: 24333 - DNA, 260 bp, Unknown
  Description of Unknown: LeftRegion for integrase C76 sequence
ggcggggggtttttacgtcgagcgaggtcagcctggcatatgcgtcaagctatgtccacaatgtctaaagatagggaactcgatgtttagactttgtgaaagtgctgtcttcatgcagaactgtaacacgttctagtcggacctccctggcttcggcgagcctattttgcgggaatgcgaacgtccgatatgctcctgacatgcgagttctcggaagaatcaggctctcaagggctacagacgaaagtaccagcgtcgag

SEQ ID NO: 24334 - DNA, 260 bp, Unknown
  Description of Unknown: LeftRegion for integrase C77 sequence
gacggttccggctgttgccattgggacggcagatagaatcctcatgcaccgctcctatcggtgtgaagtggcccctcgtctgttagcgcaggcggggggttttcaagttggaccgtaccacggcgaggctcctacctggcaagatagtttcccaagtggctcagagtactggtatagtgatcgttatgggaattacgaagttgcaggtcagagcactggtcggtgctcgcgtgtctcacgtccaaggcgaggaaaagaca

SEQ ID NO: 24335 - DNA, 260 bp, Unknown
  Description of Unknown: LeftRegion for integrase C78 sequence
agatcggctagagaagggaaaaagaataagtagcgataaattaccagtagaagggacagaattaatactagagagaggggaagagacgcatgcggtaatggtaacagataagggtttaatctacaaagaagagttttatacgtcattgtcagcagtagcagggaaaataatgggaatgagttacaacggaccgttattgtttggaatgcgtgataaaaatgggagctgaagaggagaaaatgctaaaagaagtaaggtgt

SEQ ID NO: 24336 - DNA, 260 bp, Unknown
  Description of Unknown: LeftRegion for integrase C79 sequence
gcacgagttcgacatgtgaaatcaggccccctgggttcggcttcggccggcctggggggtcttttttttgtgcccaacaaatacatagctttcctatgtatatgggaaggctctgcccggaggctacgatcacgatgtgcgggcaggggtgtgttctcatcgtgttgggactttccagcaggttccgatacacttacaaaatgagttcagcgccaagagccctggtcggggcacgagtctcggtagtccaagggcctcag

SEQ ID NO: 24337 - DNA, 260 bp, Unknown
  Description of Unknown: LeftRegion for integrase C80 sequence
gttgcgccggcgcgtggagcgcgggcaaatggagctgatgcagaaatgatccaacccacacctataacccctggggttattcgctctgacgaacacgccggcgtgctcacgcctgacggcgcccgcctggccgaggtcctcgcacgcattgcgcgccggctcacgtcggataatcggccggcagaagtgagcagatcaaaatgacggccgccgcgatctatgtccgggtgtccagtgagatgcagctcgacgggcactcc

SEQ ID NO: 24338 - DNA, 260 bp, Unknown
  Description of Unknown: LeftRegion for integrase C81 sequence
agagccgccgtcacgaagccccgctcgcgtagcaggtggatgccctcgggccagggggtgcgagtccacggcacctggaagacggtgcccatcgagacgcggatcgagcgccggtagagagggtctgcgcaacgaggcgtgaccaggacggcgtccactcccagggctgcggcactacggaagccagccccgaggttcgtgtgatcgactacgtcctcgaagacggcgatacgcccctgacctgcgcttctctgtgtacc

SEQ ID NO: 24339 - DNA, 260 bp, Unknown
  Description of Unknown: LeftRegion for integrase C82 sequence
atccacgcctgcgacaccccgttggccgctgacagctcactcagcgccgtgaacgacaacgcgaaggccaggctgccgaccgcgaccgttccggccgtcgctaccttgacgggcgatagtatttgcactggtgagaggtcctttctcatcgacttccaaagtgtttgtttctgccagcagaacccggtacattggaaactatggcacaaccactaagagccctggttggggcgcgagtcagtgtagtccaaggcccgcag

SEQ ID NO: 24340 - DNA, 260 bp, Unknown
  Description of Unknown: LeftRegion for integrase C83 sequence
atccatgcctgcgacacgccgttggccgctgacagctcactcagcgccgtgaacgacaacgcgaaggccaagccgccgaccgcgaccgttccggccgtcgccactctgactggggatagcatttgcactggtgaggggtcctttctgatcgacttcaaatgtgttggattctgccagcagaacctgtaacattggaaactatgccacaaccgctaagagccctggtcggggcccgagtcagtgtagtccaaggaccgcaa

SEQ ID NO: 24341 - DNA, 260 bp, Unknown
  Description of Unknown: LeftRegion for integrase C84 sequence
ggactttcgcgccgtcggcgtcggtgatggtgacgggctccccgatcgcgacctcgatcgctccgcgcgagttcgtcggcaccgacgaggatgatgcatcggtcgagatggggctcgtggcggcggggtcgtcgccgctgccgcacccggcaacgaggacgatcgcggctgccgtgcagagggctgggaggtagcgtgtcatgtttccgcagcgtattcgacgtgcgcctcggagacagggctacgcgcgtgatccgtgg

SEQ ID NO: 24342 - DNA, 260 bp, Unknown; identical to SEQ ID NO: 18339
  Description of Unknown: LeftRegion for integrase C85 sequence

SEQ ID NO: 24343 - DNA, 260 bp, Unknown
  Description of Unknown: LeftRegion for integrase C86 sequence
agggggaccatccacgcctgcgacactccgttgtccgctgagagctcactgagcgccgtgaacgacaacgcgaaggccaagccgccgaccgcgaccgttccggccgtcgccactctgactggggatagcatctgcactggtgaggggtcctttctcatcgacttccaatgtgttggattctgccagcagttcctgtaacattggaaactatgccacaaccgctaagagccctggtcggggcccgagtcagtgtagtccaa

SEQ ID NO: 24344 - DNA, 260 bp, Unknown
  Description of Unknown: LeftRegion for integrase C87 sequence
ccgctgcggcggaggccgcggcaagaccgagaccaccgatccgtggtgatctaaccccgcataccaagaaaccccctacccggcccgcgaaggctaggtagggggctttttgtgtttcagtgggtgtggccgtgatgacctgtgtcttcgtggtttgtctggtcaaccaccgcggtctccgtggtgtacggtacaaacccatgagagccctggtagtgatccgactgtcccgcgtcaccgatgctacgacctccccggag

SEQ ID NO: 24345 - DNA, 260 bp, Unknown
  Description of Unknown: LeftRegion for integrase C88 sequence
atccacgcctgcgacactccgttgtccgctgagagctcactgagcgccgtgaacgacaacgcgaaggccaagccgccgaccgcgaccgttccggccgtcgccactctgactggggatagcatctgcactggtaggaggtcctttcccgttgacttacaatgtgttggattctgccagcagttcctgtaacattggaaactatgccacaaccgctaagagccctggtcggggcccgagtcagtgtagtccaaggaccgcag

SEQ ID NO: 24346 - DNA, 260 bp, Unknown
  Description of Unknown: LeftRegion for integrase C89 sequence
atccacgcctgcgacactccgttgtccgctgagagctcactgagcgccgtgaacgacaacgcgaaggccaagccgccgaccgcgaccgttccggccgtcgccactctgactggggatagcatctgcactggtgaggggtcctttctcatcgacttccaatgtgttggattctgccagcagttcctgtaacattggaaactatgccacaaccgctaagagccctggtcggggcccgagtcagtgtagtccaaggaccgcag

SEQ ID NO: 24347 - DNA, 260 bp, Unknown
  Description of Unknown: LeftRegion for integrase C90 sequence
ctacgacgagttcaacgcccggcccgccctcgtggcctaggcatgttctacgtcagcttcaggaccgcctccggccgcttcgtgcggaaggagttcgcgacccggcgcgatcaacggcgctggatactccgggctccggccgccttcacgataacctcatacaactagcaagagccctcggatatccgggggctcttttagtgtcaataggtgaactacggcggtccggacttgacctattgcgctatcctcgtcacatg

SEQ ID NO: 24348 - DNA, 260 bp, Unknown
  Description of Unknown: LeftRegion for integrase C91 sequence
ccactgcggcggcggccgcggcaagaccgagaccaccgatccgtggtgatctaacccctcataccaagaaaccccctacccggcccgcgaaggctaggtagggggctttttgtgtttcagtgggtatggccgtgatgacctgtgtcttcgtggtttgtctggtcaaccaccgcggtctcagtggtgtacggtacaaacccatgagagccctggtagtgatccgcctgtcccgcgtcaccgatgctacgacttcaccggag

SEQ ID NO: 24349 - DNA, 260 bp, Unknown
  Description of Unknown: LeftRegion for integrase C92 sequence
ccactgcggcggaggccgcggcaagaccgagaccaccgatccgtggcgatctaaccccgcataccaagaaaccccctacccggcccgcgaaggctaggtagggggctttttgtgtttcagtgggtgtggccgtgatgacctgtgtcttcgcggtttgtctggtcaaccaccgcggtctcagtggtgtacggtacaaacccatgagagccctggtagtcatccgcctgtcccgcgtcaccgatgctacgacttcacccgag

SEQ ID NO: 24350 - DNA, 260 bp, Unknown
  Description of Unknown: LeftRegion for integrase C93 sequence
gcactgcggcggaggccgcggcaagaccgagaccaccgatccgtggtgatctaaccccgcataccaagaaaccccctacccggcccgcgaaggctaggtagggggcttttcttgtttcagtgggtatggccgtgatgacctgtgtcttcgtggtttgtctggtcaaccaccgcggtctcagtggtgtacggtacaaacccatgagagccctggtggtcatccgactgtcccgcgtcaccgatgctacgacttcacccgag

SEQ ID NO: 24351 - DNA, 260 bp, Unknown
  Description of Unknown: LeftRegion for integrase C94 sequence
gaggtccgctgcggcggaggccgcgcccacaaagaggtcaccgaaacctactgacctcgcataccaagaaaccccctacctagccttcgcgggccgggtagggggctttttgtgtttcagtgggtgtggccgtgatgacctgtgtcttcgtggtttgtctggtcaaccaccgcggtctcagtggtgtacggtacaaacccatgagagccctggtagtgatccgactgtcccgcgtcaccgatgctacgacttcaccggag

SEQ ID NO: 24352 - DNA, 260 bp, Unknown
  Description of Unknown: LeftRegion for integrase C95 sequence
ccactgcggtggaggccgcggcaagaccgagaccaccgatccgtggtgatctaaccccgcataccaagaaaccccctacccggcccgcgaaggctaggtagggggcttttcttgtttcagtgggtatggccgtgatgacctgtgtcttcgtggtttgtctggtcaaccaccgcggtctcagtggtgtacggtacaaacccgtgagagccttggtagtcatccgcctgtcccgcgtcaccgatgctacgacttcgccggag

SEQ ID NO: 24353 - DNA, 260 bp, Unknown
  Description of Unknown: LeftRegion for integrase C96 sequence
tccgaccgcgactgttcctgctgtggcaaagctgaccggggatagaatcttcattgcacgggcctcttccgtgtagtagccctctgccagtcctgcgcctaaacagctggtagggggctcttttcgttgttgtggagcgatacggtacaccatctcaagtgtgtttgcttcgggcaaccgagcagcgtacatttgaaatcatgacccaaacactccgcgccctggtaggcgcacgtgtcagcgtagtccaaggtccgcag

SEQ ID NO: 24354 - DNA, 260 bp, Unknown
  Description of Unknown: LeftRegion for integrase C97 sequence
ccaagaacaagcgagccaagaagaaccgcaccccgcagggcgtgtacgagtgtcggtgcggtggcttccacctgtccgatgctcggcgtgtagtcgtcctcgggggctaagaagagggaggccgggtgcagacgaggggctgcatccggcctccccttttttatatccagatacatagtttttctaactaactagtttgagtgccctttaatcacaaggagttatatcgtagaatgacacccatgacagcaaccctcgaa

SEQ ID NO: 24355 - DNA, 260 bp, Unknown
  Description of Unknown: LeftRegion for integrase C98 sequence
accccgcataccaagaaaccccctacccggcccgcgaaggctaggtagggggctttttcgcgttcagggggtctgatcgctcagcgacccatctccgatgggatcgcgtttgtgcttcagtgggtgtggccgtgatgacctgtgtcttcgtggtttgtctggtcaaccaccgcggtctcagtggtgtacggtacaaacccatgagagccctggtagtgatccgcttgtcccgcgtcaccgatgctacgacttcaccggag

SEQ ID NO: 24356 - DNA, 260 bp, Unknown
  Description of Unknown: LeftRegion for integrase C99 sequence
cctcgcataccaagaaaccccctacctagccttcgcgggccgggtagggggctttttcgcgtttcagggggcctgatcgctcagcgacccatctccgatgggatcgcgtttgtgtttcagtgggtgtggccgtgatgacctgtgtcttcgtggtttgtctggtcaaccaccgcggtctcagtggtgtacggtacaaacccatgagagccctggtagccatccgactgtcccgcgtcaccgatgctacgacttcaccggag

SEQ ID NO: 24357 - DNA, 260 bp, Unknown
  Description of Unknown: LeftRegion for integrase C100 sequence
ggaggccgcgcccacaaagaggtcaccgaaacctactgacctcgcataccaagaaaccccctacctagccttcgcgggccgggtagggggctttttgcgtttcagtgggtgtggccgtgatgacctgtgtcttcgtggtttgtctggtcaaccaccgcggtctcagtggtgtacggtacaaacccatgagagccctggtagtgatccgactgtcccgcgtcaccgatgctacgacttcaccggagcgccagctggagtct

SEQ ID NO: 24358 - DNA, 260 bp, Unknown
  Description of Unknown: LeftRegion for integrase C101 sequence
ggccgcggcaagaccgagaccaccgacccgtggtgatctaacccgcataccaagaaaccccctacccggcccgcgaaggctaggtagggggctttttgtgtttcagtgggtatggccgcgatgacctgtgtcttcgtggtttgtctggtcaaccaccgcggtctcagtggtgtacggtacaaaccatgcgagccctggtagtgatccgcctgtcccgcgtcaccgatgctacgacttcgccggagcgtcagctggagtct

SEQ ID NO: 24359 - DNA, 260 bp, Unknown
  Description of Unknown: LeftRegion for integrase C102 sequence
gcggtgtccgcggagtcgggcccacccccatatctccctcagcatggagcacaacgtactccaccgccccctccggggaacccgttttgggctccgcggagggggtgttctgcgtttcagtgggtatggccgtgatgacctgtgtcttcgtggtttgtctggtcaaccaccgcggtctcagtggtgtacggtacaaacccatgcgcgctttggtagtgatccgcttgtcccgcgtcaccgatgctacgacttcaccggag

SEQ ID NO: 24360 - DNA, 260 bp, Unknown
  Description of Unknown: LeftRegion for integrase C103 sequence
ccagggatgatttacgggcagacgtgttcgactatatcgaaaggttctacaatccacgccggcgtcattccactctcgggtatatcagcccggtacagtttgaaaacctaaaatgcgcctaacggaagtgtccgtgacgatgggggaaggccacttcttactctacaggtctcgccggtagctcaacaaggagcgcacgcgtgtcatcaagccagccaattcaggccgcaatttatgtgcggatgtcaaccgagagccaa

SEQ ID NO: 24361 - DNA, 260 bp, Unknown
  Description of Unknown: LeftRegion for integrase C104 sequence
acacacatgagcttattgattacttcctgattccggcagtgaaactcgcgaacggtccgctctatttgaaagagtcgaaccttgagcgcctcgccgaattacgatacctgtccctggcgtcaatgttcggcccgtaagccagttcgacgcacagcctgaagcgcaacataccgacatcagcattagtgaggagttccgccatggcccggcttgtttcccgtggcgccgcactgtacgtgcgagcgtcgactgagcatcag

SEQ ID NO: 24362 - DNA, 260 bp, Unknown
  Description of Unknown: LeftRegion for integrase C105 sequence
gccctggcacagcgcgccgtggccgatcatctcacccccaaaccagcatcagaacaggctgagtccgcacagcgaccgaatcaccccgcattgccagaccggcagcgggcggcataacttcggctatgagagtcgccgcctacgccagatattcgtccgatcaacaacgtgcagcatcgctggatgatcagctgcgcaacgtgcggcactggtgccagcgcaacggcgtgcccgagcccgtcgcctacaccgacgccgcc

SEQ ID NO: 24363 - DNA, 260 bp, Unknown
  Description of Unknown: LeftRegion for integrase C106 sequence
agtccagcccagccacgtctcaatcgagatggggctacttgtgctggcctgacacggtgaggggctaggtccgtgggtcgcattgggacaagcccgcagggctagggggacaaagcgagggccaagagtctagtcgcccgaagggcgtccttacggtcaggggagcccccgtcaggggccaatctccaggagccgttccgatgccaacgtacgatagatccatgcgcgtgataggccgactgagaatctcccgacaaacc

SEQ ID NO: 24364 - DNA, 260 bp, Unknown
  Description of Unknown: LeftRegion for integrase C107 sequence
cctatgacagaggaagagaaagccaacgtggccttaattcttcaacaacacttatcgaaagaataaaaccaactgtttccaaaatggaaataattgcaaacaaaaaaaagccccacgctctcaaaactttggcgagtctgagcgtgaggcatgtgacaggaaaagattttcatggagataacctctcatgatgtcttttcttgtacccattttatcattttttaggaaattttgaaagaggtactactatgataacaaca

SEQ ID NO: 24365 - DNA, 260 bp, Unknown
  Description of Unknown: LeftRegion for integrase C108 sequence
aaagtttaggtttggattttagatccataacatgatggtagccgtatttgatacggctacttttctttttatctagcaactgtttccattttggaaataactcaaaaaagccccacgctctcggtcggcaaacttctgagcgtgaggctagcaattacaagaaaaacttttcaaaagatattaccttttgagatgttttcttgtacccattttatcattttttaggaaattttgaaagaggtactactatgataacaaca

SEQ ID NO: 24366 - DNA, 260 bp, Unknown
  Description of Unknown: LeftRegion for integrase C109 sequence
tcctatgacagaggaagagaaagccaacgtggccttaattcttcaacaacacttatcgaaagaataaaaccaactgtttccaaaatggaaataattgcaaacaaaaaaagccccacgctctcaaaactttggcgagtctgagcgtgaggcatgtgacaggaaaagattttcatggagataacctctcatgatgtcttttcttgtacccattttatcattttttaggaaattttgaaagaggtactactatgataacaaca

SEQ ID NO: 24367 - DNA, 260 bp, Unknown
  Description of Unknown: LeftRegion for integrase C110 sequence
ttcgagatggggctacttgtgctggcacgacacggtgagtggctaggtccgtgggtcgcattgggacaaagcccgcagggctagggggacaaggcgagggccacaggtctagccgcccgtagggcgtccttacggtcaggggagcccccgtcaggggtcagtctccaggagccgtttcaacgccaacgtacgatagatccatgcgcgtgataggccgactaagaatctcccgtcagtccgaggagtctacgtcgatcgac

SEQ ID NO: 24368 - DNA, 260 bp, Unknown
  Description of Unknown: LeftRegion for integrase C111 sequence
tacgacggcgagccggagctcgcgcccctcgattgcttcggtactcccaacgccggagccgtcattcagcaggagcgaaacgcggacggcaaatgggaggcgatcaactagccgaaaccctcgggaaaccgggggttttttcatgccctcgttagctcaaaccgacggtaggggttctcgtagcgtcggtttgagctattatggtccgcatgaagccccgcgccgttctctaccttcgcctctcggccgtcgtcgacgac

SEQ ID NO: 24369 - DNA, 260 bp, Unknown
  Description of Unknown: LeftRegion for integrase C112 sequence
ggagaaggacgcggacggcaaatgggccgcgataaactgatccgctgagaggcccggagaggccctagaaaaacctctctgggccaatcaccctaccgaatatcgaaacttacgcgagagcccctgggacgcctgtcctgggggcttttctgtagctcaaagagacgctacgacttctcgtaccgtcggtttgagctatcatggctcccatgaaacctcgcgccgttctctacctccgcctctcggccgtcgtcgacgac

SEQ ID NO: 24370 - DNA, 260 bp, Unknown
  Description of Unknown: LeftRegion for integrase C113 sequence
aggagtttagctccataaagtttacatttggattttagatccataacgtgatggtagccgtatttgatacggctacttttctttttatctagcaactgtttccattttggaaacaactcaaaaaagccccacgctcagaagtttggcgaccgagagcgtgaggctaggagcaagaaaaaagcattaaaaagctgtttttcttgtacctattttatcaaaaaaggggtacaaattcaatgaaaacaatgaataaagtggct

SEQ ID NO: 24371 - DNA, 260 bp, Unknown
  Description of Unknown: LeftRegion for integrase C114 sequence
gacgagtcccctcgggctggccttcgggctggcccggggggtcttttttgtgcctgactcatgcacatattcgcatatgtcttcgtatcgaacgccgtcgtcaatctgacgctgccgttccttgtccatgccgccacgctacgcgggagtggttgaatgtccgcaagatgcgacgattcgcacctgttacagttaccaccatgcgtgtgctgggaagggtgaggttgtcgcggttttctgacgagtctacgtccgtcgag

SEQ ID NO: 24372 - DNA, 260 bp, Unknown
  Description of Unknown: LeftRegion for integrase C115 sequence
aagtacttttgaaggttatttttatagaattgttgaaagtaaatttttagtggaacgaagaaaagagtgtagagacaccttatatgattggcttacagaataagtaaaaaggattgtagggataagattttgtttgtatactttaatcattcacattttattgatatgagtaattataactagtaaagatggtgatttgattgaagtatggagtttatgttcgggtatctacagacagggacgaacaagtctcatctgta

SEQ ID NO: 24373 - DNA, 260 bp, Unknown
  Description of Unknown: LeftRegion for integrase C116 sequence
aagcacttttgaaggttatttttataggattgtggaaagtaaatttgtagtggaaagaagaaaagagtgtagagacgccttatatgattggcttacagaataagtaaaaaggattgtagggataagattttgtttgtatactttaatcattcacattttattgatatgagtaattataactagtaaagatggtgatttgattgaagtatgcagtttatgttcgggtatctacagacagggacgaacaagtctcatctgta

SEQ ID NO: 24374 - DNA, 260 bp, Unknown
  Description of Unknown: LeftRegion for integrase C117 sequence
gctggccgatggagggcttcggtaccaccgagtgtcaactcgaggccctgaggatgatgggtcagtaaagagagggggtcgggtgcagtcgaggggctgcatccggccccttttttatttgccaaaatttagttagttcggcttcctatattgtttcggtgcccttcaaatacaagctccaacctgctaagatggcacctatgacagcaaccctcgagcgacacctcgacaccccgcagcaggaggccctgcgggtgggt

SEQ ID NO: 24375 - DNA, 260 bp, Unknown
  Description of Unknown: LeftRegion for integrase C118 sequence
ctgttttcgcacaaaaagcaaataaaattagaagtacttttgaaggttatttttataggattcttgaaagtaaatttgttgccgaaagaagagaagaatgtcgagggttattgttcgattggttaaatgaataatatgaaattgcccacagggaaaaatttgtatataatttacttatcatattattagtaaaaaagtgggtgaagattttgaagtacgctgtttatgtacgagtttcaacggatagagatgagcaagtt

SEQ ID NO: 24376 - DNA, 260 bp, Unknown
  Description of Unknown: LeftRegion for integrase C119 sequence
cagaaaaagcaaataaaattagaagtacttttgaaggttatttttatagaattgttgaaagtaaatttgtaatggagagaaggaaagaatgtcgaggattattgttcgattggttaaatgaataatataaaattgcccacagggaaaaatatatatataatttaattatcatattcttagtaaataagtgggtgaaaattttgaaatacgctgtttatgtacgagtttcaacggatagagatgagcaagtttcatctgtt

SEQ ID NO: 24377 - DNA, 260 bp, Unknown
  Description of Unknown: LeftRegion for integrase C120 sequence
gtgcgggtggtggctcgtgggctaccttctccggctctgccggtaagggtggccgagcacagacctggttcgttgcacgacaaccctagcgacacaaagaaacccccttcgggccttcgggctcgttgggggtctttttttgtacctctagggtttcacactgtgttgttagatatgtgtaacatgatacactccgtgtaatgactatccgagccgtcgtaggggcacgagtctcccacgtccaaggacccgagaagacg

SEQ ID NO: 24378 - DNA, 260 bp, Unknown
  Description of Unknown: LeftRegion for integrase C121 sequence
agtggaagggcgcggcggtcggaagtgccatgggcgtcacggcccagaacatctatgtcgacgtcacctggccgaacggctacaccatgtccgggctcggcgtcggtgaggccgacgcgttgaagttcatcgagctcgtgaacaggctcgcccagcgctgacggcgtgtccggtgacgtacgcctgagaaacatctcccaatgttgcggtttcacctgaaactgtcagatagggactgtactgtccagctcgtgcgagcg

SEQ ID NO: 24379 - DNA, 260 bp, Unknown
  Description of Unknown: LeftRegion for integrase C122 sequence
taccgcccccttcctgttaccgcaggtagggggctctttttctgttgacggtcggttacgctaccacagttgtcaaagtctaaagatggggaactcaatattcatgctttgcgaaagcgctgttctcacggctacactcctctgacatgcgggttcttgggagaatacgactctccagaatgatggaggagtctaccagtgtggaacgccagcgtgagttcatcgagacatgggcgcggcagaatgatcatgaaatcgtc

SEQ ID NO: 24380 - DNA, 260 bp, Unknown
  Description of Unknown: LeftRegion for integrase C123 sequence
gcttgctgaagaaagtggcattgtaaacaaatctatgaaagtaaaagtaaacaactaaaataaaaagcccctgctctcctcgaccaaaatttgagcatgggacttaaaccaatttgaaaagcaacctaaaacactaagggtataggtcttttttctataccctattttaccataaaacttacaaaatagggaggctaacgatgaataaagttgctatttatgtgcgcgtgagtacaaaaggacaagcagaagagggttat

SEQ ID NO: 24381 - DNA, 260 bp, Unknown
  Description of Unknown: LeftRegion for integrase C124 sequence
gaatcgctgaaagttcgagatttggatgcaatttcaattgatgatcttcaaaactttaaaatagaatatcgtggcgtggaattaaccgaagatgaaaaaaggcaagtaatcagattgttgcgctcagtccttgaactaaagaaagaataaagttctcaaacttatatattagtataagagtattaaaggagtcgatttcgatgagagtttgtaagtacagacgagtatcgactgacatgcaaagggaagaaggagtatca

SEQ ID NO: 24382 - DNA, 260 bp, Unknown
  Description of Unknown: LeftRegion for integrase C125 sequence
cgaccacgagcgggaccatccatgcctgggccacgccgttggctgccgccagctcggagagcgcggtgaaggacagggagaatgccagggccccaacggcaatggtgcctgtcgtggcgatccggaccgggttgatcttcatcatgtctacagaccctataccgcgagaagtccttgtcaagttgttgtagactcgtgtcgtggcaggtcaacgagttctggggcgtattcgcctctcgcgtctcaccgaggagtcgacc

SEQ ID NO: 24383 - DNA, 260 bp, Unknown
  Description of Unknown: LeftRegion for integrase C126 sequence
tccaggcgatgcgcctgctcctgtcacccgcgaggcgtccgccgagtcgagtggacgaagctcgcacgatgagaccggcccccagctctcctctccccccgtggggaggctgggggccttcccttttgcctgcacgggccgggcggagcatgtaccctcaagctgtaacagccgaacgagcggtacaccttgggggtaccatgcatttcatgcaaaaccgcgggtcagggccggatgccgagtgcgacatctacgtccgc

SEQ ID NO: 24384 - DNA, 260 bp, Unknown
  Description of Unknown: LeftRegion for integrase C127 sequence
gtctatgacgatccggcggctgagcgggctggcttcctgacgtctgggcggtatatcgcggaggtggaggcgaacaactacgccctccccttctggcggctggaccgcgtgccggaaccgacagaacgcttcccagcggaggccagggccacgttcgcccggctgccgggcggatcacgtctcctgggcatctgcggcgcatgacgccccgtcctgccatcggctgcactcgcctgtctacaggcccgcaggcccgcatg

SEQ ID NO: 24385 - DNA, 260 bp, Unknown
  Description of Unknown: LeftRegion for integrase C128 sequence
ggggttacaatcgacatgcaccagctcctgtctcaaaactcagttggtgtactgccctcggagatctgccggtctccgggggcttctacgttctaccaggcagaatgccccgacgccaggttagtaacaaagcacgaacatcgactggccgatgtttgctctttcatactcgggctgataccgtccctgacatgcgggtattgggcagaacacgtatctccaggtcgacagaagagtcaacgagtatcgagcgccagcgc

SEQ ID NO: 24386 - DNA, 260 bp, Unknown
  Description of Unknown: LeftRegion for integrase C129 sequence
atcggcctcttcggcgagccgttcctgcgtccatccctcgcggcgccgatggtttcggacgttctcttggagcgacatggaatcacctcccaaccagcgtactgtgaacggggaatcccgtgtgaggactggcctcgggcatgtaccctcaagctgtaacagccgaacgagcggtacaccttgggggtaccatgcgaagcatgaatcatcgcagttcccaggccgatgcggagtgcgacatctacgtacgcatcagccag

SEQ ID NO: 24387 - DNA, 260 bp, Unknown
  Description of Unknown: LeftRegion for integrase C130 sequence
cagttaatggatacgatgctacgcttaaaagattttataaattccaagacgggataaccttagaaccggaaagttataaccccaacatcacgactcagtttttcagttccaaagaacaggagtacaaccccattcatttaaaaggaaaattagtttggtatatggcccctctcgacattaaattctaggaggaaaactgaatgaaatgtattgcctacgttagagtatccacggaagaacaagcgaaacatggatactct

SEQ ID NO: 24388 - DNA, 260 bp, Unknown
  Description of Unknown: LeftRegion for integrase C131 sequence
gtaaacattgagctagtcctattgggtaggccggactcccgaacgacccgcacagcggcggctacggcctcatgcaccgaggcgtcactcggcgcctccccgctggccggagcacctgacggggctaccgaaaacgcgacgatcatttcatatcccctttagccaaccatgcgccctcatgagtgcctaaaggtgttatggtgcttcgcatgagaattatcggctacgttcgactctccagagcctcccgcgaggagtcg

SEQ ID NO: 24389 - DNA, 260 bp, Unknown
  Description of Unknown: LeftRegion for integrase C132 sequence
gtaaacattgagctagtcctattgggtaggccggactcccgaacgacccgcacagcggcggctacggcctcatgcaccgaggcgtcactcggcgcctccccgctggccgaagcacctgacggggctaccgaaaacgcgacgatcatttcatatcccctttagacaaccatgcgccctcatgagtgcctaaaggtgttatggtgcttcgcatgagaattatcggctacgttcgactctccagagcctcccgcgaggagtcg

SEQ ID NO: 24390 - DNA, 260 bp, Unknown
  Description of Unknown: LeftRegion for integrase C133 sequence
atcggcctcttcggcgagccgttcctgggtccagccttcgcggcgccgatggtttcggacgttctcctggagcgacatggaatcacctcccaaccagcgtactgtgaacggcgaatcccgtgcggggcttgggctggggcgtgtaccctgaagctgtaacagccgaacgagcggtacaccttgggggtaccatgccattcatgcaaaatcgcgggtcagggcaggtcgccgagtgcgacatctacgtccgcatcagccag

SEQ ID NO: 24391 - DNA, 260 bp, Unknown
  Description of Unknown: LeftRegion for integrase C134 sequence
ctacgtcgacgagctcggcaaggtccgccgctcgtaaccccctcctccctcaaggcccccgtgctcacctccgagcatgggggcctttttgcgccctcatcagggcaatcgggaatatccgcccgatataaccgccccctgcatggctagtaacgcccgggctattgtgctgacgatggtctgaccgttactatcagcctatgagcccagacaagcccctccgcgccgtcggctacgtccgcctctccaaggccaccgac

SEQ ID NO: 24392 - DNA, 260 bp, Unknown
  Description of Unknown: LeftRegion for integrase C135 sequence
cgtcggcgagcgactggcgctcgatccggaacatctgcctgatcctccggcgcctcgggatcgacgtgcgccgcacctgaagtgtcgtgggtgtgacaacccgccagaggtctgatacactcacaccagaggaagctgggctgtcgaggagagcctggtcaggagtagaggacccaccgttgaaacccaagtcggcagccgtgtacgcccggatctcggatgacaccgaggggcgggccgctggcgttgcccgccaggtc

SEQ ID NO: 24393 - DNA, 260 bp, Unknown
  Description of Unknown: LeftRegion for integrase C136 sequence
aagcctatgcccggctatcaggcccgcgccgtcctcgcccgcaagcaggaggccgacgtcgacaacctctgggactaccgcctcgtcgaagtcccgacgaaccccgccaactaagcaaaagccccccggatctccgaggggcttttcttatgtcctctttgggcactcatgcgccctcatgagtgcctaaagggtatatggtgatccccatgaaaatcatcggctatgtgcgcctctcccgagcctcccgcgaggagtcg

SEQ ID NO: 24394 - DNA, 260 bp, Unknown
  Description of Unknown: LeftRegion for integrase C137 sequence
agaagaacgcggacggcaaatgggaggcgataaactgacccgctgggaggccctgagagcccctagaaaaacctctcagggccaaccgcccacccctaaaccgaaacttcgccagagccccgagcgccgcccgctccggggcttttcttatgtcctctttgggcactcatgcgccctcgtgagtgcctaaaggggttatgatgatccgcatgagaattatcggctacgttcgactctccagagcctcccgcgaggagtcg

SEQ ID NO: 24395 - DNA, 260 bp, Unknown
  Description of Unknown: LeftRegion for integrase C138 sequence
agagaaggacgaggacggcgtctggcgggcgataaactgacccgctaggcggccctgagagggcctagaaaaacctctcagggccaaccgcccacccctaaaccgaaacttcgccagagccccgagagccgcccgctccggggcttctcatgtaccctttgggcactcatgcgccctcgtgagtgcctaaaggtgttatggtgcttggcatgagaattatcggctacgttcgactctccagagcctcccgcgaggagtcg

SEQ ID NO: 24396 - DNA, 260 bp, Unknown
  Description of Unknown: LeftRegion for integrase C139 sequence
cactacgacggcgagccggaactcgccccgctggattgcttcggcactccgaacgccggagccgtgattcaggaagagaagaacggcgacggcaagtgggaagcgatcaactaacgcgaaaggccctcgggaaaccgggggcctttcctatgtcctctttgggcactcatgcgccctcgtgagtgcctaaagggtatatggtgattcccatgaaaatcatcggctatgtgcgcctctcccgagcctcccgcgaggagtcg

SEQ ID NO: 24397 - DNA, 260 bp, Unknown
  Description of Unknown: LeftRegion for integrase C140 sequence
gtatgacgcttcatcggcgcgtgccacgggggccgctgcgagggtgagcgctcccgcaataatcgcgggagccgccgcgtggcgcagtgtcatgggcgcaccgtaccaggtcagggggtgaatcgcgggaagtggccaacctcggctatgggcgaacgcaaggctgggcatgggtgcgccaatagcctaagttggagggcgtgaataaatcgccccgtgttgtggtctacctgcggcaatccgaggatagggccgacgac

SEQ ID NO: 24398 - DNA, 260 bp, Unknown
  Description of Unknown: LeftRegion for integrase C141 sequence
ggacggcaagtgggaggcgataaactgacccgctgggaggccctgagagcccctagaaaaacctctcagggccaaccgcccacccctaaaccgaaacttcgccagagccccgagcgccgcccgctccggggcttttcctatgtcctctttgggcactcatgcgccctcgtgagtgcctaaaggggatatgatgctgaggcatgagaataattgggtacgttcgcctctcccgagcctcccgcgaggagtcgacttcggta

SEQ ID NO: 24399 - DNA, 260 bp, Unknown
  Description of Unknown: LeftRegion for integrase C142 sequence
gtcttatcaaaccgctaagaatatcgcttctcaacttaacgtaaatatggaagatttatatgatttcattcagttggatgaacagtgagaatttctcactgggccaaatagtcaatcaaatgattgacccatacatttgtctaatttgctttgataaaacatatgatatagaaatttagttaagaaaggagtatgtgcaaatgaagtgtgtaatttatagacgcgtatctactgatatgcaagttgaagaaggtatttca

SEQ ID NO: 24400 - DNA, 260 bp, Unknown
  Description of Unknown: LeftRegion for integrase C143 sequence
ctggatgggccagaccggcggaggaagaggaccacgatggccaagctttgcaagaggcgccggcccctgcgccttgaggtcggcttcgaggtcagacggggcagtcgggacgtcttgggacgcgcctacgagcgcctcctgcctgcgcacccagttcgtgtcatcacgtgcaccggcaccgttgtctaaggaaggttgccatgagaactcagcacctgagagccgtttcgacaccgcagaccctgcaggttgccctttac

SEQ ID NO: 24401 - DNA, 260 bp, Unknown
  Description of Unknown: LeftRegion for integrase C144 sequence
tgtacgaggacaccatgcgctacttcctacctggtagttacggaggcgggtacctgtgaaactaggcccctgggctggccctaaccggctggcctgggggcttttttcgtacctaaaccacatctagaatagttactatacgacttctcatgtgggaagcattgtagactcgccctatgcgagtactaggacgggtgcgtttgtccaggttgaccgaggaatccacgtccgtcgaccgccaacgagaactgatcgagaag

SEQ ID NO: 24402 - DNA, 260 bp, Unknown
  Description of Unknown: LeftRegion for integrase C145 sequence
gtggctggtccattggatgccgtcgtggtagcgctggtggggcatgcccgaggggtcggggtaccagccgggggcggtcatggcggctactatacggccagcacctgctttaccaggcattatggggcggcatacgacatgacgggtattgaacgctgaaacatttccgtgtcgcatagggtgcatgtactctgactgctgtgcgggcgatcatttacaaccgggtgagcagtgatcccactggtagagcgcgttctgtt

SEQ ID NO: 24403 - DNA, 260 bp, Unknown
  Description of Unknown: LeftRegion for integrase C146 sequence
actgctgcaactggccaggagggcgatcgcggccgctgcgtagagggctgggaggtagcgtgtcatgttgccggagcgtattcgacgtgtgcgtcgtcgacagggttaaaagcatcatgcgaggtgacggccctgagacacatctcccatttcatcggtttacccgctaactgtcggaatgggactgtactgtccggcgcatgcgagcgatcatctactgccgcgtctcatccgatccgcacgcgcgcggcaaatccgtc

SEQ ID NO: 24404 - DNA, 260 bp, Unknown
  Description of Unknown: LeftRegion for integrase C147 sequence
cgcttgtgcaccgtcaatcagttgtagaaaatggagacatggccttgatcgccgtaaatgatgaaaatattgatcagacgcgtttataaagataagaatgaaattacacttgatgcattgttgagaaaacaaactattgatgaaagagaaactttattctctgttatcggaaaagtaacaaaggttataggtgaatactaatgaagtgcgctatatatagaagggtttctacagatgaacaggccgaaaaaggattctca

SEQ ID NO: 24405 - DNA, 260 bp, Unknown
  Description of Unknown: LeftRegion for integrase C148 sequence
ccgggcaccgtgctgacgcgggacttcatgggccagacccatcgtgtcgtggccatgccgaatggtgagttcgagtacaacggcaagccctacagcagcctgaccgcgatcgcctgcgaaatcgcgggcacgcgctggtcggggccggcgttcttcggcctgcgtgatggcgcgaagaagccgcgcaaggggaccggtgcatgaggctcgaagcaaacaagaaacgccggcgctgcgcggtctacacgcgcaaatcctcc

SEQ ID NO: 24406 - DNA, 260 bp, Unknown
  Description of Unknown: LeftRegion for integrase C149 sequence
aagaaatggaaaataatccggacaaaaaccaacatgctggaggtgggccaggaatgtcgttaacacaccctaatcagtcatatgatagttttagaaaagaagtaggaaaagcaagaagcgaagcagaagtaatacgataataaaatttcgggtagcccgcctacccttattattttttgccaattttgaggagggagcacatgaaagtagcaatttatactagagtaagtacacttgaacaaaaagaaaaaggacactct

SEQ ID NO: 24407 - DNA, 260 bp, Unknown; identical to SEQ ID NO: 21214
  Description of Unknown: LeftRegion for integrase C150 sequence

SEQ ID NO: 24408 - DNA, 260 bp, Unknown
  Description of Unknown: LeftRegion for integrase C151 sequence
ggacttgacccaaacttcgtacgacataatgacaacatggtaaaagaatggcaaaatcaaatgcgagaacacaacgaaaactttaatcctgaatctggtggagatttgtataacgtcgaaaccggtaactacgttgatgatgaataaaattatggggtagtccacctacccttattatttttttacttttttaaggggtgatgaattatgaacgtagctatttacgttcgtgtcaggtcagtacattagaacaaaaagag

SEQ ID NO: 24409 - DNA, 260 bp, Unknown; identical to SEQ ID NO: 21214
  Description of Unknown: LeftRegion for integrase C152 sequence

SEQ ID NO: 24410 - DNA, 260 bp, Unknown
  Description of Unknown: LeftRegion for integrase C153 sequence
cgaaaagaattctttaaagtatctcttgatgaaattgaaaaagttgttttagaaaattataacggaactgtatcttttactaaactagctcaagctgaacaatacagaagatcattagaattaacagatgtgtagtaaaaagattagccttcgggcttttcttttacaacgataagaacatacattcgaaaggagataacatgaaacgagtagcattatatatgagagtatcaactgaacaacaagccaaacatggagat

SEQ ID NO: 24411 - DNA, 260 bp, Unknown
  Description of Unknown: LeftRegion for integrase C154 sequence
cgggtcgatgatcgcccccttgcggggacccgtctgatccgcgagtggaatggtcagccccatgaggtgctcgtcaacctcagcgattttgagtatgcaggccagcggtacaaatcgctttctcgcatcgccagagtcattaccggaaccaaccgcaacggctggaccttttttggtttttctagcgcacgaggccttaaatgaacgcaacagacaaagtgctctgcgccatatacacacgcaaatccactgaagagggg

SEQ ID NO: 24412 - DNA, 260 bp, Unknown
  Description of Unknown: LeftRegion for integrase C155 sequence
tattttctggtggtctggagctcacgattccgaccgatcaaaaactgaccgatctcattcattacccaggtggcaccactccgtacaaaacccagctcttgtggagtatcatatcaggaccctgacccgctaccatagcgggttttttagtttgcacggtgacaagagtttggtatccttttctagtaggagggtaaatcatgaaatgttcactatacatacgcgtatcatcccaacaataccaggaagaaaagaaggaa

SEQ ID NO: 24413 - DNA, 260 bp, Unknown
  Description of Unknown: LeftRegion for integrase C156 sequence
cataaaggaaggaaaagcagcttgtcaagggatgcgtgtgccagaagtagatatttcaaattgggtgattacctcaccggttacagtaatagaaagggatggaaatggggaaaagtattacagttattccggccaagaaagtgcagaccagcgttcttcatcaggtcaggaagaaaatcaaggtagccgcatattgccgagtgtccaccgaccaagacgaacagctatcaagttatgaaaaccaagttaattattaccga

SEQ ID NO: 24414 - DNA, 260 bp, Unknown
  Description of Unknown: LeftRegion for integrase C157 sequence
tataaaagagggaaaagtagcttgtcgagggatgcgagtgccagaagtagacatttcaaattgggagataacctcaccaattacagtattagaaagggatagagatggggaaaagtattacagttattccggccaagaaagtgcagaacagcgttcaacatcaggtcagaaagaaaatcaatgtggccgcatattgccgagtgtccaccgatcaagacgaacagctatcaagttatgaaaaccaagttaattattaccga

SEQ ID NO: 24415 - DNA, 260 bp, Unknown
  Description of Unknown: LeftRegion for integrase C158 sequence
cataaaagagggaaaagcagcttgtaaggggatgcgtgtaccagaagtagatatctcaaattggacagtaacctcgccagtaacagtaatagaaagggatagagatggggaaaagtattacagtaataccggccaagaaagtgcagaccagcgttcttcatcaggacaggaagaaaatcaaagtagccgcatattgtcgagtgtccaccgaccaagaagaacagctatcaagttatgaaaaccaagttaattattaccga

SEQ ID NO: 24416 - DNA, 260 bp, Unknown
  Description of Unknown: LeftRegion for integrase C159 sequence
tataaaagagggaaaagtagcctgtcaggggatgcgagtgccagaagtagatatttcaaattgggtgataacctcaccaattacagtaatagaaagggatagaaatggggaaaagtattacagttattccggccaagaaagtgcagaccagcgttctgcatcaggtcaggaagaaaatcaaggtagccgcatattgtcgagtgtccaccgaccaagaagaacagctatcaagttatgaaaaccaagttaattattaccga

SEQ ID NO: 24417 - DNA, 260 bp, Unknown
  Description of Unknown: LeftRegion for integrase C160 sequence
cattaaggaaggaaaagcagcttgtcaagggatgcgtgtgccagaagtagatatctcaaattggacagtaacctcgccagtaaaagtgatagaaagggatagagatggggaaaagtattacagttattccggccaagaaagtgcagaccagcgttcaacatcaggtcagaaagaaagtcaatgtagccgcatattgccgagtgtccaccgaccaagacgaacagctatcaagttatgaaaaccaagttaattattaccga

SEQ ID NO: 24418 - DNA, 260 bp, Unknown; identical to SEQ ID NO: 24417
  Description of Unknown: LeftRegion for integrase C161 sequence

SEQ ID NO: 24419 - DNA, 260 bp, Unknown
  Description of Unknown: LeftRegion for integrase C162 sequence
cataaaagagggaaaagtagcttgtcaggggatgcgagtaccagaagtagatatttcaaattgggtgataacctcaccagttacagtaattgaaagggatagaaatggggaaaagtattacagttattccggccaagaaagtgcagaccagggttcttcatcaggtcaggaagaaaatcaaggtagccgcatattgtcgagtgtccaccgaccaagaagaacagctatcaagttatgaaaaccaagtaaattattacaga

SEQ ID NO: 24420 - DNA, 260 bp, Unknown
  Description of Unknown: LeftRegion for integrase C163 sequence
cataaaagagggaaaagcagcttgtaaggggatgcgtgtgccagaagcagatatctcaaattgggcgataacctcacctgttacagtaatagaaaggcataaaaatggggaaaagtattatagttattccagccaagaaagtgcagaccagcgttcttcatcaggtcaggaagaaaatcaaagtagccgcatattgtcgagtgtccaccgaccaagaagaacagctatcaagttatgaaaaccaagttaattattaccga

SEQ ID NO: 24421 - DNA, 260 bp, Unknown
  Description of Unknown: LeftRegion for integrase C164 sequence
catcaggctttattttttttgcctttttttcaaaaagtgcggaaaaattactcccaaacctacctagtaaggtaggaggaatatttgtattccatgaactatggcataaatctatcaggtcgaattagtttgtctgataacttgactaattttccctttagagtgatatatagtgtgccattacataggaaggagagtaaatgtccgtaaaaaagattagagtcaataaacaaaaacacaagcagaggatctgtgcctac

SEQ ID NO: 24422 - DNA, 260 bp, Unknown
  Description of Unknown: LeftRegion for integrase C165 sequence
acatcaggctttatttttttgcctttttttcaaaaagcgcggaaaaatcgctcccaaacctacctagtaaagtaggaggaatatttgtattccatgaactatggcataaatttatcaggtcgaattagtttgtctgataacttgactaatatcctttttagagtgatatatagtgtgccattacataggaaggagagtaaatgtccgtaaagaagattagagtcaatagacaaaaacataggaagagggtctgtgcctac

SEQ ID NO: 24423 - DNA, 260 bp, Unknown
  Description of Unknown: LeftRegion for integrase C166 sequence
catcaggctttatttttttgcttttttttcaataagtgcggaaaaattactcccaaacctacctagtaaggtaggaggaatatttgtattccatgaactgtggcataaatttatcatgtcgaaatagttggtctgataacttgactaatattccctttagagtgatatatagtgtgccattacataggaagggagagtaaatgtccgtaaagaagattagagtcaatagacaaaaacataggaagagggtctgtgcctac

SEQ ID NO: 24424 - DNA, 260 bp, Unknown
  Description of Unknown: LeftRegion for integrase C167 sequence
acatcaggctttatttttttgactttttttcaaaaagtgcggaaaaatcgctcccaaacctacctagtaaggtaggaggaatatttgtattccatgaactatggcataaatttatcaggtcgaattagtttgtctgataacttgactaattttccctttagagtgatatatagtgtgccattacataggaaggagagtaaatgtccgtaaaaaagattagagtcaataatcaaaaacacaagcagaggatctgtgcctac

SEQ ID NO: 24425 - DNA, 260 bp, Unknown
  Description of Unknown: LeftRegion for integrase C168 sequence
tcaggctttatttttttgccttttttttttcaataagtgcggaaaaattactcccaaacctacctagtaaggtaggaggaatatttgtattccatgaactgtggcataaatttatcaggtcgaattagttggtctgataacttgactaatatcctttttagagtgatatatagtgtgccattacataggaaggagagtaaatgtccgtaaagaagattagagtcaatagacaaaaacataggaagagggtctgtgcctac

SEQ ID NO: 24426 - DNA, 260 bp, Unknown
  Description of Unknown: LeftRegion for integrase C169 sequence
agatgacctatcaacttacaatgatacaagcaaagatacttctaaataatggagcaatcactattgaggaatttgaactttttaggcaattgatgcttgaaaaatatcaaccgtttataagtcaattatcgacctaataactggataattttttcttttagagtgatatatagtgtgccattacataggaaggagagtaaatgtccgtaaaaaagattagagtcaatagacaaaaacataggaagagggtatgtgtctac

SEQ ID NO: 24427 - DNA, 260 bp, Unknown
  Description of Unknown: LeftRegion for integrase C170 sequence
acatcaggctttatttttttgcctttttttcaataagtgcggaaaaattactcctaaacctacctagtaaggtaggaggaatatttgtattccatgaactatagcataaatttatcaggttgaattagttggtctgataacttgactaatattccctttagagtgatatatagtgtgccattacataggaaggagagtaaatgtccgtaaagaagattagagtcaataaacaaaagcataggaagaaggtctgtgtctac

SEQ ID NO: 24428 - DNA, 260 bp, Unknown
  Description of Unknown: LeftRegion for integrase C171 sequence
tcaggctttatttttttttggcctttttttcaataagtgcggaaaaattactcccaaacctacctagtaaggtaggaggaatatttgtattccatggactatggcatgaatttatcaggtcgaattagtttgtctgataacttgactaatattccctttagagtgatatatagtgtgccattacataggaaggagagtaaatgtccgtaaaaaagattagagtcaatagacaaaaacataagaagagagtctgtgcctac

SEQ ID NO: 24429 - DNA, 260 bp, Unknown
  Description of Unknown: LeftRegion for integrase C172 sequence
aagatgagatgacttaccaactgaccatgatacaggccgatagactcctaaaatctaggattattagtgaggaagttcatcagcaatttaaggaaaagatgcttgaaaaatatcaaccatttattagcagattatcgacctaaagacttgataaatgaggcctttagagtgatatatagtagcgaaaggagtgtatcaaattgagaacagttagacgaattcaaccaatgatgacaccgcaaaaacctaagttgcgtgta

SEQ ID NO: 24430 - DNA, 260 bp, Unknown
  Description of Unknown: LeftRegion for integrase C173 sequence
ataatgagatgacctatcaacttacaatgatacaagcaaaggtacttctaaataaaggagcaatcactattgaggaatttgaactttttaggcaaatgatgcttgaaaaatatcaaccatttataagtcaattatcgacctaataactggatatttttttcttttagagtgatatatagtagcgaaaggagtgtattaatttgagaacagttagaagaatacaacccataaaatcgccctgtaggccaaaattaaaagtt

SEQ ID NO: 24431 - DNA, 260 bp, Unknown
  Description of Unknown: LeftRegion for integrase C174 sequence
ataatgagatgacctatcaattgacaatgatacaagcaaaggtacttctaaataaaggagcaatcactattgaggaatttgaactttttaggcaattgatgcttgaaaaatatcaaccatttataagtcaattatcgacctaataactggatatttttttcttttagagtgatatatagtagcgaaaggagtgtattaatttgagaacagttagaagaatacaacccataaaatcaccctgtaagccaaaattaaaggtt

SEQ ID NO: 24432 - DNA, 260 bp, Unknown
  Description of Unknown: LeftRegion for integrase C175 sequence
tgactgataaatggatttatggaaaaaaaggagtgcccgaactataaaaatatttacaggagaaactatgagaaaaaaggtattaactgtaacttgtcgatatgaacctgatgagttagcagagcaacatctagcagacgcttatgagctgttactaagatatgcggtaaaaagaaacaacgaaaaggagatgaaagaaaatgacaacagtagcattatatgcgagagtttcatcgaagaaacaagcgcagaacaataca

SEQ ID NO: 24433 - DNA, 260 bp, Unknown
  Description of Unknown: LeftRegion for integrase A1 sequence
aagagcgcaagcgccgcgcgcaaggcgtatcgcggcgtcgaggtggccccgaaagaccccgttgaaacccattttcagaagctgttgacggactgggcgcgggcgcccaaggccgcgcggcggcggttcgtgcgcgagcgggcggacgatctggccgcgctcatggccgatctgccggacgcatcggaaggcggtgcggcatgagccgggagcctgcccaactgtggtggacggctgcggagatcgccgcggcagggttg

SEQ ID NO: 24434 - DNA, 260 bp, Unknown
  Description of Unknown: LeftRegion for integrase A2 sequence
ccgaaataccgggctcaacggctgagctacgacagctggggtgatcaggcgatcaactgacaaaggagccgccgggggtgtgctgaccccacggcggcatgacgaagcaaggagaagatgatggacggagcaggaatggtcaacagggtgacgacagtcgcgccactgcgcaatgtgatgctgctgacggagctgatcgaacgggttcggaaccgcgacgacgatctgccgggcatggcatgcttttcggggccgagcgg

SEQ ID NO: 24435 - DNA, 260 bp, Unknown
  Description of Unknown: LeftRegion for integrase A3 sequence
caatccgcagaataccgggggttcgcgcgcatgcgccgggccttcggcgaagacgaataacgagaaaaggagcagagcatgacaccgtccatcgcgcccctgcgcaatgtcgccgctctcgtcggtctcgtcgatcgcgtgcagaaccgcgcgttcggcctgccggggatggcgaccttctacggcccctcgggctggggcaagaccaccgccgtcaccttcgcaggcaacgagttccaggcgcatgtcgtccaggtcaa

SEQ ID NO: 24436 - DNA, 260 bp, Unknown
  Description of Unknown: LeftRegion for integrase A4 sequence
aaatgtgtgccacgggacatgaagaagttaaatcaaatcattaagattctgcatatgtaacaaaaccaacccagtataaagacgggttggttttatatattataaaatcattaaaatgtcatccactgctgctctgtaagcaaattcaatcaattcagatttagagtgaaataggtcctcaagatataaataattttttacttcattttcaggaatatatttcataagctccttaaagcttttctcgaatttcagaactg

SEQ ID NO: 24437 - DNA, 260 bp, Unknown
  Description of Unknown: LeftRegion for integrase A5 sequence
gaaagtctatttcatgttattgaaacaactatatcaggtaggagagtaaaagcatcatgagaatggtcgatttaattgcgaaaaaacgggatggttatgagctttcaaaagaagaaattgattttatcatccgcggttacacgaacggcgacattcctgattatcaaatggcttctatgttaatggcaatttatttcaatggcatgtctaaagaagaaatctctgccttaactaatgccatgattaattctggtgaaaca

SEQ ID NO: 24438 - DNA, 260 bp, Unknown
  Description of Unknown: LeftRegion for integrase A6 sequence
gacgttgacggacggggttcacggatgcagatagcctgcgtcgcatcgttgacggtatgagcaagcgcgcggcggcctccaccagcgaggactaggagtccatgcgaagggccgggcagggattactccctcccggccctttctgctgccttcagccttgtcgagggtgcgggaacgcccgcacgagatgctcggcgcacgtctccgcgctcggtccggcaaccggctggccgcaggggtagccgtgcacccacgtggcc

SEQ ID NO: 24439 - DNA, 260 bp, Unknown
  Description of Unknown: LeftRegion for integrase A7 sequence
acgggtacatcatcttcccgaatcctcttcgctcagatggatttcaatccaactcgctgagagcgggaactcgggcccccaccttacgaggtgggggcctcttcgcgtccaagggccctctctggaggcgccatccctacgtgcccaatcggcgtacgctggttgggaggtgattcgatgtcgctccaagagaacatccgtagccatcggcgccggaaggggtggacccaagagcagcttgccgaggaggcagacgtctc

SEQ ID NO: 24440 - DNA, 260 bp, Unknown
  Description of Unknown: LeftRegion for integrase A8 sequence
acgggcacatcatcttcccgaatcctcttcgctcagatggatttcaatccaactcgctgagagcgggaactcgggcccccaccttacgaggtgggggcctcttcgcgttcaagggccctctctggaggcgccatccctacgtgcccaatcggcgtacgctggttgggaggtgattcgatgtcgctccaagagaacatccgtagccatcggcgccggaaggggtggacccaagagcagcttgccgaggaggcagacgtctc

SEQ ID NO: 24441 - DNA, 260 bp, Unknown
  Description of Unknown: LeftRegion for integrase A9 sequence
gggattcgcgggaacgcttcaggtttcgagttcgagatcggcagcaccaaggcgtcctgactggtcaactggcccccggcgtaactggctcagccgtactcttgacgcatgagcgtcgacctgggtgagcggattcgcgaggtacgcaagcgtcggggcctgactcagcgccaactggccgaactgtcaggcgtgtccctctccctcgtccggaaactggagcagggggagaggagcgacacgcggctggagacggcgcg

SEQ ID NO: 24442 - DNA, 260 bp, Unknown
  Description of Unknown: LeftRegion for integrase A10 sequence
acgggcacatcatcttcccgaatcctcttcgctcagatggatttcaatccaactcgctgagagcgggaactcgggcccccaccttacgaggtgggggcctcttcgcgttcaagggccctccctggaggcgccatccctacgtgcccaatcggcgtacgctggttgggaggtgattcgatgtcgctccaagagaacatccgtagccatcggcgccggaaggggtggacccaagagcagcttgccgaggaggcagacgtctc

SEQ ID NO: 24443 - DNA, 260 bp, Unknown
  Description of Unknown: LeftRegion for integrase A11 sequence
ggaattcgcgcgaccacttcaggtttcgagttcgagatcgcgagcacgaaggcgtcctgaccagggcaaacagagggccccccgccttgcggcagggggccttcgtcatttccggcgccactggatggggatcgggggctgccgatcgaagtgatcgacgcacctgtcagtgaggcggctcatcgctggcttcccgcacaggtagccgtatgcccactgctcggcgatgctcccatcctctcgcttgaaccggatcttct

SEQ ID NO: 24444 - DNA, 260 bp, Unknown
  Description of Unknown: LeftRegion for integrase A12 sequence
gcatcgtgcggatgtgattgcgggacttaagaaaagaaagctctctttatcagctctttcccggcagtttggttatgcgccaactacattagctaatgcgctagaacgacactggccaaagggtgagcagattattgctaacgccttagaaactaaaccggaagtaatctggcctagccgatatcaagcaggtgaataacatggaactttgggtatcaccgaaagagtgtgcgaatcttcctggtttgccgaaaacatcg

SEQ ID NO: 24445 - DNA, 260 bp, Unknown
  Description of Unknown: LeftRegion for integrase A13 sequence
cagaactttagccaaagcgtttcaaacctgtttgaacagaaattcaaaaacaagctttaaaccctatttaaaccttccataaatggagattgatatgaatacaaacgtagttgaactaggcaatgcagaagcgaagcaaaccgacatattaatgcgcattcgtgcattaacagaatcgaaggctgtttcagcgtctcagattgcaaaagagatcagcgtatcacctgccacgctaagccaaatcttgaacggttcataca

SEQ ID NO: 24446 - DNA, 260 bp, Unknown
  Description of Unknown: LeftRegion for integrase A14 sequence
agattggcacagagctgacatcgttgcagagctacgaaaacgcaatatgtcactagctgaattgggaagatctaatcatctttcgtcttcaacattaaaaaatgctttggataagagatatccgaaagcggagaaaatcattgcagatgcactgggaatgacaccgcaagatatttggccgtctcgatactaggtgcgctatgaaagaatggtatacagcaaaagagttgctcggtttggcaggtttaccaaagcaagcc

SEQ ID NO: 24447 - DNA, 260 bp, Unknown
  Description of Unknown: LeftRegion for integrase A15 sequence
agactggcatcgggctgacatcgttgctgagttacgaaaacgcaatatgtcactggccgaattgggaagatcgaatcatctttcgtcttcaacattaaaaaatgctttagataagagatacccaaaagcggaaaaaatcattgcagatgcattgggaatgacaccgcaggatatctggccatctcgatactaggtgcgctatgaaagagtggtatacagcgaaagaattgcttggttttgctggtttgccaaagcaagca

SEQ ID NO: 24448 - DNA, 260 bp, Unknown
  Description of Unknown: LeftRegion for integrase A16 sequence
gagctgagctacagcacactcaaatctgcgttagacaaatcttatccaaaatgtgaacgaatcattgcgaatgcaattggcgtaccgcctgaagttatatgggctgagcgatttgcacaacgtaattttcgtccaaaattaattgataagttttaatcataaacaacttttacgttaaatgaaagagaaaaggaacgtttatgagtaacttaaaaataaaaacgcactactctgcaatggagattgcctcatttaagtta

SEQ ID NO: 24449 - DNA, 260 bp, Unknown
  Description of Unknown: LeftRegion for integrase A17 sequence
accaaggggattcgcgggaacgcttcagctttcgagttcgagatcggaagcacccggtagtcctgaccagccaactggcccccgtcgcaaggcgggggcttcttcatgtccaatgacgcgcgactccccagggccgtactctcgaaccatgagcgccaacattggggaacgactccgggatgttcgtaagcgccgggggatgagtcaacgcgagctggccgagcggtccggcctgtccatctcgctgatccgtaagctgg

SEQ ID NO: 24450 - DNA, 260 bp, Unknown
  Description of Unknown: LeftRegion for integrase A18 sequence
gccagccaggacgacttgttaacccttcagtccaccttgaatgacgcggtcactctgctggcccagttctacaaagggaacctggaaagtgaggaagtgatggccggcctgaccactgccatgggccagctggctggacatcgctgtaacgtcgagaaagcgccggcaccggagctgggcttgtttgttggaggtgacgaatgagccaggactggtttacggcgaaagagttggctgggctgagtggtatgcctggcact

SEQ ID NO: 24451 - DNA, 260 bp, Unknown
  Description of Unknown: LeftRegion for integrase A19 sequence
aaaatatatttaaaacagttaattgaaaattttaaccttgataaagattattttaagtaaaataaaaagagtaggaaaatccagtttatattcctattaatatatatacagttatatttaggtatatataaactagaaataataaaggctaggtattccctagcctttatataattcaatttatatacacttttctttagtttccaatatgtcttttctatataacttatgtgcatcaggagcagttgaaaaatccccct

SEQ ID NO: 24452 - DNA, 260 bp, Unknown
  Description of Unknown: LeftRegion for integrase A20 sequence
catttcgatgagcaggttaagtcgtgaaaacggtctagcgtcgacaactcttgcaaatgcccttgatcgcccttggcctaaaggtgaaaaaattatagctaaggctctagatttaaaccctagcgaaatatggcctagtcgctatgcagaattaagaaatgcggggtaaccacatggaatggttcgtcgtaagagatctcatgggattttctgggttaccaacaacagagcgtggaattcgaaaattagttgaaaactta

SEQ ID NO: 24453 - DNA, 260 bp, Unknown; identical to SEQ ID NO: 24452
  Description of Unknown: LeftRegion for integrase A21 sequence

SEQ ID NO: 24454 - DNA, 60 bp, Unknown
  Description of Unknown: LeftRegion for integrase A22 sequence
gtggataaagactggaatggattggccgatttaatagcaaatcttattacaaagtatgct

SEQ ID NO: 24455 - DNA, 260 bp, Unknown
  Description of Unknown: LeftRegion for integrase A23 sequence
cgtcgtcgccccgctccgcgaacggctcatcaggtacggcgtgccgacggtcgaggcgggcggcgtatgggccaaccaggaagggccggtaagcgtcacggcacgcgccgactgagagacgtttccgcaggtcaaccccgttccagcccaacagtgttagtctttgctcttacccagttgggcgggatagcctgcccggcatgagcgtgaaggttgaaggcatggtcattctggcaggcggctacgaccgacagtcggcg

SEQ ID NO: 24456 - DNA, 260 bp, Unknown
  Description of Unknown: LeftRegion for integrase A24 sequence
acacgtaccgctgcccgtggacgggggccgaacggcttccctgaacggccgacgaaggcgcaccgctcagcgtctcccccagggcgccgggcggggcgttttcccaggtcagcgcgtactacccaactgttgtagactttggctttacccagttgggtcggctaacctcaaacctcatgacacaagggacggtcagcggcatgaccattcacgcggcaggatacgaccggcagtcggcggagcgcgacagtgggagcgcg

SEQ ID NO: 24457 - DNA, 260 bp, Unknown
  Description of Unknown: LeftRegion for integrase A25 sequence
ggttacacgacgcccctctatggcccgtactgacggacacaccgaagccccggcggcaaccctcagcggatgccccggggcttcacgttttcccaggtcagaagcggttttcgggagtagtgccccaactggggtaacctttgagttctctcagttgggggcgtagggtcgccgacatgacacaaggggttgtgaccggggtggacacgtacgcgggtgcttacgaccgtcagtcgcgcgagcgcgagaattcgagcgca

SEQ ID NO: 24458 - DNA, 60 bp, Unknown
  Description of Unknown: LeftRegion for integrase A26 sequence
agcgtgaactgggtgcgggcgcggtcaaggttgtggtcggggcgggcggtgtggaaatag

SEQ ID NO: 24459 - DNA, 260 bp, Unknown
  Description of Unknown: LeftRegion for integrase A27 sequence
tactgtcggctcacagcaccggtcggcagtaaggtcgagaagccccgtccgtgcgtctccccccgtggcgccggacggggcttcagacgtttcgggtgctgggttgttgtctctggacagtgatccatgggaaactactcagcaccaccaatgttcccaaaagaaagcgcaggtcagcgcccatgagccaagatctaggcatgtcgcccttcatcgctcccgacgtccctgagcaccttctagacactgttcgcgtcttc

SEQ ID NO: 24460 - DNA, 260 bp, Unknown
  Description of Unknown: LeftRegion for integrase A28 sequence
gtcgtggccgtccatagtccgcaacgcggtagggaggggacggtgcaggagctccctcaggtcgatgatgacgtctgattcgggggccgggccgtgcccgtacccgaacgagacgacggtgcaacgcggcatgggggacattagccctcccactttcggccgcaggtctgacagcgggtgacgatcgggccgcccgccgtttggatagtgacccacgtgtggcccgggtcggtgcagcggtccgctgctacggctacgct

SEQ ID NO: 24461 - DNA, 260 bp, Unknown
  Description of Unknown: LeftRegion for integrase A29 sequence
gtccgtgcgtcgttcccccgtggcgcatgggcggggcttcgctatgtccgtgcgcggtaccctgggctagccccgatcggctgtctgtccgcaaacacactgccggtcggggttttcgctggtcaggcgcacctatgtcgtgtagttgaagcgaggcaaacgactacgcaacataggtggggtccgctaggatcatgctcatgcggacagacacgttggcgacggcaactgagattgccgccggaaggacacccatgcga

SEQ ID NO: 24462 - DNA, 260 bp, Unknown
  Description of Unknown: LeftRegion for integrase A30 sequence
gtttccctgccccgtccgtgcgtgcctcccccgtcgcgcatgggcggggctccgtcgtaccctgggcttgccccgatcggctgtctgtccgcaaacacactgccggtcggggttttcgctggtcaggcgcacctatgtcgtgtagttgaagcgaggcaaacgactacgcaacataggtgctctcggctaggatcatggccatgcggacagacacgttgacgacagcgaccgaagttgctgccggaaggaagcccatgcga

SEQ ID NO: 24463 - DNA, 260 bp, Unknown
  Description of Unknown: LeftRegion for integrase A31 sequence
aacgggccggacgcgatcgaggctgccatcgaggccgccctcgccgaggctgacgcgtagccacctcgcaccctgtctccccctttaaacgcactgtcccacaacagtgagcgcaaagggggagatccgccgggcgtcgcggacgcccccgacatggaacagagaacggccccggtacctcgcggaaggtaccggggccgctccatgtggcccaccgcgccgcacgggggggaacggacagcggcgggccggtcaccctt

SEQ ID NO: 24464 - DNA, 260 bp, Unknown
  Description of Unknown: LeftRegion for integrase A32 sequence
tttcccctgccccgtccgtgcgtgcatcccccgtcgcgcatgggcggggcttcgtcgtaccctgggcttgccccgatcggctgtctgtccgcaaacacactgccggtcggggttttcgctggtcaggcgcacctatgtgccgtagttgaagcgagcatttgggctacgcaacataggtgctctccgctaggatcatgcccatgcggacagacacgttggcgacggcgactgaggttgccgccggaaggacacccatgcga

SEQ ID NO: 24465 - DNA, 260 bp, Unknown
  Description of Unknown: LeftRegion for integrase A33 sequence
  modified_base (114)..(177): a, c, t, g, unknown or other
aggatctcggaacaactgtaaataaaatatctggaggtgtacttatgagcagcactgaaactcaggaagaaaaagaacgtcaggagcaagttcaggaattgcaacggctactgnnnnnnnnnnnnnnnnnnnnnnnnnnnnnnnnnnnnnnnnnnnnnnnnnnnnnnnnnnnnnnnngtatgtgaactaagtatagccccatggaggggctatttctttttgatggaggaattatgaagaaaaactttaagatgcccgga

SEQ ID NO: 24466 - DNA, 260 bp, Unknown
  Description of Unknown: LeftRegion for integrase A34 sequence
aggatgttaaatcaaattgaatacagtgtttgcctgatgatgttgaatcagttgttggaagcgaagcagatcacgaaaaaagaatatgacaaagttaaaattagcttaatgaaggagtatcaaatatcttctgaaatattaagtggataagtgaaaagagttcgggtagtatgtgtgctaagaaagaggtggtgagatatatggctaaagtagaaatcattaaagccaataaagaactgtcgaatcgcaataagaaaggt

SEQ ID NO: 24467 - DNA, 260 bp, Unknown
  Description of Unknown: LeftRegion for integrase A35 sequence
aagagtaaatggattgatggaaaaaaggagtggtaaggctccttgcactacaaaaacatttgcaggagaaactatgagaaaaagaacattaacttgccgatacgagccagatgaattagcggaacaacatctagcagacgcctatgagctgttattaaggtatgcggtaaaaaaaaacaatgaaaaggagataaagaaaaatgataacagtggccttatatgcaagagtttcatcgaagagtcaagcgcagaacaataca

SEQ ID NO: 24468 - DNA, 260 bp, Unknown
  Description of Unknown: LeftRegion for integrase A36 sequence
ctcgccccccgggtctgtcgcaacaaggaatgcgccgcgttcggctccgacgtcatttagacactgaggtgcacgccacagtgtgtaaacgacgtcgctccggggtcgcctagttgacctgcggaaacggcgcggccccgcctcccatcatgggacgcggggccgcgctgcgcatgttcactcggcgaggtcggacgcgaacgacgtgaacgacgaccaggccgccggcgccacggtgagcatccctgcgccgtgatcct

SEQ ID NO: 24469 - DNA, 260 bp, Unknown; identical to SEQ ID NO: 24468
  Description of Unknown: LeftRegion for integrase A37 sequence

SEQ ID NO: 24470 - DNA, 60 bp, Unknown
  Description of Unknown: LeftRegion for integrase A38 sequence
acctcaattttgctcaaaaacggcattgaactacgattttcgtacaaaaccgccgaataa

SEQ ID NO: 24471 - DNA, 260 bp, Unknown
  Description of Unknown: LeftRegion for integrase A39 sequence
aagcacattcccggcccggggccgctggtctgccccgacggaaaatgccagcgcgcttgattgtttccgggcctgctgccaccctctgaccaagcaacggaccatcgagccggaggggatccgccgtgcacagatgctcccctttagagccaccgtcccacgacaggggctctaaaggggagcgacacgagatggttgcttgacctgcggaaacacgacggccccgcctcccagccagggacgcggggccgttgccgtgc

SEQ ID NO: 24472 - DNA, 260 bp, Unknown
  Description of Unknown: LeftRegion for integrase A40 sequence
attattaacgaaccgttgggccaggagagtggcagcggcgggtttgctatggagttctgatgaagaagcgcacctacaaaaacaaacacactgccagcagtggcagtgccggacagcctgatatctctgacgctctcagaagcgatccggcgctcagcgccttcacgtttgacgggccatattcagtaacagacggctatgatctgctggacagcatgtgctgcgtcgataacggtcggtactacgagacgccaatagac

SEQ ID NO: 24473 - DNA, 260 bp, Unknown
  Description of Unknown: LeftRegion for integrase A41 sequence
gccgcgcccgcgggggtcgggtgcggcgcggccgtcagggggcgaccaactcgatcttgatcgcgagggcgccgagcgcttccttttcgggcccgtagatgttgcggatgttggcgagctgctgctcgcgggtcgacgtcgggttgacgttggccggcccctcgccgtcgagcagagcctcgaagtcggggtactccgtcacctgcttcacgagcacgtcgcaggtctcgtcggtgcccttgatcctgaagcggatcacg

SEQ ID NO: 24474 - DNA, 260 bp, Unknown
  Description of Unknown: LeftRegion for integrase A42 sequence
aacgcgaaacacaaccgggagtaccggagacgacaacggaaacagccggctaaccccgctgagtgaccagacccccgtccatgaggcgggggtttcgtcgtttgcccaggtcagcggtaggtgtaccctgtgggggagccatcaaggacgcacccccacgggggtaacatccactcatgacactaggagtagtgaccggtatggacacccacgccggagtgtacgcacgccagtccaagcggcgggccaacaaatcggag

SEQ ID NO: 24475 - DNA, 260 bp, Unknown
  Description of Unknown: LeftRegion for integrase A43 sequence
ggtccggccacggcacataaggccatggggttctacgtgatgggtggccagtgcgctaacccgcgctgcccctgcaatacggctggtcggctgcatggtcctttgatcccccattttgagaagtgagttatcaagggtccatagacgcgctaccctaaaggggctggtcaagcgtgccagcaaccctaggaggggacagcgtgacagggagaagagccgactaccagacactagtcagtctggggctcagcgaagacgac

SEQ ID NO: 24476 - DNA, 260 bp, Unknown
  Description of Unknown: LeftRegion for integrase A44 sequence
gcccggaaggacgaaccggccgaggtcgacgaccgcgccgacggggaaaccctgttctgaccagggcttttttatttgcccctttagaaccacagttccacaactgtgagcctaaaggggcatccccacccttgggcggcgacgacctcgccgagcaggacgcggccccggtacctcgcggaaggtaccggggccgttccttatggcccaccgcgccgcacgggggatgacggcagcggtgggcccttcccccccctacc

SEQ ID NO: 24477 - DNA, 260 bp, Unknown
  Description of Unknown: LeftRegion for integrase A45 sequence
gcccgcagggacgagccggccgaggtcgacgaccgcgccgacggcgaaaccctgttctgaccagcccttttttatttgcccctttaggcgcactgttccacgactgttcgcctaaaggggcatccccgccagggactcgacgacgccctcgccgagcagacagcggccccggtacctgaccaggtaccggggccgttccgttccggcccgccgcgccgctcgggggatacggcgacggcgggcctccccgctaccgtctc

SEQ ID NO: 24478 - DNA, 260 bp, Unknown
  Description of Unknown: LeftRegion for integrase A46 sequence
aatatactaagtgttaagtttaaaaatggcttagttacagaatttatctataacaattaaccatgtcaaaaattcttctttactcataccatttgacaaccccaagtttcaataaagaatgtacctttttgattcttatctgaatgtattgtatttactatattgttcaacatttattcctccatttattttaaaatatttttgtatctattaatataaatactataccataaactataggataaaaaaatatccttatt

SEQ ID NO: 24479 - DNA, 260 bp, Unknown
  Description of Unknown: LeftRegion for integrase A47 sequence
tcctgcgggtcaagaccatttcgcctgacaaacagcctacatagaaaaagcgccgcgaggcgcttttttcgtttacgcgctcccctgaccgagttgtctgataatatattttcggacacgctcggcaacccgaacgagagtcaaaatacatttgcgatgtgccggcgcatcgcctgattttacgcacttccgaacccgtcatggcgaagaaaccgaaagccaaggtctacagctatctacgcttctccgatccgaagcag

SEQ ID NO: 24480 - DNA, 260 bp, Unknown
  Description of Unknown: LeftRegion for integrase A48 sequence
gtgccgacacctcggactcgtggttcgccttggcgcggatcggctgacaaagaaacccccctctcagggccttcgggctccgggaggggggcttttttgcgtttcagggcatcaatggtgatgatgtccgtgaccgtgtccgtggtcagcaccatcatccgatggtacaacctcgacaatcgcggtctcagtcgtttaggatgtaccacatgccatcgaagagagccttgctggtcatccggctcagccgggtgacggat

SEQ ID NO: 24481 - DNA, 260 bp, Unknown
  Description of Unknown: LeftRegion for integrase A49 sequence
cgtgtaactagcataaaatttaaaaatggaattaacttaaactttatatacaacacataaaccttcatatctccacattttaaactcttccgtacttacactaatggacaaccccaagtacaaatatagaaggttttttctttagttcgttttgtatttttatttatgttaattttaatatttttatccatataaagttcctccaataattaaatagatttcttaaatttctacagtattatagcataacaaatatataa

SEQ ID NO: 24482 - DNA, 260 bp, Unknown
  Description of Unknown: LeftRegion for integrase A50 sequence
taggcatgacgactcccgtcaatcccgctgggttggtgacgtccacgctacgcagtccagggggcgggaacgggcttgagcgcacggcaactttcctgggaaacggactgacccggacacgttggacatgctagaactgtcgttcacgcgcctccggaaacccgaaggtgctcaactgacagttcaggagagccctacccgtgtcggcaacagcccaggtcagcgccacgtcaccgactcccttcatggcgggcatgacg

SEQ ID NO: 24483 - DNA, 147 bp, Unknown
  Description of Unknown: LeftRegion for integrase A51 sequence
ggacgtcataacagtgaagctattgtatttgctttcgccaatctgcagattaaaaggtaaggattacttaatgtatcggtgtcttatgtttaattttttgcagtatatagatactgtatgtctttacaaaacttcatctacatctag

SEQ ID NO: 24484 - DNA, 260 bp, Unknown
  Description of Unknown: LeftRegion for integrase A52 sequence
tggcaggcagccgaggaactagcctctcacgacatcccgcttccgcaggccgccgaatagcatcgaaatattctcaatcactcaacaccatttttctcgattgcagtacaatcgaggctcgatcaacgcacgagagtgccaaggagagaggagtgaacgagaaacttgcgcgggccgtcatcgacgcggcccgagactttgcccttacagggagcggcttcgacgcgatgtgccgcgcgatcgaagcctacgagacgcag

SEQ ID NO: 24485 - DNA, 260 bp, Unknown
  Description of Unknown: LeftRegion for integrase A53 sequence
cctcggactcgtggttcgccttggcgcggatcggctgacaaagaaacccccctctcagggccttcgggctccgggaggggggcttttttgcgtttcagggcatcaatggtgatgatgtccgtgaccgtgtccgtggtcagcaccatcatccgatggtacaacctcgacaatcgcggtctcagtcgtttaggatgtaccacatgccatcgaagagagccttgctggtcatccggctcagccgggtgacggatgcgacgacc

SEQ ID NO: 24486 - DNA, 260 bp, Unknown
  Description of Unknown: LeftRegion for integrase A54 sequence
cgctggcagctcgcgaacaggcccctgggcagttggtccgggggccttgcgcttgcccgcgagagaggcgagcagggcttccctctcctcctcggggagcgacatgagcatgtcggcaagccgctcgatcatgcgcgttccagcaggtcagacggcttcttgaccgtgagcgggagcatcttcccgccaggcggagccagttgtgggcttgttcccatctgcgggcagatggaaccacgcctacatccagtagtaccctg

SEQ ID NO: 24487 - DNA, 260 bp, Unknown
  Description of Unknown: LeftRegion for integrase A55 sequence
cgctggcagctcgcgaacaggcccctgggcagttggtccgggggccttgcgcttgcccgcgagagaggcgagcagggcttccctctcctcctcggggagcgacatgagcatgtcggcaagccgctcgatcatgcgcgttccagtaggtcagacggcttcttgaccgtgagcgggagcatcttcccgccaggcggagccagttgtgggcttgttcccatctgcgggcagatggaaccacgcctacatccagtagtaccctg

SEQ ID NO: 24488 - DNA, 260 bp, Unknown
  Description of Unknown: LeftRegion for integrase A56 sequence
tggagtgtcgtgcgcagcttcgagtttcatcccgtgtgggagcccgacccctggtcttgaccgctggagcgcaaaccatgcaggcgcgcttgattgtttctccgcctgctgccaccctctgaaaaccgcacctcagtgcagggagagggggaacgatgctcgcgagtcctttagagacactgacccacgtcagtggatctaaaggaccacatcggagcgcgaagaacggccccggtacctacctcaggtaccggggccgt

SEQ ID NO: 24489 - DNA, 260 bp, Unknown
  Description of Unknown: LeftRegion for integrase A57 sequence
tggagcctggtgcgtacctacgagttccaccccgtgtgggagcccgacccctggtcttgaccgctggagcacaaaccatgcaggcgcgcttgattgtttctgtgcctgctgccactctctgaaatccgcacctcagtgcagggagagggggaacgatgctcgcgagtcctttagagccactgacccatgacagtggatctaaaggacgcaaccaccgcaggtggcagtacgagaacggccccggtaccgagcaggtaccg

SEQ ID NO: 24490 - DNA, 260 bp, Unknown
  Description of Unknown: LeftRegion for integrase A58 sequence
cgctggcagctcgcgaacaggcccctgggcagttggtccgggggccttgcgcttgcccgcgagagaggccagtagggcttccctctcctcctcggggagcgacatgagcatgtcggcaagccgctcgatcatgcgcgttccagcaggtcagacggcttcttgaccgtgagcgggagcatcttcccgccaggcggagccagttgtgggcttgttcccatctgcgggcagatggaaccacgcctacatccagtagtaccctg

SEQ ID NO: 24491 - DNA, 260 bp, Unknown
  Description of Unknown: LeftRegion for integrase A59 sequence
cgctggcagcgtgcgacaaggcccctgggcggttggtccgggggcctcacgcttgcccgcgagagaggcgagcagggcttccctctcctcctcggggagggccatgagcatgtcggcaaggcgctcgatcatgcgcgttccagcaggtcagacggcttcttgaccgtgagcgggagcatcctcccaccaggcggagccagttgtgggcttgttcccatctgggggcagatggaaccacgcctacatccagtagtaacctg

SEQ ID NO: 24492 - DNA, 260 bp, Unknown
  Description of Unknown: LeftRegion for integrase A60 sequence
gcgacaaggaccctggtgagttggtccaccgggctcacgctggaccgcgagagaggcgaggagagcttccctctccccctcgggcagggccatcaggctctccgccaggcgctcgaccacgtcgcgcttcatgcgcgttccagcaggtcagagggcttcttgaccgagagcgggagcatcttcccgccaggcggtgccagttgtgggcttgttcccatctgggggcagatggaaccacgcctacatccagtagtaccctg

SEQ ID NO: 24493 - DNA, 100 bp, Unknown
  Description of Unknown: LeftRegion for integrase A61 sequence
acccctatcctaaggtttaatttcatttttgacctcacagccactaatagtttccactaagaaaagtagtaagtatcttaaaaaacagataaagctgtat

SEQ ID NO: 24494 - DNA, 260 bp, Unknown
  Description of Unknown: LeftRegion for integrase A62 sequence
gtagcgggagagcgttttgagcaatccccccagattattttgggccgtttcgtagcatagatttctttcaggaacgctacacactaagtcataacgcataatttcaatgacttatggtgagatcaataatcccgcctactgcattccgacaaggccagatcggaaggcatacacatccagacggtgattggcagcttccagtaagcaaccgcctcactgataaggtattcgtgtttcaggcagccggccggattgacctt

SEQ ID NO: 24495 - DNA, 260 bp, Unknown
  Description of Unknown: LeftRegion for integrase A63 sequence
cccgccgatgacgcccaggaggacgctgcccgctgtatccgggcacgccacggccctggtcccgcgctcccccgtgatgtcccacgtcaggaccacgcccgcctcacgcactggatgcccggagaccgtttctcctccacatcgggcccctgtctgtccctggatgtccgtcaagtccaccctgtcaccccttgtgacgcgtgtctgaggagatatccgctcccgccgaacttcccccaaacacacatcaggcccgctac

SEQ ID NO: 24496 - DNA, 260 bp, Unknown
  Description of Unknown: LeftRegion for integrase A64 sequence
gagcagagcctccctctcctcctcgggtagggccatgagctggtctgccagccgcttgatggtcgcgccgttcatgcgcgttccagcaggtcagagggcttcttgaccgagagcgggagcatcttcccgccaggcggtgccagttgtggccatgtatccatctgggggcagatggagacaaggtcacatccagtgatagcttgctcaccatgagcagccggaagcgacagccagccgcagagcgcgcggcctacaacatc

SEQ ID NO: 24497 - DNA, 260 bp, Unknown; identical to SEQ ID NO: 24496
  Description of Unknown: LeftRegion for integrase A65 sequence

SEQ ID NO: 24498 - DNA, 260 bp, Unknown
  Description of Unknown: LeftRegion for integrase A66 sequence
gagcagagcctccctctcctcctcgggtagggccatgagctggtctgccagccgcttaatggtcgcgccgttcatgcgcgttccagcaggtcagagggcttcttgaccgagagcgggagcatcttcccgccaggcggtgccagttgtggccatgtatccatctgggggcagatggagacaaggtcacatccagtgatagcttgctcaccatgagcagccggaagcgacagccagccgcagagcgcgcggcctacaacatc

SEQ ID NO: 24499 - DNA, 260 bp, Unknown
  Description of Unknown: LeftRegion for integrase A67 sequence
gcgcgagaagcgaagccggaaccccttccgaagcggcgtcgactgaagaaggtggacagcgcagccgtccgccagtgggccaacgagaacggcgtcgaggtcccggctactgggcgaatcgcgcgggccgtggtcgagcagtacgaggcagcacagcagggctgagtagtgctacctgaaggacacgctggtcgagcaacgtgcgtgaggtagcagaagccggtaccctgctgagcgtgacgacatcggtactcgaacag

SEQ ID NO: 24500 - DNA, 74 bp, Unknown
  Description of Unknown: LeftRegion for integrase A68 sequence
gacaccatggaagtagtcataaagccattttgcactaataaaaaaaaaggcgctctttaatgtagcgcccaaat

SEQ ID NO: 24501 - DNA, 260 bp, Unknown
  Description of Unknown: LeftRegion for integrase A69 sequence
ctccctctcctcctcgggtagggccatgagctggtctgccagccgcttgatggtcgcgccgttcatgcgcgttccagcaggtcagagggcttcttgaccgagagcgggagcatcttcccgccaggcggtgccagttgtggccatgtatccatctgggggcagatggagacaaggtcacatccagtggtagcttgctcaccatgagcagccggaagcgacagccagccgcagagcgcgcggcctacaacatcgacgccgag

SEQ ID NO: 24502 - DNA, 260 bp, Unknown
  Description of Unknown: LeftRegion for integrase A70 sequence
gtcggcgtgggttgccccgcaccccgccccgctgccgctgttcaccgcgccactggtggagttcgagtttcacggcgcgcttgtgttcctgacaaccccggacgtgctggcgctgatcgcgtcggcaatcatgcttgttcggttcgttgcgtgggcaattcagcccgtcacccgccgcctgaaggggaaaggggcctgccgtgaatgcaatgaccgcgattgaacatcgcccggccgaaatcaccccggccgaggcccgc

SEQ ID NO: 24503 - DNA, 260 bp, Unknown
  Description of Unknown: LeftRegion for integrase A71 sequence
gtcggcgtgggttgccccgcaccccgccccgctgccgctgttcaccgcgccgctggtggagttcgagtttcacggcgcgcttgtgttcctgacaaccccggacgtgctggcgctgatcgcgtcggcaatcatgcttgttcggttcgttgcgtgggcaattcagcccgtcacccgccgcctgaaggggaaaggggcctgccgtgaatgcaatgaccgcgattgaacatcgcccggccgaaatcaccccggccgaggcccgc

SEQ ID NO: 24504 - DNA, 260 bp, Unknown
  Description of Unknown: LeftRegion for integrase A72 sequence
agggatcctgatgattttgagttaacacttcatcctaagattcttcaaaattattactgatatcccgatggttcatactcttctgtaccatggtgttatcaataataaaaaccaaactccttctatatatagtgtggagtttggttttttattatttattctttgaactccctcccttccctaaacccttgcttgaatgtttcagcagcaaggtttatacgggagttatacatgtcctccaattgaagcaactcttttaa

SEQ ID NO: 24505 - DNA, 260 bp, Unknown
  Description of Unknown: LeftRegion for integrase A73 sequence
cagcgctgactggacctacgccaagcacgccgacggctcgtacaagatggacggcaccaagcacgtctacaagtgccagcgccactgcggcggcggccgcggcaaggtcgagaccaccgatccgtggtgatctaaccccgcataccaagaaaccccctacccggcccgcgaaggctaggtagggggctttttgtgtttcagtgggtgtggccgtgatgacctgtgtcttcgtggtttgtctggtcaaccaccgcggtctc

SEQ ID NO: 24506 - DNA, 260 bp, Unknown
  Description of Unknown: LeftRegion for integrase A74 sequence
ggcggtgcaggagctgactggacctacgccaagcacgccgacggctcgtacaagatggacggcaccaagcacgtctacaagtgccagcgccactgcggcggaggccgcggcaagaccgagaccaccgatccgtggtgatctaaccacgcataccaagaaaccccctacctagccttcgcgggccgggtagggggcttttcttgttttcagtgggtatggccgtgatgacctgtgtcttcgtggtttgtctggtcaaccac

SEQ ID NO: 24507 - DNA, 260 bp, Unknown; identical to SEQ ID NO: 24506
  Description of Unknown: LeftRegion for integrase A75 sequence

SEQ ID NO: 24508 - DNA, 260 bp, Unknown; identical to SEQ ID NO: 24506
  Description of Unknown: LeftRegion for integrase A76 sequence

SEQ ID NO: 24509 - DNA, 260 bp, Unknown
  Description of Unknown: LeftRegion for integrase A77 sequence
aagaccgttcacaaaaacggcaaggaccacaaggtctacaagtgcgtccgtcactgcggcggaggccgcggcaagaccgagaccaccgatccgtggtgatctaaccccgcataccaatatggtcccttatcggacctattgacgcaaagaaaccccctacctagccttcgcgggccgggtagggggcttttcttgtttcagtgggtatggccgtgatgacctgtgccttcgtggtttgtctggtcaaccaccgcggtctc

SEQ ID NO: 24510 - DNA, 260 bp, Unknown
  Description of Unknown: LeftRegion for integrase A78 sequence
ccggcggagccagcgctgactggacctacgccaagcacgccgacggctcgtacaagatggacggcaccaagcacgtctacaagtgtgtccgtcactgcggcggaggccgcggcaagaccgagaccaccgatccgtggtgatctaacctcgcataccaagaaaccccctacccggcccgcgaaggctaggtagggggctttttgtgtttcagtgggtatggtcgtgatgacctgtgtcttcgtggtttgtctggtcaacca

SEQ ID NO: 24511 - DNA, 260 bp, Unknown
  Description of Unknown: LeftRegion for integrase A79 sequence
ggtcccggtgaagaacccggacggctctatcaagaaggtcctcaagaacggcaagctgaagaccgtgtacggctgcgaggtccgctgcggcggaggccgcggcaagaccgagaccaccgatccgtggtgatctaaccccgcataccaagaaaccccctacccggcccgcgaaggctaggtagggggctttttgtgtttcagtgggtgtggccgtgatgacctgtgtcttcgtggtttgtctggtcaaccaccgcggtctc

SEQ ID NO: 24512 - DNA, 260 bp, Unknown
  Description of Unknown: LeftRegion for integrase A80 sequence
cctctcgctggtcctctgggagggccatgaccatctcggccacgcgctccaccgctcccccgctcatgcgcgttctcgcaggtcagcaggctttttgaccgtgagcgggagcatcttcccgccagccggtgccagttgtggccatgtgtccatctgggggcagatggaaacgcagtcacaaccggtgtactgtcctcaccgtgagtgaccgagcgagtacctacgacatcgaggcggagtggagtccggccgacctcgcc

SEQ ID NO: 24513 - DNA, 260 bp, Unknown
  Description of Unknown: LeftRegion for integrase A81 sequence
ctctcgctggtcctcgggtagggccaagaccgtctcagccaggcgctccaggatctgtccgttcacgggcgttcccgcaggtcagagccctgtcggaccgtgagtgggagcatcttcccaccgggcggtgccagttgtggccatgtgtccatctgggggcagatggagacggggtcacatccagtggtaggttcctcgccatgagtaaccgactacatgagtacgacgtcgaggcggagtggagtccagccgacctcgcc

SEQ ID NO: 24514 - DNA, 260 bp, Unknown
  Description of Unknown: LeftRegion for integrase A82 sequence
gacccagaggtccagggaccacctggcgtggcctacagagcccacccaccggtcggcagagagcagatacgcgaagaccccccggtcgatgagtgactggggggtccttcgcttgtcggcacgctcagccttgtgatacttcgcgaacacgctggtcgcagaaggtgcgcgaggtatcactagcagctaccatggtcgacatgaccagctccgtcctcgaacagctccgccaggcgaagtccggcgcacccaagctgtcc

SEQ ID NO: 24515 - DNA, 260 bp, Unknown
  Description of Unknown: LeftRegion for integrase A83 sequence
aggagctgactggacctacgccaagcacgccgacggctcgtacaagatggacggcaccaagcacgtctacaagtgccagcgccactgcggcggaggccgcggcaagaccgagaccaccgatccgtggtgatctaaccacgcataccaagaaaccccctacccggcccgcgaaggctaggtagggggcttttcttgtttcagtgggtatggccgtgatgacctgtgtcttcgtggtttgtctggtcaaccaccgcggtctc

SEQ ID NO: 24516 - DNA, 260 bp, Unknown
  Description of Unknown: LeftRegion for integrase A84 sequence
gcaccaagcacgtctacaagtgccagcgccactgcggcggaggccgcggcaagaccgagaccaccgacccgtggtgatctaaccccgcataccaagaaaccccctacccggcccgcgaaggctaggtagggggctttttcgcgttcaggggacctgatcgctcagcgacccatctccgatgggatcgcgtttgtgtttcagtgggtatggccgtgatgacctgtgtcttcgtggtttgtctggtcaaccaccgcggtctc

SEQ ID NO: 24517 - DNA, 260 bp, Unknown; identical to SEQ ID NO: 24311
  Description of Unknown: LeftRegion for integrase A85 sequence

SEQ ID NO: 24518 - DNA, 260 bp, Unknown
  Description of Unknown: LeftRegion for integrase A86 sequence
aggagctgactggacctacgccaagcacgccgacggctcgtacaagatggacggcaccaagcacgtctacaagtgccagcgccactgcggtggaggccgcggcaagaccgagaccaccgatccgtggtgatctaaccccgcataccaagaaaccccctacccggcccgcgaaggctaggtagggggctttttgtgtttcagtgggtatggccgtgatgacctgtgtcttcgtggtttgtctggtcaaccaccgcggtctc

SEQ ID NO: 24519 - DNA, 260 bp, Unknown
  Description of Unknown: LeftRegion for integrase A87 sequence
gactggaccccggtcatgaactccgacggcacctacaagaccgttcacaaagacggtcaggaccacaaggtctacaagtgctcccgtcactgcggcggaggccgcgcccacaaagaggtcaccgaaacctactgacctcgcataccaagaaaccccctacctagccttcgcgggccgggtagggggcttttcttgtttcagtgggtatggccgtgatgacctgtgtcttcgtggtttgtctggtcaaccaccgcggtctc

SEQ ID NO: 24520 - DNA, 260 bp, Unknown
  Description of Unknown: LeftRegion for integrase A88 sequence
gaaccccgtgttcaacgacgacggctcgtacaagaccgttcacaaaaacggcaaagaccacaaggtctacaagtgtgtccgtcactgcggcggaggccgcggcaagaccgagaccaccgatccgtggtgatctaaccccgcataccaagaaaccccctacccggcccgcgaaggctaggtagggggcttttcttgtttcagtgggtatggccgtgatgacctgtgtcttcgtggtttgtctggtcaaccaccgcggtctc

SEQ ID NO: 24521 - DNA, 260 bp, Unknown
  Description of Unknown: LeftRegion for integrase A89 sequence
gaaccccgtgttcaacgacgacggctcgtacaagaccgttcacaaaaacggcaaggaccacaaggtctacaagtgcgtccgtcactgcggcggaggccgcggcaagaccgagaccaccgatccgtggtgatctaaccccgcataccaagaaaccccctacccggcccgcgaaggctaggtagggggcttttcttgtttcagtgggtgtgtccgtgatgacctgtgtcttcgtggtttgtctggtcaaccaccgcggtctc

SEQ ID NO: 24522 - DNA, 260 bp, Unknown
  Description of Unknown: LeftRegion for integrase A90 sequence
actgtaaccgctacgtcggcgggttcggatcactgggccagcatcttcgtgccgttctgatcaccagagggtcgcgtcgcgccactgcggcggaggccgcggcaagaccgagaccaccgatccgtggcgatctaaccccgcataccaagaaaccccctacctagccttcgcgggccgggtagggggcttttcttgtttcagtgggtgtggccgtgatgacctgtgtcttcgtggtttgtctggtcaaccaccgcggtctc

SEQ ID NO: 24523 - DNA, 260 bp, Unknown
  Description of Unknown: LeftRegion for integrase A91 sequence
aagtgggtcccggtgaagaacccggacggctctatcaagaaggtcctcaagaacggcaagctgaagaccgtgtacggctgcgaggtccgctgcggcggaggccgcgcccacaaagaggtcaccgaaacctactgacctcgcataccaagaaaccccctacctagccttcgcgggccgggtagggggctttttgcgtttcagtgggtgtggccgtgatgacctgtgtcttcgtggtttgtctggtcaaccaccgcggtctc

SEQ ID NO: 24524 - DNA, 260 bp, Unknown
  Description of Unknown: LeftRegion for integrase A92 sequence
aagtgggtcccggtgaagaacccggacggctctatcaagaaggtcctcaagaacggcaagctgaagaccgtgtacggctgcgaggtccgctgcggcggcggtcgccacgccaaagaggtcaccgaaacctactgacctcgcatactaagaaaccccctacccggcccgcgaaggctaggtagggggctttttgcgtttcagtgggtatggccgtgatgacctgtgtcttcgtggtttgtctggtcaaccaccgcggtctc

SEQ ID NO: 24525 - DNA, 260 bp, Unknown
  Description of Unknown: LeftRegion for integrase A93 sequence
ggccttccggcctcgcctctcggctctttctccagaggcagcccgcggcgctgacgctgccggtggaagttgcacagccctttggaatggtgagggcggccgcagccctcgacttcgcaatcccccattgatcaatggtacaaaacagccccctcccgggaatccgtttggactcctgagagggggctttttgcgtttcagtgggtatggccgtgatgacctgtgtcttcgtggtttgtctggtcaaccaccgcggtctc

SEQ ID NO: 24526 - DNA, 260 bp, Unknown
  Description of Unknown: LeftRegion for integrase A94 sequence
gttctgatcaccagagggccgcgtcgcgccactgcggcggaggccgcggcaagaccgagaccaccgatccgtggtgatctaaccccgcataccaagaaaccccctgcccggcccgcgaaggctaggtagggggctttttcgcgttcagggggtctgatcgctcagcgacccatctccgatgggatcgcgtttgtgcttcagtgggtgtggccgtgatgacctgtgtcttcgtggtttgtccggtcaaccaccgcggtctc

SEQ ID NO: 24527 - DNA, 260 bp, Unknown
  Description of Unknown: LeftRegion for integrase A95 sequence
ggctgtacgaggcgggcaaccggatcgctacgatcgccacgtcggcgagcgactggcgctcgatccggaacatctgcctgatcctgcgccgcctcgggatcgacgtccgacgtcgaagctgaggctcagccttgtgatacctcacgaacacgctggtcgaggagggtgcgtgaggtatcacaagatggtaccctggtggggtgaccagctctgtgctcgaccagctccgccaggcgaagaccggaccagctccgaaggag

SEQ ID NO: 24528 - DNA, 260 bp, Unknown
  Description of Unknown: LeftRegion for integrase A96 sequence
ggcaagcagggcttccctctcctcctccgggagggccatgagcatgtcggcaaggcgctcgatcatgcgcgttccagcaggccagacggcttcttgaccgtgagcgggagcatcttcccgccaggcggagccagttgtgggcttgttcccatctgggggcagatggaaccacgcctacatccagtagtaccctgctcaccatgagtgcgcgcgactacgacatcgaagctgagtggacaccggccgacctcgccctgctg

SEQ ID NO: 24529 - DNA, 260 bp, Unknown
  Description of Unknown: LeftRegion for integrase A97 sequence
ggcgagcagggcttccctgtcctcctccgggagggccatgagcatgtcggcaaggcgctcgatcatgcgcgttccagcaggtcagacggcttcttgaccgtgagcgggagcatcttcccgccaggcggagccagttgtgggcttgttcccatctgcgggcagatggaaccacgcctacatccagtagtaccctgctcaccatgagtgcgcgcgactacgacatcgaagctgagtggacaccggccgacctcgccctgctg

SEQ ID NO: 24530 - DNA, 260 bp, Unknown
  Description of Unknown: LeftRegion for integrase A98 sequence
ggcgagcagggcttccctctcctcctcggggagcgacatgagcatgtcggcaagccgctcgatcatgcgcgttccagcaggtcagacggcttcttgaccgtgagcgggagcatcttcccgccaggcggagccagttgtgggcttgttcccatctgcgggcagatggaaccacgcctacatccagtagtaccctgctcaccatgagcgcgcgcgactacgacatcgaagctgagtggaccccggccgacctcgccctgctg

SEQ ID NO: 24531 - DNA, 260 bp, Unknown
  Description of Unknown: LeftRegion for integrase A99 sequence
ggcgagcagggcttccctgtcctcctccgggagggccatgagcatgtcggcaaggcgctcgatcatgcgcgttccagcaggtcagacggcttcttgaccgtgagcgggagcatcttcccgccaggcggagccagttgtgggcttgttcccatctgggggcagatggaaccacgcctacatccagtagtaccctgctcaccatgagtgcgcgcgactacgacatcgaagctgagtggacaccggccgacctcgccctgctg

SEQ ID NO: 24532 - DNA, 260 bp, Unknown
  Description of Unknown: LeftRegion for integrase A100 sequence
ggcgagcagggcttccctctcctcctcggggagagacatgagcatgtcggcaagccgctcgatcatgcgcgttccagcaggtcagacggcttcttgaccgtgagcgggagcatcttcccgccaggcggagccagttgtgggcttgttcccatctgcgggcagatggaaccacgcctacatccagtagtacgctgctcaccatgggtgcacgcgactacgacatcgaagctgaatggacaccggccgacctcgctctgctg

SEQ ID NO: 24533 - DNA, 260 bp, Unknown
  Description of Unknown: LeftRegion for integrase A101 sequence
cgtgttcaacgacgacggctcgtacaagaccgttcacaaaaacggcaaagaccacaaggtctacaagtgcgttcggcactgcggcggaggccgcggcaagaccgagaccaccgatccgtggtgatctaaccccgcataccaagaaaccccctacccggcccgcgaaggctaggtagggggcttttcttgtttcagtgggtatggccgtgatgacctgtgtcttcgtggtttgtctggtcaaccaccgcggtctcagtggt

SEQ ID NO: 24534 - DNA, 161 bp, Unknown
  Description of Unknown: LeftRegion for integrase A102 sequence
cctactgtgtttttaaaaataagtatggaaactcctgataaaaagtggtattctctagttagttaaatatagcaccatgtactgagaaagggaatacgccgatgataaagaatcttgagaacatacaccatgtagctatataccttaggattagtcaggag

SEQ ID NO: 24535 - DNA, 260 bp, Unknown
  Description of Unknown: LeftRegion for integrase A103 sequence
aaagaatggttgaagcctgagcaatttgaacttgaagttatcttgcggttccctacataggggaccgttctgtatatatgtcggtgggttatactgattgaactccccaagatatatacggactaaccttaaaaataacttacttcttattatattcatcacaaactgattatgtagcaatatccactacatcttctacaggtatccaccaaaaatcctcatcattctttaacttaatttgtttatacgttgagtcaaac

SEQ ID NO: 24536 - DNA, 260 bp, Unknown
  Description of Unknown: LeftRegion for integrase A104 sequence
gtgaagaacccggacggctctatcaagaaggtcctcaagaacggcaagctgaagaccgtgtacggctgcgaggtccgctgcggcggaggccgcgcccacaaagaggtcaccgaaacctactgacctcgcataccaagaaaccccctacccggcccgcgaaggctaggtagggggctttttgtgtttcagtgggtatggccgtgatgacctgtgtcttcgtggtttgtctggtcaaccaccgcggtctcagtggtgtacgg

SEQ ID NO: 24537 - DNA, 260 bp, Unknown
  Description of Unknown: LeftRegion for integrase A105 sequence
acctacgccaagcacgccgacggctcgtacaagatggacggtaccaagcacgtctacaagtgtgtccgtcactgcggcggaggccgcggcaagaccgagaccaccgatccgtggtgatctaacccccgcataccaagaaaccccctacccggcccgcgaaggctaggtagggggcttttctcgtttcagtgggtgtggccgtgatgacctgtgtcttcgtggtttgtctggtcaaccaccgcggtctcagtggtgtacgg

SEQ ID NO: 24538 - DNA, 260 bp, Unknown
  Description of Unknown: LeftRegion for integrase A106 sequence
ccagattattgatgaggatatttttgcaaaggcacaggaaatcagagaacataatgtgagaagtcaaaatcgcataggaatttatagacctcacccaaaagcagaaatcggagcttttaagattagaaagacagaagaaaaatataaggatccatataagcaggcagagtatgcatatagtcaaatattggaggtagcaaatgaatgagaacgtaacattgatacctgccagaatacgagctggtaatcgaataacaagg

SEQ ID NO: 24539 - DNA, 260 bp, Unknown
  Description of Unknown: LeftRegion for integrase A107 sequence
gaaggaatagtgaataagattgaggaagaaagagcccgtcgtgaaaaagcattaggaagagatagaaagaaacaaggaaaaactgttaggggagtagtatatacaaaatttcttattccccaaatagatgtgaaatatgaaaatcctatgaggcaagcagaatatgcatatagtttaatcggaaatgaggtgagcacttaatgaatcttgctaaaaatattaccatgattcctacaagaagaatggtgggtacgcaaaag

SEQ ID NO: 24540 - DNA, 260 bp, Unknown
  Description of Unknown: LeftRegion for integrase A108 sequence
ctgttcacaccaggggagatccccgaaggcgagccgctaccggagccctcgccacgttagagagaaggagatagagaatgaacaccccgacgcctgctgccggttggtacccggaccccagtggagcgcccggacagcgctacttcgacgggaccgagtggacctcccactctcagccgccagcgcacacacctcagccggtggcagtgctgccgaagaagaccaaccacgcgctgcatctgctgctgtccctcctgacc

SEQ ID NO: 24541 - DNA, 260 bp, Unknown
  Description of Unknown: LeftRegion for integrase A109 sequence
tacgagcagcatctcaggctcggcagcgtggtcgaacggctacacaccgggatgtcgtagagcgactacccccgagaacgcagaaaagccccctacgcgccgtgtaagggcacgcagagggctctctggtagtctctattcagttgtggggttgcgtccgtcagcgtggacgctagaggggtttacgggacctttccagcctgccgcgtccgggtatacgcggcgtctgccgtccgggtatacgatagtaaccggcttcc

SEQ ID NO: 24542 - DNA, 260 bp, Unknown; identical to SEQ ID NO: 24540
  Description of Unknown: LeftRegion for integrase A110 sequence

SEQ ID NO: 24543 - DNA, 260 bp, Unknown; identical to SEQ ID NO: 24540
  Description of Unknown: LeftRegion for integrase A111 sequence

SEQ ID NO: 24544 - DNA, 260 bp, Unknown
  Description of Unknown: LeftRegion for integrase A112 sequence
aagaacccggacggctctatcaagaaggtcctcaagaacggcaagctgaagaccgtgtacggctgcgaggtccgctgcggcggaggccgcgcccacaaagaggtcaccgaaacctactgacctcgcataccaagaaaccccctacccggcccgcgaaggctaggtagggggctttttgtgtttcagtgggcgtggccgtgatgacctgtgtcttcgtggtttgtctggtcaaccaccgcggtctcagtggtgtacggtac

SEQ ID NO: 24545 - DNA, 260 bp, Unknown
  Description of Unknown: LeftRegion for integrase A113 sequence
gaacccggacggctctatcaagaaggtcctcaagaacggcaagctgaagaccgtgtacggctgcgaggtccgctgcggcggaggccgcggcaagaccgagaccaccgatccgtggtgatctaacctcgcgcaccaagaaaccccctacccggcccgcgaaggctaggtagggggctttttgtgtttcagtgggtatggccgtgatgacctgtgtcttcgtggtttgtctggtcaaccaccgcggtctcagtggtgtacgg

SEQ ID NO: 24546 - DNA, 260 bp, Unknown
  Description of Unknown: LeftRegion for integrase A114 sequence
gtcggcgggttcggatcactgggccagcatcttcgtgccgttctgatcaccagagggtcgcgtcgcgccactgcggcggaggccgcggcaagaccgagacctccgatccgtggtgatctaaccccgcataccaagaaacccctacccggcccgcgaaggctaggtagggggcttttcttgtttcagtgggtgtggccgtgatgacctgtgtcttcgtggtttgtctggtcaaccaccgcggtctcagtggtgtacggtac

SEQ ID NO: 24547 - DNA, 260 bp, Unknown; identical to SEQ ID NO: 24546
  Description of Unknown: LeftRegion for integrase A115 sequence

SEQ ID NO: 24548 - DNA, 260 bp, Unknown
  Description of Unknown: LeftRegion for integrase A116 sequence
gacctacgccaagcacgccgacggctcgtacaagatggacggcaccaagcacgtctacaagtgtgtccgtcactgcggcggaggccgcggcaagaccgagaccaccgatccgtggtgatctaaccccgcataccaagaaaccccctacctagccttcgcgggccgggtagggggctttttgtgtttcagtgggtatggccgtgatgacctgtgtcttcgtggtttgtctggtcaaccaccgcggtctcagtggtgtacgg

SEQ ID NO: 24549 - DNA, 260 bp, Unknown
  Description of Unknown: LeftRegion for integrase A117 sequence
acctacgccaagcacgccgacggctcgtacaagatggacggcaccaagcacgtctacaagtgccagcgccactgcggcggaggccgcggcaagaccgagaccaccgatccgtggtgatctaaaccccgcataccaagaaaccccctacccggcccgcgaaggctaggtagggggctttttgtgtttcagtgggtatggccgtgatgacctgtgtcttcgtggtttgtctggtcaaccaccgcggtctcagtggtgtacgg

SEQ ID NO: 24550 - DNA, 260 bp, Unknown
  Description of Unknown: LeftRegion for integrase A118 sequence
acatcctcttgtcctagtaagactctatctgaaaaacggatattagctacatttgaagataaaattggatttaaaccagataaaaattgggttaccgaaaatatcaagaaggttatttatgactcatcagtaggtttaattaccgtctttcctataaaaggtagaaaatatgaactgaaggttagaaaggagcacttcttatgaaaaacgtcataactattgaagcaaatgcgcctaggaactcagagttagctagcatt

SEQ ID NO: 24551 - DNA, 260 bp, Unknown
  Description of Unknown: LeftRegion for integrase A119 sequence
gcccgcgccgccgaggagcggcgcaagtacgggatcccggatgacgaggtggctctgtgagcgacgttgatcgcccgctacgggtgacggtggggtatctggtaggccgtcaggtgactctgggccagatgttgaccgcgctggggatgtcccgcagcacctactacgcgcagatggaagctgggacgctgcacagcgccgatcacctcgtaaagacggcgcggcacttccacctcaaccccgtcgacctgctcgtaagg

SEQ ID NO: 24552 - DNA, 260 bp, Unknown
  Description of Unknown: LeftRegion for integrase A120 sequence
aagaacccggacggctctatcaagaaggtcctcaagaacggcaagctgaagaccgtgtacggctgcgaggcccgctgcggcggaggccgcgcccacaaagaggtcaccgaaacctactgacctcgcataccaagaaaccccctacctagccttcgcgggccgggtagggggctttttgtgtttcagtgggtatggccgtgatgacctgtgtcttcgtggtttgtctggtcaaccaccgcggtctcagtggtgtacggtac

SEQ ID NO: 24553 - DNA, 260 bp, Unknown
  Description of Unknown: LeftRegion for integrase A121 sequence
gattttgaatatgaaatagcccaaaaactaacacaatctttgttggagcaaggacttatttccacagaagaatacaacaaaatcaaggtgttgaacatagaaaaattttcacctttttataaggatttgatggatatatgacttgataattacagcaagtagagtgatatatagtactgataaaataaggaggtgagacaatggcaaggataacaaaaatcgaaactacaaaaagcttcgtgaaagaaagaaaaatacgt

SEQ ID NO: 24554 - DNA, 260 bp, Unknown
  Description of Unknown: LeftRegion for integrase A122 sequence
acatcctcttgtcctagtaagactctatctgaaaaacggatattagctacatttgaagataaaattggatttaaaccagataaaaattgggttaccgaaaatatcaagaaggttatttatgactcatcagtaggtttaattaccgtctttcctataaaaggtagaaaatatgaactgaaggttagaaaggagcacttcttatgaaaaacgtcataactattggagcaaatgcgcctaggaactcagagttagctagcatt

SEQ ID NO: 24555 - DNA, 260 bp, Unknown
  Description of Unknown: LeftRegion for integrase A123 sequence
acacggcaacaatacggtatatcaacttgcccaagtaaaaccttatcagagcgtcgtttggtacggacagttaaggaacaactaggagattatctcggtagcattcaaaaggttatgtttgattctagttcaaatcaagtcacactctattttgacgacgacaacattcaaatactaacacttaagcgaggacaattgaaatgaagaaagtcattaccattgaacctgctagacctgttcaccaagtagaagaaacctca

SEQ ID NO: 24556 - DNA, 260 bp, Unknown; identical to SEQ ID NO: 24328
  Description of Unknown: LeftRegion for integrase A124 sequence

SEQ ID NO: 24557 - DNA, 260 bp, Unknown
  Description of Unknown: LeftRegion for integrase A125 sequence
tgcaggacaagagatgccaagggtgtcgaggcttgtctaggacgtaccgttacagaagaacagctctttcaagcctttggtgagagcataaatacagaagacattcaccatatttcttttaatagcgtgaccaatgaagctaaagcgacctatagaaatggagaagaaaaacacgtcatcattcagaaaggacggtagacatgaaaaaagttatcacgatagaaccagccaaacaggtcacccataaggttgacctgccc

SEQ ID NO: 24558 - DNA, 260 bp, Unknown; identical to SEQ ID NO: 24557
  Description of Unknown: LeftRegion for integrase A126 sequence

SEQ ID NO: 24559 - DNA, 260 bp, Unknown; identical to SEQ ID NO: 24557
  Description of Unknown: LeftRegion for integrase A127 sequence

SEQ ID NO: 24560 - DNA, 260 bp, Unknown
  Description of Unknown: LeftRegion for integrase A128 sequence
tggggtgatccaagtgggcaaaaaaaagaaggcttttacaattaggtatatcccctgcgatgaggcagaaggcaaacttaatgagatagtaaaggatttaattaaagaaaagataaacaccgccttgtcccagtatgattctatagaatataatgatattgaaaaatcaattagccattatataacaggggtatatagttatgaaaaacaaaatagcaatttatgttcgggtatcgactacaaaagaatctcaaaaggat

SEQ ID NO: 24561 - DNA, 260 bp, Unknown
  Description of Unknown: LeftRegion for integrase A129 sequence
tggggtgatccaagtgggcaaaaaaaagaaggcttttacaattaggtatatcccctgcgatgaggcagaaggcaaacttaatgagatagtaaaggatttgattaaagaaaagataaacagcgccttgtcccagtatgattctatagaatataatgatattgaaaaatcaattagccattatataacaggggtatgtagttatgaaaaacaaaatagcaatttatgttcgggtatcgactacaaaagaatctcaaaaggat

SEQ ID NO: 24562 - DNA, 260 bp, Unknown
  Description of Unknown: LeftRegion for integrase A130 sequence
aaggtctacaagtgcgtccgtcactgcggcggaggccgcggcaagaccgagaccaccgatccgtggtgatctaaccccgcataccaatatggtcccttatcggacctattgacgcaaagaaaccccctacctagccttcgcgggccgggtagggggcttttcttgtttcagtgggtatggccgtgatgacctgtgccttcgtggtttgtctggtcaaccaccgcggtctcagtggtgtacggtacaaacccatgagagcc

SEQ ID NO: 24563 - DNA, 260 bp, Unknown
  Description of Unknown: LeftRegion for integrase A131 sequence
ggtgtcatcgttgcgaactggatcgagccacacgacatcgagaagcgcctggcctcttgaccgttcgtgtgccaggctcctcggtgccatgcaccactcagggataggagacctgatgtacgcgaatgtcccaccgcccgtgccgttccagcctcagcggaaggcggcaccgaacccgctgttcctcgtcctcgcgatcctgtcgtccctgccgactgcattcttcgtgctctgcttcatcttgtccccctcgatgctgt

SEQ ID NO: 24564 - DNA, 260 bp, Unknown
  Description of Unknown: LeftRegion for integrase A132 sequence
ggaatatgactttcacatagccgagagtattatcgcaaacctatataaagaaggtaaaattacagtggatgaattacacaaaatatcagccttgaacaggcagaaattctctccccgtttagccgagattatgtcctaaaaagcttgctattaatagcttttagagtgatgtatgtaatgggcgaaagcgaggtgagatgatgaaaaagataacaaaaatagatgaactgccccagggacagctacctaatacgaaactt

SEQ ID NO: 24565 - DNA, 260 bp, Unknown
  Description of Unknown: LeftRegion for integrase A133 sequence
tgataaagagatatttgataaagctgaagaagttagagataagcgtgcaaaggatttaggacgagtggtagagcttgccgctttcacctctccccctcccaaagaacgatttaaaatgagaaaggcagataataagatgccagttgatccttttgaacgagcagaatacttatatagtctgatagaaagcgaggaataaagtgacagagaaaaatataatggttattcctgctcgtaaaagagtaggaagtacagccgca

SEQ ID NO: 24566 - DNA, 260 bp, Unknown
  Description of Unknown: LeftRegion for integrase A134 sequence
gccgcatggtcgctcgccgaggcgtgggcgcccggcgcgctcatcctctccgggagccactcgcgcgacctcgccgagtaccgagccgctcgcggcctctagctcgccctcgcaaggccctcgcttaggcgggggccttttcgcgtattctcgatgcgcactaggtacataccgcgcccgcattctgtacctagtgcgcattgggttgtcgctcgtgtaggctcttgcgcatgtcgactcccgcaagccctccgcgcgcc

SEQ ID NO: 24567 - DNA, 260 bp, Unknown
  Description of Unknown: LeftRegion for integrase A135 sequence
gcatcatcatgttcatgtaggacgttaggagaaaagcgacttttggcatcgtttaaaagcaagttaggcattgtaccagataaagagtgggttgaaaataatattaagcacatcgattatgattttggtcaacgtatcatctgggttataccagtaaaaggaaggaaatatcctatagaaattagagaggggcgatattagtgaagaaagtaattactattcaggctacaccaagtattattaggtcaagttcagatgat

SEQ ID NO: 24568 - DNA, 260 bp, Unknown; identical to SEQ ID NO: 24567
  Description of Unknown: LeftRegion for integrase A136 sequence

SEQ ID NO: 24569 - DNA, 260 bp, Unknown
  Description of Unknown: LeftRegion for integrase A137 sequence
tgacaaagagatatttgataaagctgaagaagttagagataagcgtgcaaaggatttaggacgagtggtagagcttgccgctttcacctctccccctcccaaagaacgatttaaaatgagaaaggcagataataagatgccagttgatccttttgaacgagcagaatacttatatagtctgatagaaagcgaggaataaagtgacagagaaaaatataatggttattcctgctcgtaaaagagtaggaagtacagccgca

SEQ ID NO: 24570 - DNA, 260 bp, Unknown
  Description of Unknown: LeftRegion for integrase A138 sequence
ggaatatgattttcacatagcagagagtattgtcgcaaacctatataaagaaggcaaaatcacagcggatgaattaaacaaaatatcagccttgaacaggcagaaattctctccccgtttagccgagattatgtcctgaaaagcttgctattaatagcttttagagtgatgtatgtaatgggcgaaagcgaggtgagatgatgaaaaagataacaaaaatagatgaactgcccaagggacaactacctaatacgaaactt

SEQ ID NO: 24571 - DNA, 260 bp, Unknown
  Description of Unknown: LeftRegion for integrase A139 sequence
ggcgtcatcgtcgcgaactggatcgagccacacgacatcgagaagcgcctggcctcttgaccgttcgtgtgccaggctcctcggtgccatgcaccactcagggataggagtcctgatgtacgcgaatgtcccaccgcccgtgccgttccagcctcagcggaaggcggcaccgaacccgctgttcctcgtcctcgcgatcctgtcgtccgtgccgactgcattcttcgtactctgcttcatcttgtccccctcgatgctgt

SEQ ID NO: 24572 - DNA, 260 bp, Unknown
  Description of Unknown: LeftRegion for integrase A140 sequence
ggcgtcatcgtcgcgaactggatcgagccacacgacatcgagaagcgcctggcctcttgaccgttcgtgtgccaggctcctcggtgccatgcaccactcagggataggagacctgatgtacgcgaatgtcccaccgcccgtgccgttccagcctcagcggaaggcggcaccgaacccgctgttcctcgtcctcgcgatcctgtcgtccgtgccgactgcattcttcgtactctgcttcatcttgtccccctcgatgctgt

SEQ ID NO: 24573 - DNA, 260 bp, Unknown
  Description of Unknown: LeftRegion for integrase A141 sequence
ggtgtcatcgtggcgcactggatcgagccacacgacatcgagaagcgcctggcttcttgactggacatgtgccaggctcctatctcccagcaagttcacagggataggagacctgatgcacaacttcaccatcgccctcgtcgccgttgcggctgcagccaccatcgccgggtgctcggcaccgacccccaaggtcgacagcagtccgaagagctctgcgccgagcagcgagcctgccgcgacggagctcgcgaccacgg

SEQ ID NO: 24574 - DNA, 260 bp, Unknown
  Description of Unknown: LeftRegion for integrase A142 sequence
ggggaaacggactgacccggacacgccggacatgctagaactgtatttcacgcgcactcggaaacccgaaggcgctcaactgacacttcaggagagaccttcccgtgacagcaaacgcccaggtcagcggcacgtcaccgactcccttcatggcgggcatgacgacccccttgcgtggcctatccgtactccgtctgtctgtgctcacggacgagacgacaagccctgagcggcagcgtggcgccaaccatgacgccggc

SEQ ID NO: 24575 - DNA, 260 bp, Unknown
  Description of Unknown: LeftRegion for integrase A143 sequence
ggggaaacgggcttacccggacacccgggacatgctagaactgtatttcgcgcgcctccggaaacccgaaggcgctcaactgacacttcaggagagaccttcccgtgacggcaaacgcccaggtcagcgccgggtcaccgactcccttcatggcgggcatgacgaccccccttcgtggcctatccgtactccgtctgtctgtgctcaccgacgagacgacaagccctgagcggcagcgtgccgccaaccatgacgccggc

SEQ ID NO: 24576 - DNA, 260 bp, Unknown
  Description of Unknown: LeftRegion for integrase A144 sequence
agaagcctatactggaacacttgtcttacaaaaaacgtatcatgtagggcacaaaggacgttcagttgaaaataaaggagagcgaacaaagtacattgtagaaaatgcccatgaggcgattatctcaagagaaatgtttgaagaggtgcaacaagagaaagcaagaagaagtttacacaacaagaaaaaggaggggcgtcatgactaaaaagattattacgatagaacctgcaaaaatcttacgatcatcagaactaccc

SEQ ID NO: 24577 - DNA, 260 bp, Unknown
  Description of Unknown: LeftRegion for integrase A145 sequence
ccccggaacatcgaggtcgtcgtgccccaggaccgcgtggcggttgacctggctatttgacatcgcctatgccagggtgtgtgtcatgtcaaatccggtgccatacccctaccccgtaccgtcgaagcggaagcccgcgcccaacccgctgttcctcaccctctcgatcctgtcggggttcccgaccgcgttcttcctactgctcttcgtgtccggtggcacctcggtcttcgtcatgatcgggttcctctggtccgcga

SEQ ID NO: 24578 - DNA, 85 bp, Unknown
  Description of Unknown: LeftRegion for integrase A146 sequence
gaactgtccaaaaagttcgcacaaggtcacgtcacctccaccaacataaaagccacctgaaaacttacgtttttcaggtggcttt

SEQ ID NO: 24579 - DNA, 260 bp, Unknown
  Description of Unknown: LeftRegion for integrase A147 sequence
ccatccgcgcgaggaccggtcttcgcacgggggcacaccagtaccgccttctggcacaccaggccctcgccgcctaccagcggggactgtccccgcgctgaccccaacgccaaaggcccccagctcatcatcgagccgggggccttttcgcgtacccgccaccgtgactagcaggataggtcttgtcagatgtactccatatgacctatcctttcaatatggatcaagacctcgccaagcctacccgccgcccacgcgcc

SEQ ID NO: 24580 - DNA, 260 bp, Unknown
  Description of Unknown: LeftRegion for integrase A148 sequence
aacaaaaaccgcgtatatgacccaaatgaggtggttttacgggtccatttggttgaatgaaaaacacgtttaaacggctctgttgagccattttttatacttgttcgcgcattaaaccaatcatgtcattggtgtcaatgcaacaacattgttttatagggaaagtgagcggtgggccgaatgacggttcatcgctctttctttttatcatcgtatacccccgaccgtaaataaaaagaccacccacaggtggcctttca

SEQ ID NO: 24581 - DNA, 260 bp, Unknown
  Description of Unknown: LeftRegion for integrase A149 sequence
gctcgtacaagatggatggcaccaagcacgtctacaagtgccagcgccactgcggcggaggccgcggcaagaccgagaccaccgatccgtggtgatctaacctcgcataccaagaaaccccctacccggcccgcgaaggctaggtagggggcttttcttgtttcagtgggtatggccgtgaagacctgtgtcttcgtggtttgtctggtcaaccactgcggtctcagtggtgtacggtacaaaccatgagggctctcgtc

SEQ ID NO: 24582 - DNA, 260 bp, Unknown
  Description of Unknown: LeftRegion for integrase A150 sequence
ggcggcgaagagttcctggcctcgacggtactggcgaaagccggtatagcgtcacagtgacgaatcgaccttataccacagcaaccccttgaaacgcaaaaaagccccccaaccagggatttctccttggaaggggggtttctttgtctagtaggcgtagaaccacgcctgtccgcgagcgcctgcgctgcccgctgtggtcgagatggtcgtcccgcaaccggcaccgccgggggcgtttcctgctcccgtgagtgcgg

SEQ ID NO: 24583 - DNA, 260 bp, Unknown
  Description of Unknown: LeftRegion for integrase A151 sequence
ccgttcacaaaaacggcaaagaccacaaggtctacaagtgcgttcggcactgcggcggaggccgcggcaagaccgagaccaccgacccgtggtgatctaaccccgcataccaagaaaccccctacccggcccgcgaaggctaggtagggggcttttcttgtttcagtgggtatggccgtgatgacctgtgtcttcgtggtttgtctggtcaaccaccgcggtctcagtggtgtacggtacaaaccatgcgagctctcgtc

SEQ ID NO: 24584 - DNA, 60 bp, Unknown
  Description of Unknown: LeftRegion for integrase A152 sequence
gaaagttcgtctgggatgcgtctggtccgagtggcgagaatcgaactcacggcctcttga

SEQ ID NO: 24585 - DNA, 260 bp, Unknown
  Description of Unknown: LeftRegion for integrase A153 sequence
ggcggaggccgcggcaagaccgagaccaccgatccgtggtgatctaaccccgcataccaaaaaaccccctacccggcccgcgaaggctaggtagggggctttttcgcgttcaggggacctgatcgctcagcgacccatctccgatgggatcgcgtttgtgtttcagtgggtatggccgtgaagacctgtgtcttcgtggtttgtctggtcaaccactgcggtctcagtggtgtacggtacaaaccatgagggctctcgtc

SEQ ID NO: 24586 - DNA, 260 bp, Unknown
  Description of Unknown: LeftRegion for integrase A154 sequence
tataactatatttttgcagaagaactaacaagaaaactcttagataagggatttattacagaggaagaatacgagaaaatcatgagaaaaaaccgtcataaatttaagccttttttatcgaagatattgccataaatcacttgatatatacagcgtttagagtgatatatgtaataccgaaaaaagaagggggtgagacaatgaaacggataacaaaaattgagccggcgaaaaaaacatcaaagaaaaaattgagagtt

SEQ ID NO: 24587 - DNA, 260 bp, Unknown
  Description of Unknown: LeftRegion for integrase A155 sequence
tcaagacacctatacgggacgattaatattacaaaaaacatatcgtgtagcacataaaggaagatctgttatgaatcaaggtgagcatacaaagtatatcgttgaacaagcccatgagccgattatctcaaaagaacaatttgaagaagtccagcaagtaaaagccacaagaagtaatcattatcagaaaggagcaaagcatggcgaaaaagattgtcaccatagaagcagttaagcctgtttgtcatcaagtagatttt

SEQ ID NO: 24588 - DNA, 260 bp, Unknown
  Description of Unknown: LeftRegion for integrase A156 sequence
gaaataatagttgatcgaacagacgaaaatgaagcaaaaataaaagtaaattttctctaaggggataggactttaaagagacttttggaaaaggaacttaattataataatactttatttagtctatctctaggtggaactgtacttaattaagtcgaaatataatcaagtaccaaaagttgtcctatccccgttataacaaagaatacaagtatttttctaaattgattgaaattagatttttaaataatttgagtatg

SEQ ID NO: 24589 - DNA, 60 bp, Unknown
  Description of Unknown: LeftRegion for integrase A157 sequence
tcaaaagttgatgttaccgctgataatatagatatcatatttaaattccaactcgcttaa

SEQ ID NO: 24590 - DNA, 89 bp, Unknown
  Description of Unknown: LeftRegion for integrase A158 sequence
tcaaaagttgatgttaccgctgataatatagatatcatatttaaattccaactcgcttaattgcgagtttttatttcgtttatctcaat

SEQ ID NO: 24591 - DNA, 260 bp, Unknown
  Description of Unknown: LeftRegion for integrase A159 sequence
ccccggaacatcgaagtcgttgtgccacaggaccgcgtagcggtcgacctggctatctgataggcggtatgccagggtgtgtgccatgtcaaatcaggtgccatacccctaccccgtacctccgaagcgcaaggccgcgccgaacccgctgttcctcgtcctcgcgatcctgtcggcgctgccgaccgcgttcttcggactcgcgttcctcatgtccccgacgatgctctgggtgatggcgaccggctggtgcggtatgt

SEQ ID NO: 24592 - DNA, 260 bp, Unknown
  Description of Unknown: LeftRegion for integrase A160 sequence
tgcaggacaagagatggcaagggtgttgaggcttgtctaggacgtaccgttacagaagaacaactctttcaagcctttggtgagagcataaatatagaagacattcaccatatttcttttaatagcgtgaccaatgaagctaaggtgacctatagaaatggaaaagaaaaacacgtcatcattcagaaaggacggtagacatgaaaaaagttatcacgatagaaccagctaaacaagtcacccatatggttgacctgccc

SEQ ID NO: 24593 - skipped

SEQ ID NO: 24594 - DNA, 260 bp, Unknown
  Description of Unknown: LeftRegion for integrase A162 sequence
aaaccccctagttctaatcattaccccatgaataaaataacagaagtaaaaattgtatttcaaatcgccaatttttaaaattgcggcctaaactcggcccaatttttaaatttttcctaaggaaaaatcgaatttgtttaaaggaaatatcttcgatatacttattattaaatgtgtaccatttgcaaaggggtgtggttatggaattaacgccaattgaattcaaaaaagacacggaaaaaatcatcccatacagtgag

SEQ ID NO: 24595 - DNA, 260 bp, Unknown
  Description of Unknown: LeftRegion for integrase A163 sequence
tcgttaagtttttttattgaaagtggtttgcctacttatagagacagatatgagatgcaagctgacaaatttgctgctgaattgcttatcccagatggctattcaaaatgtgaaattgctaatatgacaatagaacaattaagttgttattttggcgtaaatgaacgtcttattaaatataagtttgggtggtggtaataatgaatcgtgtatgtatttatcttaggaagtcccgagcagacgaagaaatagaaaaagag

SEQ ID NO: 24596 - DNA, 260 bp, Unknown
  Description of Unknown: LeftRegion for integrase A164 sequence
agggtgcccgaggagctgactcgccgcctcggactacccgaccccgttccgtcacagtgacgctttgaacgcaaaaaagccccctcccaaggacactgaggtccctgagagggggtttctttgtcagccgacccgcaccatggagaaccaggtgttggccgcgttcgcgtcaccgaggatgttgacgttgccaccggtcttcagtccgggctggaccgtcgcgcctgccgcgaggtagtactgcacaccgtcgccgccgt

SEQ ID NO: 24597 - DNA, 260 bp, Unknown
  Description of Unknown: LeftRegion for integrase A165 sequence
ccccggaacatcgaggtcgtcgtgccccaggaccgcgtggcggttgacctggctatttgacatcgcctatgccagggtgtgtgtcatgtcaaatccggtgccatacccctaccccgtaccgtcgaagcggaagcccgcgcccaacccgctgttcctcaccctctcgatcctgtcggggttcccgaccgcgttcttcctgctgctcttcgtgaccggtggcacctcgatcctcgtcatgatcgggttcctctggtcagcca

SEQ ID NO: 24598 - DNA, 260 bp, Unknown
  Description of Unknown: LeftRegion for integrase A166 sequence
ccccggaacatcgaggtcgtcgtgccccaggaccgcgtggcggttgacctggctatttgacatcgcctatgccagggtgtgtgtcatgtcaaatccggtgccatacccctaccccgtaccgtcgaagcggaagcccgcgcccaacccgctgttcctcaccctctcgattctgtcggggttcccgaccgcgttcttcctactgctcttcgtgaccggtggcacctcggtcttcgtcatgatcgggttcctctggtcagcca

SEQ ID NO: 24599 - DNA, 260 bp, Unknown
  Description of Unknown: LeftRegion for integrase A167 sequence
ccccggaacatcgaggtcgtcgtgccccaggaccgcgtggcggttgacctggctatttgacatcgcctatgccagggtgtgtgacatgtcaaatccggtgccatacccctaccccgtaccgtcgaagcggaagcccgcgccgaaccctctgttcctcgtcctcgcgatcctgtcggccgtgccgactgcgttcttcgtgctcgcgttcctcttgtcaccgacgatgctttgggtgctggcagccgggtggtgcggaatgt

SEQ ID NO: 24600 - DNA, 260 bp, Unknown
  Description of Unknown: LeftRegion for integrase A168 sequence
gccctccacttcgacatccgggtcccgcacgaactgacacagagactcatcgccccatgagaaacacagaaggaaggagaaccatgttcaaactcgctatctctctcgcggctgcagcagccctgctggccgggtgcggccagagcgcgcccaccgcagcgccagccgccgcccaggagaaggacgcgaagcggggggccgtcgtcttcgagatcggaggggactactcctacgccacctacgacgacaacttcgagaac

SEQ ID NO: 24601 - DNA, 260 bp, Unknown; identical to SEQ ID NO: 24599
  Description of Unknown: LeftRegion for integrase A169 sequence

SEQ ID NO: 24602 - DNA, 260 bp, Unknown
  Description of Unknown: LeftRegion for integrase A170 sequence
aaccccgaataccaagaaaccccctacccggcccgcgaaggctaggtagggggctttttcgcgttcaggggacctgatcgctcagcgacccatctccgatgggatcgcgtttgttttcagtgggcgtggccgtgatgacctgtgtcttcgtggtttgtccggtcaaccaccgcggtctcagtggtgtacggtacaaacccatgagagctctcgtcgtgatccgcttgtcccgcgtcaccgatgctacgacctcaccggag

SEQ ID NO: 24603 - DNA, 260 bp, Unknown
  Description of Unknown: LeftRegion for integrase A171 sequence
ccactgcggcggcggccgcggcaagaccgagaccaccgacccgtggtgatctaaccccgcataccaagaaaccccctacccggcccgcgaaggctaggtagggggctttttgtgtttcagtgggtgtgaccgtgatgacctgtgtcttcgtggtttgtctggtcaaccaccgcggtctcagtggtgtacggtacaaacccatgagagccctggtagtgatccgactgtcccgcgtcaccgatgctacgacctcgccggag

SEQ ID NO: 24604 - DNA, 260 bp, Unknown
  Description of Unknown: LeftRegion for integrase A172 sequence
gaggcccgctgcggcggaggccgcgcccacaaagaggtcaccgaaacctactgacctcgcataccaagaaaccccctacctagccttcgcgggccgggtagggggcttttcttgtttcagtgggtatggccgtgatgacctgtgtcttcgtggtttgtctggtcaaccaccgcggtctcagtggtgtacggtacaaacccatgagagccctggtagtgatccgcctgtcccgcgtcaccgatgctacgacctcaccggag

SEQ ID NO: 24605 - DNA, 260 bp, Unknown
  Description of Unknown: LeftRegion for integrase A173 sequence
gaggtccgctgcggcggaggccgcgcccacaaagaggtcaccgaaacctactgacctcgcataccaagaaaccccctacctagccttcgcgggccgggtagggggcttttcttgtttcagtgggtatggccgtgatgacctgtgtcttcgtggtttgtctggtcaaccaccgcggtctcagtggtgtacggtacaaacccatgagagtcctggtagtgatccgactgtcccgcgttaccgatgctacgacttcaccggag

SEQ ID NO: 24606 - DNA, 260 bp, Unknown
  Description of Unknown: LeftRegion for integrase A174 sequence
gaggtccgctgcggcggaggccgcgcccacaaagaggtcaccgaaacctactgacctcgcataccaagaaaccccctacctagccttcgcgggccgggtagggggctttttgcgtttcagtgggtgtggccgtgatgacctgtgtcttcgtggtttgtctggtcaaccaccgcggtctcagtggtgtacggtacaaacccatgagagccctggtagtgatccgactgtcccgtgtcaccgatgctacgacttcacccgag

SEQ ID NO: 24607 - DNA, 260 bp, Unknown
  Description of Unknown: LeftRegion for integrase A175 sequence
ccactgcggcggaggccgcggcaagaccgagaccaccgatccgtggtgatctaaccccgcataccaagaaaccccctacccggcccgcgaaggctaggtagggggctttttgtgtttcagtgggtatggccgtgatgacctgtgtcttcgtggtttgtctggtcaaccaccgcggtctcagtggtgtacggtacaaacccatgagagccctggtagtcatccgcctgtcccgcgtcaccgatgctacgacttcgccggag

SEQ ID NO: 24608 - DNA, 260 bp, Unknown
  Description of Unknown: LeftRegion for integrase A176 sequence
ccccggaacatcgaggtcgtcgtgccccaggaccgcgtggcggttgacctggctatttgacatcgcctatgccagggtgtgtgtcatgtcaaatccggtgccatacccctaccccgtaccgtcgaagcggaagcccgcgcccaacccgctgttcctcaccctctcgatcctgtcgggattcccgaccgcgttcttcctactgctcttcgtgaccggtggcacctcgatcttcgtcatgatcgggttcctctggtcagcca

SEQ ID NO: 24609 - DNA, 260 bp, Unknown
  Description of Unknown: LeftRegion for integrase A177 sequence
ccactgcggcggcggccgcggcaagaccgagaccaccgatccctggtgatctaacctcgcgcaccaagaaaccccctacccggcccgcgaaggctaggtagggggctttttgtgtttcagtgggtatggccgtgatgacctgtgtcttcgtggtttgtctggtcaaccaccgcggtctcagtggtgtacggtacaaacccatgagagccctggtagtcatccgactgtcccgcgtcaccgatgctacgacctcaccggag

SEQ ID NO: 24610 - DNA, 260 bp, Unknown
  Description of Unknown: LeftRegion for integrase A178 sequence
accccgcataccaagaaaccccctacccggcccgcgaaggctaggtagggggctttctcgcgttcaggggacctgatcgctcagcgacccatctccgatgggatcgcgtttgtgtttcagtgggcgtggccgtgatgacctgtgtcttcgtggtttgtctggtcaaccaccgcggtctcagtggtgtacggtacaaacccatgagggctctcgtcgtgatccgcctgtcccgtgtcaccgatactacgacttcacccgag

SEQ ID NO: 24611 - DNA, 260 bp, Unknown; identical to SEQ ID NO: 24577
  Description of Unknown: LeftRegion for integrase A179 sequence

SEQ ID NO: 24612 - DNA, 260 bp, Unknown
  Description of Unknown: LeftRegion for integrase A180 sequence
cactgcggcggaggccgcggcaagaccgagaccaccgatccgtggtgatctaacccccgcataccaagaaaccccctacctagccttcgcgggccgggtagggggctttttgcgtttcagtgggtatggccgtgatgacctgtgtcttcgtggtttgtctggtcaaccaccgcggtctcagtggtgtacggtacaaacccatgagagccctggtagtcatccgcctgtcccgcgtcaccgatgctacgacctccccggag

SEQ ID NO: 24613 - DNA, 260 bp, Unknown
  Description of Unknown: LeftRegion for integrase A181 sequence
ccccggaacatcgaggtcgtcgtgccccaggaccgcgtggcggttgacctggctatttgacatcgcctatgccagggtgtgtgtcatgtcaaatccggtgccatacccctaccccgtaccgtcgaagcggaagccagcgcccaacccgctgttcctcaccctctcgatcctgtcggggttcccgaccgcgttcttcctactgctcttcgtgaccggtggcacctcgatcttcgtcatgatcgggttcctctggtcagcca

SEQ ID NO: 24614 - DNA, 260 bp, Unknown
  Description of Unknown: LeftRegion for integrase A182 sequence
acctcgcataccaagaaaccccctacccggcccgcgaaggctaggtagggggcttttcttgtttcagggggtatggccgtgaagacctgtgtcttcgtggtttgtctggtcaaccaccgcggtctcagtggtgtacggtacaaaccaggcccggggcgaagctccggccgtaagcgtcaatcgtccgaaggagatctagcgtgagagcgctggtggtgatccgtctatcccgtgtgaccgatgctacgacctccccggag

SEQ ID NO: 24615 - DNA, 260 bp, Unknown
  Description of Unknown: LeftRegion for integrase A183 sequence
actaaaactgaaaagggaaaagattatgaaattaaactttttcctaaacttcgtaaataagtctaactggcttatttacttggtttaatccaactacatacaacatactagatatatttcattacacacaataagttgtatgtaaattatttagtttcttcctatttatatataaaaaagcatagttaaaaactatgcttttaatcaacttattcaaaaaagtttatttttccttcattctcatagcctgttgttgctat

SEQ ID NO: 24616 - DNA, 96 bp, Unknown
  Description of Unknown: LeftRegion for integrase A184 sequence
actaagaataaacgtggagatacctttggaatagatatatttcctaaacttaagccctagactgataacttgtccagggtatttcattgccttctt

SEQ ID NO: 24617 - DNA, 92 bp, Unknown
  Description of Unknown: LeftRegion for integrase A185 sequence
actaaggataaacgtggagaaacttttggaatagatatatttccaaaacttaaaccctagactgataacttgtccagggtaattcattgcct

SEQ ID NO: 24618 - DNA, 96 bp, Unknown
  Description of Unknown: LeftRegion for integrase A186 sequence
actaagaataaacgtggagaaacctttggaatagatatatttcctaaacttaaaccctagactgataacttgtctagggtatttcattgccttctt

SEQ ID NO: 24619 - DNA, 260 bp, Unknown
  Description of Unknown: LeftRegion for integrase A187 sequence
gccctgcgcttcgacatccgagtgccggcagaactgacccagcgcctgggagcgtcctgaaacgcaaaaaagcccccctccgaagaggggggcctttgcctagtcgaccgtgtagccgagctgttccagggcgtcctcgtgggacgtccccggagggaatttgtgtaggggagtgaggtcggtagcgagaccttcctcgttgcaggcgaatacgaccgtgggccgcacgacgtgcttgacggcctgtcggccttcgccca

SEQ ID NO: 24620 - DNA, 260 bp, Unknown
  Description of Unknown: LeftRegion for integrase A188 sequence
gccctgcacttcgacttccgggtccccgaggaactgacccagcggctcggagtctcctgaaacgcaaaaaagccccctcccaaggccgtagccctgagagggggtttctttgtctagccgactctcaccatcgagaaccaggagttggacgcattcgcgtcaccgaggatgttcacgtcaccgtcggtcttgagaccgggctgcaccgtcgcgccagcggagaggtagtactgcacaccgtcaccgccgtaggcgatgtc

SEQ ID NO: 24621 - DNA, 260 bp, Unknown
  Description of Unknown: LeftRegion for integrase A189 sequence
gccctccacttcgacatccgggtcccgcacgaactgacacagagactcatcgccccatgagaaacacagaaggaaggagaaccatgttcaaactcgctatctctctcgcggctgcagcagccctgctggccgggtgcggccagagcgcgcccactgcagcgccagccgccgcccaggagaaagaggcgaagcgggggaccgtcgtattcgagatcggaggggactactcctacgccacctacgacgacaacttcgagaac

SEQ ID NO: 24622 - DNA, 260 bp, Unknown
  Description of Unknown: LeftRegion for integrase A190 sequence
ggagcactcgagttcaatctcagagttcccgaggatgcacacgcccgcatggcctcttaaacacgaatagccccctcccggttaggggagggggaatcgtgactagatcaaggtcaggttgagtgcggacgagtccacgtttcgagcggacgtacggttggtgccagtgacgtacgcctggacttcgatcacgtcgccttcgtagaacctggatggtccggtctccagagtcacagaccagccgctggttgtgaatgtgc

SEQ ID NO: 24623 - DNA, 260 bp, Unknown
  Description of Unknown: LeftRegion for integrase A191 sequence
ggtgctctccagttcaatctccgagtgccagccgatgcacaagagcgcctagcctcttaaacgacgaaagccccctcccggttaagggagggggaatcgtgtcagaccagggtcagattgagcgcggacgaatccacgtttcgagcggacgtgcggttggtaccggtggtgtaagcctgaacctcgaccacgtcaccttcgtagaacctgtacggcccactatccagggtcactgcccatccacctgtagtgaacgagcc

SEQ ID NO: 24624 - DNA, 260 bp, Unknown
  Description of Unknown: LeftRegion for integrase A192 sequence
ggagcactcgagttccatctcagagtccccgaggatgcacacgaccgcatggcctcttaaacacgaaaagccccctcccggttaggggagggggaatcgtggctagaccaaagccaggctgagcgaggacgagtccacgtttcgagcggacgtacggttggtgccagtggtgtacgcctggacctcgaccacgtcaccgtcgtagaacctgtacgggccggtctccagagtgaccgaccagccgttgttggagaacgtac

SEQ ID NO: 24625 - DNA, 260 bp, Unknown; identical to SEQ ID NO: 24624
  Description of Unknown: LeftRegion for integrase A193 sequence

SEQ ID NO: 24626 - DNA, 260 bp, Unknown
  Description of Unknown: LeftRegion for integrase A194 sequence
gccctgcacttcgacttccgggtccccgaggaactgacccagcggctcggagtcgcctgaaacgcaaaaaagcccccctcccggagcccgaaggccctgagaggggggtttctttgtcagccgactctcaccatcgagaaccaggtgttggccgcgttggcgtcaccgacgatgttcacgtcgccatcggtcttcagaccgggttggaccgtcgtacctgccgccaggtagtactgcacgccgtcgccgccgtacacgag

SEQ ID NO: 24627 - DNA, 260 bp, Unknown; identical to SEQ ID NO: 24624
  Description of Unknown: LeftRegion for integrase A195 sequence

SEQ ID NO: 24628 - DNA, 260 bp, Unknown; identical to SEQ ID NO: 24600
  Description of Unknown: LeftRegion for integrase A196 sequence

SEQ ID NO: 24629 - DNA, 260 bp, Unknown
  Description of Unknown: LeftRegion for integrase A197 sequence
gccctgcacttcgacttccgggtccccgaggaactgacccagcggctcggagtctcctgaaacgcaaaaaagccccctcccaaggccgtagccctgagagggggtttctttgtctagccgactctcaccatcgagaaccaggagttggacgcattcgcgtcaccgaggatgttcacgtcgccgtcggtcttgagaccgggctgcaccgtcgcgccagcggagaggtagtactgcacaccgtcaccgccgtaggcgatgtc

SEQ ID NO: 24630 - DNA, 260 bp, Unknown
  Description of Unknown: LeftRegion for integrase A198 sequence
tgcggcggcggtcgccacgccaaagaggtcaccgaaacctactgacctcgcatactaagaaaccccctacccggcccgcgaaggctaggtagggggctttttgcgtttcagtgggtgtggccgtgatgacctgtgtcttcgtggtttgtctggtcaaccaccgcggtctcagtggtgtacggtacaaacccatgcgcgctttggtagtgatccgcttgtcccgtgtgaccgatgctacgacttcacccgagcgtcagctg

SEQ ID NO: 24631 - DNA, 260 bp, Unknown
  Description of Unknown: LeftRegion for integrase A199 sequence
ggtgtcatcgtcgcgaactggatcgagccacacgacatcgagaagcgcctggcgtcctgaccgcttctatgccaggctcctggcttccagcatgttcacagggataggagacctgatgatgaatgtgaacgtcccaccgcccgtgccgttcgtgccgccgcagcggagggcggcgcccaaccctctgttcctcgtcctcgcgatcctctcagcgataccgactgcgttcttcgtgttcgcactcgtcgccgcgccgacga

SEQ ID NO: 24632 - DNA, 260 bp, Unknown
  Description of Unknown: LeftRegion for integrase A200 sequence
ctgaagtcgagcaagcccatgaacttcgctctacacgtcccgcagaaggaggcaggatgacgaccccagccccaggttggtacccagaccccgcaggtacaaaccagccgaggtactgggacggaaagaagtgggtgggtgaaccgaccactgtgccggtgaagacgaaccacgcgctgcatctcctgctgacgatcctcaccttctggatgttcggcggctggctgtgggtctggattctcgtcgcgatcgccaaccac

SEQ ID NO: 24633 - DNA, 260 bp, Unknown
  Description of Unknown: LeftRegion for integrase A201 sequence
cactgcggcggaggccgcggcaagaccgagaccaccgatccgtggtgatctaaaccccgcataccaagaaaccccctacccggcccgcgaaggctaggtagggggcttttcttgtttcagtgggtatggccgtgatgacctgtgtcttcgtggtttgtctggtcaaccaccgcggtctcagtggtgtacggtacaaacccatgagagccctggtagtgatccgcctgtcccgcgtcaccgatgctacgacctcacccgag

SEQ ID NO: 24634 - DNA, 260 bp, Unknown
  Description of Unknown: LeftRegion for integrase A202 sequence
ccactgcggcggcggccgcggcaaggtcgagaccaccgatccgtggtgatctaaccccgcataccaagaaaccccctacctagccttcgcgggccgggtagggggctttttgtgtttcagtgggtgtggccgtgatgacctgtgtcttcgtggtttgtctggtcaaccaccgcggtctcagtggtgtacggtacaaacccatgagagccctggtagtcatccgcctgtcccgcgtcaccgatgctacgacttcaccggag

SEQ ID NO: 24635 - DNA, 260 bp, Unknown
  Description of Unknown: LeftRegion for integrase A203 sequence
cactgcggcggaggtcgcggaaagaccgagaccaccgatccgtggtgatctaaccccacataccaagaaacccccctacccggcccgcgaaggctaggtagggggctttttgtgtttcagtgggtgtggccgagatgacctgtgtcttcgtggtttgtctggtcaaccaccgcggtctcagtggtgtacggtacaaacccatgagagccctggtagtcatccgcctgtcccgcgttaccgatgctacgacttcgccggag

SEQ ID NO: 24636 - DNA, 260 bp, Unknown
  Description of Unknown: LeftRegion for integrase A204 sequence
ccactgcggtggaggccgcggcaagaccgagaccaccgatccgtggtgatctaaccccgcataccaagaaaccccctacccggcccgcgaaggctaggtagggggctttttgtgtttcagtgggtatggccgtgatgacctgtgtcttcgtggtttgtctggtcaaccaccgcggtctcagtggtgtacggtacaaacccatgagagccctggtagtcatccgcctgtcccgcgtcaccgatgctacgacttcaccggag

SEQ ID NO: 24637 - DNA, 260 bp, Unknown
  Description of Unknown: LeftRegion for integrase A205 sequence
gaggtccgctgcggcggaggccgcgcccacaaagaggtcaccgaaacctactgacctcgcataccaagaaaccccctacccggcccgcgaaggctaggtagggggctttttgtgtttcagtgggcgtggccgtgatgacctgtgtcttcgtggtttgtctggtcaaccaccgcggtctcagtggtgtacggtacaaacccatgagggctctcgtcgtgatccgcctgtcccgtgtcaccgatgctacgacctcaccggag

SEQ ID NO: 24638 - DNA, 260 bp, Unknown
  Description of Unknown: LeftRegion for integrase A206 sequence
ccactgcggcggaggccgcggaaagaccgagaccaccgatccgtggtgatctaaccccgcataccaagaaaccccctacccggcccgcgaaggctaggtagggggcttttctcgtttcagtgggtgtggccgtgatgacctgtgtcttcgtggtttgtctggtcaaccaccgcggtctcagtggtgtacggtacaaacccatgcgcgctttggtagtgatccgcttgtcccgtgtcaccgatgctacgacttcacccgag

SEQ ID NO: 24639 - DNA, 260 bp, Unknown
  Description of Unknown: LeftRegion for integrase A207 sequence
ccgctgcggcggaggccgcggcaagaccgagaccaccgatccgtggtgatctaaccccgcataccaagaaaccccctacctagccttcgcgggccgggtagggggctttttgtgtttcagtgggtatggccgtgatgacctgtgtcttcgtggtttgtctggtcaaccaccgcggtctcagtggtgtacggtacaaacccatgagagccctcgtcgtgatccgactgtcccgcgtcaccgatgctacgacctcaccggag

SEQ ID NO: 24640 - DNA, 260 bp, Unknown
  Description of Unknown: LeftRegion for integrase A208 sequence
acctcgcataccaagaaaccccctacccggcccgcgaaggctaggtagggggctttttcgcgttcaggggacctgatcgctcagcgacccatctccgatgggatcgcgtttgcgtttcagtgggtgtggccgtgatgacctgtgtcttcgtggtttgtctggtcaaccaccgcggtctcagtggtgtacggtacaaacccatgagagccctggtagtgatccgactgtcccgcgtcaccgatgctacgacttcaccggag

SEQ ID NO: 24641 - DNA, 260 bp, Unknown
  Description of Unknown: LeftRegion for integrase A209 sequence
cactgcggcggaggccgcggcaagaccgagaccaccgatccgtggtgatctaaccacgcataccaagaaaccccctacctagccttcgcgggccgggtagggggcttttcttgttttcagtgggtatggccgtgatgacctgtgtcttcgtggtttgtctggtcaaccaccgcggtctcagtggtgtacggtacaaacccatgagagccctggtagtgatccgactgtcccgcgtcaccgatgctacgacttcaccggag

SEQ ID NO: 24642 - DNA, 260 bp, Unknown
  Description of Unknown: LeftRegion for integrase A210 sequence
gaggcccgctgcggcggaggccgcgcccacaaagaggtcaccgaaacctactgacctcgcataccaagaaaccccctacctagccttcgcgggccgggtagggggcttttcttgtttcagtgggtatggccgtgatgacctgtgtcttcgtggtttgtctggtcaaccaccgcggtctcagtggtgtacggtacaaacccatgagagccctggtagtgatccgactgtcccgcgtcaccgatgctacgacttcaccggag

SEQ ID NO: 24643 - DNA, 260 bp, Unknown
  Description of Unknown: LeftRegion for integrase A211 sequence
ccactgcggcggaggccgcggcaagaccgagaccaccgacccgtggtgatctaacctcgcacaccaagaaaccccctacccggcccgcgaaggctaggtagggggctttttgtgtttcagtgggtgtggccgtgatgacctgtgtcttcgtggtttgtctggtcaaccaccgcggtctcagtggtgtacggtacaaacccatgagagccctggtagtcatccgcctgtcccgcgtcaccgatgctacgacttcaccggag

SEQ ID NO: 24644 - DNA, 260 bp, Unknown
  Description of Unknown: LeftRegion for integrase A212 sequence
gcactgcggcggaggccgcggcaagaccgagaccaccgacccgtggtgatctaaccccgcataccaagaaaccccctacccggcccgcgaaggctaggtagggggcttttcttgtttcagtgggtatggccgtgatgacctgtgtcttcgtggtttgtctggtcaaccaccgcggtctcagtggtgtacggtacaaacccatgagagccctggtagtcatccggctgtcccgcgtcaccgatgctacgacctcaccggag

SEQ ID NO: 24645 - DNA, 260 bp, Unknown
  Description of Unknown: LeftRegion for integrase A213 sequence
ccactgcggcggaggccgcggcaagaccgagaccaccgatccgtggtgatctaaccccgcataccaagaaaccccctacctagccttcgcgggccgggtagggggctttttgcgtttcagtgggtgtgaccgtgatgacctgtgtcttcgtggtttgtctggtcaaccaccgcggtctcagtggtgtacggtacaaacccatgagagctctcgtcgtgatccgattgtcccgcgtcaccgatgctacgacttcaccggag

SEQ ID NO: 24646 - DNA, 260 bp, Unknown
  Description of Unknown: LeftRegion for integrase A214 sequence
gcactgcggcggaggccgcggcaagaccgagaccgccgatccgtggtgatctaaccccgcataccaagaaaccccctacccggcccgcgaaggctaggtagggggcttttcttgtttcagtgggtatggccgtgatgacctgtgtcttcgtggtttgtctggtcaaccaccgcggtctcagtggtgtacggtacaaacccatgagagccctggtggtcatccgactgtcccgcgtcaccgatgctacgacttcacccgag

SEQ ID NO: 24647 - DNA, 260 bp, Unknown
  Description of Unknown: LeftRegion for integrase A215 sequence
ccactgcggcggaggccgcggcaagaccgagaccaccgatccgtggtgatctaaccccgcataccaagaaaccccctacccggcccgcgaaggctaggtagggggctttttgtgtttcagtgggtgtggccgtgatgacctgtgtcttcgtggtttgtctggtcaaccaccgcggtttcagtggtgtacggtacaaacccatgagagccctggtagtcatccgactgtcccgcgtcaccgatgctacgacctcaccggag

SEQ ID NO: 24648 - DNA, 260 bp, Unknown
  Description of Unknown: LeftRegion for integrase A216 sequence
gccactgcggcggaggccgcggcaagaccgagaccaccgacccgtggtgatctaaccccgcataccaagaaaccccctacccggcccgcgaaggctaggtagggggcttttcttgtttcagtgggtatggccgtggtgaccaggttcttcgtggtttgtctggtcaaccaccgcggtctcagtggtgtacggtacaaaccatgcgagccctggtagtgatccgcctgtcccgtgtcaccgatgctacgacttcgcccgag

SEQ ID NO: 24649 - DNA, 260 bp, Unknown
  Description of Unknown: LeftRegion for integrase A217 sequence
gcactgcggcggaggccgcggcaagaccgagaccaccgatccgtggtgatctaaccccgcataccaagaaaccccctacccggcccgcgaaggctaggtagggggctttttgtgtttcagtgggtgtgtccgtgatgacctgtgtcttcgtggtttgtctggtcaaccaccgcggtctcagtggtgtacggtacaaacccatgagagccctggtagtcatccgactgtcccgcgtcaccgatgctacgacctcaccggag

SEQ ID NO: 24650 - DNA, 260 bp, Unknown
  Description of Unknown: LeftRegion for integrase A218 sequence
aaccccgcataccaagaaaccccctacctagccttcgcgggccgggtagggggctttttcgcgttcagggggcctgatcgctcagcgacccatctccgatgggatcgcgtttgttttcagtgggtgtggccgtgatgacctgtgtcttcgtggtttgtctggtcaaccaccgcggtctcagtggtgtacggtacaaacccatgcgcgctttggtagtgatccgcttgtcccgtgtgaccgatgctacgacttcacccgag

SEQ ID NO: 24651 - DNA, 260 bp, Unknown
  Description of Unknown: LeftRegion for integrase A219 sequence
cactgcggcggaggccgcggcaagaccgagaccaccgatccgtggtgatctaaccccgcataccaagaaaccccctacctagccttcgcgggccgggtagggggcttttcttgttttcagtgggtatggccgtgatgacctgtgtcttcgtggtttgtctggtcaaccaccgcggtctcagtggtgtacggtacaaacccatgagagccctggtagtgatccgactgtcccgcgtcaccgatgctacgacttcaccggag

SEQ ID NO: 24652 - DNA, 260 bp, Unknown
  Description of Unknown: LeftRegion for integrase A220 sequence
gaggtccgctgcggcggaggccgcgcccacaaagaggtcaccgaaacctactgacctcgcataccaagaaaccccctacccggcccgagaaggctaggtagggggctttttgtgtttcagtgggtatggccgtgatgacctgtgtcttcgtggtttgtctggtcaaccaccgcggtctcagtggtgtacggtacaaacccatgagagccctggtagtgatccgactgtcccgcgtcaccgatgctacgacttcaccggag

SEQ ID NO: 24653 - DNA, 260 bp, Unknown
  Description of Unknown: LeftRegion for integrase A221 sequence
ctgaagtcgagcaagcccatgaacttcgctctacacgtcccgcagaaggaggcaggatgacgaacccagccccaggttggtacccggaccccgcaggtacaaaccagccgaggtactgggacggaaagaagtgggtgggtgaaccgaccactgtgccggtgaagacgaaccacgcgctgcatctcctgctgacgatcctcaccttctggatgttcggcggctggctgtgggtctggattctcgtcgcaatcgccaaccac

SEQ ID NO: 24654 - DNA, 260 bp, Unknown
  Description of Unknown: LeftRegion for integrase A222 sequence
gccactgcggcggaggccgcggcaagaccgagaccaccgatccgtggtgatctaaccccgcataccaagaaaccccctacctagccttcgcgggccgggtagggggcttttcttgtttcagtgggtatggccgtgatgacctgtgtcttcgtggtttgtctggtcaaccaccgcggtctcagtggtgtacggtacaaaccatgcgagccctggtagtgatccgcctgtcccgtgtcaccgatgctacgacttcacccgag

SEQ ID NO: 24655 - DNA, 260 bp, Unknown
  Description of Unknown: LeftRegion for integrase A223 sequence
cgctgcggcggaggccgcggcaagaccgagaccaccgacccgtggtgatctaaccccgcataccaagaaacccccctacccggcccgcgaaggctaggtagggggcttttcttgtttcagtgggtgtggccgtgatgacctgtgtcttcgtggtttgtctggtcaaccaccgcggtctcagtggtgtacggtacaaacccatgagagccctggtagtgatccgactgtcccgcgtcaccgatgctacgacttcaccggag

SEQ ID NO: 24656 - DNA, 260 bp, Unknown
  Description of Unknown: LeftRegion for integrase A224 sequence
tcactgcggcggcggccgcggcaagaccgagaccaccgatccgtggtgatctaacctcgcgcaccaagaaaccccctacccggcccgcgaaggctaggtagggggctttttgtgtttcagtgggtatggccgtgatgacctgtgtcttcgtggtttgtctggtcaaccaccgcggtctcagtggtgtacggtacaaacccatgagagccctggtagtcatccgactgtcccgcgtcaccgatgctacgacctcaccggag

SEQ ID NO: 24657 - DNA, 260 bp, Unknown
  Description of Unknown: LeftRegion for integrase A225 sequence
taaccccgcacaccaagaaaccccctacccggcccgcgaaggctaggtagggggctttttcgcgttcaggggacctgatcgctcagcgacccatctccgatgggatcgcgtttgttttcagtgggtatggccgtgatgacctgtgtcttcgtggtttgtctggtcaaccaccgcggtctcagtggtgtacggtacaaaccatgcgagctctcgtcgtgatccgcttgtcccgtgtcaccgatgctacgacttcaccggag

SEQ ID NO: 24658 - DNA, 260 bp, Unknown
  Description of Unknown: LeftRegion for integrase A226 sequence
ccgctgcggcggaggccgcggcaagaccgagaccaccgatccgtggtgatctaaccccgcataccaagaaaccccctacccggcccgcgaaggctaggtagggggctttttgtgtttcagtgggtgtgtccgtgatgacctgtgtcttcgtggtttgtctggtcaaccaccgcggtctcagtggtgtacggtacaaacccatgagagccctggtagtgatccgactgtcccgcgtcaccgatgctacgacctcacccgag

SEQ ID NO: 24659 - DNA, 260 bp, Unknown
  Description of Unknown: LeftRegion for integrase A227 sequence
tcactgcggcggaggccgcggcaagaccgagaccaccgatccgtggtgatctaaccccgcataccaagaaaccccctacccggcccgcgaaggccgggtagggggcttttcttgtttcagtgggtatggccgtgatgacccgtgtcttcgtggtttgtctggtcaaccaccgcggtctcagtggtgtacggtacaaacccatgagagctctggtagtcatccgactgtcccgcgtcaccgatgctacgacttcaccggag

SEQ ID NO: 24660 - DNA, 260 bp, Unknown
  Description of Unknown: LeftRegion for integrase A228 sequence
agcggtgtccgcggagtcgggcccacccccatatctccctcagcatggagcacaacgtactccaccgccccctccggggaacccgttttgggctccgcggagggggtgttctgcgtttagtgggtgtggccgtgatgacctgtgtcttcgtggtttgtctggtcaaccaccgcggtctcagtggtgtacggtacaaacccatgagagccctggtagtgatccgactgtcccgcgtcaccgatgctacgacttcaccggag

SEQ ID NO: 24661 - DNA, 260 bp, Unknown
  Description of Unknown: LeftRegion for integrase A229 sequence
gtcactgcggcggaggccgcggcaagaccgagaccaccgatccgtggtgatctaacctcgcataccaagaaaccccctacccggcccgcgaaggctaggtagggggctttttgtgtttcagtgggtatggtcgtgatgacctgtgtcttcgtggtttgtctggtcaaccaccgcggtctcagtggtgtacggtacaaaccatgcgagctctcgtcgtgatccgcttgtcccgtgtcaccgatgctacgacttcacccgag

SEQ ID NO: 24662 - DNA, 260 bp, Unknown
  Description of Unknown: LeftRegion for integrase A230 sequence
gaggtccgctgcggcggcggtcgccacgccaaagaggtcaccgaaacctactgacctcgcataccaagaaaccccctacctagccttcgcgggccgggtagggggcttttcttgtttcagtgggtatggccgtgatgacctgtgtcttcgtggtttgtctggtcaaccaccgcggtctcagtggtgtacggtacaaacccatgagagccctggtagtcatccgcttgtcccgtgtcaccgatgctacgacctcaccggag

SEQ ID NO: 24663 - DNA, 260 bp, Unknown
  Description of Unknown: LeftRegion for integrase A231 sequence
ccactgcggcggaggccgcggcaagaccgagacctccgatccgtggcgatctaaccccgcataccaagaaaccccctacccggcccgcgaaggctaggtagggggcttttcttgtttcagtgggtatggccgtgatgacctgtgtcttcgtggtttgtccggtcaaccaccgcggtctcagtggtgtacggtacaaacccatgagagccctggtagtcatccgcctgtcccgcgtcaccgatgctacgacctcgccggag

SEQ ID NO: 24664 - DNA, 260 bp, Unknown
  Description of Unknown: LeftRegion for integrase A232 sequence
ccactgcggcggaggccgcggcaagaccgagaccaccgatccgtggtgatctaaccccgcataccaagaaaccccctacccggcccgcgaaggctaggtagggggctttttgtgtttcagtgggtatggccgtgatggcctgtgtcttcgtggtttgtctggtcaaccaccgcggtctcagtggtgtacggtacaaacccatgagagccctggtagtcatccgcctgtcccgtgtcaccgatgctacgacctcaccggag

SEQ ID NO: 24665 - DNA, 260 bp, Unknown
  Description of Unknown: LeftRegion for integrase A233 sequence
gcactgcggcggaggccgcggcaagaccgagaccaccgatccgtggtgatctaaccccgcataccaagaaaccccctacccggcccgcgaaggctaggtagggggctttttgtgtttcagtgggtatggccgtgatgacctgtgtcttcgtggtttgtctggtcaaccaccgcggtctcagtggtgtacggtacaaacccatgagagccctggtagtcatccgcctgtcccgcgtcaccgatgctacgacttcaccggag

SEQ ID NO: 24666 - DNA, 260 bp, Unknown; identical to SEQ ID NO: 24653
  Description of Unknown: LeftRegion for integrase A234 sequence

SEQ ID NO: 24667 - DNA, 260 bp, Unknown; identical to SEQ ID NO: 24633
  Description of Unknown: LeftRegion for integrase A235 sequence

SEQ ID NO: 24668 - DNA, 260 bp, Unknown; identical to SEQ ID NO: 24600
  Description of Unknown: LeftRegion for integrase A236 sequence

SEQ ID NO: 24669 - DNA, 260 bp, Unknown
  Description of Unknown: LeftRegion for integrase A237 sequence
cccgcataccaagaaaccccctacccggcccgcgaaggctaggtagggggctttttcgcgttcagggggtctgatcgctcagcgacccatctccgatgggatcgcgtttgtgctcttcagtgggtgtggccgtgatgacctgtgtcttcgtggtttgtccggtcaaccaccgcggtctcagtggtgtacggtacaaacccatgagagccctggtagtcatccgcctgtcccgcgtcaccgatgctacgacttcaccggag

SEQ ID NO: 24670 - DNA, 260 bp, Unknown
  Description of Unknown: LeftRegion for integrase A238 sequence
agcggtgtccgcggagtcgggcccacccccatatctccctcagcatggagcacaacgtactccaccgcccccctccggggaacccgttttgggctccgcggagggggtgttctgcgtttagtgggtatggccgtgatgacctgtgtcttcgtggtttgtctggtcaaccaccgcggtctcagtggtgtacggtacaaaccatgcgagccctggtagtgatccgactgtcccgcgtcaccgatgctacgacttcaccggag

SEQ ID NO: 24671 - DNA, 260 bp, Unknown; identical to SEQ ID NO: 24621
  Description of Unknown: LeftRegion for integrase A239 sequence

SEQ ID NO: 24672 - DNA, 260 bp, Unknown
  Description of Unknown: LeftRegion for integrase A240 sequence
tggaatggtgagggcggccgcagccctcgacttcgcaatcccccattgatcaatggtacaaaacagccccctcccgggaatccgtttggactcctgagagggggcgttttgcgtttctagtggacgtgcccgtggtggtcgtcggcttcttggcttggccgatcaacaactgccgtctcagtggtgtacggtacaaacccatgagagccttggtagtcatccgactgtcccgcgtcaccgatgctacgacttcacccgag

SEQ ID NO: 24673 - DNA, 260 bp, Unknown
  Description of Unknown: LeftRegion for integrase A241 sequence
gcactgcggcggaggccgcggcaagaccgagaccgccgatccgtggtgatctaaccccgcataccaagaaaccccctacccggcccgcgaaggctaggtagggggctttttgtgtttcagtgggtatggtcgtgatgacctgtgtcttcgtggtttgtctggtcaaccaccgcggtctcagtggtgtacggtacaaacccatgagagccctggtagtcatccgcctgtcccgcgtcaccgatgctacgacttcgccggag

SEQ ID NO: 24674 - DNA, 260 bp, Unknown; identical to SEQ ID NO: 24665
  Description of Unknown: LeftRegion for integrase A242 sequence

SEQ ID NO: 24675 - DNA, 260 bp, Unknown
  Description of Unknown: LeftRegion for integrase A243 sequence
cactgcggcggaggccgcggcaagaccgagaccaccgatccgtggtgatctaacccccacataccaagaaaccccctacccggcccgcgaaggctaggtagggggctttttgtgtttcagtgggtgtggccgtgatgacctgtgtcttcgtggtttgtctggtcaaccaccgcggtctcagtggtgtacggtacaaacccatgagagccctggtagtcatccgcctgtcccgcgtcaccgatgctacgacttcgccggag

SEQ ID NO: 24676 - DNA, 260 bp, Unknown
  Description of Unknown: LeftRegion for integrase A244 sequence
gccactgcggcggaggccgcggcaagaccgagaccaccgatccgtggtgatctaacctcgcataccaagaaaccccctacccggcccgcgaaggctaggtagggggcttttcttgtttcagtgggtatggccgtggtgaccaggttcttcgtggtttgtctggtcaaccaccgcggtctcagtggtgtacggtacaaaccatgcgagccctggtagtgatccgcctgtcccgtgtcaccgatgctacgacttcgcccgag

SEQ ID NO: 24677 - DNA, 260 bp, Unknown
  Description of Unknown: LeftRegion for integrase A245 sequence
cactgcggcggaggccgcggcaagaccgagaccaccgatccgtggtgatctaaccccgcataccaagaaacccccctacccggcccgcgaaggctaggtagggggcttttcttgtttcagtgggtatggccgtgatgacctgtgtcttcgtggtttgtctggtcaaccaccgcggtctcagtggtgtacggtacaaacccatgagagccctggtagtgatccgcctgtcccgcgtcaccgatgctacgacctcaccggag

SEQ ID NO: 24678 - DNA, 260 bp, Unknown
  Description of Unknown: LeftRegion for integrase A246 sequence
ccactgcggcggaggccgcggcaagaccgagaccaccgatccgtggtgatctaacctctcataccaagaaaccccctacccggcccgcgaaggctaggtagggggctttttgtgtttcagtgggtatggccgtgatgacctgtgtcttcgtggtttgtctggtcaaccaccgcggtctcagtggtgtacggtacaaacccatgagagccctggtagtgatccgcctgtcccgcgtcaccgatgctacgacctcaccggag

SEQ ID NO: 24679 - DNA, 260 bp, Unknown
  Description of Unknown: LeftRegion for integrase A247 sequence
gaggcccgctgcggcggaggccgtgcccacaaagaggtcaccgaaacctactgacctcgcataccaagaaaccccctacctagccttcgcgggccgggtagggggcttttcttgtttcagtgggtatggccgtgatgacctgtgtcttcgtggtttgtctggtcaaccaccgcggtctcagtggtgtacggtacaaacccatgagagccctggtagtcatccgactgtcccgcgtcaccgatgctacgacctcaccggag

SEQ ID NO: 24680 - DNA, 260 bp, Unknown
  Description of Unknown: LeftRegion for integrase A248 sequence
tcactgcggcggaggccgcggcaagaccgagaccaccgatccgtggtgatctaaccccgcataccaagaaaccccctacccggcccgcgaaggctaggtagggggctttttgcgtttcagtgggtatggccgtgatgacctgtgtcttcgtggtttgtctggtcaaccaccgcggtctcagtggtgtacggtacaaacccatgcgcgctttggtagtgatccgcctgtcccgcgtcaccgatgctacgacttcacccgag

SEQ ID NO: 24681 - DNA, 260 bp, Unknown; identical to SEQ ID NO: 24679
  Description of Unknown: LeftRegion for integrase A249 sequence

SEQ ID NO: 24682 - DNA, 260 bp, Unknown
  Description of Unknown: LeftRegion for integrase A250 sequence
ccactgcggcggcggccgcggcaagaccgagaccaccgatccgtggtgatctaacctcgcataccaagaaaccccctacccggcccgcgaaggctaggtagggggttttttgtgtttcagtgggtatggccgtgaagacctgtgtcttcgtggtttgtctggtcaaccaccgcggtctcagtggtgtacggtacaaacccatgagagccctggtagtcatccgcctgtcccgcgtcaccgatgctacgacttcaccggag

SEQ ID NO: 24683 - DNA, 260 bp, Unknown
  Description of Unknown: LeftRegion for integrase A251 sequence
ctgaagtcgagcaagcccatgaacttcgctctacacgtcccgcagaaggaggcaggatgacgaccccagctccaggttggtacccggaccccgcaggtacaaaccagccgaggtactgggacggaaagaagtgggtgggtgaaccgaccactgtgccagtgaagacgaaccacgcgctgcatctcctcctgacgatcctcaccttctggatgttcggcggttggctgtgggtctggattctcgtcgcaatcgccaaccac

SEQ ID NO: 24684 - DNA, 260 bp, Unknown
  Description of Unknown: LeftRegion for integrase A252 sequence
gcactgcggcggaggccgcggcaagaccgagaccaccgatccgtggtgatctaacctcgcataccaagaaaccccctacccggcccgcgaaggctaggtagggggcttttcttgtttcagtgggtgtgaccgtgatgacctgtgtcttcgtggtttgtctggtcaaccaccgcggtctcagtggtgtacggtacaaacccatgagagccctggtagtgatccgactgtcccgcgtcaccgatgctacgacttcaccggag

SEQ ID NO: 24685 - DNA, 260 bp, Unknown
  Description of Unknown: LeftRegion for integrase A253 sequence
ctgaagtcgagcaagcccatgaacttcgctctacacgtcccgcagaaggaggcaggatgacgactccagcgccaggttggtacccggaccccgcaggtacaaaccagccgaggtactgggacggaaagaagtgggtgggcgagccgaccactgtgcccgtgaagacgaaccacgctctgcatctcctgctgacgatcctcaccttctggatgttcggcggctggctgtgggtctggattctcgtcgcaatcgccaaccac

SEQ ID NO: 24686 - DNA, 260 bp, Unknown
  Description of Unknown: LeftRegion for integrase A254 sequence
gccactgcggcggcggccgcggcaagaccgagaccaccgacccgtggtgatctaacccgcataccaagaaaccccctacccggcccgcgaaggctaggtagggggctttttgtgtttcagtgggtgtgtccgtgatgacctgtgtcttcgtggtttgtctggtcaaccaccgcggtctccgtggtgtacggtacaaacccatgagagccctggtagtgatccgcctgtcccgcgtcaccgatgctacgacttcaccggag

SEQ ID NO: 24687 - DNA, 260 bp, Unknown
  Description of Unknown: LeftRegion for integrase A255 sequence
acctcgcataccaagaaaccccctacctagccttcgcgggccgggtagggggctttttcgcgttcagggggcctgatcgctcagcgacccatctccgatgggatcgcgtttgcgtttcagtgggtatggccgtgatgacctgtgtcttcgtggtttgtctggtcaaccaccgcggtctcagtggtgtacggtacaaacccatgagagccctggtagtgatccgcctgtcccgcgtcaccgatgctacgacttcaccggag

SEQ ID NO: 24688 - DNA, 260 bp, Unknown
  Description of Unknown: LeftRegion for integrase A256 sequence
cccccgcataccaagaaaccccctacccggcccgcgaaggctaggtagggggctttttcgcgttcagggggtctgatcgctcagcgacccatctccgatgggatcgcgtttgtgcttcagtgggtatggccgtgatgacctgtgtcttcgtggtttgtctggtcaaccaccgcggtctcagtggtgtacggtacaaacccatgagagccctggtagtgatccgcctgtcccgcgtcaccgatgctacgacttcaccggag

SEQ ID NO: 24689 - DNA, 260 bp, Unknown
  Description of Unknown: LeftRegion for integrase A257 sequence
gaggtccgatgcggcggaggccgcgcccacaaagaggtcaccgaaacctactgacctcgcataccaagaaaccccctacctagccttcgcgggccgggtagggggctttttgtgtttcagtgggtgtggccgtgatgacctgtgtcttcgtggtttgtctggtcaaccaccgcggtctcagtggtgtacggtacaaacccatgagagccctggtagtgatccgactgtcccgcgtcaccgatgctacgacctcaccggag

SEQ ID NO: 24690 - DNA, 260 bp, Unknown
  Description of Unknown: LeftRegion for integrase A258 sequence
ttgaagtcgagcaagcccatgaacttcgctctacacgtcccgcagaaggaggcaggatgacgaccccagctccaggttggtacccggaccccgcaggtacaaaccagccgaggtactgggacggaaagaagtgggtgggtgaaccgaccactgtgccggtgaagacgaaccacgcgctgcatctcctgctgacgatcctcaccttctggatgttcggaggctggctgtgggtctggattctcgtcgcaatcgccaaccac

SEQ ID NO: 24691 - DNA, 260 bp, Unknown; identical to SEQ ID NO: 24350
  Description of Unknown: LeftRegion for integrase A259 sequence

SEQ ID NO: 24692 - DNA, 260 bp, Unknown
  Description of Unknown: LeftRegion for integrase A260 sequence
cactgcggcggaggccgcggcaagaccgagaccaccgatccgtggtgatctaaccccgcataccaagaaaccccctacccggcccgcgaaggctaggtagggggctttttgtgttttcagtgggtgtggccgtgatgacctgtgtcttcgtggtttgtctggtcaaccaccgcggtctcagtggtgtacggtacaaacccatgagagccctggtagtgatccgcttgtcccgcgtcaccgatgctacgacttcaccggag

SEQ ID NO: 24693 - DNA, 260 bp, Unknown
  Description of Unknown: LeftRegion for integrase A261 sequence
ccactgcggcggaggccgcggcaagaccgagaccaccgatccgtggtgatctaaccccgcataccaagaaaccccctacccggcccgcgaaggctaggtagggggctttttgtgtttcagtgagtatgaccgtgatgacctgtgtcttcgtggtttgtctggtcaaccaccgcggtttcagtggtgtacggtacaaacccatgagagccctggtagtcatccgcttgtcccgcgtcaccgatgctacgacttcaccggag

SEQ ID NO: 24694 - DNA, 260 bp, Unknown
  Description of Unknown: LeftRegion for integrase A262 sequence
gaggcccgctgcggcggaggtcgcgcccacaaagaggtcaccgaaacctactgacctcgcataccaagaaaccccctacctagccttcgcgggccgggtagggggctttttgcgtttcagtgggtgtggccgtgatgacctgtgtcttcgtggtttgtctggtcaaccaccgcggtctcagtggtgtacggtacaaacccatgagagccctggtagtcatccgcctgtcccgcgtcaccgatgctacgacctcacccgag

SEQ ID NO: 24695 - DNA, 260 bp, Unknown
  Description of Unknown: LeftRegion for integrase A263 sequence
ctgaagtcgagcaagcccatgaacttcgctctacacgtcccgcagaaggaggcaggatgacgaacccagccccaggttggtacccggaccccgcaggtacaaaccagccgaggtactgggacggaaagaagtgggtgggagaaccgaccactgtgccggtgaagacgaaccacgcgctgcatctcctactgacgatcctcaccttctggatgttcggcggctggctgtgggtctggattctcgtcgcaatcgccaaccac

SEQ ID NO: 24696 - DNA, 260 bp, Unknown; identical to SEQ ID NO: 24662
  Description of Unknown: LeftRegion for integrase A264 sequence

SEQ ID NO: 24697 - DNA, 260 bp, Unknown
  Description of Unknown: LeftRegion for integrase A265 sequence
aaccccgcataccaagaaaccccctacccggcccgcgaaggctaggtagggggctttttcgcgttcaggggcctgatcgctcagcgacccatctccgatgggatcgcgtttgtgtttcagtgggtgtggccgtgatgacctgtgtcttcgtggtttgtctggtcaaccaccgcggtctccgtggtgtacggtacaaacccatgagagccctggtagtcatccgcctgtcccgcgtcaccgatgctacgacttcaccggag

SEQ ID NO: 24698 - DNA, 260 bp, Unknown
  Description of Unknown: LeftRegion for integrase A266 sequence
cgcataccaagaaagaaaccccctacccggcccgcgaaggctaggtagggggctttttcgcgttcaggggacctgatcgctcagcgacccatctccgatgggatcgcgtttgtgtttcagtgggtatggccgtgatgacctgtgtcttcgtggtttgtctggtcaaccaccgcggtctcagtggtgtacggtacaaacccatgagagccctggtagtcatccgactgtcccgcgtcaccgatgctacgacttcaccggag

SEQ ID NO: 24699 - DNA, 260 bp, Unknown
  Description of Unknown: LeftRegion for integrase A267 sequence
acctcgcacaccaagaaaccccctacccggcccgcgaaggctaggtagggggctttttcgcgttcaggggacctgatcgctcagcgacccatctccgatgggatcgcgtttgtgtttcagtgggtatggccgtgatgacctgtgtcttcgtggtttgtctggtcaaccaccgcggtctcagtggtgtacggtacaaacccatgagagccctggtagtgatccgcctgtcccgcgtcaccgatgctacgacttcgccggag

SEQ ID NO: 24700 - DNA, 260 bp, Unknown
  Description of Unknown: LeftRegion for integrase A268 sequence
ggcactgcggcggaggccgcggcaagaccgagaccaccgacccgtggtgatctaaccccgcataccaagaaaccccctacccggcccgcgaaggctaggtagggggcttttcttgtttcagtgggtatggccgtgatgacctgtgtcttcgtggtttgtctggtcaaccaccgcggtctcagtggtgtacggtacaaaccatgcgagctctcgtcgtgatccgcttgtcccgtgtcaccgatgctacgacctcaccggag

SEQ ID NO: 24701 - DNA, 260 bp, Unknown
  Description of Unknown: LeftRegion for integrase A269 sequence
gcactgcggcggaggccgcggcaagaccgagaccaccgatccgtggtgatctaaccccgcataccaagaaaccccctacccggcccgcgaaggctaggtagggggctttttgtgtttcagtgggtgtggccgtgatgacctgtgtcttcgtggtttgtctggtcaaccaccgcggtctcagtggtgtacggtacaaacccatgagagccctggtagtgatccgactgtcccgcgttaccgatgctacgacctcaccggag

SEQ ID NO: 24702 - DNA, 260 bp, Unknown
  Description of Unknown: LeftRegion for integrase A270 sequence
ggggcaatcacgttccacttccagataccagaagacctccacgagcgcctagcctcttaaacgacgaaagccccctcccggttaggggagggggaatcgtgtctagatcaatgtcaggttgagcgcggacgagtccacgtttcgagcggacgtacggttggtgccagtggtgtacgcctggacctcgaccacgtcgccttcgtagaacctgtacggtccggtttccagggtcacagcccaaccaccggttgtgaatgtgc

SEQ ID NO: 24703 - DNA, 260 bp, Unknown
  Description of Unknown: LeftRegion for integrase A271 sequence
gctacgtcggcgggttcggatcactgggccagcatcttcgtgccgttctgatcaccccgaataccaagaaaccccctacccggcccgcgaaggctaaggtagggggctttttgtgtttcagtgggtatggccgtggtgaccaggttcttcgtggtttgtccggtcaaccactgcggtctcagtggtgtacggtacaaaccatgcgagctctcgtcgtgatccgcttgtcccgtgtcaccgatgctacgacctcaccggag

SEQ ID NO: 24704 - DNA, 260 bp, Unknown
  Description of Unknown: LeftRegion for integrase A272 sequence
gcggtgtccgcggagtcgggcccacccccatatctccctcagcatggagcacaacgtactccaccgccccctccggggaacccgttttgggctccgcggagggggtgttctgcgtttcagtgggtatggccgtgatgacctgtgtcttcgtggtttgtccggtcaaccactgcggtctcagtggtgtacggtacaaacccatgagagccctggtagtcatccgactgtcccgcgtcaccgatgctacgacctcaccggag

SEQ ID NO: 24705 - DNA, 260 bp, Unknown
  Description of Unknown: LeftRegion for integrase A273 sequence
gctttttcgcgttcagggggtcctgatcgctcagcgacccatctccgatgggatcgcgttttcagtgggtatggccgtgatgacctgtgtcttcgtggtttgtctggtcaaccaccgcggtctcagtggtgtacggtacaaacccaaggcctggagcgaagctccggccgtaagcgtcgatcgtccgaaggagatctagcgtgagagctcttgtcgtgatccgcctgtcccgtgtcaccgatgctacgacctccccggag

SEQ ID NO: 24706 - DNA, 260 bp, Unknown; identical to SEQ ID NO: 24700
  Description of Unknown: LeftRegion for integrase A274 sequence

SEQ ID NO: 24707 - DNA, 260 bp, Unknown; identical to SEQ ID NO: 24700
  Description of Unknown: LeftRegion for integrase A275 sequence

SEQ ID NO: 24708 - DNA, 260 bp, Unknown
  Description of Unknown: LeftRegion for integrase A276 sequence
ggtgctctccagaccgagatcaagttcccaggtgacgtagaggaacgcctggcctcttaaacgacgaaaaccccctcccggttaagggagggggaatcgtgtcaaaccaggttaacgctcagcgaggacgagtccacgtttcgagccgacgtacggttggtgccagtggtgtaagcctggacctccaccacatcgccgtcatagaaccggtacgggccggtctccagagtgaccgaccagccgttgttggagaacgagcc

SEQ ID NO: 24709 - DNA, 260 bp, Unknown
  Description of Unknown: LeftRegion for integrase A277 sequence
ggggtgctccactccaactggatcgagcccaccgacatcgaggaacgcctactcgcctgaaacgcaaaaaagcccccctcccggagcccgaaggccctgagaggggggtttctttgtcagccgactcgcaccatggagaaccacgagtccgacgtgtcagcaccaccgacgatgttgacatcgcctgagttatacaggcccggtcgaaccgtcgcgcccgcaggcaggtagtacatcacgccgtcaccgccgacagagtc

SEQ ID NO: 24710 - DNA, 260 bp, Unknown
  Description of Unknown: LeftRegion for integrase A278 sequence
ggcgtcatcgtcgcgaactggatcgagccgcacgacatcgagaagcgcctggcttcctgacggtcgctatgccaggctgctgactcacagcatccatacagggataggagacctgatgcatgtgaacgtcccgcctgcccggaagccagcgcccaacccgctgttcctcaccctcgcgatcctgtcggggttcccgaccgcgttcttcctcatcctcttcgtgtccggtggcacctcggtcttcgtcatgatcgggttcc

SEQ ID NO: 24711 - DNA, 260 bp, Unknown
  Description of Unknown: LeftRegion for integrase A279 sequence
ggtgctctccagaccgagatcaagttcccaggtgacgtagaggaacgcctagcctcttaaacgacgaaaaccccctcccggttaagggagggggaatcgtgtcaaaccaggttaacgctcagcgaggacgagtccacgtttcgagccgacgtacggttggtgccagtggtgtaagcctggacctccaccacatcgccgtcatagaaccggtacgggccggtctccagagtgaccgaccagccgttgttggagaacgagcc

SEQ ID NO: 24712 - DNA, 260 bp, Unknown
  Description of Unknown: LeftRegion for integrase A280 sequence
ggtgtcatcgttgcgaactggatcgagccacacgacatcgagaagcgcctggcctcttgaccgttcgtgtgccaggctcctcggtgccatgcaccactcagggataggagacctgatgtacgcgaatgtcccaccgcccgtgccgttccagcctcagcggaaggcggcaccgaacccgctgttcctcgtcctcgcgatcctgtcgtccctgccgactgcattcttcgtactctgcttcatcttgtccccctcgatgctgt

SEQ ID NO: 24713 - DNA, 260 bp, Unknown
  Description of Unknown: LeftRegion for integrase A281 sequence
ggtgctctccagaccgagatcaagttcccaggtgacgtagaggaacgcctagcctcttaaacgacgaaagccccctcccggttaagggagggggaatcgtgtcagaccaggttcaggttgagcgcggacgagtccacgtttcgagcggacgtacggttggtgccagtggtgtacgcctggacctcgatcacgtcaccgtcgtagaacctgtacggcccggtatccagggtcacagcccagccgttgttggagaacgagcc

SEQ ID NO: 24714 - DNA, 260 bp, Unknown
  Description of Unknown: LeftRegion for integrase A282 sequence
ggtgtcatcgtcgcgaactggatcgagccacacgacatcgagaagcgcctggcctcttgaccgttcgtgtgccaggctcctcggtgccatgcaccattcagggataggagacctgatgcacgcgaatgtcccaccgcccgtaccgttccagccgccgcagcgcaaggcggcaccgaatccgctgttcctcgtcctcgcgatcctgtccgcaatcccgaccgcattcttcgtgttcgcgctcatcgccgcgccgacgatgc

SEQ ID NO: 24715 - DNA, 260 bp, Unknown
  Description of Unknown: LeftRegion for integrase A283 sequence
ggtgctctccagaccgagatcaagttcccaggtgacgtagaggaacgcctagcctcttaaacgacgaaaaccccctcccggttaagggagggggaatcgtgtcaaaccaggttaacgctcagcgaggacgagtccacgtttcgagcagacgtacggttggtgccagtggtgtaagcctggacctccaccacatcgccgtcatagaaccggtacgggccggtctccagagtgaccgaccagccgttgttggagaacgagcc

SEQ ID NO: 24716 - DNA, 260 bp, Unknown
  Description of Unknown: LeftRegion for integrase A284 sequence
ggcgcactccagaccgagatcaagttcccaggggatgtagaggaacgcctagcctcgtaaacgacgaaagccccctcccggttaagggagggggaatcgtgtctagaccaggttcaggttgagcgcggacgagtccacgtttcgagcggacgtacggttggtgccagtggtgtaagcctggacctcgatcacgtcaccgtcgtagaacctgtacggcccggtatccagggtcactgaccagccgttgttggaaaacgagc

SEQ ID NO: 24717 - DNA, 260 bp, Unknown; identical to SEQ ID NO: 24711
  Description of Unknown: LeftRegion for integrase A285 sequence

SEQ ID NO: 24718 - DNA, 260 bp, Unknown
  Description of Unknown: LeftRegion for integrase A286 sequence
ggcgtcatcgtcgcgaactggatcgagccgcacgacatcgagaagcgcctggcttcctgacggtcgctatgccaggctgctgactcacagcatccatacagggataggagacctgatgcatgtgaacgtcccgcctgcccggaagccagcgcccaacccgctgttcctcaccctctcgatcctgtcgggattcccgaccgcgttcttcctgctgctcttcgtgaccggtggcacctcgatcttcgtcatgatcgggttcc

SEQ ID NO: 24719 - DNA, 260 bp, Unknown; identical to SEQ ID NO: 24713
  Description of Unknown: LeftRegion for integrase A287 sequence

SEQ ID NO: 24720 - DNA, 260 bp, Unknown
  Description of Unknown: LeftRegion for integrase A288 sequence
ggtgctctccagaccgagatcaagttcccaggtgacgtagaggaacgcctagcctcttaaacgacgaaaaccccctcccggttaagggagggggaatcgtgtcaaaccaggttaacgctcagcgaggacgagtccacgtttcgagcagacgtacggttggtgccagtggtgtaagcctggacctccaccacgtcaccgtcgtagaacctgtacgggccggtctccagagtgaccgaccagccgttgttggagaacgtacc

SEQ ID NO: 24721 - DNA, 260 bp, Unknown
  Description of Unknown: LeftRegion for integrase A289 sequence
ggcgcactccagaccgagatcaagttcccaggggatgtagaggaacgcctagcctcgtaaacgacgaaagccccctcccggttaggggagggggaatcgtgtctagatcaaggtcaggttgagcgcggacgagtccacgtttcgagcggacgtacggttggtgccagtggtgtacgcctggacctcgatcacgtcgccttcgtagaacctgtacggcccggtatccagggtcacagcccagccgttgttggagaacgagc

SEQ ID NO: 24722 - DNA, 260 bp, Unknown; identical to SEQ ID NO: 24710
  Description of Unknown: LeftRegion for integrase A290 sequence

SEQ ID NO: 24723 - DNA, 260 bp, Unknown
  Description of Unknown: LeftRegion for integrase A291 sequence
ggtgtgctggagtttcacctgaaggtccccgaggacgtgagagaacgcctctccgcttaaacgcaaaaaagccccctcccaagacatttcgtcctgagagggggtttcttcttagatcacgtcatatccgacctgcctcagagcttcatcgtgaggcgtgccggacagcagcgtatagagccggtccatgctcgtcgcaacgccgttctcgtcgcactccacgacgacggtaggcgaaacaaccaccgcgtgttgaccga

SEQ ID NO: 24724 - DNA, 260 bp, Unknown
  Description of Unknown: LeftRegion for integrase A292 sequence
ggtgtgctggagttccacctgaaggtccccgaggacgtgagagaacgcctctccgcttaaacgcaaaaaagccccctcccaagacatttcgtcctgagagggggtttcttcttagatcacgtcatatccgacctgcctcagagcttcatcgtgaggcgtgccggacagcagcgtatagagccggtccatgctcgtcgcaacgccgttctcgtcgcactccacgacgacggtaggcgaaacaaccaccgcgtgttgaccga

SEQ ID NO: 24725 - DNA, 260 bp, Unknown
  Description of Unknown: LeftRegion for integrase A293 sequence
ggtgtgctggagttccacctgaaggtccccgaggacgtgagagaacgcctctccgcgtaaacgcaaaaaagccccctcccaagacatttcgtcctgagagggggtttcttcttagatcacgtcatatccgacctgcctcagagcttcatcgtgaggcgtgccggacagcagcgtatagagccggtccatgctcgtcgcaacgccgttctcgtcgcactccacgacgacggtaggcgaaacaaccaccgcgtgttggccga

SEQ ID NO: 24726 - DNA, 260 bp, Unknown; identical to SEQ ID NO: 24724
  Description of Unknown: LeftRegion for integrase A294 sequence

SEQ ID NO: 24727 - DNA, 260 bp, Unknown; identical to SEQ ID NO: 24724
  Description of Unknown: LeftRegion for integrase A295 sequence

SEQ ID NO: 24728 - DNA, 260 bp, Unknown
  Description of Unknown: LeftRegion for integrase A296 sequence
ggtgtgctggagttccacctgaaggtccccgaggacgtgagagaacgcctctccgcgtaaacgcaaaaaagccccctcccaagacatttcgtcctgagagggggtttcttcttagatcacgtcatatccgacctgcctcagagcttcatcgtgaggcgtgccggacagcagcgtatagagccggtccatgctcgtcgcagcgccgttctcgtcgcactccacgacgacggtaggcgaaacaaccaccgcgtgttgaccga

SEQ ID NO: 24729 - DNA, 260 bp, Unknown; identical to SEQ ID NO: 24724
  Description of Unknown: LeftRegion for integrase A297 sequence

SEQ ID NO: 24730 - DNA, 260 bp, Unknown
  Description of Unknown: LeftRegion for integrase A298 sequence
ggtgtgctggagttccacctgaaggtccccgaggacgtgagagaacgcctctccgcttaaacgcaaaaaagccccctcccaagacatttcgtcatgagagggggtttcttcttagatcacgtcatatccgacctgcctcagagcttcatcgtgaggcgtgccggacagcagcgtatagagccggtccatgctcgtcgcaacgccgttctcgtcgcactccacgacgacggtaggcgaaacaaccaccgcgtgttggccga

SEQ ID NO: 24731 - DNA, 260 bp, Unknown
  Description of Unknown: LeftRegion for integrase A299 sequence
ggtgtgctggagttccacctgaaggtccccgaggacgtacgagaacgtctctccgcttaaacgcaaaaaggccccctcccaagacatttcgtcctgagagggggtttcttcttagatcacgtcatatccgacctgcctcagagcttcatcgtgaggcgtaccggacagcagcgtatagagccggtccatgctcgtcgcaacgccgttctcgtcgcactccacgacgacggtaggcgaaacaaccaccgcgtgttgaccga

SEQ ID NO: 24732 - DNA, 260 bp, Unknown
  Description of Unknown: LeftRegion for integrase A300 sequence
gagttaaagtcgagcaagccggtgatgagcttcgccatgttcgagtcctccacctcttaaacgcaaaaaagcccccctccaaggacattgagtcccgagaggggggtttctttgttatgcgagagagcggttgatcatgattgcggcgaaccacgtcttcgagccactggcatctccgatgagagtcccagcgttggtcgacccgagggctcccgcagcggtcagatcgcaagcggggcggatcttgtcaccggccacgc

SEQ ID NO: 24733 - DNA, 260 bp, Unknown
  Description of Unknown: LeftRegion for integrase A301 sequence
ccgcggcaaggtcgagaccaccgatccgtggtgatctaacctcgcataccaagaaaccccctacccggcccgcgaaggctaggtagggggctttttgtgtttcagtgggtatggccgtgatgacctgtgtcttcgtggtttgtccggtcaaccaccgcggtctcagtggtgtacggtacaaacccatgagagccctggtagtgatccgactgtcccgcgtcaccgatgctacgacctcaccggagcgtcagctggagtct

SEQ ID NO: 24734 - DNA, 260 bp, Unknown
  Description of Unknown: LeftRegion for integrase A302 sequence
gccgcggcaagaccgagaccaccgatccgtggtgatctaaccccgcataccaagaaaccccctacctagccttcgcgggccgggtagggggcttttcttgtttcagtgggtatggccgtgatgacctgtgtcttcgtggtttgtctggtcaaccaccgcggtctcagtggtgtacggtacaaaccatgcgagccctggtagtgatccgcctgtcccgtgtcaccgatgctacgacttcacccgagcgtcagctggagtct

SEQ ID NO: 24735 - DNA, 260 bp, Unknown; identical to SEQ ID NO: 24661
  Description of Unknown: LeftRegion for integrase A303 sequence

SEQ ID NO: 24736 - DNA, 260 bp, Unknown
  Description of Unknown: LeftRegion for integrase A304 sequence
cccagctcatcatcgagccgggggccttttgcgtacccgctacgcgccgaggagcgccgtctggagcgtatcgaggccgacgccgccgaggtccagggccgccttgtgaaaggccttctccgagaacgccgcgccctcccgggccgccatctcatcatgtattttttgccagatacgttgaccgaccttacgatagaaacatgaccacacgagccgccatctaccttcgtatctctgaggacaagacgggcgaggagaag

SEQ ID NO: 24737 - DNA, 260 bp, Unknown
  Description of Unknown: LeftRegion for integrase A305 sequence
ggtgccctccagttcaatctccgagtgccagccgatgcacaagagcgcctagcctcctaaacgacgaaagccccctcccggttaagggagggggaatcgtgtcagaccagggtcaggttgagcgcggacgaatccacgtttcgagcggacgtgcggttggtaccggtggtgtaagcctggacctcgaccacgtcaccttcgtagaacctgtacggcccactatccagggtcactgcccatccacctgtagtgaacgagcc

SEQ ID NO: 24738 - DNA, 260 bp, Unknown
  Description of Unknown: LeftRegion for integrase A306 sequence
ccgcggcaagaccgagaccaccgatccgtggtgatctaaccccgcataccaagaaaccccctacccggcccgcgaaggctaggtagggggctttttgtgtttcagtggatatgaccgtgatgacctgtgtcttcgtggtttgtctggtcaaccaccgcggtctcagtggtgtacggtacaaacccatgagagccctggtagtgatccgcctgtcccgcgtcaccgatgctacgacttcgccggagcgtcagctggagtct

SEQ ID NO: 24739 - DNA, 260 bp, Unknown
  Description of Unknown: LeftRegion for integrase A307 sequence
ccgcggcaagaccgagaccaccgatccgtggtgatctaaccccgcataccaagaaaccccctacccggcccgcgaaggctaggtagggggctttttgtgtttcagtgggtgtggccgtgatgacctgtgtcttcgtggtttgtctggtcaaccaccgcggtctcagtggtgtacggtacaaacccatgagagccctggtagtgatccgactgtcccgcgttaccgatgctacgacctcaccggagcgtcagctggagtct

SEQ ID NO: 24740 - DNA, 260 bp, Unknown
  Description of Unknown: LeftRegion for integrase A308 sequence
ggggtcttacacttcgacctacgaataccggaagacatcttagaaaggatggcggggtgagcgctccagggtggtatccagatcctgctgggtcagggggccagaggtactgggacggccaacggtgggcaccgcaagctgttcacgcccagcaggtggtaacagggccgaaccacgttctgcacctgatccttaccatcctgacgttctggttcttcggtggctggatctgggtgtggctcgtcgtggcgctgtccaac

SEQ ID NO: 24741 - DNA, 260 bp, Unknown
  Description of Unknown: LeftRegion for integrase A309 sequence
ggggtcttacacttcgacctacgaataccggaagacatcttagaaaggatgagcgcgtgacagcgcctatcgccacgcctggttggtacccagacccttcgggctctggaggagaacggtactgggacggacaagcctggacggtgactcgaccggccccgcaaccgaagagaatcacggtcaactacgggttcgcgctgctcgcggtgttctcgctgctcggaacgttgtttttcggcttacctctggtaagcaacgga

SEQ ID NO: 24742 - DNA, 260 bp, Unknown
  Description of Unknown: LeftRegion for integrase A310 sequence
ggggtcttacacttcgacctacgaataccggaagacatcttagaaaggatgagcgcgtgacagcgcctatcgccacgcctggttggtacccagacccttcgggctctggaggagaacggtactgggacggacaagcctggacggtgactcgaccggccccgcaaccgaagagaatcacggtcaactacgggttcgcgctgctcgcggtgttctcgctgctcggaacgttgtttttcggcataccgctggtaagcaacgga

SEQ ID NO: 24743 - DNA, 260 bp, Unknown; identical to SEQ ID NO: 24742
  Description of Unknown: LeftRegion for integrase A311 sequence

SEQ ID NO: 24744 - DNA, 260 bp, Unknown
  Description of Unknown: LeftRegion for integrase A312 sequence
ggggtcttacacttcgacctacgaataccggaagacatcttagaaaggatggcggggtgagcgctccagggtggtatccagatcctgctgggtcagggggccagaggtactgggacggccaacggtgggcaccgcaagctgttcacgcccagcaggtggtaacagggccgaaccacgttctgcacctgatccttaccatcctgacgttctggttcttcggtggctagatctgggtgtggctcgtcgtggcgctgtccaac

SEQ ID NO: 24745 - DNA, 260 bp, Unknown; identical to SEQ ID NO: 24742
  Description of Unknown: LeftRegion for integrase A313 sequence

SEQ ID NO: 24746 - DNA, 260 bp, Unknown; identical to SEQ ID NO: 24742
  Description of Unknown: LeftRegion for integrase A314 sequence

SEQ ID NO: 24747 - DNA, 260 bp, Unknown
  Description of Unknown: LeftRegion for integrase A315 sequence
ggtgccgtcacgttccacttccacatcccggaagacctccacgagcgcatagcgtcctgatacacgaaaagccccctcccgcaatgggagggggtctttctgtgtttagaggtctccagcttcgatccagtcgatgccaggggacgaatactggatctggaagatctggtcgttggactcgatacagaagccccagcttcgtcgggtctcaccaacggggacgatccccgtggagtcggtccaggagatgaacgacgagc

SEQ ID NO: 24748 - DNA, 260 bp, Unknown; identical to SEQ ID NO: 24572
  Description of Unknown: LeftRegion for integrase A316 sequence

SEQ ID NO: 24749 - DNA, 260 bp, Unknown
  Description of Unknown: LeftRegion for integrase A317 sequence
ggcgtcatcgtcgcgaactggatcgagccacacgacatcgagaagcgcctggcttcctgacggtcgctatgccaggctgctgactcacagcatccatacagggataggagacctgatgcatgtgaacgtcccgccgcccggattcgtcccgcccgcacggaaacccagccccaatccgctgttcctcaccctctcgattctgtcggggttcccggccgcactgttcctgatcctctttgtgtccggtgcgacctcgatcc

SEQ ID NO: 24750 - DNA, 260 bp, Unknown
  Description of Unknown: LeftRegion for integrase A318 sequence
ggtgtcatcgttgcgaactggatcgagccacacgacatcgagaagcgcctggcgtcctgaccacttctatgccaggctgctcgctcacagcatccatacagggataggagacctgatgcatgtgaacgtcccgccgcccggattcgtcccgcccgcacggaaacccagccccaatccgctgttcctcaccctctcgatcctgtcggggttcccggccgcgctgttcctgatcctcttcgtctccggtgcgacctcggtcc

SEQ ID NO: 24751 - DNA, 260 bp, Unknown; identical to SEQ ID NO: 24702
  Description of Unknown: LeftRegion for integrase A319 sequence

SEQ ID NO: 24752 - DNA, 260 bp, Unknown
  Description of Unknown: LeftRegion for integrase A320 sequence
aaaatgttaaagggggcgaatttaaatactttgaatggtatcgcaattcaaattggcgatgctttttacatcgtttacgatgagaaattgagtgatggcgagaagaaaaaaattattgatcatttacaaaacaaaatcaaatcaaacaaatttgattatatacttaccgacaatgatatcattgaaagtgaggaaagaaaatgcaaagtgaattagaagagcgaaagaaagcatttgtatatgttagagtatctacttat

SEQ ID NO: 24753 - DNA, 260 bp, Unknown
  Description of Unknown: LeftRegion for integrase A321 sequence
tttttatagagggggttcttttttgtttttgtttttactagatgttgttgtgtattgtttaccccctcctaaatttttgagatttatatatttttattttgacgactgtagaaagtcgtctttttacattggtaatagattgccagtatatccggagggctatatactgtagtcataagaatttagtaagaggatgaggtgtgtacgaattgaaatatgctgtatatgtacgtgtatcaacggatagagacgaacaagtt

SEQ ID NO: 24754 - DNA, 260 bp, Unknown
  Description of Unknown: LeftRegion for integrase A322 sequence
gaacagattatcgtttataaagataagtatattgaagtaaaattcaaacagtttgaataatacgtgtttttactaatccatttaatgcggggtggggctaccaatcaatataagtatttttacttatagaacgaactgctctgatagatccagagcagttcttttttatttacaatatctttatcatttcttcacttttagctatatcatccggactaacaaattcaagattttgttttatatcaactccagcatcgtga

SEQ ID NO: 24755 - DNA, 260 bp, Unknown
  Description of Unknown: LeftRegion for integrase A323 sequence
ggggcgttgacgttcgatctcgttgtccccgaggatctccgggaacgaatcaccctgtaacgcaaaaaaggcccccctcctgggatcaccaggagaggggccaattgctcattcgactgtgtagccgagttcggccagggcatcctcgtgggatgtccctggcgctgccttgtgtacaggggtcaggctggtagcgattccttcgtcgttgcactcgaagatgaccgtgggtcgtacgacgtgcttgagggcctgtcggc

SEQ ID NO: 24756 - DNA, 260 bp, Unknown
  Description of Unknown: LeftRegion for integrase A324 sequence
ggggcattgtcgttcgatctcgttgtgccagaggatcttctggcacgaatgtccgtgtaacgcaaaaaagccccctcccggggatcacccaggagggggccattgctcattcgactgtgtagccgaggacggcgagggcatcctcgtgggatgtccctgccgggaatcggttgatcggagtgaggctggtagcgataccctcctcgttgcactcgaagacgaccgtgggtcgcacgatctccttcagcgcctgcctgccg

SEQ ID NO: 24757 - DNA, 260 bp, Unknown
  Description of Unknown: LeftRegion for integrase A325 sequence
ttatgcggggcggcgatattaaggtcaatactgcccttgaactcgctcgtgagcggttcggcggcagtcttcgctcattatatcgttggtggaagctgatcgaacaccaagatcgcgccgattggttggctgctgttgctccgtccttttcggctgatgaaagccgttcaccttgcgatgacgcggcttgggattttctcatgtcagactatttgcgctcggagaagccgagcttctccgcctgctatcggcgcatggtg

SEQ ID NO: 24758 - DNA, 260 bp, Unknown
  Description of Unknown: LeftRegion for integrase A326 sequence
ggagcgttctacttcgatctcgttgtcccagaggatctccgggagcgaatgtccctctaacgcaaaaaagccccctcccggggatcacccaggagggggccattgcttactcgacggtgtagccgagaacggcgagggcatcctcgtgggatgtccctgccgggaatctgttgatcggggtcaagctggtagcgataccctcttcgttgcaggcgaagacgaccgtgggtcgaacgacctccttcagcgcctgcctgccg

SEQ ID NO: 24759 - DNA, 260 bp, Unknown
  Description of Unknown: LeftRegion for integrase A327 sequence
gccaagctgccgcttggccacaacatcgacatctactggcataagcccagcgatgactgagatccggttgacctgagtgtcagtcaagggtgggctgtcagcgttctcgcgacgtatggcagcccactcttcttctgtcagaccgagactggccatcagatctcctccatcttcaggttcggccagcagtaatgcacgaaccccatctcgtcctggaccacgacctcgccgtcgtcgctgaagctcagcagcgtgccggt

SEQ ID NO: 24760 - DNA, 260 bp, Unknown
  Description of Unknown: LeftRegion for integrase A328 sequence
gccaagctgccgcttggccacaacatcgacatctactggcataagcccagcgatgactgagatccggttgacctgagcgtcagtcaagggtgggctgtcagcgttctcgcgacgtatggcagcccactcttcttctgtcagaccgagactggccatcagatctcctccatcttcaggttcggccagcagtaatgcacgaaccccatctcgtcctggaccacgacctcgccgacgaacggggcctcagtgatcgccatcgt

SEQ ID NO: 24761 - DNA, 89 bp, Unknown
  Description of Unknown: LeftRegion for integrase A329 sequence
tcaaaggttgatgttactgctgataatgtagatatcatatttaaattccaactcgcttaattgcgagtttttatttcgtttatttcaat

SEQ ID NO: 24762 - DNA, 260 bp, Unknown
  Description of Unknown: LeftRegion for integrase A330 sequence
gatcttgtggaaaaggtggagtgtgactgtggagagataaatgtgattctgaaaatctaacgaccatttctgccagtatttttaaagattgtggggacattttagttatgaactggaatgtcccaccattttacaccactttaggcgaagcgtatcgactagatacaaagaagatgagcatcgctaggttttgtagctggtgtgataggtacaccagctaaattagacaaaacataatgaattggggcagacacactctc

SEQ ID NO: 24763 - DNA, 260 bp, Unknown
  Description of Unknown: LeftRegion for integrase A331 sequence
ctgtcttcgcagaaaaagcaaataaaattagaagtacttttgaaggttatttttatagaattgttgaaagtaaatttgtaatggagagaaggaaagaatgtcgaggattattgttcgattggttaaatgaataatataaaattgcccacagggaaaaatatatatataatttaattatcatattcttagtaaataagtgggtgaaaattttgaaatacgctgtttatgtacgagtttcaacggatagagatgagcaagtt

SEQ ID NO: 24764 - DNA, 260 bp, Unknown
  Description of Unknown: LeftRegion for integrase A332 sequence
gtcttcgcagaaaaagcaaataaaattagaagtacttttgaaggttatttttatagaattgttgaaagtaaatttgtaatggagagaaggaaagaatgtcgaggattattgttcgattggttaaatgaataatataaaattgcccacagggaaaaatatatatatataatttaattatcatattcttagtaaataagtgggtgaaaattttgaaatacgctgtttatgtacgagtttcaacggatagagatgagcaagtt

SEQ ID NO: 24765 - DNA, 260 bp, Unknown
  Description of Unknown: LeftRegion for integrase A333 sequence
gccaaactgcccctcggtcacgccatcaagatccactggcatgatcccagcaacgactgagatccggttcacctgacggtcactgaggggtgggctggcggcgacttcgcgtcgtactgccgcccactcctcttccgtcccaccgaggctcactggatctccaccgtttcgaggttcggccagcagtagtgcgggatcccgctgtcgtcctgcaccacgacctcaccgtcaacggtgaagctgagcagcttgcccaccgc

SEQ ID NO: 24766 - DNA, 260 bp, Unknown
  Description of Unknown: LeftRegion for integrase A334 sequence
gccaaattgcccctgggtcacgccatcaagatccactggcatgatcccagcaatgactgagatccggttgatctgacggtcattgaggggtgggctggcggcgacctcgcgtcgtactgccgcccactcctcttccgtcccgccgaggctcatgggatggccaccgtttcgaggttcggccagcagtagtgcgggatcccgccgtcatcctgcacaacgacctcgccgtcagtggtgaagctgagcagcttgcccaccgc

SEQ ID NO: 24767 - DNA, 260 bp, Unknown
  Description of Unknown: LeftRegion for integrase A335 sequence
gccaaactgcccctcggtcacgccatcaagatccactggcatgatcccagcaacgactgagatccggttcacctgacggtcactgaggggtgggctggcggcgacctcgcgtcgtactgccgcccactcctcttccgtcccaccgaggctcactggatttccaccgtctcgaggttcggccagcagtagtgcgggatcccactgtcgtcctgcaccacgacctcaccgtcaacggtgaagctgagcagctttcccaccgc

SEQ ID NO: 24768 - DNA, 260 bp, Unknown
  Description of Unknown: LeftRegion for integrase A336 sequence
gaaaagatagaagttgcaagtgacggatatatcaagattatagataaagatatattatgacatgtataatccatacttgtatggaaaggttcggcttcccgtggggctaccatgcgtaatccatacttgtatggaaaacggcagtgctgaagttattaatcggcactgcctttattttaaattacaatatctttatcatttcttcacttttagctatatcatccggactaacaaattcaagattttgttttatatcaact

SEQ ID NO: 24769 - DNA, 260 bp, Unknown
  Description of Unknown: LeftRegion for integrase A337 sequence
ctgtcatcttgcctgttcaccgccctgtctggctaacggagttccttcaaactccgcgcatccgaagtttgacacaagtacgtactccagcgctagtctctccccactggaacgagggggttgaggtgctgtcacgcgacctgccactagcagggtactgccggatctcagacgcagacctagcagacatcagaagagccttgaggaacggagacatcaccccagaggaagccgcggaactggagaggaagggggtcctc

SEQ ID NO: 24770 - DNA, 260 bp, Unknown
  Description of Unknown: LeftRegion for integrase A338 sequence
ctatttttgcagaaaaagcaaataaaattaaaaatacttttgaaggttatttttatagaattgttgaaagtaaatttgtagtcgagagaaggaaagaatgtcgaggattattgtttgattggttaaatgaataacataaaattgcccacagggaaaaatttatatataatttaattatcatattcttagtaaataagtgggtggaaattttgaagtacgctgtttatgtacgagtttcaacggatagggatgagcaagtt

SEQ ID NO: 24771 - DNA, 60 bp, Unknown
  Description of Unknown: LeftRegion for integrase A339 sequence
acgttaataaagaaagttgatgtcacaaaagaggatatcaaaattatttttgatttttag

SEQ ID NO: 24772 - DNA, 60 bp, Unknown
  Description of Unknown: LeftRegion for integrase A340 sequence
gtttttgtaaaatcaggatatattaaaatagagtggaaaattcctttcaaaaaagcgtga

SEQ ID NO: 24773 - DNA, 60 bp, Unknown
  Description of Unknown: LeftRegion for integrase A341 sequence
gtttttgtaaaatcaggatatattaaaatagagtggaaaattcctttcaaaaaaatgtga

SEQ ID NO: 24774 - DNA, 60 bp, Unknown
  Description of Unknown: LeftRegion for integrase A342 sequence
gtttttgtcaaatccgggcatatcaaaattgagtggaaaatacctttcaaaaaagcgtga

SEQ ID NO: 24775 - DNA, 60 bp, Unknown
  Description of Unknown: LeftRegion for integrase A343 sequence
acgttaataaaaaaagttgatgtcacaaaagaggatatcaaaattatttttgatttttag

SEQ ID NO: 24776 - DNA, 60 bp, Unknown
  Description of Unknown: LeftRegion for integrase A344 sequence
accttaatcaacaaggtacaggtcacggatgaggacattgctatcaagtggaagatataa

SEQ ID NO: 24777 - DNA, 260 bp, Unknown
  Description of Unknown: LeftRegion for integrase A345 sequence
gcatttgttcgtaaggtttctgttacatcagacaatatagaaatatcttggaacttttagcgtacaaaacaaacatatttactatacgctatttcaatgaagtatatttaatatatttaaataggaagaaaaaaagacccaaccagaaattaatctgattgggtcttttagcatacttgtgctggttgagggcaaatagatatgcttgctattttatgatgcttcaccaacaccttgacgattataataaataattttct

SEQ ID NO: 24778 - DNA, 60 bp, Unknown
  Description of Unknown: LeftRegion for integrase A346 sequence
tcattgatagataagattttagtcaagaaaggttttattaaaatcctatggaaaatttag

SEQ ID NO: 24779 - DNA, 260 bp, Unknown
  Description of Unknown: LeftRegion for integrase A347 sequence
acacttatcgaaagaataaaaccaactgtttccaaaatggaaataattgcaaacaaaaaaagccccacgctctcaaaactttggcgagtctgagcgtgaggcatgtgacaggaaaagattttcatggagataacctctcatgatgtcttttcttgtacccattttatcattttttaggaaattttgaaagaggtactactatgataacaacaaataaagtagctatatatgtcagggtatcgacgacaaaccaggttgag

SEQ ID NO: 24780 - DNA, 260 bp, Unknown; identical to SEQ ID NO: 23749
  Description of Unknown: LeftRegion for integrase A348 sequence

SEQ ID NO: 24781 - DNA, 260 bp, Unknown; identical to SEQ ID NO: 23749
  Description of Unknown: LeftRegion for integrase A349 sequence

SEQ ID NO: 24782 - DNA, 260 bp, Unknown
  Description of Unknown: LeftRegion for integrase A350 sequence
taatacggctacttttctttttatctagcaactgtttccattttggaaacaactcaaaaaagccccacgctcagaagtttgcagaccgagagcgtgaggctagcaattacaagaaaaacttttcaaaagatattaccttttgagatgttttcttgtacccattttatcattttttaggaaattttgaaagaggtactactatgataacaacaaataaagtagctatatatgtcagggtatcgacgacaaaccaggttgag

SEQ ID NO: 24783 - DNA, 260 bp, Unknown; identical to SEQ ID NO: 23752
  Description of Unknown: LeftRegion for integrase A351 sequence

SEQ ID NO: 24784 - DNA, 260 bp, Unknown
  Description of Unknown: LeftRegion for integrase A352 sequence
taatacggctacttttctttttatctagcaactgtttccattttggaaacaactcaaaaaagccccacgctcagaagtttgcagaccgagagcgtgaggctagcaattacaagaaaaacttttcaaaagatattaccttttgagatgttttcttgtacccattttatcattttttaggaaattttgaaagaggtactactatgatagcaacaaataaagtagctatatatgtcagggtgtccactacctcacaagttgag

SEQ ID NO: 24785 - DNA, 260 bp, Unknown
  Description of Unknown: LeftRegion for integrase A353 sequence
caccatcctcgttcacgccactcttcgaggtgggggcgttcggtgcccaacgtggtgtcgtcgccgtgcccgggatagacgaccgtgcggtcgtcgaagcgatcaaacaccttcgtttcaaggtcgttcatcagcgagttgaactgatcagggtgtgttgtccggccaggaccgcccgggaataccgtaggctctcagctgtgaatacctcggggggcgatcgggtagcgctgtacgcacgcatttcgcaggacacaagc

SEQ ID NO: 24786 - DNA, 260 bp, Unknown
  Description of Unknown: LeftRegion for integrase A354 sequence
caccagccgcgttggcgccattcgtcgaggctcggacgctcggcacccagagtggtgtcgtcgccgtgcccgggatagacgaccgtgcggtcgtcgaagcgatcaaacaccttcgcttcaaggtcgttcatcagcgagttgaactgatcagggtgtgttgtccggccaggaccgcccgggaataccgtaggctctcagccgtgaatacctcggggggcgatcgggtagcgctgtacgcacgcatttcgcaggacacaagc

SEQ ID NO: 24787 - DNA, 260 bp, Unknown; identical to SEQ ID NO: 24376
  Description of Unknown: LeftRegion for integrase A355 sequence

SEQ ID NO: 24788 - DNA, 260 bp, Unknown
  Description of Unknown: LeftRegion for integrase A356 sequence
ggggtcttacacttcgacctacgaataccggacgacatcttagaaaggatggcggggtgagtgctccagggtggtatcccgaccctgctgggtcagggggtcagaggtattgggacggccaacggtgggcaccgcaggctgttcacgcccagcaagtggtgacaggaccgaaccacgtgctgcacctgatcctcaccatcctgacgttctggttcttcggtggttggatctgggtgtggctgatcgtggcgctgtccaac

SEQ ID NO: 24789 - DNA, 60 bp, Unknown
  Description of Unknown: LeftRegion for integrase A357 sequence
aggcttataaacaaggttaaggtgacagctgaggacattgttatcaattggaaaatataa

SEQ ID NO: 24790 - DNA, 60 bp, Unknown; identical to SEQ ID NO: 24789
  Description of Unknown: LeftRegion for integrase A358 sequence

SEQ ID NO: 24791 - DNA, 60 bp, Unknown
  Description of Unknown: LeftRegion for integrase A359 sequence
gggcttataaacaaggttcaggtaacagctgaggacattgttatcaattggaaaatataa

SEQ ID NO: 24792 - DNA, 260 bp, Unknown
  Description of Unknown: LeftRegion for integrase A360 sequence
cagaaaaagcaaataaaattaaaaatacttttgaaggttatttttatagaattgttgaaagtaaatttgtagtcgagagaaggaaagaatgtcgaggattattgtttgattggttaaatgaataacataaaattgcccacagggaaaaatttatatataatttaattatcatattcttagtaaataagtgggtgaaaattttgaagtacgctgtttatgtacgagtttcaacggatagggatgagcaagtttcatctgtt

SEQ ID NO: 24793 - DNA, 260 bp, Unknown
  Description of Unknown: LeftRegion for integrase A361 sequence
ggggtcttacacttcgacctacgaataccggacgacatcttagaaaggatgagcgcgtgacagcgcctatcgccacgcctggttggtacccagacccttcgggctctggaggagaacggtactgggacggacaaacctggacggtgactcgaccggctccgcaaccgaagagaatcacggtcaactacgggttcgcgctgctcgcggtgttctcgctgctcggaacgttgtttttcggaataccgctggtaagcaacgga

SEQ ID NO: 24794 - DNA, 260 bp, Unknown
  Description of Unknown: LeftRegion for integrase A362 sequence
acacttaccgaaagagtaaaaacaactgtttctaaaatagatatagttgcaaacaaaaaaagccccacgctcagaagtttggcgaccgagagcatgaggctagtacttacaagaaaaacttttcaaaagatattaccttttgagatgttttcttgtacccattttatcattttttaggaaattttgaaagaggtactactatgataacaacaaataaagtagctatatatgtcagggtgtccactacctcacaagttgag

SEQ ID NO: 24795 - DNA, 260 bp, Unknown
  Description of Unknown: LeftRegion for integrase A363 sequence
gccaacgtggccttaattcttcaacaacacttatcgaaagaataaaaccaactgtttccaaaatggaaataattgcaaacaaaaaaagccccacgctctcaaaactttggcgagtctgagcgtgaggcaacagtatagtaaaaggcattaaatggcccgttttactatacccattttatcaaaaagggggtataaaagcaatgaaaacaacgaataaggtggcaatatatgtcagagtgtctaccacttcccaggtagag

SEQ ID NO: 24796 - DNA, 260 bp, Unknown
  Description of Unknown: LeftRegion for integrase A364 sequence
taatacggctacttttctttttatctagcaactgtttccattttggaaacaactcaaaaaagccccacgctcagaagtttgcagaccgagagcgtgaggctagcaattacaagaaaaacttttcaaaagatattaccttttgagatgttttcttgtacccattttatcattttttaggaaattttgaaagaggtactactatgatagcaacaaataaagtagctatatatgtcagggtttcgacgacaaaccaggttgag

SEQ ID NO: 24797 - DNA, 260 bp, Unknown
  Description of Unknown: LeftRegion for integrase A365 sequence
caccagccgcgttggcgccactcgtcgaggctcggacgttcagtgcccagagtggtgtcgtcgccgtgcccgggatagacgaccgtgcggtcgtcgaagcgatcaaacaccttcgcttcaaggtcgttcatcagcgagttgaactgatcagggtgtgttgtccggccaggaccgcccgggaataccgtaggctctcagccgtgaatacctccgggggcgatcgggtagcgctgtacgcacgcatttcgcaggacacaagc

SEQ ID NO: 24798 - DNA, 60 bp, Unknown
  Description of Unknown: LeftRegion for integrase A366 sequence
ggcttaattaacaaggttcaggttacagctgacaaggttattattaagtggaaaatataa

SEQ ID NO: 24799 - DNA, 60 bp, Unknown; identical to SEQ ID NO: 24778
  Description of Unknown: LeftRegion for integrase A367 sequence

SEQ ID NO: 24800 - DNA, 60 bp, Unknown
  Description of Unknown: LeftRegion for integrase A368 sequence
gggcttataaacaaggtgcaggtaacagctgaggacattgttatcaagtggaaaatatag

SEQ ID NO: 24801 - DNA, 60 bp, Unknown; identical to SEQ ID NO: 24798
  Description of Unknown: LeftRegion for integrase A369 sequence

SEQ ID NO: 24802 - DNA, 260 bp, Unknown
  Description of Unknown: LeftRegion for integrase A370 sequence
accaggccaaatagatggagaaaacggaaagtgtggattgagcgtgtggaattcttgtaattctacacattcttttttattacgtttggattaccggaagtatcaatacgacttgtgtaggctttcgtctattattcaatattccgcgctttgtttattattcctgctaaaagaaaaaggcggatcactccgccttcttttcttctttcattgttttcaaacggcgctttcccacatctcttctagcgcttcctcaacaa

SEQ ID NO: 24803 - DNA, 260 bp, Unknown
  Description of Unknown: LeftRegion for integrase A371 sequence
cggaaaaagcaaataaaattaaaaatacttttgaaggttatttttatagaattgttgaaagtaaatttgtagtcgagagaaggaaagaatgtcgaggattattgtttgattggttaaatgaataatataaaattgcccacagggaaaaatatatatataatttaattatcatattcttagtaaataagtgggtggaaattttgaagtacgctgtttatgtacgagtttcaacggatagagatgagcaagtttcatctgtt

SEQ ID NO: 24804 - DNA, 260 bp, Unknown
  Description of Unknown: LeftRegion for integrase A372 sequence
tgacggcaatgctctagctagccaaaaacttgacggaacaatgaaagtcaaggttaaataagacaataaaaaaagccctataatctccctcgccaaagtttgattatagagctagcaccacagaaagagaaatgtaaactggaaacagccttacatgttcttttctgtacccattttatcaaaaacgaggtacaaatacaatgacaatgcataaagttgctatctatgtccgagtatctaccacgtcgcaggctgacgag

SEQ ID NO: 24805 - skipped

SEQ ID NO: 24806 - DNA, 260 bp, Unknown
  Description of Unknown: LeftRegion for integrase A374 sequence
agcttaattaatagaatctatgtcaaagaaaatgaaattcagattgaatggaaaaactgataattttagttaatagcatttcaagcaatgtatctaaatatcttagtttaaataagaagaaatctctttaataacatcatcaaatatctcaatacttaccacctcatgaggctgtatcttctcgccatctaatacaaaatcaaatatctttccattctttctaacaacattcacggtgtcctcaaaccaccccttagctt

SEQ ID NO: 24807 - DNA, 260 bp, Unknown
  Description of Unknown: LeftRegion for integrase A375 sequence
agacattccaagaggagattcgatagcaacaaaagattatgtgaattcaaaaattaacgaagttagactttggcttattcttacaatgattggtataggtgtttcgttgattaaactttttatcatgtaatattataagcccatctaagggcttttcttataaacctaaaaccgaacatacattctgaaaggagaaaaaaatgaaagcagcactatatattcgtgtaagtacgcaagaacaggctatcgaagggtattct

SEQ ID NO: 24808 - DNA, 260 bp, Unknown; identical to SEQ ID NO: 24725
  Description of Unknown: LeftRegion for integrase A376 sequence

SEQ ID NO: 24809 - DNA, 60 bp, Unknown
  Description of Unknown: LeftRegion for integrase A377 sequence
aacctaatagataaagtgtttgttaaacctgggaatatcgagatcaagtggagaatttga

SEQ ID NO: 24810 - DNA, 60 bp, Unknown
  Description of Unknown: LeftRegion for integrase A378 sequence
aacctgatagataaggtatttgttaaacctggcatcattgatataaattggaggatttaa

SEQ ID NO: 24811 - DNA, 260 bp, Unknown
  Description of Unknown: LeftRegion for integrase A379 sequence
cgctatgatcaaaccggaaagacagtaaccattgatagaatcaactttaaaaaagattagtacttctataacctacgaaccttcattagttatgtaagtactaattaataacaaacttcatgcctgccttagtgcaggcctcttttcatctaccacaacattcacatctcgatccactatgattagtatctttaccacataaaccgcagaaagcaatataccatcttctaaatttcattaataacaaaccccttccacat

SEQ ID NO: 24812 - DNA, 260 bp, Unknown
  Description of Unknown: LeftRegion for integrase A380 sequence
gtattcggaaggtacccccaattgcccgttgttgaaataaccaactataaacttaaataattttttattatatgggttacttatcgtatcaatggctcctcatgcatatgataagtaatctattatttaaaatgtttctgtttaatctctttatctattcttttatccacatattttaaaaactcccatatcaccctagtattgtatccttttctctttaactcatccaggtattccaataaaactagtttttctatcac

SEQ ID NO: 24813 - DNA, 60 bp, Unknown
  Description of Unknown: LeftRegion for integrase A381 sequence
gcgcttattaacaaagttcaagtgactgctgacagtatcaaaattttatggaaaatttaa

SEQ ID NO: 24814 - DNA, 60 bp, Unknown
  Description of Unknown: LeftRegion for integrase A382 sequence
agcttaattgacaaggtttttgtaacaaaagaggacatggaaattttatttaaaaaatag

SEQ ID NO: 24815 - DNA, 60 bp, Unknown
  Description of Unknown: LeftRegion for integrase A383 sequence
atgatagttgatagggttgaattgacaaaagacaagtacattatccattacaatttttaa

SEQ ID NO: 24816 - DNA, 260 bp, Unknown
  Description of Unknown: LeftRegion for integrase A384 sequence
ggctcactgaagttcgacttccgggtccccgaggacatcgagaagagactctccgcgtgaacgcaaaaaagccccctcccaaggccgtagccctgagagggggtttctttgtctagccgactctcaccatcgagaaccaggagttggacgcattcgcgtcaccgaggatgttcacgtcaccgtcggtcttgagaccgggctgcaccgtcgcgccagcggagaggtagtactgcaccccgtcaccgccgtaggcgatgtcc

SEQ ID NO: 24817 - DNA, 260 bp, Unknown
  Description of Unknown: LeftRegion for integrase A385 sequence
gtcggcctggacgcctgggagttcacccccgtccacctggaccagatctgcgacttgatcttgtccgccggacggcgtacataatttgctagcactcgccaaatgtgagtgccagcacactttctacctgcggtttcatctgtccatataccgggtacaaagatagtcacgaattggctacactcaggggtatgggagagatggaagccaccaccaaagccgctgtgtatctgcggcagtccatcgacaggactggcgag

SEQ ID NO: 24818 - DNA, 60 bp, Unknown
  Description of Unknown: LeftRegion for integrase A386 sequence
attgtggtatcaagggttgaagtaactaagaatggcattgatatttttttcaatttttaa

SEQ ID NO: 24819 - DNA, 60 bp, Unknown
  Description of Unknown: LeftRegion for integrase A387 sequence
ctgcttgttcaacgtgttaaagttgatagagataatatagacattcattggactttttaa

SEQ ID NO: 24820 - DNA, 260 bp, Unknown
  Description of Unknown: LeftRegion for integrase A388 sequence
ctacatgacctcgaagctcgtcgacacggggcggggcgagcagtgggtgtacggatacatctgcgggaagccgagcatcgacaggcggacctccgcctgtgaagatcacctggaaccccggtattcgccgttccccaccctctcgcggcgtgtaccctgaagctgtaacagtcgaacgagcggtacagcttgggggtaccatgcatttcatgcaaaaccgcgggtcagggccggatgccgagtgcgacatctacgtccgc

SEQ ID NO: 24821 - DNA, 260 bp, Unknown
  Description of Unknown: LeftRegion for integrase A389 sequence
aacagcgggggagcgtgggagtttgagtttcgtatccccgatgcggtgaagtcgctctaaacgcaaaaagcccccctcgggaccgaagtcccaaggggggtttctcttactcctcttccgggtcgaccggggtttccggtacccagtcgcgcagagtccagtcgtccaccgtcccaccggagtgggtgttgaacacatccacctgactgcgctcgatacggacgccgccgtactggtactcgcggccgtgcttcaccgtc

SEQ ID NO: 24822 - DNA, 260 bp, Unknown
  Description of Unknown: LeftRegion for integrase A390 sequence
caccgagagatcggcctcttcggcgagccgttcctgcgtccatccctcgcggcgccgatggttgcggacgttctcctggagcgacatggaatcacctcgcaaccagcgtactgtgaacggcgaatcccgtgcggcgcttggcctggagcatgtaccctgaagctgtaacagccgaacgagcggtacaccttgggggtaccatgtccttcatgcaaaatcgcgggtcagggcaggtcgcagagtgcgacatctacgtccgc

SEQ ID NO: 24823 - DNA, 260 bp, Unknown
  Description of Unknown: LeftRegion for integrase A391 sequence
gggcgagagctcggcctcctcggcgagcctctcttgggtccaccccgcccggcgccgatggctgcggacgttctcttggagcgacatcgaatcacctcccaaccagcgtactctgatgggggaatcccgtgcgcggactgggatcgagcatgtaccctcaagctgtaacactcgaaccagcggtacagcttgggggtaccatgcgaggcatgaacaaccgtgggtcagggtctgaagcagaggccgatctctatctccgc

SEQ ID NO: 24824 - DNA, 260 bp, Unknown
  Description of Unknown: LeftRegion for integrase A392 sequence
catattgagtttgagaagaaagacaataaagccaggattttagacattcatttttattagggtttatataaagtataagcacgaaaactttacacaaatacgaaaaaatcttcaggcccactaatgttagacggcgctaaaaataaatggtttcacaaaaatgttcgttttcaaaaaaatcatttgaaacaaaccaaaaaaagccctcttactcggggcttgaatatagttaaaataaaaagccctgtcagggggctttt

SEQ ID NO: 24825 - DNA, 260 bp, Unknown
  Description of Unknown: LeftRegion for integrase A393 sequence
gatgaatataaacgtggtacaggtgcatctagaaaaataattattgtatctgctaaataactaaatgtcttttataggcagaggtacacctacacctataaaagacattcgttttaaacagcattacctatctgttttaacacatttagaattaatggtgatatttgaattaatacatatcccaatccagcattttgaattgtggaccatgctttttcactattccctaacatgaagaagaaacatccaccgacaattat

SEQ ID NO: 24826 - DNA, 260 bp, Unknown
  Description of Unknown: LeftRegion for integrase A394 sequence
gtcagcctcttcggcgagccgttcctgcgtccatcccttgcgtcgccgatggctgcggacgttctcttggagcgacatcgaatcacctcccaaccagcgtactgtgaacggggaatcccgtgcggcgcttggcctggagcgtgtaccctcaagctgtatcagtcgaacgagcggtacaccttgggggtaccatgcgaagcatgaatcatcgcgggtccgggccagatgccgagaccgacatctacgtgcgcatcagccag

SEQ ID NO: 24827 - DNA, 260 bp, Unknown
  Description of Unknown: LeftRegion for integrase A395 sequence
atcggcctcttcggcgagccgttcctgcgtccatccctcgcggcgccgatggtttcggacgttctcttggagcgacatggaatcacctcccaaccagcgtactgtgaacggggaatcccgtgtgtggactggcctcgggcatgtaccctcaagctgtaacagccgaacgagcggtacaccttgggggtaccatgtccttcatgcaaaatcgcgggtcagggcaagtcgccgagtgcgacatctacgtccgcatcagccag

SEQ ID NO: 24828 - DNA, 260 bp, Unknown
  Description of Unknown: LeftRegion for integrase A396 sequence
atcggcctcttcggcgagccgttcctgcgtccatccctcgcggcgccgatggttgcggacgttctcctggagcgacatggaatcacctcgcaaccagcgtactgtgaacggcgaatcccgtgcggcgcttggcctggagcatgtaccctgaagctgtaacagccgaacgagcggtacaccttgggggtaccatgccattcatgcaaaatcgcgggtcagggcaggtcgcagagtgcgacatctacgtccgcatcagccag

SEQ ID NO: 24829 - DNA, 260 bp, Unknown; identical to SEQ ID NO: 24390
  Description of Unknown: LeftRegion for integrase A397 sequence

SEQ ID NO: 24830 - DNA, 60 bp, Unknown
  Description of Unknown: LeftRegion for integrase A398 sequence
tctgtgataaaagagatagttgtcacgaaagatgatatgacgataacgctagacttttaa

SEQ ID NO: 24831 - DNA, 260 bp, Unknown
  Description of Unknown: LeftRegion for integrase A399 sequence
ctacgtcgacgagagcggcaaggtccgccgctcgtaaccccctcctccctcaaggcccccgtgctcacctccgagcatgggggcctttttgcgccctcatcagggcaatcgggaatatccgcccgatataaccgccccctgcatggctagtaacgcccgggctattgtgctgacgatggtctgaccgttactatcagcctatgagcccagacaagcccctccgcgccgtcggctacgtccgcctctccaaggccaccgac

SEQ ID NO: 24832 - DNA, 260 bp, Unknown
  Description of Unknown: LeftRegion for integrase A400 sequence
tgggtaccgtgaagatggcggcggctcacctacagcgccgatcaggctgcaacagggactcgtctcggtggcacccgagaagccctgcgggtgggccgtcgtcctcctgaccaggcacttctctgtagacccattatgcgccatgcgcccacaagatgtagactcactctacgaagttgagcagctacggagggagcgcagtgggcaagcgggcggtcatctacacgcgagtgtcgcgagacgacacgggcgagggtcag

SEQ ID NO: 24833 - DNA, 260 bp, Unknown
  Description of Unknown: LeftRegion for integrase A401 sequence
tgctcctggctccagccggagcgcctacgatggcttcggacgttctcttgcagcgacgacatcgaatcacctcctggtcagggtatgccctccggggaaacgatgaagcccccgcgcgaagcgggggcgagggttcggagaatgttccccaaagcgataccacttgaagcagtggtactgcttgtgggtacactcctcgggtgatgaatcgaggggggcccaccatacgggccgacatctacgtccgaatcagcctggac

SEQ ID NO: 24834 - DNA, 260 bp, Unknown
  Description of Unknown: LeftRegion for integrase A402 sequence
aagcctatgcccggctatcaggcccgcgccgtcctcgcccgcaagcaggaggccgacgtcgacaacctctgggactaccgcctcgtcgaagtcccaacgaaccccgccaactaagcaaaagccccccggatctccgaggggcttttcttatgtcctctttgggcactcatgcgccctcatgagtgcctaaagggtatatggtgatccccatgaaaatcatcggctatgtgcgcctctcccgagcctcccgcgaggagtcg

SEQ ID NO: 24835 - DNA, 260 bp, Unknown
  Description of Unknown: LeftRegion for integrase A403 sequence
tgcgaggctggctccggctacaaggtccggatcacccgccagtggctcgacgagtacggcgcccccaagtgcccctgccacgacgaggtgatggtcgaggcgtaaggcgccaaacgtaaggccctcggagagatccgggggcctttcctatgtcctctttagacactcatgcgccctcgtgagtgcctaaaggggatatgatgggcgccatgagaatcctcggctacgtccgcctctccagagcctcccgcgaggagtcc

SEQ ID NO: 24836 - DNA, 60 bp, Unknown
  Description of Unknown: LeftRegion for integrase A404 sequence
aagcttgttaaatacattgtcgtcgatgaagaaagaattgatatatttttgaatttttaa

SEQ ID NO: 24837 - DNA, 60 bp, Unknown
  Description of Unknown: LeftRegion for integrase A405 sequence
aaggttgtcaaagagattctggtaaaaaccggcagcatagatttaatgctagatatatag

SEQ ID NO: 24838 - DNA, 60 bp, Unknown
  Description of Unknown: LeftRegion for integrase A406 sequence
acattaattaaacgtgtagaagttaaacgtgatgaaatcaacgttatttttaaattgtaa

SEQ ID NO: 24839 - DNA, 60 bp, Unknown; identical to SEQ ID NO: 24838
  Description of Unknown: LeftRegion for integrase A407 sequence

SEQ ID NO: 24840 - DNA, 260 bp, Unknown
  Description of Unknown: LeftRegion for integrase A408 sequence
cagcgtactgttggatcattacccgaaattgcattcactaggacgaaagttctatcttaatagttgatgggtaacaccaatatagggtgccctatcatgttgttacccatcacatataaacagcgctgttatgcggtttgtagaatcactctaaatcccggcgcgtaaaaactccacatgttacccctttttcctctgcatacttcattagttttctttgacgaaattctgagttagtataaaagatcaacatagtgtct

SEQ ID NO: 24841 - DNA, 260 bp, Unknown
  Description of Unknown: LeftRegion for integrase A409 sequence
cccttggagagacggccgattgggcatagggatcggtcgcggggcgccttactgatgtgaacgctaccacgggcgcctgtcgatcactcggcaggcgccttttgtcgtatacggtatattttcgcaggtcagagcgttggaatttacatgatcgattatgaacatagaaacacttccgtgttcgataaccctcatgtaatttgggtggcgtgcgcgccatcatttacaaccgtgtcagcagcgaccccactggtagaggc

SEQ ID NO: 24842 - DNA, 60 bp, Unknown
  Description of Unknown: LeftRegion for integrase A410 sequence
caattgatagatagagtcgaggttactatggataacatcgatattatttttaagttttaa

SEQ ID NO: 24843 - DNA, 60 bp, Unknown; identical to SEQ ID NO: 24842
  Description of Unknown: LeftRegion for integrase A411 sequence

SEQ ID NO: 24844 - DNA, 60 bp, Unknown; identical to SEQ ID NO: 24842
  Description of Unknown: LeftRegion for integrase A412 sequence

SEQ ID NO: 24845 - DNA, 60 bp, Unknown; identical to SEQ ID NO: 24842
  Description of Unknown: LeftRegion for integrase A413 sequence

SEQ ID NO: 24846 - DNA, 260 bp, Unknown
  Description of Unknown: LeftRegion for integrase A414 sequence
cttgctgactcatgccccgacgcttgcgtacgtcgcggagctgcttaccaatgtcggcactcatgagtcaagactacggcgcgtaagctggtgagcacatggaaaagcccccgcttcctggcgggggcgagggtccgaggcatgttccccaaagcgataccacttgaagcagtggtactgcttgtgggtacactctgcgggtgatgaatcgaggggggcccactgtacgggccgacatctacgtccgaatcagcctggac

SEQ ID NO: 24847 - DNA, 260 bp, Unknown
  Description of Unknown: LeftRegion for integrase A415 sequence
gagcagaagcgcgagctgacgctcggtgccctgcgccacgcgcggcggaagcggcgagagcagtccacgtaggtacgacagagccccctgctcctgacctggagagggggctctgttgcgctctgacctgcgggttcgtgctcaggagttgcctgctgggccattcagtacggacctactgattggtgtagcatgcacccatgacgatcagtggagggaccgacgaggccctgttctacttccgcatctcgctcgatgcg

SEQ ID NO: 24848 - DNA, 260 bp, Unknown
  Description of Unknown: LeftRegion for integrase A416 sequence
gggttaccgtcgagatggcggcggctcgtcgcagcgccgatcaggttgcaacagggacttgttctcggtggcacccgagaagccctgtaggcgggccgtcgtccgtctgaccaggcaacacgctgtagatccatcgtgcgccatgcgcccacaaggtgtagcctcactctacgaggtcgaccacctacggagggagagcagtgagcaagcgagcggtcatctacacccgagtgtcccgcgacgacacaggcgaggggcag

SEQ ID NO: 24849 - DNA, 260 bp, Unknown
  Description of Unknown: LeftRegion for integrase A417 sequence
gggttaccgtcgagatggcggcggctcgtcgcagcgccgatcaggttgcaacagggacttgttctcggtggcacccgagaagccctgtaggcgggccgtcgtccgtctgaccaggcaacacgctgtagacccatcgtgcgccatgcgcccacaaggtgtagcctcactctacgaggtcgaccacctacggagggagagcagtgagcaagcgagcggtcatctacacccgagtgtcccgcgatgacacgggcgagggacag

SEQ ID NO: 24850 - DNA, 260 bp, Unknown
  Description of Unknown: LeftRegion for integrase A418 sequence
gcggaggagtacaaggaccacccagactacgcgacccggtgggaggccccgtgagccccacgacgctgccagcccagcggcggggccgtcctgggtgcatccggctgtacctccgtctatcgcgcgccacggaggagtccacgtccatcgttcggcaggaatcggccggacgggatgaggcgggccgacggtggcccggcgtgcccatcgtcgtgtacgtggatgagggcgtgtccggtggcgcggagctggacaagcgg

SEQ ID NO: 24851 - DNA, 260 bp, Unknown
  Description of Unknown: LeftRegion for integrase A419 sequence
cagcggtgccgtcgtcgccgctgctgcagctggtggtgaggagagcgatcgcggctgccgtgcagagggccgggaggtagcgtgtcatgtttccgcagcgtattcgacgtgcgccttggggaccgggctacgcgcgtgatccgtggtggagcaagtgcgacacatctcccatttttgcggttacgccgctcattgtcggaatgggatcgtactgtcagttcatgcgagcgatcatctactgccgcgtctcatccgatccg

SEQ ID NO: 24852 - DNA, 260 bp, Unknown
  Description of Unknown: LeftRegion for integrase A420 sequence
cgcccagatcctggtcgacggggagcgcgtcgggcaggcgtcggtcctgaccccgggcatggagtacgcggaccgcctgaagatcaagggctggcactagccgccccgccctggaccccctggccgcccggctgggggtcctgttgcttcaactcccctttagctactcacgcgcccccgtgagtggctaatatgtacatatgcgagttatcggttacgtccggctatcccgggcatcacgagaagaatcgacgtcggtc

SEQ ID NO: 24853 - DNA, 60 bp, Unknown
  Description of Unknown: LeftRegion for integrase A421 sequence
atgcttatatacaaagtagatgtcacgaaagaagacatcaatattatttttgatttttag

SEQ ID NO: 24854 - DNA, 260 bp, Unknown
  Description of Unknown: LeftRegion for integrase A422 sequence
tgtcatgggcctgagcctggacgacccgagcttgacgagctcgcagcgtgagcgccgacgcctggtccagaaggccatcgctcgacgccgcgtgatccactgatccgcctctgacctgcgacttctctgtgtacctgttgtgcgccatgcgcccacatgtggcacgatgggtacacaccccgtcactgagaggagccacgttgagcaagcgcgccgtcatctacacccgcgtgagtcgagacgacacaggagagggtcga

SEQ ID NO: 24855 - DNA, 260 bp, Unknown
  Description of Unknown: LeftRegion for integrase A423 sequence
ctaaagtagctaaagaaaatggctatacaggtattcctaacggtgatgttggaggagtccctactcccgacgaatattattctaatgatcaattagatccagatacaggattacctatggaagatgcagatccacatgatgttgaataatttttagggtagtctatctacccttattattttttacttttttaaggagtgatgtattatgaacgtagctatttacgttcgtgtcaggtgagttcctatgagcaagcaacg

SEQ ID NO: 24856 - DNA, 260 bp, Unknown
  Description of Unknown: LeftRegion for integrase A424 sequence
ggaacggctgattaggcttagggatcggccgcggggcgccttactggattaaggctaccacaggtgcccgtcgatgatccggcgggcacctttcgtcatatacggtgcattaacgcaggtcaggcagcacgattgcacatgtggggtaagcgacatggaaacatttctgtgttccataaccgtcatgtagtttgggtttcgtgcgcgcgatcatctacaaccgtgtcagcagcgatcccactggtagggggcgttccgtc

SEQ ID NO: 24857 - DNA, 260 bp, Unknown
  Description of Unknown: LeftRegion for integrase A425 sequence
agacggccgattgggcatagggatcggtcgcggggcgccttactgatgtgaacgctaccacgggcgcctgtcgatcactcggcaggcgccttttgttgtatacggtatattttcgcaggtcagagcgttggaatttacatgatcggttatgaacatagaaacacttccgtgttcgataaccctcatgtaatttgggtggcgtgcgcgccatcatttacaaccgtgtcagcagcgaccccactggtagaggccgttccgtc

SEQ ID NO: 24858 - DNA, 260 bp, Unknown
  Description of Unknown: LeftRegion for integrase A426 sequence
agacggccgattgggcatagggatcggtcgcggggcgccttactgatgtgaacgctaccacgggcgcctgtcgatcactcggcaggcgcctttcgtcgtatacggtatattttcgcaggtcagagccttgggatttacatgatcggttatgaacatagaaacatttccgtgttcgataaccctcatgtaatttgggtggcgtgcgcgccatcatttacaaccgtgtcagcagcgaccccactggtagaggccgttctgtc

SEQ ID NO: 24859 - DNA, 260 bp, Unknown
  Description of Unknown: LeftRegion for integrase A427 sequence
agacggccgattgggcatagggatcggtcgcggggcgccttactgatgtgaacgctaccacgggcgcctgtcgatcactcggcaggcgccttttgtcctatgcggtatattttcgcaggtcagagccttgggatttacatgatcggttatgaacatagaaacacttccgtgttcgataaccctcatgtaatttgggtggcgtgcgcgccatcatttacaaccgtgtcagcagcgaccccactggtagaggccgttctgtc

SEQ ID NO: 24860 - DNA, 260 bp, Unknown
  Description of Unknown: LeftRegion for integrase A428 sequence
agacggccgattgggcatagggatcggtcgcggggcgccttactgatgtgaacgctaccacgggcgcctgtcgatcactcggcaggcgccttttgtcgtatacggtatattttcgcaggtcagagccttggaatttacatgatcggttatgaacatagaaacacttccgtgttcgataaccctcatgtaatttgggtggcgtgcgcgccatcatttacaaccgtgtcagcagcgaccccactggtagaggccgttctgtc

SEQ ID NO: 24861 - DNA, 260 bp, Unknown
  Description of Unknown: LeftRegion for integrase A429 sequence
tgcgcggccggcgcgccggccagctgcgcggcggtggtgatcccgccggccgaaagtttcagcatgcgcgcaggttaacctaccagtgtggtcctgccgccggttgcggtcgagacgctgtgagcagtctgaatgtacatgacgaccaaacaccgaagaaacatttccgtgttcgataaccctcatgtaatttgggtggcgtgcgcgccatcatttacaaccgtgtcagcagcgaccccactggtagaggccgttctgtc

SEQ ID NO: 24862 - DNA, 260 bp, Unknown
  Description of Unknown: LeftRegion for integrase A430 sequence
gggacggctgattaggcttagggatcggccgcggggcgccttacggttgtgaaggctaccacaggtgcccgtcgatgattcggcgggcacctttttcgtatacggtgcattaacgcaggtcagacggcacgatcgtacatgtggggtaagcggcatggaaacatttccgtgtttgataacggtcatgtagtttggggtgtgtgcgcgcgatcatctacaaccgtgtcagcagtgatccgactggtagggggcgttccgtc

SEQ ID NO: 24863 - DNA, 260 bp, Unknown
  Description of Unknown: LeftRegion for integrase A431 sequence
tcgtcgccagcgcagctggtggtgaagagcgcgagcgcagctgccgtgcagaggacggggaggtaacgtgtcatgtttccgcagcgtattcgacgtgcgcctcgcggacagggctacgcgcgtgatccgcggatgtagaaagtgcgacacatctcccattcttgcggttaaaccgctaattgtcggaatgggactgtactgtgcggcgcatgcgagcgatcatctactgccgcgtctcatccgatccgcacgcccgcggc

SEQ ID NO: 24864 - DNA, 260 bp, Unknown
  Description of Unknown: LeftRegion for integrase A432 sequence
gcattaataaataaagtagagctaacgaacgaagatatgaaaatagagtggaacatatagccccactctacctattcacctattcaattaaagttagtgcacaaacaacttctacatgcctagtttttcattgttcaacagtattctctaatagaaagaacctgttattttattttaacatagattacaaagaagccccttatctatatagaagctggggctttttgtaatttgattgtatttttctaaaaatgaaacta

SEQ ID NO: 24865 - DNA, 233 bp, Unknown
  Description of Unknown: LeftRegion for integrase A433 sequence
agcatccagttcgagaaacaggacgggactgttcaaatattggacgtaaacttttattgagtacctttacgaaggcttaggtgtagatctcggtggtcgccgtatcattaaaaaaaaaaaaaaagaagacaaagtgcgggtccgaacacacaaaaaattacaaaaagtacacaaacgtgagtactaataacacaacagacacatgagacctaagaacagtcaagaaaaggacg

SEQ ID NO: 24866 - DNA, 260 bp, Unknown
  Description of Unknown: LeftRegion for integrase A434 sequence
tatgtcgaagtcagccccgggcggccccgagcgaaagtcgtcgtccggccccgatggtgagactcggcactagtcactagcatgactgtgctctagtctcaccatcggctgatagaccagaatcacgcggcgccagcgaggaaagcagccaccgtgtggttcgcatgccggtcgtggttatgcctggcacggtcgtatcgtgcggtgatcctcgggtccgagtggcgggcagccacctggacgtcgcgcagcggaacgcc

SEQ ID NO: 24867 - DNA, 260 bp, Unknown
  Description of Unknown: LeftRegion for integrase A435 sequence
cagaagttggcaaggggtttggggatgttcgttatcaatccgttatcgggttggtcgtgccagccccttgatcaacaggcctttgggcaggtcaggccgtacttccggcgtcgggaggccttgtgtccatttcgggcagattctggggaaagtgaccgtgaatctcggtaccaacttctggcgctcgtacgctggtcggcatgagtagccgttatgagggccgccgggcggtcatctacacccgagtgtcgaaggaccgc

SEQ ID NO: 24868 - DNA, 260 bp, Unknown
  Description of Unknown: LeftRegion for integrase A436 sequence
gagtttgttgaacgtatagaactatttgatgatgaggtaattattaaatataaattttaggtacatagtgttatttacactaataaacaaaatcatatacctaaaatattacatttatacaaacctatagacaatacgaacatgcattcggtataattgtattactaggaggccgatattatgaaaactaattatgtaggagtagttgaaaagattagaatgttaagtatgtacccaaaaatgctagttcgattctcatt

SEQ ID NO: 24869 - DNA, 260 bp, Unknown
  Description of Unknown: LeftRegion for integrase A437 sequence
gtaatatacagagaaaaagggaagttcaagaagattacactggactatactttaaaatgaccccaacctgtgcaagagttaacttcgcgcatgcaaacttaacttttatacaggttagggacgatgtattatttccaacgataataatctaaacaaattaaaacatcaaggcggatcactccgccttcttttcttcttttctacgcttcccacatttcttcgagtgcctcctcaacaaacagatatggataaaaaaagag

SEQ ID NO: 24870 - DNA, 82 bp, Unknown
  Description of Unknown: LeftRegion for integrase A438 sequence
ttaaataaagaaggtaatattaatacagttaaaatcaatgaaatacatttcaaatattaatgagtgttatgtaactagaaag

SEQ ID NO: 24871 - DNA, 260 bp, Unknown
  Description of Unknown: LeftRegion for integrase A439 sequence
gctgcagctcgtggtgaggagcgcgagcgcagctgccgtgcagagggctgggaggtagcgtgtcatatttccgcagcgtattcgacgtgcgcctcgcggacaccgctacgcgcgcgatccgcggcgaagctaatgcgacacatctcccattctcgccgttacaccgctcattgtcggaatgggactgtactgtgcggcgcatgcgagcgatcatctactgccgcgtctcatccgatccgcacgcccgcggcaagtccgtc

SEQ ID NO: 24872 - DNA, 260 bp, Unknown
  Description of Unknown: LeftRegion for integrase A440 sequence
cgctgccgcacccggcaacgaggacgatcgcggctgccgtgcagagggctgggaggtagcgtgtcatgtttccgcagcgtattcgacgtgcgcctcggagacagggctacgcgcgtgatccgtggtggagccagtgcgacacatatcccattcttgcggttacgccgctcattgtcggaatgggatcgtactgtcagtgcatgcgagcgatcatctactgccgcgtctcatccgatccgcacgcccgcggcaagtccgtc

SEQ ID NO: 24873 - DNA, 260 bp, Unknown
  Description of Unknown: LeftRegion for integrase A441 sequence
agcagcggccccgatgacggccgcgacgagtttctgtttcacggcgctgagagtaccgggcggcggcccgcacgaggtgctaatcggctggtcggggcgtgaaacggtgccgcggtaacctatgccacaaagtgatgcaaggctgggcatgggtcaattaatggcctaagttggagggcgtgaaaaaatcgccccgtgtcgtggtctacctgcggcaatccgaagatcgggccgacgacggcctcggcgtcgatcgccag

SEQ ID NO: 24874 - DNA, 260 bp, Unknown
  Description of Unknown: LeftRegion for integrase A442 sequence
gctgcagctcgtggtgaggagcgtgagcgcagcggccgtgcagaggacggggaggtagcgtgtcatgtttccgcagcgtattcgacgtgcgcctcgcggacagagctacgcgcgcgatccgcggcgaagctagtgcaatacatctcccattctcgccgttacaccgctcattgtcggaatgggactgtactgtgcggcgcatgcgagcgatcatctactgccgcgtctcatccgatccgcacgcccgcggcaagtccgtg

SEQ ID NO: 24875 - DNA, 260 bp, Unknown
  Description of Unknown: LeftRegion for integrase A443 sequence
tgctgcagctggtggtgaggagcgcgagcgcagctgccgtgcagagggctgggaggtagcgtgtcatgtttgcgcagcgtattcgacgtacgcctcccggacagggctacgagcctgattcgcggtgaagcagttcgacacatctcccattcttgcggttaaaccgctcattgtcggaatgggactgtactgtgcggcgcatgcgagcgatcatctactgccgcgtctcatctgatccgcacgcgcgcggcaagtccgtc

SEQ ID NO: 24876 - DNA, 260 bp, Unknown
  Description of Unknown: LeftRegion for integrase A444 sequence
tattccgaccagattcatatgacaatcgtttctttgattacacagttccttatgaagatgctacgaatataaaaatacacggtaaagtagtaatgtacgtagctacattaaactaatacctagatcaattaaatctttagcgctaggaatttaatggacagcccgtacagctgtcctctttttaaaaggagagataaatagtgactgttggaatttatataagagtaagcactgaggaacaagtgcgagatggtttctct

SEQ ID NO: 24877 - DNA, 260 bp, Unknown
  Description of Unknown: LeftRegion for integrase A445 sequence
aatatacaactcaaaaaaataaatgaaaaaaatattgttgtaaacataacattttattagtatttatgttatgtttacacatataaagttctcatatatacaaaaaacaacaaaacaaaagagcacagcgtgtataagtagtgttggtagcactcttataccgtccacctgattgagccaggtaaacacttgctatactctcatgagtcattgtacatcatgcagggtctattaagcaacgtttacttaattggtgacgt

SEQ ID NO: 24878 - DNA, 260 bp, Unknown
  Description of Unknown: LeftRegion for integrase A446 sequence
ctgcagctggtggcgaggagcgcgagcacggcggccgtgcagaggactgggcggtagcgtgtcatgtttccgcagcgtattcgacgtgcgcgttccggacagggctacgcgcctgatccgcggtgaagcaaagtgcgacacatctcccattcttgcggttaaaccgctcattgtcggaatgggactgtactgtccggcgcatgcgagcgatcatctactgccgcgtctcatctgatccgcacgcccgcggcaagtccgtc

SEQ ID NO: 24879 - DNA, 260 bp, Unknown
  Description of Unknown: LeftRegion for integrase A447 sequence
atctacgtcgacgtcacctggcccaacggcttcaccatttccgggctcggaaccggcgagggcgacgcgttgaagttcatcgagctggtgaaccggctcgcccagcgctgacgtggtctcctgacgtgcgggctgagacgcatctcccattcttgctgttaaaccgctaactgtcggaatgggactgtactgtccggcgcatgcgagcgatcatctactgccgcgtctcatccgacccgcacgcgcgcggtaagtccgtc

SEQ ID NO: 24880 - DNA, 260 bp, Unknown
  Description of Unknown: LeftRegion for integrase A448 sequence
gctgcagctcgtggtgaggagcgtgagcgcagcggccgtgcagaggacggggaggtagcgtgtcatgtttccgcagcgtattcgacgtgcgcctcgcggacagcgctacgcgcgcgatccgcggcgaagctagtgcaatacatctcccattcgcgccgttacaccgctcattgtcggaatgggactgtactgtgcggcgcatgcgagcgatcatctactgccgcgtctcatccgatccgcacgcccgcggcaagtccgtg

SEQ ID NO: 24881 - DNA, 260 bp, Unknown
  Description of Unknown: LeftRegion for integrase A449 sequence
gaacatctacgtcgacgtcacttggcccaacggcttcaccatttccgggctcgggaccggcgagggcgacgcgttgaagttcgtcgagctcgtgaacaggctcgcccagctctgataagcgctcggcggcggctgcgacacatctcccattcttgcggtttatccgctaattgtctgaatgggactgtactgtccggcgcatgcgagcgatcatctactgccgcgtctcatccgatccccacgcccgcggcaaatccgtc

SEQ ID NO: 24882 - DNA, 260 bp, Unknown
  Description of Unknown: LeftRegion for integrase A450 sequence
taaatttacggggttattaaagtgtcagcattgtggttcgactttaaagagacaagtttcttacaagaaaaaaattgtttggtgctgttccaaatacataaaagaaggcaaagtaacttgtcaggggatgcgagtgccagaagtagatatttcaaattgggagataacctcacctgttacagtaatagaaagggatagaaatggggaaaagtattacagttataccggccaagaaagtgcagaccagtgttcttcatcag

SEQ ID NO: 24883 - DNA, 260 bp, Unknown
  Description of Unknown: LeftRegion for integrase A451 sequence
taaatttacggggttattaaagtgtcagcattgtggttcgactttaaagcgacaagtttcttacaagaaaaaaattgtttggtgctgttccaaatacattaaagagggaaaagcagcttgtcaagggatgcgtgtgccagaagtagatatctcaaattggacagtaacctcgccagtaaaagtgatagaaagggatagagatggggaaaagtattacagttattccggccaagaaagtgcagaacatcgttcaacatcag

SEQ ID NO: 24884 - DNA, 260 bp, Unknown
  Description of Unknown: LeftRegion for integrase A452 sequence
tggcgtgatgggtgagacgtcgcagaacatctacgtcgacatcacttggccgaacggttacaccatgtccgggctggggaccggcgaaggcgacgccctgaagttcgtcgagctggtcaaccggctcgccgctcgcgacacataaaccttttcgacagtaataccgccaattgtcggatagggatagtacggttcgccccatgcgggcgatcatctactgccgagtctcgtcagatcccaacgcgcggggaaagtctgtg

SEQ ID NO: 24885 - DNA, 260 bp, Unknown
  Description of Unknown: LeftRegion for integrase A453 sequence
tcgaacaggtcgaccgagaagtcgtcgccgccgtcgctgcccgcccagtagagcgcgattcggtaggcggacggcattcgtcgtcccggccgaagtggaagcacgtccacgaattccctccttcgatctgaccagagatatatatcccttttcgacggtatgacctaaaactgtcagatagcgattgtagggtttagcacatgcgagcgatcatctactgccgcgtttcgtccgatccgaagatgcgcgaacgaagcgtg

SEQ ID NO: 24886 - DNA, 260 bp, Unknown
  Description of Unknown: LeftRegion for integrase A454 sequence
taaatttacggggttattaaagtgtcagcattgtggttcgactctaaagagacaagtttcttacaagaaaaaaattgtttggtgctgttccaaatacattaaggaaggaaaagcagcttgtcaagggatgcgtgtgccagaagtagatatctcaaattggacagtaacctcgccagtaaaagtgatagaaagggatagagatggggaaaagtattacagttattccggccaagaaagtgcagaccagcgttcaacatcag

SEQ ID NO: 24887 - DNA, 260 bp, Unknown
  Description of Unknown: LeftRegion for integrase A455 sequence
aaaggaattaaagggaagcgccagaactcattgaagattacgggtatagagttttattaattggaagttcggaataactatgcagatacctgatacacacttccaacaaaaataaccacactcctaaattaataggtggtgtggttttgttgattgtaggggtataaaaataaccgcattattaaagatacggttactctgttatctgtaaatataatagtagtttaaaaattagtcgttattgttagttctttttttat

SEQ ID NO: 24888 - DNA, 260 bp, Unknown
  Description of Unknown: LeftRegion for integrase A456 sequence
aaaggaattaaagggaagcgccagaactcattgaagattacgggtatagagttttattaattggaagttcggaataactatgcagatacctgatacacacttccaacaaaaacaaccacactcctaaattaataggtggtgtggttttgttgtattaaaaaaccgaatttaatatatctatgttttatttaacatgaatcgccttgttatttaaaaaatacacctattataataccgataatacttacaacagtaggtgc

SEQ ID NO: 24889 - DNA, 260 bp, Unknown
  Description of Unknown: LeftRegion for integrase A457 sequence
agaggaattaaagggaagcgccagaactcattgaggattacaggtatagagttttattaattggaagttcggaataactatcctgatacctgatacacacttccaataaaaattaaccacactcctaaattaataggtggtgtggttttgttggttgtgtggggataaaaataaccgcatcagttaagatgcggttatctagcaagggccacgtatttataaatacgtttagaatctcttcggcaactttgctatagaca

SEQ ID NO: 24890 - DNA, 89 bp, Unknown
  Description of Unknown: LeftRegion for integrase A458 sequence
aagaacgacaataaaaagaaacgacgttcccttaaaataaaggatatcgagttctattaatattttatggaagtatgcacaattaatca

SEQ ID NO: 24891 - DNA, 89 bp, Unknown
  Description of Unknown: LeftRegion for integrase A459 sequence
aagaatgataacaaaaagaaacgtcgttcccttaaaataaaggatatcgagttctactgatattttatggaagtatgcacaattaatca

SEQ ID NO: 24892 - DNA, 260 bp, Unknown
  Description of Unknown: LeftRegion for integrase A460 sequence
accattacagtagagatacaagggaacgacgttgttatcactgatcacaccctcctttaagtgttttgcctaaaggagcatttacacttgaaagtgctatgttaggcaaaaaaagagcgccctataatggacgctctcgcttatttgaatgatccccaataatctacacgttttccgtttgcactctcaccagttgccatataaccatatgttccgtttgctcgtggttgtctgatccaaacatgaccgtctaactcaat

SEQ ID NO: 24893 - DNA, 260 bp, Unknown
  Description of Unknown: LeftRegion for integrase A461 sequence
ataaatgtggtaaagtctgggaacaaaaaatttaaaaagaaaaccgcccggtgcttccaacaccgaacggcttcatataaaattataccgacatgtgccgatacatacttcttacaaaatcattgtatcatcctggcactaaactgtaaactggtatagtgttatttttatactcatttttagaaagaaggtttaatacaatgaaaaaagtcaagcgcacagccctttatattagagtctctactactgagcaggcccaa

SEQ ID NO: 24894 - DNA, 260 bp, Unknown
  Description of Unknown: LeftRegion for integrase A462 sequence
ttgatcggcgagttcgcgcccaggagcatcggcgccgagctgctggaggtcgaggcatgaaggacgggacgctcgagaccttcgtgccgctgaccctgcggcggcgcggcgtgcgccggctggttcagcaccaggccgaggaccgggacgcgcacgacagcacgctcatcgaagggatggcgcgggccttccactggcaacggctgctggacagcggcgcgatgcccagcggctcggccatcgcgcgtgccgaagggctg

SEQ ID NO: 24895 - DNA, 68 bp, Unknown
  Description of Unknown: LeftRegion for integrase A463 sequence
cacgttaaaagagggaaaactaagcattctatcaaaataaaaaacattgatttttattaacttctttt

SEQ ID NO: 24896 - DNA, 260 bp, Unknown
  Description of Unknown: LeftRegion for integrase A464 sequence
gattatgtaaaacttaaaaacaggcattctatcaaaataaatgatatagaattttattaacttatgtacggaagtatagacactcgattaatatttaatgtgtatacttccgtaaaaataaccacgctcataaagaacgtggtagcaaaatttataaaggagtaaaaaaagattaaattgtatgtaatttaattgtagcacagaccgtgtaaccaatgtagtgttaaactatgttttttaatatcaatctaacatctaca

SEQ ID NO: 24897 - DNA, 260 bp, Unknown
  Description of Unknown: LeftRegion for integrase A465 sequence
gagtatgtaaagcttaaaaacaggcattctattaaaataaacgatatagaattttattaacgtatgtacggaagtatagacactcgattaatatttaatgtgtatacttccgtattttttatagaacccgtctgattctacgggtttagattatccgtgtcgaaatcgaggcgtttaaaataaaaaaccaccacactcaaaagaatgtggtagcaaaaattataaaggagtaaaaaagattaaattgtatgtaatttaat

SEQ ID NO: 24898 - DNA, 260 bp, Unknown
  Description of Unknown: LeftRegion for integrase A466 sequence
gattatgtaaaacttaaaaacaggcattctatcaaaataaatgatatagaattttattaacttatgtacggaagtatagacactcgattaatatttaatgtgtatacttccgtaaaaataaccacgctcataaagaacgtggtagcaaaatttataaaggagtaaaaaaaagattaaattgtatgtaatttaattgtagcacagaccgtgtaaccaatgtagtgttaaactatgttttttaatatcaatctaacatctac

SEQ ID NO: 24899 - DNA, 260 bp, Unknown
  Description of Unknown: LeftRegion for integrase A467 sequence
aggaacaaatagaatgggcagaagaaaatggtaagttagaagacaactaataaaattgtctactaacgatttaaatgacgaagcattgatagtgtataaattacttcttattaattaataatatctaggttggttatagtttaatattttttggggtagcacgactacccttattatttttttaccttttttagggagtgatgaattatgaacgtagctatttacgttcgtgtcaggtcagtacattagaacaaaaagaa

SEQ ID NO: 24900 - DNA, 260 bp, Unknown
  Description of Unknown: LeftRegion for integrase A468 sequence
gattatgtaaaacttaaaaacaggcattctatcaaaataaatgatatagaattttattaacttatgtacggaagtatagacactcgattaatatttaatgtgtatacttccgtaaaaataaccacgctcataaagaacgtggtagcaaaatttataaaggagtaaaaaagattaaattgtatgtaatttaattgtagcacagaccgtgtaaccaatgtagtgttaaactatgtttttttaatatcaatctaacatctaca

SEQ ID NO: 24901 - DNA, 260 bp, Unknown; identical to SEQ ID NO: 24899
  Description of Unknown: LeftRegion for integrase A469 sequence

SEQ ID NO: 24902 - DNA, 260 bp, Unknown
  Description of Unknown: LeftRegion for integrase A470 sequence
ttcaggaacaaatagaatgggcagaagaaaatggtaagttagaagacaactaataagatcgtctactaacgatttaaatgacgaaacattgatagtgtataaattacttcttattaattaataatatctaggatggttataatttaatatttttagggtagcatgcctacccttattatttttttactttttagggagtgatgaattatgaacgtagctatttacgttcgtgtcaggtcagtacattagaacaaaaagaa

SEQ ID NO: 24903 - DNA, 260 bp, Unknown
  Description of Unknown: LeftRegion for integrase A471 sequence
tagacgaccgtgcggtcgtcgaagcgatcaaacaccttcgtttcaaggtcgttcatcagcgagttgaactgatcagggtgtgttgtccggccaggaccgcccgggaataccgtaggctctcagctgtgaatacctcggggggcgatcgggtagcgctgtacgcacgcatttcgcaggacacaagcggtaaagctgtcggggtggccgaccagttggaaacggcacgcaagttctccgcagaccgcggctacgacgtcgtc

SEQ ID NO: 24904 - DNA, 60 bp, Unknown
  Description of Unknown: LeftRegion for integrase A472 sequence
ataaaaaatattgtggtttatccagatggaaatttgaaaataaattttttaggatattaa

SEQ ID NO: 24905 - DNA, 260 bp, Unknown
  Description of Unknown: LeftRegion for integrase A473 sequence
tttatcgttagtaaaggttaagttaacctttaaaattgttagtgggtagtatccactttttttagttttatggttttaatctccttaaggagattaaaactaaaattttgactattttcaaaatatttttatatttttactgtaaatatagatttttaaaaattgattttaatttttattattttacattaaataaagatatgtctggaagtcacaatattaaattgacgttagaacaacgtcaaaaactagtccgaatg

SEQ ID NO: 24906 - DNA, 260 bp, Unknown
  Description of Unknown: LeftRegion for integrase A474 sequence
agaggtgtattcgataccattacagtagagaatacaagggaacgacgtttgtatcactgatcacaccctcctttaagtgttttgcctaaaggagcatttacacttgaagttgcctcatctagcataagaatttgcggatttcgaagtaacgctcgggcaatggcaattcgctgtctttgtccaccagaaagcttcacaccgcgttctccaacttctgttgcataaccgtttggtaagtcatgaataaatgcatcaacata

SEQ ID NO: 24907 - DNA, 260 bp, Unknown
  Description of Unknown: LeftRegion for integrase A475 sequence
atacaagaaattcacattgatcatgacgtggttgatataatttggagatggcgtttttgacgttatctttttatgtattcatttccggctattcaagtagctagtcttgaataccgaaaaaattcgagacaaaacaaaagagcacagcctgtatataaagtgcgaccaacactctatataccgtccacctgattacgccaggtaaacacttgctatactctcatgaattattttacatcatgtagggtttattcagcaac

SEQ ID NO: 24908 - DNA, 260 bp, Unknown
  Description of Unknown: LeftRegion for integrase A476 sequence
tctataatagattatatagaaatagataataacaaaaacatcactattaattttatataattatttggactaacatatagtatccacttggctattattagttagtccaaataaataaaatacttataacaattgaaatacgcgatatacactgaacctcccatgactaaagtcacagggttcctgtttcatagaatttcgcataatcaaatgttagttcacaatactattctaacttaccttgacctttaaatactctg

SEQ ID NO: 24909 - DNA, 260 bp, Unknown
  Description of Unknown: LeftRegion for integrase A477 sequence
aaatcactaataaacaaaatttatattgatggtgaacaagttactattgaatggctctagtagcttgtttatttagattgtttagttcctcgttttctctcgttggaagaagaagaaacgagaaactaaaattataaataaaaagtaacctatttttctgtagattgctttttatcatttatatagaagaaagccgctttttattagattataattgatgttttttgatttatatttcacttcttgtgcaaataacgata

SEQ ID NO: 24910 - DNA, 260 bp, Unknown
  Description of Unknown: LeftRegion for integrase A478 sequence
aaatcactaattaataaaatttatatcgacggtgaacaagttactattgaatggctctagtagcttgtttatttagtttatttagtacctcgttttctctcgttggaagaagaagaaacgagatacaaaaaaagaacatcctctcaaaaggatgtctttattttacttttatatagaagaaacagtatttctgtgactaattattaacaatagattgatgttgtaaatactcgtcatagatagtctttaaatctatttca

SEQ ID NO: 24911 - DNA, 219 bp, Unknown
  Description of Unknown: LeftRegion for integrase A479 sequence
aacttcatagaaaagatttacattaatcaaaataacgtcaaaattatttggcgtttttaagtaattattttatgtattcatttccggctattcatacagcccaaataaaaaatgattctttttgcttaatagcctctataactccttgcgccgccaaattctggccagtagacaacgtcccgttccactgtaacaaatttgaattcttttctctctttc

SEQ ID NO: 24912 - DNA, 260 bp, Unknown
  Description of Unknown: LeftRegion for integrase A480 sequence
ccaaaaaggccgacgcctttaaaaagacggcgaccgatgctgcacagattgatcagctagactatgagcatcaaaccgctatcgtgaggatgctcatcgatcacatcaacgtaagtaatactggtttagatatttactggcaaatctaatggtcgctttaaaaggcggcttttttcttgcccaaaataaaaagatttagagagtgccatttcaaccacaatctctaaatcttttctaatcttacagatcgtccagtaaga

SEQ ID NO: 24913 - DNA, 260 bp, Unknown
  Description of Unknown: LeftRegion for integrase A481 sequence
tttaaaggtatacactaatccatcgcaaccattaatttttgaaagtaacattggaactaaagataaggataaaataaccatttggattaaatctttaaagcaaatggaagaagactacgaggaacaagaacaagaataaattaaattttatagtggtcaattttttaacaattttttttgttaaaaaatacattaaataaatggaaacaaaaccaagacttacagttgaacaacgtacgaatgttgttaaaaaataccaa

SEQ ID NO: 24914 - DNA, 260 bp, Unknown
  Description of Unknown: LeftRegion for integrase A482 sequence
gggtgtcacccacgtatccaagaagtggtggtattgtacctaaagccgcgctaattttatttttaagactatccaaggtatcacccgaggataatgttacatctcttccgttaatcgtaaacatttattaaatatctaataaagggaacctttcgatttgtttccagttgtaaaaaaatttattttttagtagtaaataaatggaaattacaactggaaataaatcgagactaactaaagaagagcgtcaagcagttttt

SEQ ID NO: 24915 - DNA, 260 bp, Unknown
  Description of Unknown: LeftRegion for integrase A483 sequence
aacagtatcctctagctttacaacaattagtatttttaggaacaactattttaggtatagtaaataattttcaatccattttttgatgaattgaaattatggttttttaatccattaaatggattaaaaaataacttgagttagaatgatttgaaattgaatttacaagtaaaatttttttattatttccaagtcaataaatggaaactgttaaaccaagattaactttatgtgaccgaacagaagttattaaattatat

SEQ ID NO: 24916 - DNA, 260 bp, Unknown; identical to SEQ ID NO: 24715
  Description of Unknown: LeftRegion for integrase A484 sequence

SEQ ID NO: 24917 - DNA, 260 bp, Unknown
  Description of Unknown: LeftRegion for integrase A485 sequence
caaagtttagggataaatataatcacaaaatttgatttaataaaaactttggccgaaattgatactaaaaaaatagaaatagattatagtgattacagcgaaagcgaataatttttagctttttttaatgtttatttaaacattaaaaaaaattaatacgtattaattttttttaattaaaataatttacagtataataaatgatacgcccacgtttaactaaagaacaacgcaatgaaattgttaatttatacacaagt

SEQ ID NO: 24918 - DNA, 260 bp, Unknown
  Description of Unknown: LeftRegion for integrase A486 sequence
aagggcaccgctcgcaccgtgaccttcgctctcgacggccacacctacgagatcgagctgaacgagcgcaacgaggcccggctgcacaaggcgctggcccccttcgtgaaggcgggccggaaggccaagccgacgcgccgacgtagagcgaagtaggacaacgcgcccacgttgttcgatcttggtctacactccccggcatgaagcgagcagtgatctacacccgcgtgagccgggacgacacaggtgagggccagtcc

SEQ ID NO: 24919 - DNA, 260 bp, Unknown
  Description of Unknown: LeftRegion for integrase A487 sequence
taaaccataattctcaccttattaatcagaaagaagaaaaagaggaagagttagaaacgtgtactttttgtgagggataaaaatttaatttttaaagtctaattttaatcactaattgtgattaaaattaaaaattgtgaataaatatgtataaaaatttttttaatattttagtttattttttaaagtaaataaaagtaatgcaaggaagttataaaaataagctaacgtcagaacaacgcaacactatagttcaaatg

SEQ ID NO: 24920 - DNA, 260 bp, Unknown
  Description of Unknown: LeftRegion for integrase A488 sequence
aagggcaccgctcgcaccgtgaccttcgctctcgacggccacgcctacgagatcgagctgaacgagcgcaacgaggcccggctgcacaaggcgctggcccccttcgtgaaggcgggccggaaggccaagccgacgcgccgacgtagagcgaagtaggacaacgcgcccacgttgttcgatcttggtctacactccccggcatgaagcgagcagtgatctacacccgcgtgagccgggacgacacaggtgagggccagtcc

SEQ ID NO: 24921 - DNA, 260 bp, Unknown; identical to SEQ ID NO: 24918
  Description of Unknown: LeftRegion for integrase A489 sequence

SEQ ID NO: 24922 - DNA, 260 bp, Unknown; identical to SEQ ID NO: 24918
  Description of Unknown: LeftRegion for integrase A490 sequence

SEQ ID NO: 24923 - DNA, 260 bp, Unknown
  Description of Unknown: LeftRegion for integrase A491 sequence
cgcaccgtgaccttcgctctcgacggccacacctacgagatcgagctgaacgagcgcaacgaggcccggctgcacaaggcgctggcccccttcgtgaaggcgggccgcaaggcgaagccgacacgccgacgtagagcgaagtaggacaacgcgcccacgttgttcgatcttggtctacactccccggcatgaagcgagcagtgatctacacccgcgtgagccgggacgacacaggtgagggccagtccaaccagcgccag

SEQ ID NO: 24924 - DNA, 260 bp, Unknown
  Description of Unknown: LeftRegion for integrase A492 sequence
cgcaccgtgaccttcgctctcgacggccacacctacgagatcgagctgaacgagcgcaacgaggcccggctgcacaaggcgctggcccccttcgtgaaggcgggccggaaggccaagccgacgcgccgacgtagagcgaagtaggacaacgcgcccacgttgttcgatcttggtctacactccccggcatgaagcgagcagtgatctacacccgcgtgagccgggacgacacaggtgagggccagtccaaccagcgccag

SEQ ID NO: 24925 - DNA, 260 bp, Unknown; identical to SEQ ID NO: 24924
  Description of Unknown: LeftRegion for integrase A493 sequence

SEQ ID NO: 24926 - DNA, 260 bp, Unknown
  Description of Unknown: LeftRegion for integrase A494 sequence
aatgtgaacctacaaaaccacagtggttcattggatctgaaaagattaccacaacaaaagaaccagaagttactgaaaacgagtgtacattctgcgaaggttaaaaaccattatttttctttaaagtttttaaaactttaaagaaaatgtatacaaataattttctaatttttctttaattttccaagtaataaataagtatgcaaggaaattataaaaacaagttgacacaacaacaacgtaaaaatatagttcaaatg

SEQ ID NO: 24927 - DNA, 260 bp, Unknown
  Description of Unknown: LeftRegion for integrase A495 sequence
tcctactggttttgaagaattttctttaatgtgtatgaacaaccctgaatactctggtaaaaattatgattgtcttatggattatattttaccacaatccgaaaaacttatttttaggtctaaagaataaatctttgagattttttaatcttttaattccaatcggaattaaaagaaaatttatttttccaagtaaataaatggaaactaaaaatgttaaacatagactaacacttgaagaatacacttctgtttatgat

SEQ ID NO: 24928 - DNA, 260 bp, Unknown
  Description of Unknown: LeftRegion for integrase A496 sequence
acaaagtttaatacacttttaaaggtatacactaatccatctcaaccattaatttttgaaagtaacattgggactaaagataaggataaaataaccatttggattaaatctttaaaacagatggaagaagactacgaagaacaagatcaagaataaattaaattttatagttttaaactataaaattttatagttaataaatggaacccaaacaaagacttttacctaatcaaaaattagatattatcaaaatgtatcaa

SEQ ID NO: 24929 - DNA, 260 bp, Unknown
  Description of Unknown: LeftRegion for integrase A497 sequence
actactttaattgaagatataaatggcaccattactacaacttattcttgtattagaggaataagaggattgggtggatttggctcaactggaataaattaaatttttaatttttttaaaaaattaaaaattaaagttcaagtgaactttgctaaaattattattaagtcaattgatttttattttttttaagtaaataaatggaactttcaaacaaatttaaattgacacccgctcaaagagaagatatagttaaaaaa

SEQ ID NO: 24930 - DNA, 260 bp, Unknown
  Description of Unknown: LeftRegion for integrase A498 sequence
acccaagaagaactcattgaagaaatgaaggtcatcaacgaccaaaagtatgaaatttaaatttatcaattattttaatgcttaactaagcattaaaattaagaaaatactcgagttgtgctcagagtattttataccttaaccctttctgtcccgtgggacagaaaggtaacctttgaaccgagaaattgaaatatttgaataaatttatcttaaaataaagatggatacttctatatattatggtccaagagacgatt

SEQ ID NO: 24931 - DNA, 260 bp, Unknown
  Description of Unknown: LeftRegion for integrase A499 sequence
acagaaaaagagttaatagatgaaatgaaggttattaatgatagtaaacgcaatttataatttattaatagttcaaaatttattaaatttaatttattactacaggtctaaaaaaattctaaccgttgataaagttaaccataattctcacttgtttgttaacacaaaattagaagaaaaagagccagaagtgtgtactttttgtgaaggttaatttttaaacatatttttttaatcccttttaggattaaaaaaaccca

SEQ ID NO: 24932 - DNA, 156 bp, Unknown
  Description of Unknown: LeftRegion for integrase A500 sequence
tattctcgttggatgataaagcagatttcattaagatggccattaagtctatcgacatagaatatgtaaagcttaaaaacagacattccattaaaataaatgatatagaattttattaacttatgtacggaagtatagacactcgattaatattta

SEQ ID NO: 24933 - DNA, 260 bp, Unknown
  Description of Unknown: LeftRegion for integrase A501 sequence
actactttaattgaagatataaatggcaccattactacaacttattcttgtattagaggaataagaggattgggtggatttggctcaactggaataaattaaatttttaattttttaaaaaaaattaaaaattaaagttcacttgaactttactaaaattattattaagtcaattgatttttatttttttaagtaaataaatggaactttcaaacaaatttaaattgacacccgctcaaagagaagatatagttaaaaaa

SEQ ID NO: 24934 - DNA, 260 bp, Unknown
  Description of Unknown: LeftRegion for integrase A502 sequence
aagttagatttttatttttatgcttaaaataagcataaaaataactagtgggtactagttattttttacttttttaaaggttaattaaccttaaaataaaaaatttgctctttaaatttgtttaatttttaaacattgttaataaacaatgttaatataaaaattgaaattttttatttatttgacagtaaataaagaaaatgtctggaagtcataatattaaattaacgtttgaccaacgtcaaactatagccaaatta

SEQ ID NO: 24935 - DNA, 260 bp, Unknown
  Description of Unknown: LeftRegion for integrase A503 sequence
agtcaaaattttatttttatgcttaaaataagcataaaaataactagtgggtactagttattttttacttttttaaaggtgaattcaccttaaaataaaaaatttgctctttaaatttgtttaatttttaaatattgtttattaaaaatgtcaatataaaaattgaaatttttttatttattttacagtaaataaagaaaatgtctggaagtcataatattaaattaacttttgatcaacgtcaaactatagccaaatta

SEQ ID NO: 24936 - DNA, 260 bp, Unknown
  Description of Unknown: LeftRegion for integrase A504 sequence
cataaaagaaggaaaagcaacttgtcaagggatgcgagtgccagaagtagatatttcaaattgggagataacctcacctgttacagtaatagaaagggatagaaatggggaaaagtattacagttataccggccaagaaagtgcagaccagtgttcttcatcaggacaggaagaaaatcaaagtagccgcatattgccgagtgtccaccgaccaagaagagcagctatcaagttatgaaaaccaagttaattattaccga

SEQ ID NO: 24937 - DNA, 260 bp, Unknown
  Description of Unknown: LeftRegion for integrase A505 sequence
cattaaggaaggaaaagcagcttgtcaagggatgcgtgtgccagaagtagatatctcaaattggacagtaacctcgccagtaaaagtgatagaaagggatagagatggggaaaagtattacagttattccagccaagaaagtgcagaccagtattcttcatcaggacaggaagaaaatcaaagtagccgcatattgtcgagtgtccaccgaccaagaagaacagctatcaagttatgaaaaccaagttaattattaccga

SEQ ID NO: 24938 - DNA, 260 bp, Unknown
  Description of Unknown: LeftRegion for integrase A506 sequence
atttcagaagatgggcagataacagttcgatttcatgagggaaccgaggtagacttgtaagtgactgtgaccgaaaggttgcagttttttgcgttgtttcgtggtataatgaaattgttctaataattacattattaatgatagttaaatagagttataaataagaaaggaatattgcaaatgataagcaattcaaaaacattgtttcaaaaaacaaaatacaatgattatgataatatagatatgttgctatcacaatt

SEQ ID NO: 24939 - DNA, 260 bp, Unknown
  Description of Unknown: LeftRegion for integrase A507 sequence
gatatgagtaattataactagtgaagatggtgatttgagtgaagtatgcagtttatgttcgggtatctacagacagggacgaacaagtctcatctgtagaaaatcaaattgatgtatgtcgatattggttagagcagcatgggtatgattgggatgaaaactcaatatattttgatgatggtattacaggaacggttttattggaacgacatgcaatgcagcttatactagagaaagcgaaaaaacgtgaattacagatg

SEQ ID NO: 24940 - DNA, 260 bp, Unknown
  Description of Unknown: LeftRegion for integrase A508 sequence
tataaaagagggaaaagtagcctgtcagggaatgcgagttccagaagtagatatttcaaattgggagataaactcaccagttacagtaatagaaagggatagaaatggggaaaagtattacagttattccggccaagaaagtgcagaccagcgtttttcatcaggtcaggaagaaaatcaaggtagccgcatattgtcgagtgtccaccgaccaagaagaacagctatcaagttatgaaaaccaagttaattattaccga

SEQ ID NO: 24941 - DNA, 260 bp, Unknown
  Description of Unknown: LeftRegion for integrase A509 sequence
cataaaagagggaaaagcagcttgtaaggggatgcgtgtgccagaagtagatatctcaaattggacagtaacctcgccagtaacagtaatagaaagggatagagatggggaaaagtattacagttattccagccaagaaagtgcagaccagtattcttcatcaggacaggaagaaaatcaaggtagccgcatattgtcgagtgtccacagaccaagaagaacagctatcaagttatgaaaaccaagttaattattaccga

SEQ ID NO: 24942 - DNA, 260 bp, Unknown
  Description of Unknown: LeftRegion for integrase A510 sequence
cataaaagagggaaaagtagcttgtcaggggatgcgagtgccagaagtagatatttcaaattgggtgattacctcaccggttacagtaatagaaagggatggaaatgaggaaaagtattacagttattccggccaagaaagtgaagaccagcgttcttcatcaggtcaggaagaaaatcaaggtagccgcatattgtcgagtgtccaccgaccaagaagaacagctatcaagttatgaaaaccaagttaattattaccga

SEQ ID NO: 24943 - DNA, 260 bp, Unknown
  Description of Unknown: LeftRegion for integrase A511 sequence
cataaaagaaggcaaagtaacttgtcaggggatgcgagtgccagaagtagatatttcaaattgggagataacctcacctgttacagtaatagaaagggatagaaatggggaaaagtattacagttataccggccaagaaagtgcagaccagtgttcttcatcaggacaggaagaaaatcaaagtagccgcatattgccgagtgtccaccgaccaagaagagcagctatcaagttatgaaaaccaagttaattattaccga

SEQ ID NO: 24944 - DNA, 260 bp, Unknown; identical to SEQ ID NO: 24942
  Description of Unknown: LeftRegion for integrase A512 sequence

SEQ ID NO: 24945 - DNA, 260 bp, Unknown
  Description of Unknown: LeftRegion for integrase A513 sequence
gaagatgatgatgaagacagaaaaggaccatgggaaatttttgcggttgatagagatcgttttaaccgtagaatactcaatgttgagtctcaaattggttggtgtttccaacctaaacatagagaaaatatttttaatcaacgattaaaagtgtattaattttttaattttttttgaaaattaaaaaatacagtaaataaatgatacgcccacgattgaataaagaacagcgaaacgaagttattgaaaagtatactcaa

SEQ ID NO: 24946 - DNA, 260 bp, Unknown
  Description of Unknown: LeftRegion for integrase A514 sequence
aaaagaataacaataaaccaagaagcgcttgatgaaattattcaaattaataaggatattgaagagcagcttttttctaaaatagaagatgtggatatcgtgagatatactaggctttgtttattgaacaaattgagatagtgtaaagaaatgatttaaagttagatttttttttatttacgtttttgtataaataaagaatgactttgtatcctatacataaattgacacttgatgagcgtcaaaatattattgacttg

SEQ ID NO: 24947 - DNA, 260 bp, Unknown
  Description of Unknown: LeftRegion for integrase A515 sequence
aaagttaaatttttatttttatgcttattttaagcataaaaataactagtgggtactagttattttttacttttttaaggttaattaaccttaaaataaaaaatttgctctttaaatttgtttaaaaattaaacattgtttattaaaaatgttaatataaaaattgaaattttttatttattttacagtaaataaataaaatgtctggaagtcataatattaaattaacgttggaccaacgtcaaactatagccaaatta

SEQ ID NO: 24948 - DNA, 260 bp, Unknown
  Description of Unknown: LeftRegion for integrase A516 sequence
agggtccgaggaatgttccccaaagcgataccacttgaagcagtggtactgcttgtgggtacactctgcgggtgatgaatcgaggggggcccactgtacgggccgacatctacgtccgaatcagcctggaccgcacgggggaagagctcggggtcgagcgccaggaggagtcgtgccgcgagctctgcaagagcctcggcatggaggtggggcaggtgtgggtcgacaacgacctgagcgccaccaagaagaacgtcgtc

SEQ ID NO: 24949 - DNA, 260 bp, Unknown
  Description of Unknown: LeftRegion for integrase A517 sequence
tatagttttacttcgtacgaaggttacattaaccttaataattattagtggggagcatccacttttttaagttttatggttaaaaaaaccataaaacttaaaaattaagttttttaaaatattaaccaggtaagatatataaattaacgttaataaaaaaaatgaaaaatttttctttatttaacagtaaataaagaaatatgtctggaagtcataatataaagttaacacttactcaacgtcaaactattgctcgcttg

SEQ ID NO: 24950 - DNA, 260 bp, Unknown
  Description of Unknown: LeftRegion for integrase A518 sequence
catccgagaagggaaagcttcctgcattggcatgcgcgtgccagacagtgcagtccaggattggagtatcgatgaacccacagtggtaaaggaggagaacatcagtggcaaaaaacattacagttattcctgccaagaaaactatacaagtcgagcagaatcaacacattcagaaaatccggatggcggcctactgccgagtgtccaccgaccaagacgaacagctatcaagctatgagaaccaggtccgttactaccag

SEQ ID NO: 24951 - DNA, 260 bp, Unknown
  Description of Unknown: LeftRegion for integrase A519 sequence
catcaaagaaggcaaggcttcctgccaaggcatgcgtgtgccagagaaagccattgaagagtggaaacttaagacccctgtaacagtgatagaaaggaccgaatatgggcaaaaacattacagttattccagccaagaaaatgcagctgatggtcacccatcagcaagtcaccaaaatcagagtggccgcctattgtcgggtgtccaccgaccaagacgaacagctatcaagctatgagaaccaagtcaattactaccgt

SEQ ID NO: 24952 - DNA, 260 bp, Unknown
  Description of Unknown: LeftRegion for integrase A520 sequence
tccggctgacccgcgtcaccgatgctacgacttcaccggagcgccagctggaggcttgccagcagctctgcgcccagcgcggctgggacgtcgtcggggtagcggaggatctggacgtctccggagcggtcgatccgttcgaccggaagcgccgcccgaacctggcccggtggctagcgttcgaggagcaaccgttcgatgtgatcgtggcgtaccgggtagaccggttgacccgatcgatccggcatctgcagcagctg

SEQ ID NO: 24953 - DNA, 260 bp, Unknown
  Description of Unknown: LeftRegion for integrase A521 sequence
cctttcaaggtcccaattgaccaagggggctttgccccctgggacattgggtcttaaagggttaatactcactgaaccttttggcaggtagtgattggacgagttacgggacgacagatgtagacccgtactgtcactcttattattaaagtgtattaattttttaatttttttggaaaattaaaaaatacagtaaataaatgttacgaccacgattaaataaagaacaacgtaatgaagtcattaatttatatactcaa

SEQ ID NO: 24954 - DNA, 260 bp, Unknown
  Description of Unknown: LeftRegion for integrase A522 sequence
tgtcccgcgtcaccgatgctacgacctcaccggagcgtcagctggagtcttgccagcagctctgcgcccagcgcgggtgggacgtcgtcggggtagcggaggatctggacgtctccggagcggtcgatccgttcgaccggaagcgccgcccgaacctggcccggtggctagcgttcgaggagcaaccgttcgatgtgatcgtggcgtaccgggtagaccggctgacccgatcgatccggcatctgcagcagctggtccac

SEQ ID NO: 24955 - DNA, 260 bp, Unknown
  Description of Unknown: LeftRegion for integrase A523 sequence
gttgtcgccgactttgatgatgcgacgcgtgtgtatgccgctgggtgggtctctgacgatgtcgaagttgccgttccacgcctctacgctgggcaacgtggctttgccataactagttagagctgaataagaaatcatttattagttgcagaagccccacaaatttataatatttacactttacatttttaaattaataaatgaaacgtgtcaacaaattaaataaacaagataaagagtcgattttcgacctttacttg

SEQ ID NO: 24956 - DNA, 113 bp, Unknown
  Description of Unknown: LeftRegion for integrase A524 sequence
ttaattaaaaaaatagacgtatggaacgataataaaattaagatccactggaatatttaattttttaggcgctttacgccttttttcgtatattaggtatttccaattgaaac

SEQ ID NO: 24957 - DNA, 260 bp, Unknown
  Description of Unknown: LeftRegion for integrase A525 sequence
accgaagaggagttgatagaagaaatgaaggtaatcaacgagagtaaacgcgaaatttaaattttttaaacttgttaagtttaaaaaattacttattttaatttagtaaaattattcatcctcatcttcatcaaatggattagtcgaccttggtcttgatggtctgggtaaaggagaaggagaaggtaattctctacttcccggttttttagatgtaaaagcaaccacagatcctagtattccaactacaagtaaagctc

SEQ ID NO: 24958 - DNA, 260 bp, Unknown
  Description of Unknown: LeftRegion for integrase A526 sequence
tattgggagagatgatgaacctagttgacgcagttgttacaaaagttctgagtgaaccttacccactctttaataagtattgggtagatgttgagtataattgttacgggcaggtgtccgagactaatattaggtgttcaacggaagaaactgctaaagcaattaaagttgggtatacatttcaagtttaaggagaataaatgaattttaaatattacaacgaaattatagacaaaattgtagctctaaaacaacaaggc

SEQ ID NO: 24959 - DNA, 260 bp, Unknown
  Description of Unknown: LeftRegion for integrase A527 sequence
ataaaggagaacaaatgaacatagttgatgcagtcgttacaaaagttctaagcgaaccatatctactctttaataagtattgggtagatgttgagtataattgttacggacaggtatctgaaaccaatattgtgtgttcaaccgaagaaactgctaaagcaattaaagttgggtatacatttcaagtttaaggagaataaatgaattttaaatattacaacgaaattatagacaaaattgtagctctaaaacaacaaggc

SEQ ID NO: 24960 - DNA, 260 bp, Unknown
  Description of Unknown: LeftRegion for integrase A528 sequence
gaagaagaaaagttaatagaagaaatgaaggttattaatgacgctaaaaaaaatatttaaatatttttaatccctttaagggattaaaaataaaagtagtttataagcttaatatttatatttgccgtatttatcaaatttagctggagcacccatactttctctaaattttttttcttgctctaatttaagcttttggttttgtattttttcatctgcaaagacaaccatgctttctatagaatcgcaatatgaactag

SEQ ID NO: 24961 - DNA, 260 bp, Unknown
  Description of Unknown: LeftRegion for integrase A529 sequence
catcaggctttatttttttgctttttttttcaataagtgcggaaaaattactcccaaacctacctagtaaggtaggaggaatatttgtattccatgaactttggcataaatttatcaggtcgaattagtttgtctgataacttgacttattttccctttagagtgatatatagtgtgccattacataggaaggagagtaaatgtccgtaaaaaagattagagtcaataaacaaaaacacaagcagaggatctgtgcctac

SEQ ID NO: 24962 - DNA, 260 bp, Unknown
  Description of Unknown: LeftRegion for integrase A530 sequence
acatcaggctttatttttttgcttttttttcaaaaagtgcggaaaaattactcccaaacctacctagtaaggtaggaggaatatttgtataccatgaactatggcataaatttatcatgtcgaattagtttgtctgataacttgactaattttccctttagagtgatatatagtgtgccattacataggaaggagagtaaatgtccgtaaaaaagattagagtcaataaacaaaaaaacaagcagaggatctgtgcctac

SEQ ID NO: 24963 - DNA, 260 bp, Unknown
  Description of Unknown: LeftRegion for integrase A531 sequence
caaggtagccgcatattgtcgagtgtccaccgaccaagaagaacagctatcaagttatgaaaaccaagttaattattacagagagtttatctccaaacacgaggactatgagttagttgacatctatgcggatgagggcatctcagcaaccaatacaaaaaaacgtgatgcatttaaccgcttgatacaagattgtagggctggtaaggtggataggattttggtcaagtcaatcagtcgatttgccagaaacacccttg

SEQ ID NO: 24964 - DNA, 260 bp, Unknown
  Description of Unknown: LeftRegion for integrase A532 sequence
caggctttattttttttttggcctttttttcaataagtgcggaaaaattactcccaaacctacctagtaaggtaggaggaatatttgtattccatgaactatggcataaatttatcaggtcgaattagtttgtctgataacttgactaattttccctttagagtgatatatagtgtgccattacataggaaggagagtaaatgtccgtaaaaaagattagagtcaataatcaaaaacacaagcagaggatctgtgcctac

SEQ ID NO: 24965 - DNA, 260 bp, Unknown
  Description of Unknown: LeftRegion for integrase A533 sequence
acatcaggctttatttttttgcctttttttcaataagtgcggaaaaattactcccaaacctacctagtaaggtaggaggaatatttgtattccatgaactgtggcataaatgtatcaggtcgaattagttggtctgataacttgactaatatcctttttagagtgatatatagtgtgccattacataggaaggagagtaaatgtccgtaaagaagattagagtcaatagacaaaaacataggaagagagtctgtgcctac

SEQ ID NO: 24966 - DNA, 260 bp, Unknown
  Description of Unknown: LeftRegion for integrase A534 sequence
tcaggctttattttttttgtctttttttttcaataagtgcggaaaaattactccaaaacctacctagtaaggtaggaggaatatttgtattccatgaactgtggcataaatttatcaggtcgaaatagttggtctgataacttgactaatattccctttagagtgatatatagtgtgccattacataggaaggagagtaaatgtccgtaaagaagattagagtcaatagacaaaaacataggaagagggtctgtgcctac

SEQ ID NO: 24967 - DNA, 260 bp, Unknown
  Description of Unknown: LeftRegion for integrase A535 sequence
catcaggctttattttttttgcatttttttcaataagtgcggaaaaattactcccaaacctacctagtaaggtaggaggaatatttgtattccataaattatggcataaatttatcaggtcgaattagttggtctgataacttgactaattttccctttagagtgatatatagtgtgccattacataggaaggagagtaaatgtccgtaaagaagattagagtcaatagacaaaaacataggaagagggtctgtgcctac

SEQ ID NO: 24968 - DNA, 260 bp, Unknown
  Description of Unknown: LeftRegion for integrase A536 sequence
acatcaggctttatttttttgactttttttcaaaaagtgcggaaaaatcgctcccaaacctacctagtaaggtaggaggaatatttgtattccatgaactatggcataaatttatcaggtcgaattagtttgtctgataacttgactaattttccctttagagtgatatatagtgtgccattacataggaaggagagtaaatgtccgtaaaaaagattagagtcaataaacaaaaacacaagcagaggatctgtgcctac

SEQ ID NO: 24969 - DNA, 260 bp, Unknown
  Description of Unknown: LeftRegion for integrase A537 sequence
tagtgtagttaggagaatagcatactagtatctcagcgtggtgatatcaccacgctttttctttttgctttttttcaataactgcggaaaatttgtttccaaatttacttagtaatatggagggagtagttttgctgaaagcttgacttatcttccctttagagtgatatatagtgtaccaaaaatagaaaggaaactaaatggcagtaaggttaattaaagcaaaacaagatcataaaaaacaacgcatatgtgcctat

SEQ ID NO: 24970 - DNA, 260 bp, Unknown
  Description of Unknown: LeftRegion for integrase A538 sequence
catcaggctttattttttttgcatttttttcaataagtgcggaaaaattactcccaaacctacctagtaaggtaggaggaatatttgtattccataaactatggcataaatttatcaggtcgaattagttggtctgataacttgactaattttccctttagagtgatatatagtgtgccattacataggaaggagagtaaatgtccgtaaaaaagattagagtcaatagacaaaaacataggaagaaggtatgtgcctac

SEQ ID NO: 24971 - DNA, 260 bp, Unknown
  Description of Unknown: LeftRegion for integrase A539 sequence
agtgtagttaggagactagcatactagaatctcagcgtggtgatatcaccacgctttttctttttgcttttttttcaataactgcggaaaatttgtttccaaatttactaagtaatatggagggagtagttttgctgaaagcttgacttatcttccctttagagtgatatatagtgtaccaaaaatagaaaggaaactgaatggcagtaaggttaattaaggcaaaaagtgaacagaaaaagcaacgtgtctgtgcctac

SEQ ID NO: 24972 - DNA, 260 bp, Unknown; identical to SEQ ID NO: 24961
  Description of Unknown: LeftRegion for integrase A540 sequence

SEQ ID NO: 24973 - DNA, 260 bp, Unknown
  Description of Unknown: LeftRegion for integrase A541 sequence
aagatgagatgacttaccaactgaccatgatacaggccgatagactcctaaaatctaggattattagtgaggaagttcatcagcaatttaaggaaaagatgcttgaaaaatatcaaccatttattagtagattatcgacctaaagacttgataaatgaggcctttagagtgatatatagtagcgaaaggagtgtatcaaattgagaatagttagacgaattcaaccgatgatgacaccgcaaaaacctaagttgcgtgta

SEQ ID NO: 24974 - DNA, 260 bp, Unknown
  Description of Unknown: LeftRegion for integrase A542 sequence
aagatgagatgacttaccaactgaccatgatacaggctgatagactcctaaaatctaggattattagtgaggaagttcatcagcaatttaaggaaaaaatgcttgaaaaatatcaaccatttattagtagattatcgacctaaagacttgataaatgaggcctttagagtgatatatagtagcgaaaggagtgtatcaaattgagaacagttagactaattcaaccaaggatgacaccgcaaaaacctaagttgcgtgta

SEQ ID NO: 24975 - DNA, 260 bp, Unknown; identical to SEQ ID NO: 24973
  Description of Unknown: LeftRegion for integrase A543 sequence

SEQ ID NO: 24976 - DNA, 260 bp, Unknown
  Description of Unknown: LeftRegion for integrase A544 sequence
agggtaactccagtaaaaggaaggaaatatcttatagaaattagagagggtcgatattagtgaagaaagtaattactattcaggctacaccaagtattattaggtcaagttcagatgatttctctttgaagaagcgtagggttgcaggctatgccagggtatcaactgaccatgaggatcaagcaacaagctatgagtcgcagatgcggtactactctgaatacattaatgggagggatgattgggaatttgttaaaatg

SEQ ID NO: 24977 - DNA, 260 bp, Unknown
  Description of Unknown: LeftRegion for integrase A545 sequence
ataatgagatgacctaccaactaacaatgatacaagcaaaggtacttctaaataatggagcaatcacaattaaggaatttgaactttttaggcaattgatgcttgaaaaatatcaaccgtttataagtcaattatcgacctaataactggatatttttttctttttgagtgatatatagtagcgaaaggagtgtattaatttgagaacagttagaagaatacaacccataaaatcgccctgcaagccaagatttaaggtt

SEQ ID NO: 24978 - DNA, 260 bp, Unknown
  Description of Unknown: LeftRegion for integrase A546 sequence
ataatgagatgacctaccaactaacaatgatacaagcagaggtacttctaaataatggagcaatcactattgaggaatttgaactttttaggcaattgatgcttgaaaaatatcaaccgtttataagtcaattatcgacctaataactggatatttttttctttttgagtgatatatagtagcgaaaggagtgtattaatttgagaacagttagaagaatacaacccataaaatcgccctgcaagccaagatttaaggtt

SEQ ID NO: 24979 - DNA, 260 bp, Unknown; identical to SEQ ID NO: 24248
  Description of Unknown: LeftRegion for integrase A547 sequence

SEQ ID NO: 24980 - DNA, 260 bp, Unknown
  Description of Unknown: LeftRegion for integrase A548 sequence
cggaaggccaagccgacgcgccgacgtagagcgaagtaggacaacgcgcccacgttgttcgatcttggtctacactccccggcatgaagcgagcagtgatctacacccgcgtgagccgggacgacacaggtgagggccagtccaaccagcgccaggagcgcgagtgccgacgcctcacggactacaagcggctggacgtggtggccgtcgagcaggacatctcggtgtccgccttctcgggcaaggagcgccccgcctgg

SEQ ID NO: 24981 - DNA, 260 bp, Unknown
  Description of Unknown: LeftRegion for integrase A549 sequence
cattctctacatcccaccagaatttctttcgaatgatatatttgctgcaacactatttctttcgctcttcatgctattactaatcgttgtacttctcatatggacctctccagccctcgattagggttttggcacatacagactaagtagtaaggtttattaccccccgtgccaaaactggtagggtggagggatgcgggatgcccaggccctctatccagaatgtcctcgatttaaggcgggatgaggtccttgagctc

SEQ ID NO: 24982 - DNA, 260 bp, Unknown
  Description of Unknown: LeftRegion for integrase A550 sequence
agaatgagctgacttaccaattatccctaaagcaagctcataaactctggcagcaacagctgattacacaagaagaatacgagcaatttcagcaaataatccttcaaaaataccagccctttattagccaattagtgggctaaatactggataaatagcggatttagagtgaatatgtaatcggaaaggagttgtattaattgaagacagttactaaaatacaacagagggtttctccctttcaatcaaaaaagaaagta

SEQ ID NO: 24983 - DNA, 260 bp, Unknown
  Description of Unknown: LeftRegion for integrase A551 sequence
aatctcaaggtttgctcgtaataccttggacactttaaaatacgttcggatgttgaaagaaaagaatgtcgcggtttactttgaagatgagaaaatcaatacattgacaatggatggtgagttgctcctagtcgtcttgagttctgtagcgcaacaagaggttgagaatatttccgcaaacgttaaaaaaaggattaaagatgagaatgagtcgaggggagcttatcggatttaatggttgtcttggttatgattaccat

SEQ ID NO: 24984 - DNA, 260 bp, Unknown
  Description of Unknown: LeftRegion for integrase A552 sequence
caacaagaacttacctaccaactgactatggcacaggcaaagaagctcctgtcccagggtctgatttctgaagccatcttccaagaatttaaggcaaaaatgctccaaaaatatgagccatttatgagccaattagtggcctaaagacttgataaagaagggctttagagtgatatatagtagcgaaaggagatgtatcaatgaaacaaatcaaaacgatacaagcccaaaaggtaactaccatcaaaaggttaaaggtg

SEQ ID NO: 24985 - DNA, 260 bp, Unknown
  Description of Unknown: LeftRegion for integrase A553 sequence
caacaagaaataatctatcagcttaccatggcacaggcgagtcggctcctggcagttgggatgatatctgaagctaattttcaagaatttaaggtaaaaatgctcgaaaaatatgaaccatttatgagtcaattagtggcctaaagacttgataaataagggatttagagtgatatatagtagcgaaaggagatgtatcaatgaaacgaattaaaacgatacaagcccaaaagttaaccgccatcaaaaagttaaaagta

SEQ ID NO: 24986 - DNA, 260 bp, Unknown
  Description of Unknown: LeftRegion for integrase A554 sequence
caacaagaacttacctaccaactgactatggcacaggccaagcagctcctgtctcaaggtctgatttctgaagccgtcttccaagaatttaaggcaaaaatgctcgaaaaatatgagccatttctgagccaattagttgcctaaaaacttgataaataagggctttagagtgatatatagttgcgaaaggagatgtatcaatgaaacaaatcaaaacgatacaagcccaaaaggtaactaccatcaaaaggttaaaggtg

SEQ ID NO: 24987 - DNA, 260 bp, Unknown
  Description of Unknown: LeftRegion for integrase A555 sequence
cgagttagacgaattctcaagatacataggcttaacgctatgtaaagaagacaaagaagcaattctaaaatacaacagttttcgtaaagctttagcaatcagaaaaaaattaaaattcaattcatttgaaaacgactcttcaagcaattaattaaactaagaataaaatctaatgagagaatacttttaaaatcaatatcatgtccaagttccattcaatatttgacttaaatacagtctggattctagattatgaaaat

SEQ ID NO: 24988 - DNA, 260 bp, Unknown
  Description of Unknown: LeftRegion for integrase A556 sequence
caagctgaccaagaccatgtcttagttagactagaagtaaaacccaagacggttagagaagcgttcctgaacgcctataagcgagcgggaggcattcctgtagagtgggacaatcgtctcgctgtttaaaccagcatcctgcttgctgaagagcaagcaggattattgttgtttgttaaatattcattaaaggatttattatgtccatagatacactaggaatcgacgatgaaatcgttttgaccacaatagcaaacatt

SEQ ID NO: 24989 - DNA, 260 bp, Unknown
  Description of Unknown: LeftRegion for integrase A557 sequence
attagagaagacgatatccgtctgggtaaaataaaggaaactgaattatgtaccctgtagataaagaatccagaattcgtttaatggaagatctggacaaatggataaatgaacactacctagaaaaagtcacggtcaaagacttaagtcatcaactaggtgtgtttatcccggatgtctaccgtttgtttgctgaacaacgtaataccaccccgggtgagtatcttcgacgtaaacgcttagttaaagccaaagctttg

SEQ ID NO: 24990 - DNA, 260 bp, Unknown
  Description of Unknown: LeftRegion for integrase A558 sequence
atcagagaagatgacatacgtttaggtaagatagaggtaacagaaccatgtaccctgtagataaagaatccagaactcgattaatggatgatctggacaaatggataagtgaacattacttggaaaaagtcaccgttaaagacttaagtcaccaactgggagtcttcatcccagatgtataccgtttgtttgctgaacaacgcagtacaactcctggcgaataccttcgacgtaaacgcttagttaaagccaagtctcta

SEQ ID NO: 24991 - DNA, 260 bp, Unknown
  Description of Unknown: LeftRegion for integrase A559 sequence
gacctagaaactaacacatattacatagactctagatgggcggaatcattctttcgtaccagtttggcataaaattcaaaatctatttataagtataaatggcctgatttttggttaggtcattttttatcttctaatttagaaaaacgtagttaatatatataattattatgtagatttctagaaaggaggtaaaaccaatggtaagacggaattctaaaattacccgtcaacagaagaaaattcgagatgcatttgta

SEQ ID NO: 24992 - DNA, 260 bp, Unknown
  Description of Unknown: LeftRegion for integrase A560 sequence
gacctagaaacgaatacatattacatagattctagatgggcggaatcattctgtcgtaccagtttggcataaaatttaaaatttatttacaagtataaatggtctgatttttagttaggtcattttttaccttctaatttagaaaaacgtggttaatatatataattattatgtagatttctagaaaggaggtaaaaccaatggtaagacggaattctaaaattactcgtcaacagaagaaaattcgagatgcatttata

SEQ ID NO: 24993 - DNA, 260 bp, Unknown; identical to SEQ ID NO: 24976
  Description of Unknown: LeftRegion for integrase A561 sequence

SEQ ID NO: 24994 - DNA, 260 bp, Unknown
  Description of Unknown: LeftRegion for integrase A562 sequence
gtaatctaccaatgcaatgataaatacaagtctagtggtaaaaagtcaatagaaagttgagaaaattctagttgttttttagaaaacagggtgcactaaaaacacctagtgaaaatcgctttttttcaccagtttatccaaggacttgtgcagatcattatctatcttccataagcctccttggtggcgcatagagttggcgattgcgtagtagcgcatccaccagacgcacaaattttctagcggttaagacgatggct

SEQ ID NO: 24995 - DNA, 260 bp, Unknown
  Description of Unknown: LeftRegion for integrase A563 sequence
ggaataggtagacgcgctgctggtgttaataaacacccatagaaacggcagtcagggcggcgcaagacatactgcgcggcggttgcaaacgtcaatcgtgttgaaagtgcacgactaatggttgtggggtgcaaatccccacccgcatctcgataggtcaccctaagttacagatacatattcgaaaggggtgacacaagttggaaacaaataaacaaaatgagatacgcaatgcttatgagcatagcgcacaagtccag

SEQ ID NO: 24996 - DNA, 60 bp, Unknown
  Description of Unknown: LeftRegion for integrase A564 sequence
aatatgttattgatgttctttataaacttcaacacgataaagaatatcttaaaaaaataa

SEQ ID NO: 24997 - DNA, 260 bp, Unknown
  Description of Unknown: LeftRegion for integrase A565 sequence
gccctgcccgtccacctcaaccacgcaccacccgccctcttttcttactgtcgccatatctctccccttttgaggcaatatatatttggtataggtctatgcgtaagcctcaatacgtgctaaaacgtaccaaatgacgcagataaaacatatttctgcgtatttagggcagataacgccaaacatggagcaaattacgcatggatatggacgcacaggtacaccgggcaacctaccccaagatcgcctaccgcctaatg

SEQ ID NO: 24998 - DNA, 260 bp, Unknown
  Description of Unknown: LeftRegion for integrase A566 sequence
aattacactaataatcagtgtaattttattactttaaaaaaacctgccaaaactacataaaaacctcataaaaaaatttcataaaaattgaataaattatgttctaaatacttcattatattttcccacctatattatagtttcacaactattaaattctcgtcctatttgcgatagaaaatcgaaaaaattaattcaagatggatcttcaaaaaatttgtgatcgaatttcccaagaattcgaaacagatattgtaatg

SEQ ID NO: 24999 - DNA, 260 bp, Unknown
  Description of Unknown: LeftRegion for integrase A567 sequence
gccgcttactgtcgagtgtctacagaccaagacgaacagctatcaagttatgagaatcaggttaattattaccgtgaatacatcttaaaacacgaagattatgagttagtagatatctatgcggatgagggaatctcagcaactaatacaaaaaacgtgatgcttttaaccgactaatacaagattgtagagatggtaaggtggatagaattttagttaaatctattagtagatttgccagaaatacattggactgcatc

SEQ ID NO: 25000 - DNA, 260 bp, Unknown
  Description of Unknown: LeftRegion for integrase A568 sequence
gttaaatgggaatcattgttagataaatttaatagaacatattaaaagacgtaatttacgtctttttttatttgtgtttaacttttaaaccatttagattaaaatatacataaataattaaaaaaatgatttacaaatttcgtattgtataatataataaatatataaggtccaataaggaaccaagaggaggaagaaggatggcagcaataactagaagaagatgggaaaaagaagaagatgagtcattagtaaactta

SEQ ID NO: 25001 - DNA, 260 bp, Unknown
  Description of Unknown: LeftRegion for integrase A569 sequence
ggtcacggaactctttggcaatttcttcttccgcagcttcaacacgcacgatacgtagcaccagaacaggttgttcgcttgtcagaatgcttaatcgcagcgtgaattccctgttgtcacgaacggtgcaatagtgatccacacccaacgcctgaaatcagatccagggggtaatctgctctcctgattcaggagagcttatggtcacttttgagacagttatggaaattaaaatcctgcacaagcagggaatgagtagc

SEQ ID NO: 25002 - DNA, 260 bp, Unknown
  Description of Unknown: LeftRegion for integrase A570 sequence
ctatgttattctatgtttatctaacgggctcgcgttcgcccagacattatcatatttaattatagattgtcactaaattttatttgatacaaatctatgttattctatgataatacaacgggtcggagttgatataatgaaaaaattgaaaaaatgttaaattgatacaaaatgtaatttataatacaatcaatacaacaatgaaaacagctattatatattgcagacaaagtaataaaaaaaacagtagacatggtatg

SEQ ID NO: 25003 - DNA, 60 bp, Unknown
  Description of Unknown: LeftRegion for integrase A571 sequence
gaactacagagcaagtcaagcgaatttctaagcatgagagccttgttagaaaagagctag

SEQ ID NO: 25004 - DNA, 260 bp, Unknown
  Description of Unknown: LeftRegion for integrase A572 sequence
tgtttaaattggaagtttccttatgaagttttatgtgatgaactgttgcacttaaattgacaaatcaacatacatttaaatttcatgagacaataaacgttgatttaatgcgttttttgtcttttttgttttccttatttttttctgttttacaacaaagtggtatcaaaaatggtatcatttgtagttattttagcttcacatataaaaattaaccacactcctaaattaataggtggtgtggttttttggttgtgtga

SEQ ID NO: 25005 - DNA, 260 bp, Unknown
  Description of Unknown: LeftRegion for integrase A573 sequence
tgtttaaattggaagtttccttatgaagttttatgtgatgaactgttgcacttaaattgacaaatcaacggattaaaaaccttgtctcctacactaatgctcattttcctgttcctcctcatatttatagacaacttgacctgccataatccctactgcttcatcaagttcaacaccttctttaactgaatgttgaatagcatttgtcattccctcaagtatttcatcaaacgcttgcgctttcttataaacgtcctcaa

SEQ ID NO: 25006 - DNA, 260 bp, Unknown
  Description of Unknown: LeftRegion for integrase A574 sequence
cgcagtcaaaatctttggaacgcaccaaaaacttttgacgagttcaaaaacttttgaccgcaccggtaagttttacctgtctcaaaaagtttttggtggcggcgaaataattcgcaacacactgttacaatattttcgttggtacaaatatttttccatgctatagtacgcgcacaccaacggaaataggcgtacgaatcatgagcggtatatacaagataagcttcaacggcaacaacaagcgcgactgctacataggg

SEQ ID NO: 25007 - DNA, 260 bp, Unknown
  Description of Unknown: LeftRegion for integrase A575 sequence
ggagtaagccttattagttgagagaaaataaggttgagtaggaacatatctatagatgagagttgacactagggaatggataacaagaaaaaatgcacccacttgcacccagctaaaaatttgataattgcaaaatagcctaattaacattataatataactaaaaaataagtatactaaaatattggtggagaatatctatgaatgaaagaaaagatatagttgaaaatgtaacggtaattcaaaagcagagagctata

SEQ ID NO: 25008 - DNA, 260 bp, Unknown
  Description of Unknown: LeftRegion for integrase A576 sequence
gccgaattaacttatcaagtaactatgttgtatgttaaagcgttattaagcaggggtctactaagcatagagcagtgccgtgattttcaagagcaaatgcaaacactgtattcgccactttttagcaaatatatggacgaaacacttgataaataaatggtttagagtgatatatagtgatacaaaaaggaggatacattgtgaaaacagtcaaaaaaatacaacagataagaccagtgaaaaataaaaaattacgtgtc

SEQ ID NO: 25009 - DNA, 260 bp, Unknown
  Description of Unknown: LeftRegion for integrase A577 sequence
tcgtgaatctcataaaatttggttttgtgtttctcctgctaaatttagcggcgaggatggtgtccgactcgttttccgataaaattgcgatcgccgcattatcgggtctcgcgttaaaaacagtttcactcatttcgccaaaaatagtttcttggtaaatgacgcccagcgtagtcgggtggtaaaataacttaaacaatatgatttatagaatatcaatggtgtcttgcacattgctacacaattacaaattcgtcgta

SEQ ID NO: 25010 - DNA, 260 bp, Unknown
  Description of Unknown: LeftRegion for integrase A578 sequence
tgatgaacatcctaaaaattaaaccatgtccattctgtggtagtctgccgagtatacgatatagcttcgatacattattaattgaatgtactaataaaaagtgtaaattacaaccgtctacatggtcacacgttgattccgatagtgcagaaaaacttataaaaatttggaataaaagaaaagataaggaggaagattaaatgactaaagaagtatggggagaaatagaaggttaccctaatcacaaaataagtagttta

SEQ ID NO: 25011 - DNA, 260 bp, Unknown
  Description of Unknown: LeftRegion for integrase A579 sequence
tcctaataattattcggacaactaaaatgatcgagcaccgaaagaatgccactcataaaaaatttgaatcttcgttctcaaagtggagccgccgtttctttaaacactttttatcttccccttggttctctaataacaagaaccaaagttcttttgatgatatcattttccccgccctactcttcttttcaggagcttcaatggttctttgggaagaagccgtaaatgaaaaagatccgagtaataaattaagactgatt

SEQ ID NO: 25012 - DNA, 260 bp, Unknown
  Description of Unknown: LeftRegion for integrase A580 sequence
attttacccaaacgatatagaaagctatattgcttataaagcaccattcatagagaaaatttacgctgaaataggactatgaaaaatctaagtttatcgaacttagcaaactataagtttctaagagataaaacctataaaacttgtacggatattgtagggtaggaaaagaaatcttcctctatactaaaataaaccgaatgaaaagggggatcgaagtgaatattatcaagtcgtttaacaatacgattgattatctt

SEQ ID NO: 25013 - DNA, 260 bp, Unknown
  Description of Unknown: LeftRegion for integrase A581 sequence
atgagcttatctatcaagttacgatgatacaagtgacaaaactattaaatgatggcgtaattacgaagaaagaatatgaaaaatttcaacaagaactgatcgaaatgtatcaaccgattttaagtaaatatatggacgaaacacttgataaataaagcgtttagagtgatatatagtagtacaaaaggaggaacatacaaatgaaacaaataagaaaaatcattcaaataagactaccagaacaaaagaagttaaaagtt

SEQ ID NO: 25014 - DNA, 60 bp, Unknown
  Description of Unknown: LeftRegion for integrase A582 sequence
ctcttacctaaccttacctgtgtatccaaactggatacatcttgtatacattttgtataa

SEQ ID NO: 25015 - DNA, 260 bp, Unknown
  Description of Unknown: LeftRegion for integrase A583 sequence
ctgggtgtcgacccagcgacgctgcgtcgggtgccgtcggagcacacggtctacaactggaagcgcccgtaccgcggccgcacgtacctcgaggaactcgcggtgtggcttcgggcgcaggctgagcgggaagccgcacgctgacctccgaaacgtgggttacagttggaactgttacaccacgacggagagacgagtagatgagcctgcgtgcatacggctggacgaacgacggcaagatcgtcgagtcagaagccgac

SEQ ID NO: 25016 - DNA, 260 bp, Unknown
  Description of Unknown: LeftRegion for integrase A584 sequence
ctgggtgtcgacccagcgacgctgcgccgggtgccgtcggagcacacggtctacaactggaagcgcccgtaccgcggccgcacctacctcgaggaactcgcggtgtggcttcgggcacaggctgagcgggaagccacacgctgacctccgaaacgtgggttacagttggaactgttacaccacgacggagagacgagtagatgagcctgcgtgcatacggctggacgaacgacggcaagatcgtcgagtcagaagccgac

SEQ ID NO: 25017 - DNA, 260 bp, Unknown
  Description of Unknown: LeftRegion for integrase A585 sequence
ctgggtgtcgacccagcgacgctgcggcgggtgccgtcggagcacacggtctatgggtggaagcgcccgtaccggggtcgcacgtacctcgaggaactcgcagtgtggttgcgggcgcaggctgagcgggaagccacacgctgacctccgaaacgtgggttacagttggaactgttacaccacgacggagagacgagtagatgagcctgcgtgcatacggctggacgaacgacggcaagatcgtcgagtcagaagccgac

SEQ ID NO: 25018 - DNA, 260 bp, Unknown
  Description of Unknown: LeftRegion for integrase A586 sequence
tggaactgttacaccacgacggagaggacaccgatgggcgtcgacctatccaggcaggccgcggtacagctccgcgacgcagtgcggaaccccgggccggtgcccagctatcaccatcagatgatggacaagctgagccgagaatggccggtcctacacacagcactgatgcaggtagtcgccgagatcgaggcagacctgtgagtcttcgcgcatacggctggacgaacgacggcaagatcgtcgagtcagaagctgac

SEQ ID NO: 25019 - DNA, 260 bp, Unknown
  Description of Unknown: LeftRegion for integrase A587 sequence
ctgggtgtcgacccagcgacgctgcgccgggtgccgtcggagcacacggtctacaactggaagcgcccgtaccgcggccgcacgtacctcgaggaactcgcggtgtggcttcgggcgcaggctgagcgggaagccgcacgctgacctccgaaacgtgggttacagttggaactgttacaccacgacggagagacgagtagatgagcctgcgtgcatacggctggacgaacgacggcaagatcgtcgagtccgaggccgac

SEQ ID NO: 25020 - DNA, 260 bp, Unknown
  Description of Unknown: LeftRegion for integrase A588 sequence
ctgggtgttgacccggcgacgctgcggcgggtgccgtcggagcacacggtctacaactggaagcgtccgtaccggggtcgcacgtacctcgaggaactggcggtgtggcttcggatgcaggctgagcgggaagccacacgctgacctccgaaacgtgggttacagttggaactgttacaccacgacggagagacgagtagatgagcctgcgcgcatacggctggaccaacgacggcaagatcgtggactccgaagccgac

SEQ ID NO: 25021 - DNA, 260 bp, Unknown
  Description of Unknown: LeftRegion for integrase A589 sequence
ctgggtgtcgacccagcgacgctgcgccgggtgccgtcggagcacacggtctacaactggaagcgcccgtaccgcggccgcacctacctcgaggaactcgcggtgtggcttcgggcgcaggctgagcgggaagccacacgctgacctccgaaacgtgggttacagttggaactgttacaccacgacggagagacgagtagatgagcctgcgtgcatacggctggacgaacgacggcaagatcgtcgagtcagaagccgac

SEQ ID NO: 25022 - DNA, 260 bp, Unknown
  Description of Unknown: LeftRegion for integrase A590 sequence
aatacagatatcacaacaacacgcccattcaaacgacgccattcaattagcagcacataataaaaaattgaaaaatatacataatatataataataacaatataataacaacaatgacagcactatcaaacaacaaaatcttaatctccattgaaggaaacattggcgtaggcaagtcaacatttgctagcatgatcaagggacacatagataactctgaaataatatgtgaaccaatagatatttggaagaatatgaaa

SEQ ID NO: 25023 - DNA, 60 bp, Unknown
  Description of Unknown: LeftRegion for integrase A591 sequence
atggaggcatctaaaaaaatcctagacctttccaatcaaaatatatgttatcaggaataa

SEQ ID NO: 25024 - DNA, 260 bp, Unknown
  Description of Unknown: LeftRegion for integrase A592 sequence
ctcgaaaaactgccagagtccgccgcatttctggttgttagggaagacgcagcggcatgaacgaatcatgtatacaaatcatgtaaacgaatcatgtaaacgaatcatgtaaacgattcatgtaaacgatttatgtatacgattcatttacacgcattgtgcatatgacaaacgaataaactgctgcacaatgcagaataagggagagaaaaatggtagacgaaatggatacaaaaaatgaaaatggggttcacctgaat

SEQ ID NO: 25025 - DNA, 260 bp, Unknown
  Description of Unknown: LeftRegion for integrase A593 sequence
ggttcgtgatgaaactccacacggtgaatgtggtaccgataaagaggaaggcttctttcgttgggacaataaaaactggttagtaacctaccgtcctgattggaatcgttatgataaacaatactactatatcgataactgcggaaataacacaacagcagtagaaatttcataaaaactcgaatttaattattgacaaactgatcctcttgggcgatactctctacatcaaagagaaacatcatccaaggggattttta

SEQ ID NO: 25026 - DNA, 260 bp, Unknown
  Description of Unknown: LeftRegion for integrase A594 sequence
aagtgggatattttctgcggggaagacggatatgggtggtcagaggccaaaaagatctgccagaccgaatgctccgagaagatgcgaaacaaatgcttggagaggtgcctggcgtttgaggagcatgagcctgttcgcctgggcgtgtggggcgggttgaccgcgcatgaacgtaacaagatctacggccgaaagtcttcatgagtcagtgcgctgcatctccgaattgttccaagactccatcgaagtttaagcggggc

SEQ ID NO: 25027 - DNA, 260 bp, Unknown
  Description of Unknown: LeftRegion for integrase A595 sequence
tcggacatcttctgcgatgaaaacgagaacggcgggaagggcgccgcggaggccaagaagatctgctggtcccaatgcaaccgccgagagaagtgcctcgaggaggcgttgaggttcgaggagcatgagccggtgcgcctcggggtgtggggcggcctcagcgccaatgaacgaaacaagatctacggccgaaagtcttcatgagtcagtgcgctgcatctccgaattgttccaagactccatcgaagtttaagcggggc

SEQ ID NO: 25028 - DNA, 260 bp, Unknown
  Description of Unknown: LeftRegion for integrase A596 sequence
aagtgggatattttctgcggggaagacggatatgggtggtcagaggccaagaagatctgccagaccgaatgctccgagaagatgcgaaacaaatgcttggagagatgcctggcgtttgaggagcatgagcccgttcgcctgggtgtgtggggcgggctgaccgcgcatgaacgaaacaagatctacggccgaaagtcttcatgagtcagtgcgctgcatctccgaattgttccaagactccatcgaagtttaagcggggc

SEQ ID NO: 25029 - DNA, 260 bp, Unknown
  Description of Unknown: LeftRegion for integrase A597 sequence
tcggacatcttctgcgatgaaaacgagaacggcggaaagggcgccgcggaggccaagaagatctgctggtctcaatgcactcgccgagagaagtgcctcgaggaggcgttaaggttcgaggaacacgagccggtgcgcctcggggtgtggggcggtctcagcgccaatgaacgaaacaagatctacggccgaaagtcttcatgagtcagtgcgctgcatctccgaattgttccaagactccatcgaagtttaagcggggc

SEQ ID NO: 25030 - DNA, 260 bp, Unknown
  Description of Unknown: LeftRegion for integrase A598 sequence
tcggacatcttctgcgatgaaaacgagaacggcggaaagggcgccgcggaggccaagaagatctgctggtctcaatgcgcccgccgagagaagtgcctcgaagaagcgttgaggtttgaggagcacgagccggtgcgcctcggggtgtggggcggcctcagcgccaatgagcgaaacaagatctacggccgaaagtcttcatgagtcagtgcgctgcatctccgaattgttccaagactccatcgaagtttaagcggggc

SEQ ID NO: 25031 - DNA, 260 bp, Unknown
  Description of Unknown: LeftRegion for integrase A599 sequence
tcggacatcttctgcgatgaaaacgagaacggcgggaagggcgccgcggaggccaagaagatctgctggtctcaatgcactcgccgagagaagtgcctcgaggaggcgttgaggttcgaggagcatgagccggtgcgcctcggggtgtggggcggcctcagcgccaatgaacgaaacaagatctacggccgaaagtcttcatgagtcagtgcgctgcatctccgaattgttccaagactccatcgaagtttaagcggggc

SEQ ID NO: 25032 - DNA, 260 bp, Unknown; identical to SEQ ID NO: 25028
  Description of Unknown: LeftRegion for integrase A600 sequence

SEQ ID NO: 25033 - DNA, 260 bp, Unknown
  Description of Unknown: LeftRegion for integrase A601 sequence
tacgatctagcacaaaaaatgatacctgctacaaagagaagtcctaacatactcaaataaagatgagaaagacacaatcgaaattgcatcaggcctagaaaatgttgaatatgatgaaattctagcatttgaagcataacacacaaaaaccgccctcaattaagagagcggttttgtcctatctaaaggagctttacctcctaatgttgcaaaattttaaatgttggatttttgtatttgtctattgtatttgacgagta

SEQ ID NO: 25034 - DNA, 260 bp, Unknown
  Description of Unknown: LeftRegion for integrase A602 sequence
cattctctctgagagtttattattcccagagcagaaaggctttaactctgatcttgaacagagatcgccgaatgagttatcatcagcattcactagaagctgaattacaacttcatctggtgtattctttccgaaaattaaactcatttgttttctatagagagaattttgtttctaacatttttattctttagaaaagtatgacaactcaatctactcttactgtggcgagagcctacgtgcgcgtcagtacggaatct

SEQ ID NO: 25035 - DNA, 260 bp, Unknown
  Description of Unknown: LeftRegion for integrase A603 sequence
aaaatcaaagcagagaatgataaatttatgaaaagtgtaactcaaaagatgaacaactagttatcactcaaaagatacttatttttgagaaagcatagatctaaagattttttgttagtaataattattatcaccaacaaaatgacaacaaataaaaaaatttcacaaatgggtatatttttaagtagacgtgcagaagtattcaatgaggaaaaaaaatatttaatgaaccaacccaaaatgatagaatatttgtttaa

SEQ ID NO: 25036 - DNA, 260 bp, Unknown
  Description of Unknown: LeftRegion for integrase A604 sequence
acatcaggctttatttttttgcctttttttcaaaaagtgcggaaaaattactcccaaacctacctagtaaggtaggaggaatatttgtattccatgaactttggcataaatttatcaggtcgaattagtttgtctgataacttgacttattttccctttagagtgatatatagtgtgccattacataggaaggagagtaaatgtccgtaaaaaagattagagtcaataaacaaaaacacaagcagaggatctgtgcctac

SEQ ID NO: 25037 - DNA, 260 bp, Unknown
  Description of Unknown: LeftRegion for integrase A605 sequence
tgatttagaaatccctatcttttcaaaagatagaagttacattgatcaatatgtatatttaaataaataaatagaaattagaaattagaaaggggttgcattaatttgcaatctctttttaattaaaaacttaaataagataaatttattcaacttttattaataaaatatataattaaaaattatagaggtgatgttttatgaaaaataacaataaatggtcaatagaagaagaacagcaactagcaaatatagtttta

SEQ ID NO: 25038 - DNA, 260 bp, Unknown
  Description of Unknown: LeftRegion for integrase A606 sequence
catcaaagaaggcaaggcttcctgccaaggcatgcgtgtgcctgagaaagctattgaagattggagacttaagactcctgtaacagtgatagaaaggaacgaatatgggcaaaaacattacagttattccagccaagaaaatgcagttgacagtcacccatcagcaagtcaccaaaatcagagtggccgcctattgtcgagtgtccaccgaccaagacgaacagctatcaagctatgagaaccaagtcaattactaccgt

SEQ ID NO: 25039 - DNA, 260 bp, Unknown; identical to SEQ ID NO: 24229
  Description of Unknown: LeftRegion for integrase A607 sequence

SEQ ID NO: 25040 - DNA, 260 bp, Unknown
  Description of Unknown: LeftRegion for integrase A608 sequence
aaatcggacatcttctgcgatgaaaacgagaacggcgggaagggcgccgcggaggctaagaggatctgctggtcccaatgcaaccgccgagagaagtgcctcgaggaggcgttgaggttcgaggaacatgagccggtgcgcctgggggtgtggggcggcctcagcgccaatgaacggaacaagatctatggccggcgcgggtgacaaggggtaagtgtcggcggtccggctgctcgaatctgactcggtcaagtggcggc

SEQ ID NO: 25041 - DNA, 260 bp, Unknown
  Description of Unknown: LeftRegion for integrase A609 sequence
aaatcggacatcttctgcgatgaaaacgagaacggcgggaagggcgccgcggaggccaagaagatctgctggtctcaatgcgcccgccgagagaagtgcctcgaggaggcgttgaggttcgaggaacatgagccggtgcgcctcggggtgtggggcggcctcagcgccaatgaacgaaacaagatctatggtcggcgcgggtgacaaggggtaagtgtcggcggtccggctgctcgaatctgactcggtcaagtggcggc

SEQ ID NO: 25042 - DNA, 260 bp, Unknown
  Description of Unknown: LeftRegion for integrase A610 sequence
aagtgggatattttctgcggggaagacggatatgggtggtcagaggccaagaggatctgccagaccgaatgccccgagaagatgcgaaacaaatgcttggagagatgcctagcgtttgaggagcatgagcccgttcgcctgggtgtgtggggcggattaaccgcgcatgaacgcaacaagatctacggccgaaagagttcatgaagtacgggaagtgccggcggcctaattgccagaactccactaggtcaagggggtcg

SEQ ID NO: 25043 - DNA, 260 bp, Unknown
  Description of Unknown: LeftRegion for integrase A611 sequence
cccatcgccaccgcccgccgcgcggcaaacctcacccagcaccagctcgcgacccgcgtcggggtcagccgtggagccgtcgcccagtgggagatggagagcggcacacgccccgacatcgacaacgccaagatcctttgtgaggtgctcggcctgacgcttgagcagatcttcgccgaccagccgggcagggcagcctgatgcgcgccttcgcctacgtccgcgtcagcaccgaagagcaggccgacagcggccacagc

SEQ ID NO: 25044 - DNA, 260 bp, Unknown
  Description of Unknown: LeftRegion for integrase A612 sequence
aagtgggatattttctgcggggaagacggatatgggtggtcagaggccaaaaagatctgccagaccgaatgctccgagaagatgcgaaacaaatgcttggagagatgcctggcgtttgaggagcatgagcccgttcgcctgggtgtgtggggcggattaaccgcgcatgaacgcaacaagatctacggccgaaagagttcatgaagtacgggaagtgccggcggcctaattgccagaactccactaggtcaagggggtcg

SEQ ID NO: 25045 - DNA, 260 bp, Unknown
  Description of Unknown: LeftRegion for integrase A613 sequence
aaatgtgtcattatattaacttctattttattgcctatataatttatccatcaagattaatcttgtattttgatcgcaaattttaaataattaaatacaaaaaattgatatttattgatattcatgaaaaaccatatatataaacaaaatgaacaacataaacttctcgagatcctttaaattatctatttttcaaaacaatgaagcaagttaatcaagttttatcccaagtttttccgtatgtatttaataatatacct

SEQ ID NO: 25046 - DNA, 260 bp, Unknown
  Description of Unknown: LeftRegion for integrase A614 sequence
gagacgcctgcgaagtggcgtcagcccgctctccggggtcgcggtctgcatcacctgtgaccgtccgttgcaccacgaccggtatctggtgaagcggccctacggcgactacccctaccggtactaccggtgccgagaccgccacggcaagaacctgcccgccgagctggtcgagaccctcatggaagagtccttcctggcccgcgtgggcgactatccggtgcgggagagggtctgggtccagggggacacgaattggg

SEQ ID NO: 25047 - DNA, 260 bp, Unknown
  Description of Unknown: LeftRegion for integrase A615 sequence
aacgtaaggatgatccagattttgaatttaattctacttatatttgtacactagtggatcgtatgatgggagaatctggacagactgctgaagacctagatatcgaccccgaaattatttaaaaataaaaccttgacacaacttatcctctgaactaatatcttatcaaaaggtaaaaacgagttcagaggatttttattatgattaaaaaatacgtagtttattctagacaatcaaagaagtcaggaatgaaaggtcaa

SEQ ID NO: 25048 - DNA, 260 bp, Unknown
  Description of Unknown: LeftRegion for integrase A616 sequence
gttggttcggattatgaatacgacatcagaagatacttaatggctaattacggactgactcctgcggaaatccgtaaacataaaggtccactcactcgtcgtaacaaaaccaagcagtttgttcgttttgttaaaactaacgccgacttatgcattagagaagacgatatccgtctgggtaaaataaaggaaactgaattatgtaccctgtagataaagaatccagaattcgtttaatggaagatctggacaaatggata

SEQ ID NO: 25049 - DNA, 260 bp, Unknown
  Description of Unknown: LeftRegion for integrase A617 sequence
gaagtctacggggttaatatcgttgaactccgggaaactttgagaggcgcttgtgtctgataagaattccagagagttcaagaagctcaaaaatgcggctaagaaatattgtttggaacctaatgcttcggaattagttttaaagaaaacagggatctcacccactagagtcattaaactattccgtgatgcaggtgaagggagtttgtatgattacatcacccatttaaaaatgttagaagcgaagaaactcttagacg

SEQ ID NO: 25050 - DNA, 260 bp, Unknown
  Description of Unknown: LeftRegion for integrase A618 sequence
aattatgtattgagatcggtggattcgggtggggagaaaaaagaattaggtggtgtttaatcctcgggcttgtaagtatgtttcttgattacgtttcatacagaggcatccgctattgtgggttccgtcattgcaataataattatttaaaacgtagtcgctatttgggggaagtttcgtcgttttaaatgggacgggccattgagggctgcaacatgcaggtgagcatttattgttggtcaaagtataatcgcttatat

SEQ ID NO: 25051 - DNA, 260 bp, Unknown
  Description of Unknown: LeftRegion for integrase A619 sequence
taccaagagtacaagtatgacaaatacgaaaagggtctcctagacgataaacctaaacagaagtctctaatctctcaatggattaaagctaagaaagataaagtctgtccgatgatcgattgggaagaataaaatctattgacagcgtggaaaccttttgctagaatctccttatcaacttggtaaggagatttttatttatggctaagaagtatgtaacttataaacgtgtttcaactaagagacagggtgaatcggga

SEQ ID NO: 25052 - DNA, 260 bp, Unknown
  Description of Unknown: LeftRegion for integrase A620 sequence
ctatatttacaagagttacactctacttttgtagattaaatgtcaatttatttgtttgtttgtgataatattgaaaaacatcaattaaaacaatcaaaaaatgtgacataaatcaataattttatttttacacaacttcttgatttctgagcctggctatctctattcttattcaaagcctctttagaatggtggtggccatgtcagcagtttgttacttcatactcataaagaaacctataagctttcaatttcttaag

SEQ ID NO: 25053 - DNA, 260 bp, Unknown
  Description of Unknown: LeftRegion for integrase A621 sequence
ggagtgattagccaagggtctttggcaaaacttattaagaaatataacctaaacagttgacacaaagattaaataatattatcttgtacacagattaagaaataaggagaaaatcatgattaaatgtaaagaagacctgtacaataaatacatcccgatggaagaaggtggattacgtggtaaattcatcgaggtttgtaacaagtttggtattcacccagcgtttagttttagtattgacatgagtcagaaatattacg

SEQ ID NO: 25054 - DNA, 260 bp, Unknown
  Description of Unknown: LeftRegion for integrase A622 sequence
ggagataaggtaggatttgttgtaccgaggtacagaacccttaaagagggtactatattaaaactaggtaataagatggccaccataggatatcctgatagcaaaggaaaagaagttaaggttactagatactactcacaagtagttttcgtagggagtgccactaagtaatcaaataaaataatcaaaaattaataaagatggataataagaaatacgtagcatactacagggcgtcgacagaaagccaaagagatgga

SEQ ID NO: 25055 - DNA, 260 bp, Unknown
  Description of Unknown: LeftRegion for integrase A623 sequence
ttagaatatgttaattataactatttagaactaaatagtattaattagtataattaaaaattagacgacttaaaattataaatataggattaataataatttatagacctcctaaatttaatgtatctttttttttatattgttatgtatatatgactactaaacctagagcgttagcatacttaagggtatctactacaatgcaatcagaagaaggtatttctttagatactcaacttaaaaagattcaagattattgt

SEQ ID NO: 25056 - DNA, 260 bp, Unknown
  Description of Unknown: LeftRegion for integrase A624 sequence
aacatcgagcgtatcatcagtgtcgcaaccagtggcaatagaagttctttttgtatgtcgttccgttctcactttggtttaactccgacggaagcccgtcgttatcctgaacgtgttatgcgtttaaagggaacagaaggattaagaaaatatatcgaggtaggtgttaagaacatcacactaagttaaggtaataaaccatgaaagcagaatttagagataagctttttaaagatacgttaaaatggatagacaacaac

SEQ ID NO: 25057 - DNA, 260 bp, Unknown
  Description of Unknown: LeftRegion for integrase A625 sequence
tttaaacaacaattccgtacacatcctcaaacgtacgccaattcttttaagagtaagtagttatggatacccaagaaaccattttaaaaatcgaagccgcagtcaaagaactatttgcagaaagcaaagcctccgctaagatttacgcacggctcaatatgagtgggccaagcatgggacgtttcctagagaaacataaccacccatcggttaaggagatgttagtagaagctcgcatgggacacgctaaacaccttctt

SEQ ID NO: 25058 - DNA, 260 bp, Unknown
  Description of Unknown: LeftRegion for integrase A626 sequence
aatagttgttggtctgcttctactgtaaaacgtgcattagatagacttcaaacactttaacaaaggagatattatgagtgtttatttaaataaagtaagacgattcgtaaggaagcattacgatttttttccaatcatattctatgcagctgtaatcatgtttatgttatatgcatttatgattgtcggttgtgccttggacgatgcttgttacgaggttcacatgagatcaatagaggaggttccgtatgtctaccccc

SEQ ID NO: 25059 - DNA, 260 bp, Unknown
  Description of Unknown: LeftRegion for integrase A627 sequence
gaccagacctatacggactggcgtaaatctttacgcatgcgcatggcttcagacttaatccgagataacccgaagattgacgtaacacgtatccatggacaacttggcatctgttccttccaatacttcgtaactttatttaaacaacactaccgtacgcatcctcaatcgtacgcgaatgcattcaagagaaaatgaatatgactgaccacgaattagcactacaaatccaagactacgttaaagaaatctatatgaaa

SEQ ID NO: 25060 - DNA, 260 bp, Unknown
  Description of Unknown: LeftRegion for integrase A628 sequence
aaaataggtcaaaatccctaaaaaaacaacatagtttttgcctgaaagtactgaaaatgttatactatcagcatgtttaattaaaaaaagatttagtttaagtactgttttaagcacgataatgcctaaactagtataaaactacctagatatttagttctactctaaaaacattctaaaaacatgcttaaaaggaatatatgtcacagcttgacacaccaacagcacgccaaccagttctatatggctatgctcgagtt

SEQ ID NO: 25061 - DNA, 260 bp, Unknown
  Description of Unknown: LeftRegion for integrase A629 sequence
caggtaaaggtgtgattttgaaatgtaagtatgacgaagaagatattattgatatcgatagtgattctcatttaaccctgaaaaaggttatacctgttgaggtcattaaatctctcaatgaattaaataaacattgacacacaatctccattgaactattatctaatcaacaggtaacaagttcattggagatttttattatgtcacgcaatatttcttacaaacgtgtttcaactacacatcaatcttgtgatcgtcag

SEQ ID NO: 25062 - DNA, 260 bp, Unknown
  Description of Unknown: LeftRegion for integrase A630 sequence
agttggaaacagagtacagtacaaagagtgttagaaagacacaatattaatttattctaaggggtaatatatgcaaatacctgaaggttcaacacactattatgcagagggtagtaggtactacatggtacacgagaatatgtggtggttttatttaagtaagtgtaatgaatggcgaattagttctcatttaggagattggttcgaaaataatttaattgaaatttaaggagatactagtggctgatttaacttgcaca

SEQ ID NO: 25063 - DNA, 260 bp, Unknown
  Description of Unknown: LeftRegion for integrase A631 sequence
agttggaaacagagtacagtacaaagagtattagaaagacacaatattaatttattctaaggggtaatatatgcaaatacctgaaggttcaacacactattatgcagagggtagtaggtactacatggtacacgagaatatgtggtggttttatttaagtaagtgtaatgaatggcgaattagttctcatttaggagattggttcgaaaataatttaattgaaatttaaggagatactagtggctgatttaacttgcaca

SEQ ID NO: 25064 - DNA, 260 bp, Unknown
  Description of Unknown: LeftRegion for integrase A632 sequence
ttacggtaaatcctatcgtgaatggagaaaggatactaggatgaaattagctaaggagttactccacaaaaatccaagtgttaagatttcagacttagcgactaccgtaggttcttgtagtgcgacctatttacggaagcaataccaagaagtctatggagttaatattgttgagctccgggaaactttgagaggtgttcgtgtctgataagaaatcgaaagaactcaagaagctcaaaagtgccgccaagaaatattgt

SEQ ID NO: 25065 - DNA, 260 bp, Unknown
  Description of Unknown: LeftRegion for integrase A633 sequence
aagttcgagaaaaaatatggaatgggacctaaacgttatcaacaacacacccgtctttaaattaattcctaacccaaggtacattatatgtgagcggtacaagattaggtttagctagactagcgtgtccgaaaagaaaaggtgtatgccgcgagtccgacctaggaagttattccttcattacaaccgctcacaactattctggttcaggggggagtcctccttgtcaacatcgatgtcactaaagccatcccctgaac

SEQ ID NO: 25066 - DNA, 260 bp, Unknown
  Description of Unknown: LeftRegion for integrase A634 sequence
aagttcgagaataaatatgggatgggtccaaagcgattccgtcaactgtcaaggttgtaattaattcctaactcagtgtacattgtatgtgagcggtacaagattaggattagctagactagcgtgtccgaaaagaaaaggtgtataccgcgagtccgacctaggaagttattccttcattacaaccgctcacagcttactcatatcgtgttacgagtataaagcgccgatcgccacccccatggcgatcactattttca

SEQ ID NO: 25067 - DNA, 260 bp, Unknown
  Description of Unknown: LeftRegion for integrase A635 sequence
ggtaagtttaccccctcccaagcactgcgcgcactatcttacttaaacattacacgataaattacaggggaacttatttatggcggtaccaattatacctaaaactgaatgttacactacacctgcaaagaaaagctctagcttcggactggagatgaatgcatctacacttaaagctctttctcagaccctatatgactacaagattgaagcagttgttcgagagtacagtacaaacattactgacagccataacgatt

SEQ ID NO: 25068 - DNA, 260 bp, Unknown
  Description of Unknown: LeftRegion for integrase A636 sequence
aaaaaatattgggattctattatggttggaactgtatacagaaaacataataaaaaataattttttataaaaatcatacggtcgatagtttatgggaattttcaatgtatacgagaaataataataataaattcgtacggtcgatagttcatgggaattttcaatgtatacgagaaataataataataaatccgtacggtcgatagttcatgagaattttcaatgtatacgaaaaatatatttttaatatttcgtataca

SEQ ID NO: 25069 - DNA, 260 bp, Unknown
  Description of Unknown: LeftRegion for integrase A637 sequence
gccgccggggccggcgccaccgagctgttgagcgcctccctgtccgaattaaaattttaaagaatttttgttactaaatggagaccgaccctctgttgggaccggattccgagtcctctggcgcgtcgtcctcgctgccggtggtgcccggcatgtccgcggacccggattcggccgccgccgcgcgaagcgccacaccggtgttggcggcggcggcgcccgtcctgccggccacgatcgtccagacggagcccgtgccg

SEQ ID NO: 25070 - DNA, 260 bp, Unknown
  Description of Unknown: LeftRegion for integrase A638 sequence
tataactggctccaaaataagagagccagtgacaaaaagcaatcaatgatgaattcatgaaaagtgtcaccaaaaaataaacatctaagtatcatgcagatgtttattttaaggcctaaagaatttttgttagtaataattattattaacaacaaaaatgacaacaaataaaaaaattacacaaatgggaatttttttgaatagacgtgcggaagtatttaatgaggaaaaaaaatatttaatgaaccaacctaaaatga

SEQ ID NO: 25071 - DNA, 260 bp, Unknown
  Description of Unknown: LeftRegion for integrase A639 sequence
gccgccggggccggggccaccgagctgttgagcgcatctctgtccgaattaaaattttgaagaatttttgttactaaatggaaaccgaccctctgctgggaccggattccgaagcctccggcgcgccggccgcgctgccggtggtgcccggcatgccctcggacccggacctcgccaccgcgcggagcgcggcgccggtcgcggcgccggtcgcggcgccgccgcccattccgccggccgcgatcgttcagaccgagccc

SEQ ID NO: 25072 - DNA, 260 bp, Unknown
  Description of Unknown: LeftRegion for integrase A640 sequence
ttccatatcaactgacaaaattaatttccataatggaacaccatggtttcgcgtatcgacaacaaatcgtcgtgttcaaaggctgaacagctgttggtgacaaatgacatctattgtgtcgtttgtcatctatatgggtcatatcgacagaattattaatttaacaaacacaaaccataacatttcaacaatggaatgaaatgtcctcgaaaaatgtcaaagaaaccgcaaaattcgttgctcccggaagagctcgaaaa

SEQ ID NO: 25073 - DNA, 260 bp, Unknown
  Description of Unknown: LeftRegion for integrase A641 sequence
tgtgcaggtaacggtttcggtcaaaatgcacatatacgaactggggtagaatatgtaactaagcttgcaaagagaaagtttaaatagtgtacctaaaatttaggtaaaatcaaaaaattaatttattgacttacatccccgttcagctatacttggtctaaagataagaaattaactataactaacggggatttttatttatgcgtaatattgggtaccttcgtgtctcaacagataacggttcgcagaaaacagacaga

SEQ ID NO: 25074 - DNA, 260 bp, Unknown
  Description of Unknown: LeftRegion for integrase A642 sequence
atatttgtggcgaaaatgaatggtttaaggaaatatagaaaaaaagaagaaaaaaaatgaaaaataaaagagaatatcaaagaaagtaaagaatgtgtgttactagtagcatcccttataatcaaatggatttaatttatactctacaaatttgccttcattttcatcaaaaataaatttatcaataactgatttctttgtgaataaatatttaaaatgtgaatataatagcatatttattttttcgtcgtatttattag

SEQ ID NO: 25075 - DNA, 260 bp, Unknown
  Description of Unknown: LeftRegion for integrase A643 sequence
aaaaagttagagacaaaatttatgcaaaagcaattgaacaattattttaaaaccaagtgattccattggtatctcaatatcctaatttttctttatctacgtaataatcaacaaaaccattttcagctccttggatttgttttggtgtcatacataaacaaccagtgccaccagtattgtttgtgcaaacataatcggacgctaaatatttgtttttaccatctttgcatacaaaaggatcatatgttcctttaaatggt

SEQ ID NO: 25076 - DNA, 260 bp, Unknown
  Description of Unknown: LeftRegion for integrase A644 sequence
aaagatgaaggacaagggggtggttctgagatgcaggaaggtaaggatacttccgagtgaggaacagcgagaaatactcaagtcttgtttcggtatccatcgacacatctataacgagtgtgtcaaggccgagaaggacggggacatcgatggagctggggttagggagtgctacaagtggcgaaaggctttcactacaagagaggactactatggacaggggaagaattggaaagacgattgccccagccataccaaac

SEQ ID NO: 25077 - DNA, 260 bp, Unknown
  Description of Unknown: LeftRegion for integrase A645 sequence
gaaactttgtgttactttacattgaaaggttttcccgaatcagtgaataagttcatggttgatgaatggaattaccgtattgacatggaaatttagaacaaattgaaaaattaatttatacaaaacgtttgacacatatgaccctctttggtaatctttacacatcaagtagtagagaacaaccaaagaggattttatttatgagacatatcggatatcttcgcgtaagtaccatatcacaggtgaccgaccgacaactc

SEQ ID NO: 25078 - DNA, 260 bp, Unknown
  Description of Unknown: LeftRegion for integrase A646 sequence
ttctttgcataagatttcctattgtgaaactgatctttagttatactgcctgatgataacccttcgatgataaccataacctgttgtgtaagcactggttggaaggctagtaattccttgtaattcatagttgactcctaagtaattgtggtataatatacattatatcatgtaatgagtattgaaagggaaattaatttatgagacatatcggatatcttcgtgtcagcacgcaagaccaatcggtatcaagacaactc

SEQ ID NO: 25079 - DNA, 260 bp, Unknown
  Description of Unknown: LeftRegion for integrase A647 sequence
cctacaaccattgtgcaaagaatgtaactctttgaaaggaactgaaacgatagattatagggtagcagataaacacaaagctaggaaaagaaagttagagtgtagaagactgaggaataaaaacaattgacttacatccccgttcagttatacttggcctaaagataagagattaactataaccacggggaattttatttatgagacatatcggatatcttcgcgtcagtacgatctcgcaacaggttgatcgacaacta

SEQ ID NO: 25080 - DNA, 260 bp, Unknown
  Description of Unknown: LeftRegion for integrase A648 sequence
aagccatcacgcaagcgcactagcgcaaattcctcaagatcgcgaagcaatacccgatgaattcaacggcgtcgacctgttcggcgctgatgatttcggacttataggcgggattgtctgttagcaagtgcagctcgcccccgtgcatgcgctgcactcgccgcaatctgatgctatcccccatacgcaacacataaacgccgtcaacatcacgcggccgtcgatccacgagcaccacgtcgccattgttgattgttgtc

SEQ ID NO: 25081 - DNA, 260 bp, Unknown
  Description of Unknown: LeftRegion for integrase A649 sequence
ttgttttttttttaataaaattacactgactattagtttaattttattgaaaacctgcacaaaactacataaaaaaaacctaataaaaattgaataatttatgttctaaatacttcattatattttcccattaatattatagttttacaactattgaattctcatccgtttcgtaatagaaaatcaaaaaattaatccaaatggatcttcaaaaagcttgtgatcgaatttcccaagaatttgaaacagatattataatg

SEQ ID NO: 25082 - DNA, 260 bp, Unknown
  Description of Unknown: LeftRegion for integrase A650 sequence
atgtccaatcaatagcccacacaatgtagacaaggactatcttgggacatttgttgaatacacttacatagacaaaaacaagcgtaaacaacatgtcgaggaatactgcttaagagtagaatggctgtaaataataaataccttgacaagtgtttattcgttttgtaaagtgagaatacagcaatggtttaggagtggttatgaaaaagtttgttgtttacagtcgtctttctaaacagaaaaaaggtgaggcacaatat

SEQ ID NO: 25083 - DNA, 260 bp, Unknown
  Description of Unknown: LeftRegion for integrase A651 sequence
tagataacatattggaagaagaatacgggtttacgtctcgtcaggcattttatgagtatatcacagactaccatgcaaataaggtggttacgatcgcagatgctcgtaaaataaaagataaaaagagtgaataaaatgcttgactctaacatagggtatatgttacaatattaatagagttaagggaaggaggaaagatagtgttatgtcggggttgcagtaaagaaatagaacctgactataggtatggaaatactcac

SEQ ID NO: 25084 - DNA, 260 bp, Unknown
  Description of Unknown: LeftRegion for integrase A652 sequence
gtaatgttaaaaggtagattgtttaaaagttacaatttaaaaagctggagttttaaaccagattgttcagcagtatatccacaaatatacaatggatataattggagtagtgataacattaaagttaaaaaaaaaaacaaagcgacttgttttaaaatattcaatcatgcaattaacagaatgaaagtgaggattaaataatgaataaaagatatgtaggctacactagagttagtacagataagcaaggtaaggaaggt

SEQ ID NO: 25085 - DNA, 260 bp, Unknown
  Description of Unknown: LeftRegion for integrase A653 sequence
tcaagaaggctactataagaaggaggctgtctaatgaataaagatcaaaaagaattattaactgatgttattgataagggtattgcacatgaaaaatctaaatacccagattgggatgataacaaacatttaattaaagttgatattaagtttgtagataacaacttacatttacattttactagaaaggataaaaaataatgaaaagatatgtaggctacactagagttagtacagataagcaaggtaaggaaggttat

SEQ ID NO: 25086 - DNA, 260 bp, Unknown
  Description of Unknown: LeftRegion for integrase A654 sequence
gggagtttgttcgatgccaaagcggtacaacgtctttgtgcaaaattgaatattaaataaggaggaaacatggcagttcaatcttttgaggagactgttaaaaaacaattcctatcgaagcgagcgatggttgaatttttgcattttctcgaagtagatagggtacttattgagactacaccagatggtaactggcaagtctcgtatattgccaccaggcatatcgtagacagtacgaaagaagaaagttcggaagttac

SEQ ID NO: 25087 - DNA, 260 bp, Unknown
  Description of Unknown: LeftRegion for integrase A655 sequence
gggagtttgttcgatgccaaagcggtacaacgtctttgtgcaaaattgaatattaaataaggaggaaacatggtagttcaatcttttgaggagactgttaaaaaacaattcctatcgaagcgagcgatggttgaatttttgcattttctcgaagtagatagggtacttattgagactacaccagatggtaactggcaagtctcgtatattgccaccaggcatatcgtagacagtacgaaagaagaaagttcggaagttac

SEQ ID NO: 25088 - DNA, 260 bp, Unknown
  Description of Unknown: LeftRegion for integrase A656 sequence
gttaagagcttacaaagtggagataaaaccaactcaagaacaaagtataaaaattcataaaactattggagttagtagatttatttataatttttatatagctcataataaagcaatttatgaaaaagaaaataaatttataagtggtatgcaattttctaaatggttaaataatgaatatattcctaataatcaagataaaatttggattaaagaagtttcttcaaaagctaccaaacaatctataatgaatggagaaa

SEQ ID NO: 25089 - DNA, 260 bp, Unknown
  Description of Unknown: LeftRegion for integrase A657 sequence
atttatttcccagccaattgccaacaagagggatggaaaaatcatggtatctatcattgattatcatgtactacaaacattatgttaaaaaaatagacagtaatggagggatattacgaaataaaagataagcatccagactacctattaattttcaggaaagcagatttttgtgaaatgtatgcgaacgatgcagcaatcgcttccaaagttttgaacattgacatcagaaaacagacccacggacatggccaaacgct

SEQ ID NO: 25090 - DNA, 260 bp, Unknown
  Description of Unknown: LeftRegion for integrase A658 sequence
aacaagcatttaaaaagcttttaaaagccttgaatttaaaagaaagaaagctatacaccacacggcacacttttgcaagcttgatgctaagccagggcgaagaggccatgtgggttacaaacagaaactaaaatcctataataacctataaaatactataatttttgtatagttgttaagttttgtgttatactgcttgcatgaataaaagaatgctatcaatcggtcaagcgagtaagcttttgggtgtaactatccaa

SEQ ID NO: 25091 - DNA, 260 bp, Unknown
  Description of Unknown: LeftRegion for integrase A659 sequence
aagctttacgctttcgcaggagaagataaaggcatgctttatagcgggcttttgggcgtgattgacaattgtccggtagtggatgcaggagtttggaataaattgaatgtgggtaaaaaacagcaactaaaatcctataacaatccataaaacactataatttttgtataggttattaagttttgtgttatactgctcgcatgaataaaagaatgctatccatcggtcaagcgagtaagcttttgggtgtaactatccaa

SEQ ID NO: 25092 - DNA, 260 bp, Unknown
  Description of Unknown: LeftRegion for integrase A660 sequence
aaaacagttggacttgtatctgctatgtttggaatattatctgagaatgacaaggaggcaaaagtaaaataccaaaaaagattttacgagaaagttcctggtttacaatttccagatgattgggatcagttaagtgtagaagagaaagaaaaaagacttgatggtgtaaacaaaatagcactagaaaagagaggtaactaatgaataagattgtagctttagtaagagtaagtacagacaagcaagatgtaaacaatcaa

SEQ ID NO: 25093 - DNA, 260 bp, Unknown
  Description of Unknown: LeftRegion for integrase A661 sequence
attgcggtcgtcgagctgccagtcagctacgaggacgaggacgggcaggtctattacggcgccgacggcggtattcgcgtagacacgaccgcgcggggcaccgatttcccgctgatctacgtcgaccacacgccgtatgccccagaaacgctgcgccgcgacgccgccgagatgctcgccgccgcactggaggccgagaagtgatcacctacacctgcgactcgtgcaccgcgccgatcaccgggccggtacgtctcagc

SEQ ID NO: 25094 - DNA, 260 bp, Unknown
  Description of Unknown: LeftRegion for integrase A662 sequence
cctcagaatgcggaagataaagatgaaccccacgaaaacccagaaactgatgctgaataaatacgcagacgccgcgcgttttacttacaacgcgtgtgtgagttctgtcaacgacaagacccacacggcaaataagtttactttgcgcaatgcgttcgtcacagcaaagaacaatccgttcttcgaggacaagaagtggattctcgtcactccaaaggtgatcagacagcaggcggtattcgaggttgccaagaatttca

SEQ ID NO: 25095 - DNA, 260 bp, Unknown
  Description of Unknown: LeftRegion for integrase A663 sequence
acccgtaataaaattaggaaggacactgttttggagaattatcccctttattgtccaaaatgcagacaagaaagtttatcgaacttagcaaactataagtttctaagagataaaacctataaaacttgtacggatattgtagggtaggaaaagaaatcttcctctatactaaaataaaccgaatgaaaagggggatcgaagtgaatattatcaagtcgtttaacaatacgattgattatcttgaaacagttcttgatgat

SEQ ID NO: 25096 - DNA, 260 bp, Unknown
  Description of Unknown: LeftRegion for integrase A664 sequence
aagcttgataagactcaaccaattgtgaggtttaaaaccaaagaagctgctgaaaggtttgctcagaaaattcttaagtctgctgaaaagttaaatgtctagttaggggtttgtaactgttcggtaatttctacctataactagacaaacctaacggaacgtccatataattaactcagtcaagtaaaggagttaattatatggaaaaccacgaagtgatgatttcaataggagatactgctaaagaacttggtgtttcg

SEQ ID NO: 25097 - DNA, 260 bp, Unknown
  Description of Unknown: LeftRegion for integrase A665 sequence
tttgattttatttatgatttaataaccttgagttttaaattacaaaaatttaaactttagttttagttgttttaaaagctttaaactttagtttagattgtttatatgttatgatattatattctataccatctatgaaatattataagaatatataaatatctataattatattataagttttcttaaaaaggatttaaatgtatagtattggagaattttctagaattataggtgttactaggacaaccttaagaaat

SEQ ID NO: 25098 - DNA, 260 bp, Unknown
  Description of Unknown: LeftRegion for integrase A666 sequence
aacgtttgttaggaatacttttagaaaaatagagagtactgatatcaatggcccccaaggtcattgattggttattattgtacggtgaattgatctttactaaaaaaaatatcaggacccctggtttttcagtaaaaaaatgttcaacaaataaaaaataactgttattctaatttcacacattcaacaggttattcataatgagtatttctactaattttccaggaatcatcactagtctaagcaaggcacttcctggt

SEQ ID NO: 25099 - DNA, 260 bp, Unknown
  Description of Unknown: LeftRegion for integrase A667 sequence
caaataatgaatgtatttgttgcgaaaatgaatggacaacgaaaatacaaaaaaaagtaaatcgttaaaaattcattttatttatagtatttatcataccacctacataaaaatcgacattatatttttctaataatatatgttattctttttttttctatttattgtatgaatatattgatataaaacaaatattatttgctttataaataaatgttaaaaattgaaataaaaaaaacaaaatttatcagcaacaacat

SEQ ID NO: 25100 - DNA, 260 bp, Unknown
  Description of Unknown: LeftRegion for integrase A668 sequence
tgccgacaagcgatcgctccccaagttagccgagcttgctggtataagccacacatactggcgggaagtggaagcagagacagttaagaacctacaagaacacacacttgccggaattgagaaggcgttaggtgtaaactttggagtggggtttggtaatgattagaaatatttatccatacttactcataactacttaaatgctatgctatagtagttatatgagtaagttatctatatctgaagcagcaaagttaaaa

SEQ ID NO: 25101 - DNA, 260 bp, Unknown; identical to SEQ ID NO: 25100
  Description of Unknown: LeftRegion for integrase A669 sequence

SEQ ID NO: 25102 - DNA, 260 bp, Unknown; identical to SEQ ID NO: 25100
  Description of Unknown: LeftRegion for integrase A670 sequence

SEQ ID NO: 25103 - DNA, 260 bp, Unknown
  Description of Unknown: LeftRegion for integrase A671 sequence
tacaagtttttctttttctgaattattaattttctgctaaaagtgttcaattaaagacctgcttttgtgaacaatagatatttcaaaaagataaaaaatagaaactagatatttcaatgaaaaatattgtgtaattgttcattttattattgatgccttttcgtgaacatgttataatttaattataatattgtggaagggtgttgattatgaaagtcttaggttattgtagatgttcaacaaatgaagaaaagcaggac

SEQ ID NO: 25104 - DNA, 260 bp, Unknown
  Description of Unknown: LeftRegion for integrase A672 sequence
ttctatattgtcataatcattaaatcctttattattaatagattttaaattaaaccaaccatcagtattaatattttttcgttttttatttttaaaccaatgataattttttatattcattaatataaaaaattatatatatttaaataagtttataaaaattgttatttatatataaagatataaagaattataatttaatggacgaatatctaggtggtaaagaagctagtaaaatattgggtgtacatcaaagaaca

SEQ ID NO: 25105 - DNA, 260 bp, Unknown
  Description of Unknown: LeftRegion for integrase A673 sequence
cataaaaatagaaaaatcgtagaggagttaagagacgttgctactaggattcaagactgagttaaaactaaataatcaacaacgctcattattagcccaacacgcaggaaccgcacgtcatgcttggaattggggtttggctttaaccaagcaaattttagaccataatcaagctaaccctgatgaaaaaattaagtttcctacggctattgaccttcacaaatggttggtagcattggtaaaatcagagcatgattggt

SEQ ID NO: 25106 - DNA, 260 bp, Unknown
  Description of Unknown: LeftRegion for integrase A674 sequence
ggcggtccggaaccgagggcgtgctcctcaacgagcgcaccgcacccgtcgcgatcgtccagtacgacaacctgcccgaacccacctgggccgactggaaagacatcgcgtgaccagttccggggggtttccgtttcgcgctggcccgcgccggctgcgggaggcgccggagtattgcctcgcgcgcgcgggtgtgtctggtggcgatcttgattgggggtggggcggtgagtgagggtcagttgttggggtatgcgcgg

SEQ ID NO: 25107 - DNA, 260 bp, Unknown
  Description of Unknown: LeftRegion for integrase A675 sequence
agtaattacaggtaaccataaattatcagatagttttttaacatttttcttgtaccattgacatattaaagtgtcagtgatatctgtatcttttgttgtatcagttgacgttgtatgaatatagtagtatataatcaagtctttaagtctatttataataaattatacttaaatataatagtatataatagtatatatcaatgaacgataaattaattcccagaagagaagtattagaaactttaaagatccattatcaa

SEQ ID NO: 25108 - DNA, 260 bp, Unknown
  Description of Unknown: LeftRegion for integrase A676 sequence
ttatatggtcaaaggtctaaaaaaactaagcgtttaattgaggaagtgaaaaaacaatgatagtagcaattaaaataaaattaaagccaactaaagaacaagagattttattttggaaatcggcaggagttgcaaggtggtcttataactattttttatcagaaagtgaaagacactaccaagagtatcttgaaggtaaacaagacaagaaaaccataaaagaaagcgaagtcagaaaatatattaataatgtattaaaa

SEQ ID NO: 25109 - DNA, 260 bp, Unknown
  Description of Unknown: LeftRegion for integrase A677 sequence
atgtcgccggaagggatttggcggcatgaaggttacgtgcagcgccgcgagaaggagaaatgagggtgttacaaaaacgaccgtttacgtaacacacttcagcgccacgcatctcggacctgttttgcgcggtttcgtgttacttttgctgttacttttcaatctgtaacttttgcccccttcattagctaacgtaacacatgcttgtcggttacgctcgcgtctccaccaaatcgcaaagtttgcagccccagattgac

SEQ ID NO: 25110 - DNA, 260 bp, Unknown
  Description of Unknown: LeftRegion for integrase A678 sequence
accacgtctcggacgtgactggggtcgaaaacatcctcgtccccgagcactcgatattcctggtcaacacacccgtgatctcactggatacgtggcaaggggagcgcctgcccccgcgccactgggctaccggcgacgtagcgtttctaccggccggatcagaaatcacatccaccccggatagaccctacggcagtgccatgatccgcgtgaacgacgaggcgttcaaaagggccacgagctgcgacctgcagtacgac

SEQ ID NO: 25111 - DNA, 260 bp, Unknown
  Description of Unknown: LeftRegion for integrase A679 sequence
taagcttgcataacttttttcgtaaacatattatattattattatgtttatgatgaaaaaaataatattataattatatttttgttcatattcatcattattgaaaattaatatttatgtataatcatgtataaaaagaatacaatgtgaaaaaattgcgcaaaaacatataaaaaaaaaagaatattgtaaattataacatgaaaaatattggaaactcttacaaaacgcgtaagaccgcttgtgaaatgcttgggata

SEQ ID NO: 25112 - DNA, 260 bp, Unknown
  Description of Unknown: LeftRegion for integrase A680 sequence
aaaagtattattatctactatttttgtaggataccatatttttttatttatttcttttattgtatcatcataccatggacacgtatctggattattctccatttataaatgtaattattagaattaacaaatctttaagtggttttataataatatataatgaaatataatataaacgaatggttacatatagtaatattatggataaatacatatcaagaaaagaagtattaagtgtactaaaaatacattatcatact

SEQ ID NO: 25113 - DNA, 260 bp, Unknown
  Description of Unknown: LeftRegion for integrase A681 sequence
atcttgtttacaacaaatgcatcaaaagaattctaaaaaatatgtttattggtaaagtatcaaattgtggtgtcgcaatataacatccagttggaaaacggttgatattgcgatatttcatgaatataatgattaataattatcagggtcgaaaaagtatataaaactatataaggatttgccttaattatatatatataatgaaatccaaagaggttttacaattattaggagtatctagagttactttatataaatac

SEQ ID NO: 25114 - DNA, 260 bp, Unknown
  Description of Unknown: LeftRegion for integrase A682 sequence
aatagagaatgagtttgatgcaataaaaactacaaaattcacaggcaaacaattcaattacgcccttttgcaagagtaatgacaatacttataagtacttttgattcatttaaaaaaattcactcgtattcataactgtacggtattgactacgatttgattatgtagtaaaatgaacatatagaaggtagtcataactaatggtcaaaagtaaggggtgtatttttatgatatttgggtattgtcgggtaagtagtaaa

SEQ ID NO: 25115 - DNA, 260 bp, Unknown
  Description of Unknown: LeftRegion for integrase A683 sequence
atatgatcactgctacaatttattgttgattggtaattattatttctttgatactgaacaatatcaaaccaagaatcagtctcaatactaatattattatcagataattttggtatccatttattttttttctttgtcattcattatttttcataaattgataaaactttatataaatatttatcaatattaaaaattaaatgagcaagtacataacaggaaaaaaagcaagtgaaatgctaaaagtacatcaacgtaca

SEQ ID NO: 25116 - DNA, 260 bp, Unknown
  Description of Unknown: LeftRegion for integrase A684 sequence
aatattcagccatgcgctatatgcgcggcaggcaccaatatttttggtgaaggtatcttttcctggaatatctgcaccgttctggtttttctgtaatgcgccagaagcctgatttaccgtttcctgtaaaccgaggttttagataatggttgtttccggcctgcatggcatgatttgcgcttttaaacgggagatccagagtgctgattggctatgtaagggtatcaacaaatgaccagaatacagacctgcaacgaaac

SEQ ID NO: 25117 - DNA, 260 bp, Unknown
  Description of Unknown: LeftRegion for integrase A685 sequence
gcggtcgtcgagctgccccagcctgacgggcccgacgacgacgggcaggtctacttcggtgcgtgccgtgacatccgcgtcgacaccaccgcaccgcacggacagttcccgcgcatctacgtcgaccacacgccgtatgccccagaaacgttgcgccgcgacgccgccgagatgctcgccgccgcactggaggccgagaagtgatcacctacacgtgcgactcatgcacggcgccgatcaccgggccggtacgtctcagc

SEQ ID NO: 25118 - DNA, 260 bp, Unknown
  Description of Unknown: LeftRegion for integrase A686 sequence
acctttgccagttccgggtattcttcagcagaaaaagccgccccgttgcatttcagccagcctgtcggcggagtggctgaaggccacggaacaggcacaccgacgggtaatgccgaaccttctcccaaaccaacgtttatgaaaatgcagagataacgggtaactggcatcatctccggtttttattcagggggatgctcatgcttattggctatgtacgcgtgtcaacaaatgaccagaacacggaattgcagcgtaac

SEQ ID NO: 25119 - DNA, 260 bp, Unknown
  Description of Unknown: LeftRegion for integrase A687 sequence
aaacgttatgacgtaggtcctaagcagtaccgccaactaaaattaatcaacgctatataactgaagtgtaatactatgtggtgagaataaatcgagcgtctgctcagatgtcgaatttgaacacctacaggtacttaccgcgaatcacggcagagatgcagatagccgtaagtctcaccacaaacttaccaacccccaattggttagttacagatcagtagatataaagcgcacgtccgttaatgaaaattgacggacac

SEQ ID NO: 25120 - DNA, 260 bp, Unknown
  Description of Unknown: LeftRegion for integrase A688 sequence
aaacgtgcaattaaacgccacgaagtaagcttacagacgagtctgctagatgccgcataattccgcccaacaacagggggcagggaatgggcgtagaagatcgcgattggtaccacgaccgtaaaaaacagaaaccaatcaatccagattggcagagagaatacaaccgatggtacggcaaaccgaacacgcccacgcccaagaagcccggcatgcactggacgctaacgctgatgtgctgggccacgttctttcttgcg

SEQ ID NO: 25121 - DNA, 260 bp, Unknown
  Description of Unknown: LeftRegion for integrase A689 sequence
aaacgtgcaattaagcgccaccaagaaagcgtgcaaccgagcttgctagacgccgcgtaacacgggagaggcatcatgggaattcacgatcgggattggtatcgcgacgcgatactcagacgcgaaacgagagaggcagcgcgagaaaaacgaacgctcaccgaacatcacgacagcccgccaaaaccgtccgctcactggaccgtgcgactcttgttctggatcgccatcttcctcatagcccacttagtcaacaaaca

SEQ ID NO: 25122 - DNA, 260 bp, Unknown
  Description of Unknown: LeftRegion for integrase A690 sequence
agacgtgcaattaagcgccaccaagagcgccagcagcccagcctactcgacgcagcataaccaccgctaaacgaacgccatgaagagcttcatcgcagtatcggcagcaaccgtatccatcgccgcgaacgcatataccgtcacgactacgacgacgaccacaacgcgctccgacgggactgtaaccacgcagacatcaaggaccgttccctacgatgccgcccgatgcgcgcgactaaccgtcgacctcagcatgctca

SEQ ID NO: 25123 - DNA, 260 bp, Unknown
  Description of Unknown: LeftRegion for integrase A691 sequence
tgtagcattagtaataccataaatgagtcccgaatcccagaactagataagattactaaaaataataaaatgtgggataagtggaattcaatttcgaatagtaataaggaggtacttaacagtaactgaatatctataaaaatttgacaaattctgtaaaatattatataatgttgctatattatatatgaggtgataaaatgaaaccagcagaattttcaaatagaataggcgtatcagagcaaactcttcgtaactgg

SEQ ID NO: 25124 - DNA, 260 bp, Unknown
  Description of Unknown: LeftRegion for integrase A692 sequence
aatattcagccatgcgctatatgcgcggcaggccccaatatttttggtgaaggtatcttttcccggaatatctgcgccgttctggtttttctgtaatgcgccagaagcctgatttaccgtttcctgtaaaccgaggttttagataatggccgtttctgacctgcatggcatgatttacgcttttggacgggagattcagcgtgctgattggctatgtaagggtatcaacaaatgaccagaatacagacctgcaacgaaac

SEQ ID NO: 25125 - DNA, 260 bp, Unknown
  Description of Unknown: LeftRegion for integrase A693 sequence
atgcatagttacattaatttattaatgcatttttttttatttttaatggtgggtcgattcagttggttttcggagaaggagaactgtgaactgacgccgtatcaaaagtatcctttttaatattttatgaaagatagtctcaaaagtattgttttcttacttttgattcattattatcaatttatcttaaggctattgagatgatagtgatggcaaaagtaggttacaggagagtgtccagtcgagatcagcatctggac

SEQ ID NO: 25126 - DNA, 260 bp, Unknown
  Description of Unknown: LeftRegion for integrase A694 sequence
gtattacaaataatgaatgtatttacagcaaaaatgaatggattaagaaaatataaataattataaaattttatatagttataaagttttataaagaaagaatttactagtagatgcccagtctaataatttatttatctagtaaatttagaaagatgtcaaagattattccaaaaaaattagccatttattatgggtacccaagttcagtgaatgccacatatactgttagtggtgcggctgctgttttttcagcatac

SEQ ID NO: 25127 - DNA, 260 bp, Unknown
  Description of Unknown: LeftRegion for integrase A695 sequence
ggaatgaggagtcacaaatacgaaaaggtgaagaagtgtgttgaagaacttaaggcttaataactttcaaccacaagaggaatacgtttacctaacgtactctctgaagaataataagaaggaggagacgaaaatactactggagaattacagagtcctattgcagaaagctctagactggttatgggagaggactaagatagagaggaaggaagtaaagaaaggtaagaaagtcctaacgaagattaagataaccctgc

SEQ ID NO: 25128 - DNA, 260 bp, Unknown
  Description of Unknown: LeftRegion for integrase A696 sequence
ggtatgaggagccataaatatgagaaggtgaagaagtgtgtcgaagagcttaaggcttaaatcattccaaccggaggaggaatacgtttacctaacgtactctctgaagaacgataagaaggtgaagagcaggatattactagagaactataaacacctactacagaaggctttagactggttatgggagaggactaagatagagaggaaggaggtcaagaagggcaagaaaattttcgctaaggttaaagtaaccttgc

SEQ ID NO: 25129 - DNA, 260 bp, Unknown
  Description of Unknown: LeftRegion for integrase A697 sequence
aatattcagccatgcgctatatgcgcgacaggccccaatatttttggtgaaggtatcttttcctggaatatctgcgccgttctggttttgctgtaatgcgccagaagcctgatttaccgtttcctgtaaaccgaggttttggataatggtcgattttggcacgcatggcatgattggcgcttttaaacaggagatccagagtgctgattggctatgtaagggtatcaacaaatgaccagaatacagacctgcaacgaaac

SEQ ID NO: 25130 - DNA, 260 bp, Unknown
  Description of Unknown: LeftRegion for integrase A698 sequence
gtaatggtagtcgatgttaccgcgccgatagttctcgcaaattgttttttgtccggaatatcgccgccattctgcgatttttgcagtgcacccgcagcgagatttatcgtttctcctaaaccaaggtttttgcgaattgcctccgtgtcgtctgaacgatattttttcccgcttttagcaacaatcgctggtgataaagtatgcaatatggttatgcgagagtgtcaacttttgaccaaaatttagaattacaactggag

SEQ ID NO: 25131 - DNA, 260 bp, Unknown
  Description of Unknown: LeftRegion for integrase A699 sequence
tcagttacatttactttgaataagaatggaataagaggtggaattatagatgagaactaatgaacataacttccataatatagaagaagaaatcaaacatgttgctgtatatttaagattatctaggggagaagatgaaagtgagttagataaccataaaactagattattaaatagatgtgaattaaataattggagctatgagttatataaagaaattggttcaggttcaactattgatgatcgtccagtaatgcaaa

SEQ ID NO: 25132 - DNA, 260 bp, Unknown
  Description of Unknown: LeftRegion for integrase A700 sequence
tcgcttaacttgtgtttgacaataattattcagaatgaaaacaaaaataaaaataagtgagatagattccattcgaaatcatttaaaactatattaacgactagtacgataaattttctcatggctgcttaataataattagatccaaagcttaatataaaaaacacccaccggaaaataatccagtgggtgttttcaatagagatgtttattcaatggacggatacctcattactagtacccaaagatgttataagcac

SEQ ID NO: 25133 - DNA, 260 bp, Unknown
  Description of Unknown: LeftRegion for integrase A701 sequence
aatgtatatgtagccaaaataaatggaaaaagaagtggtaaattaaaagcgaaaaagtaattacattaacaataaaatatatgaaaatacatacattttcatatattttaacgatccgtaataatttgttaagtatttttgacaatgtatattgattaatgtacattgtcaaatcatattacttttgttttcggttatcactaattgcgttcttgactttggaaatgatttcaataaccaatcgacaacatccactagca

SEQ ID NO: 25134 - DNA, 260 bp, Unknown
  Description of Unknown: LeftRegion for integrase A702 sequence
aatgtatatgtagcaaaaataaatggaaaaaaaagtggtaaattaaaagcgaaaaaatgattacattaataataaaatatatgaaaatacatacattttcatatattttaatgaaccgtattaattgatcgatcgagtagcttgtttgagaaagtcattaaaattccctatagtaattttcatctttgcaaacaaattgtcactgaattagaattttacaacataaattatcctcacaacttttttgaattcggtaacaa

SEQ ID NO: 25135 - DNA, 260 bp, Unknown
  Description of Unknown: LeftRegion for integrase A703 sequence
gtttatgattaacagctaaactaggtttccaaagtaaatcagaaaccttttcacattcgtcattccaaaacttaccatttgtagttttggccattacattattactaatattatgaaattatcttatatttaagtaactttttgactattatattaattgaacatatttaaagatatgtttcgaaaatatatttatcagaatgcctaaatatgttcgtcgtaaagaagtacttgaagtattaaaagttcattatcaaact

SEQ ID NO: 25136 - DNA, 260 bp, Unknown
  Description of Unknown: LeftRegion for integrase A704 sequence
gcaattaaaagacgaagatttcaactttaacttttaatcattaaacctacttggactttaattcaagtaggtttaattttctttaatttttgtaaataaaaatattaattttaaatataattttaatgtaattacttattaatttctgagaaagaaaattaacagtttatataaaggataaaaaggagtttttatttgcaatgagaaaaagatggaataaagaagaagataaagagttactatcatatattttaaaattc

SEQ ID NO: 25137 - DNA, 260 bp, Unknown
  Description of Unknown: LeftRegion for integrase A705 sequence
aatgtctatgtagcaaaaataaatggaaaaagaagtggtaaattaaaagcgaaaaaatgattatattaataataaaatatatgaaaatacatacattttcatatattttaatgaaccgtaatatcagcaccttgacttaccaagtatttaaccatttcaagatgcccattttcacaagcttttctaacagctatgttatcacgttctttaatattagctcctaaaattattagatatttgactatttcgattagtccata

SEQ ID NO: 25138 - DNA, 260 bp, Unknown
  Description of Unknown: LeftRegion for integrase A706 sequence
ggtttatgattaatgattaaattaggtttccaaaataaatcagaaatcttttcacattcatcattccaaaatttaccatttgtagttttagccattacattattattaattttatgaaattatcatatatttaagtaacttttgactattgcattaattgaacatatttaaagatatgtttataaaatatctttatcagaatgcctaaatatgttcgtcgtaaagaagtactcgaagtattaaaagtccattatcaaact

SEQ ID NO: 25139 - DNA, 260 bp, Unknown
  Description of Unknown: LeftRegion for integrase A707 sequence
cttcttgacaaaaacctttttcttagttttacttccagtaataatcctctttttagcgggaacttttggtttgacatttttaactgcctctttcatgattattttatgattatttatgaataatatttctttatattaattttgataaatacatataaaatgatattaactaaaatatcaatattaataaaataataacaatgagtaaatacatgggcgggaaagaagctagttctgttcttggtgttcatcaaagaacg

SEQ ID NO: 25140 - DNA, 260 bp, Unknown
  Description of Unknown: LeftRegion for integrase A708 sequence
cttcttgacaaaaacctttttcttagttttacttccagtaataatcctctttttagcgggaacttttggtttgacatttttaactgcctctttcatgattattttatgattatttatgaataatatttctttatattaattttgataaatacatataaaatgatattaactaaaatatcaatattaataaaataataacaatgagtaaatatatgggtggtaaagaagccagttctgttcttggtgttcatcaaagaaca

SEQ ID NO: 25141 - DNA, 260 bp, Unknown
  Description of Unknown: LeftRegion for integrase A709 sequence
gacaaaaacctttttcttagttttactaccagtaacaatccgctttttagcgggaacttttggtttgacagttttaactgcctctttcatgattattttatgattatttatgaataatatttctttatattaattttgataaatacatataaaatgatattaactaaaatatcaatatcaatattaataaaataataacaatgagtaaatacatgggcgggaaagaagctagttctgttcttggtgttcatcaaagaacg

SEQ ID NO: 25142 - DNA, 260 bp, Unknown
  Description of Unknown: LeftRegion for integrase A710 sequence
aactataaaattcacaggcaaacaattcaattacgcccttttacaagagtaatgacaatatttataagtacttttgattcatttaaaaaaattcactcgtattcataactgtacggtattgactacgatttaattatgtagtaaaatgaacatatagaaagtagtcataactaatggtcaaaagtaaggggtgtatttttatgatatttgggtattgtcgggtaagtagtaaagtacaaattgataataatagtttagaa

SEQ ID NO: 25143 - DNA, 260 bp, Unknown
  Description of Unknown: LeftRegion for integrase A711 sequence
tatttggattatcacatttaaaatatttttttttgttttgttttaaattaattgttttggaaggaatccataatgatttggataatttggtacattcattattccaaaacattacatattataaattgtatttataaacatatctttaaatactttttaataatattttatataaaaattatttataagtatgtataataatgacaaaatatgtaagaagaaaagaagtattggatgttttaaaagtacattatcaaaca

SEQ ID NO: 25144 - DNA, 260 bp, Unknown
  Description of Unknown: LeftRegion for integrase A712 sequence
ggttgcatcgcgcatgtcaatctaggctataccctaacttgatgtcaggcagggccgcgccgcttcgtcagaatagagtctgctttcccattttttgacacatgcccgcgaaggttatagatttcagcctgacagaaatgggctttgaggcacaacggaacagaaagtgcacttaagccgccttcaaccaaggagacatcgtgcaggggcaccgcatcggctacgtccgggtcagcagctttgaccagaacccggaacgc

SEQ ID NO: 25145 - DNA, 260 bp, Unknown
  Description of Unknown: LeftRegion for integrase A713 sequence
gctcgtgaattcggaatcagtcgcgaaaccctgtatcaatacttgagaacggatcagtaaatatgccacgtcgttccatcctgtccgccgccgagcgggaaagcctgctggcgttgccggactccaaggacgacctgatccgacattacacattcaacgataccgacctctcgatcatccgacagcggcgcgggccagccaatcggctgggcttcgcggtgcagctctgttacctgcgctttcccggcgtcatcctgggc

SEQ ID NO: 25146 - DNA, 260 bp, Unknown
  Description of Unknown: LeftRegion for integrase A714 sequence
tttcacaaaccccattcagaaacgaatgcaccccgccaaggatggagaggagcattattgtgaaatcacacataactatttccttaatagtgaattaaatatcattgggaaacggtatgtactttgtgatttccacacatactggtttttgttaattaaaatccgcagcttgctataaataacgatagtgagcagaaaatatgctaataggctatgtacgcgtatcaacaaatgaacaaaacactgctttacaacgaaac

SEQ ID NO: 25147 - DNA, 260 bp, Unknown
  Description of Unknown: LeftRegion for integrase A715 sequence
tataagctccacgcctaactccagtaagaaataaataggttccactaataatggacattaaaaaaatcaaaatctgcataagctcctcccggatctaacaaaaatcaagcaggaacctattcagattgttatttctgtgcataacgctttgttctttaaaattcgcagactcataagaacaacgcattagagtaaaaatcatgctgatcggctatgtacgcgtatcaacaaatgaacaaaacactgctttgcaacgaaat

SEQ ID NO: 25148 - DNA, 260 bp, Unknown
  Description of Unknown: LeftRegion for integrase A716 sequence
aattatcttttttatctctaattattggtattttgtttctttaatgttgtaaaaataaagtacgctttaaatttacgtttgcgttttaaaataaaattgtaaaaatagaattataaaattaattattttacaaaatgtaaataaaattattgattttaattttacaattagttataatatagtcaaggagtgattatattatgaatatagcttatgtaagagttagtacagtagaacaaaatgaagaaagacaattagaa

SEQ ID NO: 25149 - DNA, 260 bp, Unknown
  Description of Unknown: LeftRegion for integrase A717 sequence
gctaaaagaaaaacagaaaaaatcattaaagaaataacggaggaaaaagaagatgagtaggattataggaacttacctatatccgtcatatgctaatagaggaaaaatagaaaagataaatagcgttctaatagagtatagaaaaaccgctaaacaaatagcaaaattacaatggaaacatttctttaaaggtggtgagtttagcaagtatttgaacgttagggaagtgaaatcaaggctatcaaaaagatatatacaaa

SEQ ID NO: 25150 - DNA, 260 bp, Unknown
  Description of Unknown: LeftRegion for integrase A718 sequence
ttcatgtacttgtgtgactccgtatttaatgtccaccggcataccgagggctgtcagctgctgccggatttatgtccgtttatatccatttgtatccgtttgtgtcatttatttatatcgtcacaaagaatacaaaatcacgaggtgcgttaaaatcccagaaataaaatatcctcttgtgttatgaagtaacgtatgggatgttcgcaacccttagagacgccaagaaacattatcagtgcaaccataagaccatctgg

SEQ ID NO: 25151 - DNA, 260 bp, Unknown
  Description of Unknown: LeftRegion for integrase A719 sequence
atgcgcccgtctctaactccgagaaggaatacgccggttccacttagtagggatgttatgactactacagccagattttcataatctgcaaacatacccctccagaaataacatctaatgcgccactaacttagtcagtttgttatttccttacaggacatcttctagaatctccccccttaacatacaaggggggacatatgcttattggatacattcgcgtatcaactaatgaccaaaacaccgctttacaacgaaac

SEQ ID NO: 25152 - DNA, 260 bp, Unknown
  Description of Unknown: LeftRegion for integrase A720 sequence
atttatggcgtgggagtgtcgacgatttaccgatatttccctgcctcaaaaaagtcatgatgatggcttaaaatcttcacaatatcatcatgatatcgtctctatttatatgatttgtatgagggtggtatatccatcttattgtgaatatagctattaactaattgatatttatataataagcaatgaatttaaaatccctcggccgcaaggctgtgcgggttcaagtcccgctctgggcaccatataagaattcattg

SEQ ID NO: 25153 - DNA, 260 bp, Unknown
  Description of Unknown: LeftRegion for integrase A721 sequence
ttacaagtaatgaatgtctttgtagcaaaaatgaatggtatgagaaaatataaaaattaaaattatttataatttatataattaattttaatataaaaagtgtcaaaaaatatcaagaaattgatctactagttcctgcccttcataatcctccttttttcaattttttttttataaaaaattgaaaagttaattaataaacaagtttattttattatttccatattattcacggaggaccattttcccatatctttttt

SEQ ID NO: 25154 - DNA, 260 bp, Unknown
  Description of Unknown: LeftRegion for integrase A722 sequence
tttcagtctgctcagtggtcagaaagtcaacgggcatatcggcctccctgcctgacgggcatttagtaacatttttccaaccgtacgaaatgttataaattatcggacatcgtaaaactgttacattaatatgtctattaaatcgtaaatttgtaataatagacatgagttgtccgatattcgatttaaggtacatttttatgcgactttttggttacgctcgggtctcaaccagtcagcagtctcttgatcttcaggtc

SEQ ID NO: 25155 - DNA, 260 bp, Unknown
  Description of Unknown: LeftRegion for integrase A723 sequence
ctttttgatgttagcatttccactctttacaagaaattccctgtaaatcagtcgcgttgaaagtggcgatattgtaccagcactgacacatcgtgaaatacgtgcgccgcacgcctggcaaccagaacataaggtatccctgtcaaccggagagactgccttatggctcaggattaccaccacggggtgcgcgttgttgaaatcaacgagggcacccgacctattaccacggtgagcactgccatcgtgggcatggtctg

SEQ ID NO: 25156 - DNA, 260 bp, Unknown
  Description of Unknown: LeftRegion for integrase A724 sequence
ttaaaaaaactaccattttatagatatttgatgtaaaaataaagcatggtgtaaatttacattgtaaaatatctattttgatgtaaaaataaaattaaaaacgtaattaatttacaaaaagaaggataagtctttgactctaattttacatttatgctataatattatttatagagtaaacataggtggagggatcaaagatggtagtaggttatatgagagtttcaacagcagaacaaaatgaagatagacaattagtt

SEQ ID NO: 25157 - DNA, 260 bp, Unknown
  Description of Unknown: LeftRegion for integrase A725 sequence
tctatcatgcatttattttctacaaaagaatattctaggagaaaaaacaaaaaaatataattgaggcgaaaaaattaaaaaaaatttaattgcggcgaaaaaattaaaaaaaatataattgcggcgaaaaaattaaaaaaaatataattgcgtttaaaaactatataaagatatataaataatatttatattatggatgattctgaaatatcaattgaagatactgttaaaaagaaaacattttcaatacaattgaacaa

SEQ ID NO: 25158 - DNA, 260 bp, Unknown
  Description of Unknown: LeftRegion for integrase A726 sequence
tctattatgcatttattttctacaaaagaatattctaggagaaaaaacaaaaaaatataattgcggcgaaaaaattataaaaaatataatcgcgttcaaaaactatataaagatatataaataatatttatattatggatgattcagaaatatcaattgaagatactgttaaaaagaaaacattttcaatacaattgaacaaaaaatcatatattaataatatttttaaacatctatcatcgatcactaagaatattttt

SEQ ID NO: 25159 - DNA, 260 bp, Unknown
  Description of Unknown: LeftRegion for integrase A727 sequence
tccgacagcatcggcggaaatggccccaacatctgacgcccataaagtgatatcaccggtcagtggtttactgttaacccgccgtgtcgccgggacggcattttttgccagatttatcgtttcgcctaaaccgagatttatgaaaatgcagaaaacggtcgtaaatggcatgatcccagccttttgcgagggggcctgttgtgcaaattggctatgtacgggtgtcaacaaatgaccagaacaccgatttacagcgaaac

SEQ ID NO: 25160 - DNA, 260 bp, Unknown
  Description of Unknown: LeftRegion for integrase A728 sequence
atgtgtcatcaaacgctgcctgctcgctatccgttgtattcaaataattcagatcgttaaggaaaatgttgtctcacaccccccagtgcgtctcgatccagaaaattacatacacgactaaattaccaacatgctggctgcaatttggtctgatttagacaaactgaaactagaagaagaagaatgcaaagaaaacgtaaagccagtacaacaaaacagcttggtgaagaatttttgcgtcgaatgctgcggggtcaagg

SEQ ID NO: 25161 - DNA, 260 bp, Unknown
  Description of Unknown: LeftRegion for integrase A729 sequence
ggtcgttaaccgttccggccggaccgttaaccagctcgtcagcgcgcttgacgttatccaggaaaatttcaggcgaagttgttcccaaaggcgggttaagttcggccatgttttttgctccaaaaagaggcttcgcccaaacgagggtttgagcgaatggccgcagctttttacaatcagctatttcaacgggttacaacatgctgattggctatgcacgggtctctacaggggatcaaaacctcgatttacagaaaaac

SEQ ID NO: 25162 - DNA, 260 bp, Unknown
  Description of Unknown: LeftRegion for integrase A730 sequence
tctcatttgcatcagtgacggctgatgcgttcaaataggtggaaccaataccaaaagcccctacctgaattacgttccccgctaaagaacctacgtccctgatagcactacttcccaaaccgacattttatagattgctcttgagtagcctggccgataacttcacctgatttttttgcagaattaactgggtgaaaaatatgcaaattggctatgtaagggtgtcaacaaatgaccaaaatacagatctccagcgccaa

SEQ ID NO: 25163 - DNA, 260 bp, Unknown
  Description of Unknown: LeftRegion for integrase A731 sequence
cagccggacttcgccgataagacgacaaacgaaagcgagaaccggtactggatcctgcgtaacatggggagggttctgaggagttatcttgcgatgcgctataggtttgccccatccctcccaaaccaaccttttttataaccatcaaaaatctggtgatgcttcgccgtttctcctgttttcataacaggagaaatcccatgatttacggttatgcccgagtatcaacaaaccaccaggacactgaattgcaactaacg

SEQ ID NO: 25164 - DNA, 260 bp, Unknown
  Description of Unknown: LeftRegion for integrase A732 sequence
ctcgaccatattgcaggattttaccgttgggtaatttcatccatccatcaccactggcaaaaaaagccatatccggtatctgattttcccctgttcccacatcccgttttgccgcttctcccaaaccaacctttcaaatatttttctgaatcaggtgatatttcgcctcttctcctgtttttacaacaggagaagcactcatgatttacggttatgcccgagtatcaacaaaccaccaggacactgaattgcaactaacg

SEQ ID NO: 25165 - DNA, 260 bp, Unknown
  Description of Unknown: LeftRegion for integrase A733 sequence
ggacttcccggcctcgtgtcgttcgttgtggagacgatagaaaccctcgccgaaccgccgacccagaacgaactggcaaagcgtgaagtagagacagcggccaaggttgccgcaatcaacgaggccacccagcgcctcagagcagcccaagcacgggcacaggcagagcagatcgccaacaacagaagagtgagagagatatgattttcggatacgcaagagtgagcaccaatgaccaagatcatcagctccagctggac

SEQ ID NO: 25166 - DNA, 260 bp, Unknown
  Description of Unknown: LeftRegion for integrase A734 sequence
cgctggatagcaaaccagaaggttgcccagcaagaggccatgggtaggtggaatgccaaagagcaggccatcaaggacgcaacagcagcaaacgccgcccgctgggaagagcccaagccggaaccggtaacacatcaatcacccgcccgcatgggcatgacagcaatcaccaccaaccccaagaacaggaaacgccttagatgatattcggatacgcaagagtgagcaccgccgaccagaatcaccagcttcaactggac

SEQ ID NO: 25167 - DNA, 260 bp, Unknown
  Description of Unknown: LeftRegion for integrase A735 sequence
aagctcctgttccgggctccggttgtggtggttgcttgggcgatagagcgccacgggtatgcagctgaagagcgggaatatgcacccattcgagcacggcgaaacaaggcggcggatgccgccctgagagccgccattaaccgggctaacgcattcatcgaacaatacgacgccgagaaggcaaagagagaggtagagcaatgatttttggatacgcccgagtcagcaccgctgaacaagataacgccatgcagatgacc

SEQ ID NO: 25168 - DNA, 260 bp, Unknown
  Description of Unknown: LeftRegion for integrase A736 sequence
gggtttcccggcctcgtgtcgttcgtggtggagacgatagccaccctctcggagccaccgacccagcaccagctggcagagagggccaagcaaagggccaatcaggccatcgcaatcaccgaggccacccagcgcctcaaggccgcccaagcgcggacactggccgagcaggccgccaacaacagaagggttagagagatatgattttcggatacgcaagagtaagcactaatgaccaagatcatcagctccagcttgat

SEQ ID NO: 25169 - DNA, 260 bp, Unknown
  Description of Unknown: LeftRegion for integrase A737 sequence
ggattacccggccttgtatcgttcgtggttgagacgactgccacccttgcggagccaccaaccaagcgggagctggcggcaagagccaagcagaaggtcgagcaggccaccgcaatcaccgaggccacccagcgcctcaaagccgcccagtcacgggtgatggtcgagcaggccgccaacaacagaagagtgagggagatatgattttcggatatgcaagagtgagtaccgctgaccagaaccaccaacttcaactagat

SEQ ID NO: 25170 - DNA, 260 bp, Unknown
  Description of Unknown: LeftRegion for integrase A738 sequence
gtagcaacccaaatgggtgtcagccgcgctaccctttatcgcaatttggagaccgtataatgttcgacatcaacctgaccaaggccgccatcgtccaagtggaagaggctcaagccctcaactcccagttggcccgcctcatgtatgacgttgctgatggccgtggttacatgatcatgcagggagccacaaccgtgagtgtggttgcccgccagcaaggtgagaccagagttgtgaaggtctatcccgtctccttcctc

SEQ ID NO: 25171 - DNA, 260 bp, Unknown
  Description of Unknown: LeftRegion for integrase A739 sequence
atcacagtgattttagaaccacatttattatataatggaaatgaatctactggttcttatacgacgggtattgacaaaattgataaaataattgagcagagaattggtcaagattatactgctcaaaaaaatctattcaaaacaaacaccaattcttttttatataattgatataaacattcattataatactattattaatgtcgtatgtcaattctaaagaagcacaagccttcttcaaagtctcggatcaaactctc

SEQ ID NO: 25172 - DNA, 260 bp, Unknown
  Description of Unknown: LeftRegion for integrase A740 sequence
acagtcttcacagcaaaatatcacggaaaaagaaaatataatttgcacaaggaagattagaatatttccatgcgttgaacatataaatttctttaataaatgttttggagccacaagatatatttataataaaacacttgatgcaataaaaaaaatgtataaaaaaaattcaaaaattcttcgaacaaaagccaaaaaaggatgtattcacgttgtatcaaaaaataagtcaagtagtaaaactacaaaaaataaaagtc

SEQ ID NO: 25173 - DNA, 260 bp, Unknown
  Description of Unknown: LeftRegion for integrase A741 sequence
aggatgttaaatcaaattgaatacagtgtttgcctgatgatgttgaatcagttgttggaagcgaagcagatcacgaaaaaagaatatgacaaagttaaaattaccttaatgaaggagtatcaaatatcttctgaaatattaagtggataagtgaaaagagttcgggtagtatgtgtgctaagaaagaggtggtgagatatatggctaaagtagaaatcattaaagccaataaagaactgtcgaatcgcaataagaaaggt

SEQ ID NO: 25174 - DNA, 260 bp, Unknown
  Description of Unknown: LeftRegion for integrase A742 sequence
tcaattatcacagtcttcacagcaaaataccacggaaaaagaaaatataatttgcactagaaagattagaatatttccatgtacagaacatataaatttctttaataaatgttttggagccacaagatatatttataataaaacacttgatgcaataaaaaaaatgtataaaaagaattcaaaaattcttcgaacaaaagctaaaaaaggatgtattcatcaaatatctaaaaataaatcaggtagtaaaactactaaaa

SEQ ID NO: 25175 - DNA, 260 bp, Unknown
  Description of Unknown: LeftRegion for integrase A743 sequence
gttgaaactgttacattacctataaagaatcaagtagataatgaagagtgggttgattaaacattaatgccgttcgcacggcattttttgtatggtaaaatgtatattcgtattacatttggtgatactaattgtaacggaaggagcgtgcgacatgacagtcatcgcagaccaactaaaggtaggcgactatatatttattgatagtccacatgtacctgattttatgaatagaagatgggttgaaattgaaggattta

SEQ ID NO: 25176 - DNA, 260 bp, Unknown
  Description of Unknown: LeftRegion for integrase A744 sequence
ccggacgcgggcccgcccgcgcgcgaggcgatcccgcttgcaccgttatcgatctgtgacctactgtggggggcgtctccggcgtgcccggagaaccccagaccacaccccgcgagccgacaccgccgcggaaccccgacgccccgccggcccccacccggcggggcgtccgcatgtccccggcgaggaggtgaccgccgatggcacgccccatcacggacgccgaccgccgacaggtgcgcgagctgcacgccgcgggg

SEQ ID NO: 25177 - DNA, 260 bp, Unknown
  Description of Unknown: LeftRegion for integrase A745 sequence
gcgggcccgcccgtgcgcgcgaggcgatcacgcttgcgccgttatcgatccgtgacctaatgtgggggccgtccccggcgtgcccggagataacgagaccaccccccgcgccccgcgtccgacacccgcaggagcgccgacgccccgccgaccccacccggcggggcgttcgcatgtccccggcgaggaggtgaccgccgatggcacgccccatcacggacgccgaccgccgcaaggtgcgcgagctgcacgccgcgggg

SEQ ID NO: 25178 - DNA, 260 bp, Unknown
  Description of Unknown: LeftRegion for integrase A746 sequence
gcggacccgcccgtgcgcgcgaggcgatcacgcttgcgtcgttatcgatccgtgatctaatgtgggggccgtccccggcgtgcccggagataacgagaccaccccccgcgccccgcgtccgacacccgcaggagcgccgacgccccgccgaccccacccggcggggcgttcgcatgtccccggcgaggaggtgaccgccgatggcacgccccatcacggacgccgaccgccgacaggtgcgcgaactgcacgccgcgggg

SEQ ID NO: 25179 - DNA, 260 bp, Unknown
  Description of Unknown: LeftRegion for integrase A747 sequence
cgtaggcgcgcgcgccctcgaacggacttgcgccgttatcaatccgtgacctaatgttggggccgtctccggcgtgcccggaactccccagaccgcgcccccgcgagcgactaccgcacccgggggcgccgacaacccgaacgccccgtcggcccacccccggcggggcgttcgcatgctcggcgaggaggtgttcgccgatggctcgccccatcacggccgccgaccgccgcaaggtgcgcgagctgcacgccgccggc

SEQ ID NO: 25180 - DNA, 260 bp, Unknown
  Description of Unknown: LeftRegion for integrase A748 sequence
aaagctcacgtggcttgctttacccatctagtacaagttatctattatagaaaagtctaaataggtaagtttgagtaagttttatgtaacggctgagacaatagcggatcttggatcgatccaaatagacagaacagtagaagaaactgctgaaataaaggaattaaggcaacaaataagcaaattggtaggtttaggcgataatgatctaaacgaaataattcaaataaaacagacaaaattaaataacctgctgaacg

SEQ ID NO: 25181 - DNA, 260 bp, Unknown
  Description of Unknown: LeftRegion for integrase A749 sequence
ggtcgtagttggagactggcaccttcgatgtgaggtagattgtgcgatacaacagataatttacttcccatatgtgctctgcgaatgatgtaatgtctgacaataatccctaaagtttgataggatcaattttttagcgaaaaattgaatatggaatgttgtgtaggtcttagtaagtgagtggatttgaaaccacacacatggcgggaactgttgttgatccaaacgagaataaaatattgctacagtggcttgaagcg

SEQ ID NO: 25182 - DNA, 75 bp, Unknown
  Description of Unknown: LeftRegion for integrase A750 sequence
ttcatacccgttgacatggcagacgacatttgtgggcatgaaaccgccagtggcgaaccatgccaaaaccccgct

SEQ ID NO: 25183 - DNA, 260 bp, Unknown
  Description of Unknown: LeftRegion for integrase A751 sequence
ggcggggacaacgtcgactccctcgcgcagcagcggttcagcaccagcagccacgaggtaaccgccgtcgaggccaaggcgatcaacgccaccctcggcgcgacgttctgcaagaccgcctaacgcccgacctcgacggcccggccccgcaccagggcgccgggccgtcgccatgtccgccctcggcgaggaggtgagccgtggccgcccgacccatcaccgacacagaccgggagcaggtcaaggccctccacgccgag

SEQ ID NO: 25184 - DNA, 260 bp, Unknown; identical to SEQ ID NO: 25183
  Description of Unknown: LeftRegion for integrase A752 sequence

SEQ ID NO: 25185 - DNA, 260 bp, Unknown; identical to SEQ ID NO: 25183
  Description of Unknown: LeftRegion for integrase A753 sequence

SEQ ID NO: 25186 - DNA, 60 bp, Unknown
  Description of Unknown: LeftRegion for integrase A754 sequence
atggcgcgaaagagcttgtatgaaaaattggacatagaaacacggttgcccgaaattgaa

SEQ ID NO: 25187 - DNA, 260 bp, Unknown
  Description of Unknown: LeftRegion for integrase A755 sequence
acgcctgtgacaaccgggttgttacggacccgattgagcgattttcgaccattggcatgatttcgatataggcgagtttaatttatagtggcatgacgtagctcgtgggctttagcttgtcggcagcgagtttatacgtgcagtagtcctgagcttctcgttttgctgtcattacatcttcccatgtggggtagatgcggccggaacggatcttttcagcaaaatcgtagacgatcattcgatcgttcacatctttcttc

SEQ ID NO: 25188 - DNA, 260 bp, Unknown
  Description of Unknown: LeftRegion for integrase A756 sequence
aacattaaaaataaaaaatgtcatcgaaatattacagatgaattagataaagattattaaaaaggagaaattataatggcaaacgaaattaaagatttacaagtgtatttaggtggagacttattatcaacccctatggtagaatatcgaaacaaacaaagagacgaattagatggtattattggaattaaagcatactctccatcagacgataagtctatcaatgataaaacgactgcgatacaagaaggtctggcaga

SEQ ID NO: 25189 - DNA, 260 bp, Unknown
  Description of Unknown: LeftRegion for integrase A757 sequence
atatgatcactgctacaatttattgttgattggtaattattatttctttgatactgaacaatatcaaaccaagaatcagtctcaatactaatattattatcagataattttggtatccatttattttttttctttgtcattcattatttttcataaattgataaaactttatataaatatttatcaatattaaaaattaaatgagcaagtacataacaggaaaaaaagcaagtgaaatgctaaaagtacatcaacgaaca

SEQ ID NO: 25190 - DNA, 260 bp, Unknown
  Description of Unknown: LeftRegion for integrase A758 sequence
gcaggattttcccgttgggtaatttcatccatccatcaccactggcaaaagaggccatgtccggtatctgattttcccctgtccccacattccgttttgccgcttctcccaaaccaaggtatgcgagaagacccgtttatgaaaatgcagagataacgggtaactggcatcatctccggtttttattcagggggatgctcatgcttattggctatgtacgcgtgtcaacaaatgaccagaacacggatttgcaacgtaac

SEQ ID NO: 25191 - DNA, 260 bp, Unknown
  Description of Unknown: LeftRegion for integrase A759 sequence
ctaaacgtggacataggcactatggatatacgcacagactgggactcagattcaggatgggattgggagacaattccagatgaagtgatagtttgtaagaaatgtttagaacacctcattgaagcaaaaacaatgagtgagcagtaagccaaaggcttaacggacgtatctttttctttttgcgggtcgtattgctggtaatgactgatatttgtggcgtagagacaactaaaggtgagccatgtcagaatcctgttgag

SEQ ID NO: 25192 - DNA, 260 bp, Unknown
  Description of Unknown: LeftRegion for integrase A760 sequence
gttggcaatagtacgatttctagaattaaacataacgtttcgtggtcagctactaagtaaaaaaaagccccctatatttctagggggctactagtgttttctaacctgctactactatttcgactcgttatagagtgctactaacttatatcgagatatgcctagacgttctaatgcatattctaatagttcactatcttcataatcttcttttctacaatagtcacagctagaatcctgctcccatgtttcccccggag

SEQ ID NO: 25193 - DNA, 260 bp, Unknown
  Description of Unknown: LeftRegion for integrase A761 sequence
gttggcaatagtacgatttctagaattaaacataacgtttcgtggtcagctactaagtaaaaaaaaagccccctatatttctagggggctactagtgttttctaacctgctactactatttcgactcgttatagagtgctactaacttatatcgagatatgcctagacgttctaatgcatattctaatagttcactatcttcataatcttcttttctacaatagtcacagctagaatcttgctcccacgtttctcccgga

SEQ ID NO: 25194 - DNA, 260 bp, Unknown
  Description of Unknown: LeftRegion for integrase A762 sequence
ctcgaattgattgagagtaacggtggtgtgaccgagggtagtttcaccgaagaatatcagtgtcaaatctgcaatctcacaatgactattgcaggggaggcagatcaacctcctgatatgtggcagaagtatggcgcggcgtatgatggcgagtaagtaacggacgtatctttttctttttgcgggttgtattgctggtaatgactgatatttgtggcgtagagacaactaaaggtgagccatgtcagaatcctgttgag

SEQ ID NO: 25195 - DNA, 260 bp, Unknown
  Description of Unknown: LeftRegion for integrase A763 sequence
aatctcgaactgacagatagccgtggagcaaccgatgagggcagttttaccgaagaatatcagtgtgccaactgtaagttgacaatgactatcacagggaatgccgaagacccacctgagcaatggcagaggtacggtgcagcgtttaacggataactgacggacgtatccttttctttttccggttcgtattgctggtaatgactgatatttgtggtgtagagacaactaaaggggaaccgtgccagaatcctgctgag

SEQ ID NO: 25196 - DNA, 260 bp, Unknown
  Description of Unknown: LeftRegion for integrase A764 sequence
ataagtaaaagtacagtttctaaaataaaaaacaatattttatggaaaaacgttatataggaagaaactcgacttttttaattaaaaacgttgatttaacagtatttagttgcaatttaagtttttctttcatataatggatacataaattgatgaaagcaacaaaatataggagtgagtacctttagagtaccgatagatatgattgtcattgcgacaattgtatttgttggtactcttttttgttgtcttacagtttt

SEQ ID NO: 25197 - DNA, 260 bp, Unknown
  Description of Unknown: LeftRegion for integrase A765 sequence
cgcacaatattctgggcaacccgctagggttcaatgctggcaatgtccagaatgttaacctacaacatgttaacttaggcgctgttgatgcagaattgcagtttggtaacctaaaagttatcattacaaaagaaaactttgcaaaagttgcacgagagttaatgtaatacacttgacagtgacgtaaaaaggtggtaaacttgttagttccaaaagagaaaaaacttattcctaatgagcttcttccacctaagtatcaa

SEQ ID NO: 25198 - DNA, 260 bp, Unknown
  Description of Unknown: LeftRegion for integrase A766 sequence
agaggaaaagagtttagaaatatcctatattatatctaatatttaggatgttacgtttttcaacaataggacattatataaatttaaatagccttaatgatagaatttgcaaagaacaggatagttttattaataagtctgaaaaacactattaaaggacatttatacgaggaatttaagataatgtataaacataaaaaatgaagcaaaggagtgattgtttgaatgacaaagatgttgaaatagttaatgatagctat

SEQ ID NO: 25199 - DNA, 260 bp, Unknown
  Description of Unknown: LeftRegion for integrase A767 sequence
tcgacataattgtattagctcagatgtttcaagatatgataatattattgcgattattgggtcgatcattttattgatatgagaaataaaaattggtaggtgtgttgtgattttatttcaatttttatagcaaaaattgaatatggaatgatatattgatctcattactagaggaacttaacattcagcgctagcggatcatggggaggcgcacttttttcactgaacatcagaatcaaatattagctatgtggtttgat

SEQ ID NO: 25200 - DNA, 260 bp, Unknown
  Description of Unknown: LeftRegion for integrase A768 sequence
ctggaagaactcgtcgaccgccgagacaggcccggacttgtgacgggctacaccaccaacctcggcctgcaccgccaggagtctgcgccgagtgacttctccgccttcgttggggcgcgcgtcgtctctcggatgtgccgacaggggacctacctgcttcgcgactgcgggacgcgagacctgcggaaggaaggcacgccatgacgtgcaaccgtcagcccaaggtggtgcactaccgcggcaagtccggtgacacctcg

SEQ ID NO: 25201 - DNA, 260 bp, Unknown
  Description of Unknown: LeftRegion for integrase A769 sequence
ggcagtcattattaatacgatattcatctttattcaaaataggtattttagattattaaacatttggttttgttttaatcccccgggggaggtcaaatctggtgaggggctggcaggcgctcgtaacgttccgccagaatttttaaactcggggggctatacaaaatatacgaatttcaaggcaatcgatactaaatcggttgcctttttctatttcaggaagaaaggggagcgaaatgatggcgaagttagacgaatta

SEQ ID NO: 25202 - DNA, 260 bp, Unknown
  Description of Unknown: LeftRegion for integrase A770 sequence
taagggggtaactggagtgcaaatgtgtcgtagatgtggatttgatcaaatgagagaatcaaaattctgttccaagtgcggcgctatacatccagtacgtgacaaatattttgctgctaacaaagattttttaattgaattagcacttaaaacgagagataaagaatggtttgaacaattgaatagggggattgttactgatgttaaataaatttgaaaagaaagaagttagaacagtgattactggcttgttaacacat

SEQ ID NO: 25203 - DNA, 260 bp, Unknown
  Description of Unknown: LeftRegion for integrase A771 sequence
tgtggtctgccgcgaatcttatcaaggtagatgccgaggcaggtgttattcattgccaacgtaaataccatcgtgctggtcaaatcatagctgagtctatgacttgggcaggtaagtatttaaacatgcgttgccctatgtccggggaatttaagatcggaagttcatgggctgaaacgcactaacatgggaaaaggaaaatgcaagagtgggttcgcattacaagctatcctaactatgctgtgtcgaacgaaggtgag

SEQ ID NO: 25204 - DNA, 260 bp, Unknown
  Description of Unknown: LeftRegion for integrase A772 sequence
caccgacagcaagagcccgatctattcgggtacgaggatgctccaaagcggttgcactgaccgcccctacatcaagccccgcctagcggggctttttgcttaaagcccccggaaatacagcgcccttgctgctcgggcgaacctagccaggtccattcatctggcagattcgaacatgcttgagcacgccacctcttcagcggaattcgcccagcgcgtcattgacgagcgctgcgagaagacgcgccaacgaatgatcg

SEQ ID NO: 25205 - DNA, 260 bp, Unknown
  Description of Unknown: LeftRegion for integrase A773 sequence
tcgtccggggttcgggttcgaggacgtctgggagtggccgatgaaggacttcgaccaccacttcctggtcagcctgtgggcgatcgtgtggggcatccagcagtgggacacccgcgagcacaagacgcagctggattgggagcgcgaggaccacgcccgcacgcgggcggagctggccaacctgcggcggtaccacaaccatgtctgagctggaggagctgcgcgccgaggtcgaacgcctccgcgcacgcgccgacgag

SEQ ID NO: 25206 - DNA, 260 bp, Unknown
  Description of Unknown: LeftRegion for integrase A774 sequence
gatagactgtgtagattcggttacgaacttatcgaatggatcgttggaagatacggttgacgaatcgtcgttttggatgaaaagacgttcgaatccgaagaaaccgaactcgcaaacgatttattatccattaccacgtcttcagttgtaaacaattgggaaaaagacgttataaaaaatctaaaagtaagaatttatccaacaccaactcaacgtaagatttttaaagaatggtttgggacgacacgttacgtttacaa

SEQ ID NO: 25207 - DNA, 260 bp, Unknown
  Description of Unknown: LeftRegion for integrase A775 sequence
aaggatctttactacttcaaaaatactttcatgatggtgtaaacggtccaaaaagattaaatcaaggacaggttgaacaatactatatcgaagataatcatgaaggaattgtatctaaggaaatatgggagaaggttcaggtaaaaataaaaagccgttctcggatccaaggtacaaataaaacctataaattttccagaatgttaaaatgccaatattgtggttcaacattaaaaagacaagtttcttataagaaaaag

SEQ ID NO: 25208 - DNA, 260 bp, Unknown
  Description of Unknown: LeftRegion for integrase A776 sequence
ttaatctattaaatgaaaattcaagtaaagatgttgctaggattacagaagtactaactgataacaacaattacttttataagctaacaggtgaatacgataaggtatttaaagaaagtgagttaactttagtaaaagatattgacaagaatgattaagtgtagtatgatataagtatcaaaacaaaaggagttttttatatgtttatttcattaaataaagaagaagagaagattttaggtacagaaaataaaaaagaa

SEQ ID NO: 25209 - DNA, 260 bp, Unknown
  Description of Unknown: LeftRegion for integrase A777 sequence
ctagaaccgattctacagaacaaaacactggtactaaacgataggcatacgatactgctcgaccaaatggcgcaatatccattttctgaccacgatgactcattagacgcctgccagcttgctgttgataatatttcaagacctgttgcacgggttgtagcaaagcctgcgtatctataaaacgaaaggagcaatttggaatggcgaatcctagacgaatgaaagcactagaagcgaaattgacggcgcaacaacgtaaa

SEQ ID NO: 25210 - DNA, 260 bp, Unknown
  Description of Unknown: LeftRegion for integrase A778 sequence
gcattagtacctaacagcaactttatgaaaacatggtcgagttggtcaccaagcccataaaaacggcgctttttccttaaaaatcaaggtgaccgagaaaaacaccgcttgtctccctgtagtcacctatttctggtcaccgttcatcttttcggctacaatccctatattgacttttatttataattattgggggttacatggaattaccgcgcactgtgcaggaaatagctgacgttattggccgtgaacgtgcgcta

SEQ ID NO: 25211 - DNA, 260 bp, Unknown
  Description of Unknown: LeftRegion for integrase A779 sequence
gacacatcacctgcaaatgacaaccatcagcaccgactactaatgactacggggcaataactggcatgaatatttttgagaagtttctggataacattggatgggcaatcgctggtttaatgggtgcgttgattgctgttccttttcacgatgataagagcatcaaaggccgtctgtggtttgtttgtagcgggcttgcatgttcttactttcttactggctggacgtcatggttttacagcatcccgcagcaatacact

SEQ ID NO: 25212 - DNA, 260 bp, Unknown
  Description of Unknown: LeftRegion for integrase A780 sequence
aaaaatataatttttttataatgatacatcgcagattaaaaatataattataataaatattcaatataaccatataatttatctgcgatgtattattataattataggtgtatataggtttctgtaatgttccaatataatcagatttattttctcaaaaaatataatttttttataatgatacatcgtagataaattatatggtcatattgaatatttattataattatattattatcgttcccgaaatatccagatta

SEQ ID NO: 25213 - DNA, 260 bp, Unknown
  Description of Unknown: LeftRegion for integrase A781 sequence
aacgaaggaggtacgtaaggatgaacgacacgattacgaagtttactcgctgtggtgattgcgtattccacgacagtaccgaaaatatatgcgagttgttaggcgtcgtagccgagacaacagacggatgtactttcggagtgaccgatagtgacatcgaagatgaaataacgtaatgaaaacggaaaggagtggatagtatgccgaataaattcgatgacctgtccgagcaacagaaacgggcagccgaattattgctc

SEQ ID NO: 25214 - DNA, 260 bp, Unknown
  Description of Unknown: LeftRegion for integrase A782 sequence
acagacatgaaagcagatttgcgtcaaatgaatggtgacatcagacacattacagaaatagtcaatgatgtagaagatagacaaaaagaagatacaagagaaatatttgatgagattaaaatcatcgaagataaccttaacttaaatattaataaggcattgaacaatccactaaacaatatgtcagcaaaggtaaaataatgacaacagcagtagtaaacaaacaaggtaatcgtcctgctaaatacaaacaaagtatt

SEQ ID NO: 25215 - DNA, 260 bp, Unknown
  Description of Unknown: LeftRegion for integrase A783 sequence
cagctcagtattgcccgctccacggtttataaaattcttgaagacgaaagggcctcgtgatacgcctatttttataggttaatgtcatgataataatggtatcttagacgtcaggtggcacttttcggggaaatgtgcgcggaacccctatttgtttatttttctaaatacattcaaatatgtatccgctcatgagacaataaccctggtaaatgcttcaataatattgaaaaaggaagagtatgagtattcaacatttt

SEQ ID NO: 25216 - DNA, 260 bp, Unknown
  Description of Unknown: LeftRegion for integrase A784 sequence
aatgagagcgaagatttttctgatgaacccactaaagatgaggctagagaattttatttgagaaacttgattgcttttatgctggtagctgaagatgatgatataaaacgttcttgtgccaaagcattcttgacgttcccagaaaaaaacctggacattgctttgagtacagaactattgactagagaagatttagagaggtggtcaaaatagcaaaaggaaaatataaagaatggctaacaaatgagaagttagatatt

SEQ ID NO: 25217 - DNA, 260 bp, Unknown
  Description of Unknown: LeftRegion for integrase A785 sequence
tggccggattgctgacgttctggctctcctttcgttttcgcgctcgtctgttcgggtaaaggggcaccatgtacagaaaattcagtgatgaatgtttcgggccgtccacgctgattagtgcgataaaagtgattgcccttgtggttctgataaccatcagtgccgtggtgtatctttctgtctgttaaccgggggaaaatatgcagcatgatttatttgaacacgatccggcaattcgccagttaatcggacatattgat

SEQ ID NO: 25218 - DNA, 260 bp, Unknown
  Description of Unknown: LeftRegion for integrase A786 sequence
tggccggattgctgacgttctggctctcatttcgttttcgcgctcgtctgttcgggtaaaggggcaccatgtacagaaaattcagtgatgaatgtttcgggccgtccacgctgattaatgcgataaaagtgattgcccttgtggttctgataaccatcagtgccgtggtgtatctttctgtctgttaaccgggggaaaatatgcagcatgatttatttgaacacgatccggcaattcgccagttaatcggacatattgat

SEQ ID NO: 25219 - DNA, 260 bp, Unknown
  Description of Unknown: LeftRegion for integrase A787 sequence
cgcgtagtcgctaaaatgcgcaagatagaagttaagaaccgtcaaccgaatttattttaaggaattgaaaatgaaagccattgctttattactatcatcattattttgtatgcccgtgttggcaaaggacttaccaccagtaaatgaaatgctccatcgcttagatgttgctggttatagcaacgccgataaatgggaagatattgaaggtacaaaaaagcaagatttagaaactggaacattgtttgttagtcaatcga

SEQ ID NO: 25220 - DNA, 260 bp, Unknown
  Description of Unknown: LeftRegion for integrase A788 sequence
gaaaggctggcagtcagttgatatgccggaaattcttcaccactgtcaacgttataaggaaaaatattgtgtacagaaaattcagtgatgaatgtttcgggccgtccacgctgattaatgcgataaaagtgattgcccttgtggttctgataaccatcagtgccgtggtgtatctttttgtctgttaaccgggggaaaatatgcagcatgatttatttgaacacgatccggcaattcgccagttaatcgggcatattgat

SEQ ID NO: 25221 - DNA, 260 bp, Unknown
  Description of Unknown: LeftRegion for integrase A789 sequence
gattaccaaaaacttaagtggtggttacgaaagacaaaaagcactcgagcttattttaagctacacagcaaagaaaaacataataacagaatttgacgatgccttatttttaaggcatgttgaccatatcatagtttatagcagaacggaaattggctttgttatgaaatttggacctatttttaaagagaggatttaagatgaagcatacaccatatggatatattatcgtggacggtaaggcagtagtaaacgaaaaa

SEQ ID NO: 25222 - DNA, 260 bp, Unknown
  Description of Unknown: LeftRegion for integrase A790 sequence
tatcaaattccgcgagtgggattttgcgagcaaacgagataaaggacctcattgattacgtatcagcagataattttaatggtgactacacggaagagatatttgaagaatttgtagagaacatcattgtaaattccagggatgagctgacattcaatttgaaatgcggtctttccctgaaagaaaaggtggtgagataaatggcatatattccatatggatacaaaattcaagatggagtggttactgtcgatgaaaag

SEQ ID NO: 25223 - DNA, 260 bp, Unknown
  Description of Unknown: LeftRegion for integrase A791 sequence
agaatttctgagaaaaccgttggataaggaacttcttattgcggtagaagagagatataagtccaactcagttgaatatagtgcagaaattattacaaaagagatgtataaacgtgcagttgagaaagtagaaaaatgcaaagaataataattaaatgtggtaaagtataattaagataaaaacaggaggtaagttataaatggaaaaatgtacttatacaagaaaatataaaaatgaagatgaaaagggtggcacacca

SEQ ID NO: 25224 - DNA, 260 bp, Unknown
  Description of Unknown: LeftRegion for integrase A792 sequence
gtgaaaagcattaacggagatttaagtcatttagatgaggcacagaaacttcttagatttacatctaaaaaagaagttatcacagaatttaatgatgccttatttctagaatatgttgatacgattaaagttaataacagaaatgaaataactttcgctttaaaatgtgggctgaatttaacagaaaggttggtaaagatatgacacatacaccatatggataccgcatcgaaaatggaatagcggtagttgatgaagtt

SEQ ID NO: 25225 - DNA, 260 bp, Unknown
  Description of Unknown: LeftRegion for integrase A793 sequence
ttccagttctctaaagttgacatcgtgcggatgttcccgatcttcgtcaccattctcggcgtgggccttgcggaagtgatcgaggatgaaaaggctctgaaggccggagttaacgcgctgattgattgccttgaggattgcggcgacgctgagcagggattgcgcctggctttacgtgccatgcttgagggccgcaaataatgaacgtgtctatcagggccattcaggcgatcatggagaacgccattgaagatggtaag

SEQ ID NO: 25226 - DNA, 260 bp, Unknown
  Description of Unknown: LeftRegion for integrase A794 sequence
ttagaagttgatgtatctacaatatatagaaataaaaaagagataataaataaacttatgaaagtaatagtattttaatagtaatatacttgtaatgtactattttattacatctagtaatatgttattatgttatcatacggagtacccgaaagaggtactcttttttatttatgtaaaatgtaaaggaggtggttataatggctgatatattaacaactaaagaatcagatatgattacaatgcttatagaaggtgtt

SEQ ID NO: 25227 - DNA, 260 bp, Unknown
  Description of Unknown: LeftRegion for integrase A795 sequence
gtgggggagtttgagctattcacccgacccgcgcccgccgctggccttgctgatctggtgccgggtgaatttgataattggaaaaaccccgcatctgaagcgatgagcgcgattggctacgttggcaataagcaagatttcactatgggcgctaactggatgcgcgctgccgttctgcgaaacattaatggtggcaactaatgaacgtgtctatcagagccattcaggcgatcatggagaacgccattgaagagggtaag

SEQ ID NO: 25228 - DNA, 260 bp, Unknown
  Description of Unknown: LeftRegion for integrase A796 sequence
ttcccgttctctaaagttgacatcgttcggatgttcccgatctttgtcactattcgcggcgttggtcttgcggaagtgatcgaggatgatgcgtcattgaaagccggtgttaacgcgctggttgattgccttgaggattgcggagacgctgagcagggattgcgcctggctttacgcgccatgcttgagggccgaaaataatgaacgtgtctatcagggccattcaggcgatcatggagaacgcaattgaagatggtaag

SEQ ID NO: 25229 - DNA, 260 bp, Unknown
  Description of Unknown: LeftRegion for integrase A797 sequence
ccaatccacttcggatactggtgcgggtgtaactaccattgtgttgtgttttggcctcgcttttgcggggctttttttcgtgcacaggtagcgttatactgtaaccataggttccacaggcaccccgccgcctaactcctccctgccagccgatgtggggcaagtcttgcggggaatcggcacccattaaccaagtgtgaatgaccatggcgcgaccgacgaagtacgatcctaagttctgtgatgaagcacgcgagatg

SEQ ID NO: 25230 - DNA, 260 bp, Unknown
  Description of Unknown: LeftRegion for integrase A798 sequence
atgccaagaagcgggtgcttctgcaggaaaagacgaccgaccagatccgcttcatgtccgctggggacttcaagaaattgctctaaacccaaccatgacgtacatggactggcttgacaggctggcaaagcatatggttgactaggtgtacatggtgaggccctacccggggcctcaccggtcacccagtaggagccaccttgacgcacatagctagtgagaaacttgagcagattcaagacctgcttgacaaccagctt

SEQ ID NO: 25231 - DNA, 260 bp, Unknown
  Description of Unknown: LeftRegion for integrase A799 sequence
gatgccaagaagcgggtgcttctgcaggaaaagacgaccgaccagatccgcttcatgtccgctggggacttcaagaaattgctctaaacccaaccatgacgtacatgggctggcttgacaggctggcaaagcgtatggttgactaggtgtacatggtgaggccctacccgggcctcaccagtcacccagtaggagccaccttgacgcacatagctagtgagaaacttgagcagattcaagacctgcttgacaaccagctt

SEQ ID NO: 25232 - DNA, 260 bp, Unknown
  Description of Unknown: LeftRegion for integrase A800 sequence
tatcatggaggttgtatgagcaagaaaggcaagaaagctttacagcagatagcggaccagtcagtctatgactttcaagcaagtcagtctatgtggttctgtgagtgagcaatcaaccttatggcgtctaccatgccaattcatgaagtagcagagtatttgcgtcgtcaggtgaagattttagaggaatatgaatagttatggctggcggtcgtccaaccttatacagaccagaatattgtgagacagtcattgaactt

SEQ ID NO: 25233 - DNA, 260 bp, Unknown
  Description of Unknown: LeftRegion for integrase A801 sequence
tggccgaagtgatcactaaaagtggtggtcgcattccatcgaacaacgattgcacaggcccagctggttatgagctattagctgagcattatgcgagtaactactacaaaactggttaacgtgccccaccagtaaacactgccatatactacaaacacctcgccaagcggggtgtttttatattcatactatgtgaaggtatgccatgtggatgggaggcagtaatgagtgaagaaaaccaagacttgtttggttacaag

SEQ ID NO: 25234 - DNA, 260 bp, Unknown
  Description of Unknown: LeftRegion for integrase A802 sequence
ttgatggaaagaaatatttggtctttagcgtcattcataatcttgatggtaatgaatcgacagtaattgctgattttatggggtaacctgcttaacgtgccccaccagtaaacactgccatatactacaaacacctcgccaagcggggtgtttttgtatttatactatgtgaaggtatgccatgtggatgggaggcagtgatgagtgaagaaaaccaagacttgtttggttacaagaatgtaagcctagaagaagttgaa

SEQ ID NO: 25235 - DNA, 260 bp, Unknown
  Description of Unknown: LeftRegion for integrase A803 sequence
atagcaaaacacttggatatttctaggatgtctgtttaccgaatattaaagggggcttaaatgccaattgctatagtaagaaatccagaagatacaatctgttcattcaaagtaactattgtaaataagatagacaatcttatgacagaatgtaagactcataattattcagtgcaagatgtcatccaagaaataacagatgctctgccagataattattttgtttatgaaattgtaaaccttgaaactaattctaccta

SEQ ID NO: 25236 - DNA, 260 bp, Unknown
  Description of Unknown: LeftRegion for integrase A804 sequence
aagctggatttactggaaccattaccgatgcatcagaaggttataatggattccaagagtatgaagttacatgggacatttcaggatgtacctctgacatgttggtgaatgaaattgaaccaatgaaagagggacaagataatccacaaacacagaatgacatccataagaaacaatttggtgattaaaggagaagtgaaatggcagacacacttcataccgtaccaaccaagccgctcactaaagaggataggattgag

SEQ ID NO: 25237 - DNA, 260 bp, Unknown
  Description of Unknown: LeftRegion for integrase A805 sequence
tccacgctggcttggtgccacggagaatcgttgcaagttgtgcttgaaaccctgaaacagtggcacatccgctgtattcgtgaagccttttcccgtcacgggcttccgttgccggtcagtccgtccgggcgtgaactgcgcggctatgatgccatgacggcggcttatgcccatgccagaaagacacggaggatggcacaatgacggaagatttatttggtgatttgcaggatgacaccatcctggcacatcttgacaat

SEQ ID NO: 25238 - DNA, 260 bp, Unknown
  Description of Unknown: LeftRegion for integrase A806 sequence
tccacactggcgtggtgtcatggcgacacgctgctgacagtcctcgaaacactcaagcagtggcacatccgctgtattcgtgaagccttttcccgtcacgggcttccattgccggtcagtccgtccggtcgtgaactgcgcggctatgatgccatgacggcggcttatgcccatgccagaaagacacggaggatggcacaatgacggaagatttatttggtgatttgcaggatgacaccatcctggcacatcttgacaat

SEQ ID NO: 25239 - DNA, 260 bp, Unknown
  Description of Unknown: LeftRegion for integrase A807 sequence
cccgccgaaaaacagcagcacctgcgtgattctgtcctgccagagaccagcaaaccctgaagacatgcacccgcccgcctgagctgacactctgagcgcacccataacacggagtgcatcagatgtctgattatcatcacggtgtccgcgtcgtcgaaatcaacgacggcacgcgcaccatttccaccgtatccacggccattgtcggcatggtctgtaccgcagacgatgccgatgcggccgccttcccgctcaatgag

SEQ ID NO: 25240 - DNA, 260 bp, Unknown
  Description of Unknown: LeftRegion for integrase A808 sequence
attctaaatggtactgcttataatgacattgttcaaaaacacaatttaatagcaaaataaaaaaccgcttatagcggttttttattttttaatatttttctacataccaaccaaattctacatgggcctctaaatcactaagtactttaattctaacttctggagcgccatatccataactatcttcccacaaactagaaaatgaacgagctctatgcaatctatgaactctccctttagaaaaagtaccatttttcttt

SEQ ID NO: 25241 - DNA, 260 bp, Unknown
  Description of Unknown: LeftRegion for integrase A809 sequence
gtctcctgcgcggtggacgcctaccacgacgaaacctcagagaccgctgctgcggcctgactgtcaaccgaaagaggagtattacaccgatgagaaccagagtgaacgtaggccgggtgatcctgccgctccacggcaagggggctttggcatgagcggcctagacgatctgttcggcgtcgaggccgggatcggccacaactccaccgacagctaccgcatcaccgcctccgaactgcgccagttcatcgagcgcgtcg

SEQ ID NO: 25242 - DNA, 260 bp, Unknown
  Description of Unknown: LeftRegion for integrase A810 sequence
tccctccttgaaataaataccggcacaatccggcattttaccggcattcctgctttaaagagacggtgctatttaaatgtgctgatctctttaaggtgttagtgagtgccggattttttatactaatcagaattatactaatttaaattattatattgattgtttttattttaaatgaggagatgagagaggtgaggtgaatgaaaagaaaagagttgagaaaagttaataaaaaagggatttccaaaagacaacagaga

SEQ ID NO: 25243 - DNA, 260 bp, Unknown; identical to SEQ ID NO: 25242
  Description of Unknown: LeftRegion for integrase A811 sequence

SEQ ID NO: 25244 - DNA, 260 bp, Unknown
  Description of Unknown: LeftRegion for integrase A812 sequence
tttcatgttgtgattctcctctattcgtgtcgcttggttgacatgtaggtccatttggaccctacgtccagcatcttttctctttttgggtgaaattatttttacgctcaactttccccttttggttgacatgtgactcgagccaggagtacggatcggacaacccggcccggaatcgccggacctaagaggagagaaatatgtcgtcaaaacccaagcccggtttcatgcgcccgagggcgaaccgggaggagatggcc

SEQ ID NO: 25245 - DNA, 60 bp, Unknown
  Description of Unknown: LeftRegion for integrase A813 sequence
gtggctaaatcaaacgcaggaagaccgtcaaagtatgatgactcattccttggtatcaca

SEQ ID NO: 25246 - DNA, 260 bp, Unknown
  Description of Unknown: LeftRegion for integrase A814 sequence
aaaccgcacttttcaggtgtaggagaacgtagcactggagaagaacaggaaaataaaaccacatatcagcaaatggatcaagcaaaagaggatgcgattttatatatagatcgtatatatcgattggggcaaccagttgaaaacttagaaggctacgatatttggaaagcatggaaagaacaacaaataggagctaaatgatgagtacaaatgcagatatttttgatgaaaaagcacctgaaatcttagctgatttagct

SEQ ID NO: 25247 - DNA, 60 bp, Unknown
  Description of Unknown: LeftRegion for integrase A815 sequence
tgagtaaatcaaacgcaggaagaccgtcaaagtatgatgactcattccttggtgttacag

SEQ ID NO: 25248 - DNA, 260 bp, Unknown
  Description of Unknown: LeftRegion for integrase A816 sequence
cgcgaggagatcgccgcgcgccaacgcgacctgtttgcaagtccgacttccaccgattgagcccgagggggctaccttgacaggtaggtagccgcctctcagaattctctacagccgtcgaagcagtgccacaggatcggtccgcaagtgttgtcgtaaatcccgcgtccgccagtggacaacggtgttgcccccaccacaagggcggggacaaccgctacgcggttccaccgttgaccactgtctcctcgcgaaccttg

SEQ ID NO: 25249 - DNA, 260 bp, Unknown
  Description of Unknown: LeftRegion for integrase A817 sequence
cgcgaggagatcgccgctcgccaacgcgacctgttcgcgagccccacttctaccgattgagcccgaggaggctgccttgacaggtaggtaaccgcccctcagacttctccgcagccgtcgatgtaatgccgcagaatcggtccgcaggggtcgtcgtagatcccgcgtccgccagtggacaacggtgttgcccccaccacaagggcggggacaaccgctacgcggttccaccgttgaccactgtctcctcgcgagccttg

SEQ ID NO: 25250 - DNA, 260 bp, Unknown
  Description of Unknown: LeftRegion for integrase A818 sequence
caatccagcccattagtaaacgattttttaaggtattaccgttgcgatttttcataatatgccctctggttaatatactattataatacactctttgtgtacgtattacaacaaattaccatgtaacaagggcattacagtgtaattaatggtttaaatttatagagtaataaacaaacacaatagatagggtaaagatgatggctaaattaggtcgaccgactaaatattctgatgatgttggagagatagttcttgat

SEQ ID NO: 25251 - DNA, 60 bp, Unknown
  Description of Unknown: LeftRegion for integrase A819 sequence
ttgactaagcaaaagattggaagaccaactaaatacaaagatgaatattgcgacaaagct

SEQ ID NO: 25252 - DNA, 260 bp, Unknown
  Description of Unknown: LeftRegion for integrase A820 sequence
cgcaactacggggtcaacccggccaccatctcccgcatcgtcaaccgggtctactactgatgagcgaccgcgctcaggtggtagtgatcctgccccgcgacggagccctgccgatcgacgtgcagggcgtcaacactcggcgcttggcgatcgagcgcatgtcggagctgggcgaggtggacgagaacagcgtccgctacaaggccggtaccgaagaggccacggtctcgttcgggggtccgaactacgtcagcctgtgg

SEQ ID NO: 25253 - DNA, 260 bp, Unknown
  Description of Unknown: LeftRegion for integrase A821 sequence
acgatgcgcaagaagggtttgcttccggcttatgagccagagtcttacgagtatgtaggaaccagcgaaacgctcggggtggtgaggttcagatcactcagtcatgcgcacgaggaaggatttccatccagcatggtgagcaaggcggtaaacgggaaaatcagcagttacgcagggtacacgtgggagaaggtggcaaaatgaaaaagcatatcgagatgcgcttggcggatggcgcaacgcttgacgacatcaaggca

SEQ ID NO: 25254 - DNA, 260 bp, Unknown
  Description of Unknown: LeftRegion for integrase A822 sequence
cagtggctagacagccacgggattgaatcaccggcgttagaggagcacgagcgggattgagaacaagagtttccgtgcgaccaccactatccacatgaggaccgcgaaggcctgcttgagttgtccaaggaaacacggttgtccaccagatttactgaggttcatgttgtagccaccccaacatgcggtatagcgatgacaactgacagaggtgacggtgggagcgagcgggcacaatccccgagcgacgcataccgtga

SEQ ID NO: 25255 - DNA, 260 bp, Unknown
  Description of Unknown: LeftRegion for integrase A823 sequence
gagtgagtgattatgaaagagatatttgcaatatgcgtactaatactaactatatggtttatcaagaatgaaccactgcaagatgcgctgcttgtactgctgactaagtaaaatctgccctgcttatcgtggggctttttatttgttatactgtataaaactcaggcgagtaaattttatgttaatcaggagattgatatatgacagcaggtagacctacaaaatacaaagaagagttatgcaagaggagtgtagctttt

SEQ ID NO: 25256 - DNA, 60 bp, Unknown
  Description of Unknown: LeftRegion for integrase A824 sequence
tggctaaatcaaacgcaggaagaccgtcaaagtatgatgaatcattccttggtatcacag

SEQ ID NO: 25257 - DNA, 60 bp, Unknown; identical to SEQ ID NO: 25247
  Description of Unknown: LeftRegion for integrase A825 sequence

SEQ ID NO: 25258 - DNA, 260 bp, Unknown
  Description of Unknown: LeftRegion for integrase A826 sequence
acgatgcgcaagaagggtttgcttccggcttatgagccagagtcttacgagtatgtcggaaccagtgaaacgctcggggttgttaggttcagatcactcagtcatgcgcacgaggaaggatttccctccagcatggtcagcaaggcggtaaacggggctatcagcagttacgcagggtacacgtgggagaaggtggcgaaatgaaaaagaatatcgagatgcgcttgactgatggcgcaacgctaaacgacatcaaggct

SEQ ID NO: 25259 - DNA, 260 bp, Unknown
  Description of Unknown: LeftRegion for integrase A827 sequence
acgatgcgcaagaagggtttgcttccggcttatgagccagagtcttacgagtatgtcggaaccagtgaaacgctcggggttgttaggttcagatcactcagtcatgcgcacgaggaaggatttccctccagcatggtcagcaaggcggttaacggggcaatcagtagttacgcagggtacacgtgggggagggtggcgaaatgaaaaagcatatcgagatgcgcttggctgatggcgcaacgctaaacgacatcaaagcc

SEQ ID NO: 25260 - DNA, 184 bp, Unknown
  Description of Unknown: LeftRegion for integrase A828 sequence
caggatcgtaagttcgaacgtgaccagggcaaactggacctcggcgacggcctggcctgaccggccgccgccttttcatccttggaaactctttttcaaagcctatcccactaaatccctttcccttcctctatatcccacaattttctcgctttaccctcctggtttatctcactctctctca

SEQ ID NO: 25261 - DNA, 184 bp, Unknown
  Description of Unknown: LeftRegion for integrase A829 sequence
caggatcggaagttcgaacatgaccagggcaaactggacctcggcgacggcctggcctgaccggccgccgccttttcatccttggaaactctttttcaaagcctatcccactaaatccctttcccttcctctatatcccacaattttctcgctttaccctcctggtttatctcactctctctca

SEQ ID NO: 25262 - DNA, 260 bp, Unknown
  Description of Unknown: LeftRegion for integrase A830 sequence
acgatgcgcaagaagggtttgcttccggcttatgagccagagtcttacgagtatgtcggaaccagcgaaacgctcggggttgttaggttcagatcactcagtcatgcgcacgaggaaggatttccatccagcatggtgagcaaggcggttaacgggactatcagcagttacgcagggtacacgtgggagaaggtggcaaaatgaaaaagcatatcgagatgcgcttggctgatggcgcaacgctaaacgacatcaaggct

SEQ ID NO: 25263 - DNA, 260 bp, Unknown
  Description of Unknown: LeftRegion for integrase A831 sequence
attccagagggagccaagaaatctgatatcttcgtcatagaagaccatattaggtttaagaaatgactcatatacgattaattcaatttttcgaaaaaatgatcagcaaaaattgaatatggaatatcatatgggtctcattattgaagcaacgaagtatttggcgctgggttgttgattttgtgaacaaaccataaatcatggcgagtgttgacgatgaaaatagcgatgatgatactggccgtcaggctttcaataaa

SEQ ID NO: 25264 - DNA, 260 bp, Unknown
  Description of Unknown: LeftRegion for integrase A832 sequence
cctgattgggaatcgcaaaccgcggcaacagttgtctggctgtccaggcgtatccgtgtcggcgactcgctgggtgtgtgggactacctcaccaagcttcccgttgatcagcgcaccagattgttgatggccgcgctggctggaatcccagatgttgatgacccgttcgcgtggatcactgaggaagtggagcaggtcgcatgagcaacggaaaccggctcacccctgagcaggtgaagatgatcctgtcgatgacgcgt

SEQ ID NO: 25265 - DNA, 260 bp, Unknown
  Description of Unknown: LeftRegion for integrase A833 sequence
gaagtggaccccgaagtgttttttcccgagaagggtggaagcgcgaagccggctaaacggatctgcagccggtgcgaggttcgggtcgaatgcttggagttcgcgttggcgaaccgcgagaactacggggtgttcggggggttgtcggagcgggaacggcgtcctctgctcaaagcgatcgatggtgaggatcaggtggcatgagcaacgggaacaggctcaccccagagcaggtgcagacgattctgttgatgactcgt

SEQ ID NO: 25266 - DNA, 260 bp, Unknown
  Description of Unknown: LeftRegion for integrase A834 sequence
gatctggacgccattgaacgggccttcaagggcgcgttcgaggccgcgacggtcgcctgtccggaactgggcgagatgccgtcgcacgaatgccaggcatggcggaagaaggcgcgcaagttttccggtgccaacagcctgcgggtgcggatgtttcgggcctgctcccgctgtgcgctaaacaaaaagggagacgcctgatgcccgctccccatcccaagcgcgccgaggttctggcgctggcgcgcgccggcatgcgt

SEQ ID NO: 25267 - DNA, 260 bp, Unknown
  Description of Unknown: LeftRegion for integrase A835 sequence
gctgattgggaatcgcaaaccgccgcaaccgttgtgtggctgtccaggcgtatccgtgtcggcgactccatcggcgtgtgggactacctcaccaagcttcccgaggaccagcgcacccaactactcatggccgcgttggctggcatccctgatgtggaggatccgttcgcgtggatcactgaggaagtggagcaggtcgcatgagcaacggcaacaggctcacccctgagcaggtgaaaacggtgctggcgatgactcgt

SEQ ID NO: 25268 - DNA, 260 bp, Unknown
  Description of Unknown: LeftRegion for integrase A836 sequence
gaagtggaccccgaagtgtttttccccgagaagggtggaagcgcgaagccagctaaacggatctgcagccggtgcgaggttcgggtcgaatgcttggagttcgcgttggcgaaccgcgagaactacggggtgttcggggggttgtcggagcgggaacggcggcctctgctcaaagcgatcgatggtgaggatcaggtggcatgagcaacgggaacaggctcaccccagagcaggtgcagacgattctgttgatgactcgt

SEQ ID NO: 25269 - DNA, 260 bp, Unknown
  Description of Unknown: LeftRegion for integrase A837 sequence
gctgattgggaatcgcaaaccgccgcaacagttgtgtggctgtccaggcgtatccgtgtcggtgactccatcggcgtgtgggactacctcaccaagcttcccgaggaccagcgcacccaactactcatggccgcgttggctggcatccctgatgtggaggatccgttcgcgtggatcactgaggaagtggggcaggtcgcatgagcaacggcaacaggctcacccctgagcaggtgaaaacggtgctggcgatgactcgt

SEQ ID NO: 25270 - DNA, 260 bp, Unknown
  Description of Unknown: LeftRegion for integrase A838 sequence
gccgaagtggaccccgaagtgtttttccccgagaagggtcgaagcgcgaagccagccaaacggatctgcagccggtgcgaggttcgggtcgaatgcttggagttcgcgttggcgaaccgcgagaactacggggtgttcggggggttgtcggagaaggaacggcggcctctgctcaaagcgaatggtgaggatcaggtggcatgagcaacgggaacaggctcaccccagagcaggtgcagacgattctgttgatgactcgt

SEQ ID NO: 25271 - DNA, 260 bp, Unknown
  Description of Unknown: LeftRegion for integrase A839 sequence
tatttaagatgttacaaaaagagaaagggactaatagctaatattagtcctttttttatataaattggttattatgtaaaaaattgacaataatgtggatgagttttttaactattttgttaatttattatataatacatgtatacgcaaaggggtaaaaactacgaacgtagtataaattaatgtagggggagtttcgtttgtctaaaagatggacagcagaagaagataaattgttagcagtattaatgctaaaatat

SEQ ID NO: 25272 - DNA, 260 bp, Unknown
  Description of Unknown: LeftRegion for integrase A840 sequence
gccgaagtggaccccgaagtgtttttccccgagaagggtggcagcgcgaagccagccaaacggatctgcagccggtgcgaagtcgcggatgagtgcctggagtgggctctggcgaatcgcgagaactacggggtgttcggggggttgtcggagcgggaacggcggcctctgctcaaagcgaatggtgaggatcaggtggcatgagcaacgggaacaggctcaccccagagcaggtgcagacgattctgttgatgactcgt

SEQ ID NO: 25273 - DNA, 260 bp, Unknown
  Description of Unknown: LeftRegion for integrase A841 sequence
gctgattgggaatcgcaaaccgccgcaaccgttgtatggctgtccaggcgtatccgtgtcggcgactccatcggcgtgtgggactacctcaccaagcttcccgaggaccagcgcacccaactactcatggccgcgttggctggcatccctgatgtggaggatccgttcgcgtggatcactgaggaagtggagcaggtcgcatgagcaacggaaaccggcttaccaaggagcaggtgaagatgatcctgtcgatgactcgt

SEQ ID NO: 25274 - DNA, 260 bp, Unknown
  Description of Unknown: LeftRegion for integrase A842 sequence
cctgattgggaatcgcaaaccgcggcaacggttgtgtggctgtccaggcgtatccgtgtcggcgactcgctgggtgtgtgggattacctcaccaaacttccagttgatcagcgcaccaaattgttgatggccgcgctggctggcatcccagatgttgatgacccgttcgcgtggatcactgaggaagtggagcaggtcgcatgagcaacggcaacaggctcacccctgagcaggtgaaaacggtgctggcgatgactcgt

SEQ ID NO: 25275 - DNA, 260 bp, Unknown
  Description of Unknown: LeftRegion for integrase A843 sequence
gctgattgggaatcgcaaaccgccgcaaccgttgtgtggctgtccaggcgtatccgtgtcggcgactccatcggcgtgtgggactacctcaccaagcttcccgaggaccagcgcacccaactactcatggccgcgttggctggcatccctgatgtggaggatccgttcgcgtggatcactgaggaagtggagcaggtcgcatgagcaacggaaaccgacttaccaatgagcaggtgaagaggatcctgtcgatgactcgt

SEQ ID NO: 25276 - DNA, 260 bp, Unknown
  Description of Unknown: LeftRegion for integrase A844 sequence
gctgattgggaatcgcaaaccgccgcaaccgttgtgtggctgtccaggcgtatccgtgtcggcgactccatcggcgtgtgggactacctcaccaagcttcccgaggaccagcgcacccaactactcatggccgcgttggctggcatccctgatgtggaggatccgttcgcgtggatcactgaggaagtggagcaggtcgcatgagcaacggaaacaggctcacccctgagcaggtgaaaacggtgctggcgatgactcgt

SEQ ID NO: 25277 - DNA, 260 bp, Unknown
  Description of Unknown: LeftRegion for integrase A845 sequence
gctgattgggaatcgcaaaccgccgcaaccgttgtgtggctgtccaggcgtatccgtgtcggcgactccatcggcgtgtgggactacctcaccaagcttcccgaggaccagcgcacccaactactcatggccgcgttggctggcatccctgatgtggaggatccgttcgcgtggatcactgaggaagtggagcaggtcgcatgagcaacggaaaccgacttaccaatgagcaggtgaagatgatcctggcgatgactcgt

SEQ ID NO: 25278 - DNA, 260 bp, Unknown
  Description of Unknown: LeftRegion for integrase A846 sequence
gccgaagtggaccccgaagtgtttttccccgagaagggtaaaagcgcgaagccagccaaacggatctgcagccggtgcgaggttcgggtcgaatgcttggagttcgcgttggcgaaccgtgagcactatggggtgttcggggggttgtcggagaaggaacggcgtcctctgctcaaagcgaatggtgaggatcaggtggcatgagcaacgggaacaggctcaccccagagcaggtgcaaacgattctgttgatgactcgt

SEQ ID NO: 25279 - DNA, 260 bp, Unknown; identical to SEQ ID NO: 25275
  Description of Unknown: LeftRegion for integrase A847 sequence

SEQ ID NO: 25280 - DNA, 260 bp, Unknown
  Description of Unknown: LeftRegion for integrase A848 sequence
gccgaagtggaccccgaagtgtttttccccgagaagggtaaaagcgcgaagccagccaaacggatctgcagccggtgcgaggttcgggtcgaatgcttggagttcgcgttggcgaatcgcgagaactacggggtgttcggggggttgtcggagcgggaacggcggcctctgctcaaagcgaatggtgaggatcaggtggcatgagcaacgggaacaggctcaccccagagcaggtgcagacgattctgttgatgactcgt

SEQ ID NO: 25281 - DNA, 260 bp, Unknown; identical to SEQ ID NO: 25264
  Description of Unknown: LeftRegion for integrase A849 sequence

SEQ ID NO: 25282 - DNA, 260 bp, Unknown; identical to SEQ ID NO: 25268
  Description of Unknown: LeftRegion for integrase A850 sequence

SEQ ID NO: 25283 - DNA, 260 bp, Unknown
  Description of Unknown: LeftRegion for integrase A851 sequence
cgactggtgattgagacacagttcgcatccggatccatgctgcagcgcaagctccacatcggctacgcccgcgccggccgcctgctcgacgagctggaagcgcttagcatcgtcggccccgcacaaggcagcaaggcccgcgacgtgctcgtgaacgctgccgacgtccaggccgccgtcgaccgcatcggcggtgcggaatgagcgccaccagtacacagcagcgcgccaccatcgccgaccgccgcgcgctcgtcacc

SEQ ID NO: 25284 - DNA, 260 bp, Unknown
  Description of Unknown: LeftRegion for integrase A852 sequence
atccgcacccagttcctcgagaccgccgaagcacttccgtgtcctgacgggtggtcgtggacggtcgtcgactacgccgcgtatcaccgtgcgtgccaggacggcatcccgacgctgcacctcgagttcgggtgcgacgacgcggtcgagttcgtgtacctcgtcggccgccacgacctcgaacccgagtcggtgacgggatgacgaccaacgttcccatccaccgcgaggaagtcgcacgccgccgcgaggccatcgcc

SEQ ID NO: 25285 - DNA, 260 bp, Unknown
  Description of Unknown: LeftRegion for integrase A853 sequence
atccgcaccgacttcctcacccaggcagaggttctgccctgccctgagggctggtcgtggacggtcgtcgagtacgccgcgtatcaccgggcgtgccaggacggcatccccaccctgcacctcgagtacgggtgcgacgacgacgtcgagttcgtgtatctcgtcggccgccacgacctcgaacccgaggcggtgacgggatgacgaccaacgtccccaccgaccgcgaggaagtcgctcggcggcgcgaggccatcgcc

SEQ ID NO: 25286 - DNA, 260 bp, Unknown
  Description of Unknown: LeftRegion for integrase A854 sequence
atccgcaccaagttcctcgagtcggcggaagctctgccctgccctgagggctggtcgtggacggtcgtcgagtacgccgcgtatcaccgggcgtgccaggacggaatccccaccctgcacctcgagtacgggtgcgacgacgacgtcgaattcgtgtacctcgttggccgccacgacctcgaacccgaggcggtgacgggatgacgaccaacgtccccatccaccgtgaggaagtcgcacgccgccgcgaggccatcgcc

SEQ ID NO: 25287 - DNA, 260 bp, Unknown
  Description of Unknown: LeftRegion for integrase A855 sequence
atccgcaccgacttcctcacccaggcagaagcattgccttgccccgagggctggtcgtggacggtcgtcgagtaccccgcgtaccaccgggcgtgccaggacggaatccccacgctgcacctcgagtacgggtgcgacgacgacgtcgagttcgtgtacctcgttggccgccacgacctcgaacccgaggcggtgacgggatgacgaccaacgtccccaccgaccgcgaggaagtcgcacgacgccgcgaggccatcgcc

SEQ ID NO: 25288 - DNA, 260 bp, Unknown
  Description of Unknown: LeftRegion for integrase A856 sequence
ggacagtacgcccgacagctcgaccaactaaagcgcctagagctagggagaaccaaatgacaggaccgagccccgccgtccgccggcaagtaatcgcgcgcgacctcagccgctgccaatggtgtggcaggcacgtccggacggactcgggctggtactcgctgcagcaccgccgcgcccgcggcatgggaggcagcaaagacaaggcaaccaaccagccggcaaacctcatccttgtccacggcaccggaacgaccgag

SEQ ID NO: 25289 - DNA, 260 bp, Unknown
  Description of Unknown: LeftRegion for integrase A857 sequence
atccgcacccagttcctcgagaccgccgaagcactcccgtgtcctgacgggtggtcgtggacggtcgttgactacgccgcgtatcaccgtgcgtgccaggacggcatcccgacgctgcaccttgagttcgggtgcgacgacgcggtcgagttcgtgtacctcgtcggccgccacgacctcgaacccgaggcggtgacgggatgacgaccaacgttcccaccgaccgcgaggaagtcgctcggcggcgcgagaccatcgcc

SEQ ID NO: 25290 - DNA, 260 bp, Unknown
  Description of Unknown: LeftRegion for integrase A858 sequence
cagatccgcacccagttcctcgagaccgccgaagcgatgccgtgcccggacgggtggtcgtggacggtcgttgactacgccgcctaccaccgcgcgtgtcaggacggagtcccgacgctacacctcgagtacggctgcgacgacgccgtcgagttcgtgtacctcatcggccgccacgaccttgcgccggaggtgtcgtcgtgacaacgaacgtccccaccgatcgcgaggaagtcgcgcgccgccgcgagaccatcgcc

SEQ ID NO: 25291 - DNA, 260 bp, Unknown
  Description of Unknown: LeftRegion for integrase A859 sequence
atccgtaccaagttcctcgagtcggcggaagctcttccctgccctgagggctggtcgtggacggtcgtcgagtacgccgcctatcaccgggcgtgccaggacggcatccccaccctgcacctcgagtacgggtgcgacgacgacgtcgagttcgtctacctcgtcggccgccacgacctcgaacccgaggcggtgacgggatgacaaccaacgtccccatccaccgtgaggaagtcgcacgccgccgcgaggccatcgcc

SEQ ID NO: 25292 - DNA, 183 bp, Unknown
  Description of Unknown: LeftRegion for integrase A860 sequence
cgaaagcaccggagacaacgccgaaccgatcagttgggcctttttgacccggccgaatgagccgggtctttctttccccagtggcaaaacattttcattgccccatcccgctatagtccgatctgtcccagtacatcccactttatcgcgctcccccaccctggtatttctcactctctctca

SEQ ID NO: 25293 - DNA, 183 bp, Unknown
  Description of Unknown: LeftRegion for integrase A861 sequence
gtcaggaagcaccgcaggcagcgaaaggatcagatgacgctttttgacccggccgaatgagccgggtcttcgtttcacccctggcaacaccttttcattctctcgtcccgatattccccatcccctcccgctatatctcgatttttcgcgcacctccccctaggtatttctcaccctctctca

SEQ ID NO: 25294 - DNA, 260 bp, Unknown
  Description of Unknown: LeftRegion for integrase A862 sequence
aaacccaaaccacccgcactgtctgccgaggtgctggcggaagcggcccgcatgctcgccgatggggcgtcacagaacgaagtggcccgcaccctgggtgttgggcagtccaccatcagcgcccacttccgcggccagggctggacccgtgagcagtccatcgagtgggtttcgttcctccgccgctatcggggtgtcgcatgaccacctggaagaaactcaccccggagcagatcgaacggatcgtgtcgttgacgtgg

SEQ ID NO: 25295 - DNA, 153 bp, Unknown
  Description of Unknown: LeftRegion for integrase A863 sequence
caaaggtaaataaaaatgcacagatattgcatagctttgaatgatttagtgtctccatttttatttagtttattttagattggaggggattttttgaaacttaataaaaagcatcaaaaagcaatagaattactgtttgaaggttctttaaag

SEQ ID NO: 25296 - DNA, 260 bp, Unknown
  Description of Unknown: LeftRegion for integrase A864 sequence
aaaccgaaaccccccgccctgtctacggagatcctggaggaagcggcgcggatgctggccgatggtgcttcgcagaacgaggtggcccgcactttgggtgttgggcaggccacgatctcggcgcatttccgcggccagggctggactcgtgagcagtcgattgagtggatttcgttcatccgccgctacaggggtgtcgcatgaggcggggcgcgaaactcccggagtgggtggtggagcggatcgtggcgttgtcgtgg

SEQ ID NO: 25297 - DNA, 260 bp, Unknown
  Description of Unknown: LeftRegion for integrase A865 sequence
aaaccgaaaccccccgccctgtctacggagatcctggaggaagcggcgcggatgctggccgatggtgcttcgcagaacgaggtggcccgcactttgggtgttgggcaggccacgatctcggcgcatttccgcggccagggttggactcgtgagcagtcgattgagtggatttcgttcatccgccgctacaggggtgtcgcatgaggcggggcgcgaaactcccggagtgggtggtggagcggatcgtggcgttgtcgtgg

SEQ ID NO: 25298 - DNA, 260 bp, Unknown; identical to SEQ ID NO: 25297
  Description of Unknown: LeftRegion for integrase A866 sequence

SEQ ID NO: 25299 - DNA, 260 bp, Unknown
  Description of Unknown: LeftRegion for integrase A867 sequence
aaaccgaaaccccccgccctgtctacggagatcctggaggaagcggcgcggatgctggccgatggtgcttcgcagaacgaggtggcccgcaccttgggtgttgggcaggccacgatctcggcgcatttccgcggccagggttggactcgtgagcagtcgattgagtggatttcgttcatccgccgctacaggggtgtcgcatgaggcggggcgcgaaactcccggagtgggtggtggagcggatcgtggcgttgtcgtgg

SEQ ID NO: 25300 - DNA, 260 bp, Unknown
  Description of Unknown: LeftRegion for integrase A868 sequence
aaacccaaaccacccgcactgtctgccgaggtgctggcggaagcggcccgcatgctcgccgatggggcgtcgcaaaacgaagtggcccgcaccctgggtgttgggcagtccaccatcagcgcccacttccgcggccagggctggacccgtgagcagtccatcgagtgggtttcgttcctccgccgctatcggggtgtcgcatgaccacctggaagaaactcacccctgagcagatcgaacggatcgtgtcgttgacgtgg

SEQ ID NO: 25301 - DNA, 260 bp, Unknown
  Description of Unknown: LeftRegion for integrase A869 sequence
caaaatcgccgagcacgagacagtaaaaaaaatagattgagtaataaattgggaaaatgaatattattatttgtttgttataaaattataataaacaaataaataatattaaattaaatggagtgttatgattgtggtagaatgagtactaatattgtactacattataatatcaaatataaaatatatattgaatcagaaaattataataaaaacaaacaccaagattttaaacctatttgtgaaaaatgtgtaatcca

SEQ ID NO: 25302 - DNA, 260 bp, Unknown
  Description of Unknown: LeftRegion for integrase A870 sequence
caaaatcgccgagcacgagacagtaaaaaaaatagattgagtaataaattgggaaaatgaatattattatttgtttgttataaaattataataaacaagttaataatactaaattaaatggagtgttatgattgtggtagaatgagtactaatattgtactacattataatatcaaacataaaatatatattgaatcagaaaattataataaaaacaaacaccaagattttaaacctatttgtgaaaaatgtgtaatcca

SEQ ID NO: 25303 - DNA, 260 bp, Unknown
  Description of Unknown: LeftRegion for integrase A871 sequence
caaaatcgccgagcacgagatagtaaaaaaattagattgaataataaattggaaaaatgaatattactatttgtttgttataaaattataatgaacaaataaataatattaaattaaatggagtgttatgattgtggtattatgagtactaatattgtactacattataatatcaaacataaaatatatatcgaatcagaaaattataatattgataaacaccaagattttaaacctatttgtgaaaaatgtgtgatcca

SEQ ID NO: 25304 - DNA, 260 bp, Unknown
  Description of Unknown: LeftRegion for integrase A872 sequence
gaatgcttgcagtgcggtgaggtgttcgagccggtcacccgcagggcaaggttttgctcgcagaaatgcaagaagcgcgccgcgaatgcgttgcggtcacaaccgtccctgaagatctgcacgcagtgcggcggcgagtttatggggacgtatgcgcagacctgctcgaatgagtgccgacgggcgcagaggtggggcgcatgaccgggcgtgtgctcaccccgatcgaggtggagaaggtggcgtggtggacgcagctg

SEQ ID NO: 25305 - DNA, 260 bp, Unknown
  Description of Unknown: LeftRegion for integrase A873 sequence
gaatgcttgcagtgcggtgaggtgttcgagccggtcacccgcagggcaaggttttgctcgcagaaatgcaagaaacgcgccgcgaatgcgttgcggtcacaaccgtccctgaagatctgcacgcagtgcggcggcgagttcatgggcacgtatgcgaagacctgctcgaatgagtgccgccgggcgcagaggtggggcgcatgaccggccgtgtcctgacccccgttgaggtggagaaggtggcgtggctgacccgcatg

SEQ ID NO: 25306 - DNA, 260 bp, Unknown
  Description of Unknown: LeftRegion for integrase A874 sequence
gagtgcttgcagtgcggtgaggtgttcgagccggtcacccgcagggcaaggttttgctcgcagaaatgcaagaagcgcgccgcgaatgcgttgcggtcacaaccgtccctgaagatctgcacgcagtgcggcggcgagtttatggggacgtatgcgaagacctgctcgaatgagtgccgccgggcgcagaggtggggcgcatgaccggccgtgtcctgacccccgttgaggtggagaaggtggcgtggctgacccgcatg

SEQ ID NO: 25307 - DNA, 260 bp, Unknown
  Description of Unknown: LeftRegion for integrase A875 sequence
gaatgcttgcagtgcggtgaggtgttcgagccggtcacccgaagggcaaggttttgctcgcagaaatgcaagaaacgcgccgcgaatgcgttgcggtcacaaccgtccctgaagatctgcacgcagtgcggcggcgagttcatgggcacgtatgcgcagacctgctcgaatgagtgccgccgggcgcagaggtggggcgcatgaccggccgtgtcctgacccccgttgaggtggagaaggtggcgtggctgacccgcatg

SEQ ID NO: 25308 - DNA, 260 bp, Unknown
  Description of Unknown: LeftRegion for integrase A876 sequence
gaatgcttgcagtgcggtgaggtgttcgagccggtcacccgcagggcaaggttttgctcgcagaaatgcaagaagcgcgccgcgaatgcgttgcggtcacaaccgtccctgaagatctgcagccactgcggcggcgagtttatggggacgtatgcgaagacctgctcgaatgagtgccgccgggcgcagaggtggggcgcatgaccggccgcgtgttgactccggttgaggtggagaaggtggcgtggctgacccgcatg

SEQ ID NO: 25309 - DNA, 260 bp, Unknown
  Description of Unknown: LeftRegion for integrase A877 sequence
gaatgcttgcagtgcggtgaggtgttcgagccggtcacccgcagggcaaggttttgctcgcagaaatgcaagaaacgcgccgcgaatgcgttgcggtcacaaccgtccctgaagatctgcacgcagtgcggcggcgagtttatggggacgtatgcgcagacctgctcgaatgagtgccgccgggcgcagaggtggggcgcatgaccggccgtgtcctcacccccgttgaggtggagaaggtggcgtggctgacccgcatg

SEQ ID NO: 25310 - DNA, 260 bp, Unknown
  Description of Unknown: LeftRegion for integrase A878 sequence
tactactacggcccatacgacaccaaaggtgaagctgaattcatgcttgaaaggaattgaccatgcaatcaccaaactacgcaaggaacgcgcacaaggcagcgcaagcagaaaggcaacacgactaccctatggcggttgtgttttggcaaaaggcagcaaagagcgaatgcacagacaaacaacgccattgggctgagtgtcgctgtcagcactgcaatagatttgtggagatgtgggatgtttaatcaatacgacaa

SEQ ID NO: 25311 - DNA, 260 bp, Unknown
  Description of Unknown: LeftRegion for integrase A879 sequence
cgtaaacggaggccggaatataggaaggatgcgtttgttgaggatgatgatttatggtaactgatgtttttttataagaaaatacttaaagatttcatttatacatatatttataataaaatgaaatgttttaattgtgaaactattggttctattcatataaatgacaactatactttgtgttatgattgctttcattttagagatacaattatatctcattcaaatgtgatacatatatatctattgactgatgatga

SEQ ID NO: 25312 - DNA, 260 bp, Unknown
  Description of Unknown: LeftRegion for integrase A880 sequence
tatcaacaaatgaacaaaacactgctttacaacgaaacgctcttgaaagcgcaggatgtgagctaatttttgaggacaaggcgagcggcaaaaaggctgaacgccctgggttaaaaaaggttctccgtatgctttccagaggtgacaccctagtcgtatggaagttagatcgtcttgggcgcagcatgcgtcacttagttgtgctggtggaagagctgcgtgacagaggcattaacttccggagtctcactgactccatc

SEQ ID NO: 25313 - DNA, 260 bp, Unknown
  Description of Unknown: LeftRegion for integrase A881 sequence
gggagtggggagttatgagtgagtggacgctggtgaaagacaaattaccagaaaaatctgttagagtacgcttgcacatcgaggcaacagggtttactgacggcatgtatctagaaatgagtgatggttcaaaattcttcctgacgtcaatcggtacgtttcatgttgacgatgttaaacgctggagacctctttaaccattgaccataccgtcaaatacgtgtcatactgcatcatattttactactggattagagata

SEQ ID NO: 25314 - DNA, 260 bp, Unknown
  Description of Unknown: LeftRegion for integrase A882 sequence
gaagggcaagtcacaatttttgatatcggatgcgaaaacgacatggagaatacatcctaaaaaggtgaagaaaagctcagaagtagtacaggtattatattccataaatagacgatagaatatccttagtaaccaagttactaaggatatttttatttataagaaaaggaggattaatcatcatggaagcaattcaaagtatcgcgggtgaatttgctgtaacaatggcacttggggtcattactcttttggctgcatac

SEQ ID NO: 25315 - DNA, 260 bp, Unknown
  Description of Unknown: LeftRegion for integrase A883 sequence
gttctcgcagcgaagcaggcaggagagattgacggaagagagttcagagaagcttgcaacaaagacaacttgttgccaatcagacttgacccgaaaaaagaaatgctcaaggctcccagtgacgattctaaagatgatgagatcgaaacgcgcgaacggacgagcaaggtaaaaccaaaagacgctaaggaggcaaactcatgagtgatgtaatgtggcaacccggtgttacaatcgcagacctggaaaaaggcgcaatc

SEQ ID NO: 25316 - DNA, 260 bp, Unknown
  Description of Unknown: LeftRegion for integrase A884 sequence
cgagcgagccggaggagcaggagccggagttcccggcgtatcagttagaggggcttgaaacgctcgtggaggctgacgtcatcaactcccccgagttctggcggcagaagttcggcgagcaggtgacggtcggcgagttgttcggcatcttggggaagctcttcacgaaagcaagcgagtaaggacacggagggcgggacatggaagacctcgtaaaggagctgacgatcgacatggttcctgacggcgacaaccgcatc

SEQ ID NO: 25317 - DNA, 260 bp, Unknown
  Description of Unknown: LeftRegion for integrase A885 sequence
actgagcgagacatcctgcggtcggcggccaaatatttcgccggagagacgaattggtgaaccgcttccagttcgtcgcagaccactccgacacctacccggtgaagcggttgtgccaggtcatcgatatcgcccgctcgtcgtactacgcatggatcaacgccgccgagaaacgagccgcccgggccgcagccgacgctgaactcgccgacaagatccgcgccgtccacacggtggacaacacctacgggcggccccgg

SEQ ID NO: 25318 - DNA, 260 bp, Unknown
  Description of Unknown: LeftRegion for integrase A886 sequence
tggccatgcattggcatctcctataaatccttatactgaatattgtttggtggatattgaaggatggatattagaaccaggaattataaaagaaccttgtatgtatatgtgttgatattaaattatcataaaaaaaattgaataattaaattataaatattatcagtatcaaataatttatattattttatttgataataatggaaaatcttgatattttagaacttaatgccgctattacgttggtatctttgcgtcgt

SEQ ID NO: 25319 - DNA, 260 bp, Unknown
  Description of Unknown: LeftRegion for integrase A887 sequence
gtacacgccatccggtgttattgttttcgaaacaagataacgcttaaagtaagacgttgatggggtggcgctatggtcaaggactggacacccgaagaagacgcgatattgattaccctgtaccgaaacggtatcccgatgcaagagattgcggcacggcttgaccgaaccgaaggctctgttcaaggtcgaattaaccgcaatcgcaagcgctggaaactcatgtcgcgtcaccgctattgttgtttcgaagaacgtgt

SEQ ID NO: 25320 - DNA, 260 bp, Unknown
  Description of Unknown: LeftRegion for integrase A888 sequence
acgtggttccaaaataaacgtgctcatgataaacgtttcgaaagcatgaataaaaattgattataatatattaattaaattaacatattataaagattattaatcatattcataataaatggaatgttattattgtgaaactaataaaaataatatatgtttttattattgtctaaaaccaattatttatttagaaagtaaatattacaatccacagattcatgagaattataaaccaatatgtcaagattgcgttattg

SEQ ID NO: 25321 - DNA, 260 bp, Unknown
  Description of Unknown: LeftRegion for integrase A889 sequence
caaaatcgccgagcacgagacagtaaaaaaattagattgaataataaattggaaaaatgaatattactatttgtttgttataaaattataataaacaagttaataatactaaattaaatggagtgttatgattgtggtaacataagtactgatattgtactacattataatatcaaacataaaatatacattgaatcaaaaaattataatattgataaacaccaagattttaaacacatttgtgaaaaatgtgtaatcca

SEQ ID NO: 25322 - DNA, 260 bp, Unknown
  Description of Unknown: LeftRegion for integrase A890 sequence
ataaaatatcacaatacgaaggaatatttaaagtatatttaagtaaaccatcagaaaaaaaagattatgtggaatattgttttacagataatgaaggatatattttacaaccaggtattaaaagaaaatatcttgattaaaaaattgatattttaaagattagaatagttcatagtaattttaattcataataatccaatatggataaaaagattattattattgatcgcgagaactttgattcttttgaagagaccgca

SEQ ID NO: 25323 - DNA, 260 bp, Unknown
  Description of Unknown: LeftRegion for integrase A891 sequence
gaaatattaaaaaaggctaccgcgctcttgatgtcagactccctgaacagttctcgataatcgggaaactcagagcgcattatcctgtggtcacactctgccatgtgttcggggttcatcgcagcagctacagatactggaaaaaccgtcctgaaaaaccagacggcagacgggctgtattacgcagtcaggtacttgagctacatggcatcagccacggttcggccggagcaagaagcatcgccacaatggcaacccgg

SEQ ID NO: 25324 - DNA, 260 bp, Unknown
  Description of Unknown: LeftRegion for integrase A892 sequence
taatcaacaaatctggaagatacaacaacttgagaaagagcttggctgggaagataatccgaaacgaatgaaagcattcatgaaaaagtatgctggtgtcgatcggattgaatggcttacacctcaaaaggcttggcgtttgattgagtctcttaaaaagctgacagaaaaagagaatgaagcatagtaggaggtcaacaatggaaaaatggatgcacaaactgaaggtcgaggaccttccggaagtttatcaaaattta

SEQ ID NO: 25325 - DNA, 260 bp, Unknown
  Description of Unknown: LeftRegion for integrase A893 sequence
gtaaaacaaatatccatttggtttgccaacagacgcgcttatgatgctagaaaaaattgattataatttgtttatatttataaatgaattataatattgaattatcaatataattatggaatgttattattgcgaaaaaaataaagataatatatgtttttattattgtcttaaacctattttttacatcgaaagtaaaaattatgattcacaattacatgaacaatataaacctatatgtcaggattgcgtatttgaat

SEQ ID NO: 25326 - DNA, 260 bp, Unknown
  Description of Unknown: LeftRegion for integrase A894 sequence
gaaatggaacgtgaatttttaaaaaaggcagcagcgtactttgccaaagaaagtcagtaaggtacgcctatatgaaacaaaaaagatattcttttccaattaccttaatggctcgattacttcatgtttcagtttcatgtttttatgattggctcaagagaggcgtgagcaaaagaacgattcaacgaaatcaacagacgatattggtgaaaatagcccatgaggagacaaagcagagctatggttatattcgattaacc

SEQ ID NO: 25327 - DNA, 260 bp, Unknown
  Description of Unknown: LeftRegion for integrase A895 sequence
ttgaatctacagcggcgtacttcgcaaagctgtccgactgaggtacgcctttatccgtgacaacacccattgctggcctgtccgactgctttgtcgggtgctggatgtgcatccgagtggtttttacgcctggcttcagcagccggattcacggcggcatcatgctgacctgaggctgacggggctgataaagcagttctggctggagtcgggttgcgtttatggttatcgcaagatccacctcgacctgcgggataccg

SEQ ID NO: 25328 - DNA, 260 bp, Unknown
  Description of Unknown: LeftRegion for integrase A896 sequence
gccaggaagtgttacgcaacgatatctcaccaatctttcgcaccactattaatcaatgagttagaggtgattagtgacctgagacagagcattagcgcaaggtgattttttgtccgtaagcgtaaaccgatcgccgtatgtagccattagacaagaattggtaacttagacgcccatctgacacagacggacatctaagtatggaattacaggactggcgaaaagaacctcgtaaaaagtattcgaatgaattcaaactt

SEQ ID NO: 25329 - DNA, 260 bp, Unknown
  Description of Unknown: LeftRegion for integrase A897 sequence
acctacgaggtcaatccatccaccatctcccggacgatcggaagggtctaccactcgtgagcactcactacaccgtctcgaaccagcacgaagacctgttcgctcagaacaaggtccgattgaccatcgacgtcaagctcgagaccgcactcgcgctgatcaagcaggctgaggagctggacaagccgaagccgttcgacccgagcgtctactacaccgaccccgacaagatcggcctgcgcgaccccttccgtcgtccg

SEQ ID NO: 25330 - DNA, 260 bp, Unknown
  Description of Unknown: LeftRegion for integrase A898 sequence
gatcttgcaatgccgtaactaattccggatccatagacggaatcgtacttccctctgggtgtatctcggccagaagggttataagagtgctctcgctgatgatgggtattttctcttcaacgggttcctttcctttcttcagttttgtcaactgcatttgtgttttctccgcctctaaacgaatcttttcgtgatccataatgaccgacagaacgcggatgaaatggacccccgagcttcacgctatatttatcgacacc

SEQ ID NO: 25331 - DNA, 260 bp, Unknown
  Description of Unknown: LeftRegion for integrase A899 sequence
tttattccattgatagatcaatggttttaggttttttgcccatcttttgatatcaaacaaatacccttgggaacttgggtattttttatagcaatggtatcgatttgttgtgacgagagataaggtttgcctgaataggttacactaaactagacagaatttataaagtgttctacactaaagaaaataggagaaccgatatgtctaggaaaatacgtcgccacttcaccgatgattttaagcaacaaattgttgacctt

SEQ ID NO: 25332 - DNA, 260 bp, Unknown
  Description of Unknown: LeftRegion for integrase A900 sequence
gaaatgcaattagacattctaaagcaagcggcagtgattatggtacgaaaagggaaataatcactgctaacaaggataaatatagcatttcaaacatgtgtcgttggttgaagattcctcgctctagctattactacaaagctgttaagccagtacctgaagcagaacttggagaaaaaatcaaatctatcttcctccaaagtaagtctaggtacggagccaggaagataaaaaaatgtctggaagtactaggaatcaac

SEQ ID NO: 25333 - DNA, 260 bp, Unknown
  Description of Unknown: LeftRegion for integrase A901 sequence
agcgaccctacggtcctcgtgtgggtgatcttgatttcgtcggtgctggcggcggtgacggtgacggtgaactggtgcatgatgactccttgcctcgtggccttccgttctggctggccggtcccccaagcatataacagactgttaggagttgtcaacacctaacccggggttgctttcactaacagagtgttatagacttgcttcagcggggcagccagccgggccgccccctgaacccccgggaaggggtgagcatg

SEQ ID NO: 25334 - DNA, 260 bp, Unknown
  Description of Unknown: LeftRegion for integrase A902 sequence
aagttaaattatactttttgccttacaagtataattctactaaataaaattgtacttaaatatagattcaggtagggaacgagtggagaagttaggtcaatgggaaccaatgatatacgcaacgatataaaacctattgacaaaaagggaatctgagcatatcataaagaagtaaacctaataaatatacaataggtagtatgccaaatcaggaaaccttaaaccgcaaaaaagcgcggaaagcggaagtagctagactt

SEQ ID NO: 25335 - DNA, 260 bp, Unknown
  Description of Unknown: LeftRegion for integrase A903 sequence
caaaaagcccggatggcacctgacaccaggcgacaaacgtgctcaagcgcaagcggcgttcggggcgcttgtcgtcagtaagggtggaattttcactttcgcgcagagcgttgaggattacgtaacagcggtacagcgttgacaacagcgtcaagtatcatcatactgtcacgaatacacccatcgtaaggatttaagaaatgaacgacactcagacgtcagtactcaacgcagcgatgaagttatcgcgaatccacggt

SEQ ID NO: 25336 - DNA, 260 bp, Unknown
  Description of Unknown: LeftRegion for integrase A904 sequence
cgtcttaagatggaagtcgatattttaaagcaagcagcgctgatcatgggacgaaagtaaatgtcatgaagcgtaatcgtgacaaatactcggtatcagcaatgtgcgacgtcctacaaatctctagaagtacgtactattatgaagccaaagagcgtcagaatgaagaccatgtaacccatcatatcgttgaaatctttgagaaaaatcggaaagcatacggtacaagaaagattaaagcaaaacttcatgaacgtagt

SEQ ID NO: 25337 - DNA, 260 bp, Unknown
  Description of Unknown: LeftRegion for integrase A905 sequence
ctgcccagaatacgcaaaaatactttggtacgttgaacaaagagatttgtcttattgcacctgacggcacaaaacatgtaactaccaatttgtatcaattttgtaaacaacacggtttgaccccgtcacgtatgagtgatgtaaagaacggcaagtttaaacaacataaaggttggcaagtccaacaggagtaaagattaatgtcacgcgctattaatacgcatgaacctcgtacagctaagatggaagtttcattggtt

SEQ ID NO: 25338 - DNA, 260 bp, Unknown
  Description of Unknown: LeftRegion for integrase A906 sequence
cgtcttcaggaggaaaatgaaatcttaaaaaaggctatggccatatttgcgaaaaaatagaaacagacgagctcatcgatgtaattgtagatcttcaagaccaacatgctacacaaactctgtgtagtgtacttggtatacctaaaagcactttttatcaatcgtttaaaaaaacggaatctaatcgtgaatctgaaaacaagcaactaacaaaaagaatcaaagagatccatgaagaaagcaaaatgcgttatggtgcc

SEQ ID NO: 25339 - DNA, 260 bp, Unknown
  Description of Unknown: LeftRegion for integrase A907 sequence
tccttcgacgtgaaccgatcaaccatctcccggatcgtccggggcatctaccaccgataggaggcccgatgatcgagcaccggcatgaggtcgcgggtgacgaggttgtcatccgcgtcgtggagaccgaggacgaccttgagggcttccgggacttcatccgggctcatctgggcttcctcggcctggactcggagacgaccggactggacatctacagcgacgacttccgttgccgtactgtccagttcggcactccg

SEQ ID NO: 25340 - DNA, 260 bp, Unknown
  Description of Unknown: LeftRegion for integrase A908 sequence
tccttcgacgtgaaccgctcaaccatctcccggatcgtccggggcatctaccaccgataggaggcccgatgatcgagcaccggcatgaggtcgcgggtgaccaggttgtcatccgcgtcgtggagaccgaggacgaccttgagggcttccgggacttcatccgggctcatctgggcttcctcggcctggactcggagacgaccggactggacatctacagcgacgacttccgttgccgtactgtccagttcggcactccg

SEQ ID NO: 25341 - DNA, 260 bp, Unknown
  Description of Unknown: LeftRegion for integrase A909 sequence
tccttcgacgtgaaccgatcaaccatctcccggatcgtccggggggtttatcaccgataggagcatccatgatcgagcaccggcatgaggtcgcgggtgacgaggttgtcattcgcgtagtggagaccgaggacgacctggagggcttccgtgacttcatccgggctcatctgggcttcctcggactcgactcggagacgaccgggctggacatctacagcgacgacttccgttgccgtactgtccagttcggcactccg

SEQ ID NO: 25342 - DNA, 260 bp, Unknown
  Description of Unknown: LeftRegion for integrase A910 sequence
tccttcgacgttaaccgctcaaccatctcccggatcgtccgggggatctaccaccgataggagagggaattggacatccacatcatgaacgggctggcgagggtcatcgtctcgccacccgagcagccggtcctgatgtctgccgcgttcatggcgacctgggactcactggtcgagtccggtgagaccgagaccaccacggcagccgacttcttcaagaagttcgccgcgaccttcactgatctgctgaaccgctaagg

SEQ ID NO: 25343 - DNA, 260 bp, Unknown
  Description of Unknown: LeftRegion for integrase A911 sequence
tccttcgacgttaaccgctcaaccatctcccggatcgtccggggaatctaccaccgataggaggtccgatgatcgagcaccggcatgaggtcgcgggtgacgaggttgtcatccgcgtcgtggagacagaggacgacctggagggcttccgtgacttcatccgggctcatctaggcttcctcggtctggactcggagacgaccggactggacatctacagcgacgatttccgttgccgtactgtccagttcggcactccg

SEQ ID NO: 25344 - DNA, 260 bp, Unknown
  Description of Unknown: LeftRegion for integrase A912 sequence
tccttcgacgtgaaccgctcaaccatctcccggatcgtccggggcatctaccaccgataggagaccgatgatcgagcaccggcatgaagtcgcgggtgacgaggtagtcatccgcgtcgtggagaccgaggacgaccttgagggcttccgggacttcatccgggctcatctgggcttcctcggtttggactcggagacgaccggactggacatctacagcgacaacttccgttgccgcaccgtccagttcggcactccga

SEQ ID NO: 25345 - DNA, 260 bp, Unknown
  Description of Unknown: LeftRegion for integrase A913 sequence
gaagaggagaaccttatcttaaaaaaagcaagtgccatattcatgcaaaacttaaagtaagactcctcgcttgtctatcggttacgctttgaacacgccacaacaaccttgtgtcgtgttttacgtgtcaatcgctccacttactataaatttctaaaacataagccctcaaaaagagatttggataatcaaatttatagaaaacaaatacttgagatttataccaaagcaaacaaaagacttggtgcgaagtctatcaa

SEQ ID NO: 25346 - DNA, 260 bp, Unknown
  Description of Unknown: LeftRegion for integrase A914 sequence
cgtaatttttacgtcagaatacataaatgtattatatattaataatatatacaacatgttatataaatatatgcagagggctttggttgtcctctagcatattatttaaattagttatttgcttcgcaaatatgtctatcgactggagaaaatttttgtttttaactctttagttataaaaactctaccggggtgacaaaatgcgtgaaggaagactatcagttgtctacttgaaagaagaggagaaacagaagagaact

SEQ ID NO: 25347 - DNA, 260 bp, Unknown
  Description of Unknown: LeftRegion for integrase A915 sequence
aattggttttataacaaaaaacgcaatgaaaaaaaattgaaaaataatacattagaatagctcattatagttatatttatcattataatcaaagtgtttgattaaattgataacaatgtctatcacttacgacttccaaaacgggattcctactgtcgcccatcacaatctgggttcgaattttcttgctgtaagtaaacaacaagaactttcggcttatcccactcacaccataatcaacatctacatgaatcagacca

SEQ ID NO: 25348 - DNA, 260 bp, Unknown
  Description of Unknown: LeftRegion for integrase A916 sequence
aattggttttataacaaaaaacgcaatgaaaaaaaattgaaatataatacattagaatagctcattatagttatatttatcattataatcaaagtgtttgattaaattgataacaatgtctatcacttacgacttccaaaatggtcttctcactgtcgcccatcacaatctgggttcgaattttcttgctgtaagtaaacaacaagaactttcggcttatcccactcacaccataatcaacatctacatgaatcagacca

SEQ ID NO: 25349 - DNA, 260 bp, Unknown
  Description of Unknown: LeftRegion for integrase A917 sequence
aatcccgcaaccatctctcggatcgtccgagggatctaccacaccaaaggaggatcatgaacaaccttgagatcgcagagatcgtagagaaggcccacgacgagatggcggcacgaggccgcaccacgggcaacctgatcgacccagagacctgcgaggtctgcctgctcggcgctgtcggcgtggcaggtatcggtgaggaagagctcaagaagaccctctacgaagagttctactacggcggcaagttgcatccggtg

SEQ ID NO: 25350 - DNA, 260 bp, Unknown
  Description of Unknown: LeftRegion for integrase A918 sequence
aacccggcaactgtctctcggatcgtccgagggatctaccacgcaaaaggaggatcgtgaacagcaacgagatcgcagagatcgtagagaaggcccacgacgagatggtggcacgaggccgcaccacaggcaacctgatcgacccagagacctgcgaggtctgcctgctcggcgctgtcggcgtggcaggtatcggtgaggagaagctcaagaataccctctacgaagagttctactacggcggcaagttgcatccggtg

SEQ ID NO: 25351 - DNA, 260 bp, Unknown
  Description of Unknown: LeftRegion for integrase A919 sequence
aatcccgcaaccgtctctcggatcgtccgagggatctaccacaccaaaggaggatcatgaacaaccttgagatcgcagagatcgtagagaaggcccacgacgagatggcggcacgaggccgcaccacgggcatcctgatcgacccagagacctgcgaggtctgcctgctcggcgctgtcggcgtggcaggtatcggtgaggaggagctcaagaaggcccgctacgaagagttctactacggcggcaagttgcatccggtg

SEQ ID NO: 25352 - DNA, 260 bp, Unknown
  Description of Unknown: LeftRegion for integrase A920 sequence
aaccctgcaaccatctctcgactcgtccgagggatctaccacaacaaaggaggatcatgaacaaccaagagatctcagagatcatcgagaaagcccacgatgtcatggtggaacggggccgaaccacgggccagttgatcgacccagacacttgcaaggtctgcctgctcggcgctatcggagtggccggaatcggtgaggaagagctcaagaagacgcactacgacgagttctacgtaggcggcaagttgcgtccggta

SEQ ID NO: 25353 - DNA, 260 bp, Unknown
  Description of Unknown: LeftRegion for integrase A921 sequence
aaccctgcaaccatctctcgactcgtccgagggatctaccacaacaaaggaggatcatgaacaaccaagagatctcagagatcatcgagaaagcccacgatgtcatggtggaacggggccgaaccacgggccagttgatcgacccagacacttgcaaggtctgcctgctcggcgctatcggcgtggccggaatcggtgaggaagagctcaagaagacgcactacgacgagttctacgtaggcggcaagttgcgtccggtg

SEQ ID NO: 25354 - DNA, 260 bp, Unknown
  Description of Unknown: LeftRegion for integrase A922 sequence
aaccctgcaactatctctcgactcgtccgagggatctaccacaacaaaggaggatcatgaacaaccaagagatcgcagagatcatcgagaatgcccacgatgtcatggtggaacggggccgaaccactggcaagctgatcgacccagacacatgcaaggtctgcctgctcggcgctatcggcgtggccggaataggtgaggaagagctcaagaagacgcactacgacgagttctacgtaggaggcaagttgcgtccggta

SEQ ID NO: 25355 - DNA, 260 bp, Unknown
  Description of Unknown: LeftRegion for integrase A923 sequence
aaccctgcaactatctctcgactcgtccgagggatctaccacaacaaaggaggatcatgaacaaccaagagatcgcagagatcatcgagaatgcccacgatgtcatggtggaacggggccgaaccactggcaagctgatcgacccagacacatgcaaggtctgcctgctcggcgctatcggcgtggccggaatcggtgaggaagagctcaagaagacgcactacgacgagttccacgcaggcggcaagttgcgtccggtg

SEQ ID NO: 25356 - DNA, 260 bp, Unknown
  Description of Unknown: LeftRegion for integrase A924 sequence
aatcccgcaaccatctctcggatcgtccgagggatctaccacaccaaaggaggatcatgaacaaccttgagatcgcagagatcgtagagaaggcccacgacgagatggtggcacgaggccgcaccacaggcaacctgatcgacccagagacctgcgaggtctgcctgctcggcgctgtcggcgtggcaggtatcggtgaggagaagctcaagaagaccctctacgaagagttctactacggcggcaagttgcatccggtg

SEQ ID NO: 25357 - DNA, 260 bp, Unknown
  Description of Unknown: LeftRegion for integrase A925 sequence
acagtactcatgtagaaatcagtttacgtgataataacagtgtgaaacttcaaagtgtagtgatcaaaaatcctaagaatagaaaaaacccaacacgtgtaacattcaataatttacagatagcacagttgactagtttgtctcaagtcgttacaacgtatgtttaatttaaagatttttttatattatccattatataaatggaagtagattatgttacaacgaaagaagcttgtcgaattacaggtttcaaagctcca

SEQ ID NO: 25358 - DNA, 260 bp, Unknown
  Description of Unknown: LeftRegion for integrase A926 sequence
aacccggcaactgtctctcggatcgtccgagggatctaccacgcaaaaggaggatcgtgaacagcaacgagatcgcagagatcgtagagaaggcccacgacgagatggtggcacgaggccgcaccacaggcaacctgatcgacccagagacctgcgaggtctgcctgctcggcgctgtcggcgtggcaggtatcggtgaggagaagctcaagaagaccctctacgaagagttctactacggcggcaagttgcatccggtg

SEQ ID NO: 25359 - DNA, 260 bp, Unknown
  Description of Unknown: LeftRegion for integrase A927 sequence
gcgattatttatgacgtgggactgtcgacgctgtacagaaaatttcctgcgagatgctgaaaaggtgccgctgcttcgtcgtatgcaagaacgggggcggctgactggcgatcgttcgatagtgcgagtattgaatggttgccagtcgcggcggattctactggttaagaatgactaattaatgtgtttaatctgaaaccaggcatctgttcaacttttcgtgatcgcttttgttggcatcactattcaagcagtttgcc

SEQ ID NO: 25360 - DNA, 260 bp, Unknown
  Description of Unknown: LeftRegion for integrase A928 sequence
ttaatgttaagcaagcctgtgatgacttacttgtgccacctgcaggtataaggcgtgccatagttggacgtcaagccacctcgcacggttacagatgggctaaacaaactccgacatgcaaagctcaggttagaaaccgtttagacgaactgagggccaataaggagctctcagaacaatttgattatttggactagattatgaaaagcagagaatttaaatcaatcgtgtttggatgcgaacctcaatacgaaattgaa

SEQ ID NO: 25361 - DNA, 260 bp, Unknown
  Description of Unknown: LeftRegion for integrase A929 sequence
taatcttaaactacttagcttatcgtaaattagttaataatgttggtaattatgatgacgcaatcgaaatgtaccacaacaatattacccataattatttggatgtatactataaaagtagacaaaactttgtgtgttataatctattttaaaagacacaaaaacgaaaggacaacctatgtcaacatttaaacgctacgatgaagaatttaaacaatcccttgtcaacctttatcaaactggaaaaaactcagtctgaa

SEQ ID NO: 25362 - DNA, 260 bp, Unknown
  Description of Unknown: LeftRegion for integrase A930 sequence
ttggtatacagatattaagaatcgcttcagcaatggcgatgtaattacggtcgatgtggctaataccaaaacttatttcaatggcagtgaagatcgccctttgcatacattaggcaacctggatgtaagttgattcctgagacaacttttaagagagggtataatgaataaatcgtctctcaaaaggaaggaatttttacatgacaagtcgttacgacaaagaattcaaacaaaacattatcaacctatataagcaaggc

SEQ ID NO: 25363 - DNA, 260 bp, Unknown
  Description of Unknown: LeftRegion for integrase A931 sequence
gcgtacgacgtgaaccccgcaaccatctctcggatcgtccgagggatctaccacacctaaaggaggatcatgaacaaccttgagatcgcagagataatcgagaaggcccacgacgagatggtggcgcgaggccgcaccaagggcgatctgatcgacacagagacctgcaaggtctgcctgctcggcgctgtcggcgtggccggtatcggtgaggaagagctcaagagaacgcactacgacgagttccgcaacggcggcaa

SEQ ID NO: 25364 - DNA, 260 bp, Unknown
  Description of Unknown: LeftRegion for integrase A932 sequence
gcgtacgacgtgaaccccgcaaccatctctcggatcgtccgagggatctaccacacctaaaggaggatcatgaacaaccttgagatcgcagagatcatcgagaaggcccacgacgagatggtggcgagaggacgcaccacgggcaatctgatcaacccagagacctgcgaggtctgcctgctcggcgctgtcggcgtggccggtatcggtgaggaagagctcaagagaacgcactacgacgagttctactacggcggcaa

SEQ ID NO: 25365 - DNA, 260 bp, Unknown
  Description of Unknown: LeftRegion for integrase A933 sequence
gcgtacgacgtgaaccccgcaaccatctctcggatcgtccgagggatctaccacacctaaaggaggatcatgaacaaccttgagatcgcagagatcatcgagaaggcccacgacgagatggtggcgcgaggccgcaccacgggcgatctgatcgacaccgagacctgcaaggtctgcctgctcggcgctgtcggcgtggccggtatcggtgaggaagagctcaagagaacgctctacgacgagttccgcaacggcggcaa

SEQ ID NO: 25366 - DNA, 260 bp, Unknown
  Description of Unknown: LeftRegion for integrase A934 sequence
ttacaaaaacgtaatgcgcagcttgaagaggagaaccttgaatcggttacactaaactagacagaatttataaagtgttctacactaaagaaaacaggagaacagatatgtctagaaaaatacgtcgccacttcaccgatgattttaagcaacaaatcgttgacttgcacaatgcaggtagaaaacgcagtgaactgatcaaagaatatgatttaacgccctcaaccttcgataagtgggtcagacaagccaaactaacg

SEQ ID NO: 25367 - DNA, 260 bp, Unknown
  Description of Unknown: LeftRegion for integrase A935 sequence
ttgacaccaatccaaattaaaaattggttttataacaaaaaacgcaatgaaaaaaattgaaaaataatacattagaatagctcattatagttatatttatcattataatcaaagtgtttgattaaattgataacaatgtctatcacttacgacttccaaaacgggattcctactgtcacccatcacaatctgggttcgaattttcttgctgtaagtaaacaacaagaactttcggcttatcccactcacaccataatcaa

SEQ ID NO: 25368 - DNA, 260 bp, Unknown
  Description of Unknown: LeftRegion for integrase A936 sequence
aaaatgcttgggattagtcgctcggggttgggtggtattttgaagagggtgggcagatgaaatataaaataggtgaagctaatggaaaaaattaacaagtatctaatgtattatgcagtaatagtatcatgcactggcatcacggctatggtttttgttgttttgcaatacttaggaagggtgtgtaaatgaaattcaatttggataggacggattatattttatatccagaatcaatatacaagatcgaggttagactt

SEQ ID NO: 25369 - DNA, 260 bp, Unknown
  Description of Unknown: LeftRegion for integrase A937 sequence
aagaccgccccggcctgacccgtcttctggacaaggcccgcgagggcgacaccgtggttatctggcgctttgaccgtctggcccgctccaccgtcgatctgctgggcttggtcgatgacctccagaagcgcggcatccaccttcgctcccttcatgagggtatcgacacctctggggcaactggccggttcttcctcaccatgttcggtgctctgggtgagttcgagcggaacctgatgattgagcgtgtcaacgccggt

SEQ ID NO: 25370 - DNA, 260 bp, Unknown
  Description of Unknown: LeftRegion for integrase A938 sequence
aagaacgttgatataattcatccacagaattaaagctgctttattttcatcactgataattcccaacgttaattctgtgcgccagtccttaatagcattacctgcatcgttaagtaatttcgggtggtttcggccttagcctgacaatccaccgaaacgggtaaaatcttaccatccctgtatcaccaggagccatcaccatggcaatcatcagggcagtctgcagcgtccacttccgcgccggacttgccgctgcgagg

SEQ ID NO: 25371 - DNA, 260 bp, Unknown
  Description of Unknown: LeftRegion for integrase A939 sequence
gacaccctggtcgtatgggcgttagatcattttgcgggcagcagcgttacttggttgtgatgttggaaaatgaggtcttacagcgaattgatttcatctcacctcctttacatcaattcgccactatcgaaaaaaacatcgtgggttgagtgtggctattggggcacaatcaatctgtgttgccgaccgattcaattggtttgagcgttactttctatgcacgttcgtttggcggggtgttttttatacaaagttgacag

SEQ ID NO: 25372 - DNA, 260 bp, Unknown
  Description of Unknown: LeftRegion for integrase A940 sequence
gttccgtttgttgctgaccgccgtcagggttcgcataagaaggagtcgaacaatgactgacaagtgcgagacggtaggatgcgataacgacgctgagttttttgacgggctgcacaacaaaatatgctccgactgtatggatatggagattgcagaatccgaatgtgaagctgaagactttatgacgattgaggactaaccatgctatcaccaaactactcaaggaacgcgcacaaggcagcgcaagcagaaaggcaaca

SEQ ID NO: 25373 - DNA, 260 bp, Unknown
  Description of Unknown: LeftRegion for integrase A941 sequence
gttccgtttgttgctgatcgccgtcagggctcgcataagaaggagtcgaataatggctgaatggattggtgtgcacgagcaagctccacctctagacgctgcatttgacatatgggttgactatcaagatttgacaggaaggctttgcaattgcttttacaaccataataataataaatattggtactgggacgataagtgtaagaataaaattcaactttacgcttcatatgtaacacactggatgccactaccgcctc

SEQ ID NO: 25374 - DNA, 260 bp, Unknown
  Description of Unknown: LeftRegion for integrase A942 sequence
gtgccgtttgttgctgaccgccgtcaaggtgcgcataagaaggagtcgaataatggctgattggattagcgtgcacgagcagatgccacctgtagatgttgcttttgacttatgggtagattatcaagatatgacgggaagaatgtgcaactgcttctacagccctaaaaacaataaatattggtattgggacgaatcttgcaagaataagatccagttttacgcatcatacgcaacacactggatgccactgccgcctc

SEQ ID NO: 25375 - DNA, 260 bp, Unknown
  Description of Unknown: LeftRegion for integrase A943 sequence
gtgccgtttgttgctgaccgccgccaaggtgcgcataagaaggagtcgaataatggttaatcacaaattaagcgaatggtttggcttgagttactcatcattctgcgtaatgcctcgcgtgcttatggaggatatgccggacgagtggcaagaaaaaatggcagaactgctaaatcagtatgacgatgcattcgatcagtcaaaagttggtattgatggatgcagagttcaagcaactatggataacaagttggttaaga

SEQ ID NO: 25376 - DNA, 260 bp, Unknown
  Description of Unknown: LeftRegion for integrase A944 sequence
gttccgtttgttgctgaccgccgtcaaggtgcgcataagaaggagctgaataatggctgattggattggtgtgcacgagcaagctccacctctagacgctgcatttgacatatgggttgactatcaagatttgacaggaaggctttgcaattgcttttacaaccataagaataataaatattggtactgggacgataagtgtaagaataaaattcaactttacgcttcatatgtaacacactggatgccactaccgcctc

SEQ ID NO: 25377 - DNA, 260 bp, Unknown
  Description of Unknown: LeftRegion for integrase A945 sequence
gttccgtttgttgctgaccgccgccaaggtgcgcataagaaggagtctaataatggctaacttaaagcaccaagatatcattgatgagttttatcgactcgcaaagcttaagtttgaatggatggatgacgagatgatggagaagattgaagaagtcactggcattactccagaaaaactgaactctgacatagaaaccggagttagaaatggcatatctccaagtctgcaacttgttttaatgaagcagcttttacact

SEQ ID NO: 25378 - DNA, 260 bp, Unknown
  Description of Unknown: LeftRegion for integrase A946 sequence
acgctattaatataacataccatgatttgagattgataagatatcgggttttaaccttagtttaataaattggaagatttttgtatgaagatttgctaccgtattttcgtgccatagctatctgaaacgatagtttttacttggttagggggggcttaaaattacatttttgaataagtattttatacttcttatacgatatgtttttattgtattgcagggggacaggggagattggcgggcgaagaccaaagttatca

SEQ ID NO: 25379 - DNA, 260 bp, Unknown
  Description of Unknown: LeftRegion for integrase A947 sequence
atgacagctagacagactaacgtgccgttacactcagtgctaaatgctgaaggcgtactaaacaaccagcttgcagttggtatcgtgaagatggcgtatagcttaccagttatgcatagcgagaaaaataagctgattgtcacaaaccagttcggcagcaagatcatgatgatgtgccttgagaatgtggagatttaacaatgcaaacccaaaacaacgttcgcacaactaacatcgaagtagcaacaatcaaagacgca

SEQ ID NO: 25380 - DNA, 260 bp, Unknown
  Description of Unknown: LeftRegion for integrase A948 sequence
aagttaatggcttttgttgctgaccgccgtcaggggcatcataagaaggaaggtaagtgatggttaattggattggtgtggaagaaaaactaccagaagttaacgaacctgtactgtgcgttggtatgtgtggcgatggtgactttctagctcctgttgtcgcagcgcttcaggatgatggtaagtttattgttggttatagatttgatggagatagagctataggttttttcattgaaacatttgttactcactggatg

SEQ ID NO: 25381 - DNA, 260 bp, Unknown
  Description of Unknown: LeftRegion for integrase A949 sequence
gcctctgcggcttctagtgggatttgtacattcataagtattagtcctgagtttaatgctccccaccacaatggctaaaagggacaggacagcccgaggagcttgttaagtataaccacatcaaaataattaaacaaatgccttgattttattcaatgtgatgattaagattaattcaacttaaacaggaaaggataatcatgaaatttacagacacaaaaacaaccaccattgatgaagtgttaattaacactcgtggc

SEQ ID NO: 25382 - DNA, 260 bp, Unknown
  Description of Unknown: LeftRegion for integrase A950 sequence
ggaaagctagtaccatttgttgctgatcgccgtcagggtgcgcataagaaggctagttgaccatgcaatcaccaaactactcaaggaacgcgcacaaggcagcgcaagcagaaaggcaacacgactaccctatggcggttgtgttttggcaaaaggcagcaaagagcgaatgcagcgataaacaacgccattgggctgagtgtcgctgtcagcactgcaatagatttgtaggggattgggatgtttagcaaaaagagccg

SEQ ID NO: 25383 - DNA, 260 bp, Unknown
  Description of Unknown: LeftRegion for integrase A951 sequence
ggaaagcttgttgtttttgttgctgaccgccgtcaaggtgcgcataagaaggccaattgacatgcaatcaccaaactacgcaaggaacgcgcacaaggcagcgcaagcagaaaggcaacgcgactaccctatggcggttgtgttttggcaaaaggcagcgaagagtgaatgcacagacaaacaacgccattgggctgagtgtcgctgtcagcactgtaatagatttgtggagatgtgggatgtttaataaattatctgcg

SEQ ID NO: 25384 - DNA, 260 bp, Unknown
  Description of Unknown: LeftRegion for integrase A952 sequence
ggaaagcttgtaccgtttgttgctgaccgccgtcagggtgcgcataagaaggccagttgaccatgcaatcaccaaactactcaaggaacgcgcacaaggcagcgcaagcagaaaggcaacacgactaccctatggcggttgtgttttggcaaaaggcagcaaagagcgaatgcagcgataaacaacgccattgggctgagtgtcgatgtcagcactgtaatagatttgtggagatgtgggatgtttaaccaagcaagcaa

SEQ ID NO: 25385 - DNA, 260 bp, Unknown
  Description of Unknown: LeftRegion for integrase A953 sequence
ggaaagcttgttccgtttgtcgctgaccgccgtcagggttcgcataagaagggcaattgaccatgcaatcaccaaactacgcaaggaacgcacacaaggcagcgcaagcagaaagggcacacgactaccctatggcggttgtgttttggcaaaaggcagcacagagcgaatgcacagacaaacaacgccattgggctgagtgtcgctgtcagcattgtaatagatttgtggagatgtgggatgtttaatcaatacgacaa

SEQ ID NO: 25386 - DNA, 260 bp, Unknown
  Description of Unknown: LeftRegion for integrase A954 sequence
ggaaagttaatggcttttgtcgctgaccgccgtcaagggcatcataagaagggcaattgaccatgcaatcaccaaactactcaaggaacgcgcacaaggcagcgcaagcagaaaggcaacacgactaccctatggcggttgtgttttggcaaaaggcagcacagagcgaatgcacagacaaacaacgccattgggctgagtgccgctgtcagcactgtaatagatttgtggagatgtgggatgtttaattatttaaaagc

SEQ ID NO: 25387 - DNA, 260 bp, Unknown
  Description of Unknown: LeftRegion for integrase A955 sequence
ggcaaattagtcccgtttgttgctgaccgccgtcaaggtgcgcataagaaggccagttgaccatgcaatcaccaagctactcaaggaacgcgcacaaggcagcgcaagcagaaaggcaacacgactaccctatggctgttgtgttttggcaaaaggcagcaaagagcgaatgcagcgataaacaacgccattgggctgagtgtcgctgtcagcactgtaatagatttgcaggggattgggatgtttaatcaagcaagcaa

SEQ ID NO: 25388 - DNA, 260 bp, Unknown
  Description of Unknown: LeftRegion for integrase A956 sequence
aacccggcaactgtctctcggatcgtccgagggatctaccacgcaaaaggaggatcgtgaacagcaacgagatcgcagagatcgtagagaaggcccacgacgagatggtggcacgaggccgcaccacaggcaacctgatcgacccagagacctgcgaggtctgcctgctcggcgctgtcggcgtggcaggtataggtgaggagaagctcaagaagaccctctacgaagagttctactacggcggcaagttgcatccggtg

SEQ ID NO: 25389 - DNA, 260 bp, Unknown
  Description of Unknown: LeftRegion for integrase A957 sequence
gatggaaagcttgttgtttttgtcgctgaccgccgtcaggggcattttaagaaggcttagcaaatggaatcaccaaactacgcaaggaacgcgcacaaggcagcgcaagcagaaagggcgcacgactaccctatggcggttgtgttttggcaaaaggcagcacagagcgaatgcacagacaaacaacgccattgggctgagtgccgctgtcagcactgtaatagatttgtggagatgtgggatgtttaatcaatacgaca

SEQ ID NO: 25390 - DNA, 260 bp, Unknown
  Description of Unknown: LeftRegion for integrase A958 sequence
gatggaaagcttgttgtttttgtcgctgaccgccgtcagggttcgcataagaaggcttagcaaatgcaatcaccaaactactcaaggaacgcgcacaaggccgcgcaagcagaaagggcgcacgactaccctatggcggttgtattttggcaaaaggcagcacagagcgaatgcacagacaaacagcgccattgggctgagtgtcgctgtcagcactgtaatagatttgtggagatgtgggatgtttaatcaagcaagca

SEQ ID NO: 25391 - DNA, 260 bp, Unknown
  Description of Unknown: LeftRegion for integrase A959 sequence
ttaaattcggtgctatatgtaagtgtttgtttttattgcttctttttgcatcgaattgacgaatcgaaaattcggcagtctgtatagtttgtgatatttgagtgattttcagcatccaaaaactgtgatttacgtcactgacgaatcaatcgtcgtttttgtagaatgaatcgacaacaacaaaaccaataggaacaaccatgctaaaaacaaaatcaattcaggtttgcactgtggccgatgttttggtgaagactcgc

SEQ ID NO: 25392 - DNA, 260 bp, Unknown
  Description of Unknown: LeftRegion for integrase A960 sequence
ttagttcgcgtcgagattcacggcgattttgaggaaaagctaacggtgattaatcattagtgtgaggcctgtcactgaatcaaaaaccaataacgcttaaattacctaaaaaacacaaggtgattaatatggaatacaaaggaaacataacgctacctagttactcagagttttgcgagtcaattgtgtcttctgcggcaaagtctaacgaaaaggttagatgcaaagaatgtgatggaagtggcgagattgaagaggat

SEQ ID NO: 25393 - DNA, 260 bp, Unknown
  Description of Unknown: LeftRegion for integrase A961 sequence
gtccgacgtgcgggcgtggtggccggcatgccacgaccacgaggaggacccaacgtgaccgtcgtcggcatcttgggggcggccgcgttctcggccatcatcggcgccgctggctacagcgtgtggtggctcaacgagaaacgcaacgcccgaccccaggaacacaacaccatcaccggcaccggtcaggagatcccccgatgacaaccaccgcgccggcggcgaccaccctcaccgccgaccaaaccaccaccgcgcga

SEQ ID NO: 25394 - DNA, 260 bp, Unknown
  Description of Unknown: LeftRegion for integrase A962 sequence
atgaccactgcggcaattttcgatgatgttgtctatccgctgcatttcgacaatgccggcaaggtcaggcaagaaatggaaggcgctgttaactggttctgcaggtggcgcaacgaagagaaagccgttgtgaaagcgagattgttggtcagttgctggggtcaatatctgagccatgagcaggttatccgggaggccgcatgacacacactatcaaaaccattccagacatgctcattgagacatacggaaaccagaca

SEQ ID NO: 25395 - DNA, 260 bp, Unknown
  Description of Unknown: LeftRegion for integrase A963 sequence
atgaccactgcggcaattttcgatgatgttgtctatccgctgcatttcgacaatgccggcaaggttaggcaagaaatggaaggcgctgttaactggttctgcaggtggtgcaacgaagagaaagccgctgtgaaagcgagattgttggtcagttgctggggtcaatatctgagtcatgagcaggttatccgggaggccgcatgacacacactgtcaaaaccattccagacatgctcatagagacatatggaaaccagaca

SEQ ID NO: 25396 - DNA, 260 bp, Unknown; identical to SEQ ID NO: 25395
  Description of Unknown: LeftRegion for integrase A964 sequence

SEQ ID NO: 25397 - DNA, 260 bp, Unknown
  Description of Unknown: LeftRegion for integrase A965 sequence
atcattaatgggacggcgctgtcaggctcctctatatcggattatgtctcggcattcggagacagaaaaatgatatctgaatgggcgaaagacgagagatgcacagtcacagccaaaaccattctaaggcgaattctttcaggcattccgcctgaacaagctatttcctccaaaagaagaccagatatccgggaggccgcatgacacacactatcaaaaccattccagacatgctcatagagacatatggaaaccagaca

SEQ ID NO: 25398 - DNA, 260 bp, Unknown
  Description of Unknown: LeftRegion for integrase A966 sequence
aggaatatcttaatgataagtgagctacaggcatttcacctgatggtgaagcacagcatgattatcatccactgtgaccgggataaattagtgtttaccgatgacctgcagtataccgaacagtggtctgataagtttgataaacccaaagccacatgtcgtttaatcgaacgtgtagcgcgtgacagaggtgaacagttatgaaagcaacagtgcatactatttatgaattattaccatctacccgtggtaacattact

SEQ ID NO: 25399 - DNA, 260 bp, Unknown
  Description of Unknown: LeftRegion for integrase A967 sequence
gaccgcggcgacgccggcgtggcttggggtcgtgccgcgtgcgctgtctgtcgtggcgctggccaactcggtggccgtgacatcactgctggtggccgctgctcgcagcccggccgtatcgacttctagtccgtttgccatgccaatcccccaaccggcaatctcctggttgtgagcgtacctcagcgttgctgagcgacgtgacgcgagaatatgcgacatggccgccaattcgggctggtcagccgcgcctcgagttc

SEQ ID NO: 25400 - DNA, 260 bp, Unknown
  Description of Unknown: LeftRegion for integrase A968 sequence
atgaccactgcggcaattttcgatgatgttgtctatccgctgcatttcgacaatgccggcaaggttaggcaagaaatggaaggcgctgttaactggttctgcaggtggtgcaacgaagagaaagccgctgtgaaagcgagattgttggtcagttgctggggtcaatatctgagtcatgagcaggttatccgggaggccgcatgacacacactgtcaaaaccattccagacatgctcatagagacatacggaaaccagaca

SEQ ID NO: 25401 - DNA, 260 bp, Unknown
  Description of Unknown: LeftRegion for integrase A969 sequence
atgaccactgcggcaattttcgatgatgttgtctatccgctgcatttcgacaatgccggcaaggttaggcaagaaatggaaggcgctgttaactggttctgcaggtggtgcaacgaagagaaagccgctgtgaaagcgagattgttggtcagttgctggggtcaatatctgagtcatgagcaggttatccgggaggccgcatgacacacactatcaaaaccattccagacgtgctcatagagacatatggaaaccagaca

SEQ ID NO: 25402 - DNA, 260 bp, Unknown
  Description of Unknown: LeftRegion for integrase A970 sequence
acttgaatcagcacccaaaggcgctacccattattttcttgtgccaaatggatctggtgagccttattttgttcttgaaaaagaaaagaagttttactggttccacggtcaggatgaaataactaagccacacattttaagttggattaagccaattgaatcactgaaagaagttaaagcggaaagtaaggaggggtgaaatgacaaaaacatccatagatcaagaaattgacgaagctatagccaaaggtggaagcttt

SEQ ID NO: 25403 - DNA, 260 bp, Unknown
  Description of Unknown: LeftRegion for integrase A971 sequence
aaaatgcttgggattagtcgaacggggttgggtggtattttgaagagggtatgtagatgaaaattgatgaaattatttgggcgcaatgtcgcggattccaagtttatgggaaaacaaaacatggaataaaaaaatacaattattctggtcttatatcggctggttttggtattcataaattcacagatgaagacggaagcaagtattttgtaaaagttaattcatacaatgatagtttaatgactataaacccttgggat

SEQ ID NO: 25404 - DNA, 260 bp, Unknown
  Description of Unknown: LeftRegion for integrase A972 sequence
aagatgcttgggattagtcgaacggggttgagtgggattttgaagagggtgagtagatgaaatttaatttagataaaacggattatattttatatccagaatcaatatataagagcaaggttagatttacgctatttgttggtgtgtattgggtttggtgcttgttatggcttggtgttgctttatacaatattgttgttaatcacaattatgctgatggattaatttcaggtgtaattcatattttatgtttatttatg

SEQ ID NO: 25405 - DNA, 260 bp, Unknown
  Description of Unknown: LeftRegion for integrase A973 sequence
aagatgcttgggattagtcgaacggggttgggtggcattttgaagagggtgagtagatgaaatttaatttagataaaacggattatattttatataccgagtcgatgtataagagcaaagttagatttacgctatttgctggtgtgtattgggtttggtgtttagtttggtttggcattgctttatacaatattgtagtgaattacaattatattgaaggtttgatttcaggtgtgattcatattttatgtttgtttatg

SEQ ID NO: 25406 - DNA, 260 bp, Unknown
  Description of Unknown: LeftRegion for integrase A974 sequence
atgcggaggaatatctaaataatgaacggtgaacaggcttttgacattctggtaaaatataacattatcgttattcattgtgaccgtgatcagattgttttcactgatgatctgcgttatgaagaaccttatgacggtgataaacgatcagcaacgttaagactgattgaacgtgtagcgcgtgacaaaggtgaacagctatgactcatactattcatgaattattacccactacccgtgggaacatcactgaattagcc

SEQ ID NO: 25407 - DNA, 260 bp, Unknown
  Description of Unknown: LeftRegion for integrase A975 sequence
gagcgtaacgggcaatataatttatttacaaatatcagcgagcaatacggcaatggataaaaaatcaaagcaaatctacgacgcagtttttaaaaacgtgcatctaacgagtagtaagaaagcggctgaacaccttggcttaacatcaactgaaatatccagggcagcgcgtaagcattcgattatcagcgaaacaatacgccgtaataagattaagcagggtggcgcttatgctagagcgttttcgttgatgcctgtga

SEQ ID NO: 25408 - DNA, 260 bp, Unknown
  Description of Unknown: LeftRegion for integrase A976 sequence
aacttgtaaaaaggaaaacaaataatgtctaatggaaaagtaaatatctaccatgcttggaaaatgttcctattgtttgaaaataaaacagtgaaagaggttacctcaattattgaaacttttgaaaattttcttcataataatgagccagaaaaagcgcaagaatttttagataccttatttgaaaaggaaaacaagtaatgagggattttaaccttaaagaagaaacaagaaagtttcaaaaatctttaatagaacaa

SEQ ID NO: 25409 - DNA, 260 bp, Unknown
  Description of Unknown: LeftRegion for integrase A977 sequence
aacggtcgtaccgtgaatgcaattaggcaaaagtactatagtattttaaattgcaggtaacgtacttgtatatggtgcgttgacgataggaaatgcattatatacggtgttacctggcgaagtgaacagttattattaaaagaaaaaaagcgatggcaaattatttttgcaaaaaataaaatatgtatgattgatataaggttgagtgataatttagagttaatggcagaaatgcaagataatacagtagatttaattta

SEQ ID NO: 25410 - DNA, 260 bp, Unknown; identical to SEQ ID NO: 25339
  Description of Unknown: LeftRegion for integrase A978 sequence

SEQ ID NO: 25411 - DNA, 260 bp, Unknown
  Description of Unknown: LeftRegion for integrase A979 sequence
tgtttgatagtcatggcttatgaggtggaaggtgatggggtgatggggagtgttgtctcagatagggatctcaatctgctcatcttggttctgaaggtaactgttcgaggggtaaggggtcaacaagggaaacctgttcgacttgatacatacatattcgggaaggctgtgcttgtcaacatcagaacagggcggtttgtatgaatggataccccaaaaggatcagaaatcagatactcgcccttcatgaacaagggatg

SEQ ID NO: 25412 - DNA, 260 bp, Unknown
  Description of Unknown: LeftRegion for integrase A980 sequence
tgctgatccggagaataatcttccggcacaaaatagcgatacaccttagcctcaaatggtgatgagacgtatagcacgtcaccgccgtttccaggggcagcgccctggcagaaatggagcgcgagctgatcgtcgagcgtacccgcgccggtttagccgcagcgagggagcaggggagagtaggtggacggcgccgggtaatgaccactgaggttgtggagcgatgccgcaggatgttgggtacgggcgcaacccggcag

SEQ ID NO: 25413 - DNA, 260 bp, Unknown
  Description of Unknown: LeftRegion for integrase A981 sequence
ttgatgctaaaaggcaagcaacgcttcttctatctgcacgtcattattgctactaaattctgtaagaagctaccacaccatactcaagttaatcataaagatggcaataaattgaataacgctaaagataacttagagtggtgtactgctagcgaaacatactgcacaaataccatggagacatacaaggagatattactttgtactctaagatgaaagaactaagagctgtaggaatgacctataagcagatagcacag

SEQ ID NO: 25414 - DNA, 260 bp, Unknown
  Description of Unknown: LeftRegion for integrase A982 sequence
ctgtgctgcgcgggagttggcggatgcgctcgtccgccggggtgaacgagcggtgggcggggcatcgtgaaggcggcggggatgagccggacgcggtccttgatggggccgggggtgcgggctgatgccgcaggtgggtgcgttgtgcgagcaggtgacggtgctggccaacatggtcgagtcggcgctgggcggcggtcatgaacgggctgtcgaagatcacggcgtcgcaccgctccaggacggcggcgatctatctg

SEQ ID NO: 25415 - DNA, 260 bp, Unknown
  Description of Unknown: LeftRegion for integrase A983 sequence
cggtcgctcgggatgaaggagagccaggtcgggaaggtgcgcaagacgatctccgccctgcgcaaggggagggaccccgcctcgatcgccgccctccgcacccgctcctgacgacgtcccgcggcgccgggcgtcgtccgtcccccgcagggtcccgaaattccggtttcgggacccccggccgtccacgggcccgtcgtatggacccgcgccgtccgcgatcccctcgaggggccgcgcgaccgagtccgcgcccgatc

SEQ ID NO: 25416 - DNA, 260 bp, Unknown
  Description of Unknown: LeftRegion for integrase A984 sequence
atcccaggttcccggcgaggtcaccggccggggggaggagagcatgtcgcgcgagcgcccgtggcacgtccagcgcagcggcgtgccaaccgcgaccggccagcagcactgggaccgggcctatcagctcctcctgcagtgggcgacgaccccgtccgtctcggccgagacgctgaggccgaacctgccggaggcatcccatgcgtgtagccctgtacgctcgcgtctcgaccagccatcaagtcgagcaccaaaccatt

SEQ ID NO: 25417 - DNA, 260 bp, Unknown
  Description of Unknown: LeftRegion for integrase A985 sequence
cccagcagtttgcgagctttggtccggatggtccgtgagcacggcagagcgccgtcaacggagaccagtgatgccatgtcccaccaccaggatttggacgcgcctgccgctcgatgcgaaggcagcgacgacgcagctctgggccgagctgatgctccggcgcgcagcacgcgagcgcgcacgcaacggggtgcccggccatgaccgcgcattccaaggtggagggacggcacctgcggctgctcgcccttgtctacatc

SEQ ID NO: 25418 - DNA, 260 bp, Unknown
  Description of Unknown: LeftRegion for integrase A986 sequence
ctcttcttcagcggcgtgatgagtcgccgcccgctcaaggagaaggcatatgcaactgaagctgacatttgccgaggaagacagcaaccggcattccgaaccgcctgcctgtgagaagctggacgccgaggcgcgggcaaaggcgttgcgccgacttgccctgatgatcgcacgcatgctgacagccagggaggcctgcgatgattgaacacagcaagattgccactggccatctggcacggcaggctgtcgtctccctg

SEQ ID NO: 25419 - DNA, 260 bp, Unknown
  Description of Unknown: LeftRegion for integrase A987 sequence
atcacgccggggccggcgaggtgtcctgtgcaccttgtccggccagcggtccgaagatcccggctcggctggtcccacgctccaatgggcggatcttccgccctcgccgccggtgccatgagggatgtggcttctcatgttgcccggaggacgaccgccggccggaaggcggggacggcccgaccggaaggggattctgcatgaagcggttgaatggcctgttcgatgaggctgcccgggatcggcgcgccctggccgcg

SEQ ID NO: 25420 - DNA, 260 bp, Unknown
  Description of Unknown: LeftRegion for integrase A988 sequence
atcattgatgctttgctgcgccagacggaacaggagagcaacgatgcaactgaacctaaccttcgcagacctgccgccggacgacgacagtctgtgggaacaactcgaccaaacaacacgccaagcggtgatcgacagtctggctcaagcgatcgcgaaggtcgtgacgggcaacgatccgatccacagggagaacgctgatgagtgacactgccaacaagatcggtaccagccatttgcagcgtgcggcgttcgtctac

SEQ ID NO: 25421 - DNA, 260 bp, Unknown
  Description of Unknown: LeftRegion for integrase A989 sequence
gagaagcgcaatgggcaagctgccaaacgtcgttccagcaagtctgcagtcgttgcaatcgataccgcgccagatgaacatgacgttcgacgccgtcgagcttcaggggatgagcgcggtacaacgcgcaagggcaatcacccatctggcgagcctgctgatgcaggccgccggcgtcgccacgccaaaggagcataacgatgacgaacgttgatcgtttgcctgagctccttcttaaacgcaaagcggtgatctacgtc

SEQ ID NO: 25422 - DNA, 260 bp, Unknown
  Description of Unknown: LeftRegion for integrase A990 sequence
gtggcacagcaccgggcaactcaggacttagacgcacaagcaggtgtcgtatgccaggacagcccattcccccccgtctcaaccgccagcagtccatcaactgtggtttcagttatcccttgcccaacgccaacgattagtagccgttctcaccgagatgatgagcgctcagatcactgctctggagcaggaggaacatcatgaatcctaaacgtgaagctcacaaccgccgctctgagaagattgacgatctgcatctc

SEQ ID NO: 25423 - DNA, 260 bp, Unknown
  Description of Unknown: LeftRegion for integrase A991 sequence
ggctggcggtccgtgaggggagcgaaccgtcatgtgcggcggaagcgacgtcggccccagaagccggtccgagctcatctgagcgaacgtgtgtgggacaggttgccggaagtgaaccggcaagtggtcgttcagcagttggtgaggctggtcggccgtgtgatagcgccggatgagcggggtcggccgtgacggcggtgatgccctgggagagggctaacagcaaggtatgtgaccgtcacctgcagcggttggcggtg

SEQ ID NO: 25424 - DNA, 260 bp, Unknown
  Description of Unknown: LeftRegion for integrase A992 sequence
ccgcttatggcccgtagcggcctgatgctctttctgcgccggggcatgtggggatgggttcaggcgctgacagcaacagcaagcaccccgcgagagcagatttacccatcgtcaattgcttggccgctgcacggcgggcacagcgccgttgttcacgtccttgcgacaatcgccatgagcatcaacgatcggagatcaccatgaatgtacatctcaaagtccagcctcatcacctcgaacgcggcgcctacctgtacatc

SEQ ID NO: 25425 - DNA, 260 bp, Unknown
  Description of Unknown: LeftRegion for integrase A993 sequence
gcatcgggagacatcgcatgtccgtcgccccccgtcacaacgctcccccccgcgcctgacgacggcgccctgcccaccgccgacggtcgcaccgacgatctgggcccgcctgccggccgaccggcagcgacagctccgcgacctgctcggccaactcctcgccaggctcctggcggccacccgaagcgaggaggccggccatgagtgacgcaacccgctcgcccaagctccggccctggcatctcgaccgggcggccttc

SEQ ID NO: 25426 - DNA, 260 bp, Unknown
  Description of Unknown: LeftRegion for integrase A994 sequence
ccgctcatggcccgtagcggcctgctgctctttttgcgccggggcatgtggggatgggctcaggcgttagcctcaacagcaatcaccccgcgagagcagaattacccgtcgtcaattgcttggccgctgcaccgcggacacagcaccgtcgttcacgtccttgcgacaatcgccatgagcatcaacgatcggagatcacgatgaatgtacatctcaaagtccagcctcatcacctcgaacgcggcgcctatctgtacatc

SEQ ID NO: 25427 - DNA, 260 bp, Unknown
  Description of Unknown: LeftRegion for integrase A995 sequence
ccgcttatggcccgtagcggcctgatgctctttctgcgccggggcatgtggggatgggctcaggcgctgacagcaacagcaagcaccccgcgagagcagatttaccaatcgtcaattgcttggccgctgcacggcgggcacagcgccgttgttcacgtccttgcgacaatcgccatgagcatcaacgatcggagatcaccatgaatgtacatctcaaagtccagcctcatcacctcgaacgcggcgcctacctgtacatc

SEQ ID NO: 25428 - DNA, 260 bp, Unknown
  Description of Unknown: LeftRegion for integrase A996 sequence
ccgctcatggctcgtagcggcctgatgctctttctgcgccggggcatgtggggatgggttcaggcgctgaccgcaacagcaaccaccccgcgagagcagagttacccatcgtcaattgcttgtccgctgcatgtcggacacagcgccgtcgttcacgtccttgcgacaatcgccatgagcaccaacgatcggaggtcaccatgaatgtacatctcaaagtccagcctcatcacctcgaacgcggcgcctacctctacatc

SEQ ID NO: 25429 - DNA, 260 bp, Unknown; identical to SEQ ID NO: 25426
  Description of Unknown: LeftRegion for integrase A997 sequence

SEQ ID NO: 25430 - DNA, 260 bp, Unknown
  Description of Unknown: LeftRegion for integrase A998 sequence
gaggtgattcgcgatgaacgtgcaatcaaaaccgtaccgcgtagcgtctcagtccctcgtaaagcttctgaccccgagcacgacagtcccgcgtccgtggctcgatctgccaccggagacgcggaaacaagtcgctcaaaagcttgcccgcctgttgatgcggatgcggtcaatacgcgcgccgacaaaggtagaccggcatgctgagagcgacgaatagcccagacgagcgcgtcacggccgagcatcgcggcaagctc

SEQ ID NO: 25431 - DNA, 260 bp, Unknown
  Description of Unknown: LeftRegion for integrase A999 sequence
aaggtgatccacgatggcccaacgctgtcccttgaaccgggagcccgcttctccgaccaggctgcacctgcaccgctctcggcaccaaccgatccggccgtggccgaacctcccggccgagacgcaaacgcagatggctcagcttctggccgagcttgtgcgacggatgcacccgatgccgccgatcagggagaagaccgatgctgagcgtcacgaacccttctgacgagcggctgacctcggcccgccgcgccaagctg

SEQ ID NO: 25432 - DNA, 260 bp, Unknown
  Description of Unknown: LeftRegion for integrase A1000 sequence
gacccaccgaccgcttccaggtcgcgttgcgtatcgacccctgccgaccttggcagatccacccggccgtccgacggccgacgttccgcgcctgtggcccaatctgtcgaccgcgacgcaaacccagattgctcaaacaatcgccgcgctgatgcggcgaatgcaagcgatccccggcacgcccggaaggggactgggtcgtgctgatcagctcgaacatcgctgacgagcggctcacgaccgcacaccgagccaagttg

SEQ ID NO: 25433 - DNA, 260 bp, Unknown
  Description of Unknown: LeftRegion for integrase A1001 sequence
aaggcccgtagcggcctcatgctttttctgcgccgcggcatgtggggatgggcccgtgcactgcctgcggcggcaagccctgatcaagacccgttttacctgtcattggccacccgaccggcgcgcgacgacctcagcgccgtcgttcatgtcctggcgaccatcgccatgagcatccaccaacggagagcaccatgaacatgaatgtacacctcaaagtccagtcccatcaccgtgaacgcagcgcctacctctacatc

SEQ ID NO: 25434 - DNA, 260 bp, Unknown
  Description of Unknown: LeftRegion for integrase A1002 sequence
ctgccgctcaaggcccgtagcggcctcatgctttttctgcgccgcggcatgtggggatgggcccgtgcactgcgtgcggcggcaagccctgatcaagacccgttttacctgtcattggccacccgaccggcgcacagcgccgtcgttcatgtcctggcgaccatcgccatgagcatccaccaacggagagcaccatgaacatgaatgtacacctcaaagtccagtcccatcaccgtgaacgcagcgcctacctctacatc

SEQ ID NO: 25435 - DNA, 260 bp, Unknown
  Description of Unknown: LeftRegion for integrase A1003 sequence
atgcgagtcgttgcgctggcagaggcgttgcgccgttcatcacaggacgaggaatgccagagtgaacatcagctctccccggagacggccaaagatccagatatggtcgagcctgccgccagcaatccagcgtcagctggcggcgacgatagcgcaggctttgtgctcgcgcccaactgcccgctacgccggtgacaccgatgttgagagattatgccgtagatgaacggataagcaccacgcagcaggccaagctggcc

SEQ ID NO: 25436 - DNA, 260 bp, Unknown
  Description of Unknown: LeftRegion for integrase A1004 sequence
ccggtcgcggcgaccgaaccacggatgtcgatggagaatcgaacgaagctgagcgtcgaggcactacacgatctgacctctctggttgagcagctcgaacacgatgccgatcgatccaaaagacctttgggccacgctgtcaacgacactgcagcgccaaatcgtcagcgaggtcgccgcggtgctggcggaggcaagtcatgaaatccgagctgatcaaaccgatacacctggcgcgacgggcggtcgtgtacatccgg

SEQ ID NO: 25437 - DNA, 260 bp, Unknown
  Description of Unknown: LeftRegion for integrase A1005 sequence
gacggcgcagcatcggacaactcacccacggaggaggttgccgatgaccagacgaccgcggccgacgtcccaactctcgctcgctctctctgttccgcttcaggacatcgccgttccggacgaagtcgtgcaagtactggcggatctcctcttggaagctgtgggcgcccatctcgacatggagaacagggaggaggcccatgagcaccaagatcaccgttgatcatctgggccgcggtgccgcgatctatgttcgccaa

SEQ ID NO: 25438 - DNA, 260 bp, Unknown
  Description of Unknown: LeftRegion for integrase A1006 sequence
ggcggcgcagcatcggacaactcacccacggaggaggttgccgatgaccagacgaccgcggccgacgtcccaactcttgctcgacctcacggttccactcccgggtctcgtggttccggacgaggtcgtgcaggtcctggcggacctcctcctggaagccgtcggagcccggctgggcacgaagaaaaaggaggacggccatgagccccaagatcaccgctgatcacctcggccgcggtgccgcgatctatgtccgccag

SEQ ID NO: 25439 - DNA, 260 bp, Unknown
  Description of Unknown: LeftRegion for integrase A1007 sequence
tcgaaagccttaaggaactcatccaaatccaccgagcagcacgctgaacgattcgatccgcacccgcgtcactcaccggatgcgtacctctgttccgcttcaggacatcgccgttccggacgaagtcgtgcaagtactggcggatctcctcttggaagctgtgggcgcccatctcgacatggagaacagggaggaggcccatgagcaccaagatcaccgttgatcatctgggccgcggtgccgcgatctatgttcgccaa

SEQ ID NO: 25440 - DNA, 260 bp, Unknown; identical to SEQ ID NO: 25437
  Description of Unknown: LeftRegion for integrase A1008 sequence

SEQ ID NO: 25441 - DNA, 260 bp, Unknown
  Description of Unknown: LeftRegion for integrase A1009 sequence
aaatcccgtccttcgaggaagaaggagaaggatgatgcgaagcaggcgacatcaaaatcgcgaccaactcgttctgcagttggagcgccaaaatcttcaggttccggcggtcaagaacgtcaaagggttggtggaagcgctggcggatcttctgctggaagctatggacgcgaacagaatgacgaagacgggaggcgttgatgaacacgaagatcacgcctgaccatcttggccgcgccgctgtggtctatgtccgccag

SEQ ID NO: 25442 - DNA, 260 bp, Unknown
  Description of Unknown: LeftRegion for integrase A1010 sequence
aaatcccgtccttcgaggaagaaggagaaggatgatgcgaagcaggcgacatcaaaatcgcgaccaactcgttctgcagttggagcgccaaaatctacaggttccagcggtcaagaacgtcaaagggttggtggaagcgctggcggaccttctgctggaagctctggaagcgaacagaatgacgaagacgggaggcgttgatgaacacgaagatcacgcctgaccatcttcgccgcgccgctgtggtctatgtccggcaa

SEQ ID NO: 25443 - DNA, 260 bp, Unknown
  Description of Unknown: LeftRegion for integrase A1011 sequence
gtgcccgtggcggcgaccgagccactcgccttgccgcgcgctcccacaaaattgagcgttgaagctttgtttgatctactaaatgtggtagatatagagcatcatgagcacggcacccgaagatctttggacgacactgccggtgacgctaaggcgccagatcatcggcgatatcgccgtggttctggcggaggtctttcgtgatgtccgagttgattcagccgatacatctgaagcgcaaggcagttgtctacatccgg

SEQ ID NO: 25444 - DNA, 260 bp, Unknown
  Description of Unknown: LeftRegion for integrase A1012 sequence
agctctcgtccttcgaggaagaaggagaagggtaatgcgaaacaggcgacatcaaaatcgcgaccaactcgttctggagttggagcgtcaaaatcgccagattccggtggtcaagaacgtcaaaggactggtggaaacgctggcggatcttctgttggaggctttgggagcgagcaaaacggcgaagacgggaggcgtagatgaacacgaagatcacgtctgaccatctgggccgcgccgcgattgtctatgtccgccag

SEQ ID NO: 25445 - DNA, 260 bp, Unknown
  Description of Unknown: LeftRegion for integrase A1013 sequence
attccagaggaggatgcgcatgccctgccgacccaaacgcctctcgcagccgaaacaaccgaagcccaagcagctctgcttgccgttggacgacagccggaaccgtcccccggcagcaccagcgacacccgcaattctggaggccttggccgagctgctgctggtggccgcgaacaagatggcggagggcgcgcaaaatgatgcatgcaaagatcaccgttgagcatctcgcccgcagtgcgctcgtttatgtccgtcag

SEQ ID NO: 25446 - DNA, 260 bp, Unknown
  Description of Unknown: LeftRegion for integrase A1014 sequence
gcaagatcccgtccttcgagaaagaaggagaagggtgatgcgaagcaggcgacatcaaaatcgcgaccagctcgtcctacagctggagcgtcaaaatcttcaggttccggtcaagaacgtcaaagggttggtggaagcgctggcggatcttctgctggaagctttggaggtgaacaggacggcgaagacgggaggcgcagatgaacacaaagatcacgtctgaccatctcggccgcgccgctgtagtctatgtccgtcaa

SEQ ID NO: 25447 - DNA, 260 bp, Unknown
  Description of Unknown: LeftRegion for integrase A1015 sequence
caagcaaccgcaatcgaatattatgagcaagaggcaaatcagattaagctgagtatggaggctctactcgagcttttatcgacagcggattgtcccgacgcacatgagcatggatccagccgatctttggtcgacgctgacgcccgcgctccgacgccagatcgtcgaagacgtcgccgcaattttggcggagatccctcatgaagtccgagctggtcacaccaagccacttggcgcgcaaagccgtagtctacatccgg

SEQ ID NO: 25448 - DNA, 260 bp, Unknown
  Description of Unknown: LeftRegion for integrase A1016 sequence
cgggcgcagctctcacgagcaagcgctgagccgggcaagacagaggggcgagcgacattggttagtttgccgaacgaagctgccgccaccgggatggttccgagcggacggccgcatgagatcacgatgcttctggcgagcctggtgctctcgacccgtcatccgtcaggtctgtcgccaggtgatggaggatatcgagcatgtccatgaacagcgagtctcatcaaaagatcacaagcgcacacctgtcacgcatggcg

SEQ ID NO: 25449 - DNA, 260 bp, Unknown
  Description of Unknown: LeftRegion for integrase A1017 sequence
cccgtgtcagcgacacagggatatgtcgaagccacgaatcagattaaacttagcgttgaggcagttcgggatcttatcgcggtggcggaaactctcgaaggtcatgatgatcgaaccgaagaacctgtgggcgacgttatcacccgcgttgcggcgtcagattctcgacgacgtcgccgcagttctggcggaggtatgtcatgaagtccgaactggtcaagcccacccatctggcacgcagagcggttgtttacgtccgt

SEQ ID NO: 25450 - DNA, 260 bp, Unknown; identical to SEQ ID NO: 25449
  Description of Unknown: LeftRegion for integrase A1018 sequence

SEQ ID NO: 25451 - DNA, 260 bp, Unknown
  Description of Unknown: LeftRegion for integrase A1019 sequence
cccgtgtcagcgacacagggatatgtcgaagccacgaatcagattaaacttagcgttgaggcagttcgggatcttatcgcggtggcggaaactctcgaaggtcatgatgatcgaaccgaagaacctgtgggcgacgttatcacccgcgttgcggcgtcagattctcgacgacgtcgccgcagttctggcggaggtgtgtcatgaagtccgaactggtcaagcccacccatctggcacgcagagcggttgtttacgtccgt

SEQ ID NO: 25452 - DNA, 260 bp, Unknown
  Description of Unknown: LeftRegion for integrase A1020 sequence
tctattgcagcaacagaatacctgcatgacaaaagcgatcaaacaaaattgagtattgaggcgttacttgatattatcaatgtgtcagactgtattcatgacagcaaatgcgaatccgaaggacctctggaaacaactaccgtcgtccctccgacggcagattgtcgacgatgtcgcagcggttctgacggaggttctgcgtgatgtcagagctgatcaaacccacccatctggcacgtaaggcggtcgtctatatccga

SEQ ID NO: 25453 - DNA, 260 bp, Unknown
  Description of Unknown: LeftRegion for integrase A1021 sequence
cggcacaggtcctcactccgaaggccacgccgcaatacgctttcatggtgtattgaacggcctcgcgatcaaactctcgcacgctctgtgcaccgaagttgccgtcccagccgtgtttgattccaactcagtgcgggataacggtgcgctcgtacgcgtgctggccaacctcgtgctgcgcgcccacgaggagcttgcccatgtctactaactccgctcagaaggtcacctcggaacatctccggcgagatgcctttctt

SEQ ID NO: 25454 - DNA, 260 bp, Unknown
  Description of Unknown: LeftRegion for integrase A1022 sequence
gggtcaggcccgccccgaggggctcggcgccatcgtctatcacggcatgctaaacggattgacgctgatcctgacgagcccgcccgttgcgtccttcgtccagagtgccccggcaggcgccgtcgcccccatcccgaacaaccgtcaattcgtgcgcctgctcgccaacatgctgctgcgaacccagtcggaggtggtccatgtttactgaaacccatcagaaggtcactgccgatcatctcagccgcgatgccttcctc

SEQ ID NO: 25455 - DNA, 260 bp, Unknown
  Description of Unknown: LeftRegion for integrase A1023 sequence
ggcttgcgcaaggcggatgggcgccatcgtctttcacggactatggcgcggcctggccgtgctgatcacgccagagcagtccacgatagcgcgacagcagtcggcgcctcggtccacgacaacttcagtggtcgcgcacgatcgccagctcgtgcacatgctcgccaatatggtgctggcagcagagacaggaggaagccatgtctactgataacgccatgaagattagtgccgatcacctgcggcgcgatgcatttctc

SEQ ID NO: 25456 - DNA, 260 bp, Unknown
  Description of Unknown: LeftRegion for integrase A1024 sequence
cgacacaggtcctaactcagaaggccacgcggccatacgctttcatggcctgttgcacgggctggcgatccaacgcccggacgcttcgcgcatcgaggctcccactccaaccgtgcctgcttccaactcagtgcgggataacggcgcgcttgttcgcgtgctcgccaacctcgtactgcgcacccacgaggagcttgcccatgtctactaactccgctctgaaggtcaccgctgaacatctgcggcgtgatgcgttcctc

SEQ ID NO: 25457 - DNA, 260 bp, Unknown
  Description of Unknown: LeftRegion for integrase A1025 sequence
tgcttgcgcgaggcgcatgggcgccatcgtctttcacggactgtggcgcggcctggcagtgctgatcgcaccacctcaatccgcgatagcgcgacagcagtcgacgcctcggttcaagacaacttcaatggtcgcgcacgaccgccagctcgtgcacatgctcgccaatatggtgctggcagcagagacaggaggaagccatgtctactgataatgccatgaagattagtgccgatcacctgcggcgcgatgcatttctc

SEQ ID NO: 25458 - DNA, 260 bp, Unknown
  Description of Unknown: LeftRegion for integrase A1026 sequence
cggtcaggcctgcgccaaggacatgggcgccatcgttttccacggcctttggcaagggctggcggtgctgatcgcgcagcctcccccgccgacgcatcggcggctggaatcacggcctacggcttcggtcgcagtgcacgatcgccagctcgtgcacatgctcgccaacatggtgctggcagcagagacccgagggaaccatgtctactgacatcgccataaaggttgacgccgaccatctgcggcgtgatgcattcctc

SEQ ID NO: 25459 - DNA, 260 bp, Unknown
  Description of Unknown: LeftRegion for integrase A1027 sequence
ggcttgcgcgaggcgcatgggcgccatcgtcttccacggactgtggcgcggcctggcagtactgatcgcaccacatcaatccgcggtagcgcgacagcagtccgcgcctcggttcaagacaacttcaatggtcgcgcacgaccgccagctcgtgcacatgctcgccaatatggtgctggcagcagagacaggaggaagccatgtctactgataatgccatgaagattagtgccgatcacctgcggcgcgatgcatttctc

SEQ ID NO: 25460 - DNA, 260 bp, Unknown
  Description of Unknown: LeftRegion for integrase A1028 sequence
ggcttgcgcgaggcgcatgggtgccatcgtctttcacggactgtggcgcggcttggcagtgctgatcgcaccgcatcaatccgcggtagcgcgacagcagtcagcgcctcggctcaagacaacttcaatggtcgcgcacgaccgccagctcgtgcacatgctcgccaatatggtgctggcagcagagacaggaggaagccatgtctactgataatgccatgaagattagtgccgatcacctgcggcgcgatgcatttctc

SEQ ID NO: 25461 - DNA, 260 bp, Unknown; identical to SEQ ID NO: 25459
  Description of Unknown: LeftRegion for integrase A1029 sequence

SEQ ID NO: 25462 - DNA, 260 bp, Unknown
  Description of Unknown: LeftRegion for integrase A1030 sequence
ggcttgcgcaaggcggatgggcgccatcgtctttcacggactatggcgcggcctggccgtgctgatcaagccagagcagtccacgatagcgcgacagcagtcggcgcctcggcccacgacaacttcagtggtcgcgcacgatcgccagctcgtgcacatgctcgccaatatggtgctggcagcagagacaggaggaagccatgtctactgataacgccatgaagattagtgctgatcacctgcggcgcgatgcatttctc

SEQ ID NO: 25463 - DNA, 260 bp, Unknown
  Description of Unknown: LeftRegion for integrase A1031 sequence
cggcaccccgcgcgccgagggcgccgcagcgctgcgctatcacgggatgctgcatggacttcctgtactcgtgaagtcaacggcggccatagacgctacctcgcgtcaccaggcgcagcgtatggacgcctttccggctggcgacgagtttgtgcgtttgctggccaacctcgttctacggacccattcggagctcgcccatgtctactgaacggtatcagaaggttacgcacgaccacttgcgccgtgatgccttcctc

SEQ ID NO: 25464 - DNA, 260 bp, Unknown
  Description of Unknown: LeftRegion for integrase A1032 sequence
ggcggccgtcaccgctcgcccgggcgtgcactcttcctgttcaaagggatggcggcctggatgcgtggcgtcagcgaaacggccccgagtccggccgccgccgctctgcgcaatgagtcgaggttaccggcggggatggaacagcacctgatcaatctggtcgccagcatggcgctggcgacggcacgggagagtaggccatgatgggtgagcagcacgcaaaaatacaggcgcgacacctgaagagaaatgcctatctc

SEQ ID NO: 25465 - DNA, 260 bp, Unknown
  Description of Unknown: LeftRegion for integrase A1033 sequence
gagaaacgcaatgggccagctgccaaggggtgttccagcacgaccgcaatcgccggcggtgacgccgcgccagatgaacatggtgttcgacaacgtcgagcttcagggaatgaacacggcgcaacgcgcaaaggtaatcacgcatcttgcaagcctgctgatccaagccgccggcgcaaccaccgggaaggagcgtgacgatgacgaacgctgatcgtttgccggcgccccttctccagcgcaaggcagtagtttatgtc

SEQ ID NO: 25466 - DNA, 260 bp, Unknown
  Description of Unknown: LeftRegion for integrase A1034 sequence
acgtcagaaattccttgtgttcctgaaaataaaggagttgaacacaggaaaaacaataatgatacaaaagcatctactaccaaccactcaaccagccaacaaagaaaggctaagtcgtctaataaaactaacagcaaggttagtagacaagatactcgtaagcaaaagtctcaacgagtcgatagtaaggagtaaaccagatgaatagtaaagttaggacgacccatctggaacgccatgctgttgtatatttaagacaa

SEQ ID NO: 25467 - DNA, 260 bp, Unknown
  Description of Unknown: LeftRegion for integrase A1035 sequence
ataacgtccgaatcttcttgtgttcttgatgatattgaagtcgaacacaagaaaaaaaatgagaaaaaagcatctactagcaaccgctcaagccaaaaacgaagaaaggctaagtcgccttataaagctaacagcacggttagtggacaaaatactctccactcaacagacagagaaagcgataactaggagtgaaccagatgaataataaaattagttcaacccatctggaacgccgtgctgttgtgtatttaagacag

SEQ ID NO: 25468 - DNA, 260 bp, Unknown
  Description of Unknown: LeftRegion for integrase A1036 sequence
gaggaagaaagccccggaggattcggcaatgagaaagcagtgtcgtgcgcaaatcgatctgttccttcccctaacccggcccggcgatatgagtggtgccgaacgccagaaggctatggcgcttctgcgagtattgctaatggaagcggcggcgcagccggccaacgagcctcaggccaacggcaaaaagggagcaggcaatgagtaagatcacgcccgtgcatctggcccgtgccgcattcgtgtacatccgccaatcc

SEQ ID NO: 25469 - DNA, 260 bp, Unknown
  Description of Unknown: LeftRegion for integrase A1037 sequence
cgctcggttcaagaagccgaagggataagccatgagaaagcaatttcgcatgcaattggatctgttcgtgacagcccggccggtagacctgagcgacacccagcgccgggaagccttaacactccttcaattactgttgacggaagcggcggcaaagctggccggcaagcggttcgccgacggcggaaaggaggcgggcaatgagtaagattaccgccgaccatcttagccttagcgccttcgtctacgtccggcagtcg

SEQ ID NO: 25470 - DNA, 260 bp, Unknown
  Description of Unknown: LeftRegion for integrase A1038 sequence
tgctcggtgcaagaagccgaagggataggccatgagaaagcaatttcgcatccaattggatctgttcgtcacagcccggccgatggatctgagcgacacccagcgccgggaagcattgacactcctgcaactattactgacggaagcggcggtaaaactagccgccgagcggtgcgtcgacggcagaaaggaggcggacaatgagtaagatcaccatcgaccatcttgccctgagcgccttcatctacgtccggcagtcg

SEQ ID NO: 25471 - DNA, 60 bp, Unknown
  Description of Unknown: LeftRegion for integrase A1039 sequence
ggcggtgcaaaatcgggccgcggtgggcgtgcgctgctttctgggctcctttcctgcggt

SEQ ID NO: 25472 - DNA, 260 bp, Unknown
  Description of Unknown: LeftRegion for integrase A1040 sequence
cgagatcatcgaggaaatctgcgagatcaaccgcgaactattgcgccgccgcgaggcgctctgaggggcgccggtgaaccagtctccgctgtcactcacccacatcatcgatccgcaatcggccggcgtactcatcgccaacatgctcgaggcctggctcaccgccgggcccgcgctggagctgaccgaggaggccgccgatgaacaccaagatcaccccccaacatcaaagcaagccggcgtacatctatatccggcag

SEQ ID NO: 25473 - DNA, 260 bp, Unknown
  Description of Unknown: LeftRegion for integrase A1041 sequence
attcccggagacacccatgccgcgccgaccgacaccccagcaacccgacctcttcgacccgccatcggatcccgagcggttcccgacgccgcaatggcagagcttgcccgacgaggtgcggctgacgctgaccgagttgatggcccgcttgatcctcgaccacgccatcgacgcggcccgccaacggaaggacgcgggacatgatgcatgagaagatcggaccgcatcatctggagcgcaaagcgctcctctatgtgcgg

SEQ ID NO: 25474 - DNA, 260 bp, Unknown
  Description of Unknown: LeftRegion for integrase A1042 sequence
caacgcgatgatggagtcgcattggaggaagtcgatgaacaagcacgacacgcccgcaccggcctcgggcagacagatgagcctgatcttcgagccccggagggtggacgggatgagcgaggcggaacggacgaaggccgtaatcacgcttgctcaaatcctgatgcaagccgctggcctcgtcgtcgaggagctcggcgatgaccggcactgatttaatcccggcgcaactgctgaagcgcaaggccgtcgtctacgtg

SEQ ID NO: 25475 - DNA, 260 bp, Unknown
  Description of Unknown: LeftRegion for integrase A1043 sequence
cgagatcatcgaggagatctgcgagatcaatcgcgaactattacgccgccgcgaggcgctataaggggcgtcggtgagccagtcgccgctgtcgctcaccgactccatcgacctgcaatcggccggcgtactcatcgccaacatgctcgaagcctggctcaccgcagagcccgcgctggagttgaccgaggaggccgtcgatgaacaccaagatcaccccccaacatcagagcaagccggcgtacatctatatccgccaa

SEQ ID NO: 25476 - DNA, 260 bp, Unknown
  Description of Unknown: LeftRegion for integrase A1044 sequence
cattcgggaggtctcaatggcttacaagtccaaggtgttgcagctcgatctgttttcctgtccccgcaattccgcgataaccccgacaccaagatgggacacgctgccagcgcagacgcgccagacattgacgtcgctgatcgtgcgcctgctgctcgaccacgtcaacgatcccgtcatggaacagcgggaggtgcgtgatgatctgtgagaagattgggccacagcatctcgaccgcaaggcgatcctgtatgtgcgg

SEQ ID NO: 25477 - DNA, 260 bp, Unknown
  Description of Unknown: LeftRegion for integrase A1045 sequence
ccgagcgcaatcagattcgcatgggaggaagtcgatgaaacagaacaacgtgtcagctccgatcgcgggcaggcagatgagcctgatattcgaaccccgcagattggacgggatgcgcgacgcggagcgggcgaagacagtactgcttcttgcccaaatcctgatgcaggccgccggcctcgtcgtcgaggagttgggcgatgacgaagtctgatctgatcccgacggtgctgctgaggcgcaaggccgtcgtctatgtg

SEQ ID NO: 25478 - DNA, 260 bp, Unknown; identical to SEQ ID NO: 25477
  Description of Unknown: LeftRegion for integrase A1046 sequence

SEQ ID NO: 25479 - DNA, 260 bp, Unknown
  Description of Unknown: LeftRegion for integrase A1047 sequence
cattcgggaggtctcaatgccgcgcaagtccaagacgttgcaactcgacctgttctcctgcccacgcgatttcgagatatccaagacaccacggtgggacaccctgccagcgcagacacgccagacgttgacgtcgttgatggtgcgcctgttgctcgagcacttcgacgatcccgttgcggagctgcgggaggtgcaagatgatctctgagaagatcgggccgcagcatctcgagcgcaaggcaatcctgtatgtgcgg

SEQ ID NO: 25480 - DNA, 260 bp, Unknown
  Description of Unknown: LeftRegion for integrase A1048 sequence
ccaagcgagaatggaatcgcacgggagaaagtcgatgaaacagcacaacgtgcctgcaccgacctcgagcaggcagatgagcctgatattcgaaccccacaggctgggggggatgaacgaagtggagcgggcgaaggccttgctgacgctcgctcaaatcctcatgcaggccgccggtctgatcgtcgaggagctcgatgatgaccagcactgatctgatcccaactgcgctcttgaagcgcaaggccgtcgtctatgta

SEQ ID NO: 25481 - DNA, 260 bp, Unknown
  Description of Unknown: LeftRegion for integrase A1049 sequence
cgaagtggacgtagaatcactcaggaggaccatgatgagatcccgcaatacgctggtgccggcgtcgggccggcagctcgacctgatattcaaaacccggatgctcgacggactgagcgacaaggatcgcaagaaggcgatttcaacgctggcttgcctgctgatgcaggccgcaggcctcgtcgtcgaggagctcaacgatgagcaacactgatttgattccgacagcgctgctcgcgcgcaaagccatcgtctacgta

SEQ ID NO: 25482 - DNA, 260 bp, Unknown
  Description of Unknown: LeftRegion for integrase A1050 sequence
aagccacatgacccagtcaccgcacacgaagctcctgtcgacgatctcaagtgcgccgcgccctacgacgccgcgccagatgaacatggtgttcgagtcagcagtaacccaggacctgaccgcgagcgagcgggccagcgtggtcgcgcaactggccaccctgcttctgcaggccgccggccggcccacggaggatgacgatgacgaactctgaactgctgcctgccaccgtgctgcggcgcaaggccgtcgtctacgta

SEQ ID NO: 25483 - DNA, 260 bp, Unknown
  Description of Unknown: LeftRegion for integrase A1051 sequence
aatcggggagacttcgatgccacgcacgccagcccatcagttcgagttgttctccgctccgcagggaaaggagaagttgagcttgccgcagtggcaggcgctgcccgagggaatacgccagacgctgtccgaactgatggcgcaactgttgctcgaccacgtcgccgacgaaagcgcgcctctcccgggggagatgcggcatgatgcatgagaagatcaggccacatcatctggagcgcaaggcggtcctctacgtgcgg

SEQ ID NO: 25484 - DNA, 260 bp, Unknown
  Description of Unknown: LeftRegion for integrase A1052 sequence
ccgcgtgaaggaggggatcatgcaaccaagacgccacttgcaacggggcctgttcgaggaggatcgccagacgccggagattccggcgtcgcagagaagcactctcgtccgcctgatcgaggggctgctggtcgaggccctcgccgacggcgccaatatcgagacgggcacgccaaccacagagacgagggaggccgctgatgagcaagatcacgcctgagcacctcgcccgtcaggccgtcgtctacatccgtcagtcg

SEQ ID NO: 25485 - DNA, 260 bp, Unknown
  Description of Unknown: LeftRegion for integrase A1053 sequence
catgagccatcatgtacccggacatcgccgacggttgacgacatcggcatcacttcagccatctcccccacgccagctgagcctgaccctcgagtccccggtccttcgggacatggcctcgagcgaacgggccgccgtggtcgcacggctggcaacgctgctgctgcaggcagccggccttcaaaccgaaaggagtgatcatgacgacctctgatctgttgccggccgcagtgctgcgtcgcaaagctgtcgtctatgtg

SEQ ID NO: 25486 - DNA, 260 bp, Unknown
  Description of Unknown: LeftRegion for integrase A1054 sequence
tgccgcggcatgaccatgggaacgccacgcgtcgatcttgcgacgctaatcgaattgaacaggctggtctctggcggcagcaaagcggcacccttccgaagtggacgtagaatcactcaggaggaccatgatgagatctcgcaatacgctggtgccggcgtcgggccggcagctcgacctgatattcgaggagctcaacgatgaccatcactgatttgattccgacagcgctgctcgcgcgcaaggccgtcgtttatgtg

SEQ ID NO: 25487 - DNA, 260 bp, Unknown; identical to SEQ ID NO: 25486
  Description of Unknown: LeftRegion for integrase A1055 sequence

SEQ ID NO: 25488 - DNA, 260 bp, Unknown
  Description of Unknown: LeftRegion for integrase A1056 sequence
cgaggtgaacatagaatcactcaggagcaagatgatgagatcccgcaacacgctggtgccggcgtcgggccggcagctcgacctgatattcaaaacccgcacgctcgacggactgagcgacaaggatcgcaagaaggcaatatcaacactggcttgcctgctgatgcaggcggccggtctggccgtcgaggagctcaacgatgaccagcactgatctgattccgacagtgctgcttgaacgcaaggccgtcgtttacgtt

SEQ ID NO: 25489 - DNA, 260 bp, Unknown
  Description of Unknown: LeftRegion for integrase A1057 sequence
cgaagtggacgtagaatcactcaggaggaccatgatgagatcccgcaatacgctggtgccggcgtcgggccggcagctcgacctgatattcaaattccggatgctcgacggactgagcgacaaggatcgcaagaaggcgatttcaacgctggcttgcctgctgatgcaggccgcaggcctcgtcgtcgaggagctcatcgatgagcagcactgatttgattccgacagcgctgctcgcgcgcaaagccatagtctacgtg

SEQ ID NO: 25490 - DNA, 260 bp, Unknown
  Description of Unknown: LeftRegion for integrase A1058 sequence
cgaggtgaacatagaatcactcaggaggaagatgatgagatcccgcaacacgctggtgccggcgtcgggccggcagctcgacctgatattcaaaacccgcacgctcgacggactgagcgacaaggatcgcaagaaggcgatatcaacactggcttgcctgctgatgcaggcggccggtctggccgtcgaggagctcaacgatgatcagcactgatctgattccgacagtgctgcttgaacgcaaggccgtcgtttacgtt

SEQ ID NO: 25491 - DNA, 260 bp, Unknown
  Description of Unknown: LeftRegion for integrase A1059 sequence
cgaggtggacgtagaatcactcaggaggaagacgatgagatcccgcaatacgctggtgccggcgtcacgccggcagctcgacctgatattcaaacctcggacgctcgacggagtgagcgacaaggaccgcaagaaggcggtagcaactctggcttgcctgctgatgcaggcggccggtctggtcgtcgaggagctcaacgatgaccagcactgatttgattccgacagcgctgctcgcgcgcaaggccgtcgtttatgtg

SEQ ID NO: 25492 - DNA, 260 bp, Unknown
  Description of Unknown: LeftRegion for integrase A1060 sequence
ctacgttttctgcagagcgactcacgccagccaggagacgaccatgcagcgcaggcaatgccgaaccgaccagccagacctgttttccacgacggctccaacgccgagccttccgggcgaagtgcgggaacgaaccctcccgctgatagaagccttgttgagggaagcggtggtgagccagacgggacgggaggcagatcatgaagatcaccgctgaacatctcgcgcgcggcgcctatgtctatgtccggcagtcgacg

SEQ ID NO: 25493 - DNA, 260 bp, Unknown; identical to SEQ ID NO: 25481
  Description of Unknown: LeftRegion for integrase A1061 sequence

SEQ ID NO: 25494 - DNA, 260 bp, Unknown
  Description of Unknown: LeftRegion for integrase A1062 sequence
ggactcacggccatccaggaggcgcgccatgaaggcactaccacgaccctcgtcgctatcgatgctgacccagcagctgagcatgccgctcgatacgccgcagatgcgaggcctgagcgaggcgcagcgaagcgccgttgttgccaggctggcgaccctcttgatggccgcagccggcgtcgcggcgaaggaggccagcgatgacgggcaatgatctccttccagtcacggtgctcaagcgcaaagctgtggtgtatgtc

SEQ ID NO: 25495 - DNA, 260 bp, Unknown; identical to SEQ ID NO: 25486
  Description of Unknown: LeftRegion for integrase A1063 sequence

SEQ ID NO: 25496 - DNA, 260 bp, Unknown
  Description of Unknown: LeftRegion for integrase A1064 sequence
ggtctcacccccatccaggaggcgccctgtgaaggcattaccaccaccctcgacgttaccgatgctggcccgtcagttgagcatgccgctcgatatgccgcagattcggggcctgaccgacgcggaacgcagcacggttgtcgccaagttggcgaccctcctgatggcggcggccggcgtcgcggcgaaggagccgagcgatgacgggcaataatctcattccggccacggtgcttaatcgcaaagctgtcgtctacgtt

SEQ ID NO: 25497 - DNA, 260 bp, Unknown
  Description of Unknown: LeftRegion for integrase A1065 sequence
ggtctcacccccatccaggaggcgccctgtgaaggcattaccaccaccctcgacgttaccgatgctggcccgtcagttgagcatgccgctcgatatgccgcagattcggggcctgaccgacgcggaacgcagcacggtcgtcgccaagttggcgaccctcctaatggcggcggccggcgtcgcggcgaaggagccgagcgatgacgggcaataatctcattccggccacggtgcttaatcgcaaagctgtcgtctacgtt

SEQ ID NO: 25498 - DNA, 260 bp, Unknown
  Description of Unknown: LeftRegion for integrase A1066 sequence
cgacgagccttgctccacggccgtcgtgtgagccgccgtgcaagctgacacgtgaggcactggaggaactgatcgccctggccgacgagtgcggggtggcgccatgcccatgcgacccgaacgcgtctggagacgcttgcccgacgaactccgcgccgcgatcgccgaagacgtcgccgccatcctcacagaggtgatctatgagatcggaacttatcaccgaccggcatctggcccgccacgcggtcatctacatccgc

SEQ ID NO: 25499 - DNA, 260 bp, Unknown
  Description of Unknown: LeftRegion for integrase A1067 sequence
ggactcaccgccatccaggaggcgccctatgaaggcattaccaccaccctcgacgttaccgatgctgacccgtcagttgagcatgccgctcgatatgccacagattcggggcctgaccgacgcggaacgaagcacggtcgtcgccaggttggcgaccctcctgatggcggcggccggcgccgtggagaaggagccgagcgatgacgggcaataatctcattccggccacggtgcttaatcgcaaagctgtcgtctacgtt

SEQ ID NO: 25500 - DNA, 260 bp, Unknown
  Description of Unknown: LeftRegion for integrase A1068 sequence
gatagcaacgtcgtccaggaggaccgtcatgaggaagtcattcgacctgatcttaacgccccgcccgccgcgccagctctgcattctactggacccgcccgagttgaaggggatcaaggccaccgaacgaagcgcggtcaccataaggttggcgcggcttctcatggaagccgccggcgcgataacggtggagaacggcaatgactgacgtcgatattttgccgccttcaatattaaagcgcaaggccgtggtttatgtt

SEQ ID NO: 25501 - DNA, 260 bp, Unknown
  Description of Unknown: LeftRegion for integrase A1069 sequence
cggagagatgtccatgccacgccagttcatgacatatcagttcgatctgttctcgggtctacacagcgggaggacagcggcgatgccgcaatggcaggagttgccggaagggacgcgccaggccctgacggcgctcatggtgcgcctgctcatcgaccacgcaaacggcggacgcgcctctcaacggaaggaggccggtcatgatgcatgagaagatcgggccacaccatctggagcgcaaggccatcctgtacgtccga

SEQ ID NO: 25502 - DNA, 260 bp, Unknown
  Description of Unknown: LeftRegion for integrase A1070 sequence
cggagagatgttcatgcctcgccagcccatgacatgccagttcgatctgttctcggccccgcagcgggggaagacggcagggacgccgcaatggtcggagttgccggaggagacccgccaagcgttgacggtgctcatcgtgcggctgttcgtcgatcacgcaaagtgcggacatgcctcccaacagaaggaggccggtcatgatgcatgagaagatcgggccgcatcatctggagcggaaggccatcctctatgttcgg

SEQ ID NO: 25503 - DNA, 260 bp, Unknown
  Description of Unknown: LeftRegion for integrase A1071 sequence
cggagagatgttcatgcctcgccagcccatgacatgccagttcgatctgttctcggccccgcagcgggggaagacggcagggacgccgcaatggccggagttgccggaggagacccgccaagcgttgacggtgctcatcgtgcggctgttcgtcgatcacgcaaagtgcggacatgcctgccaacagaaggaggccggtcatgatgcatgagaagatcgcgccgcatcatctggagcggaaggccatcctctatgttcgg

SEQ ID NO: 25504 - DNA, 260 bp, Unknown
  Description of Unknown: LeftRegion for integrase A1072 sequence
cggagagatgttcatgcctcgccagcccatgacatgccagttcgatctgttctcggccccgcagcgggggaagacggcagggacgccgcaatggccggagttgccggaggagacccgccaagcgttgacggtgctcatcgtgcgactgttcgtcgatcacgcaaagtgcggacatgcctcccaacagaaggaggccagtcatgatgcatgagaagatcgggccgcatcatctggcgcggaaggccatcctctatgttcgg

SEQ ID NO: 25505 - DNA, 260 bp, Unknown
  Description of Unknown: LeftRegion for integrase A1073 sequence
cggggagatgtccatgccacgccagtttacgacatatcagttcgatctgttctcgagtgcccacagcgggaagacgccagcgatgccgcaatggcagacgttgccggaaggaacacaacaggcgttgacggcgctcatcgtgcggctgctcgtcgaccactcaaacggcgagagcgcctcccagtcgaaggaggccaatcatgatgcatgagaagatcagcgcccaccatcttgaacgcaaggccattctgtacgtccga

SEQ ID NO: 25506 - DNA, 260 bp, Unknown; identical to SEQ ID NO: 24281
  Description of Unknown: LeftRegion for integrase A1074 sequence

SEQ ID NO: 25507 - DNA, 260 bp, Unknown; identical to SEQ ID NO: 24284
  Description of Unknown: LeftRegion for integrase A1075 sequence

SEQ ID NO: 25508 - DNA, 260 bp, Unknown
  Description of Unknown: LeftRegion for integrase A1076 sequence
cggagagatgttcatgcctcgccagcccatgacatgccagttcgatctgttctcggccccgcagcgggggaagacggcagggacgccgcaatggccggagttgccggacgagacccgccaagcattgacggtgcttaacgtgcggctgttcgtcgatcacgcaaagtgcggacatgcctcccaacagaaggaggccagtcatgatgcatgagaagatcgggccgcatcatctggcgcggaaggccatcctctatgttcgg

SEQ ID NO: 25509 - DNA, 260 bp, Unknown
  Description of Unknown: LeftRegion for integrase A1077 sequence
cggagagatgtccatgcctcgccagtccatgacataccagttcgatctgttctcggccccgcagcgcgggaagacggcagggacgccgcaatggccggagttgccggaggagacccgccaaacgctgacggtgctcatcgtgcggctgttcgtcgatcacgcaaactgcgggcgcgtctcccagcagaaggagaccggtcatgatgcatgagaagatcggaccgcaccatctcgagcggaaggccatcctctatgttcgg

SEQ ID NO: 25510 - DNA, 260 bp, Unknown
  Description of Unknown: LeftRegion for integrase A1078 sequence
cggagagatgccgatgcctcgccagcctacagcctaccagttcgacctgtttctaattccaagcgaaggacagacagcgcccgtgccgccgtggcagaccttgccgcacgaggcacgccggaagctgaagcaactgatggcgcgcttgatcctcgatcacgtcgcgggagaaccgacaaactcaaaggagggcgcggatcatgatgcatgaaaagatcaggccgcatcatctcgagcgcaaggcaatcctgtatgtcagg

SEQ ID NO: 25511 - DNA, 260 bp, Unknown
  Description of Unknown: LeftRegion for integrase A1079 sequence
gctgccttgtcgttgctccgcgagcgagacaacggagggcggcatgagacaccccaaagcgaccgtgcaaccggacttgtttgcgccgacgcggccggaggccgcccttccgctggaggtggcgcaacggctcctgccgcttctggaacagctcctgctggaggtgctggcgagcgaaaccctggtgacggaggcgggcgatgagcaagatcacccctgaccacctcgcgcgtcatgcctacgtctacgtccgccagtcc

SEQ ID NO: 25512 - DNA, 260 bp, Unknown; identical to SEQ ID NO: 24284
  Description of Unknown: LeftRegion for integrase A1080 sequence

SEQ ID NO: 25513 - DNA, 260 bp, Unknown
  Description of Unknown: LeftRegion for integrase A1081 sequence
ggcttgcgcgaggcgcatgggcgccatcgtctttcacggactgtggcgcggcctggcagtgctcatcgcaccacatcaatccgcgatagcgcgacagcagtcgacgcctcggctcaagacaacttcactggtcgcgcacgatcgccagctcgtgcacatgctcgccaatatggtgctggcagcagagacaggaggaagccatgtctactgataatgccatgaagattagcgccgatcacctgcggcgcgatgcgtttctc

SEQ ID NO: 25514 - DNA, 260 bp, Unknown
  Description of Unknown: LeftRegion for integrase A1082 sequence
agtatttcggctgaccgccccgcgatctccgcctcggcgccgtccataaagcaagggcctcatcactcacccacacggtcaaatcaccacgttgacgcaggctttcattataggccgcccaattcgtcaccttaaacttctgcttggctatcttgtcccgtcggtcggcattgaacttatgcggcatcatcaaaaccccgatcaggagactgaaaaccaaagcccaatatcagtcgccgggtgatccgcgcaacaacgcc

SEQ ID NO: 25515 - DNA, 260 bp, Unknown
  Description of Unknown: LeftRegion for integrase A1083 sequence
gatgacgcaactgttatcgaggaggcatgtgatgaaagcgcgacagcaccacgccatcgtaaaacaaccctgccagctcagcatgacgttggaaacgcccgagctgacgcggatgagcgccgtggaacgacaagcaatgattttgcgccttgcgcaattgatcctgcaggcgggcgggacgacgatcacggaggacagcgatgacgcacgttgatcttcccgcatcgcttttgaagcgtaaggccgtggtttatgtccgt

SEQ ID NO: 25516 - DNA, 260 bp, Unknown
  Description of Unknown: LeftRegion for integrase A1084 sequence
cgcgtcagtagcaatctgaccgcacgggaatgggattgtctgctttgggcgggcgagggaaagacgaactgggaaacttcggcgattcttggaatctcaagatcaaccgtgaccaagcatatcatggcggcgcgcgcgaagcttggtgcagtcagcaaagctcatgccattgccacggcgattcggacgaagctccttcgctgaaagcgttaggtcaggccatcgtctacattcgtcagtcgaccgccggccagctcgcc

SEQ ID NO: 25517 - DNA, 260 bp, Unknown
  Description of Unknown: LeftRegion for integrase A1085 sequence
cgtaacaaccacactaaacaaaacatggatatttgtgtcccccctcctcgcagaggggggatttttttaactatacacatcatcgcgatgcaacactatactgtaatcggcaaaaaagatgaaccattaaacataaaaatattctcataataacgctgtcacaaagccgtgctatacttattctgaaaggagttgatagcatggctgaaataactataatacagccaagagaacagccccgcagaaaacttcgctgcggg

SEQ ID NO: 25518 - DNA, 260 bp, Unknown; identical to SEQ ID NO: 25481
  Description of Unknown: LeftRegion for integrase A1086 sequence

SEQ ID NO: 25519 - DNA, 260 bp, Unknown
  Description of Unknown: LeftRegion for integrase A1087 sequence
agagggcgcctgagaggctggcgagcgtggtgtaaagcgctgatgcggcgtaggattcggttgtgaagccaaccccatcacctcaaccgcgaacgccacgcccgccatgaccgacgatacgattccgcccttctcgtttccagggtactgtccagaatctttcgcacttttgatcaggcgacggctccggtttcagagagttgtggctgatagagcggtcgcatgttcatgtagcatttggtcgcgtccaggtgattgac

SEQ ID NO: 25520 - DNA, 260 bp, Unknown; identical to SEQ ID NO: 25469
  Description of Unknown: LeftRegion for integrase A1088 sequence

SEQ ID NO: 25521 - DNA, 260 bp, Unknown
  Description of Unknown: LeftRegion for integrase A1089 sequence
gcgacgacgcggaccaccaccggccagcagtgggacgaaccgaacggctgggcgccgctgcagtacctcgcggtgatggggctgcgccgctatagcgagccggagctcgcgcgcgatatcgcgacccgctggattcgcaccgacgttgcgtactatcagcgcaccggcgagctcgttggacctcaaagtataatagatgaatgcccgcagggctccgtccagcaagggcttcagccgaatggaagcgaaggctcgaccgc

SEQ ID NO: 25522 - DNA, 260 bp, Unknown
  Description of Unknown: LeftRegion for integrase A1090 sequence
aacaacgtgacatcgccctcgccagcccatgacatgccagttcgatctgttctccgccccgcagcgggggaagacggcagggacgccgcaatggccggagttgccggaggagacccgccaagcgttgacggtgctcatcgtgcggctgttcgtcgatcacgcaaagtgcggacatgcctcccaacagaaggaggccggtcatgatgcatgagaagatcggaccacaccatctcgagcggaaggccatcctctatgttcgg

SEQ ID NO: 25523 - DNA, 260 bp, Unknown
  Description of Unknown: LeftRegion for integrase A1091 sequence
caactcaaataacagcaactgcgggaataggaacaaatctttacttagcaaaaattgcaatggatatattagccaaaaaacaaaatattaataaagatggatttgcatagggtgttgtatgctctaaaagacttcttaatcaagcggttgagaagtctcttagaacacacaacctaaaaccgaagaaaggagcgcaagttatgagaaaaaacgagaaaataacagctctgtacgaacgactgagccgtgatgactttggc

SEQ ID NO: 25524 - DNA, 260 bp, Unknown; identical to SEQ ID NO: 25523
  Description of Unknown: LeftRegion for integrase A1092 sequence

SEQ ID NO: 25525 - DNA, 260 bp, Unknown; identical to SEQ ID NO: 25433
  Description of Unknown: LeftRegion for integrase A1093 sequence

SEQ ID NO: 25526 - DNA, 260 bp, Unknown
  Description of Unknown: LeftRegion for integrase A1094 sequence
ctggcggtggcaacaaaataggtggtgtagatcaacatcagttcgtgtgaaagcgccataatttcctctgtggctgattaagtcccgatttagggttatatcgttgaacgcgacatttttctatgccagatctgttaattaggtgttaattcgctatgctgtggctccacttaaccggggtgtaacgcaggagaagggctgtgaatctgagccagcgcgaacatatcgccaatgtggttgccagcgtcgagcaggcggca

SEQ ID NO: 25527 - DNA, 260 bp, Unknown
  Description of Unknown: LeftRegion for integrase A1095 sequence
ctgccatgcatagcgccggcgcaattcccatgcccgcagggctgaaattctacacgaaaacggtcaaaagtggccgtcgagggaagcaaccgcacgttgtctacctgctgatggacgacgatccgcccgtggacctgtcagaggtcgaaatgtttgcagacttgatgaaccgcaagtcggcggcttcgtaggaggaacaaatggtagtcaaaccccgtccgtccctctccaagccgcggtgcgtcatctacgctcgtgta

SEQ ID NO: 25528 - DNA, 260 bp, Unknown
  Description of Unknown: LeftRegion for integrase A1096 sequence
ggtaaaaatgcaagcaataaagatttatagcatgagagttgctatgttatgtaggctttatgatcttaaattaattaatgagaaggaatatacaaaaattaagaacaggttagaaaatgattataagaagagagatagaaagtagttaatcttgtgatataataacactgtagaaagatacaaaatgggaaggaggtaaaatgaatactaaagtaaaattaataaaagcttcaaatttaggagcaagaaatagaaatgca

SEQ ID NO: 25529 - DNA, 260 bp, Unknown
  Description of Unknown: LeftRegion for integrase A1097 sequence
ggctaccgcctcgtctatcaggtcgtggaacagcggatcgtcatttttgtcatcgcggtcggacgccgtgaggacagcgaaatctacacgacggcaaccgggcgcatcccggagacgccagccgaccggataaaacagcccagcggcaaaagtcgcaaaaggtaaagcttacgaaaaaccacctgtggggaaaagccgccatgacccgtgtcgcactctatgctcgctattcctcggacaaccagcgggcggcttctatc

SEQ ID NO: 25530 - DNA, 260 bp, Unknown
  Description of Unknown: LeftRegion for integrase A1098 sequence
gaacgaaccaggccgatgaaggacgaggaccgcaatggccaagctttgcaaaaggcgccatcctctgcgccttgaggtcggcttcgaggtcagacggggcagtcaagaagtcctgggacgcgcctacgagcgcctcctgcccctgcgcacctgttccctgccatcacgggcgcaggccgccatgtccaagggagcgtacgatgagaactccgcacctgagagccgtttcggcaccgcagaccctgcaggtcgccctttac

SEQ ID NO: 25531 - DNA, 260 bp, Unknown
  Description of Unknown: LeftRegion for integrase A1099 sequence
ggaggcgccgatgacccggcagacgcgtcatccgctcctgcaggtgcaggagtccttcgagatcacgcggttcagccccgaatgcctgatcgaggcctaccgccgcgtcgtacccatccaaaccaaagccatccggagagccgccgaacaccgccgatcccaaactcccgtccacaccacccgaagtcagggaggtaagcatgtctgatcgccgcattgccctttacgcgcgggtctccaccgaacagcaggcccgggat

SEQ ID NO: 25532 - DNA, 260 bp, Unknown
  Description of Unknown: LeftRegion for integrase A1100 sequence
tctccgggctgggggggccggggaggggaagcggtaagagcgacaacgatgaggcatggcgctgctgcaggaacttgtcggagccgtgccgggaagatccgcggatgtcgaacactccgcacccgttgcttgccggaccagatgcaaatgatgatcatgggtccgaagagcgaaccggatccagacgaaggagcctcgccatgagcaagggcaatcgcgtggcgatctacgcccgcttctcgaccgacctgcagcgggag

SEQ ID NO: 25533 - DNA, 260 bp, Unknown
  Description of Unknown: LeftRegion for integrase A1101 sequence
gagatgcttacatgtactatatataattttttattctctaataaagctataaaaccatatataatttttatttaccgacaaaaacttatataataaatacaaagcatagaaggaggacgaaaacatgctcatcaataaagaatacataaaagcatcattatctatcctaaacaaatataacgaaacgagggagcaataatatgcctgataacagaaaatacgcaatttacagccgcaaatccaaatttaccggcaaaggt

SEQ ID NO: 25534 - DNA, 260 bp, Unknown
  Description of Unknown: LeftRegion for integrase A1102 sequence
cgatcctgcggtttctgtcgacgagatctgggaagatgtttaccgcatcgcccgcaagattatccgggtcaagcgccgccgtgaagccgaagccgctgcacaggctgccaacaccccctgatcgtcatccgccctttccccgttgcccgtcaaccggttaaatgtcgtgtatacatacgacacagaccggaggaaacgtcatgctggtcgccatttacgcgcgccacagcaccgacaaacaggacacatccagcgccgat

SEQ ID NO: 25535 - DNA, 260 bp, Unknown
  Description of Unknown: LeftRegion for integrase A1103 sequence
cgatcctgcggtttctgtcgacgagatctggggagatgtttaccgcatcgcccgcaagattatccgggtcaagcgccgccgtgaagccgaagccgctgcacaggctgccaacaccccctgatcgtcatccgccctttccccgttgcccgtcaaccggttaaatgtcgtgtatacatacgacacagaccggaggaaacgtcatgctggtcgccatttacgcgcgccacagcaccgacaaacaggacacatccagcgccgat

SEQ ID NO: 25536 - DNA, 260 bp, Unknown
  Description of Unknown: LeftRegion for integrase A1104 sequence
cgagcgcgaagcgctgctcgaatctttgctgctggacgagccggagttgacgtttacgccgcgcggcattcccgaccctcgccttctgcgtctggtcggcatcctggcaaagcaggcggcacgggaatgctttgcagaggaagtgacgttatccaggcaaaggaggaagcgcacctcctgatgcggataggagccatgttttgaaagtcgcgatctacgcccgttattcttccgacaatcaacgcgacgcttccatcgcc

SEQ ID NO: 25537 - DNA, 260 bp, Unknown
  Description of Unknown: LeftRegion for integrase A1105 sequence
taacttaaagtttcaacaacaaaaggcaatcattgatgaacttaaaaaggcaagtttgattaccaatgaagaatggtatctttgcctaacaaaactactaaagataaataatgaaaaaagcaacaaatagcacggtattgacttgctatttattgctttttgagtgatgtatatagtaactaattataggaggtacaagaatgcaggaaaaacgagttatagttattgaaccaactcaagtaatccatgaagatataaac

SEQ ID NO: 25538 - DNA, 260 bp, Unknown
  Description of Unknown: LeftRegion for integrase A1106 sequence
atccgcgacttcgtccgcgcgatgtgggactggtttgtggcgcagacccgcacgcgctgcattctcacgggtgaagcggcgacgcagctcccgagcggccgagtcgtgggccgcgcgggcgagaagctgctcaagcgcgaccccgcggcgttccaagcacaagtctacggccccgaagccgcctgacaggagacccatccatgtcgctgccgtcccacggcttcaccatcctgcgcaacgcgcccgacagcgcccgcgga

SEQ ID NO: 25539 - DNA, 260 bp, Unknown
  Description of Unknown: LeftRegion for integrase A1107 sequence
cgacacagacgcgatggtgcattgctgcgcgaaaccgccccagcggtaacgccggaggagcttcgcacagccatgcttaagtttgtcgaagcactcgccatcgccgatgccagaggcgatcatctcaaatccgtcggcgcttcggctgaccgaaatgctgccatggatgcagatcgctgcaacaagaaggcttccgatacatgaggcgggccgctgtctatgcacgcttttcgaccgagctgcagaacgaaaaatccact

SEQ ID NO: 25540 - DNA, 260 bp, Unknown
  Description of Unknown: LeftRegion for integrase A1108 sequence
aattgctcacagagagccgactaaagccaacggtagcacgccgcgacggttgatggatgacgatctccaagtcccgcccatcgacgttggccgaccgcagggcagtatagaagcgcgctccaattttgatcgtggcccaagattggcaagaatggtcaaatctgtagactgatcacaaagctcaattctggagactccgaatgccccgtgtagctctgtatgcccgctattccgacgacaagcagagccctgcatccatc

SEQ ID NO: 25541 - DNA, 260 bp, Unknown
  Description of Unknown: LeftRegion for integrase A1109 sequence
tggtgctttagatttagataatctgcccgatccaacgccagcaaaaaatcaagagatgaaaaatagttttgacatggcaaaaacacaaattgagacggactaataaaagtgttataatatacttgaaatgatagtccaaacttaaattcaaaaatcaaagtttatatatgatatagaaaaattataatgaggttaatgctatgttaaaagaaaaaataaaagtatacctctatacacgagtatctacgtcaatacagata

SEQ ID NO: 25542 - DNA, 260 bp, Unknown; identical to SEQ ID NO: 25530
  Description of Unknown: LeftRegion for integrase A1110 sequence

SEQ ID NO: 25543 - DNA, 260 bp, Unknown
  Description of Unknown: LeftRegion for integrase A1111 sequence
gaccgagacgtacaacagccgaacggcttcttgtggtcgccgacgcgacccgcgaaccggttgcgcttgcgtcatcaaaacccgatccacgcctcgtcaatctggtccgactgctggcgcgacaggccgcgcgggacttcgttcgagccgaaactgatagccggacgcgagaccaccttccggagtaaggaggtcgcctcgtgaaggtcgcgctctacgcccgctactcatcagacaatcagcgagacgcttcaatcgag

SEQ ID NO: 25544 - DNA, 260 bp, Unknown
  Description of Unknown: LeftRegion for integrase A1112 sequence
ggtgaatcaaaaccaaacttgattcaatttagaggcgcgataggaagggcttaccataaaatttatgaacaaattatgccatataaagatgaactggattttcttggtgtaattaaaaattagggtcgtgaaattaaagttttgtattggtttacgaattaacaagcataagttaaaatattagttagagaggagaacttatgctttgttattcttatgtcagattcagtacaccagaccaagctaaaggtgatagttat

SEQ ID NO: 25545 - DNA, 260 bp, Unknown
  Description of Unknown: LeftRegion for integrase A1113 sequence
actcgtcggcacggtgcggaacgtcgggggcccggcaacagcagcatggagaactgctgttgccgggcccgggtctgagtagttgcggtacaggatgtagcgctgagattgatcatggtcgctatcacagcgaacggctccggtggggagcttccgggaaagatcgttgagcgggtgcgggggctggctacggtccggctgtgccggtggaatttctgactgacgagcaagccgctgcctacgggacgttcggtgaggtg

SEQ ID NO: 25546 - DNA, 260 bp, Unknown
  Description of Unknown: LeftRegion for integrase A1114 sequence
atgggaacttataagtttataatcgcactcagcccttcagaagtacttctcttgataagtgatactcctatgacaaaaaagagtatcaaaaacgaactagatgtatataaggctatgccatccatttatacggacaaagtaaaaagcatgaacgagaaatatgacataacatatcatgtggtagatttgagggaacaagaatgaatgcagtagagataattgatttcaataaacttgagtcaaaagatagattaaagaat

SEQ ID NO: 25547 - DNA, 260 bp, Unknown
  Description of Unknown: LeftRegion for integrase A1115 sequence
ctggaggaactggcggaaatcaccggccgggccggctccaatctgtcacgcaccctgaaaaccatggagaactacggtcttgtgcgactcgaaccggggcatgggcgtaagctcgcgcccaaggtggtgcatgaccgcgtggagctggcgttgcccctgatcgaccaccccaagatgaagaaagctatgggaggccgaccatgaacattcacagcccaaccactaccgcccgcgccgcgctctacctgcgcgtttcgact

SEQ ID NO: 25548 - DNA, 260 bp, Unknown
  Description of Unknown: LeftRegion for integrase A1116 sequence
acccggtctattaaagacaaggcctaatttaatctaagatttcataacacatataccgaaatctaaaaactagatagatctatattcaaagaatacaaatctttcatattattttgttgttttcgtattcaatgttagatagaatgtttttacagatacttctgttttgacattaaacacaataaagaggtgctaaatttttggagttaaaaaatattgtcaattcttacaacatcacaaatattttaggttatcttaga

SEQ ID NO: 25549 - DNA, 260 bp, Unknown
  Description of Unknown: LeftRegion for integrase A1117 sequence
aagtacaactgctgcacttataatcgcataccttatataacagaggaacttgtgcatattattcaaggctttacgccctcggaagagatcaacaagcaaatgctcacaaagactgttgagaagataacatttgataaaaacaaagtgataaccgttactttcaaaaacggcagaaaaatagcggcaaaggagggagaaatatgtcaagaccgatagaagcggcttcaaacgtcaagataattcctgcaatgtcctcggag

SEQ ID NO: 25550 - DNA, 260 bp, Unknown
  Description of Unknown: LeftRegion for integrase A1118 sequence
gaaatacaacgcctgcacatacagcagagagccgtatatcacgcaggagcttcaagacctgattgcaggacatgagccttccgaaacgattgatacggagcttttattgcagatcgtaagcagaataaccgttgatgaaaacaaggttatagcgatagagttcagaaacggaaagcgcatcgcatacaaggaggttaacaatgccgaagaataacgatatggcttccaatgttacgatgatacctgccctctcgcctgcc

SEQ ID NO: 25551 - DNA, 260 bp, Unknown
  Description of Unknown: LeftRegion for integrase A1119 sequence
agacataagcagtgaatgcgggaacgatcgccacgtatcgtccaaagatcacgcgacgccgttcgaactttctctgatacgtttcgtcgaagcccttgcgatcgcggacgcgaggcgcgatcatctcgcttcaagcgctccgttcatcccacaggcaactcccgagcggacgcggacattgcaggcgggagcgtcgacccatgactcgcgcggtcatctacgcaagattctcgactgaactccagagcgagaaatcgact

SEQ ID NO: 25552 - DNA, 260 bp, Unknown
  Description of Unknown: LeftRegion for integrase A1120 sequence
agaggaagggggagtgcttatgcaaatagggcggcctgtaccaaggataagggttattcctgtggggaatgttgccgatcacagaagggcctatgcccgggtggttgatattatacgccaggcctgccctgacaggcaggaaaacccgcaagggatgttgaaggaagtaaacatgaatcctgctatggggaagaagaaagatgaaggccgtgatttacgctagggtaagcacccaggaccaggcccttggtttttccctg

SEQ ID NO: 25553 - DNA, 260 bp, Unknown
  Description of Unknown: LeftRegion for integrase A1121 sequence
atttataacggaagaagaatttatcaaaatagatgatgaaaataaaaagacttttaatagatagattatgggcttgagctatagtagttcaagcctataattttttagatttttttatatgttcttacaagctaattaacttgctatgaggctggagtagaggtaacatgtgactaccttgaaagggaggagggtttatattgaagaaaataactgctattgcagcaaagaataaagtggatattcatgaaactgcatta

SEQ ID NO: 25554 - DNA, 260 bp, Unknown
  Description of Unknown: LeftRegion for integrase A1122 sequence
ttactcaacatgatttggctgaaaaaataggcataagtgcttcatatttaagcgagttagaacatgggacaaagtatccaaattcatttatgattatgaatatagcttgcgcactagatgtatgtccaaaatgtcttatagaatgcacaaaagaatgtaaagaaagaaatttagaaaaatgtaattattaggaggaagatatgaacattgctatatacagcagaaaatcagtttttaaagaagccggagattctgtacaa

SEQ ID NO: 25555 - DNA, 260 bp, Unknown
  Description of Unknown: LeftRegion for integrase A1123 sequence
aattttagaacaaaaaggtaaaagtgtatattggctaaaaaatcaaacaaatataagtcattctacaatttataaaatggttaataatgaaactaaaatgatttcatttgaaaatcttcataaaatttgtaaagctttgaaatgtacacctaatgatgtatttgtatttaatgatatagaaaaggagattaacattaaaaatgaaagtagcaatttatagtcgtaaatcaatgtttacgggtaaaggtgactctgtagaa

SEQ ID NO: 25556 - DNA, 260 bp, Unknown
  Description of Unknown: LeftRegion for integrase A1124 sequence
tagcttcttataatgcctacttaatgcatgttgatatctgttattcctacactattagcactagaaaagatagctttaaaagtgatgtataaataataactattttagtgtgctacaaatggtttacatgtagtagcacacttctggaaaacatgttatacaagtaattatgaaaggttaatggtaaaaatactaaatggatggcattcaatatgagaacagtaggttatgcgcgtgtcagtactgaggagcaaggaaga

SEQ ID NO: 25557 - DNA, 260 bp, Unknown
  Description of Unknown: LeftRegion for integrase A1125 sequence
gccattttccccctggcgcaggaggtctctgcggcgggagggcatgatgcgggagtggcgggtgtgccgggtgttccagccccatccggacggccagagataccgggaccgagcctatcagcagctcctatcctggaacgaggcggagccgctgtgcgccgccccggccggtcccgagcctcccaaggaggaggtcagccatgagggtcgctctttatgcgcgggtgtccactcaacgtcaggcccaggccgacggcgtt

SEQ ID NO: 25558 - DNA, 260 bp, Unknown
  Description of Unknown: LeftRegion for integrase A1126 sequence
ttgatgataacaaagataaaaactcaaaaaactaaaaatgcacccattccagtaagtgcatttttaatgaactaaaaacatataacgttgaaaccgcaacggcttcttttaaacatattataccacaattatattaaatttaaacttatttaaatttatttttataaattatagcatttctatagatgaggtgtatttttatgatagcagctatatactcaagaaaatcaaaattcaccggtaaaggtgatagcatagag

SEQ ID NO: 25559 - DNA, 260 bp, Unknown
  Description of Unknown: LeftRegion for integrase A1127 sequence
cttgtcctgtataggaaaaggcactaaaaaactaaaaaaatatcggttttacgatttaaagtgttgacaaatcgttcgagatgtgttatactattattatagaacgcatcttgacaattgaatacccaatgttggacaagcacaacgatttatctaccgatatttagaacaacatgatctgaaatcggaggtaatcgtaaatgaacacagtttatacattatacagagtatccaccaagcagcaggtcgataagaccaag

SEQ ID NO: 25560 - DNA, 260 bp, Unknown
  Description of Unknown: LeftRegion for integrase A1128 sequence
ataatacaaaattttatgtgatttcaaaatttataggagctgtaacacttcaacatcttataaagagattgataaaaaatgaggtaggacaggtcgttaaatgacactaaaacagtcaaataaatagctgaaacccctatgagggcgtggtataatggaatggatatgagttgtttgtttgctgtggaaaggagcttacattgttaaaacagcaagcaaataataaagaaaaagttgcattatactctcgcctttcacga

SEQ ID NO: 25561 - DNA, 260 bp, Unknown
  Description of Unknown: LeftRegion for integrase A1129 sequence
taaagaaataagaagagtaattgaaatgagagaaaccactcttacagagtttgatgataatatatttgaaaatttaatagaaaagatagtagctttaacaccaacacatttagaatttcatcttaagaatggaatgaaggttgaagaagaatttattaaaaagagaggagtcaacggacttcagtaaaggagagatttttatggctagggtttcagtaataccagcaaggcaagtggctgttataaatggagttcagagg

SEQ ID NO: 25562 - DNA, 260 bp, Unknown
  Description of Unknown: LeftRegion for integrase A1130 sequence
tcttgcagaggaaaaaatcggctgcattgagtacaacgtgaaaaccgagcagaccgcgcatatagaggacgctatcaagaattgtgtggagctgccggagtttctaatacaagcggtcaggcacatctatgtcacgcccgacagagtgcgtgttaagttcatcaacggaaagacggtcaaaagtgaaaggagcaccaaccatgagtaatataaagacagcggcaaacgtgacacttatccctgcaaaggagcaggcaaac

SEQ ID NO: 25563 - DNA, 260 bp, Unknown
  Description of Unknown: LeftRegion for integrase A1131 sequence
gacacaagaaaacccaacccctattgttaatttgttattacagagccacttttggattgaccaaaggtggtttcttatttaaaatgtgatatacaagctttgcaattctgaaaatacagtgaatgaaaatccgcttgtttaatttgttaatacaatgggtatataaaatgtgttcaaattaactattaagaggtgaattcatgataggaggaatttatgccaggagttctttaggacaaaccaaacagggagatacagtt

SEQ ID NO: 25564 - DNA, 260 bp, Unknown
  Description of Unknown: LeftRegion for integrase A1132 sequence
aggtttactaatgaagaaatatattaagactactataagcagggataaattatatgatagaaactacagtagggacagtattgaagatgtaataatagatgaaaaagttaatagtagaataagatatgattctttagttaaggtattaacctctaagtatttagattctcaagaaaatggagtaaaaatatgaggagtgaatgctggtgataaaatctaaggttgttgaaattataagagcttgtgcatatattaggtat

SEQ ID NO: 25565 - DNA, 260 bp, Unknown
  Description of Unknown: LeftRegion for integrase A1133 sequence
gaatttgatgaggtgactttcaaccgccaaatagaggagattcagattcctgatgcgaacctgcttttatttgttttcaacgatgggcgcacagatctaagagaatggcagagcaaatcacgtagtgaaagttggaatgaggaagcaagggaaaaggccagaatgcgccagattgaatacttagaagggaggaagggagaatgcgtacggcacgtgcagtaagaatgatacctgcaacggcaaaacttcatgagcctgtt

SEQ ID NO: 25566 - DNA, 260 bp, Unknown
  Description of Unknown: LeftRegion for integrase A1134 sequence
ccaaaataatgaggatacattcaaatcaaaggtaaccaagataatcgttcaagaaaataggatgttagaatttcatatgaaagacgggaagatattaaactaccgatggaaacataagtctagaagtaagagttggacacctgaaatgaaagaacaagcacgattaagagcactagaacagcatcatggaggtggagaaaatgcctaaagtcacagtcataccatcaacaattaatcctattacacaaatgcctatccat

SEQ ID NO: 25567 - DNA, 260 bp, Unknown
  Description of Unknown: LeftRegion for integrase A1135 sequence
gggcgcgttgcgccgcgcctgctcgcggacctcgcccccgactacgcgacccgcgtcaccgtcgccgacgagaagaccggtcacggcatcacccgccacctccgccccacaacgagggccggccgagcccgcgccgccgaggactacccgttcatcgacctctccacagagggcaccggccgccagcccggtggcctgatgtggacactgagcgtagacatggaccacgacaactcgctgctgcggctattcgcggccga

SEQ ID NO: 25568 - DNA, 260 bp, Unknown; identical to SEQ ID NO: 25567
  Description of Unknown: LeftRegion for integrase A1136 sequence

SEQ ID NO: 25569 - DNA, 260 bp, Unknown
  Description of Unknown: LeftRegion for integrase A1137 sequence
ggcaacccctgtagggggcacaacctacgcgaaacactcctcgaacaagcctgcgcagacatgctcggcacccaaagtttcgaccccgtccaggttggcgagcagatcgtgatgattgaagccttcccgcaccagctcacattccacctcgcggatggaactatgacgccggtgggcttaaccagtgaggggaggttggcatgagtcgcacggtcactgcgatacccgcaacaaagaaacccggaactgtcacaaccccg

SEQ ID NO: 25570 - DNA, 260 bp, Unknown
  Description of Unknown: LeftRegion for integrase A1138 sequence
cggccatcacgtctgcataggcctggcgcccggccaacgcccctttccaagccggtaacttcttgccctttttcggcaacatctcccgttcctttcgcagctacactgctgatgagaacgtagaggcgagcagtcgtgggtttcgtgcggcagcggatggtcgccctggctgctgcagcaaacccatggagaggcgagccttggaggactggcgcactcaagacggcaccgaccatgacccggcatcgccgatcgtgcgc

SEQ ID NO: 25571 - DNA, 260 bp, Unknown
  Description of Unknown: LeftRegion for integrase A1139 sequence
cggccatcacgtccgcataggcctggcgcccagttaatgcccccttccaagccggtaacttcttgccctttttcggcaacatctcccgttcctttcgcagctacactgctgatgagaacgtagaggcgagcagtcgtgggtttcgtgctgcagcggatggtcgccctggctgctgcagcaagcccatggagaggcgagccttggaggactggcgcacccgagacggcaccgaccatgaaccggcatcgccgtgcgtgcgt

SEQ ID NO: 25572 - DNA, 260 bp, Unknown
  Description of Unknown: LeftRegion for integrase A1140 sequence
gaattaagtgatgtaaagcaattacgtgaaaagataagtaattaccaatcctctatctcattgtcctatgatgatataaaggagaatcgacagttaggttccttttttcaagatttaatacaacaagttaaaaccgacggaaagaactgcgaaattgtttttaaacacccattcttacgtactcaagaggtgttaacatcatgaagctttctcatatattacaaccaaatatgaaggctgctttttatggccgtcattct

SEQ ID NO: 25573 - DNA, 260 bp, Unknown
  Description of Unknown: LeftRegion for integrase A1141 sequence
attaaaaaaggttcctgatgtagtaaagaatttggaaggtaatatccataaacaattaatgttagattccttatcagattataagagtatggagttatttcaagatttgatttttactgtaattgtagatagacacggatatgaaattatttttaaacatccatttttacattatccagaggtgcatacatgtgaagacaattcgtgatgttttagaaaaaggaaaaaaaggagccttttatgcgagggtttcgtctgat

SEQ ID NO: 25574 - DNA, 260 bp, Unknown
  Description of Unknown: LeftRegion for integrase A1142 sequence
cctatcgatcgtcccgtggggccgcattgcggcggaacgggggcgccggcgctcacaaagtgagtcagcgtttaccgacagttgaaaggcttggtttccaaacagaaaagccgggcattcgacataaactggaggggtgttttgaaccaaaccacaggccgatgatcgttagcatgtcccgaatggcaggagcgcaagcgatggacgaggttgcaacgaccctaaaagctccttctggtaggcgcgtagtgcgtgcggcc

SEQ ID NO: 25575 - DNA, 260 bp, Unknown
  Description of Unknown: LeftRegion for integrase A1143 sequence
tagcgtcttcgcagctgattgcaaacagcctactcgatcgacgcgccatagcttcgctgctaccttggcagggcgaacacgaccgccgagcgccgacgcacgacctttccatcaggcccgcatcgaccgacggcgtcgcctgcgccaccggtgccttgccggtgaggcccgttggcccgttgacctggtggaggccgtacatgcaatcggacgtcccacgaaccgaagggcaggaggtgcccatccgcatgcgcgcggcc

SEQ ID NO: 25576 - DNA, 260 bp, Unknown
  Description of Unknown: LeftRegion for integrase A1144 sequence
atcgttcacctcacggtgctgaaatccacggaggggattcgcgcggaaagtttgtaaatagatgactcgtgccgcctaacgttacgcgctgctactctggttccgtcgcgaagcgctccgctccgtagggcgtcgattggcggttcgctcggacgagttctacggtacgcatgaagcgggtcatcggattggtggcaaaaatggcaggcgataccgaaccaacggtgtgcgaaggcggctcccatacgagagctgccgag

SEQ ID NO: 25577 - DNA, 260 bp, Unknown; identical to SEQ ID NO: 24325
  Description of Unknown: LeftRegion for integrase A1145 sequence

SEQ ID NO: 25578 - DNA, 260 bp, Unknown
  Description of Unknown: LeftRegion for integrase A1146 sequence
ttgaaagccatggtttccaaagcgcaaaggaaacgggcaaacccgctgatctcaacggccgataaagttgcgcacggatatatatttatatctggatgcggccgacggctcgcattcgaagcaaactcgacatgttttcctaaccaaatcgcaggcggtacaggcccctattatcaggtctgagtaccatggcccgcgcgatggacaaagcaaccacaccccccgagtttgaaaggcgaagggctcgcgctgctcaatac

SEQ ID NO: 25579 - DNA, 260 bp, Unknown
  Description of Unknown: LeftRegion for integrase A1147 sequence
ctcttcatcatcggcttcaatcgtcatgtcagaaacccggttataataccgggcgcccgctttcgtgaaccggctttcttaacgcgtgtgccaagataaaccccgtccttgcctgtaaggcactccttaacgataaaaatgcccggccagtaaaacggatggtgtgcccgccttcacataacctgagcgacacaggtggcatgctgtcgcgatatgaaggagggcatcatgataaagaagccatagcctatgtgagattc

SEQ ID NO: 25580 - DNA, 260 bp, Unknown; identical to SEQ ID NO: 24332
  Description of Unknown: LeftRegion for integrase A1148 sequence

SEQ ID NO: 25581 - DNA, 260 bp, Unknown
  Description of Unknown: LeftRegion for integrase A1149 sequence
tgccctcgccgaagtcgcttcgcagtgccgtcgctatggcagaagcaaaggccgcagcacctaagcgcccttcggttgaagaaggaaatccttttccgtttttggactgaatatttcggcccttgttcgtaggcgacatttcgtttcccctcgaattaatatcagaactcgggaaatgcctcaaaatagctgcgagatagatgaccggagctggcgatcagacacacaagactgaaaatgtgcgtgcggcacagtatgtc

SEQ ID NO: 25582 - DNA, 260 bp, Unknown
  Description of Unknown: LeftRegion for integrase A1150 sequence
taaagctgaagaagttagagataaacgtgcaaaggatttaggacgagtggtagagcttgccgctttcacctctccccctcccaaagaacgattcaaaatgaaaaaggcagataataagatgccagtggatccttttgaacgagcagaatacttatacagtctgatagaaagcgaggaataaagtgacagagaaaaatataatggttattcctgctcgtaaaagagtaggaagtacagccgcaaaagaaaagataaagaaa

SEQ ID NO: 25583 - DNA, 260 bp, Unknown
  Description of Unknown: LeftRegion for integrase A1151 sequence
tggcgggctccgaatttcagaggcctaagtttcgcttaaggggcgcctcgcacgatcaactcacagtcccggcgctggtagaggatgcttcggcagccagcccttgacgggtaggttcctcgatgccggtgactgtccaattctggccttcgcattggaaaaggcgcaccatcttcctaccgacacgctgggagcgcgagatggtcaagtcactcaagcctcagctcgacccggaaagggtcatacgagcagctgagtac

SEQ ID NO: 25584 - DNA, 260 bp, Unknown
  Description of Unknown: LeftRegion for integrase A1152 sequence
tttttgttcctctttttccattaatgcaagtggtgaatgaataatgacttttgtattaccaaattgaaattctttcatcatatccccccttgcattatatgtatgcaagacaggaaaaaagacgaactatcattttcataggacaagctagccatacatatctataacaataataatagacaagttggtaggtgaaactaatgtaccatccacaagaacttgatgtattcatctatttacgtaaaagtcgaaaagacctt

SEQ ID NO: 25585 - DNA, 260 bp, Unknown
  Description of Unknown: LeftRegion for integrase A1153 sequence
caccggcccgatgttgaccgccaccgacgtgatcatcgccggtttccatgagccggtgtttgcgccgcaggataaagcgtccaatactgaagcgatgatcgccgcaatggcgcagggggacgtgcatatcatcagccaccccggcaacccgaaaagaatttctgcgtattaaagtaactgattgattcttggagtgtttgatgaaattgtacagctatcagcggtggtcaagtgcagtacaggaggctggtactactaag

SEQ ID NO: 25586 - DNA, 260 bp, Unknown
  Description of Unknown: LeftRegion for integrase A1154 sequence
gcatcggacggcgaggagcatgaaagaaacgagtgcatttttatccagttgcagaatgggctgacatactgcactgacgaagattaaacggaattggtacggaacaggcgaattgcttgttccgtattcaaaaagcaacaggtcatctaaaccgtaaatatgtatcaaaatctgaacagtaaaaacaggagctgatgtttatgaagaaaatgacagtgatccctgccgtgtcgcagatcaggcagggacgtatcagagtg

SEQ ID NO: 25587 - DNA, 260 bp, Unknown
  Description of Unknown: LeftRegion for integrase A1155 sequence
tagcacgccctggcgctcctctcctccaagctgaacgtcagttacaaaaacgcctcggatcagagcgacccgtacgcggagcttgcattattcgcagcatcagctatcacactagcttgatcgggaggtgtggtatgcgacccgcgacccatatgcgcccccgaccggacacatcgtcgactgcggttcagtacgtgcgtatgtccacggacctgcaacgcgactcgcccaccaaccaaaaggaggtacttgcgcggtac

SEQ ID NO: 25588 - DNA, 260 bp, Unknown
  Description of Unknown: LeftRegion for integrase A1156 sequence
ggagataaaaaaatgaaaataattgcaggctatgccagagtttcttctcgtgaacaagctgttgattctcatgctttgaaacaacagacaacaagactaaaatccgccggagcaaccgagatttatcaagttattcaatccgttagtaaggacgatagaccacgttttaaaaatagacattatttgaaaaaactgagattatgactgagaaaacaaaaataattgtaggctatgccagagtttcttctcgtgaacaagct

SEQ ID NO: 25589 - DNA, 260 bp, Unknown; identical to SEQ ID NO: 17319
  Description of Unknown: LeftRegion for integrase A1157 sequence

SEQ ID NO: 25590 - DNA, 260 bp, Unknown
  Description of Unknown: LeftRegion for integrase A1158 sequence
aatgccagtagaagctgaatatctcagtgtcaaagatcctctgctcgctccgaacatgggtgtgttgtcagcccgctttgcaatcatggcatatgcatcttttgacgcctgaaggctcgcagtaaagttggcgtgatttctcttaataactgctggttttatgccagcattatcgctcatgttctttcggagcatcagcaatgaaaaaagccatcgcataccttcgcttttccacttcctcgcagcagtacggagactca

SEQ ID NO: 25591 - DNA, 260 bp, Unknown
  Description of Unknown: LeftRegion for integrase A1159 sequence
tcgttttatgctttttgttaatgtctttagtttttattcattcttttgatctttcaagaccatggtgtaagaaaattgcaatacgattattgttgtatattcaagataatgtgaccttaattgtctttttaaataaaaattaaacaaaaatcatatctcaccactaaggtttataaaagcatactttagcaggtgtcaccatgaaaaaagccatagcatatatgcgattttcatcaccaggtcagatgtctggtgattca

SEQ ID NO: 25592 - DNA, 260 bp, Unknown
  Description of Unknown: LeftRegion for integrase A1160 sequence
aatttatgaatagtttataggttttattaattaaagtttactaatttttttaaatttattaatagttaaaaaaaaattattatttttattttcacaaaaaaaatgtgcaggatttattcaattaaaccttgcacattttttaattaattgtttataataaaactaattaattaagtttaaaaagcaacacataatttaatatgcaccaatataatatagtaggctatgcacgggtgtctagtcgtgaacaggcagaaaat

SEQ ID NO: 25593 - DNA, 260 bp, Unknown
  Description of Unknown: LeftRegion for integrase A1161 sequence
gcagcgaaaatgctgacgatgataataacgccgataacgatacggcttcatgagcgcctaatattatgcggagcaggtcaagcgcctgttccgtatataaaaatatgaaaggtcaactgttttgtagcaaggctgtcaaccgtattgtaaggagcttgtcaactgttccgttggaatgaataagaagggagaaatttggtatgaacaacatgatagtagtacctgcggctgcaaaggttcagcgagggctgacaagggtg

SEQ ID NO: 25594 - DNA, 260 bp, Unknown
  Description of Unknown: LeftRegion for integrase A1162 sequence
tagtggctttggggagcctcggatgttcgcggcgacaatcgcaggccgaagatcggaatatcatagtgctccagcggaaatgtatgtgcatcggcctgcaacactgggccagtttcaggggtgatcggcgtccaataaccagccacccctgatctggcagactaccaccctgggtttggacgacagggtggcggacagggatgttgacggtggagacgatcgcacggatacgacgcgagcacgcgaaggggaaaagcatc

SEQ ID NO: 25595 - DNA, 260 bp, Unknown
  Description of Unknown: LeftRegion for integrase A1163 sequence
cacgccggagcaggaagcggccaaacgccgggaactggagcagcagctttatgaggtgttccgcaaatacgccgataagcggcagaaagaggaagccggggcataaggtttcccgaagccatcgttgatttgcggggctgctggcggtataataaaactgtcagcagctccgtttcttttttaagaaaaggagcgacaaaatgaataacaggatagacgcgatctatgcaaggcaatcggtagacaaaaaggacagcatt

SEQ ID NO: 25596 - DNA, 96 bp, Unknown
  Description of Unknown: LeftRegion for integrase A1164 sequence
taatcgagttgcgatgctaactggcatactagcgcagtgagacttccagcgcagccactaccctccgatctcatcgacgcgctgtacgcgctgccg

SEQ ID NO: 25597 - DNA, 260 bp, Unknown
  Description of Unknown: LeftRegion for integrase A1165 sequence
ccccccgtgcaatttgttttgaaaggtgatgattttaatgaccgtgcaaaagaagcttcaacttagatcgatttcgtatattcatgatcctgaagctgcacaaaaatggtttcaattatatgtggaacttttagtagaaataatgaaacaaaatgattctatggacaaggatgacgtgcatacattgtaagcacaacaagatggaagggctggttgtattgaagaaaacagtcgcatattaccgtagttcatctaaaaaa

SEQ ID NO: 25598 - DNA, 260 bp, Unknown
  Description of Unknown: LeftRegion for integrase A1166 sequence
ctgcgtcctccttcgataatactctgggaaggacatgaaaagcggcagttcgtatttgcgcccaatctgcggtagagggccatcagctcgaagcagcccacatgatttcttgggaggcgggcgtggctcggggaaaagcaccattatccgaaggagaaaccgagccgtccgcgcagctgctggctgcggagtacgtccggatgtcgaccgagcatcaacagtattcaacccagaaccaggcgcagacgatccgcgaatac

SEQ ID NO: 25599 - DNA, 260 bp, Unknown
  Description of Unknown: LeftRegion for integrase A1167 sequence
tttaggcatgcaatcacgcgaagaatgatgcgaagtgatcgctcccccttgttaatatccaatttagctcaaaatttaggacatgagaaagaccagggcgttatcatttcatgttatggtactagccctgaacatgacagggcggggattttaaaggcatttgagctggagtagtagcaattttaaagaggtaatgaattatgaaagccgtaatattcgccagagtatcatcaagagatcaagaagatggtcattcattg

SEQ ID NO: 25600 - DNA, 260 bp, Unknown
  Description of Unknown: LeftRegion for integrase A1168 sequence
agcgccctccggttgaagaaggaaatccttgtccttttttggactgaatatttcggcccttgttcgtaggcgacatttcgtttcccctcgaattaatatcagaactcgggaaatgcctcaaaatagctgcgaaatagatgaccggagctggcgatcagacacacaagactgaaaatgtgcgtgcggcacagtatgtccgcatgtccactgagcatcagaagtattctaccgaaaaccaagccatcgagatcgctaagtac

SEQ ID NO: 25601 - DNA, 260 bp, Unknown
  Description of Unknown: LeftRegion for integrase A1169 sequence
ctttttcggcaacatcttccgctccttcatgcgctaggattgcgatgcggatgtctgcaaaaatggatgtgctcggcgccgcgccagcctcaggatcaagcgcctttgatcaacgacaggaggggcaaaaagtggatcgggagacctttaacggcatgtcatcggagccgcagccaattcgggctgccgaatatgtccgtatgtcgaccgatcatcagcgatattctaccgaaaaccagtcggaggcaattcgggactat

SEQ ID NO: 25602 - DNA, 260 bp, Unknown
  Description of Unknown: LeftRegion for integrase A1170 sequence
ctttttcggcaacatcttccgctccttgatgcgctagaattgcgatgcggatgcctgcagaaatggatgtgctcggcgccgcgacagcctcaggatcagacgcctctgatcaataacaggaggggcaaccagtggatcgggagacctttaacggcaggtcatcggcgtcgcagccagtgcgggctgccgaatatgtgcgtatgtcgaccgatcatcagcgatattctaccgaaaaccaatcggaggcaattcgagactat

SEQ ID NO: 25603 - DNA, 260 bp, Unknown
  Description of Unknown: LeftRegion for integrase A1171 sequence
gcaagatgcaggccagcttcgcgaagggccagagcctgggcaacgcgcggaagactgcggccaagccggcggccaagcggaccaccaagaagtaagccgtagcgcttcgggaaggccctccaagtttggggggcttttttacgggttgcccccgcaacatcagtcctggcccgcacgtctgcgggccacaataggtcatcatgccaaacgcttccttgcgcgctgcgacctaccgccgagtctcgaccgaggagcaggtc

SEQ ID NO: 25604 - DNA, 260 bp, Unknown
  Description of Unknown: LeftRegion for integrase A1172 sequence
gagggtgttgccgtcctccggcccttgagtcgcttgtgattgcaaagagaggacttgttcgaactgccggcgacttgctgctaccttccaacacaccaaaagctgattcaaatcacctggcagccatgtcgatcgatcacggactcgaacgctgcggtggcgaggccgccgcgccattccgggcagccgaatacgttcggatgtcgaccgagcatcagcagtattcaacgctcaatcagtccgacaaaatccgcgaatac

SEQ ID NO: 25605 - DNA, 260 bp, Unknown
  Description of Unknown: LeftRegion for integrase A1173 sequence
atgatctgcccttcttcggcaacatgcttcgtctccatgacgatacactgagagaagcagagggtttccggcgtaggatcgtccgtacaacggtcgattgcttggtgtgccggtaagacgggtggtgaccgccaatgacagcgccgcgcaatgagatctcttccggctttcccgaggtgcgtgccgcgcagtacgtgcggatgtcgaccgagcatcagcgctattcgacggagaaccaggcggatgccatccgtgactac

SEQ ID NO: 25606 - DNA, 260 bp, Unknown
  Description of Unknown: LeftRegion for integrase A1174 sequence
actgcgcagcgaacgtcatgtgcaagacgcggccgaggtcaggcgatatcggcggcatgcggttgggactggaactgcatgagccggctggcgcttgttcgccgtcccgcggttgggggggccaagctctctgcgctcaggttgcgcagtttgtgaacgagcagtagaggcgaaccgagggttcgcaaggggaaaaagctatgcgcgccgcgggatacgttcgcatgtcatctgaccgacaagagctttccattggcacg

SEQ ID NO: 25607 - DNA, 260 bp, Unknown
  Description of Unknown: LeftRegion for integrase A1175 sequence
aaaaagacgggcgaatctttactgccacactcgaagataaatgggtttttcgcaaggccgcccaccttaaagagttaaaagatgccgagtgggggaaatcgccaatttttctaagaataaacgggaaagaaattgacggacaagtaactcaggccatgattgttgatgtaggtgaagacaaagagtaagaccaaaaacccatgatcgcagcagtctatatccgaaaatcccgcgaagataaaaataaaccctcccaccgg

SEQ ID NO: 25608 - DNA, 260 bp, Unknown
  Description of Unknown: LeftRegion for integrase A1176 sequence
gacagtatctgaacgagtctcaccgtgagccggtggagatcacgcgacatggacggcgcgagtttgtactgatgtcggccgcccaatatgacgagctactgtcagccgcgcagcgcagcggcaaggccgctgaagccgccaccgaacccgaacgtcattaagatccctcccccgacacggagcctgaaaggactgccgatatgacccgcgttgcgctttatgcccgatattcttccgacaatcagcgcgaagcgtcgatc

SEQ ID NO: 25609 - DNA, 260 bp, Unknown
  Description of Unknown: LeftRegion for integrase A1177 sequence
attgatttaactcactcaacttatttccaggttagccaactgtcttgaagaaagagatttctcaataacctttttgttccactgaattttcttgaggagctaaacgtcaaactttgttagcctttgtcgaacatttagttcaatcaatgtttgacatacaattagttaactaattaatcgattacggagagaatataaggatgaaactgaaacctattattggttatgctcgtgtctcaacggaagaacaagccaacacc

SEQ ID NO: 25610 - DNA, 260 bp, Unknown
  Description of Unknown: LeftRegion for integrase A1178 sequence
aggaatatgtaaaatgaataagcaaaagaaaattacaattacatcagtaagctatgttcatgatccagaatcagctcgaaagtggtttgaagcatatatcaagattgttgaaaaagaattagttaaagcaattaataaggactagctgctatttttgatacatacagtgtaaatagaacatcatgagaggaggtcctgaattgaagaccgttgcatattatagaagttcaattgattctcaggaaaactcaatcgaaatg

SEQ ID NO: 25611 - DNA, 260 bp, Unknown
  Description of Unknown: LeftRegion for integrase A1179 sequence
aagcagttcgaccggcccgctgagcactcggcggttcctggacctcatggccgccgcgaacaggcgcatctgaaccgccggggcgaggagccgcctgtcttcgccgcgctcaccattcgtcgaccccccagggtggaccggtcgcgacggcggcgggctcaacccacagctgcaatctcaaatgtcgctaaactaccctcatggcgaaagcaaaaactcctggtcagcgggtgggagtggggtcggcggcgatttacgcg

SEQ ID NO: 25612 - DNA, 260 bp, Unknown
  Description of Unknown: LeftRegion for integrase A1180 sequence
aatgagttacattgtaattcactcatgcttatcaagcaaggagcaacagtcaacttggagtataccccatcctgacgtcaggcacaggcccgaaaagcgtcagattagggtccttttcggaattgattgacactctcactccggggtcttagactctaacttgacacttttgccttccccctcaaaaaacaggagttcccttgagcgaccagcgcatcggctatgtccgcgtctcaagcgtcgaccagaacacggaccgc

SEQ ID NO: 25613 - DNA, 260 bp, Unknown
  Description of Unknown: LeftRegion for integrase A1181 sequence
gcgcacatggtccggcgcatggatagccctgtgctgcgcatgcacgtgtcgttcgaagcgacaagaaccggcccccaacttctgatcgaggcctacgcccatcttgtgccgacgatacggcgcacgaagcaacggccggtgcgtcgagcgaacccctcatcgaaggtgacgaaagcgatggcgagatcgggaggtgagcaatgaccgagacacgatgcgcgctctatgcgagggtgtcgagtgaggcgcagacgcgcgac

SEQ ID NO: 25614 - DNA, 113 bp, Unknown
  Description of Unknown: LeftRegion for integrase A1182 sequence
agctgacctgggctacttgtcaagggtgacatgtacggttcacactatcggacgtgacttcgacgatcgttcgtgtagtgatctactgccgcatctccaaggaccggatcggc

SEQ ID NO: 25615 - DNA, 260 bp, Unknown
  Description of Unknown: LeftRegion for integrase A1183 sequence
caactcaatattaatatggaagatttatacgaattcattcagtcggaaaaacagtgagtttttctcactgcacctgaaagtcaactacttgattgacctcgattcataatgcgccttattgaaacttatattttcacatagtattcgtctaataaattaaaaatatacataaaatattgattaagaaaggggtttagctaatgaaatgtgtcatttatagacgtgtatcaactgacatgcaagttgaagaggggatttca

SEQ ID NO: 25616 - DNA, 260 bp, Unknown
  Description of Unknown: LeftRegion for integrase A1184 sequence
ttctcgaaaagaaaaaatgaactcaagaatatgccttggccttttacattcccaatcgagagtgtaaacgaagtggttcattaatgattccatacaatgtacacaataaaatgacatatgttatctcttataaagcgctcggcatgagcgctctatttttgttagcacggaatttgtttttttcaaaggagggcaaccaaatgaaagtcgccatttacgccagagtaagtacagacgagcaagcgaaagaaggcttttct

SEQ ID NO: 25617 - DNA, 260 bp, Unknown
  Description of Unknown: LeftRegion for integrase A1185 sequence
aaatcgactgttgatctttagccctgaatcaaccttcaaaaagtatcatgatattgttgttccatatgacacagttaatgatcttaaaatctatgctaaagtcatatggtatgccgtgttattagattgagtctttagcgctaaagatttaatcagggcgggcgacggctcgcccaattttttctaaggggggttgactaatgagagtggccatttacgtgagagttagcacagacgaacaagcaaaagaaggtttttct

SEQ ID NO: 25618 - DNA, 260 bp, Unknown
  Description of Unknown: LeftRegion for integrase A1186 sequence
gcatcggtcagggccagcgactccccgtcgagcacgacggaccggcacgggagttcccgcgccagcgcgacgatctcgggcacggcgtcggtgatgtcgcggagcgtgcgggtgtagacgcgcacctcgtcgccgagccggtggacctggatccgggcgccagccaatagttggtcatgactcatgtagtatttggcgccatgaccagcgccaacgccatcatctacgcccgcatctcgaaggaccgcacaggcgcgggg

SEQ ID NO: 25619 - DNA, 260 bp, Unknown
  Description of Unknown: LeftRegion for integrase A1187 sequence
gccggcgctcgtcacgatgctgcgcagcagccggggacggcgaaatcggggacctgttcgtcccgagccaaaccgccaacgggattggcgatgaggacaacggtgacaacgtttgaagcgccacatcgggggttgatgccgttggcgaggtaagaccgggaacggcgctaccgtggcaaggtcgcgcctagtgtctgcatatggaagctgcggtgtacctgcgtcagtccgtcgataagtacggtgacgaacttgcgatc

SEQ ID NO: 25620 - DNA, 260 bp, Unknown
  Description of Unknown: LeftRegion for integrase A1188 sequence
gggtgcagctctcacgagcaagcgctgagtcgagaaagactgaggggcgatccctgtcggttagtttgccgaatgaggctgccgctgccgggacggttccgagtggacggccgcacgagatcacgatgcttctggcgagccttgtgctctcgacccgtcatccgacagtcgccaggtgatggaggatatcgaacatgtccatgaacagcgaatctcatcaaaagatcacaagcgcacacctgtcgcgcatggcgtatctc

SEQ ID NO: 25621 - DNA, 260 bp, Unknown
  Description of Unknown: LeftRegion for integrase A1189 sequence
tgaagcgactttataacgatgtggaatacgaggtgattgtgcgatcagacggacagtttgaatttcaaaaacagctctataaaagcttatccaaaattgcgaaagagattaccggtacacattggtctggacctgcgttttttggtttgcgtaagcctaacaccccatcgaaaaagaaaaagtgagggaaagaaaaatagatgagtaaacatgttatacctaaacgtcgatgtgctgtctacacacgaaaatcccacgaa

SEQ ID NO: 25622 - DNA, 260 bp, Unknown
  Description of Unknown: LeftRegion for integrase A1190 sequence
cgtgaaaagaactataggatatcgatcgctatcgccaaggaaatgctctcgaaaaggattataaacgagagggaatacagcaaaattgataaaatgcttgttgctaaatataaccctgtatttggaggcttgtaagccttaataagcttgctatgtatcaaaatcagagttaacatggtgcttgaaaggaggagctttcaatgaccagaataataaggaagataacgcctaaggcgccaaaagcacccataaaaaaacgt

SEQ ID NO: 25623 - DNA, 260 bp, Unknown
  Description of Unknown: LeftRegion for integrase A1191 sequence
tttagagatgtattacttatccattgcacccattaaatcaatgtttgagggggggattttaagtaaatctgaataccttaaagcagaagcatttttagcagacaaatattgtatcaataaaggtaacattcatcgtcttaacaacttgactaaaccccctaaaagagtgatatatggtgtaaccaaagaggaggtaaaagatgaaagaaaagaagataaccaaaatcgaagcattatccaaattaccaaagaaaactaga

SEQ ID NO: 25624 - DNA, 260 bp, Unknown
  Description of Unknown: LeftRegion for integrase A1192 sequence
gttgttttaacagtcattccccgtttacatatttatgactttgcaacagaaatttacagtttcctcactgattgaggttttttacgctttcggatcatatacttcaacataagttattgatcttatcgatcaatttcgtttatcgttaaagtaagtattttcacttgattcactagcttgttgaatggaaattaaaagccatgactggaacagccgagttggttattttcgttaccgatgcaactggctttgcaatgcag

SEQ ID NO: 25625 - DNA, 260 bp, Unknown
  Description of Unknown: LeftRegion for integrase A1193 sequence
cagctcaaaccagatgcgtactgatgtagtggagtcggcgcgaacctggttgggagcatgttcggctcagatagtgattgtcggaaaacgatcatttgccgacaaccttgcgtgagcgggagaaaccccaagataagagtgtcgaaaactcgtgccgggaatcaacgtcggcaaacccgatttcagctattttcgacatcatgttgatcggctacgggcgggtgtcgaccgccgaccagaaccccgcccaccagatcgac

SEQ ID NO: 25626 - DNA, 260 bp, Unknown; identical to SEQ ID NO: 25625
  Description of Unknown: LeftRegion for integrase A1194 sequence

SEQ ID NO: 25627 - DNA, 260 bp, Unknown
  Description of Unknown: LeftRegion for integrase A1195 sequence
agaactcgccttcattactgacgctcacacgttgagcatgctggcaggtcgaggagtgctaacccccgcagagtatcggcgtgtctatcggttgttgttccaggcgttgagcccgatctatcaaccacagattgtgggcgaaacgactggataaacacctggtttagagcgtgtatagacctaacacgaaaggagaaaacgtggcacaagttagtgtggtgacaccagttcggccgccgaccccgaaactggtcaacgta

SEQ ID NO: 25628 - DNA, 260 bp, Unknown
  Description of Unknown: LeftRegion for integrase A1196 sequence
ttccaacgccggacccgctgattaagagtcagcgggtcccgtcgctgcgggggccgcgatcgtcggccgacgggtgtcgggggtgtcgggctgtcccgataacgaaggtttttgggacaccgccgtggtgttcggctgacctggacgtttcgtgtcccaaaaacgcgtgccgaaagttgtcggtgtcggctgatacaaccatgttcgtgccactgctgggatatgcgcgagtatcgacgagcgatcagagcctcaccggg

SEQ ID NO: 25629 - DNA, 260 bp, Unknown; identical to SEQ ID NO: 25628
  Description of Unknown: LeftRegion for integrase A1197 sequence

SEQ ID NO: 25630 - DNA, 260 bp, Unknown
  Description of Unknown: LeftRegion for integrase A1198 sequence
cttcgagtaacagtttcgggccggtaactggtcttcacgaagtgagatccctgaaaaggagtactttattagtttcattagggtataccctattgagacagtcatttttgtatcatttccactgcctcactaagtcctaaccgttagttttgatacactgtccgtaatagctattaaccctattgagacactaggttgatatgacccgctacggcaccctccttggactccacggccaacccaccgaccgcgtcatcatt

SEQ ID NO: 25631 - DNA, 260 bp, Unknown; identical to SEQ ID NO: 25630
  Description of Unknown: LeftRegion for integrase A1199 sequence

SEQ ID NO: 25632 - DNA, 260 bp, Unknown; identical to SEQ ID NO: 24376
  Description of Unknown: LeftRegion for integrase A1200 sequence

SEQ ID NO: 25633 - DNA, 260 bp, Unknown
  Description of Unknown: LeftRegion for integrase A1201 sequence
ataaaaattgaatgtctttctggcttagataaaggaaaggttattgagtttatttcttcaaagaatggaaatgagtttgaattagcagctggagaatacaaaatctcagaaactcaagctccagagggctatactttaataggacaaaaaaattaactgtcctaaattgaaaaaatacatacggaaaggaggataagaaaatgtcaaggacttcaagaattacagcactttacgagcgtttgtcaagagatgatgacctt

SEQ ID NO: 25634 - DNA, 260 bp, Unknown; identical to SEQ ID NO: 25560
  Description of Unknown: LeftRegion for integrase A1202 sequence

SEQ ID NO: 25635 - DNA, 260 bp, Unknown
  Description of Unknown: LeftRegion for integrase A1203 sequence
ggcaacccgaacgagagtcaaaatacatttgcgatgtgccggcgcatcgcctgattttacgcacttccgaacccgtcatggcgaagaaaccgaaagccaaggtctacagctatctacgcttctccgatccgaagcaggccgctggcagcagtgcggatcggcaaatggaatacgcggcgcgatgggcgaccgagcacgacatgcagctcgacgctacgctgacgttacgcgacgaaggactgtctgcattccaccagcgc

SEQ ID NO: 25636 - DNA, 260 bp, Unknown
  Description of Unknown: LeftRegion for integrase A1204 sequence
ccggtcggcaagagcggcaggatattcaatcccgaacgggtgcaggtgaattggcgatgagccggcaccacaacatcgtgatcgtctgtgaccacggccgcaaaggcgatggccgcatcgaacacgagcgctgcgatcttgtcgcgccgatcatttgggtcgacgagacccagggctggttaccgcaggcgccagcggtggcaacattactcgacgacgacaaccagccgcgagccgttattggcttgccgcccaacgag

SEQ ID NO: 25637 - DNA, 260 bp, Unknown; identical to SEQ ID NO: 25635
  Description of Unknown: LeftRegion for integrase A1205 sequence

SEQ ID NO: 25638 - DNA, 260 bp, Unknown; identical to SEQ ID NO: 25633
  Description of Unknown: LeftRegion for integrase A1206 sequence

SEQ ID NO: 25639 - DNA, 260 bp, Unknown
  Description of Unknown: LeftRegion for integrase A1207 sequence
aagttaaagaagatagtaaactacaattagtatacaaagcatcaatttggaacgataaaacagtacgctttaatttagactaaataaaaaaataagcactctctcaacttggcggaaggtagagtgcttacacaaaaaatcaacctataaaataggtctctttatattgcctattttatcatataaaggagaaaaatactatgaaattacgggctgcaatatatgtacgagtatcgacaatggaacaagctgaggaagga

SEQ ID NO: 25640 - DNA, 89 bp, Unknown; identical to SEQ ID NO: 24761
  Description of Unknown: LeftRegion for integrase A1208 sequence

SEQ ID NO: 25641 - DNA, 260 bp, Unknown; identical to SEQ ID NO: 24540
  Description of Unknown: LeftRegion for integrase A1209 sequence

SEQ ID NO: 25642 - DNA, 260 bp, Unknown
  Description of Unknown: LeftRegion for integrase A1210 sequence
ttttgcatattcattgaaacgtttaataacactatagtttaatttaaaatctcctcatttggacaaacagctgttacatagcattacccaaggggtgatgcattttatgaaagtgataatcatcgagggaccgcaagctgacaaatgcattaacgattgctatcattatttaataaaactttataggaaggagattcagggtgatagcaatatatgtaagggtatcgaccgaggaacaagcgatcaagggatcgagcatc

SEQ ID NO: 25643 - DNA, 260 bp, Unknown; identical to SEQ ID NO: 24455
  Description of Unknown: LeftRegion for integrase A1211 sequence

SEQ ID NO: 25644 - DNA, 260 bp, Unknown; identical to SEQ ID NO: 24864
  Description of Unknown: LeftRegion for integrase A1212 sequence

SEQ ID NO: 25645 - DNA, 260 bp, Unknown
  Description of Unknown: LeftRegion for integrase A1213 sequence
ggaaccccgccctcgaccccgacatccccctcggcgatgccgtcgacgccatcgagaccgtcatcgtgccgcgcgcccgcgatctcggcggtttcgaggtgcgccgcgcgctgccctcggcccggaggcagatggtgggccccttcatcttcttgaacatgattggtattgtgaccccatcagagacgatgaggccgagccatgaccaatccagcaagccgaccgaaggcatacagctacattcgtatgtcctcggctat

SEQ ID NO: 25646 - DNA, 260 bp, Unknown; identical to SEQ ID NO: 25635
  Description of Unknown: LeftRegion for integrase A1214 sequence

SEQ ID NO: 25647 - DNA, 260 bp, Unknown
  Description of Unknown: LeftRegion for integrase A1215 sequence
gaccacgcgtaccgcgccggctaccaccgcgcgctcacccacgtgtcgcaaggacttctcgacgccccggcagcaccgccggacggcggagaggaagccgggcacgacccgcaggggacctgcaccccgtgcgacgacccgctcggcaacgtgcggccgatccggccgcacggagaggacatcaacccacggaaagcggtatgaaacgagacctaccaagcacgttccgcggctcccgcacgccgggcgagccgtggctc

SEQ ID NO: 25648 - DNA, 260 bp, Unknown; identical to SEQ ID NO: 24649
  Description of Unknown: LeftRegion for integrase A1216 sequence

SEQ ID NO: 25649 - DNA, 161 bp, Unknown
  Description of Unknown: LeftRegion for integrase A1217 sequence
aggctggaccacccacaacaacacccacggccacaccgaatggctaccaccaccccacctcgaccacggccaaccgtggacctgtgagatacactacacctgtgcgtgctgctgtctacctccgaatctcagaagaccgctccggcgaacagctcggcgtg

SEQ ID NO: 25650 - DNA, 260 bp, Unknown
  Description of Unknown: LeftRegion for integrase A1218 sequence
tccgtgcggccgccccgagagcgcttcgccacccgtttcggccgttctggcgcttcgccgcccgcgcggccgctccgagggcgttgcgtcacccgtgcggccgtcccgattctgcgccgcgtactatggacggcgcagaaggggagtagctcttcgcccgagaacttctgcaaggcactgctcttggctatggtctcggcatgcccatcgcgcctgagttcctgagcctcgcctacccaggtcaggagttccccgcctac

SEQ ID NO: 25651 - DNA, 260 bp, Unknown; identical to SEQ ID NO: 25647
  Description of Unknown: LeftRegion for integrase A1219 sequence

SEQ ID NO: 25652 - DNA, 91 bp, Unknown
  Description of Unknown: LeftRegion for integrase A1220 sequence
ctagtatttattttgaaaggagcaattttatatgaaacgtgcagcattgtatatacgtgtatccacaatggaacaagccaaggaaggatac

SEQ ID NO: 25653 - DNA, 260 bp, Unknown
  Description of Unknown: LeftRegion for integrase A1221 sequence
agttcttgatgctttaaataacagtatggataatcaaaaggaaaataaagtcacagttaatgatattacttatcaattttctacaattaacgctggaacaacaaatataacaactttagagattttcccaaactaaagagagcctccgggcttttcttttttaccgaaaaaaagaacgtatgtgcgaaaggagaatgagaatgaaagcggctatctatataagagtatctacacaagaacaagtagaaaattattcaata

SEQ ID NO: 25654 - DNA, 260 bp, Unknown
  Description of Unknown: LeftRegion for integrase A1222 sequence
ttcaactgttacagaattattacaaatagttggtatagtcctctttagcctttggagctattatctcatcatttgttttttaggtgaaaactgggtaaacttagtattaatcaatataaaattaattctcaaatacttaattacgtactgggattttctgaaaaaaagatcttaactttccatgcgagaggagaacggaaatgaaggcagctatttatatacgcgtatctactcaagaacaaatagagaattactctata

SEQ ID NO: 25655 - DNA, 260 bp, Unknown; identical to SEQ ID NO: 25639
  Description of Unknown: LeftRegion for integrase A1223 sequence

SEQ ID NO: 25656 - DNA, 260 bp, Unknown
  Description of Unknown: LeftRegion for integrase A1224 sequence
aaaaattcaaggaacttcttgatttgggtgctattactcaagaagaatttgaaattcaaaagtcgaaattattaaaataaataaaaaaatccgctcaagtttggcaacgaggggcggattaaaatctatgtggtatagtaaacctccaaatttggagagttttactgtacttattttatcagaaatgaggtacaaaaacaatgactaagaaagtagcaatctatacacgagtatccactactaaccaagcagaggaaggg

SEQ ID NO: 25657 - DNA, 260 bp, Unknown; identical to SEQ ID NO: 24864
  Description of Unknown: LeftRegion for integrase A1225 sequence

SEQ ID NO: 25658 - DNA, 260 bp, Unknown; identical to SEQ ID NO: 24846
  Description of Unknown: LeftRegion for integrase A1226 sequence

SEQ ID NO: 25659 - DNA, 260 bp, Unknown; identical to SEQ ID NO: 25653
  Description of Unknown: LeftRegion for integrase A1227 sequence

SEQ ID NO: 25660 - DNA, 260 bp, Unknown
  Description of Unknown: LeftRegion for integrase A1228 sequence
tgttcatcgtcataaatatcaaattcactactataattttcaactgattcttttatataagctatttctgcgtcagtaaactttacgcacatttcatcacctactttttattttattatatcacatttagtacctagtactaaatttcgggtagcccgcctacccttattatttttttgccaattttgaggagggagcacatgaaagtagcaatttatactagagtgagtacacttgaacaaaaagaaaaaggacactct

SEQ ID NO: 25661 - DNA, 260 bp, Unknown; identical to SEQ ID NO: 25635
  Description of Unknown: LeftRegion for integrase A1229 sequence

SEQ ID NO: 25662 - DNA, 260 bp, Unknown; identical to SEQ ID NO: 24488
  Description of Unknown: LeftRegion for integrase A1230 sequence

SEQ ID NO: 25663 - DNA, 260 bp, Unknown; identical to SEQ ID NO: 25639
  Description of Unknown: LeftRegion for integrase A1231 sequence

SEQ ID NO: 25664 - DNA, 260 bp, Unknown; identical to SEQ ID NO: 25635
  Description of Unknown: LeftRegion for integrase A1232 sequence

SEQ ID NO: 25665 - DNA, 260 bp, Unknown; identical to SEQ ID NO: 24455
  Description of Unknown: LeftRegion for integrase A1233 sequence

SEQ ID NO: 25666 - DNA, 260 bp, Unknown; identical to SEQ ID NO: 25633
  Description of Unknown: LeftRegion for integrase A1234 sequence

SEQ ID NO: 25667 - DNA, 260 bp, Unknown; identical to SEQ ID NO: 24846
  Description of Unknown: LeftRegion for integrase A1235 sequence

SEQ ID NO: 25668 - DNA, 260 bp, Unknown; identical to SEQ ID NO: 24846
  Description of Unknown: LeftRegion for integrase A1236 sequence

SEQ ID NO: 25669 - DNA, 260 bp, Unknown; identical to SEQ ID NO: 25656
  Description of Unknown: LeftRegion for integrase A1237 sequence

SEQ ID NO: 25670 - DNA, 89 bp, Unknown; identical to SEQ ID NO: 24761
  Description of Unknown: LeftRegion for integrase A1238 sequence

SEQ ID NO: 25671 - DNA, 260 bp, Unknown
  Description of Unknown: LeftRegion for integrase A1239 sequence
accattaactgaaaataaagatgtttataaagattaataacatctttaagcgtatcacataaaaaaacgttatcagcaactggcgaccaaaccgaaactgataacgcaaagattttaataagaaaacaacagagcaattaagaaattgcacacatttattataacatctttgctcttgttttaatactaggagtgagaaaatgaaagtagcagtctactgcagagtttcgactttagagcagaaagaacacggccactca

SEQ ID NO: 25672 - DNA, 260 bp, Unknown; identical to SEQ ID NO: 24488
  Description of Unknown: LeftRegion for integrase A1240 sequence

SEQ ID NO: 25673 - DNA, 75 bp, Unknown
  Description of Unknown: LeftRegion for integrase A1241 sequence
ttgaggagggagcacatgaaagtagcaatttatactagagtaagtacacttgaacaaaaagaaaaaggacactct

SEQ ID NO: 25674 - DNA, 75 bp, Unknown; identical to SEQ ID NO: 25673
  Description of Unknown: LeftRegion for integrase A1242 sequence

SEQ ID NO: 25675 - DNA, 280 bp, Unknown
  Description of Unknown: LeftRegion for integrase A1243 sequence
tcggtgaatggacaaaaacccggtctattaaagacaaggcctaatttaatctaagatttcataacacatataccgaaatctaaaaactagatagatctatattcaaagaatacaaatctttcatattattttgttgttttcgtattcaatgttagatagaatgtttttacagatacttctgttttgacattaaacacaataaagaggtgctaaatttttggagttaaaaaatattgtcaattcttacaacatcacaaatattttaggttatcttagacgt

SEQ ID NO: 25676 - DNA, 260 bp, Unknown; identical to SEQ ID NO: 25560
  Description of Unknown: LeftRegion for integrase A1244 sequence

SEQ ID NO: 25677 - DNA, 260 bp, Unknown
  Description of Unknown: LeftRegion for integrase A1245 sequence
tgggatgactaccggctcgcccgcatcgagaagcgggggaagggggcgcagacggccgcctagggcgttctcgggggtgatgggggctggccggtggatcggtcggcccccttcgtttttcctggtcaggccctaatacgcaagtcgataactctcctgggagcgttgacaacttgcgcaccctgatctgacctgcgacgatgcccggcatgacaacagaaacagggccggaccccgccggactgatcgacttgttctgt

SEQ ID NO: 25678-26000 - skipped (323 entries)

SEQ ID NO: 26001 - DNA, 260 bp, Unknown
  Description of Unknown: RightRegion for integrase B2 sequence
attcagtaccgcagatacctgacaactgcagcgaagcgcgagagggaagaagcggtgtgatggaaggagacaggaccctgccgggtgtggtttttgtggctgcatcaggcagggctttttttgtttttaaggttttattgtgctgctattttgcctgcttttttgtctggccttttttacccgtaaggattgctatgtgcagaatcctgttatatgttgtgggtggcgagaaatacacatacgacagaaaatacacatag

SEQ ID NO: 26002 - DNA, 260 bp, Unknown
  Description of Unknown: RightRegion for integrase B3 sequence
tcgcaggagctgctggagacgtatgtgcgcaacggcttctcgctggagcgcctgaaatgaggggaatgcggatgaaaaagttatgttcgctgctgatggcgctggtgctgctggcgggctgtgcgctgggtgaaagcgcaccggaattccgccggatgggggatgcggcgctgctgccgtatctggaaaacagcctgtacgaacagctggtgtccgatttggacagcagcgactattttgtggaaaacgtacaggcggtg

SEQ ID NO: 26003 - DNA, 260 bp, Unknown
  Description of Unknown: RightRegion for integrase B4 sequence
tcgcaggagctgctggagacgtatgtgcgcaacggcttctcgctggaacgcctgaaatgaggggaatgcggatgaaaaagctatgttcgctgctgctggcgctggtgctgctggcgggctgtgcgctgggtgaaagcgcaccggaattccgccggttgggggatgcggcgctgctgccgtatctggaaaacagcctgtacgaacagctggtgtccgatttggacagcagcgactattttgtggaaaacgtacaggcggtg

SEQ ID NO: 26004 - DNA, 260 bp, Unknown
  Description of Unknown: RightRegion for integrase B5 sequence
tcgcaggagctgctggagacgtatgtgcgcaacggcttctcgctggagcgcctgaaatgaggggaatgcggatgaaaaagctatgttcgctgctgatggcgctggtgctgctggcgggctgtgcgctgggtgaaagcgcaccagaattccgccggatgggggatgcggcgctgctgccgtatctggaaaacagcctgtacgaacagctggtgtccgatttggagagcagcgactattttgtggaaaacgtacaggcggtg

SEQ ID NO: 26005 - DNA, 260 bp, Unknown
  Description of Unknown: RightRegion for integrase B6 sequence
tcgcaggagctgctggagacgtatgtgcgcaacggcttctcgctggagcgcctgaaatgaggggaatgcggatgaaaaagctatgttcgctgctgctggcgctggtgctgctggcgggctgtgcgctgggtgaaagcgcaccggaattccgccggttgggggatgcggcgctgctgccgtatctggaaaacagcctgtacgaacagctggtgtccgatttggacagcggcgactattttgtggaaaacgtacaggcggtg

SEQ ID NO: 26006 - DNA, 260 bp, Unknown
  Description of Unknown: RightRegion for integrase B7 sequence
tcgcaggagctgctggagacgtatgtgcgcaacggcttctcgctggagcgcctgaaatgaggggaatgcggatgaaaaagctatgttcgctgctgctggcgctggtgctgctggcgggctgtgcgctgggtgaaagcgcaccggaattccgccggatgggggatgcggcgctgctgccgtatctggaaaacagcctgtacgaacagctggtgtccgatttggacagcagcgactattttgtggaaaacgtacaggcagtg

SEQ ID NO: 26007 - DNA, 260 bp, Unknown
  Description of Unknown: RightRegion for integrase B8 sequence
tcgcaggagctgctggagacgtatgtgcgcaacggcttctcgctggagcgcctgaaatgaggggaatgcggatgaaaaagctatgttcgctgctgctggcgctggtgctgctggcgggctgtgcgctgggtgaaagcgcaccggaattccgccggatgggggatgcggcgctgctgccgtatctggaaaacagcctgtacgaacagctggtgttcgatttggacagcagcgactattttgtggaaaacgtacaggcggtg

SEQ ID NO: 26008 - DNA, 94 bp, Unknown
  Description of Unknown: RightRegion for integrase B9 sequence
gacaccggcgcggtgcggatggcgcagattgccttgacattgttggaggaagcgcaatgaaggagtttctgccgaaatccgccgcgaaaatggc

SEQ ID NO: 26009 - DNA, 260 bp, Unknown
  Description of Unknown: RightRegion for integrase B10 sequence
gataaacatcatacatatcgtttggagatgaacggtataaatatgcgtgaaacggaatgatatcatctagcggtacttcgtaccgttaaaaatggaatggccgttccgcagtagcggaactggcattccgtttaagcataatttgcaaaatattaggccgctttcagcggccatatcatttttcaactgctttcttagacttcctttcttctgtaactgatgatcgatattgatggttctgttcttcatatccagatctg

SEQ ID NO: 26010 - DNA, 260 bp, Unknown
  Description of Unknown: RightRegion for integrase B11 sequence
cagggcggcgcgacccatgccattgaggaaggcggcaccgagctcatcccgctcgtctgacccataaaatcagcccggctgccaaatgatggcagccgggaaaatttagggaagctctgattaaatcagcaagagtggatggcgagagattttctgtcaagtcaaggtttgaaaaatgcaggaatactttgtgtatttctagtttttcaaaccgatggattggcggaaaatatccgccatccaccgcagatgatttattc

SEQ ID NO: 26011 - DNA, 109 bp, Unknown
  Description of Unknown: RightRegion for integrase B12 sequence
cagggcggcgcgacccatgccattgaggaaggcggcaccgagctcatcccgctcgtctgacccataaaatcagcccggctgccaaatgatggcagccgggaaaatttag

SEQ ID NO: 26012 - DNA, 260 bp, Unknown
  Description of Unknown: RightRegion for integrase B13 sequence
gcagatattctccatcaggcccaccgggtcggtaaaggtgtcggtgttgatgcgctgtaagataaagcgcttggagtggtcctcccgccagaccacgaaggtatcgttgatgtggccttcgccgtagtgacgggcatcgcagaccacaggcccgccaaaatcaaaggcatttgcggcggcgttgagaatgggttcggtaacaggtttcattttgggttcctcatttcttatccttcatgccgtttggcaggtgcagggcg

SEQ ID NO: 26013 - DNA, 260 bp, Unknown
  Description of Unknown: RightRegion for integrase B14 sequence
cagccattcgctcaacaaaccggaaatgtcataatacccatggaacagagtggcaagtagcgccatcagcgaaccgctgagcaagtcaccgttaaagcaggtgataatgattagaccaatcagaacacccagcatctttacaccggttacggtaactgtactgaatggcttgaccagatagccaaataagagcataaatgccaagccaatgaccatgacaattgcgtaggtcgaattgatctttctttgttttgtcattt

SEQ ID NO: 26014 - DNA, 260 bp, Unknown
  Description of Unknown: RightRegion for integrase B15 sequence
gccgtggtttacgacgagaccggacgcgcgacgctggaacgcgcggcgagcatggaatgaacgaacggagcgacgacagaaccccgcccgacgcgcttttgacgcttgcccttttttcgggttcatggtatactataccctgaaaaaatggcggagtgcgccgtttgtgaaacgataaaggaagtgcccttttgcaaggcgaagaaatcagggcggcgcaggccgcgttttccctcccggacccgagggagttgaacccg

SEQ ID NO: 26015 - DNA, 260 bp, Unknown
  Description of Unknown: RightRegion for integrase B16 sequence
aatctggcgttcttgattgggtttgtagccgcaaaaaagagaaaggatcggaatagatagtatccgatttgctgtaatgaactgttccttactttgacgatgagatgggggaataacaacgtcccgctttgcaatgtccgctacaacatcatctatgaaaaaatcccgaaagatcatctttcgggattttttgtcagccgctgagctcgcggatctcgtcctgaatgagccggcccgccgcggcggcgagctgatcaatg

SEQ ID NO: 26016 - DNA, 260 bp, Unknown
  Description of Unknown: RightRegion for integrase B17 sequence
aatctggcgttcttgattgggtttgtagccgcaaaaaagagaaaggatcggaatagatagtatccgatttgctgtaatgaactgttccttactttgacgatgagatgggggaataacaacgtcccgctttgcaatgtccgctacaacatcatctatgaaaaaatcccgaaagatcatctttcgggattttttgtcagccgctgagctcgcggatctcgtcctgaatgagccggcctgccgcggcagcgggacgcgccgga

SEQ ID NO: 26017 - DNA, 260 bp, Unknown
  Description of Unknown: RightRegion for integrase B18 sequence
aacagcctgcttgcccaatttacgcagtaccagttccgtggtatgcagcgggaattctgacccggaaaggagagcgcttgtgaattttgcattgtttggacgtttttttctggaatttgcaatgatgtatccggcagaatacctctgccttgcctcgctgcaggagcacttgcgtgcaccgcgtaaaacctatgcaatcggtgcgtcggcgatcacactgatgggtctggctggcgcagcggtgtgctgcatgctggaca

SEQ ID NO: 26018 - DNA, 260 bp, Unknown
  Description of Unknown: RightRegion for integrase B19 sequence
aacagcctgcttgcccaatttacgcagtaccagttccgtggtatgcagcgggaattctgacccggaaaggagagcgcttgtgaattttgcattgtttggacgtttttttctggaatttgcaatgatgtatccggcagaatacctctgccttgcctcgctgcaggagcacttgcgtgcaccgcgtaaaacctatgccatcggtgcgtcggcaatcacactgatgggtctggctggcgcagcggtgtgctgcatgctggaca

SEQ ID NO: 26019 - DNA, 260 bp, Unknown
  Description of Unknown: RightRegion for integrase B20 sequence
gaagaagtgcgcaaggcggcatgggataattccctgaaattgtatcgaatggataaataaccgggtaaaaagaaatggaagcaagcaacacaaaactattttcaaaagatgatctgaaaaaactgatcattccgctcttatttgaacaggcactggcaatcactgtgggcatggcagataccgtcatgatatcctctgcgggagaagcggcggtctccggcgtatccctgatcgacatgttcaataatctgatcatcagt

SEQ ID NO: 26020 - DNA, 260 bp, Unknown; identical to SEQ ID NO: 26016
  Description of Unknown: RightRegion for integrase B21 sequence

SEQ ID NO: 26021 - DNA, 260 bp, Unknown
  Description of Unknown: RightRegion for integrase B22 sequence
cagatttttccacgtctgactgtgttgcagttccatggtcaatgcctcccgttatattgatgtgccgcaagacggcaaagcgccgtcaaaccattgtatgcggcggtacccggttctgaccatgcgcacgggcaccttaaaaggacgggacagaaaaagccctgccagatcccaaaaggatctggcggggcttcagcatttggagcattgttcccggcaagccgcctcacatcgaaagaggcgttccttcgacacgcggg

SEQ ID NO: 26022 - DNA, 260 bp, Unknown
  Description of Unknown: RightRegion for integrase B23 sequence
gcaaggcgggagaactaccacaggaagaagcacgacgagaaaggagaacaaatcgcatgagaagattgattgataacgggaaccgccccattaccccaaagccccatatcggccactacgggcggctgcggaaagcctatctggaacaataccgccaccgcctttataccgcccttgtagccagcgagaagctatacccccaccttgcggaaacagaccgggcggcgcgggatatgctggactacctcatgccccgcctt

SEQ ID NO: 26023 - DNA, 260 bp, Unknown
  Description of Unknown: RightRegion for integrase B24 sequence
ctgggcgggcttgtgcgcacgcagaagggcgtgggttatcttgtggaggagcagacatgaacaaggaatgtaagctagcctttgcctacctgcatgaaaaacgggcggcggcctgccttctggcggcggccgtcgcctttttatttcttattacagagctgtaccatgccccgcgcgagctggccgtgtatacatcgctgatgctgagcacgggcgcggccctggcctttgccgccgggctataccgctaccgcgccgtg

SEQ ID NO: 26024 - DNA, 260 bp, Unknown
  Description of Unknown: RightRegion for integrase B25 sequence
atccagtacagacggtacttaacgacagctgcaaagagagagcgtggaatcgccgtgtgagaaaacaagaaaatgtgagagtgagaaacaaccctgctggatgtagtgaaaactacgtctggcagggctttttttgtttattggggattttacttctttgtctggtcttttttaactgtggggattgctatgtgcagagttctgttatatgttatgggtggatgagaaatacacataacagaaaagacaccggagcgttc

SEQ ID NO: 26025 - DNA, 260 bp, Unknown; identical to SEQ ID NO: 26024
  Description of Unknown: RightRegion for integrase B26 sequence

SEQ ID NO: 26026 - DNA, 260 bp, Unknown
  Description of Unknown: RightRegion for integrase B27 sequence
gagggcgaggatatcaaactcattcacaccgtgaggggtgcaggctatgtcatcaaataaaaaaacaagacccgcgcgccgccgctcttcgttcaagctgcggataacggtgtggataacgctgctcatcgccgttgtcagctccctcggcatcggaggaatactgataacaggctcgcagattgccgattcgcgcctgcagaatgagctgataagcacggtcgagcgcaatgttgacgagatagaatacaagaacggca

SEQ ID NO: 26027 - DNA, 260 bp, Unknown
  Description of Unknown: RightRegion for integrase B28 sequence
gagggcgaggatatcaaactcattcacaccgtgaggggtgcaggctatgtcatcaaataaaaaaacaagacccgcgcgccgccgctcttcgttcaagctgcggataacggtgtggataacgctgctcatcgccgttgtcagctccctcggcatcggaggcatactgataacaggctcgcagattgccgattcgcgcctgcaaaatgagctgataagcacggtcgagcgcaatgttgacgagatagaatacaagaacggca

SEQ ID NO: 26028 - DNA, 260 bp, Unknown
  Description of Unknown: RightRegion for integrase B29 sequence
gagggcgaggatatcaaactcattcacaccgtgaggggtgcaggctatgtcatcaaataaaaaaacaagacccgcgcgccgccgctcttcgttcaagcttcggataacggtgtggataacgctgctcatcgccgttgtcagctccctcggcatcggaggaatactgataacaggctcgcagattgccgattcgcgcctgcaaaatgaactgataagcacggtcgagcgcaatgttgacgagatagaatacaagaacggca

SEQ ID NO: 26029 - DNA, 260 bp, Unknown
  Description of Unknown: RightRegion for integrase B30 sequence
tgtttttgtgcaaaggcaggagaaacactttcagtaaaagcacttctgcctgtgaaatagtataccgcattttggaaaattggtcaacgggaagcaaaaactttgtaaaagaatttaaaaaaacagttgacaggtttttgaaaaactgctatgatggtcacggacaaaggaatgactgcggcgtgcgccgcttgaaaatggagaaaaatatgaaaagcaaaatcgttgtagattcctctgcaaatgtgtacgagctcccc

SEQ ID NO: 26030 - DNA, 260 bp, Unknown
  Description of Unknown: RightRegion for integrase B31 sequence
aacccccgatgtgaccgccgcaataaattttcttcgcatgataaaacctcctttttatgagcggttcatcccaggatcgagaatctccgcacttctacattgttattctccacgccggagcagtcctgaaagactttatgccgtatccggccccggatggtgttgccgctgacttccttcgtgccggcgatgccgcagccgagggagacgtccagcgtatttcctttcaaggcgctgagctgatagcagatgcgccgccc

SEQ ID NO: 26031 - DNA, 109 bp, Unknown
  Description of Unknown: RightRegion for integrase B32 sequence
gagaccgcccgcgcagtaaacattgccgcggcatttttagcaaagtggatggaagaatgaaccgttggccggcatcaccctgctgtctggcgggcagcaaaacaagata

SEQ ID NO: 26032 - DNA, 260 bp, Unknown
  Description of Unknown: RightRegion for integrase B33 sequence
atccgcgttccccctttctttcgtaaaattattatgcatttggataactttcgaccttagtttatactcgttagaataatttgtcaagcagtttttttgcgcctgcataaaaatcgtgcccggttgtttctgcatgcgcgcagagtgttgcttttttgacgaaaacaaagcgatttaaagtattctttctgactttttgcacaaaaaaatcaagaaattatatggaaaacggatattgcaatctttttccgtttgcgtta

SEQ ID NO: 26033 - DNA, 260 bp, Unknown
  Description of Unknown: RightRegion for integrase B34 sequence
gacgatctcgcagccctgatccgcgagcacggaaatccggtgcacattgcggagctgtgagcacgggcacatacgcacaaaaaagcaaggcttcccgaattcgggaagccttgctttatctatttctcttttttgcagtcacagtttctgccgcactgcgcacagttgccggtgcagccgctgccgcagcagccgccctttttcatggcgcggcgccagacgcgaaacgcgatgacggcgcacacggccacgacggccag

SEQ ID NO: 26034 - DNA, 260 bp, Unknown
  Description of Unknown: RightRegion for integrase B35 sequence
ggaggccgttatttaaaggaaaatttcaatattgatattattttattgccctttgactgataacataatcgtaaaaatgaacttggacacgtagaaatgatatctacaatggcatttcaattaatggaaggtgcaactatcgaagaattggataaagcaggtcttggaggacactttactcaatttaaccatgcattatttccagcagatccaaatggaataccatttacaagtgcttatatagcaacgactggggatta

SEQ ID NO: 26035 - DNA, 84 bp, Unknown
  Description of Unknown: RightRegion for integrase B36 sequence
aaaggcggtcgatacttaaaagagaatttttctctcaagattatattgttgtctttttaactgataacatacttgtaaaaatga

SEQ ID NO: 26036 - DNA, 260 bp, Unknown
  Description of Unknown: RightRegion for integrase B37 sequence
aaaggcggtcgatacttaaaagagaatttttctctcaagattatattgttgtctttttaactgataacatacttgtaaaaattaattgacacaataactttatcataaataaaagccacaaataaaataagaggaaaaaagagcaaaaaaaaagagaggtcgccgacattttagtcggaaaccttctttttttatttaactcttaatttttgccctgcgtaaatcgtatctgatgttagaccatttaactttttaatagt

SEQ ID NO: 26037 - DNA, 260 bp, Unknown
  Description of Unknown: RightRegion for integrase B38 sequence
aaaggcggtcgatacttaaaagaaaatttttctctcaagattatattgttgtctttttaactgataacatacttgtaaaaatgaaataggtcatttagaaatggttgctacaattgtttcacaacttatggaaaatgctactattgaagaaattaaagaagctggacttgaaagtttttatactgaacatggtaaaggtgtatttccaatgagtgctgatggtgttgcttttgatgcatcaacatttgcggttactggta

SEQ ID NO: 26038 - DNA, 109 bp, Unknown
  Description of Unknown: RightRegion for integrase B39 sequence
aaaggcggtcgatacttaaaagagaatttttctctcaagattatattgttgtctttttaactgataacatacttgtagaaatgaacttggtcatgttgaaatgatatgt

SEQ ID NO: 26039 - DNA, 260 bp, Unknown
  Description of Unknown: RightRegion for integrase B40 sequence
aaaggcggtcgatacttaaaagagaatttttctctcaagattatattgttgtctttttaactgataacatacttgtaaaaatgagcttgcacacattgaaatgatttctaccatgatttatcaattaacaaaagacgccactattgaagagttaaaagaagccggattaggtacaaattatgcagaacacaataaggcattattcccaaccgattcaaatggagtacctttttctgttacatactttgctgcaacaggag

SEQ ID NO: 26040 - DNA, 109 bp, Unknown
  Description of Unknown: RightRegion for integrase B41 sequence
aaaggcggtcgatacttaaaagagaatttttctctcaagattatattgttgtctttttaactgataacatacttgtaaaaatgaatttggacatgcagaaatgatttgt

SEQ ID NO: 26041 - DNA, 260 bp, Unknown
  Description of Unknown: RightRegion for integrase B42 sequence
aaaggcggtcgatacttaaaagagaatttttctctcaagattatattgttgtctttttaactgataacatacttgtaaaaatgaactagcccatgttgaaatgatatccgctatgatatatcaactactaaatggcgccactctaaaagaattaaaagaagctggattagaatctcactatgccgaacatggatatggactatatccaactgactctaatggcgtaccatttaccgtatcatattttgcaacaaccggag

SEQ ID NO: 26042 - DNA, 260 bp, Unknown
  Description of Unknown: RightRegion for integrase B43 sequence
aaaggcggtcgatacttaaaagagaatttttctctcaagattatattgttgtctttttaactgataacatacttgtaaaaatgaactaggtcacgtagaaatgatctgtgcaatgatatatcaattaacaaaaaatgctacaaaagaagaaatgataaaagcaggattcgatcaacattatgcagaacataaaaaagcactattcccaacagacgccaatggtgtaccatttacagcaagttactttgcaacaacaggag

SEQ ID NO: 26043 - DNA, 109 bp, Unknown
  Description of Unknown: RightRegion for integrase B44 sequence
aaaggcggtcgatacttaaaagagaatttttctctcaagattatattgttgtctttttaactgataacatacttgtagaaatgaatttggacatgcagaaatgatttgt

SEQ ID NO: 26044 - DNA, 109 bp, Unknown
  Description of Unknown: RightRegion for integrase B45 sequence
aaaggcggtcgatacttaaaagagaatttttctctcaagattatattgttgtctttttaactgataacatacttgtaaaaatgaacttgctcatattgaaatgatttct

SEQ ID NO: 26045 - DNA, 260 bp, Unknown
  Description of Unknown: RightRegion for integrase B46 sequence
aaaggcggtcgatacttaaaagagaatttttctcttaagattatattgttgtctttttaactgataacatacttgtaaaaatgaaatttctcactgtgaaatgatagcgtcaatgattactcaactaatgaaagatgctagtattgaagaactaaaaaatgctggcttatcagattactacacaactcacaaaaaaggaatattcccaagtggtgctaatggagtaccatttacagctgcttacattagttcaagtggaa

SEQ ID NO: 26046 - DNA, 260 bp, Unknown
  Description of Unknown: RightRegion for integrase B47 sequence
aaaggcggtcgatacttaaaagaaaatttttctctcaagattatattgttgtctttttaactgataacatacttgtaaaaatgaacttgggcattgtgaaatgattgcaacgatgtttagacagttaattaaggatgcaacgttagaagaattagaggcagcggggttagctgagtattatacagaacatggtaaaggtgtttatccagtaaatccttcaggagtgccatttacagcaagttattttgcatcgacgggag

SEQ ID NO: 26047 - DNA, 109 bp, Unknown
  Description of Unknown: RightRegion for integrase B48 sequence
aaaggcggtcgatacttaaaagagaatttttctctcaagattatattgttgtctttttaactgataacatacttgtaaaaatgaaatcggacatcttgaaatgattgct

SEQ ID NO: 26048 - DNA, 260 bp, Unknown
  Description of Unknown: RightRegion for integrase B49 sequence
aaaggcggtcgatacttaaaagagaatttttctctcaagattatattgttgtctttttaactgataacatacttgtagaaatgaattgacacaataagtttatcataaataaaagccacaagtaaaatagagcaaaaaaaaagaaaggtaaccgacaattatgtcggaaaccttctttttattttatcatttattttatagttaatacttgtcctggtttaattagattagggttgctaccaataacagatctattatca

SEQ ID NO: 26049 - DNA, 109 bp, Unknown
  Description of Unknown: RightRegion for integrase B50 sequence
aaaggcggtcgatacttaaaagaaaatttttctctcaagattatattgttgtctttttaactgataacatacttgtaaaaatgaacttggacacgtagaaatgatatct

SEQ ID NO: 26050 - DNA, 260 bp, Unknown
  Description of Unknown: RightRegion for integrase B51 sequence
aaaggcggtcgatacttaaaagaaaatttttctctcaagattatattgttgtctttttaactgataacatacttgtaaaaatgaattagcgcatatcgaaattatttgtgcaatgttatatcagttaatgaaaggtgcaacgcctgaagaaatgaaagaagctggattagctagtcactatgcagaacataaaaatgctgtttatccagtagatgcaagtggtgtaccatttacagtgacttattttgcaacaactggag

SEQ ID NO: 26051 - DNA, 109 bp, Unknown
  Description of Unknown: RightRegion for integrase B52 sequence
aaaggcggtcgatacttaaaagagaatttttctctcaagattatattgttgtctttttaactgataacatacttgtagaaatgagcttgcacacattgaaatgatttct

SEQ ID NO: 26052 - DNA, 109 bp, Unknown
  Description of Unknown: RightRegion for integrase B53 sequence
aaaggcggtcgatacttaaaagagaatttttctctcaagattatattgttgtctttttaactgataacatacttgtaaaaatgaactagctcatgttgaaatgatatcc

SEQ ID NO: 26053 - DNA, 260 bp, Unknown
  Description of Unknown: RightRegion for integrase B54 sequence
aaaggcggtcgatacttaaaagagaatttttctctcaagattatattgttgtctttttaactgataacatacttgtaaaaatgaaataggtcatttagaaatggttgccactatagtttcacaattaatatctaatgctacaattgatgagattaaagaagcaggactagaaagcttttatacagaacacggaaaaggagttttccctatgaacgcagacggtgtagcatttgatgcttcaacatttgctgtaactggta

SEQ ID NO: 26054 - DNA, 109 bp, Unknown
  Description of Unknown: RightRegion for integrase B55 sequence
aaaggcggtcgatacttaaaagagaatttttctctcaagattatattgttgtctttttaactgataacatacttgtaaaaatgaattaggtcacttagaaatggttgct

SEQ ID NO: 26055 - DNA, 109 bp, Unknown
  Description of Unknown: RightRegion for integrase B56 sequence
aaaggcggtcgatacttaaaagagaatttttctctcaagattatattgttgtctttttaactgataacatacttgtaaaaatgagttagcacacgttgaaatgatatgc

SEQ ID NO: 26056 - DNA, 136 bp, Unknown
  Description of Unknown: RightRegion for integrase B57 sequence
aaaggcggtcgatacttaaaagagaatttttctcttaagattatattgttgtctttttaactgataacatacttgtaaaaatgaactagcccatgttgaaatgatatccgctatgatatatcaactactaaatggc

SEQ ID NO: 26057 - DNA, 260 bp, Unknown
  Description of Unknown: RightRegion for integrase B58 sequence
aaaggcggtcgatacttaaaagagaatttttctctcaagattatattgttgtctttttaactgataacatacttgtaaaaatgaactaggtcacgtagaaatgatctgtgcaatgatatatcaattaacaaaaaatgctacaaaagaagaaatgataaaagcaggattcgatcaacactatgcagaacataaaaaagcactattcccaacagacgccaatggtgtaccatttacagcaagttactttgcaacaacaggag

SEQ ID NO: 26058 - DNA, 260 bp, Unknown
  Description of Unknown: RightRegion for integrase B59 sequence
aaaggcggtcgatacttaaaagagaatttttctctcaagattatattgttgtctttttaactgataacatacttgtaaaaatgagcttgcacacattgaaatgatttctaccatgatttatcaattaacaaaagacgccactattgaagagttaaaagaagccggattaggtacaaattatgcagaacacaataagtctttattcccaaccgattcaaatggagtacctttttctgttacatactttgctgcaacaggag

SEQ ID NO: 26059 - DNA, 260 bp, Unknown
  Description of Unknown: RightRegion for integrase B60 sequence
aaaggcggtcgatacttaaaagagaatttttctctcaagattatattgttgtctttttaactgataacatacttgtagaaatgaattagcgcatatcgaaattatttgtgcaatgttatatcagttaatgaaaggtgcaacgcctgaagaaatgaaagaagctggattagctagtcactatgcagaacataaaaatgctgtttatccagtagatgcaagtggtgtaccatttacagtgacttattttgcaacaactggag

SEQ ID NO: 26060 - DNA, 260 bp, Unknown
  Description of Unknown: RightRegion for integrase B61 sequence
aaaggcggtcgatacttaaaagaaaatttttctctcaagattatattgttgtctttttaactgataacatacttgtaaaaatgaaatcggacatcttgaaatgattgctagtatgatttatcaacttatgcaaggggcaagtatagatgaacttaaacaaaacggacttggaggattctttacagaacatgatggaggtctatttccagccgacccaatgggaattcccttttcagcttcttatattgaaacaacaggtg

SEQ ID NO: 26061 - DNA, 260 bp, Unknown
  Description of Unknown: RightRegion for integrase B62 sequence
aaaggcggtcgatacttaaaagagaatttttctctcaagattatattgttgtctttttaactgataacatacttgtagaaatgaattgacacaataagtttatcataaacaaaagccataagtaaaatagtgcaaaaaaaaagaaaggtaaccgacaaatatgtcggaaaccttctttttattttatagttaatacttgtcctggtttaattaaattagggttactaccaataacagatttattatcattgtagattttt

SEQ ID NO: 26062 - DNA, 260 bp, Unknown
  Description of Unknown: RightRegion for integrase B63 sequence
aaaggcggtcgatacttaaaagagaatttttctctcaagattatattgttgtctttttaactgataacatacttgtaaaaatgagcttgcacacattgaaatgatttctaccatgatttatcaattaacaaaagacgccactattgaagagttaaaagaagccggattaggtacaaattatgcagaacacaataaggctttattcccaaccgattcaaatggagtacctttttctgttacatactttgctgcaacaggag

SEQ ID NO: 26063 - DNA, 109 bp, Unknown; identical to SEQ ID NO: 26049
  Description of Unknown: RightRegion for integrase B64 sequence

SEQ ID NO: 26064 - DNA, 260 bp, Unknown
  Description of Unknown: RightRegion for integrase B65 sequence
aaaggcggtcgatacttaaaagagaatttttctctcaagattatattgttgtctttttaactgataacatacttgtaaaaatgaattttctcataatgaaatgatctgtacaatgttatatcaacttacaaaagatgccagtttaaaagaaatgcaagaagctggacttgatactttatacactgaacatggtaaaggtatttatccaactgactctaatggagttccttttacagcaacatattttgcatctgttggag

SEQ ID NO: 26065 - DNA, 260 bp, Unknown
  Description of Unknown: RightRegion for integrase B66 sequence
aaaggcggtcgatacttaaaagagaatttttctctcaagattatattgttgtctttttaactgataacatacttgtaaaaatgaattgacacaataagtttatcataaataaaagccacaagtaaaatagagcaaaaaaaaagaaaggtaaccgacaattatgtcggaaaccttctttttattttatcatttattttatagttaatacttgtcctggtttaattaaattagggttactaccaataacagatttattatca

SEQ ID NO: 26066 - DNA, 260 bp, Unknown
  Description of Unknown: RightRegion for integrase B67 sequence
aaaggcggtcgatacttaaaagaaaatttttctctcaagattatattgttgtctttttaactgataacatacttgtaaaaatgagttgggacatgtagaaatgctttctactatgatatatcaacttatgaagggtgctaccatagaagaaataagaaatgctggacttgatagtcattatgctgaacatgaaagagctgtatatccaacagatgccagtggtgttccttttacagttagctattttgctacaactggtg

SEQ ID NO: 26067 - DNA, 109 bp, Unknown; identical to SEQ ID NO: 26044
  Description of Unknown: RightRegion for integrase B68 sequence

SEQ ID NO: 26068 - DNA, 260 bp, Unknown
  Description of Unknown: RightRegion for integrase B69 sequence
atgagaataagtctatataataaaataaaaggtaatttggcacactataatcttatataaaattttcaaataaaaaatggggaatatcttacaaaagatactctcccttttttatctatacaaataattatgctttttatattttcaaaaatataagtttattataatatgttagtatcattaattttatttatacttatacttcgctcttcttttagtgttacaaatgattctatttcttttgttaaactatgatgact

SEQ ID NO: 26069 - DNA, 260 bp, Unknown
  Description of Unknown: RightRegion for integrase B70 sequence
gctgactatctccgcgccatcagtcaggacatcgacgtgctgcttgatttcatgggataaggatgctataagatgaaaagggaagagcctcactgcaaagcggtgaggctcttccctttggtggagcacagaggattcgtctggctcacgtgtggtggaggcgatgggagtcgaactaattcccgccgtttcatcgtgaaaaattacggattttcggctcaaaaatatggcgttgctatggcttgaaattcggcctatgg

SEQ ID NO: 26070 - DNA, 260 bp, Unknown
  Description of Unknown: RightRegion for integrase B71 sequence
gctgactatctccgcgccatcagtcaggacatcgacgtgctgcttgatttcatgggataaggatgccataagatgaaaagggaagagcctcaccgcaaagcggtgaggctcttccctttggtggagcacagagggttcgtctggctcacgtgtggtggaggcgatgggagtcgaactaattcccgccgtttcatcgtgaaaaattacggattttcggcttaaaaatatggcgttgctatggcttgaaattcggcctgtgg

SEQ ID NO: 26071 - DNA, 260 bp, Unknown
  Description of Unknown: RightRegion for integrase B72 sequence
cagacgaaagaacaggtatccgatacgaactcatcggagattactattatccctgcctgacagtagagaaaagtcctcccctttcaaaatatggtcgattgcggcaacgatatttgagggaacataagcgtgtgctatattttaatctgctgacaagcggaaagttatatgaacaccttgccgaaattgatacttcggctcgtgatatggcggaatatctgataaaggaaatggcaaagaagcaaggtgtaacggaagaa

SEQ ID NO: 26072 - DNA, 260 bp, Unknown
  Description of Unknown: RightRegion for integrase B73 sequence
cagacgaaagaactggtatccagtacgaactcatcggagattattactatccctgcttgacgatagaaaacgaagaaccgcccactctcacaaaatacggaagaatgagggaaaaatatttaagagaacacaggaaagtcttatattgcaatctgcttacaagtggaaagttatatgaacaccttgttgaaattgatacttcggcgtgtaatatggcggagcatctgataaaggaaatggcaagaaaacagggtgtgacg

SEQ ID NO: 26073 - DNA, 260 bp, Unknown
  Description of Unknown: RightRegion for integrase B74 sequence
gttgaagtgttagtgggttattcgggtaattcgcccaaatctttcaggatagaggtgtagatttgggcatgtgcctgttctgtcgggatgtccccatccaatagcccgtcatactgtgggtcaacagggtgctctttcaggaacgccttcatttgttcaatctcttccggcgtaatagttgactccatattgcgcaatctcctcaagaaaattagaaacaagatttattttagactgtgacgtcaaagaaggttcctttg

SEQ ID NO: 26074 - DNA, 260 bp, Unknown
  Description of Unknown: RightRegion for integrase B75 sequence
ccagtattgcttgatgccccgcctattaaagaaaacgggcaaaaacagaaaacagcataataaatgacgctgaaggcgacttgtgagaataaaatctcatgagccgccttctttgcgttttcagccggatacggcagaaaggaataaaacctatgacagaaaatgaaaagaagcttttacaggcgaagcacagattggaagaagccgagatgcgtgaccgacagaaagagcgaaaagcacggacacggcggctggttcag

SEQ ID NO: 26075 - DNA, 260 bp, Unknown
  Description of Unknown: RightRegion for integrase B76 sequence
tgtccgatctgcggcgaacagttgatcgcttgcgaacacgggccaaacgggaaagattgataggaaggggctttcgccccttcttttttaacagttaccgtttacaaccggtctgacaatctggtattcgatgaaggtcttcgccatgatttcggctaactctttatcaataccctgtttgattaagtcttccttgtatgctttctttgctcttttctctgctactgtcattttttatttccgcctttccttaacttctg

SEQ ID NO: 26076 - DNA, 260 bp, Unknown
  Description of Unknown: RightRegion for integrase B77 sequence
gcgattctggatgcgttccgtcactttggactcataggagaagacgggacggagaaataggacgccgtattttgcgttctaagacgttttaagcccgttggggtactcgtgtaccactcgggcttttttcgtgccttaaaacgcctctgaagcggtctgagggtatttgagcgcccttgcgcatctcgcatccgctcgatgcaagggtggccgccctgcgggcggcggtcggatgtgggtggacgtacagaagggatgcg

SEQ ID NO: 26077 - DNA, 260 bp, Unknown
  Description of Unknown: RightRegion for integrase B78 sequence
tttaaataccaactaccaaaaaataaatatatattaataaaaaaattagaccagaaataatttctggtctttaatgttaagtaaaccaaacatatgaaagcaatatcaattaactgaagtgtatttctttatgaaatctataaagttttatatttaccattatttgtgtataattaaataagaaagtaatttaaaattgtaatatactatatatatgaagtataataaaaattgaaggagaagatctatgaactgtataa

SEQ ID NO: 26078 - DNA, 260 bp, Unknown
  Description of Unknown: RightRegion for integrase B79 sequence
tgtccgatctgcggcgaacagttgatcgcttgcgaacacgggccaaacgggaaagattgatagaaaggggctttcgccccttcttttttaacagttaccgtttacaaccggtctgacaatccggtattcgatgaaggtcttcgccatgatttcggctaactctttatcaataccctgtttgattaagtcttccttgtatgctttctttgctcttttctctgctactgtcattttttatttccgcctttccttaacttctg

SEQ ID NO: 26079 - DNA, 260 bp, Unknown
  Description of Unknown: RightRegion for integrase B80 sequence
tgtccgatctgcggcgaacagttgatcgcttgcgaacacgggctaaacgggaaagattgataggaaggggctttcgccccttcttttttaacagttcccgtttacaaccggtctgacaatctggtattcgatgaaggtcttcgccatgatttcggctaactctttatcaataccctgtttgattaagtcttccttgtatgctttctttgctcttttctctgctactgtcattttttatttccgcctttccttaacttctg

SEQ ID NO: 26080 - DNA, 260 bp, Unknown
  Description of Unknown: RightRegion for integrase B81 sequence
tgtccgatctgtggcgaacagttaatcgcttgcgaacatgggccaaacggtaaaaattgataggaaggggctttcaccccttcttttttttaacagttaccattcacaaccggtctgacgatctgatattcaacgaatgtcttcgccatgatttcggctaactctttatcaatgccctgtttgattaagtcttccttgtatgctttctttgctcttttctctgctactgtcattttttatttccgcctttccttaacttc

SEQ ID NO: 26081 - DNA, 260 bp, Unknown
  Description of Unknown: RightRegion for integrase B82 sequence
tgtccgatctgcggcgaacagttgatcgcttgcgaacacgggccaaacgggaaagattgataggaaggggctttcgccccttctttttaacagttaccgtttacaaccggtcttacaatctggtattcaatgaaggtcttcgccatgatttcggctaactctttatcaataccctgtttgattaagtcttccttgtatgctttctttgctcttttctctgctactgtcatttttttatttccgcctttccttaacttctg

SEQ ID NO: 26082 - DNA, 260 bp, Unknown
  Description of Unknown: RightRegion for integrase B83 sequence
tgtccgatatgcggcgaacagttaatcgcttgcgaacatgggccaaacgggaaagattgatgggaaggggctttcgccccttctttttttaacagttaccgtttacaaccggtctgacgatctggtattcgatgaaggtcttcgccatgatttcggctaactctttatcaatgccctgtttgattaagtcttccttgtatgctttctttgctcttttctctgctactgtcatttttttatttccgcctttccttaacttc

SEQ ID NO: 26083 - DNA, 260 bp, Unknown
  Description of Unknown: RightRegion for integrase B84 sequence
tgtccgatctgcggcgaacagttaatcgcttgcgaacacgggccgaatgggaaagattagagaaagaaagccgccttcgggcggctctttctttacatcggattgataagcgtccgaaaatggaaacactgaatattatatccaccagcaccgattgtctggacttttgctatgcctttttcgccgataactataccatcaagatttcctttcggagaaactcgaagtttactggcgtctgttatctttccgacgatttc

SEQ ID NO: 26084 - DNA, 260 bp, Unknown
  Description of Unknown: RightRegion for integrase B85 sequence
tgtccgatctgtggcgaacagttgatcgcttgcgaacacgggccaaacgggaaagattagaaagaaagccgccttcgggcggctctttctttacatcggattgataagcgtccgaaaatggaaacactgaatattatatccaccagcaccgattgtctggacttttgctgtgcctttttcgccgataactataccatcaagatttcctttcggagaaactcgaagtttactggcgtctgttatctttccgacgatttcgt

SEQ ID NO: 26085 - DNA, 260 bp, Unknown
  Description of Unknown: RightRegion for integrase B86 sequence
tgtccgatctgcggtgaacagttaatcgcttgtgaacacgggccgaacgggaagaaataaaagaagccgctattcaaggcggcttctttctagtaataatatatttctgcttttggggattctatatttgtttttgatgcatattcttcaagcataactaatccatattcgcaaatacaacattctttacgcctgaccgcctggactgcaacgtggtgaattatccatttctttttgtgaaattcaacaattctatttct

SEQ ID NO: 26086 - DNA, 260 bp, Unknown
  Description of Unknown: RightRegion for integrase B87 sequence
tgtccgatctgcggcgaacagttaatcgcttgcgagcatgggccgaatgggaaagactagaaagaaagccgccttcgggcggctctttctttacatcggattgataagcgtccgaaaatggaaacactgaatattatatccaccagcaccgattgtctggacttttgctgtgcctttttcgccgataactataccatcaagatttcctttcggagaaactcgaagtttactggcgtcggttatctttccgacaatttcgt

SEQ ID NO: 26087 - DNA, 260 bp, Unknown; identical to SEQ ID NO: 26075
  Description of Unknown: RightRegion for integrase B88 sequence

SEQ ID NO: 26088 - DNA, 260 bp, Unknown
  Description of Unknown: RightRegion for integrase B89 sequence
tgtccgatctgcggcgaacagttgatcgcttgcgaacacgagccaaacgggaaagattgataggaaggggctttcgccccttctcagactgtagacaaagtggtgtttgaccgttaggtcagacaccatttttctcttgcgtttatttcattcagtaaaatttcaattctatatataaatgaaagtgattttttattcctcatagccagtatcttagctagtttttttaggttcatgcatgcaaaagtaagcccggcttt

SEQ ID NO: 26089 - DNA, 260 bp, Unknown
  Description of Unknown: RightRegion for integrase B90 sequence
tgtccgatctgcggtgaacagttgatcgcttgcgaacatgggccaaacggcaaagattgataggaaggggctttcgccccttcttttttaacagttaccattcacaaccggtcttacaatctggtattcaatgaaggtcttcgccatgatttcggctaactctttatcaataccctgtttgattaagtcttccttgtatgctttctttgctcttttctctgctactgtcattttttatttccgcctttccttaacttctg

SEQ ID NO: 26090 - DNA, 260 bp, Unknown
  Description of Unknown: RightRegion for integrase B91 sequence
tgtccgatctgcggcgaacagttaatcacttgcgaacatgggccgaacgggaaagattgatgggaaggggctttcgccccttcttttttaacagttaccgtttacaaccggtctgacaatctggtattcgatgaaggtcttcgccatgatttcggctaactctttatcaatgccctgtttgattaagtcttccttgtatgctttctttgctcttttctctgctactgtcattttttatttccgcctttccttaacttctg

SEQ ID NO: 26091 - DNA, 260 bp, Unknown
  Description of Unknown: RightRegion for integrase B92 sequence
cgttgccccgtatgccatgaacagctaattggctgtgaatgcgatttttcagacttataatcaaaacggccaggagaattaacctcctggctgctttttttatatcaactatacagtttacttctggtgttatagtataatcatagcatccccaaaggagaagaaacggtaacgttccttcactgcttcccggtaggcgtttaaaatatgctcccgtccggccagcgcgctgaccagcatcaccagtgtggactggggca

SEQ ID NO: 26092 - DNA, 260 bp, Unknown
  Description of Unknown: RightRegion for integrase B93 sequence
agtagacgagtaaatggcttaggtgctataatattagatagtataaacataatattatagtagggggataaagattgtgccagggttttttaataatggtaagttttgtgatgtaatatatgacctaaattttatagatataccttatatagatttgaatattacaccagagtatgacattagtaataccaagtttatatattttatatttgagtgtgctgtagcaactaaaaccttagatataaagccaacaataataa

SEQ ID NO: 26093 - DNA, 260 bp, Unknown
  Description of Unknown: RightRegion for integrase B94 sequence
aaactccccgttacagctataatacagaaagcttctcagacaaaaaaagaaaccacctaaaaactttcgtttctaggtggtttctttggtgcgagtagtgatacagcattttttgaaaaccatcgtagtacaatttgtttttgaggtcatcggatagcaacttgcttgtatcgcaccccgatgggcggctgtattgaaaaaacagttgccttttatataccacacaacctaaaaatcatcaagtacgcgcagcgttcact

SEQ ID NO: 26094 - DNA, 260 bp, Unknown
  Description of Unknown: RightRegion for integrase B95 sequence
ttccataaattcgggtgctacatctatgtcacggacgttgtcctctttcgtggtcgttaggtgatagcctttgttcactatgagcagtgacttatccacatggacggtgcagtggtcgaagtcaatatcttcccatgtcagcccggctaactcaccgcgccgcattccggtattcagcagccccatgacgatgacttgctccagtgtggaacagcgcggcagcaccttaaaaagagcctctacttcttccgggtgcaggc

SEQ ID NO: 26095 - DNA, 260 bp, Unknown
  Description of Unknown: RightRegion for integrase B96 sequence
ggatggcgtcacgctcccagagccatgagcggaagaagaaccggagccgccgccgtctgaagtgccgcccccgttgccggaagaagccgctcctttggggtcggcgtacttgtcccacgccgactcgtcgccatagaagatgtcgccgtcgaggttgccgttgtagccggagaggcgcaccgaactggagaactgccaggcgcagatggttccgttcacggagtagctggacgggatggcgttgttcttcccgtagttga

SEQ ID NO: 26096 - DNA, 260 bp, Unknown
  Description of Unknown: RightRegion for integrase B97 sequence
gggatcgtgtggctgcatgcgatgaggttctcgcgggagtcgacgtccgtcccgaaatagcaggggttgaggaacggcggcgcggacacgcgcatatgaacctccgtcgcgccggcctcgcggacgagctttacgatgtgggcgcaggtggtgccgcggacgatggagtcgtcgatcagtaccacgcgcttgccgcggatggtggaggagatggtgttgagcttgatgttgacggatttctcccgctggctctgctccgg

SEQ ID NO: 26097 - DNA, 260 bp, Unknown
  Description of Unknown: RightRegion for integrase B98 sequence
tgtccgatctgtggcggacgcctggcggaatgtgaacacgggccgaatggtaagaaatagcacaaggggcgttctgccccttgcttttgttttattaacaattcccatttactaccggtttgacgatctcataatcaacgaatgtcttcgccatgatttcggccaaatccttatctattccctggctgattaagttttccttatatgctttctttgctttcttctctgctgttgtcattttttatttccgcctttcctta

SEQ ID NO: 26098 - DNA, 236 bp, Unknown
  Description of Unknown: RightRegion for integrase B99 sequence
tgtccgatctgtggcgaacgactggcggaatgtgaacacgggccgaatggcaagaattaaaaataagccgcttccctggtttgggttgcggcttacttcttaaagcgtcgcgccttttacctgaacatatacagttttatttgtctttgcatctgtaattttgatttcttccagggaaatatttgtttcccactgatcgaattcttcgtcgtaagttcttttaatatcaacgtaat

SEQ ID NO: 26099 - DNA, 260 bp, Unknown
  Description of Unknown: RightRegion for integrase B100 sequence
tgtccgatctgcggcgaacagttaatcgcttgcgaacatgggccaaataagaaagattagaaagaaagccgcctttgggcggctctttctttacatcggattgataagtgttcgaaaatggaaacactggatattatatccgccagcgccgattgtctgaacttttgctgtgcctttttcgccgataacaattccgtcaagatttcctttcggagaaattcgaagttcactggcgtctgttatctttccgacaatttcgt

SEQ ID NO: 26100 - DNA, 260 bp, Unknown
  Description of Unknown: RightRegion for integrase B101 sequence
tgtccgatctgcggcggccgcctggcggaatgtgaacacgggccgaatagtaagaattaaaaagaagccgcttccctggtttgggttgcggcttacttcttaaagcgtcgcgccttttacctgaacatatacagttttatttgtctttgcatctgtaattttgatttcttccagggaaatatttgtttcccactgatcgaattcttcgtcgtaagttcttttaatatcaacgtaatattcccatttttcgatcggatcgt

SEQ ID NO: 26101 - DNA, 260 bp, Unknown
  Description of Unknown: RightRegion for integrase B102 sequence
tgtccaatctgcggcgaacgcctggcggaatgtgaacacgggccgaatggcaagaattaacacaaggggcgttctgccccttgcttttgttttattaacaattcccatttactaccggtttgacgatctcataatcaacgaatgtcttcgccatgatttcggccagatccttgtctattccctggctgattaagttttccttgtatgctttctttgctttcttctctgctactgtcattttttatttccgcctttcctta

SEQ ID NO: 26102 - DNA, 260 bp, Unknown
  Description of Unknown: RightRegion for integrase B103 sequence
tgtccaatctgcggcgaacgcctggcggaatgtgaacacgggccgaatggcaagaattaacacaaggggcgttctgccccttgcttttgttttattaacaattcccatttactaccggtttgacaatctcataatcaacgaatgtcttcgccatgatttcggccagatccttgtctattccctggctgattaagttttccttgtatgctttctttgctttcttctctgctactgtcattttttatttccgcctttcctta

SEQ ID NO: 26103 - DNA, 260 bp, Unknown
  Description of Unknown: RightRegion for integrase B104 sequence
tgtccgatctgcggcgaacagttaatcgcttgcgaacatgggccgaacgggaaagattgatgggaaggggctttcgccccttcttttttaacagttaccgtttacaaccggtctgacaatctggtattcgatgaaggtcttcgccatgatttcggctaactctttatcaatgccctgtttgattaagtcttccttgtatgctttctttgctcttttctctgctactgtcattttttatttccgcctttccttaacttctg

SEQ ID NO: 26104 - DNA, 260 bp, Unknown
  Description of Unknown: RightRegion for integrase B105 sequence
tgtccaatctgtggcgaacgcctggcggaatgtgaacacgggccgaatggcaagaattaacacaaggggcgttctgccccttgcttttgttttattaacaattcccatttactaccggtttgacgatctcataatcaacgaatgtcttcgccatgatttcggccagatccttgtctattccctggctgattaagttttccttgtatgctttttttgctttcttctctgctactgtcattttttatttccgcctttcctta

SEQ ID NO: 26105 - DNA, 260 bp, Unknown
  Description of Unknown: RightRegion for integrase B106 sequence
tgtccgatctgcggcggccgcctggcggaatgtgaacacgggccgaatggtaagaaataacgcaaggggcgttctgccccttgcgtttgttttattaacaattcccatttactactggtttgataatcccataatcaatgaatgtcttcgccatgatttcggccagttccttgtctattccctggctgattaagttttccttgtatgctttctttgctttcttctctgctactgtcattttttatttccgcctttcctta

SEQ ID NO: 26106 - DNA, 260 bp, Unknown
  Description of Unknown: RightRegion for integrase B107 sequence
tgtccgatctgcggcggccgcctggcagaatgtgaacacgggccgaatggtaagaaataacgcaaggggcgttctgccccttgcttttgttttattaacaattcccatttactactggtttgataatcccataatcaatgaatgtcttcgccatgatttcggccagttccttgtctattccctggctgattaagtttttcttgtatgctttctttgctttcttctctgctactgtcattttttatttccgcctttcctta

SEQ ID NO: 26107 - DNA, 260 bp, Unknown; identical to SEQ ID NO: 26086
  Description of Unknown: RightRegion for integrase B108 sequence

SEQ ID NO: 26108 - DNA, 260 bp, Unknown
  Description of Unknown: RightRegion for integrase B109 sequence
tgtccgatctgtggcggacgcctggcggaatgtgaacacgggccgaatggcaagaattaacacaaggggcgttctgccccttgcttttgttttattaacaattcccatttactaccggtttgacgatctcataatcaacgaatgtcttcgccatgatttcggccagatccttgtctattccctggctgattaagttttccttgtatgctttctttgctttcttctctgctactgtcattttttatttccgcctttcctta

SEQ ID NO: 26109 - DNA, 260 bp, Unknown
  Description of Unknown: RightRegion for integrase B110 sequence
tgtccgatctgcggtgaacagttaatcgcttgcgaacatgggccaaacggcaaagattgataggaaggggctttcgccccttcttttttaacagttaccattcacaaccggtcttacaatctggtattcaatgaaggtcttcgccatgatttcggctaactctttatcaataccctgtttgattaagtcttccttgtatgctttctttgctcttttctctgctactgtcattttttatttccgcctttccttaacttctg

SEQ ID NO: 26110 - DNA, 260 bp, Unknown
  Description of Unknown: RightRegion for integrase B111 sequence
tgtccgatctgcggcggacgcctggcggaatgtgaacacgggccggacaataagaattaaaaagaagccgcttccctggtttgggttgcggcttctttcttaaagtgtcgcgccttttacttgaacatatacagttttatttgtttttgcgtctgtaattttgatttcttccagggaaatattcgtttcccactgatcgaattcttcatcgtatgttcttttaatgtcaacgtaatattcccatttttcgatcggatcgt

SEQ ID NO: 26111 - DNA, 260 bp, Unknown
  Description of Unknown: RightRegion for integrase B112 sequence
tgtccaatctgcggcgaacgcctggcagaatgtgaacacgggccgaatggtaagaattaacacaaggggcgttctgccccttacttttgttttattaacaattcccatttactaccggtttgacgatctcataatcaacgaatgtcttcgccatgatttcggccagatccttgtctattccctgactgattaagttttccttgtatgctttctttgctttcttctctgctactgtcattttttatttccgcctttcctta

SEQ ID NO: 26112 - DNA, 260 bp, Unknown
  Description of Unknown: RightRegion for integrase B113 sequence
tgtccgatctgcggcggacgcctggcggaatgtgaacacgggccgaatggcaagaattaacacaaggggcgttctgccccttgcttttgttttattaacaattcccatttactaccggtttgacgatctcataatcaacgaatgtcttcgccatgatttcagccagatccttgtctattccctggctgattaagttttccttgtatgctttctttgctttcttctctgctactgtcattttttatttccgcctttcctta

SEQ ID NO: 26113 - DNA, 260 bp, Unknown; identical to SEQ ID NO: 26097
  Description of Unknown: RightRegion for integrase B114 sequence

SEQ ID NO: 26114 - DNA, 260 bp, Unknown
  Description of Unknown: RightRegion for integrase B115 sequence
tgtccgatctgtggcgaacgcctggcggaatgtgaacacgggccgaatggcaagaattaaaaataagccgcttccctggtttgggttgcggcttacttcttaaagcgtcgcgccttttacctgaacatatacagttttatttgtctttgcatctgtaattttgatttcttccagggaaatatttgtttcccactgatcgaattcttcgtcgtaagttcttttaatatcaacgtaatattcccatttttcgatcggatcgt

SEQ ID NO: 26115 - DNA, 260 bp, Unknown
  Description of Unknown: RightRegion for integrase B116 sequence
tgtccgatctgcggcggacgcctggcggaatgtgaacacgggccggacaataagaattaaaaagaagccgcttccctggtttgggttgcggcttctttcttaaagtgtcgcgccttttacttgaacatatacagttttatttgtttttgcgtctgtaattttgatttcttccagggaaatattcgtttcccactgatcgaattcttcatcgtatgttcttttaatgtcaacgtaatattcccatttttcgaccggatcgt

SEQ ID NO: 26116 - DNA, 260 bp, Unknown
  Description of Unknown: RightRegion for integrase B117 sequence
tgtccgatctgcggcggacgcctggcggaatgtgaacacgggccgaatggtaagaaatagcacaaggggcgttctgccccttgcttttgttttattaacaattcccatttactaccggtttgacgatctcataatcaacgaatgtcttcgccatgatttcggccaaatccttatctattccctggctgattaagttttccttgtatgctttctttgctttcttctctgctgttgtcattttttatttccgcctttcctta

SEQ ID NO: 26117 - DNA, 260 bp, Unknown
  Description of Unknown: RightRegion for integrase B118 sequence
tgtccgatctgcggcgaacagttaatcgcttgcgaacacgggccgaatgggaaagattgatgggaaggggctttcgccccttcttttttaacagttaccgtttacaaccggtctgacaatctggtattcgatgaaggtcttcgccatgatttcggctaactctttatcaatgccctgtttgattaagtcttccttgtatgctttctttgctcttttctctgctactgtcattttttatttccgcctttccttaacttctg

SEQ ID NO: 26118 - DNA, 260 bp, Unknown
  Description of Unknown: RightRegion for integrase B119 sequence
tgtccgatctgcggcggccgcctggcggaatgtgaacacgggccgaacggtaagaaatagcacaaggggcgttctgccccttgcttttgttttattaacaattcccatttactaccggtttgatgatctcataatcaacgaatgtcttcgccatgatttcggccagttccttgtctattccctgactgattaagttttccttatatgctttctttgctttcttctctgctactgtcattttttatttccgcctttcctta

SEQ ID NO: 26119 - DNA, 260 bp, Unknown; identical to SEQ ID NO: 26117
  Description of Unknown: RightRegion for integrase B120 sequence

SEQ ID NO: 26120 - DNA, 260 bp, Unknown
  Description of Unknown: RightRegion for integrase B121 sequence
tgtccgatctgcggcggacgcctggcggaatgtgaacacgggccgaatggcaagaattaacacaaggggcgttctgccccttgcttttgttttattaacaattcccatttactaccggtttgacgatctcataatcaacgaatgtcttcgccatgatttcggccagatccttgtctattccctggctgattaagttttccttgtatgctttctttgctttcttctctgctactgtcattttttatttccgcctttcctta

SEQ ID NO: 26121 - DNA, 260 bp, Unknown
  Description of Unknown: RightRegion for integrase B122 sequence
tgtccgatctgcggcgaacagttgatcgcttgcgaacacgggccaaacgggaaagattgatatgaaggggctttcaccccttctttttaacagttaccgtttacaaccggtcttacaatctggtattcgatgaaggtcttcgccatgatttcggctaactctttatcaataccctgtttgattaagtcttccttgtatgctttctttgctcttttctctgctactgtcattttttatttccgcctttccttaacttctga

SEQ ID NO: 26122 - DNA, 260 bp, Unknown
  Description of Unknown: RightRegion for integrase B123 sequence
tgtccgatctgcggtgaacagttaatcgcttgtgaacacgggccgaacgggaaagactagaaagaaagccgccttcgggcggctctttctttacatcggattgataagcgtccgaaaatggaaacactgaatattatatccaccagcaccgattgtctggacttttgctgtgcctttttcgccgataactataccatcaagatttcctttcggagaaactcgaagtttactggcgtcggttatctttccgacaatttcgt

SEQ ID NO: 26123 - DNA, 260 bp, Unknown
  Description of Unknown: RightRegion for integrase B124 sequence
tgtccgatctgcggtgaacagttgatcgcttgcgaacacgggccaaacgggaaagattgataggaaggggctttcgccccttcttttttaacagttaccgtttacaaccggtctgacaatctggtattcgatgaaggtcttcgccatgatttcggctaactctttatcaataccctgtttgattaagtcttccttgtatgctttctttgctcttttctctgctactgtcattttttatttccgcctttccttaacttctg

SEQ ID NO: 26124 - DNA, 260 bp, Unknown
  Description of Unknown: RightRegion for integrase B125 sequence
tgtccgatctgtggcgaacagttaattgcttgcgaacatgggccaaataagaaagattagaaagaaagccgcctttgggcggctctttctttacatcggattgataagtgttcgaaaatggaaacactggatattatatccgccagcgccgattgtctgaacttttgctgtgcctttttcgccgataacaattccgtcaagatttcctttcggagaaattcgaagttcactggcgtctgttatctttccgacaatttcgt

SEQ ID NO: 26125 - DNA, 260 bp, Unknown
  Description of Unknown: RightRegion for integrase B126 sequence
tgtccgatctgcggcgaacagttaatcgcttgcgaacacgggccgaatgggaaagattagaaagaaagccgccttcgggcggctctttctttacatcggattgataagcgtccgaaaatggaaacactgaatattatatccaccagcaccgattgtctggacttttgctgtgcctttttcgccgataactataccatcaagatttcctttcggagaaactcgaagtttactggcgtctgttatctttccgacgatttcgt

SEQ ID NO: 26126 - DNA, 260 bp, Unknown; identical to SEQ ID NO: 26108
  Description of Unknown: RightRegion for integrase B127 sequence

SEQ ID NO: 26127 - DNA, 260 bp, Unknown; identical to SEQ ID NO: 26112
  Description of Unknown: RightRegion for integrase B128 sequence

SEQ ID NO: 26128 - DNA, 260 bp, Unknown
  Description of Unknown: RightRegion for integrase B129 sequence
tgtccgatctgcggcggacgcttggcggaatgtgaacacgggccgaatggcaagaattaacacaaggggcgttctgccccttgcttttgttttattaacaattcccatttactaccggtttgacgatctcataatcaacgaatgtcttcgccatgatttcggccagatccttgtctattccctggctgattaagttttccttgtatgctttctttgctttcttctctgctactgtcattttttatttccgcctttcctta

SEQ ID NO: 26129 - DNA, 260 bp, Unknown
  Description of Unknown: RightRegion for integrase B130 sequence
ctgctccttttgggggcggtgttgctggccggctgcatcggggtaattaccctgttgtgagcccggaaagcccacgcaaagaaaaaaccgcccccggaaaggaagcctgccgcttcccctccgggggccttgccattaaaattcacttcgtttatcccgcagcatcagctcagtcagcgccgcggccgggtctttcccgttaaacagaatatcataaacacactcgcagatgggcatatggacccccagcttttgggcca

SEQ ID NO: 26130 - DNA, 260 bp, Unknown
  Description of Unknown: RightRegion for integrase B131 sequence
ccgacagcggagaaagtggaagccataaaggatgcgttgaagcattttgaagtgatttaatgaggataggcgtatcattagaaatagtggtacgcttatttttttacatagttgtcttttcgttgaccaatattttatttggttataaaagcggaggacagattttatactaaactgcctaattgatagaattaaaagcgttcactttgctattattgacttaaagagaaaaatcaaatataatatagtaaagtgcccaa

SEQ ID NO: 26131 - DNA, 260 bp, Unknown
  Description of Unknown: RightRegion for integrase B132 sequence
aaaaacttaaataaaattagtagtaaatttaatattgatataggctattttttaaagtaggaaattaataaaatttcctactttttatttttagtttttattattaatataactcttgtttttttaccagatttagcttgtctctttttcatatgtattcccccggtaatcactaattttactttactactaaattataccgctaatggttcaaatattcaagaacatctgttcgagttaaatattttaaatgttccttt

SEQ ID NO: 26132 - DNA, 260 bp, Unknown
  Description of Unknown: RightRegion for integrase B133 sequence
aaaaaaaatataagcaagatatgttcatattttaatatatctgaaaattactttgattaaaaatgcctagggagtattccctggacatctttttattattctcaatataactcttttcttattctttttttctttagcttttgatccacccataatatcgttatcccttccccaatattttttaatacacgaataatttacttaaattataccaaacatacattcgtgtttcaaatcgtttttttatttttaaattagat

SEQ ID NO: 26133 - DNA, 260 bp, Unknown
  Description of Unknown: RightRegion for integrase B134 sequence
gcccatcgggcgcagcaaatcattgacctgagtggacaattcggaaacgatcatagttgacacatcctttctatgcgtcaactctaaccgaaaaatacttaaaatttatcaattacgtcgatatacgtcgtaaagcgtcgaaacacgccaaacaaaaacagccccgaggaaccgtcaggctccccggggctgctgctatactatgattttgttggcgttaacatttttgtgatgccgcgaaaacgtcacatataggtctt

SEQ ID NO: 26134 - DNA, 260 bp, Unknown
  Description of Unknown: RightRegion for integrase B135 sequence
gcccatcgggcgcagcaaatcattgacctgagtggacaattcggaaacgatcatagttgacacatcctttctatgcgtcaactctaaccgaaaaatacttaaaatttaccaattacgtcgatatacgtcgtaaagcgtcgaaacacgccaaacaaaaacagccccgaggaaccgtcaggctccccggggctgctgctatgtatgggattaccgcttgatacagcggttcgtcagcttgccgtatacatcctcgtacagct

SEQ ID NO: 26135 - DNA, 260 bp, Unknown
  Description of Unknown: RightRegion for integrase B136 sequence
gtgtgcggatcagatgtcggagagggaacagaggagaacagagatcgagcagacctttgattatgatggctatcaggtcgcccggagggaactttttgcacatcttcgagatcccgccattataataaggaaagacagcatcacattcaacacggcctgcattgcaggtttggaggatgtggtgtacgtcaacatcatgtttaacagcgacttaaagcggcttgtagttaaaggctgtaatgaaaatgacagggatgctc

SEQ ID NO: 26136 - DNA, 118 bp, Unknown
  Description of Unknown: RightRegion for integrase B137 sequence
tcactatatcgggggtgttctttcattggagagtatggtatactcggcttagcccagtaaattggaagttgtgaacttagaattagaggtgttgaaaatgaaaataataattatattt

SEQ ID NO: 26137 - DNA, 260 bp, Unknown
  Description of Unknown: RightRegion for integrase B138 sequence
tgtccgcaggagaaggtggagtatattaaggatgcgttgaggcattttaagttgatttagtttgtggaggttggtatgcagagatatttattaacaatgtgttatgagcatgaaaattatgttaatgatatagaaagaaaaaaacaatataaaaatgatattgtgtcagtaatacataaacaaaagcttccttttttcaagaaacggaaaatattgaaactagtacaagctttatgtgatatgcaatttttattagatga

SEQ ID NO: 26138 - DNA, 260 bp, Unknown
  Description of Unknown: RightRegion for integrase B139 sequence
ccggaaaaggaagcagcaatcacggatgctttaaagcattttgggatgattccagactaagtgattgtatagctgattttctgaactttcataggaatacaacttgtcttcgaaaacaaagaaaaggagacaaacacatgaaagaaagaattacagaaaatggaattgattatgtattggtcggagattattatattcctgatctcaagctgccagaggaaaacagaccgattggtcgttggggacgaatgcaccgagat

SEQ ID NO: 26139 - DNA, 260 bp, Unknown
  Description of Unknown: RightRegion for integrase B140 sequence
gtaatccctacacacggagagcttgaagatgaattagaacaaatctatgaggcaatgtaaccggaggacgatatggataacgataatttttcctttctcgctgatgcagaaagctcgataacgggagataaaaccgaagggtacacgcccaaggagcaggagctgattcatcaattggttcaagaacgactgggcaagaaaaatgccatcgagtttgaatctctcgatgactatgtcgttccgcccaaaatgttcttctc

SEQ ID NO: 26140 - DNA, 260 bp, Unknown
  Description of Unknown: RightRegion for integrase B141 sequence
caccccggtttgtggaaagatatgcgtgtggatatatttctggtaaaaaaagaaaattgaaaaagttgtggaaaaaatccgattcgctgttctcttatgtattaggaggttccaaacctccgaaaaagtgaatagcgtcctctgctgtaccgcattggggaagcagcgccatgactggattccacgagcgtgccaagatgcgagaaaacatatcgcatggctgcaaagcgatgcgaggcaaagcgccgggaagggttgcc

SEQ ID NO: 26141 - DNA, 260 bp, Unknown
  Description of Unknown: RightRegion for integrase B142 sequence
tgtccgcaggaaaaggtggagtatattaaggatgcgttgaaacattttaagttgatttagtttgtggaggttggtatgcagagatatttattaacaatgtgttatgagcatgaaaattatgttaatgatatagaaagaaaaaaacaatataaaaatgatattgtgtcagcaatacataaacaaaagcttccttttttcaagaaacggaaaatattgaaactagtacaagctttatgtgatatgcaatttttattagatga

SEQ ID NO: 26142 - DNA, 260 bp, Unknown
  Description of Unknown: RightRegion for integrase B143 sequence
gatgctgcaactgagtgcggaacagatgtcggagcgggagcagaggagaacggagattgagcagacctttgattacgatggctatcaggtcgcacgacgggagctttttgcccatctccgggacccggccattataataaggggagatagcatcacgtttaacacagcatgcattgcaggactggaggatgtggtgtatatcaacattatgtttaacagcgaattaaagcggattgtggtcaaaggctgcaatgaaaatg

SEQ ID NO: 26143 - DNA, 260 bp, Unknown
  Description of Unknown: RightRegion for integrase B144 sequence
gccctctgcggtgaacacggggtgctcagtgctgaacacaagccagccgccgggacatagccagcgtgagatattctgcaccaggccgggccaatcctgcacatagtgaaaggcaagggaggacagcacaatatcaaagctgccggcaggaaagcaggcgtcctctatggcgcagcggcggtaggcaatggcgcgcgggccgcgtttttcccgtgctacggcaagcatcctttccgagatgtccagccccagcacactgg

SEQ ID NO: 26144 - DNA, 260 bp, Unknown
  Description of Unknown: RightRegion for integrase B145 sequence
attagcaaaagaattccaaatgaaaaatatctaaaacagctcaaatcgcaaataaaataagacttcaattagtgaagtcttattttatttgcgatttgagctgtttatattcttattgataagcttacttaaatagaaacttatatatatttttttatctatttagctatataaagttattattaattttatgtattcgccggcaaattgtaagcaaaattataattaccaacaaatttaattaagtccaataattagta

SEQ ID NO: 26145 - DNA, 260 bp, Unknown
  Description of Unknown: RightRegion for integrase B146 sequence
tcagattctgttacctcgtggatgcgtcataatcacaatttcctctttgcaaataattaagccccgataggggctatttcatgcctgtttttcactctcagtactaaatactctaaataatgtacttgagaggatttatgaatttattagttaaaattattttagaagtactcgcattcgttttttgcgtttgtgtactattaccattctacctggtttgtttaattatttacatgatcttaggtgtgctaacactgcct

SEQ ID NO: 26146 - DNA, 260 bp, Unknown
  Description of Unknown: RightRegion for integrase B147 sequence
gtagagatagctaaggctcagaatcaagttctagagtatcagtataagccggaagcataaactaaaaagcctattctatgataggctttctttttatatcttctctacgctgctatagagctttataatattctctcctttgattctgaatccgcttccgtggtcgtgtggtttaccaaagttcttaccactactataagctcccattctaatatcatacattatctctccttcatccagcatttttaagaaggtatcta

SEQ ID NO: 26147 - DNA, 95 bp, Unknown
  Description of Unknown: RightRegion for integrase B148 sequence
cccattcaatttgaaccgtcttttgaaacgcctgaagagatgaaaggagaatccgcatgaacgaactgaagaaatctatccatgacaacgccaac

SEQ ID NO: 26148 - DNA, 260 bp, Unknown
  Description of Unknown: RightRegion for integrase B149 sequence
gatttagttttatacaagaaagagcaaacagaagacgaagagaaaagctccaaagattagctaaagctgaagtagcatttcgaagaaaggctacgaagcaggaatttgactttgtcaaaattcctaaccccctatgagttttgacatactatcaaaactcgggggctctgcgaggcatcgaattagctatcttttcatcaaaaaacgaatgattttcttatcagaaaatcaagtgtaaaatttcattttacaagtcgttt

SEQ ID NO: 26149 - DNA, 260 bp, Unknown
  Description of Unknown: RightRegion for integrase B150 sequence
ctccttgctcgtgaaggttttgagatcttcgtaaacgaagatcaaattgattggttttagtgttgcggcttaccggggaatttatcgttcagataaattaaaaagagggtagtttgccgtttctttcgtttgcagctgataaaagtacatccctaaattagcgacaagtgccatgtaactcttgaaatattatagagcctttattatgggaagcattgctgatttacttgttaaaaagtgaatttcgacctcaccagacg

SEQ ID NO: 26150 - DNA, 260 bp, Unknown
  Description of Unknown: RightRegion for integrase B151 sequence
ctccttgctcgtgaaggttttgagatcttcgtaaacgaagatcaaattgattggttttagtgttgcggcttaccggggaatttatcgttcagataaattaaaaagagggtagtttgccgtttctttcgtttgcagctgataaaagtacatgccttaattagcgacaagtgccatgtaattcttgaaatattatagagcctttattatgggaagcattgctgatttacttgttaaaaagtgaatttcgacctcaccagacg

SEQ ID NO: 26151 - DNA, 109 bp, Unknown
  Description of Unknown: RightRegion for integrase B152 sequence
ggagaacgtagtgaaattgttgtaaaaccagtaaaattctccgaagaagatactaaataattgttgcaacttttactttggttatgggctatgttgcaacaatcaaatt

SEQ ID NO: 26152 - DNA, 260 bp, Unknown
  Description of Unknown: RightRegion for integrase B153 sequence
aaggaagaaatgcctgcgaatgagagggaagagcgaagtacctgtctgtcggaatcttgatagcatatattttcgtatggttcgtgacggaaggcatacatgttgttatttttctggcttaacagggtctgaggaaaacagaattatggcagaatacgatgctgaacaatcaagacgacattgccggtacctctgcagcagctcgcgccagattggagatacactagatctcgtctttggcgagtgaaaggagacaaaaa

SEQ ID NO: 26153 - DNA, 260 bp, Unknown
  Description of Unknown: RightRegion for integrase B154 sequence
atttcagtgggtgttaaaccagtaaagttctgcgaagataacactgaagaaaaaaattaacgtagcacgttttgtttttatgaaataaaaatgaaagtggtgatagttaatttgaataaaatttgtctgtgtaagataaattttattgcctcgcagagcccccgagttttgataaaatgtcaaaactcatagggggttaggacttatggcaaagccaaagtccatagctacgaagaaatttcaaaggagggattttatgg

SEQ ID NO: 26154 - DNA, 260 bp, Unknown
  Description of Unknown: RightRegion for integrase B155 sequence
aaggaaggaatgtctgtgaatgagcgggaaaagcgagatccccttctgtcggaatcctgatggcatatctttttgtgtggttcgtgacgggaagtataccagttattgttattctgacttaacagtacctgaacaattaagactactttgccggtgcctctgcagcagcttgcgcctgattggggatacactagatctcgtctttgacgagtgaaaggagacaaaaatggaaatggaaaatcaaagtacctttatctcac

SEQ ID NO: 26155 - DNA, 260 bp, Unknown
  Description of Unknown: RightRegion for integrase B156 sequence
cctatttcgataggtgttaagccagtaaaattctccgaagaagatacggaagaaaaataaaatgttgcagacacaaaaagattgcttttatttgagcaacatttgcaaaaatagatgtatgaatttgttttgtagaaaaacaaaatttaggcagatatttttgtatcaatttgaaagtaatttcaaattgatttgcctcgcagagcccccgagtttagatggcacgtctaaactcatagggggttaggactttaaacaag

SEQ ID NO: 26156 - DNA, 109 bp, Unknown
  Description of Unknown: RightRegion for integrase B157 sequence
attcctattgaaattggtgttaaacctgttaaaaaggaattgctctctatagaaaaataaaatgcgtggcacgttttgcgagtttactcgcgaaagtggcgatagcatt

SEQ ID NO: 26157 - DNA, 260 bp, Unknown
  Description of Unknown: RightRegion for integrase B158 sequence
caaaaaaagaagaactgccccgcatggcagtgcttctttctccgctgtattaataagtaagaaataagaataagaggtttttgtttcagccggttctttatctgcatctataatagcatttattttggcttattacaaatacacaggtatgatatcatgttggctgttatcgtttttatcaattatatttctttctatgccagatcatgtcctaagagtcgcacgaagtctgtccgtcttaagcagcaagtccaagcctt

SEQ ID NO: 26158 - DNA, 260 bp, Unknown
  Description of Unknown: RightRegion for integrase B159 sequence
gaagatggtacggtgtttcaggcgtactattttaatgacgatacaatttcaaagtggtaatataaaaggcagacgtttttagcgcctgccttttaattttggtgaacgattgttgaagggcatagaaatttatgctattataaaaatatcgcagatatgttcagattcacaaaggagaatttctgtgggaattttttcaagatttcgcaagaatgagcaaaaaataattctgaatctgttagcttgagcccaaaagaaaa

SEQ ID NO: 26159 - DNA, 260 bp, Unknown
  Description of Unknown: RightRegion for integrase B160 sequence
ttaagagatttaaaagatgttcctagtaaacctattaaaatggaattaataaaaaaataaaatatgtggcacgttttgttgaacttgttcaatgaaagtggcgatagtattttatatcaattctttatgtagttttatttcattacaaagttttgaaatattacgaaataaagcaaacggattctaaggtgttaaaccttagcccactggtatcttgttagtatgacaagatacctagggggttatatattatgtcaaaa

SEQ ID NO: 26160 - DNA, 260 bp, Unknown
  Description of Unknown: RightRegion for integrase B161 sequence
gacatgcatattcaggatcgtgacaaagatcgagattgcgatcgtcatggcgatgattgactcggtacccgcgccgatccagacgatgaacaccgggccgagcgccgttttcggcagcgcgttgagcacgaccagatatgggtcgagcacgcgcgagagcagctcgctccaccacaggccgatggcgatgagcgtgccgagcagcgtcccgagcacgaagccaaccacgacctcgaggcacgacgtgccgatgtgcagcc

SEQ ID NO: 26161 - DNA, 260 bp, Unknown
  Description of Unknown: RightRegion for integrase B162 sequence
tatgacgttgaccgcgtggatttagctgccgggatcgtgtatctgacgaaagccgcataacagaacgaacaccccgcaccgtgcgtttacaagacgcatggtgcggggtgtttttgcgttttcaggaggtttctcttcgcaacggccccagcataccgccaaattcgcctacaagaccgctacgatgcgctacgtcttttcttatatactttcaccccttccgccaaaacgccgccagaagccgtctacgggccgtacag

SEQ ID NO: 26162 - DNA, 260 bp, Unknown
  Description of Unknown: RightRegion for integrase B163 sequence
ccaaatccacgagagcggatgcgccaatccgatcaaaacgaaatcaacatgagtttgtaagcgccggggttctagagataaaaccccggcgcttttttgcgtttggaggaggtaatcgacataaatacagagcaaaacaaccccgcatcctatggcaagactgtcggacagaccgcccataagtgcgagggttgcccctacccccatcatggttttattttgctgggggaaagacggcagctgtatgcgcaccgatgtag

SEQ ID NO: 26163 - DNA, 260 bp, Unknown
  Description of Unknown: RightRegion for integrase B164 sequence
agaactggaaagcaagccttgattgatgtatacaataaggagaacaaagatgaaatataacaaattgtatcatatggtggccgccctgctggtggtgatgctgctggtgctgaccgcctgcggcagcgagccccggcagccgcaaacgcctaatgaaaccaccgtgaccggccctgaggagatcggtgagatatacctgtacggggaataccatgccaatgagcatctgctgcaaaaggagctggccctgtggaaggact

SEQ ID NO: 26164 - DNA, 260 bp, Unknown
  Description of Unknown: RightRegion for integrase B165 sequence
aaggcgcgggaatatcgggcaaagcgaaaggcgcaagccgctgcgctgcccgtatcgtaaaacagaataaccgacagcagaaagggattttccaactatgggaaatcctttttttgcacccaaaggaaggagtgacccaatgacagaaaagaaaaccacaaccaccgcgcagaagcagccggatggtatcatcacaacacagcggaacggacagaccatcgttgcggagttgtttttcaatcacagaagcgcagaaacat

SEQ ID NO: 26165 - DNA, 260 bp, Unknown; identical to SEQ ID NO: 26164
  Description of Unknown: RightRegion for integrase B166 sequence

SEQ ID NO: 26166 - DNA, 260 bp, Unknown
  Description of Unknown: RightRegion for integrase B167 sequence
ccagataatgttacggaagaagattttttaaataatgatgaaaattctagtcaagaataaatttatttacttgcgaagttcttgactagaaatagtaaaaataataatggaaaaagtttaaaacaaaaagttatctttcttgttttagacttatctactgaaaatttttttgttaactttttttctaaaaaaagttataacaaacgaacacgttttgttgaaacgtagtttcaatgaaagtgggaaaagtttgtttaata

SEQ ID NO: 26167 - DNA, 260 bp, Unknown
  Description of Unknown: RightRegion for integrase B168 sequence
ttgaagcattttcggatgctggatgaggatgtggagtacaggaaggagagtgcagagtgaagaaaaaatgttatatttatatccgtgtttctacggcgatgcaggtggacggttacagtctggaggcgcagaaggaacggctgatcaagtttgcggaatttcaggatatggaagtggtcagggaatactgtgatgcaggaaagtccggaaagagtattacaggcagaccggagtttcagcggatgctgcaggacgtgtct

SEQ ID NO: 26168 - DNA, 260 bp, Unknown
  Description of Unknown: RightRegion for integrase B169 sequence
atcacgcacgaattaggcggcgttatgccacaggaggtaagcaatggaaacttggaatgatgaataccgtatgggcgagcctgctgcggtgtatcaggttgcggaggtcaaggaacgggtgaatcccgaggctcctctgttggaaaagggcgacgagatcatcgacatgggcgctgatttcgattttgacggcttccaggtagtgcgaagagagttcttcgctcacttagcggagcccgcggtcacttttaataactgca

SEQ ID NO: 26169 - DNA, 260 bp, Unknown
  Description of Unknown: RightRegion for integrase B170 sequence
ggattatcacgtaaagactttatagcacgttttaaggtttgcaaggccgagaaaaggtaagtataaaaaggtcaaagtggattatgaagatatagaatatatcatttaaattaacagtatttttaaatactcaattatttgtggggtaaggtttatgaaaactaaagagcaaaaaaatttagaaaaggatgcagcagtagaagaaaaacggaaattaatcagagacgtgattgaaactctggcagagaaaggtatcccgc

SEQ ID NO: 26170 - DNA, 260 bp, Unknown
  Description of Unknown: RightRegion for integrase B171 sequence
attatgaaagaactgggtggtacaatgccgcaggaggaccgcaatggaaacatggaatgatatccggcacgcagatattcttgctccaaccgaagacagcgcatctgtacccatgaacgatttctctgatgtcccgtctctaagcacaaatgacgaagttgttgacatgggtacggattttgatttcgagggttttcaagtcgtccgcagagaattctttgcgcacttgcatgagccgtctgtgaccttcaacaattaca

SEQ ID NO: 26171 - DNA, 260 bp, Unknown
  Description of Unknown: RightRegion for integrase B172 sequence
tgcaacattatatatggtcaaatacgacagaagtcattgattttctttgtttatctgtgataccattcgttacgagacctccaccattgctctcttcgcttatggttgagactccggcactcaaagaaactttccgaaaaacacaacgaggtgaccatttttgaaacgtcgaacttttcttgtctgcaccgctgcacttttttgcggtgcgtttctggcagggggctgcactcaaaaaacttctcagcctgtccttcagc

SEQ ID NO: 26172 - DNA, 260 bp, Unknown
  Description of Unknown: RightRegion for integrase B173 sequence
ataattcgggacatgcgtcagggaggagaaatgaatggaactattcaaccagtggaatagacaggatccggtttccagtgcattgcagggcagatctgtaaacatccccatggaatcttcgtttgattatgccatactgcgtcagaccccggtgacggagactattgaaaataaagatgcacttgtcatggaagcggcacctgaagtgcaaagcgcaccgcttgcggagtcggagatcgtcaacatgaaggacttctcct

SEQ ID NO: 26173 - DNA, 260 bp, Unknown
  Description of Unknown: RightRegion for integrase B174 sequence
ataattcgggacatgcatcggggaggagaaatgaatggaactattcaaccagtggaatagaaaggacccggtttccagcgcattgcagggcagatctgttagcattcccgtggaaccttcatttgattatgctgcaccgcttcaggccccggcgcaggagccaatcgagaagaaagatgagcctgtcacggcagccgcccctgaagcgcaaagcgcacctcttgcggagtcggagatcgttgaaatggaggatttctctt

SEQ ID NO: 26174 - DNA, 260 bp, Unknown
  Description of Unknown: RightRegion for integrase B175 sequence
gtagtaacacacgttatacctcctgaaagtaccaagaagaaaaagagcaaaaataaataagctagtttgtaagtgcatatttttcacagataaatttttcattacatttttaacaataatcgcttaagtataatacaaaatttactgctcaaaatatgcacctgcctcgccctttactaactaaaatttagcaacattttaaattggcgaggcagaaatgaattttgctttgacaaaattcataaccccctatgagtttt

SEQ ID NO: 26175 - DNA, 260 bp, Unknown
  Description of Unknown: RightRegion for integrase B176 sequence
cagagatatatcaagcaggaactaagcgtgttaactagaccggaggtaaatcatgaatgatttgacagttgggaatattttgactccaagaggatcggacagtgttccgtctgatgtatccagtacacccatagattcgatcatggctgctgaaattgaagacgatattttggaaatgaacgaaagcttcgaccttgatgaatttcaggtagtgcgaagggagtttttcgctcatcttcatgagccgtcgatctgtttta

SEQ ID NO: 26176 - DNA, 260 bp, Unknown
  Description of Unknown: RightRegion for integrase B177 sequence
actatgacggagttcatggaatcgaacgtgtggcattccataccgttcaagcatttttgaaaaatgatgcgtcacatagtccggagcaaatgtgcgcccatcgggccatttgaaaacatagtcattcttctggtaggccttgccgaacaaacgctggttttcttcttcctcagcttttgctttcagaaaaatctcccgtgcttcttctgtcataggaaagcttcggcggctgctttgggttttcgtcttatccttttcca

SEQ ID NO: 26177 - DNA, 260 bp, Unknown
  Description of Unknown: RightRegion for integrase B178 sequence
gaatcgactggtttaacacgtaaagagttcatagagcgttatcggatagaccagatctagacgggcatttattttggcctagaaagtagattagaaataccgtaaacaaaaaataatatagtagtagttgttatgccccgtatcgattgatgtcgcattacggggctttttttcgtcttattgataaataattgtacataataattataaggggaaactatgttagattggttagtcagtgcttttgtattagtggtagg

SEQ ID NO: 26178 - DNA, 109 bp, Unknown
  Description of Unknown: RightRegion for integrase B179 sequence
actatgacggagttcatggaatcgaatgtgtggcattccataccgttcaagcatttttgaaaaatgatgcgtcacatagtccggagcaaatgtgcgcccatcgggccat

SEQ ID NO: 26179 - DNA, 260 bp, Unknown
  Description of Unknown: RightRegion for integrase B180 sequence
actatgacggagttcatggaatcgaatgtgtggcattccataccgttcaagcatttttgaaaaatgatgcgtcacatagtccggagcaaatgtgcgcccatcgggccatttgaaaacatagtcattcttctggtaggccttgccgaacaaacgctggttttcttcttcctcagcttttgctttcagaaaaatctcccgtgcttcttctgtcataggaaagcttcggcggctgctttgggttttcgtcttatccttttcca

SEQ ID NO: 26180 - DNA, 260 bp, Unknown
  Description of Unknown: RightRegion for integrase B181 sequence
ggtcagctaccaaaagaagaaccgcgcaaaggcagcatagcagccagcgcagcagtctaattatcacgaagcaaaggagaatgaatatgagtaagttgacttacattcgttgtggagattatgatatacccaacctaaaactttctgaacagccggaaacttctatcggcaagtacggcagaatgcgaaaatcctacctaaaggaacatcgccccattctctacaaccatctgctgatgagcgagaagctgtatccacac

SEQ ID NO: 26181 - DNA, 260 bp, Unknown
  Description of Unknown: RightRegion for integrase B182 sequence
ttcatcaacgagcaattaagcgcttcaaaacagttggaaggagcggactacaatgcatgaacaatccaacattccgacagttcggaatcttgatggtgtatattaccgtgtggttcgtgatggcaatcacgtcagccgatgcttttctgacctatcggaatctgaacaggatgtgattatggaaaagtatgacgcagagcagctcagacggctttgtcgctatctcagcatgagcctacgccagattggagatgcgctgg

SEQ ID NO: 26182 - DNA, 260 bp, Unknown
  Description of Unknown: RightRegion for integrase B183 sequence
ttcatagcagagcaattagcccccataaagcagatggaagaggtggattttaatgcctgaaaaaaacgatattccaatctttcggaatcttgatggagtgtactaccgcgtggttcgtgatggtatacatgtcaacagatgcttttctgatttgtccgaagccgagcaggatgtgatcatggcagagtataacacggaacagctcagacggctttgtcgctatctcagcatgagcctacgccagattggagatgcgctga

SEQ ID NO: 26183 - DNA, 260 bp, Unknown
  Description of Unknown: RightRegion for integrase B184 sequence
ttcatagcagagcaattagcccccataaagcagatggaagaggtggattttaatgcctgaaaaaaacaatattccaatctttcggaatcttgatggagtgtactaccgcgtggttcgtgatggtatacatgtcaacagatgcttttctgatttgtccgaagccgagcaggatgtgatcatggcagagtataacacggaacagctcagacggctttgtcgctatctcagcatgagcctacgccagattggagatgcgctgg

SEQ ID NO: 26184 - DNA, 260 bp, Unknown
  Description of Unknown: RightRegion for integrase B185 sequence
ttcatagccgagcaattagcccccataaagcagatggaagaggtggattttaatgcctgaaaaaaacgatatcccaatctttcggaatcttgatggagtgtactaccgtgtgattcgtgatggtatacatgtcaaccgatgcttttctgatttgtctgaagccgagcaggatatgatcatggcagagtataacgaggaacaactcagacggctttgtcgctatctcagcataagcctacgccagattggagatgcgctgg

SEQ ID NO: 26185 - DNA, 260 bp, Unknown
  Description of Unknown: RightRegion for integrase B186 sequence
ttcatagccgagcaattagcccccataaagcagaaggacgaggtggattttaatgcctgaaaaaaacgatatcccaatctttcggaatcttgatggagtgtactaccgtgtggttcgtgatggtatacatgtcaaccgatgcttttctgatttgtccgaagccgagcaggatgagatcatggcagagtataacgcggaacaactcagacggctttgtcgctatctcagcatgagcctacgccagattggagatgggctgg

SEQ ID NO: 26186 - DNA, 260 bp, Unknown
  Description of Unknown: RightRegion for integrase B187 sequence
ttcatagcagagcaattagcccccataaagcagatggaagaggtggattttaatgcctgaaaaaaacgatattcccatctttcggaatcttgatggagtgtactaccgcgtggttcgtgatggtatacatgtcaaccgatgcttttctgatttgtccgaagccgagcaggatgtgaccatggcagagtataacacggaacagctcagacggctttgtctctatctcagcatgagcctacgccagattggagatgcgctga

SEQ ID NO: 26187 - DNA, 260 bp, Unknown
  Description of Unknown: RightRegion for integrase B188 sequence
gcaattgaaaaaacaggattaactcgtcaacaatttattgaaaaattcaaaatacaataaaatattatagccccaacaatgttgattaagccccgaaaggggctatttcatgtctgttttttactctcagtactaaatactctaaagaatgtacttgagaggatgtatgaatttattagttaaaattattgtagaagtactggcattcgttttttgcgtttgtgtattattaccattctatctggtttgtttaatcatct

SEQ ID NO: 26188 - DNA, 260 bp, Unknown
  Description of Unknown: RightRegion for integrase B189 sequence
ccacagcgtccttatcgatcatgtaaatggacaggaccttgcttccgctgttttccatagcaccatcagaaaggtaggttttcagggtccggttataggtgtacgcctgtgccagttccatgatcttttctttctggtcctctgtaatgtggtcgtaggcttcagagtggatatagggttccccgttctggacgccaaaggtgttgctgtgcaagagcaaggagccattttcagggatgcagctcgataagggcagcggt

SEQ ID NO: 26189 - DNA, 260 bp, Unknown
  Description of Unknown: RightRegion for integrase B190 sequence
aatgagtttgtagatatagctatagctaataattgggttatagaataccaatatatctagtgacagttgaggaatcttattcaagatgtaaggagcaaatatcgttaataatggtgattatttgctcctttttagtacctttgcgctaaattggattaataggcaaataatgaatttacgctttatagatttattcgcagggattggaggaatccgcaaagggttagaactagctgctattgaagctggttataccccta

SEQ ID NO: 26190 - DNA, 260 bp, Unknown
  Description of Unknown: RightRegion for integrase B191 sequence
aatgagtttgtagatatagctatagctaataattgggttatagaataccagtatcaataataattatccccagcctattaaatagctgaattagttaaggtttagcctattggatatttatctgatagtgaactattgacagattaagtattgactaatttgaataataaaatattttgtatatttacttattattcctatatttgtaatatttaattaaattatactatgaatgctttctttgatggcttatggctgta

SEQ ID NO: 26191 - DNA, 260 bp, Unknown
  Description of Unknown: RightRegion for integrase B192 sequence
aatgagtttgtagatatagctatagctaataactgggttatagaataccagtatcaataataattatccccagcctaccgattaaagtaagctggggataattatatttagttagattttttacttttattataaagagtagttccccagtatattaagtatggtattaacaatgtatataatataaattcagagccatcataatatcttaaatctgtagatacaaatggaaacagccaatcacttgcatctctattttt

SEQ ID NO: 26192 - DNA, 260 bp, Unknown
  Description of Unknown: RightRegion for integrase B193 sequence
aatgagtttgtagatatagctatagctaataattgggttatagaataccaatatatctagtgacagctgaggaatcttattcacgctgtaaggagcaaataaccgtcgtaattaatggtttttgctccttttttagtaacttcgcactaaattagattgaagatgataaataaaagactgaaggctatttctttattctctggagcaatggggctagatttaggaatagagaaagctgggatagaaataaagttatgcgt

SEQ ID NO: 26193 - DNA, 260 bp, Unknown; identical to SEQ ID NO: 26189
  Description of Unknown: RightRegion for integrase B194 sequence

SEQ ID NO: 26194 - DNA, 260 bp, Unknown
  Description of Unknown: RightRegion for integrase B195 sequence
aatgagtttgtagatatagctatagctaataactgggttatagaataccagtaccagtaatagctactgcccttccaaagttaaacacaaaaactttggaagggtacttcatagtgaagtgaaattgggataatattctattggggaactaatcaagaatttccatatcactaatatttgaatgaatacaaggacagctacaataatacataaatacggcaatgatagcaaaaagactaactccacagcacccaactgga

SEQ ID NO: 26195 - DNA, 260 bp, Unknown; identical to SEQ ID NO: 26189
  Description of Unknown: RightRegion for integrase B196 sequence

SEQ ID NO: 26196 - DNA, 260 bp, Unknown; identical to SEQ ID NO: 26189
  Description of Unknown: RightRegion for integrase B197 sequence

SEQ ID NO: 26197 - DNA, 260 bp, Unknown
  Description of Unknown: RightRegion for integrase B198 sequence
aatgagtttgtagatatagctatagctaataattgggttatagaataccaatatatctagtgacagctgagaaatcttattcacgctgtaaggagcaaaaaccattaattatgacggctatttgctccttttttagtaactttgtccgattaaactgtagatggatgaaaccaatactgaaatataggggtggtaaatcaaaagaattatctatgttattgccttatgtacctgcctttgctggaaggtacatagagcct

SEQ ID NO: 26198 - DNA, 260 bp, Unknown
  Description of Unknown: RightRegion for integrase B199 sequence
cgtctcccagactgccttcagcgtttccagactcacttcgccggttgccgcggcatttgacttgccatagccggcggtggagacaccggctccggaacccgcggtgtccgctctctgcggctcctgatcctcaggctgtgccgtatccagatcttcatatacgcttgggtcggggtcgccgaagcgtacggacatcttggttacgctgtcctcaatcatcggcttataccaattattgtaagaccacgggcggctgtccg

SEQ ID NO: 26199 - DNA, 260 bp, Unknown
  Description of Unknown: RightRegion for integrase B200 sequence
aatgagtttgtagatatagctatagctaataactgggttatagaataccagtatatatagtgacaactgagaagtcttattcacgctgtaaggagcaaataaccgtcataattaatggtttttgctccttttttagtaactttgtattcttaaactgtagatggatgaagccaatactgaaatataggggtggtaaatcaaaagaattatctatgttattgccttatgtacctgcctttgctggaaggtacatagagcct

SEQ ID NO: 26200 - DNA, 260 bp, Unknown; identical to SEQ ID NO: 26189
  Description of Unknown: RightRegion for integrase B201 sequence

SEQ ID NO: 26201 - DNA, 260 bp, Unknown
  Description of Unknown: RightRegion for integrase B202 sequence
aatgagtttgtagatatagctatagctaataactgggttatagaataccaatatatctagtgacagctgaggaatcttattcacgctgtaaggagcaaaaaccattaattatgacggctatttgctccttttttagtaactttgtccgattaaactgtagatggatgaaaccaatactgaaatataggggtggtaaatcaaaagaattatctatgttattgccttatgtacctgcctttgctggaaggtacatagagcct

SEQ ID NO: 26202 - DNA, 260 bp, Unknown
  Description of Unknown: RightRegion for integrase B203 sequence
aatgagtttgtagatatagctatagctaataactgggttatagaataccagtatatatagtgacaactgagaagtcttattcacgctgtaaggagcaaataaccgtcataattaatggtttttactccttttttagtaacttcgcactaaattagattgaagatgataaataaaagactgaaggctatttctttattctctggagcaatgggattagatttaggaatagagaaagctggaatagaaataaagttatgcgt

SEQ ID NO: 26203 - DNA, 260 bp, Unknown; identical to SEQ ID NO: 26199
  Description of Unknown: RightRegion for integrase B204 sequence

SEQ ID NO: 26204 - DNA, 260 bp, Unknown; identical to SEQ ID NO: 26199
  Description of Unknown: RightRegion for integrase B205 sequence

SEQ ID NO: 26205 - DNA, 260 bp, Unknown; identical to SEQ ID NO: 26189
  Description of Unknown: RightRegion for integrase B206 sequence

SEQ ID NO: 26206 - DNA, 260 bp, Unknown
  Description of Unknown: RightRegion for integrase B207 sequence
aatgagtttgtagatatagctatagctaataattgggttatagaataccaatatatctagtgacagctgaggaatcttattcacgctgtaaggagcaaaaaccattaattatgacggctatttgctccttttttagtaactttgtccgattaaactgtagatggatgaaaccaatactgaaatataggggtggtaaatcaaaagaattatctatgttattgccttatgtacctgcctttgctggaaggtacatagagcct

SEQ ID NO: 26207 - DNA, 260 bp, Unknown; identical to SEQ ID NO: 26202
  Description of Unknown: RightRegion for integrase B208 sequence

SEQ ID NO: 26208 - DNA, 260 bp, Unknown
  Description of Unknown: RightRegion for integrase B209 sequence
aatgagtttgtagatatagctatagctaataactgggttatagaataccagtaccaataagcaacaaccgccagcctatcaaatagctgaattagttaaggtttagcctattggatatttatctgatagtgaactattgacagattaagtattgactaatttaaataataaaatattttgtatatttacttattattcatatatttgtaatatttaattaaattatgctatgagtgctttctttgatatgttatggctgt

SEQ ID NO: 26209 - DNA, 260 bp, Unknown
  Description of Unknown: RightRegion for integrase B210 sequence
aatgagtttgtagatatagctatagctaataattgggttatagaataccaatatatctagtgaaagttgaggaatcttattcaagatgtaaggagcaaatatccgtcgtaattaatggtttttgctccttttttagtaacttcgcactaaattagattgaagatgataaataaaagactgaaggctatttctttattctctggagcaatggggctagatttaggaatagagaaagctgggatagaaataaagttatgcgt

SEQ ID NO: 26210 - DNA, 260 bp, Unknown; identical to SEQ ID NO: 26202
  Description of Unknown: RightRegion for integrase B211 sequence

SEQ ID NO: 26211 - DNA, 260 bp, Unknown; identical to SEQ ID NO: 26209
  Description of Unknown: RightRegion for integrase B212 sequence

SEQ ID NO: 26212 - DNA, 260 bp, Unknown; identical to SEQ ID NO: 26199
  Description of Unknown: RightRegion for integrase B213 sequence

SEQ ID NO: 26213 - DNA, 260 bp, Unknown; identical to SEQ ID NO: 26189
  Description of Unknown: RightRegion for integrase B214 sequence

SEQ ID NO: 26214 - DNA, 260 bp, Unknown; identical to SEQ ID NO: 26189
  Description of Unknown: RightRegion for integrase B215 sequence

SEQ ID NO: 26215 - DNA, 260 bp, Unknown; identical to SEQ ID NO: 26189
  Description of Unknown: RightRegion for integrase B216 sequence

SEQ ID NO: 26216 - DNA, 260 bp, Unknown
  Description of Unknown: RightRegion for integrase B217 sequence
attgaagaaacactagaaaatatactcaataaccaaaaccaggaggaaacaaatgagtaaagaactaaacaacaatgaaatggaaatcattaacgacgatgatttcagttacgaaggataccaagttgttcgtggtgaattcttcgcacatatttttgagccttctttcacttttaacaactataaggtatctgtaaatacagcatgcattaaaaagctcccagaatatgattatgttcaaatcctggtaaaccctgatg

SEQ ID NO: 26217 - DNA, 260 bp, Unknown; identical to SEQ ID NO: 26209
  Description of Unknown: RightRegion for integrase B218 sequence

SEQ ID NO: 26218 - DNA, 260 bp, Unknown
  Description of Unknown: RightRegion for integrase B219 sequence
aatgagtttgtagatatagctatagctaataactgggttatagaataccagtatcaataagcaagaaaaggcactataaaatattttgtgtaaatgcaaaatacgggattcagttataagttctcttatatctgaatcccgttttacatttacacaaaattgtggacagtgccaaaggataagcggttataacttatcctttttgtttttattgaaataaagatttgtctgcatatttattaaggtctacagcttcacca

SEQ ID NO: 26219 - DNA, 260 bp, Unknown
  Description of Unknown: RightRegion for integrase B220 sequence
aatgagtttgtagctatagctatagctaataactgggttatagaataccaatatatctagtgacagctgagtaatcttattcaagatgtaaggagtaaataaccgtcgtaattaatggtttttgctccttttttagtaacttcgcactaaattagattgaagatgataaataaaagactgaaggctatttctttattctctggagcaatggggctagatttaggaatagagaaggctgggatagaaataaagttatgcgt

SEQ ID NO: 26220 - DNA, 260 bp, Unknown
  Description of Unknown: RightRegion for integrase B221 sequence
ttgctgagatgtaattcagtcatttttgtgttaatgggtaaaaccatttatcagccataaggcaaaattaaatatcaaatttagaccttgtagaagcaattctgcaaggtcttttttacccgcaaaacatagaaaaagccttgtaaacactgcgtttttgtcaataaaacaggaattttatttacattatttgcggcggtgctgttgataacgatttttacatcgtggttgataaacagctttgcacaatgacatagagc

SEQ ID NO: 26221 - DNA, 260 bp, Unknown; identical to SEQ ID NO: 26189
  Description of Unknown: RightRegion for integrase B222 sequence

SEQ ID NO: 26222 - DNA, 260 bp, Unknown
  Description of Unknown: RightRegion for integrase B223 sequence
aatgagtttgtagatatagctatagctaataattgggttatagaataccagtatcaataaacaaccgcaacttattaataagtgaattggtcaaggtctagcctattagatatttatctgatagtgaattactgacagattaagtattgactaatttaaataacaaaatattttgtatatttacttattgtttatacatttgtaatatttaattaaattatgctatgagtgctttctttgatatgttatggctgtatttt

SEQ ID NO: 26223 - DNA, 260 bp, Unknown; identical to SEQ ID NO: 26190
  Description of Unknown: RightRegion for integrase B224 sequence

SEQ ID NO: 26224 - DNA, 260 bp, Unknown
  Description of Unknown: RightRegion for integrase B225 sequence
gtggtttctccgggcaaaatgacgagacgattcacaagtttctgggaaaggtcgatttgaaagacacccagcaagtggaagccctcaaggattctttctgcaacaagtacgccagttccaaagttgagaatatgatggtcatcacccgcaacggtgaagtccattatatgaccgacaataatccccgaggggttgactgctcgtatctgggtggtaaactgaaagggagttacaacatccacacgcacccgccagatacc

SEQ ID NO: 26225 - DNA, 260 bp, Unknown
  Description of Unknown: RightRegion for integrase B226 sequence
ttcattccgctatcactgcttcccccagcagaaccgaagaaaggagttgcatcagcatgagcaaattagaaagaatcattcacgataacagtaatggtctggattatatccttgtcggggaaatctatctgccactgatcgcagtacccgaagagaaaagagagattggtttttatggaagtcttcacagaaactatctgaaagattacaagagtggcttgtattcctatctgacattgagtggtaagctctggacgtat

SEQ ID NO: 26226 - DNA, 260 bp, Unknown
  Description of Unknown: RightRegion for integrase B227 sequence
gggcagctaccaaaagaagaaccgcgcaaaggcagcatagcagccagcgcagcagtctaatcatcacgaagcaaaggagaatgaatatgagtaagttgacttacattcgttgtggagattatgatatacccaacctaaaactttctgaacagccggaaacttctatcggcaagtacggcaggatgcgaaaatcctacctgaaggaacatcgtcctattctctacaaccaactgctgatgagcgagaagctgtatccacac

SEQ ID NO: 26227 - DNA, 260 bp, Unknown
  Description of Unknown: RightRegion for integrase B228 sequence
gctcgcccgcgcccgtttgccttgcaagaaactatcccggaaaatgcgttgctgcggtaagttgacgggcgaccaatggtcgcccctacacacgtaataggacaagaatgcaattttttgacggtctgtttttgttgcccgctttttctgctgttttcagaatgctcaatttccccgcagccggaaaccgtggagtggttcatgcccatcctgcaaaatcagaaaccgggcacagaattgcagcgggcacttgcaatccg

SEQ ID NO: 26228 - DNA, 209 bp, Unknown
  Description of Unknown: RightRegion for integrase B229 sequence
ttacgcattccctatgctcgtcagctcgtatcttctggtccgtatggaaggcagaattgaaaagctgagtgccaatatcgataccctaacccgtgtgctgcaggaaagactcgtgatgcaatttccatatgtacagcagtaaatagtatatacaagcaaaaatatactaagaactaatcatatggcacaggggctgtcgtacacaaagt

SEQ ID NO: 26229 - DNA, 260 bp, Unknown
  Description of Unknown: RightRegion for integrase B230 sequence
gctcgcctgcgcccgtttgccttgcaagaaactatcccggaaaatgcgttgctgcggtaagttgacgggcgaccaatggtcgcccctacacacgcaatagggcaagaatgcaattttttgacggtctgtttttgttgtccgctttttctgctgttttcagaatgttcgatttccccgcagccggagaccgtggagtggttcatgcccatcctgtaaaatcagaaaccgggcacagaattgcagcgggcacttgcaatctg

SEQ ID NO: 26230 - DNA, 109 bp, Unknown
  Description of Unknown: RightRegion for integrase B231 sequence
attcctgtcagcaatatgccgaagttagagccgaaaatcgcaccacagaaaggagcttaatcatggaactgaattttatcaaatgtggggactactacatcccagacat

SEQ ID NO: 26231 - DNA, 260 bp, Unknown
  Description of Unknown: RightRegion for integrase B232 sequence
atcgtttatatcaaggaaaagttcgaacatagcgaatgctattgggaggtggtagagtagccagcacgttaaaaaagtatgccaccaacccgaactctgacagtagttccagaccccttgtaacccggcattgatttccgtcggcctacggctcggtgtggacaattactaccattattttgaacagttcggcctaaaacagcgcaccggcatcgacttgccgggggaagctgggactatcatgcataaaaaagaggata

SEQ ID NO: 26232 - DNA, 260 bp, Unknown
  Description of Unknown: RightRegion for integrase B233 sequence
atcgtttatatcaaggaaaagttcgaacatagcgaatgctattgggaggtggtagagtagccagcacgttaaaaaaatatgccaccaacccgaactctgacagtagttccagaccccttgtaacccggcattgatttccgtcggcctacggctcggtgtggacaattactaccattattttgaacagttcggcctaaaacagcgcaccggcatcgacctgccgggagaagctgggactatcatgcataaaaaagaggata

SEQ ID NO: 26233 - DNA, 260 bp, Unknown
  Description of Unknown: RightRegion for integrase B234 sequence
atcgtttatatcaaggaaaagttcgaacatagcgaatgctattgggaggtggtagagtagccagcacgttaaaaaagtatgccaccaacccgaactctgacagtagttccagaccccttgtaacccggcattgatttccgtcggcctgcggctcggtgtggacaattactaccattattttgaacagttcggcctaaaacagcgcaccggcatcgacctgccgggagaagctgggactatcatgcataaaaaagaggata

SEQ ID NO: 26234 - DNA, 260 bp, Unknown
  Description of Unknown: RightRegion for integrase B235 sequence
atcgtttatatcaaggaaaagttcgaacatagcgaatgctattgggaggtggtagagtagccagcacgttaaaaaagtatgccaccaacccgaactctgacagtagttccagaccccttgtaacccggcattgatttccgtcggcctacggctcggtgtggacaattactaccattattttgaacagttcggcctaaaacagcgcaccggcatcgacctgccgggggaagctgggactatcatgcataaaaaagaggata

SEQ ID NO: 26235 - DNA, 260 bp, Unknown; identical to SEQ ID NO: 26234
  Description of Unknown: RightRegion for integrase B236 sequence

SEQ ID NO: 26236 - DNA, 260 bp, Unknown
  Description of Unknown: RightRegion for integrase B237 sequence
atcgtttatattaaggaaaagttcgaacataacgaatgctattgggaggtggtagagtagccagcacgttaaaaaagtatgccaccaacccgaactctgacagtagttccagaccccttgtaacccggcattgatttccgtcggcctgcggctcggtgtggacaattactaccattattttgaacagttcggcctaaaacagcgcaccggcatcgacctgccgggagaagctgggactatcatgcataaaaaagaggata

SEQ ID NO: 26237 - DNA, 260 bp, Unknown
  Description of Unknown: RightRegion for integrase B238 sequence
atagaagaaaacatcaaatccatgatagatggaatgagacaggaggcaaataatgaatgatgagatacaactcaaggaagctgtagattatgtggaggacgaggcttttacctttgaaggttatcaggttgtacgaggagaatttttttctcacgtatttgaaccctccttcacatttaataactataaagtccaggtcaatactgcctgtattaagagattaccggattttgactatgttcaaatattggtgaacccag

SEQ ID NO: 26238 - DNA, 260 bp, Unknown
  Description of Unknown: RightRegion for integrase B239 sequence
gtccccgtcagcaatatgccgaagttagaaccgaaaatcgcaccgcagaaaggagcttgagaatgtggatagtacgatttatccgtaaggatgccaagcccgatgaagaatacttctatcactcgcagggtgaagcggaatatcatcgtgatctgttccagaacgatgattctggactatatgaaaaaatcgaagttatcaatgaaacagatttataaggaggttgctatggaactgaattttattaagtgcggagatta

SEQ ID NO: 26239 - DNA, 260 bp, Unknown
  Description of Unknown: RightRegion for integrase B240 sequence
gcgggcctgacggtctaccgcacggacatgcagggcaatatattgatcacagtggactgagaggactacatggcagagagaaaaacgcccaacaagggctatcagaaattaaaaagcgacctgagcgcgggagagatcggtcaggtctacatctttcacggcgaggagagttacctgcgtgaatactacctcggcgagatcaaaaaaaagctcgtccccgcgggctttgaggagttcaactaccaccgcctgagcggcaa

SEQ ID NO: 26240 - DNA, 260 bp, Unknown
  Description of Unknown: RightRegion for integrase B241 sequence
gaggaagcaagggagcaatcccaagcagcccaaaaagaaaagaaaaccggcgtagcctaaactacgccgattctctcacataaatgttttcttacggaaccacgccttttagccgtcctcttttcctatatagcaccgccttcgtgttgtccattgcaattgctgatcgtaccacctctcatcgtgaatacgcagtcctttccaatatccacagcaccgccatcaccatcgtcatctctgcaattcgcaatgatactgct

SEQ ID NO: 26241 - DNA, 260 bp, Unknown
  Description of Unknown: RightRegion for integrase B242 sequence
aaggcgcgggaataccgggcaaggagaaaggcacaggccgccgcagcacccacacagtaaaacagaataccgacaaccaagagggattttccgggctacgggaaatccctttttcgcgcccggagaaaggagccgcctatggcagaacagacccccgacagtatcatcacgacacagaggaacggacagaccatcgttgcggaattgtttttcaatcacagcggcacagaaacattccgcgacaagctgctcaaagtgat

SEQ ID NO: 26242 - DNA, 260 bp, Unknown
  Description of Unknown: RightRegion for integrase B243 sequence
atggtggaaatagctattaataatgggtgggtcttatcctattgttataaacaaaaataacagtcttatagtatgcctagtattactatagtacctagcaaagtattactagtataggtaatacattatatggcagtctagtagtggatattatattattgctactacctcattactagtatcagctatagaagtgcgcctatttttatttattacagaaatggtatctatatcttggtaatgtcctagaaactaaatat

SEQ ID NO: 26243 - DNA, 260 bp, Unknown
  Description of Unknown: RightRegion for integrase B244 sequence
aaagctggcaccatcctaccagagaatctacccgccgaaacaaaaggagaatggttatgattgatttgaaaaaacacatccatgatagtgccaatggtctggattacacccttgtcaacgaccactatctgccgaacctgaccgtagcagccccggcagagcaccccaccgggcggtggggccgcttacataagatgtatctgaaggagcaacatcccatccggtacaaccaactgctcctgtccggcgaactgggcggc

SEQ ID NO: 26244 - DNA, 260 bp, Unknown
  Description of Unknown: RightRegion for integrase B245 sequence
tttatccctgtcagcaatcttccgaagcgagagccacagaaaggagctatcacagcatgaaagaactgaaaccgagaatccacgaaaacggcattgactatatccttgtgggagattactatgtgccggatttgaagctgccagaggaaaagcgacctgtcgggcattggggcagacttcacaaagcctatttgcagaactaccgccccgccgtttacaacgagcttgttttgtcctgtcggcttcattccgtccttgcg

SEQ ID NO: 26245 - DNA, 260 bp, Unknown
  Description of Unknown: RightRegion for integrase B246 sequence
acggggtttgaagaactcaaaagttttatcacgcaagaattgcagggcgtagatatttaggaggtagtttatgaatgatattactgagcaaaggactatgacagagacctttgctccccaagcggactcagaactgcataaaattccggtattaaaagacgaggaagaattgattgaaatgagcacggacttcaacctggaggaattccaggttgtccgcagagagttctttgctcatattcgtgagcctgcggttacat

SEQ ID NO: 26246 - DNA, 260 bp, Unknown
  Description of Unknown: RightRegion for integrase B247 sequence
gttgtgcttttcaaagttgtatgcgccgatggcctcgtacatggtggcaccgctgtgtaggtcattgatgatgaactgccgcagcgtctcctccttttcggtaataatacacacccggcgcttgatgctgttatcgaagatgaaatgatccagcacgatgccgttgaagtaggtaccgaggatactcagtactacggtctttttatcgtagacaagggcggcagagagtgccacgcacatgcccgaaagggacatggcct

SEQ ID NO: 26247 - DNA, 260 bp, Unknown
  Description of Unknown: RightRegion for integrase B248 sequence
gatctcacgaaaggaatcgtggaaattatggaagaaataaaggagaatcgtaatgactgacacacctgtaaacacatgggaactggcacaaaatattcccgaagatatgagcaaacctcaaaatcccctgccagtaactatcacaccgggaaaggatggacaatccgacatcattgaagacatggatttcagctttgatggatatcaagttgtccgtggcgaatttttcgcccatacatttgagccttcctttacattta

SEQ ID NO: 26248 - DNA, 260 bp, Unknown
  Description of Unknown: RightRegion for integrase B249 sequence
tttatccctgtcagcaatcttccgaagcgagaaccacagaaaggagctatcacagcatgaacgaactgaaagcgagaatccatgaaaacggcattgactatgtccttgtgggagattactatgtgccggatttgaagctgccggaggaaaagcgacctatcgggcattggggcagacttcacaaagcctatttgcagaactaccgccccaccgtttacaacgagcttgttttgtcctgtcggcttcattccgtccttgcg

SEQ ID NO: 26249 - DNA, 260 bp, Unknown
  Description of Unknown: RightRegion for integrase B250 sequence
gaaatagcagaagaaaatcaatgggtattatcttttgaatacaactgcaaaaagaagtagctatctgatgtagttcttatatatataataaggtacacgtatataataaggtatatatataactaataaggtatagcttctatatttaaagtattataaaatccagtcagaaatggctggattttgcttttttattagtatctttgtcttctaaacataaataattaaatgaatgaaattgctagaagataataaaagat

SEQ ID NO: 26250 - DNA, 260 bp, Unknown
  Description of Unknown: RightRegion for integrase B251 sequence
gatatagcagaagaaaatcaatgggtattatcttttgaatacaactgcaaaaagaagtagctatctgatgtagttcttatatatatataataaggtacacgtatataataaggtataataaggcatagtttctatatttaaagtattataaaatccagtcagaaatggctggattttgctattttatttgtatctttgtacttaatttcataacaaatatgacatgaactttacagaattacgaacagaaattaatagct

SEQ ID NO: 26251 - DNA, 260 bp, Unknown
  Description of Unknown: RightRegion for integrase B252 sequence
aaagaagcaattgataaatttacgctcacaccttacttaaaaatcttaacaaacgaataaagaaaaaaagaaacccttgattttaaagggtttttttgttggggtttatcaatgacatttaaaatgtacgtactcttacgtatatacattatataaatgatttacacaacaaaaaaaagagtgcctagcactcttttataaaccacacttttccatggtctgctctcaaatctctttgagaatatacataatatgcacca

SEQ ID NO: 26252 - DNA, 260 bp, Unknown
  Description of Unknown: RightRegion for integrase B253 sequence
tctaagtgccgatacggcgagcgaggtgccgcagccgccggagcggtgcttgagccgtaaggtgggaattgtgcggtattgccttaaatttccccgcagccggagaccgtggagtggttcatgcccatcctgtaaaatcagaaaccgggcacagaattacagcgggcacttgcaatccgggcggaaaacaggtataatagcaactgttacctgtctcagtagctcagctggatagagcacacgcctcctaaggttgcgtt

SEQ ID NO: 26253 - DNA, 260 bp, Unknown
  Description of Unknown: RightRegion for integrase B254 sequence
cgagtgtatcacggcattaacccgcataaaaccttgatttttagcatttttaagacttgaaaaatggtgatttgccacccatttgccaccattgaacattgaacacgaaaaagaggattgaaccgttgaacattttggcggctcaatcctcttttttctcttatgacagtttcttttgttctatcgcctgttcaaaaatatcaacagaacggtttgccatcgcttctgtatcatgtacataggtttgcagggtggtttga

SEQ ID NO: 26254 - DNA, 260 bp, Unknown
  Description of Unknown: RightRegion for integrase B255 sequence
tataatcagaatcataaaattcataaatggaacgacttaaaagtttctatttatctataggctaaaaaaatagggtaggagattacaaataagtagtcttctaccctatattatatatagttagttggacgaccattattggtcgtcctttttttttgattatttaaaagtccaataaagatgttatagagaaatccaattaatgaaaattatctttatttttaaatttaaaaactgttttaccaaatatcttataatac

SEQ ID NO: 26255 - DNA, 260 bp, Unknown
  Description of Unknown: RightRegion for integrase B256 sequence
tctaagtgccgatacggcgagcgaggtgccgcagccgccggagcggtgcttgagccgtaaggtgggaattgtgcggtattgccttaaatttccccgcagccggagaccgtggagtggttcatgcccatcctgtaaaatcagaaaccgggcacagaattacagcgggcacttgcaatccgggcggaaaacaggtataatagcaactgttacctgtctcagtagctcagctggatagagcacacgcctcctaagcgtggggc

SEQ ID NO: 26256 - DNA, 260 bp, Unknown
  Description of Unknown: RightRegion for integrase B257 sequence
aggaacgttttgattctgcaaatgtggaattgcaacagatgcgtgaagctggtacaataaaggcgaaaggcaagttgattgaatcgccgcctgcacccaatgaaatcaactttgcgagcgaacacgttctgcagcgctgggcagaacgtggcatggggccgatggatgagggcggtcaaaaattgatggaggtggtcaaaaagcatggaattccgcattagtgacgatgtaaaactcgaagaatggttttgtcccattta

SEQ ID NO: 26257 - DNA, 260 bp, Unknown
  Description of Unknown: RightRegion for integrase B258 sequence
ttcgtggctactctgcacaggctgctattgctgaaatgtaattcagtcattttgtactgatattatatagcgtaatattttgggctgtcccgttttgggacagcccttttgcattgcttaaataataaaaaatcagaacaaggctttttaaagtcttgcgggctttgcccacacccacaaactttgaaaagtcataatttattcgacatcatattattgaaaagtcagattatttgtgataaaatttacttgaaaagtca

SEQ ID NO: 26258 - DNA, 260 bp, Unknown
  Description of Unknown: RightRegion for integrase B259 sequence
tcctatcctattgacaacacatgtggagatggtggtattattgtcaagaaaatagaataacaagctataaaactgtcgaaataggtggcttttaggattttaaaagaaatcagttctataataaattaaaaatcgtgttggtagaaaaatcgtctacttctaccaacacgattttacaaagagccagtacttacatctctttttctcctgtaaaaccattgtatattgatactttaaggagtttcaatcattcgatctgt

SEQ ID NO: 26259 - DNA, 260 bp, Unknown
  Description of Unknown: RightRegion for integrase B260 sequence
ttcgtggctactctgcacaggctgctatcgcaaacaagtaatccacacaggatgtattgacaggtaacttaatacaagtttattcctgatataaaatcagagggtgttccaatcggaacaccctctttttgatgtattatgtaaaataaatttatattttgttgcttttgaaaatataatgatgattttcaaaggagacaaatgtatgggaaataacattatatctaaggtacttaaatttgtgggtataggcgtaatta

SEQ ID NO: 26260 - DNA, 260 bp, Unknown
  Description of Unknown: RightRegion for integrase B261 sequence
gctatagacaaattcacgcttacacctcatttaaagatactaattgatgaaattgaataaataagcaaaaagaaaaacccttgatattaaagggtttttttgttggtgtaaatcaatgataattaaaatgtacgtactcttacgtatatttattatataaatgataaacacaacgatttaatcatcaatattaaagtaatatcttttaatatcacttttgctaaagcgtttcattaattcttttaaatcatttctttcaa

SEQ ID NO: 26261 - DNA, 260 bp, Unknown
  Description of Unknown: RightRegion for integrase B262 sequence
gctatagacaaattcacgcttacacctcatttaaaaatactccttgaagaaaatgaataaataagcaaaaaaaagaaacccttgatattaaagggtttttttgatgggttttatcaatgataattaaaatgtgcgtactcttacgtatatttatgttgtaaatgataaacaccacgatttaatcataaacattcaaataataacgtttaacgttttcttcaccaaatttatcaatgagattttgaactgtttcttcacta

SEQ ID NO: 26262 - DNA, 260 bp, Unknown
  Description of Unknown: RightRegion for integrase B263 sequence
gctatagacaaattcacacttacacctcatttaaaaatactccttgaagaaaatgaataaataagcaaaaaaagaaacccttgatattaaagggtttttttgatgggttttatcaatgataattaaaaggtacgtactcttacgtatatttatgttgtaaatgataaacaccacgatttaatcataaacattcaaataataacgtttaacgttttcttcaccaaatttatcaatgagattttgaactgtttcttcactat

SEQ ID NO: 26263 - DNA, 260 bp, Unknown
  Description of Unknown: RightRegion for integrase B264 sequence
aggagcagagaacagaaaaggatagcatgtatgaactgtccgcaaaaaatgaccgactgatatagatcctactgcagatacattagaagaagcaaaaaagtggaaaaaagagaataaatatgataatgaaaaagaaaaagtatgttggccattcggagaaatgaatggtaaaaaaatgtggatgtctatactagctatagttagaatgcagcaaactgattttaaaaatacaggtattccttatgaatcttcatctaata

SEQ ID NO: 26264 - DNA, 260 bp, Unknown
  Description of Unknown: RightRegion for integrase B265 sequence
tcatcgtcgataacggcaaaatcgtccgtgccggtctcagccgcctgctgggcgctctgagcgtttctagcttcgctggcataactttccgtctgttcatcaaaaccccgcgtagacgtgctgtcaggggctttcgagccgcaaaagctgacctcacgcacctgaatctcataggcagtgcggttgttgccctgcttgtcctgatatttccgggtctgcaagctgccattgacggcgatcatgctgcccttgtcgaaata

SEQ ID NO: 26265 - DNA, 260 bp, Unknown
  Description of Unknown: RightRegion for integrase B266 sequence
gcaatagacaaatttacccttacacctcatttaaagatactaattgatgaaactgaataaataagcaaaaagaaaaacccttgatattaaagggtttttttgttggtgtaaatcaatgataataagaatgagcgtactcttacgtatatttatgttgtaagtgataaacaccacgatttaatcataaacattcaatacacctccaaataataacgtttgacattttcttcaccgaatttattgataagattttcaattgt

SEQ ID NO: 26266 - DNA, 260 bp, Unknown
  Description of Unknown: RightRegion for integrase B267 sequence
gctatagacaaattcacgcttacacctcatttaaagatactaattgatgaaattgaataaataagcaaaaaaagaaacccttgatattaaagggtttttttgatgggttttttcaatgataattaaaaggtacgtactcttacgtatatttatgttgtaagtgataaacacaacgatttaatcataaacattcaatacacctccaaataataacgtttgacattttcttcaccgaatttattgataagattttcaattgt

SEQ ID NO: 26267 - DNA, 260 bp, Unknown
  Description of Unknown: RightRegion for integrase B268 sequence
gccaacgagaatgtcatcccttacaattatatatatgagcgcgcgtatgaaggggaatgaatacatagagaaagccaaagcacttgtcgaggcaaaaaagcaatattacctaactttatctgaactatcaaggtttagtccagatgaagagagtgcttatgccaaaatacaaaagatgtctcagttcttacgcaccgtcattgattatgggaaaagaggggaagatatacctctgtctttattcatgaatcttggtggta

SEQ ID NO: 26268 - DNA, 260 bp, Unknown
  Description of Unknown: RightRegion for integrase B269 sequence
gtaaacattagagatgtatttgaaacaatacctgataatgttaccaaagaagatttttaaaatacgtggcacgttatgaaattacaaagtaattttgtaagtggcgatatcaatttaaaaattaatactttatgaactttaactaatacgatagtttagttattgtgaaataaagtataaacggtttcaaaggtggtaaaccttagcttccatatcttggtcatgacaagatatatagaaagttatgaataatgacaaag

SEQ ID NO: 26269 - DNA, 260 bp, Unknown
  Description of Unknown: RightRegion for integrase B270 sequence
aaatacttacgtaagaatcaatggtctgacgcaatcattgatgtcgcagtagaactataaagagttctattaatgtccaaacgatatataatacctcatggtgtgagaaatcatgccgtggggtattattttatttacaattaataaacgtaaaaaaataggacagaagagtattattgcgcaactgtcctaaattattttcatcctcttgacttgtagaacaaatgtttgtataatgtaagcaaggaggtaaaatacta

SEQ ID NO: 26270 - DNA, 260 bp, Unknown
  Description of Unknown: RightRegion for integrase B271 sequence
aaatacttacgtaagaatcaatggtctgacgcaatcattgatgtcgcagtagaactataaagagttctattaatgtccaaacgatatataatacctcatggtgtgagaaatcataccgtggggtattattttatttacaatttacagacgtaaaaaataggacagaagagtatcattactcaactgtcctaaattatttttattctcttgacttgcagaacaaatgtttgtataatgtaagcatggaggtaagatgctat

SEQ ID NO: 26271 - DNA, 260 bp, Unknown
  Description of Unknown: RightRegion for integrase B272 sequence
aaaaggatgaactggagaagaaatgatcctgatgatatggaattaactatttatatgtagttgttaaaacccttgaaatcaagggttttttattgttggtggaactgcttgtaggtgtatggtacttatagtacagaaccaagataatatatgttattacaccaacaaaaaaagagccggtataaaccaactctttaaataattacttttcaatttcccaagccttatcagataaataaccatttatctcaccagatacg

SEQ ID NO: 26272 - DNA, 260 bp, Unknown
  Description of Unknown: RightRegion for integrase B273 sequence
cgcggtcatccggcggcatccgccagttccgcgaaaacgacatcgagtggctgcgggtgatcggctgcatgaaaaaagccggtatgtccatcaaggacatccggcaggaactgaagcagcagccggagggctgagcccttctcagtgccagaacacgatgcccagtacggcagaaagcaggatcatcccaatgggggatggtgctttctgccgtatttttttgtacccgcagtgcaccagccccagcagcacaaacaccg

SEQ ID NO: 26273 - DNA, 260 bp, Unknown
  Description of Unknown: RightRegion for integrase B274 sequence
gaaaccattatacaaaatataaagaatattattacagaaattaaaggagacacccaatgagcgagcaacctataaatcaatggaatatgactacagaaccttctgatatgatgaaaatcaacacacctatgccaataacagtcgcgcccagcccctcaaatcaaatggaagtcattgacgatgattctttcagctatgacggttatcaagttgtacgtggcgaattcttcgctcatatttacgaaccttcgtttacgttt

SEQ ID NO: 26274 - DNA, 260 bp, Unknown; identical to SEQ ID NO: 26273
  Description of Unknown: RightRegion for integrase B275 sequence

SEQ ID NO: 26275 - DNA, 260 bp, Unknown
  Description of Unknown: RightRegion for integrase B276 sequence
cgccttgcgggtggtatcaaaggtatccacggccttcatcagcccaatggttccaattgagatcaggtcctcctggtcgccgggctgggcgtagtatttctttgccacatgggccaccagccgcaagttgtgccggatgatcttctcccgcgcactcctgtcccccgcccgcagagccgcaaaggcttcgatctcctcccgcgcgctgagcggctttgggaaactccccgcttccagatgcagcgccagcaccagaaatt

SEQ ID NO: 26276 - DNA, 260 bp, Unknown
  Description of Unknown: RightRegion for integrase B277 sequence
aaaaggatgaactggagaagaaatgattctgatgatatggaattaactatttatatgtaattgctaaaacccttgattttcaagggttttttattgttggtggaactgcttgtaggtgtgtggtacttatagtactgaaccatagtaatatatgttattataccaacaaaaaaaaagaaccgtttaaggttctttaatctttgctactttgttgctgcttttaagtcattgattacttgttttatttctttttcatcagt

SEQ ID NO: 26277 - DNA, 260 bp, Unknown
  Description of Unknown: RightRegion for integrase B278 sequence
gaaaccattatacaaaatataaagaatattattacagaaattaaaggagacacccaatgagcgagcaacctataaatcaatggaatatgactacagaaccttctgatatgatgaaaatcaacacacctatgccaataacagtcgcacccagcccctcaaatcaaatggaagtcattgacgatgattctttcagctatgacggttatcaagttgtacgtggcgaattcttcgctcatatttacgaaccttcgtttacattt

SEQ ID NO: 26278 - DNA, 260 bp, Unknown
  Description of Unknown: RightRegion for integrase B279 sequence
gaaaccattatacaaaatataaagaatattattacagaaattaaaggagacacccaatgagcgagcaacctataaatcaatggaatatgactacagaaccttctgatatgatgaaaatcaacacacctatgccaataacagtcgcacccagcccctcaaatcaaatggaagtcattgacgatgattctttcagctatgacggttatcaagttgtacgtggcgaattcttcgctcatatttacgaaccttcgtttacgttt

SEQ ID NO: 26279 - DNA, 260 bp, Unknown
  Description of Unknown: RightRegion for integrase B280 sequence
aaatacttacgtaagaatcaatggtctgacgcaatcattgatgtcgcagtagaactataaagagttctattaatgtccaaacgatatataatacctcatggtgtgagaaatcatactgtggggtattattttatttacaattcataaacgtaaaaaataggacagaagagtatcattactcaactgtcctaaattattttatcctcttgacttgcagaacaaatgtttgtataatgtaagcatggaggtaagatgctatg

SEQ ID NO: 26280 - DNA, 260 bp, Unknown; identical to SEQ ID NO: 26278
  Description of Unknown: RightRegion for integrase B281 sequence

SEQ ID NO: 26281 - DNA, 260 bp, Unknown
  Description of Unknown: RightRegion for integrase B282 sequence
aaatacttacgtaagaatcaatggtctgacgcaatcattgatgtcgcagtagaactataaagagttctattaatgtccaaacgatatataatacctcatggtgtgagaaatcatactgtggggtattattttatttacaattcacagacgtaaaaaataggacagaagagtatcattactcaactgtcctaaattatttttatcctcttgacttgcagaacaaatgtttgtataatgtaaacatggaggtaaagatacta

SEQ ID NO: 26282 - DNA, 260 bp, Unknown
  Description of Unknown: RightRegion for integrase B283 sequence
aacattagagatgtatttgaaacaataccagataatgttaaggaagaagatttttgttaaataaaattatgagaacttttacttacgatagtttgtaaaaggtacgaataattttcatagataaaataataagcaatgcttactattttatcagaagtcttatgtagttttaactatttacgaagtttatagttattacgaaataagacaggtggattctaaggttgcctaaaccttagcccccagattttgatacttgt

SEQ ID NO: 26283 - DNA, 260 bp, Unknown; identical to SEQ ID NO: 26278
  Description of Unknown: RightRegion for integrase B284 sequence

SEQ ID NO: 26284 - DNA, 260 bp, Unknown
  Description of Unknown: RightRegion for integrase B285 sequence
gcgcgggaataccgggcgaagaaaaaggcgcaggcagccgccgcacagcccacacagtaaaacagaataaccgtcaaccaagagggattttccgagttacgggaaatccctcttttgcgcccaaagaaaggagccgcctatggcagaacagacccccgacagcatcatcacgacccagaggaacgggcagaccattgttgcggagttatttttcaatcacagcagcacagaaacattccgcgacaagctgctcaaactgg

SEQ ID NO: 26285 - DNA, 260 bp, Unknown
  Description of Unknown: RightRegion for integrase B286 sequence
aaagaaaccattatacaaaatataaagaatattattacagaaattaaaggagacacctaatgagcgatcaacctataaatcaatggaatatgaccacagaaccttctgatatgatgaaaatcaacccacctatgccaataacagtcgcatccagccccacaaatcaaatggaagtcattgacgatgattctttcagttatgacggttatcaagttgtacgtggcgaattcttcgctcatatttacgaaccttcgtttaca

SEQ ID NO: 26286 - DNA, 260 bp, Unknown
  Description of Unknown: RightRegion for integrase B287 sequence
acccagcagagtacggaaagcacacggcgcagacgtgccgccgcccgaaaagcggcatagcagatggatcgtccgcaaagtctgtccgtccgacatagagcagcgtgagggcagggccatccggcagggaaataccaacaaaaaggtgttcatccaccgctatgtgacggaagggacgtttgacgcttattcgtggcagctcattgagacaaagcagcggttcatatcccaggtgatgagcggaaaagcgccgtcccgtt

SEQ ID NO: 26287 - DNA, 260 bp, Unknown
  Description of Unknown: RightRegion for integrase B288 sequence
gcgcgggaataccgggcaagaagaaaggcacaggcagccgccgcacagcccacacagtaaaacagaataaccgtcaaccaagagggattttccgaactacgggaaatccctcttttacgcccaaagaaaggagccgcctatggcagaacagacccccgacagtatcatcacgacccagaggaacgggcagaccattgttgcggagttatttttcaatcacagcagcacagaaacattccgcgacaagctgctcaaactgg

SEQ ID NO: 26288 - DNA, 260 bp, Unknown
  Description of Unknown: RightRegion for integrase B289 sequence
gcgcgggaataccgggcaaggagaaaggcgcaggcagccgccgcacagcccacacagtaaaacagaataaccgtcaaccaagagggattttccgaactacgggaaatccctcttttacgcccaaagaaaggagccgcctatggcagaacagacccccgacagtatcatcacgacccagaggaacgggcagaccattgttgcggagttatttttcaatcacagcagcacagaaacattccgcgacaagctgctcaaactgg

SEQ ID NO: 26289 - DNA, 260 bp, Unknown
  Description of Unknown: RightRegion for integrase B290 sequence
cggttgcatctcacctctgcatttttgacagaggccgagagtgaaaataccgccgcctaaaaaccgaaaagctgcgctatctggctatacgggcatttggaggatatgacaatgaaactttacaaatattccggcaccatcgaggagcttgccgttgaacacggccgaatctcctacatcaaactctttgatgtgaccgacctcaacaaagcacccacccggctggaagtcttcggtgcgctgagcaagtacattgaggc

SEQ ID NO: 26290 - DNA, 260 bp, Unknown
  Description of Unknown: RightRegion for integrase B291 sequence
attgaatataatcgcatgggcggcggcgaaataaaacttgatatctgttggcttgtttaatttttttgtggcgaaatgttgagaatttcgctactttttcaaaagtcacatcaatgcgactttcaaaattaacgcgaaaatctcaacaaaaagaaaaacggcagggcgggcgcgtccctctctgccgttgatttctttatcgcttattgattttcacttgaccgacaatttcgttataattgccgcttgaattcagcgtt

SEQ ID NO: 26291 - DNA, 260 bp, Unknown
  Description of Unknown: RightRegion for integrase B292 sequence
ggctgccgagaacctggacgcggcttttttcaccttctttgtcatggtgatggggaataaaactgccggagctgtgacagggcttgtggcaggaatcacgcttctgaccctgggtatggctgtttacagccgtcttgctgaggatgaatttacctatgagccgaagagtgtttacgaagcaatgcaggatgtggttggggaaaacacagaggaaagtgtggatttctatctcaacgacaacacggaatgggtaaagattc

SEQ ID NO: 26292 - DNA, 260 bp, Unknown
  Description of Unknown: RightRegion for integrase B293 sequence
agatggaataaggaagcaataaatcagtttgagttagcggttgaaacctatgatttctaatgttctaaccgttgtgtaaatcacatacactaagttaggaacatactcgtctgtatatttttaatataaatgataaagacaacaaaaaaaagactaccaattaaggtagtcttttattattttatttctaacacttgtcctactttgattatgtaagggaatttaatattattcttttttgctaagtcagtccattttac

SEQ ID NO: 26293 - DNA, 260 bp, Unknown
  Description of Unknown: RightRegion for integrase B294 sequence
aaaaaggcgcaaagacaagcgcagttcagatcaagtaaaatgagtaagaaaaaacgttaagaagcaagtatgatttcttgtgtaggtacgacaaaaggctttctatagaaaatattataaaagtcataacacataatttgaatagattttattcaaacttgtgctatgactttttcatttaatttgattagattattcattttccaatcaacaagtacttttctactaagtattgttgtatcgactgattttatcatatt

SEQ ID NO: 26294 - DNA, 260 bp, Unknown
  Description of Unknown: RightRegion for integrase B295 sequence
ggcataattcatttcctccttggttgttatttggtttactgttacattgctagtatgtgaaaaccataaaataatacactggcagttaaaggaaatttaacatataaaaatatttccgttcataaattataccgcagtaaaaaagcgaatgtatggttgctttttgactagaattgcggttataataatctctgcatcacatataatatctgtcagacaaaaaaagtaaggggagcccgtgaaaaagaagcgttatccta

SEQ ID NO: 26295 - DNA, 260 bp, Unknown
  Description of Unknown: RightRegion for integrase B296 sequence
cgggacggactcgcacttcgcgcaagcgctcgtgttcgtctcgcggggactggtcgctaaaaatggttgcgggtttgtgagcaggggccacgattgagcgtgagcgaaagcggggagcgaacaatgtacgccgcgcgcttcgtacaaccgcacgagcggttttgcgaagcaaaatggaggctttacgggctgacaagcggaccagactgaattcttaacgcgcccactgatggtgcaccaaagaatgccttacacaaaag

SEQ ID NO: 26296 - DNA, 260 bp, Unknown
  Description of Unknown: RightRegion for integrase B297 sequence
gaagcgaggaaagcgtgggcagaaatagaagcggagaaagcaaaggtagtaggtcattaattatcgtgaatttgcgattgtgaaaatggcagacgaggaaattatcaagtgaataataaggaatggttttgctacgatatttaacgagcaaaatcagaataaaagggcattcaaaacggacagtggaacatgtttgtagtggatgtcttttttgtggtcttgtcggtgcaaccttcccttccccttccttctctttctct

SEQ ID NO: 26297 - DNA, 260 bp, Unknown
  Description of Unknown: RightRegion for integrase B298 sequence
ctcttactgttattccgcactcgaactcgatttcgatttccttgttggacagcacagtgattttccgcacaaggcttttgaacatcactcgatcaaactcttcaagtatctttcctgtctgtagtagtttggtcacttcttcgattcggtacgacgcgagttggacttttccttgctcggacagtatctcttcttttctcataagcagttggtctatttgcattccgacctgctgactttgctgttcatattctttatcg

SEQ ID NO: 26298 - DNA, 260 bp, Unknown
  Description of Unknown: RightRegion for integrase B299 sequence
tatgacggcggaagaaaacatgaaagagcagtattatgttttgggtttgccgtcttttgaaggaatccctcagattttgaaactggtggggctggaagatgcagggaagaaaaaggcaaaagatttttctctcgggatgcgtcagagactgggaattgcgattgcgctggcaggaaaaccagatctgcttgtgttggatgagccaaccaatggtctggatccacaggggatcgtagagatgagagaactgatattaaagc

SEQ ID NO: 26299 - DNA, 260 bp, Unknown
  Description of Unknown: RightRegion for integrase B300 sequence
ggaaggtggaacaaagaagaagctaccaccttcactttggaaatatctctaaaaatatagttaaaacaaaaagaagaaatttatgcgatttcttctttttcatatttccatatataattatatgattttttgcatttatttttcaagcatttacatatattgtatgacttaaaacctaactctctttcaacttcttttgcactattccatttttttataaaatttccgtttagatcgtattgtaaaattggtttgtttgt

SEQ ID NO: 26300 - DNA, 260 bp, Unknown
  Description of Unknown: RightRegion for integrase B301 sequence
tattcaacaaaacataggatcttccgatgggaagatatcaatgtaagcatttttatgtgagtattccatagatactatgaataaaacgtagtgtcttatatgtccaaacagagaaaatgccccacgtgtgagaaatcgcattgtggggctatttttattcataaaaaattatgaattacaaataataatctataataaatatttgatatcaattacataaagtatagaataagtataaaagttgtgataaaattataata

SEQ ID NO: 26301 - DNA, 260 bp, Unknown
  Description of Unknown: RightRegion for integrase B302 sequence
gctaaaaagtgtgttgaagaacatttatcaaaattgatggaggaacagctagatgtctgatgaaattatattaaaaactgaagatgtgtcatatgacgatgatgaagatattgaagaagtcgatgactttgattatacaggatatgaagtagtaagaagagaattttacgctcatctatacgatgcagcagttaattttaaaaatgatagtattcaatttaataccgcttgtgttaataaaattaatggcttgtatatac

SEQ ID NO: 26302 - DNA, 260 bp, Unknown
  Description of Unknown: RightRegion for integrase B303 sequence
gctaaaaagtgtgttgaagaacatttatcaaaattgatggaggaacagctagatgtctgatgaaattatattaaaaactgaagatgtgtcatatgacgatgatgaagatattgaagaagtcgatgactttgattatacaggatatgaagtggtaagaagagaattttatgctcatttatacgatgcagcagttaattttaaaaatgatagtattcaatttaataccgcttgtgttaataaaattaatggcttgtatattc

SEQ ID NO: 26303 - DNA, 260 bp, Unknown
  Description of Unknown: RightRegion for integrase B304 sequence
tattcaacaaaacataggatcttccgatgggaagatatcaatgtaagcatttttatgtgagtattccatagatactatgaataaaacgtagtgtcttatatgtccaaacagagaaaatgccccacgtgtgagaaatcgcattgtggggctatttttattcataaaaaattatgaattacaaataaatatttgatatcaattacataaactatagaataagtataaaagttgtgataaaattataataatattactaataa

SEQ ID NO: 26304 - DNA, 260 bp, Unknown
  Description of Unknown: RightRegion for integrase B305 sequence
tattcaacaaaacatcgtatcttacgttgggaagatatccatgtatgtatttttatataaaaattatcctaaatattatgaataaaacataatatcttgatctatgtccaaacgtaaaatttgacctggagaattgtagaaatacagttctctgggtcatttttgtattatgatacaatgtgcttgataaaaagtataaaacataatataatataaataaaaactatggggaggtattgagtatgaaaaagaaaaaaatt

SEQ ID NO: 26305 - DNA, 260 bp, Unknown
  Description of Unknown: RightRegion for integrase B306 sequence
ggaaggtggaacaaaaaagaagctaccaccttcactttggaaatatctctaaaaatatagttaaaacaaaaagaagaaatttatgcgatttcttctttttcatatttccatatataattatatgattttttgcatttgtttttcaagcatttacatatattgtatgccttatagcctagctctctttcaacttcttttgcactattccatttttttatgaaatttccgtctaaatcgtattgtaaaattggtttattagt

SEQ ID NO: 26306 - DNA, 260 bp, Unknown
  Description of Unknown: RightRegion for integrase B307 sequence
agtgcattatattctcgtttaaatagaaaagaacaaccaaataagttatgctatatttagatgtaaaagtattaatacattaaatggtttatcccatattggtagtcataacaaacgagaaaaagaatcttataaatctaatcctgatataagaaaagaagacagtattaacaatatagaattagtaaaatgtaataacaaatatagagaaaaattttatgaaatcactaaagaatataaaaaagaacacgaagaaaaaa

SEQ ID NO: 26307 - DNA, 260 bp, Unknown
  Description of Unknown: RightRegion for integrase B308 sequence
tcatggatcattatttataaacccaactttgttatttcaccatggcagacgctgatataataaaaaaagagtgcattaccacctcagataatgcactcttatattttactctatttttcctccagcccgctgagcgaaagcctgctctccattttctgaacagtcttgctctcctgctttgcgatctttgcttcaaaccagaaggtcgagcctttgccctcctccgattgaacgccgtatgcaaagccgtgggctttgag

SEQ ID NO: 26308 - DNA, 260 bp, Unknown
  Description of Unknown: RightRegion for integrase B309 sequence
ggcggcgctttttctatttttcttggtttggtatatttcctgtcttatgcgatatactaattgccccgccgtggaggattacaacgacttttccgaagccttggaggacatctggcagaaggacgggatgctcctgacctacgccgccgtgctggaggctgagcggccggatacgctgcgcggagcctgtgagctcctgcgaaatctggacaactatcagcgcatcacggagggtgcttacggttacggtcagcagcgat

SEQ ID NO: 26309 - DNA, 260 bp, Unknown
  Description of Unknown: RightRegion for integrase B310 sequence
tattcaacaaaacataggatcttccgatgggaagatatcaatgtaagcatttttatgtgagtattccatagatactatgaataaaacgtagtgtcttatatgtccaaacagagaaaatgccccacgtgtgagaaatcgcattgtggggctatttttattcataaaaaattatgaattacaaataataatctataataaatatttgatatcaattacatgttgtgataaaattataataatattactaataatagtggagg

SEQ ID NO: 26310 - DNA, 260 bp, Unknown
  Description of Unknown: RightRegion for integrase B311 sequence
atagagtatacaaggattgacggcggtgaaatctcgcttgacatatgttggctgatttaattttttgaaatattgtcgggattctcgcgggcattccgaacattacatcaatgcgatgtttgaaatcaccgcaaataatgcaaaaaagcggagaattttctccgctttttgttatctcttattttttgcaatgagtcccgcagtctcgttgtatgttcctgcgttcgtcagagtgcttgttgcgccgttgatgtacgttt

SEQ ID NO: 26311 - DNA, 260 bp, Unknown
  Description of Unknown: RightRegion for integrase B312 sequence
tattcaacaaaacatcgtatcttacgttgggaagatatccatgtatgtatttttatataaaaattattctaaatattatgaataaaacataatatcttgatctatgtccaaacgtaaaatttgacctggagaattgtagaaatacagttctctgggtcatttttgtattatgatacaatgtgcttgataaaaagtataaaacataatataatataaataaaaaatatggggaggtattgagtatgaaaaagaaaaaaatt

SEQ ID NO: 26312 - DNA, 260 bp, Unknown; identical to SEQ ID NO: 26309
  Description of Unknown: RightRegion for integrase B313 sequence

SEQ ID NO: 26313 - DNA, 260 bp, Unknown
  Description of Unknown: RightRegion for integrase B314 sequence
atagagtatacaaggattgacggcggtgaaatctcgcttgacatatgttggctgatttaattttttgaaatattgtcgggattctcgcgggcattccgaacattacatcaatgcgatgtttgaaatcaccgcaaataatgcaaaaaagcggagagtgttctccgctttttctttatctcttattctttgcgacaagtcccgctgtttcggtgtatgttcctgcgtttgtcagagtgcttgttgcgccgttgatgtacgtt

SEQ ID NO: 26314 - DNA, 260 bp, Unknown
  Description of Unknown: RightRegion for integrase B315 sequence
gaactgataaagatatgtatgcagaatggttgggaaatagattatacttacaagatgtaatatttcactgaatattattattaactagtaaatgtggttgattaaattgaaaatgaggttgtgccaatgtcttgacacaacctcacgaaagatgctattgggcgtttaatgcagctaaagctgcttctaaagcttctttagacatgccactcaataactgtgcttgacttgaatgtttcagttctgtacagttcttaatc

SEQ ID NO: 26315 - DNA, 260 bp, Unknown
  Description of Unknown: RightRegion for integrase B316 sequence
gaactgataaagatatgtatgcagaatggttgggaaatagattatacttacaagatgtaatatttcactgaatataattattaactagtaaatgtggttgattaaattgaaaatgaggttgtgtcaagacattggcacaacctcacgaaagatgctattgggcgtttaatgcagctaaagctgcttctaaagcttctttagacatgccactcaataactgtgcttgacttgaatgtttcagttctgtacagttcttaatc

SEQ ID NO: 26316 - DNA, 260 bp, Unknown
  Description of Unknown: RightRegion for integrase B317 sequence
gaaggacgtattcgcttttgtgggggaggcggtgtgggttattgggagattttagaataaggaggtaaggcacatcagacgtaaaatggtgataactttattgtgagatggggggtattgtgttaaaatataattagagaaaatgtagaggagaatagggagtgatattaaaaaatctgcatattacgaattttaaattgtttgaagagatagaattcgagtttgagtctggatttaatctcatacttggagataatgga

SEQ ID NO: 26317 - DNA, 260 bp, Unknown
  Description of Unknown: RightRegion for integrase B318 sequence
gaactgataaagatatgtatgcagaatggttgggaaatagattatacttacaagatgtaatatttcactgaatataattattaactagtaaatgtggttgattaaattgaaaatgaggttgtgccaatgtcttgacacaacctcacgaaagatgctattgggcgtttaatgcagctaaagctgcttctaaagcttctttagacatgccactcaataactgtgcttgacttgaatgtttcagttctgtacagttcttaatc

SEQ ID NO: 26318 - DNA, 260 bp, Unknown; identical to SEQ ID NO: 26317
  Description of Unknown: RightRegion for integrase B319 sequence

SEQ ID NO: 26319 - DNA, 260 bp, Unknown
  Description of Unknown: RightRegion for integrase B320 sequence
ctaaatgagttgctccgtgaagcggagaagataatggaaggatggactgattatagatgaatgaagaaaacacaacaatcatgccgccagagaagcagattgtgcaggatgatagagacgcacgggcggaagaactggaaagtgccttttcgtatgatggctaccaggtcgtgcgaaaggaattgtttgcccatctgcgtgacccggcaatcgtgattcgtaaagatagtatcacattcaatacagcctgtatcacaggg

SEQ ID NO: 26320 - DNA, 260 bp, Unknown; identical to SEQ ID NO: 26315
  Description of Unknown: RightRegion for integrase B321 sequence

SEQ ID NO: 26321 - DNA, 260 bp, Unknown; identical to SEQ ID NO: 26317
  Description of Unknown: RightRegion for integrase B322 sequence

SEQ ID NO: 26322 - DNA, 260 bp, Unknown
  Description of Unknown: RightRegion for integrase B323 sequence
gaactgataaagatatgtatgcagaatggttgggaaatagattatacttacaagacgtaatgttccactgaatataatagttgatttatatataatgctgtatctggtttattatgtgttatctaagcaagctacttaaatggctaggtaataatactactattccctactagtagggtcaagtacataggaatttactagtggaaggtagggtaggatatataggcatacagagactttatatcctacgtttcttagca

SEQ ID NO: 26323 - DNA, 260 bp, Unknown; identical to SEQ ID NO: 26317
  Description of Unknown: RightRegion for integrase B324 sequence

SEQ ID NO: 26324 - DNA, 260 bp, Unknown; identical to SEQ ID NO: 26315
  Description of Unknown: RightRegion for integrase B325 sequence

SEQ ID NO: 26325 - DNA, 260 bp, Unknown
  Description of Unknown: RightRegion for integrase B326 sequence
gaactgataaagatatgtatgcagaatggttgggaaatagattatacttacaagatgtaatatttcactgaatataattattaactagtaaatgtggttgattattgaaaatgaggttgtgccaatgtcttgacacaacctcacgaaagatgctattgggcgtttaatgcagctaaagctgcttctaaagcttctttagacatgccactcaataactgtgcttgacttgaatgtttcagttctgtacagttcttaatcca

SEQ ID NO: 26326 - DNA, 109 bp, Unknown
  Description of Unknown: RightRegion for integrase B327 sequence
gaacgagatactaatgcactttcgctcccagaaaaagtctgccaacgatatccactttgacgagcctgttgactccgataaggacggcaatcagctttgccttatcgac

SEQ ID NO: 26327 - DNA, 260 bp, Unknown
  Description of Unknown: RightRegion for integrase B328 sequence
agagagcctgatgatttcgcataccaactgaacgaagaccatatcgaatggattgactaatactgaagaggttaaatgacatgtggattaacccgcttatagatataatacttggtattggcctagtgtgcggtattggttggttaatccttcgattttggccttactttttcagtacaggtttgatcctcgcaacgttttacgagatatggaacatttttagatgatagaaacctcgaaaggggttttgttgtttgcta

SEQ ID NO: 26328 - DNA, 260 bp, Unknown
  Description of Unknown: RightRegion for integrase B329 sequence
agcccagatggaacactgctatataaaaatatttttaaaacaagtaaactaccaacttaatacttgttttttaatataaatatttatactaatttaaattattatttatattcttgttatattaattctttatattatattattatattatgttagacaaaaaatataaatcttattcaaaataaaaagactagttatatttcaaactaatctcatcaataaattgactatctaagttttgtcaatactaaatttataaa

SEQ ID NO: 26329 - DNA, 260 bp, Unknown
  Description of Unknown: RightRegion for integrase B330 sequence
agcccagatggaacactgctatataaaaatatttttaaaacaagtaaactaccaacttaatacttgttttttaatataaatatttatactaatttatattattatttatattcttgttatattaattctttatattatattattatattatgttagacaaaaaatataaatcttattcaaaataaaaagactagttatatttcaaactaatctcatcaataaattgtaatttgtcttttacaataatagcataaaaaaga

SEQ ID NO: 26330 - DNA, 260 bp, Unknown; identical to SEQ ID NO: 26329
  Description of Unknown: RightRegion for integrase B331 sequence

SEQ ID NO: 26331 - DNA, 260 bp, Unknown
  Description of Unknown: RightRegion for integrase B332 sequence
aatgctctgctccatgaagcggaaaaaataatggaaggatggactgacacagatgaatgaaaatacgaacgccatgccaccggaagagcaggcagaaaatgatagagacgcaagagcggaagaattagaaagtacattttcctatgatggataccaggtcgtgcggaaggagctgtttgcacatctccgtgaccccgcgatcgtgatccgcaaggacagcatcacatttaacacggcctgcatcaccgggctggaagatg

SEQ ID NO: 26332 - DNA, 260 bp, Unknown
  Description of Unknown: RightRegion for integrase B333 sequence
tttcaaactttttgcccagctccatgcgggaagactgctggatatgggcgtaagtgttaaccagaagatccgcactggcgtggccggttgttccctgcacagatttgatatcgccgcccgagatcatcagctggtaggtggcgctggaatgtcgcagcccgtggaagacgatgcgggggaactccgggtgagcgtcctgccatttgaggaactttttgcggatcagaacgggctccacggcctgaccattgggcaggcgg

SEQ ID NO: 26333 - DNA, 260 bp, Unknown
  Description of Unknown: RightRegion for integrase B334 sequence
aaagaaaaagcagctttagaagctgcaactgatactgacaaatctaaaaagggagcataggcaactgccggaaactcccattacataagggtttcaagcccacttctaaaaatatccctatgaaagtgaaacatgagtatgacgcagaacatgagttgtaatctcgacgtctttgttcagcacccggtgggcggtctccttcagacatttattgtatgcccagtaatgcacatgatctccggatatatccgggataaaga

SEQ ID NO: 26334 - DNA, 260 bp, Unknown
  Description of Unknown: RightRegion for integrase B335 sequence
tcagtactcgataatgtatcttctttcggctggggcggttacctgccccgcctcggttaactttgctcagcgccaacaacatacgcgtccatcagatctttgatttcgtcgacggtgtaggttttgcccttctcgcctttgtcaaggatcttctgcaggtcgtaaaccgtcgccttccgtacaactgcaatcttttctttctctgacatggtgtcacgccttctttcagtgtcgttttcttatcactgctttcaggataa

SEQ ID NO: 26335 - DNA, 260 bp, Unknown
  Description of Unknown: RightRegion for integrase B336 sequence
atatatggaaatgacggtgcgggaatatctggaattcgctgcagaattaaaaggaattaaaaaagacaaaagagagccgcagatagaagaagttataagacttgcaaagctgagagacgtagaaaaccggctgatccagaacctgtcaaaaggttataagcagagagtcggacttgcacaggcagttctgggattcccggagatcattatcctggatgagccgacagtaggccttgatccgaagcagatcatcgaaatcc

SEQ ID NO: 26336 - DNA, 260 bp, Unknown
  Description of Unknown: RightRegion for integrase B337 sequence
cagctgcaattgaccatagataacctaacgagaggaaacgaaatgccctatgatggatgatcagactgaacagatttttatgaacgccgaggcgattacggaagccgacgctgaaacggaggtccttgcagatcttgcgggatatcaggttacgaaggccgagctgttctcccatacaagggagccagctattacgatctgggagtcccggatcaaattcaatatggcctgcctacggaagtttccgaatgttacgcata

SEQ ID NO: 26337 - DNA, 260 bp, Unknown
  Description of Unknown: RightRegion for integrase B338 sequence
gaagggcgaattcgttttaatggtgccggtggcaagggctgctgggaaattctggaatagccggaaaataggcaaaaaatgagtattacgatatcagttcgtatccgtatgcctgcacagttaaacgtctgggaaccgtagatgatcaggtatccaagtccctggcgggcgccaatgaattctccgatgatcacgccgacaaggcacaacccaatgttgactttcatcacacttaagatgaggggcacagaagacggaag

SEQ ID NO: 26338 - DNA, 109 bp, Unknown
  Description of Unknown: RightRegion for integrase B339 sequence
tcccggcgggttgcggcccggggcaaaaagagggttgacaaactgccgcagcggtggtagagtacgaataatacaaaaaccgatgagtaagaggagtacccgcagggga

SEQ ID NO: 26339 - DNA, 109 bp, Unknown
  Description of Unknown: RightRegion for integrase B340 sequence
atttttacctatctgcacaggctgctattgcagagcaggcaaaatagacaaaggttctaatttaaaagtctatatataagattttgcaagggaaagtatttagtacttt

SEQ ID NO: 26340 - DNA, 260 bp, Unknown
  Description of Unknown: RightRegion for integrase B341 sequence
gagcagctgcagctgtcgatcaatgatttaaggagaggaatcgacgaggatgatggataacaacgaattagagcgctactttcaaaaaagcacgatactgcaggaaccacaggatgatcccgaagaattggtcaaccttgcaggctatcaggtgacgaaggctgagctgttcgcacacacccgcgaaccggccataacgatttgggataacagagtcaaattcaatatggcctgcctgcgccggtttcccggttgcaccc

SEQ ID NO: 26341 - DNA, 260 bp, Unknown
  Description of Unknown: RightRegion for integrase B342 sequence
cgcagcccgcaggccgtgacaaacgctttttattttactgtgcgcccaagcgcattttgaagtcctgataaccgaagtgcaccagttcccggcaattgccgtctgcgcccagcagccagatgggcggcaggggcatcccgttgaaggtgttgttcttgcaggtggtgtagatggccatatcgccgaagatgagcttatcaccctcggcaaggggggcgtcaaagctgtaatccccgatgatatcccccgcaaggcaggtg

SEQ ID NO: 26342 - DNA, 260 bp, Unknown
  Description of Unknown: RightRegion for integrase B343 sequence
atttttacctatctgcacaggctgctatcgcaaacaagtaatccacacaggatgtattgacaggtaacttaatacaagtttattcctgatataaaatcagagggtgttccaatcggaacaccctctttttgatgtgctatgtaaaacaaatttatatttggttgcttttgaaaatataatgatgattttcaaaggagacaaatgtatgggaaataacattatatctaaggtacttaatttgtgggtataggcgtaattat

SEQ ID NO: 26343 - DNA, 260 bp, Unknown
  Description of Unknown: RightRegion for integrase B344 sequence
atttttacctatctgcacaggctgctatcgcaaacaagtaatccacacaggatgtattgacaggtaacttaatacaagtttattcctgatataaaatcagagggtgttccgattggaacaccctctttttgatgtgttatgtaaaacaaatttatattttgttgtttttgaaaatataataatgattttcaaaggagacaaatgtatgggaaataacattatatctaaggtacttaaatttgtgggtataggcgtaatta

SEQ ID NO: 26344 - DNA, 260 bp, Unknown
  Description of Unknown: RightRegion for integrase B345 sequence
cacaaccgcttatgctggggcacctcccataaggaagttgccccagggcgggggccgtgagtaacaagttacctatttggacagcgcagcttcagctacgccgtctttttcttgcgctttttcatggcccgacagtaggacagatactcccattccatcgtttccgggtcgggtgctgtccacaggccaatggtgttgtagtggatgtccacccgttggtgccgcttgccatctaccttgtcaggcttggacaccacgat

SEQ ID NO: 26345 - DNA, 260 bp, Unknown
  Description of Unknown: RightRegion for integrase B346 sequence
tccggctacttttcactggttgaacaccaattttcggcccgtttgtggcgcaccgcataatctgtaattattttgtaatctttgcgcaaacaaaaaatgccccgccagcaatccgtcaggatgccagcggggcattgctttacttagtggagataccttgccaattcagatgcaacaaagcctgcgatcactgccgcaatgactgcccaccagagtttgtttccaaatactccgggggctttttccagcgcggtcaagcg

SEQ ID NO: 26346 - DNA, 260 bp, Unknown
  Description of Unknown: RightRegion for integrase B347 sequence
agcacaaaccgcaaaaggctacaccgaaaagacaatagcaaactaccgctcacactttaagtctatcagcagacacattgatattgatcgagcgttttccaacctgacacaagccgacattgacggtatgatcgtttcaatgagggaaagcgggttggcaacaaactccatcagcagttatgtccgcgtgttcaaaacctttatgaattggagcagacagcagggctacacaacattgactgtgccgaactataaacagg

SEQ ID NO: 26347 - DNA, 260 bp, Unknown
  Description of Unknown: RightRegion for integrase B348 sequence
cctttcacacggagcgtcaggagctgcatttcaggtgcagttccgttagatgttcgttagaatattacagtgctgccgttgctgtgccagctcacagcaggcttccctgtctgaacgcagcgtttcccgaaagccgggagatgctgcgttttctcttgcccgcaaaccgggctgaaagggaagccgccatgtccacattccgcgtcaacaaaaacgtcaactacaccgtcatgagcaactaccatcttcaggacaagaag

SEQ ID NO: 26348 - DNA, 260 bp, Unknown
  Description of Unknown: RightRegion for integrase B349 sequence
gaagaattgcagcaaagtatggcaacaataaagaaaggtactgatgacaaaaatgaatgacaacaatcaaatcgaagatataacggcaaaggctgaacttctggagaatgtgagcgaggatgttgaagaaatcaatttagcaggatatcaggtcaccaaagctgaacttttttctcataccaaagaacctgcaataacagtatgggaaaaccgtgttaaatttaatatggcttgtctaagaaaatttcccggagtaacgc

SEQ ID NO: 26349 - DNA, 260 bp, Unknown
  Description of Unknown: RightRegion for integrase B350 sequence
ttgttagaagaagtgttacttggcataattcatttcctccttggttgttatttggtttgatgttacattgctagtatgtgaaaaccataaaataatacactggcagttaaaggaaatttaacatataaaaatatttctgttcataaattataccgcagtaaaaaccgaatgtatggttgctttttgactggaattgcggttataataatctctgcatcacatataatatctgtcagacaaaaaaagtaagggggtcccgt

SEQ ID NO: 26350 - DNA, 260 bp, Unknown; identical to SEQ ID NO: 26349
  Description of Unknown: RightRegion for integrase B351 sequence

SEQ ID NO: 26351 - DNA, 260 bp, Unknown
  Description of Unknown: RightRegion for integrase B352 sequence
acattgcaatatcctgccctatacggcagcgcgaacgccccaagaattaagactaattaagatgtcaccgtatgcttttcttgctataatactggccgcagaacaaaaaacaccatcaggagaacagagcaaatgacaagcgtaagaagatgggcaatcgaaaatcgtacaaacggcatgccggccgcgcagaaagcgcccgtccggtccgtgccggtcgtatccttttctccggcaaggacggcaaaacagcctcattg

SEQ ID NO: 26352 - DNA, 260 bp, Unknown
  Description of Unknown: RightRegion for integrase B353 sequence
ggagataaagataatcccacttttacactgaatctcaagccccgaatcccgcgtatttaggggcttttctattagcgacaacatttttggactcacgaacttgcccatctcgagatgatctgcgccattgtgcaccagcttacccgcgacctgacacctgaacaattaaaggaatctggattcgaccaatattatgttgaccacacgttagcactttggcctcaggcagccagcggcacaccttggagcgcaacaacatt

SEQ ID NO: 26353 - DNA, 260 bp, Unknown
  Description of Unknown: RightRegion for integrase B354 sequence
catgctgagtatacaaaggcaaatcgttttaaagatattgtttgcaaaatctatatatagttcgagagggaagcatttgcttccctttcttttatctctcgattaggactaaatccctgaaataaaaaaggatttagtcctttttttatataaaaatattttaaaggagattgattatgaaagtatatgtagtagcaaatttaaaaggtggcgttggaaaaaccaccacaacagtaaacgtagcttatacattttcggaa

SEQ ID NO: 26354 - DNA, 260 bp, Unknown
  Description of Unknown: RightRegion for integrase B355 sequence
cggaatgataccgtaggtgtttggatgcgtaatcaattcaattttcttacgtctaactaatcaccgcatttgaacgtgtttttgatggttctccactaaatatctctaggttcattacttggagatattaatcgtgttagattgggtaattacttctgctggagctacatcatcggatttatcattttggtaacggggtttatcaagtacgtgttacttggatggattctgtacctactaattatggtagttttatgggt

SEQ ID NO: 26355 - DNA, 260 bp, Unknown; identical to SEQ ID NO: 26351
  Description of Unknown: RightRegion for integrase B356 sequence

SEQ ID NO: 26356 - DNA, 260 bp, Unknown
  Description of Unknown: RightRegion for integrase B357 sequence
tgtatccttgacatgaaaatacccccagagctttcagagttttttctctgtctactctaggggtagcatatcaaagaagcaccgggcttcatattttttattttgcctgcctgctggcggcgtggcgcttgggcagggggatggagcatacgatggcaatgccaagggccagggcaacggcaacttttaaggtttcaatgcctttgctggtgcacagggcgcggtcgttgcgcaaaaaatagtaagccgtgtaataaatg

SEQ ID NO: 26357 - DNA, 260 bp, Unknown
  Description of Unknown: RightRegion for integrase B358 sequence
ttgggaaaaacgcagcccctcagcgccgcaaaagcgcgttggggggagaatagcaaatgaactccgcatggacctgcggcgggggcggcggacgggagtgacgctgtcgctgcaggagccgctcgaggcggacgggcagctgacgctggcggacaccctgcccgatgaagccgacatggaggccggctgcgagagccgcgccgacgccgcccggctgcgcgctctggtggacgctctgcccgcccgggaacgcgctatta

SEQ ID NO: 26358 - DNA, 260 bp, Unknown
  Description of Unknown: RightRegion for integrase B359 sequence
actggtggacttgataagtccaaatccgaaatagtagcggtattgttttcaccgctgtaattgtaggttatgacaatcttatcatcatagacgaaaacggcgtgaacaaaggtatcaataagctgctggcggtatttttcgcttgttatgttgccgtccttaaaactggaaatccaataaataatttgttccctgctgatgatccgccgcgcaatgctttcttttgcgatctctatttcaacgttgcgcttttcgtcctc

SEQ ID NO: 26359 - DNA, 260 bp, Unknown
  Description of Unknown: RightRegion for integrase B360 sequence
acatacaaacatccggccctatgcgacagcgcgaacgtcccaagaattaagactaattaagatgccgccgtatgcttttcttgctataatattggccgcagaacaaaaaacgccatcaggagaacagagcaaatgacaagcgtaagaagatgggcaatcgaaaatcgtacaaacggcatgccggccgcgcagaaagcgcccgtccggtccgtgccggtcgtatccttttctccggcaaggacggcaaaacagcctcattg

SEQ ID NO: 26360 - DNA, 260 bp, Unknown
  Description of Unknown: RightRegion for integrase B361 sequence
aaaaaagtaaatagaattgtaggagcaattagagtaaaagaacgagaaaaagttagttaaaagatttataaatggaggaattgaaaatggaaaataaagaattaaaaacaaataatattgaaaataaatatggaattgaatacacaaaggttggagattactatctaccaaatttagttttagaaaaagaaaaaattgtgttaaacaaatatggaagaatgagattaaaatttttaaaagaaaacagaaaagcagaatat

SEQ ID NO: 26361 - DNA, 260 bp, Unknown
  Description of Unknown: RightRegion for integrase B362 sequence
gatattacatttggattagtatttagacctactattaaagagataattaatgaaaaataagtaagtaaataataagcaggataaagagaatgatagcactaccctaatttattctatataaataaaggatttatagtgctatcatttcttattttgcacttgcaaaattgagttaaaaatatggaagaattctaccatacttttgattttatccttttgattaaagtatttgcaaggttatattttgcttccaacagttg

SEQ ID NO: 26362 - DNA, 260 bp, Unknown
  Description of Unknown: RightRegion for integrase B363 sequence
ttagaagaactacataaagcaggtttggatggtaggctcagaccattaaaaaaggaataacttcatcctttttaattatctttgcttccaaaccatataagcaaagatatgagaccaattgaaagacttgaagaaacttatttccctaaaggcataaagttacttgaatacatggaggaagtagcagtactttatgtaccagatgatgatatagaccatgaaacaggagaacaatatatttatggcacaaccgccttacc

SEQ ID NO: 26363 - DNA, 260 bp, Unknown
  Description of Unknown: RightRegion for integrase B364 sequence
ataaatttatcgaatataaaaggtattaatggtgctccactatataaacaaataaagtaatcctttaatgcttgtattttaatataaatatttatatttttgttatattaattctttatattatattatcatattatgttagacaaattttccatcgtggatagaaatatcttctaccctagatggaaatattttctaccctagacaaaaaatataaatcttattcaaaataaaaagactagttatatttcaaactaatc

SEQ ID NO: 26364 - DNA, 260 bp, Unknown
  Description of Unknown: RightRegion for integrase B365 sequence
cgtggaagacagcaagccggatgccgaacggttgaaacagctgctgaaaaaggcatttgaaaatgagaacatatcctgcagctgttttgccagcggagatgaatttttgcggaccggcgggcgcgaagggtatcaggtggtgtttctggacatctgcatggagggcaccaatggcattgagacggcgcagcggctgcgtgcggccgacccggacctgctgatcgtgtttgtgacatcctcgccggagtacgtgtgggatg

SEQ ID NO: 26365 - DNA, 260 bp, Unknown
  Description of Unknown: RightRegion for integrase B366 sequence
ttaaaagaactacataaagcagggttggatggtaggctcagaccattaaaaaaagaataacttcatcctttttaattatctttgcttccaaaccatataagcaaagatatgagacctattgaaagacttgaagaaacttattaccctaaaagcatagagttacttgaatacatggaagaagtagctgtactttatgtaccagattatgatatagaccatgaaacaggagaacaatatatttatggcacaaccgccttacc

SEQ ID NO: 26366 - DNA, 260 bp, Unknown
  Description of Unknown: RightRegion for integrase B367 sequence
gatgaaaacatgaaaaaagtcaataaatggaatgatattaaaataaaagttacaatataaagtaattattaagggaagtaagtttaatcttgcttcccttttcttgtccaacgacgagtcaaatacataagcttgcttgaatgtatttgacgactgcatacaatcccgaaacaagcgaagcggtttcgtggattatctaaaaaatatagaaaggataaggccaggaagtcacaacctctatatatcaaatcgatttaatc

SEQ ID NO: 26367 - DNA, 260 bp, Unknown
  Description of Unknown: RightRegion for integrase B368 sequence
cgtagaagacagcaagccggatgccgaacggttgaaacagctgctgaaaaaggcatttgaaaatgagaatatatcctgcagctgttttgccagcggagatgaatttttgcgggccggcgggcgcgaagggtatcaggtagtgtttctggacatctgcatggagggtaccaatggcattgagacggcgcagcggctgcgtgcggccgacccggacctgctgatcgtgtttgtgacatcctcgccggagtacgtgtgggatg

SEQ ID NO: 26368 - DNA, 260 bp, Unknown
  Description of Unknown: RightRegion for integrase B369 sequence
agagacaatatggtagctgtatggatgcgacataatatcaatttcttattcgataagtaattactatgccatatattactatttaaatggtgagctatctaattctgattttagttcgattgaataaatttaatgattctgtgaatggataatatgagtgtttattgaataccttagcgacataagtgttatcagtactaataacattgaaatgcaaaggaaaattaaccttggccttttttggttcctaaatactaata

SEQ ID NO: 26369 - DNA, 260 bp, Unknown
  Description of Unknown: RightRegion for integrase B370 sequence
ttagaagaactacataaagcaggtttggatggtaggctcagaccattaaaaaaggaataacttcatcctttttaattatctttgcttccaaaccatataagcaaagatatgagaccaattgaaagacttgaagaaacttatttccctaaaggcataaagttacttgaatacatggaggaagtagcagtactttatgtaccagattatgatatagaccatgaaacaggagaacaatatatttatggcacaaccgccttacc

SEQ ID NO: 26370 - DNA, 260 bp, Unknown
  Description of Unknown: RightRegion for integrase B371 sequence
gatattacatttggattagtatttagacctactattaaagagataattaatgaaaaataagtaagtaaataataagcaggataaagagaatgatagcactgccctaattcattctatataaatataggaatagttgtgctatcatttcttattttgcacttgcaaaattgagttaaaaatatggaagaattctaccatactttttatttaaatcaattaattaaaaggtttgcgaggttttattttacttccaactgttg

SEQ ID NO: 26371 - DNA, 260 bp, Unknown
  Description of Unknown: RightRegion for integrase B372 sequence
atgcacattgtcggtggtatttgcggtacagcttttggttttgccgtccggaagagataacgaatgatcgggaagaggatcttatttatgatgattaagcacatttttcagaaagaacccgtcctgagcattgccacttgtttggcgatcatttccgctttctttgtcctcccggacgcagaatacctcggatatatcgatttccgtactcttgcaatcctgttttcgctaatgacagttatggccggactgagagggca

SEQ ID NO: 26372 - DNA, 260 bp, Unknown
  Description of Unknown: RightRegion for integrase B373 sequence
tgcgcagacatccgggaaaggccgcgctctgcggcaagctgccttgccagtgcaccataggtcgtggtctggccgcaggggatacggcgcagcagcgcccacacctcctgctgaaaggcagagccagcgggatggagcggcggggtaaagtccggctcctgcccgccgaaataaacatccagccagcgtctggcctcggagagcacagcggtctcctgctcctgatgcaccgtatccagggtgcgggcaaagtacttctg

SEQ ID NO: 26373 - DNA, 260 bp, Unknown
  Description of Unknown: RightRegion for integrase B374 sequence
gaaaaaggcggtagaggctacgaaagtaatttttcaataataatacaccctaagttctaattagggcttttttacgtctctatcgttgttatacagaagaacttggtcatgttgaaatgatatgtacaatggtccatcagcttacaaaaaatgcgacaattgatgaacttgaaaaagcaggacttggaagttattatacagaacatggagtaggtatattcccagttgatgctacaggaaatccatttacatgtgcatac

SEQ ID NO: 26374 - DNA, 260 bp, Unknown
  Description of Unknown: RightRegion for integrase B375 sequence
tgcgcagacatccgggaaaggccgcgctctgcagccagctgccttgccagtgccccataggtcgtggtctggccgcaggggatgcggcgcagcagcgcccacacctcctgctgaaaggcagagccagcgggatggagcggcggagtaaagtccggctcctgcccgccgaaataaacatccagccagcggctggccttggagagcacagcggtctcctgctcctgatgcaccgcatccagggtgcgggcaaagtacttctg

SEQ ID NO: 26375 - DNA, 260 bp, Unknown
  Description of Unknown: RightRegion for integrase B376 sequence
cagaaactaaagaaacaggctgaaaaagaagccagagaaaaagccaattcagaggcttaaataaaagaaaaaaggacactaacctcaaagcgtcctttagaacggcaatgtgagtgtcgcagatcatgcattctaatttttttttaacccctgataattcagaatatttattcatcattctagaaagtgcgtatttgtctaccaaaaataaacggtcgctaggcttataaccatatagtagtttaacatattcttgcagg

SEQ ID NO: 26376 - DNA, 260 bp, Unknown
  Description of Unknown: RightRegion for integrase B377 sequence
gaaaaaggcggtagaggctacgaaagtaatttttcaatagtaatacaccctaagttctaattagggcttttttacgtctctatcgttgttatacagaagaacttggtcatgttgaaatgatatgtacaatggtccatcagcttacaaaaaatgctacaattgatgaacttgaaaaagcaggacttggaagttattatacagaacatggagtaggtatattcccagttgatgctacaggaaatccatttacatgtgcatac

SEQ ID NO: 26377 - DNA, 260 bp, Unknown
  Description of Unknown: RightRegion for integrase B378 sequence
cggcgtaaggtcgaacttgaaagtaatgttgagctgatgcccacgataaacataaactaaaaaatccgccgaggactcctcccgaaaaaacgggaagaatcctcggcggatttcgtttatcgtgttggctctttttcggctggctcagattcaggctgatctttcgcttttttcacagagaacacctcatttgcgggcaatcatcagatgccacggaacgtaaaggtgaactccacaggcttggtcacatcaggaatata

SEQ ID NO: 26378 - DNA, 260 bp, Unknown
  Description of Unknown: RightRegion for integrase B379 sequence
ggagtgcatcacggcatttgtccgcatgaatccttgatttttgacgttttcaaggtttgaaaagcgtcaatttgccacccatttgccaccgctttttgaaaattcacccctgaacagcagaaaaagggctgaaccgattgaacaaggtctttcggttcagcccttttcgctgtattatgccaattctaccaggctttcaaacagatttactgtggtctgcttcatttcatccgtgttatgaacgtatttgttcattgtgg

SEQ ID NO: 26379 - DNA, 260 bp, Unknown
  Description of Unknown: RightRegion for integrase B380 sequence
aacccgaggcggcctgcccgcaggcaggcgaatgtcccaacacctctgagagagacttgatctcaaacccaacttcgacggcgcgcgtcgcaaacgtatgccgcagcgtgtgaaaatgcactccctcaaggccgcatttgcgggtgtacttttccatcctgtattgcagggctcttggctccatgaagctgtccgtaccagtcaaaacataagcggctgaactatggggggccatcttcccacaaagctcagccgtgtag

SEQ ID NO: 26380 - DNA, 99 bp, Unknown
  Description of Unknown: RightRegion for integrase B381 sequence
gataaaggcggacgtggatatgaaaataatttttcaatcgtaatacaccctaaattataggtggcacttttatatgtcaatcgttgctgtactgaagaa

SEQ ID NO: 26381 - DNA, 260 bp, Unknown
  Description of Unknown: RightRegion for integrase B382 sequence
gtacggcgtaagatcaaagttgccttttcgggcacaatctttgtcaggctcaggagctgaactgctcctctcccagctacggtgcgctcagcgggggcgcaccgttttattttcttccagttttttgatagaccacgcgcccagccagccgcaggcagtgcccagcaccgcaccacccagaatatccgtcggaaagtggacgcagaggtacatccgggagaacgcgatcagcactgccagcggcagcgctgccattgccc

SEQ ID NO: 26382 - DNA, 260 bp, Unknown
  Description of Unknown: RightRegion for integrase B383 sequence
ttgctatcgcatgtgggttatccagaacttgatagtaaaatgttttggcctagaaaatagctaacttcatctacttcacatttgaaagtatattttcagcctcgtaggattgcccctgcgaggtttttttatatgtagtaatgcgggttgaatgggttagggcttgaactgcttagaaagcgttacaggaggaattataaagtttagcattgggaaggttttgtgattgttcaattatcaaccatctagtggggggtgaa

SEQ ID NO: 26383 - DNA, 260 bp, Unknown
  Description of Unknown: RightRegion for integrase B384 sequence
ggttcacagacagcacctcgatgctgttttcgagatagattcagctgcgaccagccgtgaggaaataggcaatccgccgcactacggcaccaaaaacaaactatacgaggagcatattcctcttattccacaccgcgcgagacagatgacacgcgatgattatttgtactatgaccttctgattggaatggacactgcaaatatcaggaatatgacaagaattgcaggtggcagtgacagtcagcagaagatatttaaga

SEQ ID NO: 26384 - DNA, 260 bp, Unknown
  Description of Unknown: RightRegion for integrase B385 sequence
ctgctatcacatgttggttatcctgaacttgatagtagaatgttctggcctcgcaaatagttaacaagccccttcgggggcttttttattatgggatgtttttctcctgtatctagtaaatactttacatagtcagatacaggagaaaacacactatgattaacattctaattgagatactctctacagtattctatatgttcgtactattcccaatgttcttagtactaaatcttttctttatgattcttgtagtactt

SEQ ID NO: 26385 - DNA, 260 bp, Unknown
  Description of Unknown: RightRegion for integrase B386 sequence
gatattttaatattagtgccaagattagtgccgaaaaatgaattaattaacactatttaaagaagaaaggaatgataaaaatgaaagttacttatacaagaaaaggagattatttattaccagatttatatttagaaaaaggcgaaaattatggaaggcttggaagatatggaatattaagattacactttattgcccaaaacaagcaagcactttatgaaacattattgatgacaaataaattaactcatcatcttctt

SEQ ID NO: 26386 - DNA, 260 bp, Unknown
  Description of Unknown: RightRegion for integrase B387 sequence
ggtccacagacagcacctcgatgctgttttcgagatagattcagctgcgaccagccgtgaggaaataggcaatccgccgcactacggcaccaaaaacaaactatacgaggagcatattcctcttattccacaccgcgcgagacagatgacacgcgatgattatttgtactatgaccttctgattggaatggacactgcaaatatcaggaatatgacaaggattgcaggtggcagtgacagtcagcagaagatatttaaga

SEQ ID NO: 26387 - DNA, 260 bp, Unknown
  Description of Unknown: RightRegion for integrase B388 sequence
ggtccacagacagcacctcgatgctgttttcgagatagattcagctgcgaccagccgtgaggaaataggcaatccgccgcactacggcaccaaaaacaaattatacgaggagcatattcctcttattccacaccgcgcgagacagatgacacgcgatgattatttgtactatgaccttctgattggaatggacactgcaaatatcaggaatatgacaaggattgcaggtggcaatgacagtcagcagaagatatttaaga

SEQ ID NO: 26388 - DNA, 260 bp, Unknown
  Description of Unknown: RightRegion for integrase B389 sequence
atcaggttgatggctacgtatgtgataattcccatggagataccttcggaaatgctgtagaagaacggcattgcgatgatacatacataacatgggattgcctcggacatatcgctgaaatcaatgctgataacattgctgagcatgtacagaccgacgatcaccagagccggagctgtggcaaaggacgggattgccaggaagatcggagacaggaacagggacaggccaaataagatggcagttgtcactgcggtaag

SEQ ID NO: 26389 - DNA, 85 bp, Unknown
  Description of Unknown: RightRegion for integrase B390 sequence
aataattctcgggttgacgaagataccgttgaaaccgtagcgatcctcgggcgccgctagcccaccccagtagatttttgggaca

SEQ ID NO: 26390 - DNA, 260 bp, Unknown
  Description of Unknown: RightRegion for integrase B391 sequence
ggtacagctgctttgttagaagaagtattgtttgacataatcattttcctccttggttaattgttgttttgtttgatgttacattgctagtatgtactctgaaaatgaaaatacactgggaataaatggggtgatcaaaaaaagacaacaaaaaaaatatgccggatagcaaaatgttttaacttgacgctacattctcagtgtagaaattcttatattgggagcatatcttattacaagaacaaaaaattgcatacaca

SEQ ID NO: 26391 - DNA, 260 bp, Unknown
  Description of Unknown: RightRegion for integrase B392 sequence
tcgcccgccagcttaacggaactgcttcttttccgggatggttattcacgcaaaaagtgagggcgcacatcatgcgcccccagcgtgtcgaaaaaccatctgcgaaacagaccccccgatgcgagaaaggtggcgcttgcgccagaggctaagggagggaaacacaccttcttcgacattcaaaggacaattactgttctcccactctatattgctctgacgcgttttttaataaagttaaacagcataatctgcccgat

SEQ ID NO: 26392 - DNA, 260 bp, Unknown
  Description of Unknown: RightRegion for integrase B393 sequence
ctaaatgagttgctccgtgaagcggagaagataatggaaggatggactgattatagatgaatgaagaaaacacaacaatcatgccgccagagaagcagattgtgcaggatgatagagacgcacgggcggaagaactggaaagtgccttttcgtatgatggctaccaggtcgtgcgaaaggaattgtttgcccatctgcgtgacccggcaatcgtgattcgtaaagatagtatcacattcaacacagcctgtatcacaggg

SEQ ID NO: 26393 - DNA, 260 bp, Unknown
  Description of Unknown: RightRegion for integrase B394 sequence
ccggagcagtacggcgtggaggatgattcttttgaggaagaagaaacggagcaggcgtaaacctgctccgtacaaatgtaaattagtcgtcctcgtcatcatcaggccacgaggataccaaatggatatctccggaatccatgtccatggccatattatcgcccatgcgcatcatcatatttccgtcagaatccatcgccatgttgtccgagacggtgaatgcaaaatcgccgtcttcaaaatcaaaaaagtgtttaccc

SEQ ID NO: 26394 - DNA, 260 bp, Unknown
  Description of Unknown: RightRegion for integrase B395 sequence
aaacttaataaagtacttcgaaatggcttgagaattagagtagaatgtgatataacataaataataattttttgaggaggtactatatgagcaaagaaacagagaaaatattctcacaaatgaacaaatatatggaacaatttaactttgatagtgaagaacaaatggaaaaagaaatgaaaaattttatacaaaaactaaacaataacgaaattgaatttgatgatccaaaatttaagtcggatgatttattggaaggg

SEQ ID NO: 26395 - DNA, 109 bp, Unknown
  Description of Unknown: RightRegion for integrase B396 sequence
tgggcgttccggcatccaccctgcgctactatgacaaggaaggtctgctgccctttgtagcgcggtcatccggtggcatccgccagttccgcgaaagcgacatcgagtg

SEQ ID NO: 26396 - DNA, 260 bp, Unknown
  Description of Unknown: RightRegion for integrase B397 sequence
gcgtgtcggctgtctgatcgaggcaccgggcatttatccaaatatgacggcgaaagataatctgatgatcaaggcgcagctgtttggcattcatgaccgcaaatatgcggatgagcttttagacatggttggtcttggggatgtcggcaggaaaaaggcaggtcatttttcgctgggaatgaagcagaggcttggcattgcgctggcacttgtcggaaatccggatcttttggtattggatgagccgatcaacggactgg

SEQ ID NO: 26397 - DNA, 260 bp, Unknown
  Description of Unknown: RightRegion for integrase B398 sequence
ctattatcagtagtgcattaccccgatttagacgggcggttattctggcctagaaaataaatcgacctccagccctcgaaagggggctttacctactataattagtagattgtcagaattttacagtcctgtataataaacagacaagacgagccgccgtgaaaatactttatagtattgatgggggcttgcttgcgtctatatttgccgattatccggcagggcttaccctttaagccctttttttaatcacccaggag

SEQ ID NO: 26398 - DNA, 260 bp, Unknown
  Description of Unknown: RightRegion for integrase B399 sequence
gtctacaaagacgaaaccggcccggaagagcatgagagcgccgtggaagcgtcagaataaatccccgggggagtttttcccccggggatttcccgtgcctctcagggcctcctattcgctcataaactcgatgaggcggtccaggcgcttcaggtgtgcgcggaggtttgccagcctcttctcgtccgggatcaccgcggccttctcctcttcggtcaggtcgaagttgatgtccgcgcagtaggtcacgacatcggcga

SEQ ID NO: 26399 - DNA, 260 bp, Unknown
  Description of Unknown: RightRegion for integrase B400 sequence
aatgttattaaagatattttaatattagtacctaaaaatgaattaattaatgcaatttaaataagaaaggaatgataaaaaatgaaaattacttatacaaggaaaggagattatttattaccagatttatatttagaaaaaggtgaagattatgggagaattggaagatatggaatgttaagattacactttattgcccaaaataaacaagcactttatgaaacactattgatgacaaataaattgactcatcatcttct

SEQ ID NO: 26400 - DNA, 260 bp, Unknown
  Description of Unknown: RightRegion for integrase B401 sequence
ggctacaatcttgataagcaaaaacaggcagagcaagaaaaccatcagaacactgaataatgcgcattgcacaattttcaagcaatagccaaaagcgccgaaggcataagccctcggcgcttttgggtatgtaaagtgtggttctccaccttacaaatgttaaatttctctattatttcacgaacatggcatcgccaaaggagaaaaagcgatatttttcctgtacggcaaccttatatgcagccatggttttctcatac

SEQ ID NO: 26401 - DNA, 260 bp, Unknown
  Description of Unknown: RightRegion for integrase B402 sequence
aatgttattaaagatattttaatattagtgccaaaaaagaaattaattaacactatttaaagaagaaaggaatgataaaaatgaaagttacttatacaagaaaaggagattatttattaccagatttatatttagaaaaagacgaaaattatggaaggcttggaagatatggaatattaagattacactttattgcccaaaacaagcaagcactttatgaaacattattgatgacaaataaattaactcatcatcttctt

SEQ ID NO: 26402 - DNA, 260 bp, Unknown
  Description of Unknown: RightRegion for integrase B403 sequence
aggatgccgctgaccgtgtttaccgcctggatctgggtgtctttggtgacgtgggcgtaggtgtccagcgtgaatccggcgctgtaatggcccatcattccagagactgttttcacgtttcccccgttctgccgggcgatacgccgctggatacggagcgtttttctctggaagtcaatgcctgtccattttaatcccaacagctctccccgccgcaggccggttgtccaggtccatgtagcagcgttcatacacgccgc

SEQ ID NO: 26403 - DNA, 260 bp, Unknown
  Description of Unknown: RightRegion for integrase B404 sequence
cccccttttcggaaatttcttcaaaaatttccgcgccatcgtaggttgatacagccttgagctgttccacttggttgaagctggcgttcagggtaatcgagatctcatagtcttttcggacgcgaatctccttaatgaactgctgcaaaatggcgcggcgttcatcgtggttggcggtgtcgtacacatccgcccatgtaaacagctcgttgcagatgtagttgctacgctttgccgttttggtggcttcttcgtattct

SEQ ID NO: 26404 - DNA, 260 bp, Unknown; identical to SEQ ID NO: 26402
  Description of Unknown: RightRegion for integrase B405 sequence

SEQ ID NO: 26405 - DNA, 260 bp, Unknown
  Description of Unknown: RightRegion for integrase B406 sequence
agtggcacctctatagggcatgaacaggagataaaatacagctatcgttttgcattataattaacataggatgaagaagaaggagcgagattaaacagaaaggagtgaaaaagaatgaatatccataccgcatatgatgtaatgcgagagtatatgattacaggagcagagttggacggactgtatcaaattccaatgttggatagatacacaggccgaccgggcgaagatactgtagatttcaaggacagtttcagtcc

SEQ ID NO: 26406 - DNA, 260 bp, Unknown
  Description of Unknown: RightRegion for integrase B407 sequence
ggctacaatcttgataagcaaaaacaggcagagcaagaaaaccatcagaacactgaataatgcgcattgcacaattttcaagcaatagcaaaaagcgccgaaggcataagccctcggcgcttttgggtatgtaaagtgtggttctccaccttacaaatgttaaatttctctattatttcacgaacatggcatcgccaaaggagaaaaagcgatatttttcctgtacggcaaccttatatgcagccatggttttctcatac

SEQ ID NO: 26407 - DNA, 260 bp, Unknown
  Description of Unknown: RightRegion for integrase B408 sequence
ggctacaatcttgataagcaaaaacaggcagagcaagaaaaccatcagaacactgaataatgcgcattgcacaattttcaagcaatagcaaaaagcgccgaaggcataagccctcggcgcttttgggtatgtaaagtgtggttctccaccttacaaatgttaaatttctctattatttcacgaacatggcatcgccaaaggagaaaaagcgatatttttcctgtacggcaaccttataggcagccatggttttctcatac

SEQ ID NO: 26408 - DNA, 260 bp, Unknown; identical to SEQ ID NO: 26405
  Description of Unknown: RightRegion for integrase B409 sequence

SEQ ID NO: 26409 - DNA, 260 bp, Unknown
  Description of Unknown: RightRegion for integrase B410 sequence
agtggcacctctatagggcatgaacaggagataaaatacagttatcgttttgcattataattaacacaggatgaagaagaaggagcgagattaaacagaaaggagtgaaaaagaatgaatatccataccgcatatgatgtaatgcgagagtatatgattacaggagcagagttggacggactgtatcaaattccaatgttggatagatacacaggccgaccgggcgaagatactgtagatttcaaggacagtttcagtcc

SEQ ID NO: 26410 - DNA, 260 bp, Unknown; identical to SEQ ID NO: 26406
  Description of Unknown: RightRegion for integrase B411 sequence

SEQ ID NO: 26411 - DNA, 236 bp, Unknown
  Description of Unknown: RightRegion for integrase B412 sequence
ggctacaatcttgataagcaaaaacaggcagagcaagaaaaccatcagaacgctgaataatgcgcattgcacaattttcaagcaatagcaaaaagcgccgaaggcataagccctcggcgcttttgggtatgtaaagtgtggttctccaccttacaaatgttaaatttctctattatttcacgaacatggcatcgccaaaggagaaaaagcgatatttttcctgtacggcaacctta

SEQ ID NO: 26412 - DNA, 260 bp, Unknown
  Description of Unknown: RightRegion for integrase B413 sequence
aagtttattactcattgtgttcttcctcatcaatcttttcatttccttcattcagcatgaagtatagcagagcttccagcaatgttgccatataatgaagcgaccagttttcttccggctcttttgtcatcttatcaagcacggctcgaaaagccgtggtacggtcaatccttgtttcctcatcaatgcggtcaagtatgcccttcattttcagggcgagttctttttcctcgtcagaaagctccggtatgccaagtaac

SEQ ID NO: 26413 - DNA, 260 bp, Unknown
  Description of Unknown: RightRegion for integrase B414 sequence
caaaagaggatggaagcgcaactggagcaaacagatgctcccacgcaagaaacagcataatgttatgcaaggcggtttgcgagatgcaggccgcctttttgtacacttaaacaacattttgaagtccgcacagcggcagaaaggaaaatatcatgaaaaagactttttattccgtcacctacgcagtatggggatccagcttctgccgtgaggcatggttcgacagcaagtccgcagcggacgccttcgccgcacacgat

SEQ ID NO: 26414 - DNA, 260 bp, Unknown
  Description of Unknown: RightRegion for integrase B415 sequence
aagtttcttactcattgtgttcttcctcatcaatcttttcatttccttcattcagcatgaagtatagcagagcttccagcaatgttgccatataatgaagcgaccagttttcttccggctcttttgtcatcttatcaagcacggctcgaaaagccgtggtacggtcaatccttgtttcatcatcaatgcggtcaagtatgcccttcattttcagggcgagttctttttcctcgtcagaaagctccggtatgccaagtaac

SEQ ID NO: 26415 - DNA, 260 bp, Unknown
  Description of Unknown: RightRegion for integrase B416 sequence
aaaagtttccgcattttgttcaccgcagcacaggcagctatcgctgagaagaatgcataattaacataatgttaaggggcaaagcgaaatatcctctaaagaggtaaaatagccaaccagccctaaagtgtccaaacgtaaaatttgaccttggagaattgtagaaatacagttcttcagggtcttttttgttatattacacagcggtattcttttgtttaaggtttacgtatctgtagttgtaaccatcctgcatgcgg

SEQ ID NO: 26416 - DNA, 260 bp, Unknown; identical to SEQ ID NO: 26412
  Description of Unknown: RightRegion for integrase B417 sequence

SEQ ID NO: 26417 - DNA, 260 bp, Unknown
  Description of Unknown: RightRegion for integrase B418 sequence
ttccgagatgacgaggcacacgttgagacaatagtgttgctacaaagagaaaccttgtagaaatccttagatttaggcacttttcccgccatgtggtgtttgacgcagagggtgataaattccgcaataagcgtattgaggactatatcacggtttcggtagttattgatatggagtgtgggaacacaaaaaactaaatagttgactgaaaaggacatcgtgcaagcggtgtccttttcttttaggcgaaaccgcagatt

SEQ ID NO: 26418 - DNA, 260 bp, Unknown
  Description of Unknown: RightRegion for integrase B419 sequence
atgccccaccagttccgccgtgcagcgtggaccgacctaactgtggaggtgtatctgtgatgcttctggaaagcacccccgtgttaaacgcaattcacctcatacatgagcaaacaaataaggctcaccgccaaaattgacggtgagccttattttacgctcgatttttaacgttaagtcgttataaaaaccttatgctctcggttttttaatagcagcctgtgctgccttctgctgggcgttagcctgcttcagtgccc

SEQ ID NO: 26419 - DNA, 260 bp, Unknown
  Description of Unknown: RightRegion for integrase B420 sequence
agaggagggtttttaagaaaaaaccaatggcgagatttgactgtacatgtttttgtgtgaaagaaaggggacggggtaaccgtcccctttaggttaattctgcttgcaattttagtattgatatggtattatattaccaacaaagtaatatgtcggcaagggcgaacatcgcacatccgaggggcaactaatagtgttgtaatattaacacaactactatatatagtatatagcagctcgttttgctataatatgagttg

SEQ ID NO: 26420 - DNA, 260 bp, Unknown
  Description of Unknown: RightRegion for integrase B421 sequence
gctgcatcatccccctcaatgtacggcgtaaggtcgaagttgaacgtaatactgagctgatttgtcagtgtggttgtcgaatcgctgctcaccctcttgggtattccacacccggatgccgtttcgcacaaaccattctacaacaaacggcgttccatctgcgatgcgtccgattcggtcgcacatgaacaccagcagaatgtcaaacttgccttttcgggcataatctttgtcaggctcagaagctgagctgctcctct

SEQ ID NO: 26421 - DNA, 260 bp, Unknown
  Description of Unknown: RightRegion for integrase B422 sequence
gctgcatcatccccttcaatgtacggcgtaaggtcgaagttgaagggaatgttgagctgataacccctcttctttgcagatctttctgatccgttctccaacaagggatgctagttcggctggctcagattcaggctgatctttcgcttttttcacagagaacacctcatttgcgggcaatcatcagatgccacggaacgtaaaggtgaactccacgggcttggtcacatcagaaatatactccgggtggacattggcac

SEQ ID NO: 26422 - DNA, 260 bp, Unknown
  Description of Unknown: RightRegion for integrase B423 sequence
gctgcatcatccccttcaatgtacggcgtaaggtcgaagttgaaggtaatgttgagctgatacccacgataaacatctactctacggataagctgattgacgatcattttctttgcttcaaaactggcactgtcgtagagatcagaaaaagaaatcagttcttcgtacagttttgatacgttgtccatcagttcggcagttttttctgtttctgcataggaagattcataaagagcatccaattcccgaagtttttcctc

SEQ ID NO: 26423 - DNA, 260 bp, Unknown
  Description of Unknown: RightRegion for integrase B424 sequence
acacgccctgcctccaaacggggaacagaagttttgtttttggtaagtgccggtgtgtagcaactataccattataatataatcggtctgtcaaccattctatgtaaagcagaaatgttacccctcaaagcgtttattacgcccgaggggtatttttttgtacaagtgttaacgcactcctggcgttaatgaataatgggaatgtgaaccccgtcatatagccgcgagtccggttctacgagcttgtccacttattactc

SEQ ID NO: 26424 - DNA, 260 bp, Unknown
  Description of Unknown: RightRegion for integrase B425 sequence
aatggactgacacatatttttctatatcgtgatgaaatggccgaaaacgtaccgaaatagtgaaaaacgtacacaaacgcggctgaaatgttcaaaaaccggcgttttctgttttattgcaacggttaggggcgtgtaaggtccccggctttcagtggtggatctttatttatggccgtagtacagaaacgcgggtttaattctcccacggcgcccggttcacattaaacccggccggaacctgtcaaacaacattacaa

SEQ ID NO: 26425 - DNA, 260 bp, Unknown
  Description of Unknown: RightRegion for integrase B426 sequence
gtccgtggacaatctgcggacagtcacagaatgcagctattttcacttaccgttcagtaagattttcgcaatttttaatcgcgcgttctcatttgcgcaagaatccacacaaacacaactctgaatgctataatgcgcttgcagacgttcagagggaggaggttttcatcatggacatgaccgcacgtttcaaggcatacagagacctgaaccgggaaattgacctgcaaattgaacgactggagcagttggaagcaaag

SEQ ID NO: 26426 - DNA, 260 bp, Unknown
  Description of Unknown: RightRegion for integrase B427 sequence
accagcaagtccaacctttgttctctcgcttgttctttcaatttcttgttggctaactgatgttaaaatacgacttatcattttaccatttgcactagtagtatttatatcatcattagcacagtctaaatatgcttcgttttcttctaaaaactttaagatattttcccagtcataaacagaacgtgtaagtctatctaattttaaaactactatggtgttacatttcctatcttttatatcttgcaataatctttcaa

SEQ ID NO: 26427 - DNA, 260 bp, Unknown
  Description of Unknown: RightRegion for integrase B428 sequence
atgccgagccagttcagacgttgttcttggacagatttgagggtcgaagtgtatgtttgacagaaaaacaaatgtgcgctgctgacaagcagcggcgcacattttagtcaattttcagcctttttcgggctttaatttttaacgataactcgttaaaaattaatcacttcgctctgggtgctttaatggctgcctgtgcggcggccaggcgggcgatgggaacacggtagggagagcagctgacgtagtccaggccaacg

SEQ ID NO: 26428 - DNA, 260 bp, Unknown
  Description of Unknown: RightRegion for integrase B429 sequence
aggatattgcccatggtctgggcggctttcagttgggcgtcggtggtgacgtgggcgtaggtgtccagcgtaaagcccgccgagtagtgacccagcatactgctgacggtcttgacgtccacgccgttttgcagggccatcgtcgcgaaagtgtggcgcaggtcgtggaatcgtatccgtggcagccccgcccgtttcagcactctctgcagcatatgcagcacgctgtccggggacatagggcctccgcttggcgatgg

SEQ ID NO: 26429 - DNA, 109 bp, Unknown
  Description of Unknown: RightRegion for integrase B430 sequence
aataacttccgagatgacgaggcacacgttgaaaccgtagcgatcctcgggcgccgctagcccaccccagtagatttttgggacatgccttaaaatctaccggcacaag

SEQ ID NO: 26430 - DNA, 260 bp, Unknown
  Description of Unknown: RightRegion for integrase B431 sequence
ggccgccttggcagtgacggcggcattgatgaggtcgcgctcgtcgtcggacaggcctaaggggtcagtctggttcaggttttgggtcgggtctacaccggccgtgccgggctggtaggtgccgttctcagaggcagagcgggcaatcgtgacgatcatcacgttgttgtcgttcatgctgtctttccaagtggcgttctggccgtccagcgcagcctggctcggctccttgctggagaaaacgccggtcgtggagggag

SEQ ID NO: 26431 - DNA, 109 bp, Unknown
  Description of Unknown: RightRegion for integrase B432 sequence
ccaaagttttttcacccatctggtgaacacccatggtcttgcagaccagtttgtcattgacagttgtgcaacaagcagagaagaaatcggcaatccaccccacagagga

SEQ ID NO: 26432 - DNA, 260 bp, Unknown
  Description of Unknown: RightRegion for integrase B433 sequence
gcagcggcatctcgttatactgcacgcggcggacaagttcgtccgcttccagctccttaagtgcgctggtgagcgcggtgttggtgacgggcgctagcagcttcctcagctcgccaaagcgcagcggtgagcttatgcacagctcgtagattatctgcatcttccacttcccctgcagcatctgcaccacaggcgtgaccgggcaattgccctcatcggtcaatatcacaccgcccactttttccttaaattcctcatat

SEQ ID NO: 26433 - DNA, 260 bp, Unknown
  Description of Unknown: RightRegion for integrase B434 sequence
atgagtacaagagtaaaaaagttaaggagtgagaaacattggtcgtccaaaagaaagtaaccaccataccggcatcgctgacccgctttacagcgacgccgatcacagaattaaagaagcgccgtgtggccggatatgcccgtgtttccactgaccacgatgaccagttcaccagctacgctgcgcagattgattactacaccaactacatcaagagccgagacgattgggagtttgtcgaggtctacaccgatgagggc

SEQ ID NO: 26434 - DNA, 260 bp, Unknown
  Description of Unknown: RightRegion for integrase B435 sequence
ataattttgataaaactacggcggcttctttgttgcacggcattttcgtggatggtataatgagcgttagagaaagtaatttttggggaggaatagtatgatttaccacggttcgtgtatttctgggctgcacacaatcaaggcaaattcaaaatctcattctaccggaaaaatggttgcctatttcagcgaggacagatgctatgctctggtttgctgcagaagcagggccgaaaattatgttacgatgggcgttggag

SEQ ID NO: 26435 - DNA, 260 bp, Unknown
  Description of Unknown: RightRegion for integrase B436 sequence
ttacatccgctttacgccatgaaatccggcaggggcttgccctccttcagccattggtgatactcggcggtagcggcaaactcaacgtcgccagcggagttcagcgccgtctcgaccgaatcctggatgacaccaatgataaagccgacaccaacgacctgcatcgcaatgtcattggagatgccgaacagcgaacaggccatagggatcagcagcagcgaaccgcccgcaacgccggaggcaccgcacgcgcccagtgc

SEQ ID NO: 26436 - DNA, 109 bp, Unknown
  Description of Unknown: RightRegion for integrase B437 sequence
catggcgcagagtgtctttgcccatctggcggcggaagcgaacctggcagattattttgaaattgattccgcggcgacaagccgcgaagaaatcggaaacacaccacat

SEQ ID NO: 26437 - DNA, 109 bp, Unknown
  Description of Unknown: RightRegion for integrase B438 sequence
aatgtcagaattcgtattaaaagacatggtggaacagcgtggcttgacagaacaatttgaaatcgcttcggcggcgaccagcacagaggaaatctggaacggcaaagga

SEQ ID NO: 26438 - DNA, 260 bp, Unknown
  Description of Unknown: RightRegion for integrase B439 sequence
agtgaacacatgaagcagctacggaaggagcgtgggaaagcatggcgcaaagaaaagtaacggcgatcccggctaccatcagcaggtacacagccacgccgataaacagtacgaagaaacgccgtgttgcagggtacgcccgcgtttcgaccgaccatgaagaccagaccaccagctacgaagcgcaggtcgattactatacgaattacatcaggagcagggatgattgggagtttgtggccatatacacggacgaagga

SEQ ID NO: 26439 - DNA, 260 bp, Unknown
  Description of Unknown: RightRegion for integrase B440 sequence
aaaataggcgacaagtcttttgttcatggcaatgcactccctcttgatgattttgtataggataagtatagcacggtaggggagcagcatcaagcggttgcccatgatataacatcaacgacaatgttatattatggacaactgttcgtaaaaatttaaggattttgagggagttgtacagcttgatatgaggagcgatttatggtaagatgaaagtacaataagagcttatacgctcttgttgaatctactgcgaggaa

SEQ ID NO: 26440 - DNA, 260 bp, Unknown
  Description of Unknown: RightRegion for integrase B441 sequence
attcccggtgtaccatggggctgccccatcgccgtggcggcgggtgtgatttatttataataccacttacggctctttttgtaaaattgatttccatgagacaagcaggttttcctctcgcaatccggggtgggttgtggtatactggagcagaatccggaaatcatcctttgaaacgaggtatccccatggagatcatcattcatcaggccatcctgcatgtgctggacaccacccttgacgccccggtgctcagcggc

SEQ ID NO: 26441 - DNA, 260 bp, Unknown
  Description of Unknown: RightRegion for integrase B442 sequence
ccgaaaaaggtcacctatcggtggcctttttctcgtatcggaggagggaatgcggtataatggtgtgggacgataaaatgctggcaaagaaagcagaaaactgaggacaattggaatttgtgagcttggaagaaatggtgccgcaggatcacttgctgcgaaagatcgacacagcaatcgacttcaagaagatctacgaatttgtagaggatctgtactgcgaggacaacggccggccaagcgtagacccggtggtactg

SEQ ID NO: 26442 - DNA, 260 bp, Unknown
  Description of Unknown: RightRegion for integrase B443 sequence
ttcagagcctgctccagatcgatctcttccgcatcgccccacagacgctccaaatcatagaacttgcgggcctcgtcggtaaagacatggaccactaccgcagaaaaatccatcagcagccaggtgccgccccggtgtccctcaatgtgatgggcacgctcgccgtgggcctccatggcctcttcacaggcgtccgacatggcctttacctgggtgttggaggtagcagtgcagatcacaaagtaatccgccagagtagt

SEQ ID NO: 26443 - DNA, 260 bp, Unknown
  Description of Unknown: RightRegion for integrase B444 sequence
tatagtaatgaaactattatagaccaaataatgttaatacctaaaaccgaaatatgttaaagaaaggacttactaattatgaaattattaagtaaaaataatattattaaaagtcaagtaaatacaatagaacaatataaagttttaaactacttaaaagatacttttgatactgatgctattgatatttatttagttgatagatttactattaaagttatagataaaaataatgatattggctattttaaatacaatag

SEQ ID NO: 26444 - DNA, 260 bp, Unknown
  Description of Unknown: RightRegion for integrase B445 sequence
tatagtaatgaaactattatagaccaaataatgttaatacctaaaactgaaatatgttaaagaaagtacttactaattatgaaattggtaaacaaaaataatattattaaaaatcaggttaatacaatagaacaatataaagttttaaactacttaaaagatacttttaattctgattatattgctgtttatttagttgatagatatacaattaaagtcatagatacgaataatgatattggctattttaaatacaatag

SEQ ID NO: 26445 - DNA, 260 bp, Unknown
  Description of Unknown: RightRegion for integrase B446 sequence
tcccgggttgatgggaatcacgacgagacggtagttttgatgtctaggaaagagaaataaatagcgaaaagtagcgtatttacgggcttttttgagattagtaggtagctcatgaaagtccgtatttcttatattgaaacatatctactgtaaaaacggtcagagagtttaggctgttgattagatgtcgtgggttgtggcactaagatagatgttatctagggtgcaaactcaatttgagtgagtgatttagatgttgt

SEQ ID NO: 26446 - DNA, 260 bp, Unknown
  Description of Unknown: RightRegion for integrase B447 sequence
ttgcgcggggtacgcggaagaaacgcgggtcggcgatacggtcatgttcgggcaatatgaacaggatggaaatctggacaacggcagtgagcctattgcgtggcaggtgctggatgtgcagggcggcaaagcgctgctgatgagccgctatgcgctggactgcctgccgttccatgacgagaaaaccgatgccgcgtggaatcaaagcgcgctgaatgcgtggcttcaggcggattttcatgcggcgttcacggatgctg

SEQ ID NO: 26447 - DNA, 260 bp, Unknown
  Description of Unknown: RightRegion for integrase B448 sequence
ttgcgcggggtacgcggaagaaacgcgggttggcgatacggtcattttcgggcagtatgagcaggatggcaatctggataacggcagcgagcccattgcgtggctggtgctggatgtgcagggcgggaaggcgctgctgatgagccgctacgcgctggactgcctgccgttccatgacgagaaaaccgatgccgcgtggaatcaaagcgcgctgaatgcgtggcttcaggcggattttcacgcggcgttcacggatgctg

SEQ ID NO: 26448 - DNA, 260 bp, Unknown
  Description of Unknown: RightRegion for integrase B449 sequence
gaggcaatgagtgaaagaatcaagaaaataaggagcgaaaagaaatggccaaatccgtaaccacgataccggcgacgctgtcacgcttcacggcggcaccgattaacagcactaagaagcgacgtgtggcggcctacgctcgtgtcagcaccgacaacgaggagcagctgaccagttacgaagcgcagattgactactacacgaattacatcaatggccgggatgattgggagttcgtcggggtatatcctgacgaaggc

SEQ ID NO: 26449 - DNA, 260 bp, Unknown
  Description of Unknown: RightRegion for integrase B450 sequence
catgtaagctccatagtctttaagaatggccttacacacaaatttatctataaaaattgacaccgacataaatgtcgggcacaaaaataaccaggaagcgttcgtacctcctggttattcttatattttctgtgttttttctccatccaacaaatgttagaaatggatgttaaatgataagcatggcatccccaaaggagaagaaacgataacgctcttttaccgcttcctcgtaagcagccatgatcttatcttttccg

SEQ ID NO: 26450 - DNA, 109 bp, Unknown
  Description of Unknown: RightRegion for integrase B451 sequence
catggcagaattcatattaaaagatatagtaacaaaacgtggtattgccgatcagtttgagatcgcatcggcagccaccagcacagaagagatttggaatggtgttggg

SEQ ID NO: 26451 - DNA, 260 bp, Unknown; identical to SEQ ID NO: 26446
  Description of Unknown: RightRegion for integrase B452 sequence

SEQ ID NO: 26452 - DNA, 260 bp, Unknown
  Description of Unknown: RightRegion for integrase B453 sequence
aaattgtgtttacatagtagctccgacacatgtggaaacagtttgtttattatcacgtaaataggcggttttactggcttttatgagtggggttcagtctatttgccacccatttgccaccctaattccgaaaaacatcactgaacacaagaaaagcactgaacccgttgaactattgccggattcagtgcttttttcaggtctttatgtagttgttatgatgtttttgcctgtgtcacctgttcaaacagatcaacaga

SEQ ID NO: 26453 - DNA, 260 bp, Unknown; identical to SEQ ID NO: 26447
  Description of Unknown: RightRegion for integrase B454 sequence

SEQ ID NO: 26454 - DNA, 260 bp, Unknown
  Description of Unknown: RightRegion for integrase B455 sequence
aatgacaacttattatcctttagaaaaattaagaaagataccaggactagaacatgctaagtatgtggatccatatgcaggaagtaaaggtaactcaatgagatatctatctgttgctcctagaactaatgacatgaaggttcaaggagtggataatttattctgcgctggagaaaaaagtggtctttttgttggacatacagaagctcgttattccaaattgcgatgaatattaataatttactatacgatgacatgcc

SEQ ID NO: 26455 - DNA, 260 bp, Unknown
  Description of Unknown: RightRegion for integrase B456 sequence
gaggcaatgagtgaaagaatcaagaaaataaggagcgaaaagaaatggccaaatccgtaaccacgataccggcgacgctgtcacgcttcacggcggcaccgatcaacagcaccaagaagcgacgtgtggcggcctacgctcgtgtcagcaccgacaacgaggagcagctgaccagttacgaagcgcagattgattactacacgaattacatcaatggccgggatgattgggagttcgtcggggtatatcctgacgaaggc

SEQ ID NO: 26456 - DNA, 260 bp, Unknown
  Description of Unknown: RightRegion for integrase B457 sequence
aggcttttatccagttttagggcaaaagtttcagccagtgaaaaatctaaattcacgtaaataagcgtgaaagtgtccaagcataagaataaccttggagaactgtagaaatacggttcttcaaggtttttttgtttctatggcagcagtttcacaggatttactgatatttggaaagtagagaaaagccttattttaagggctttcaaggggcttgatttacacataaaattgacattttatgaggaacagaaaatgta

SEQ ID NO: 26457 - DNA, 260 bp, Unknown
  Description of Unknown: RightRegion for integrase B458 sequence
cgcgtggcttcgatagagtttaagaatggactcgttcacgagttcctttacagagagtgagagcaggctgaggaggcagcctgctctctttatgtgtgtatgagtaagattagattaacaagaaaggttgattttacaaggttttaggtatcttgtttttagagttcatctgacacccgaatgtctttacaaaataagtcataggacggccgatttctttagatttcttttcaacaaaatcctttgcctttgccatgtaa

SEQ ID NO: 26458 - DNA, 260 bp, Unknown
  Description of Unknown: RightRegion for integrase B459 sequence
aaaccggatcagctcttaacggtgaactttgcggaatcgagcagctggttgccgatgtagatggacagggtataatcgccgtcggtctgcggggtgcgcgggaagtagccgacgaacatattcttttcccacatgtccttccagaccagcacggagctggacgaatcgacgatcttcccgtccgcgttgcggacgacaaggttgaccatgaccgttccgtcggaggaagcgtccagattgctgcccgcgtccacgtcgaa

SEQ ID NO: 26459 - DNA, 260 bp, Unknown
  Description of Unknown: RightRegion for integrase B460 sequence
atgagtgaacagatgaaagccctgcgaaaggagcgtggtgaaaattggcaaagacagtaagagccattccggctaccatcagccgttatacagcgatctcgattaacagccggaagaagcggagagtagctggctatgcccgggtttctacggatcatgatgaccaggttaccagctatgaagcgcaggtggactactacacgaattacatcaaggggcgggacgattgggaggttgttgctatctacacggacgaaggg

SEQ ID NO: 26460 - DNA, 260 bp, Unknown
  Description of Unknown: RightRegion for integrase B461 sequence
ggaaattcccgggttgccggaaatcacgacgagacggttgtattgatgtcaaaaaaataaaatcaagtgccagaaagtagcgtatttccgggctttttcggagatttggatttgaagccagacttctgaaaaagctcggttttcttatatggaaacatatctactgcaaaatgtgtgtcaggttgtaatctcggattagctgtcacgatttgagacagtggattagatgtcaggcattttagagtgatttttggaaaacg

SEQ ID NO: 26461 - DNA, 260 bp, Unknown
  Description of Unknown: RightRegion for integrase B462 sequence
acggaagcgaaaaaacgactagatcatccccgaacactgatcgatgaactgacggaataaaggtaagtgttagtgccattgtaaaattgccccacagaaatgttagcgtaatccatcgctatatagccatgaatcgctctgtatcttgtcagagcgattaaagcagacttcaggcatcgttcaatataaaacccccgtaaaacttgatacagagcgttgtagagcaagggttcaaaattacatcgtattcattctgtcta

SEQ ID NO: 26462 - DNA, 260 bp, Unknown
  Description of Unknown: RightRegion for integrase B463 sequence
atgagtgagaaaatgaagcagatcaggaaggagcgcggagcacagtggcgaaaagagtaacgacgatcatgccgacattggtgcggtttacggaagcgcccattgccgagcatcgcaagcggaaggttgccgcttatgcgcgtgtctctacggacagcgacgagcagtttaccagctatgaagcgcagattgactattatacccagtacatcaaggcgcgggacgactgggaattcgttcaggtttatacggatgaaggc

SEQ ID NO: 26463 - DNA, 260 bp, Unknown
  Description of Unknown: RightRegion for integrase B464 sequence
cctgcatgtatcttctttcttccgggcacattcgttttggttataaagtttgtcaaataacaaggacgcaaaaatcccccgtaacggtttctacaccgctgcgggggattttttgatatttgactttgttgtttacgcatgatacaatatttatagcttagtgaccgtgttgtagtaacctgcgggtctacaaccatattgaccccccgcacctctccatattgaaagatatgcgatgtgtcccagtgggggacattttt

SEQ ID NO: 26464 - DNA, 260 bp, Unknown
  Description of Unknown: RightRegion for integrase B465 sequence
acaggtgggccgccgcgcaggccgccatcaagaatccccgctaaaggcgagcatttataaagtaaacaggagcgccgcccaaatgggcggcgctcctgctgtttgtaccaaagagagagcccggacagcggaaccgctggccgggctcaaaacatctacggaatacacagccgtatcagacgtagcattttcatagcgagggtggggggtgtccacaacgaggatgctgcaaagtggttccgccataagctaggtcaata

SEQ ID NO: 26465 - DNA, 260 bp, Unknown
  Description of Unknown: RightRegion for integrase B466 sequence
ctcttttcgtttttgaacgatattattcgtagtcgatgggcagggtgggcaggccgttgagctccagcccggcggtgtgcccggcgatgtactggtagtagccctgggcggcgatcattgcgccgttgtcgccgcagaacttgagctccggcaggtagactttggcacccagcttctgtgcgccgtcgttgacgagctggcgcagccggccattggctgcgacgccgcccgccaggcagacctgcttcgctccggtgtcg

SEQ ID NO: 26466 - DNA, 260 bp, Unknown
  Description of Unknown: RightRegion for integrase B467 sequence
tcatttctgcgtaatcaaccatccataacaaaaactctaaatctaaaattaaaaatgtaaaaaatgggggcaagagaaacaaaatctcttaccccttatttattagccccaaattgtagggctaatttctctaagaataaaacctattacaccacctgtaaccgcagcaagtacaatttggataattgcatcaacccatttggaacgcctcttcataggttcagctttaaccacggcaatttcttttttaacggtcttaa

SEQ ID NO: 26467 - DNA, 260 bp, Unknown
  Description of Unknown: RightRegion for integrase B468 sequence
attgagctccaatttttctacaaaccgtccaaggatgacaaaagcccagaaaccgcttgatttctgggctttttcgctatttcttgttgtcgggatctggattgcttccaataaacatcgcatcgccaaaggagaagaaacgatatctctcctccacggcggctttataggcttccaggacatgctcgcggcccgccagcgcagaaaccagcatgatgagggtactctcgggcaaatgaaagtttgttatcaacccgtcc

SEQ ID NO: 26468 - DNA, 260 bp, Unknown
  Description of Unknown: RightRegion for integrase B469 sequence
gctggcggagaagtaagcaacaagtcgtttgctcatgacaaatgcacttcctttgattgattttcatggtttaagtatagcacgttgaatagggagcatcaagtaaggctgagtggacgaatgtgctaatattgcaaatgaaataagcacaaaagaaaatttgtgttgactttcgtgcttatttagaatacaatataagcacgaaggtgaggtgacgcttatgatgaacatgaacaatttggctcaaacacatgagattt

SEQ ID NO: 26469 - DNA, 260 bp, Unknown
  Description of Unknown: RightRegion for integrase B470 sequence
ctctcaattcgcttcaaaaacggtcttgaacacaaatttttgtacaaggacgcagaatagcaaagagccgaaaaccctgcaatttcaagggttttcggctctatttttttgcttgtggcatcctttacaggataagcattgcatcgccaaacgagaagaaccgatagcggttttcgacggcgatcttgtatgcgttgaggatgtgctcccgcccggccagcgccgacacgagcatgatgagcgtgctctccggcaggtgg

SEQ ID NO: 26470 - DNA, 220 bp, Unknown
  Description of Unknown: RightRegion for integrase B471 sequence
ctctcaattcgcttcaaaaacggtcttgagcacaaatttttgtacaaggacccagaatagcagaaagccgaaaaccctgcaattccaagggttttcggctctattttttggcttgtggcatcctttacaggataagcattgcatcgccgaaggagaaaaaccgatacctctcccgcacggcctcttcataagcccgcaatacattttcgcggccagccag

SEQ ID NO: 26471 - DNA, 260 bp, Unknown
  Description of Unknown: RightRegion for integrase B472 sequence
ataattcacgaatttgtgtacgccgacgaagaacctgttgccgaggcttcagagggctaaaaacgccgaaaaatccccgaaatacgctgatttcgaggatttttcttttggctcaagggccttctaaaaaactgttatcgaatgaacatcgcgtcccccatgaccacgggatatgagttttggtgcattggggaacccgcttgtaatcgtcgtaacgtactcattttatatcagaagccggtttcttgtcaatccgggtc

SEQ ID NO: 26472 - DNA, 260 bp, Unknown
  Description of Unknown: RightRegion for integrase B473 sequence
tggaaaagaaatgacagacgcagatacaaatatgcgggaaagaataggtgttgtttatgacggagataattttccagcttattggacagcagcacaattagcgaaagttatgtcgggattttataagcaatgggacaatattttgtttcagaaatttttaaaagaatacaaattacctgcaaatcaaaaaattaagcaatattccagagggatgacaatgaaattagcgattgcggttgctttatcgcaccatccacaac

SEQ ID NO: 26473 - DNA, 260 bp, Unknown
  Description of Unknown: RightRegion for integrase B474 sequence
ctctcaattcgcttcaaaaacggtcttgaacacaaatttttgcacaaggacgcagaatagcaaagagccgaaagccctgcaattccaagggttttcggctctgttttttggcttgtggcatcctttacaggataagcattgcatccccaaacgagaagaaccggtagcggttttcaacggcgatcttatatgcgttgaggatatgctcccgtccggccagcgccgatacgagcatgatgagcgtgctctccggcaggtgg

SEQ ID NO: 26474 - DNA, 109 bp, Unknown
  Description of Unknown: RightRegion for integrase B475 sequence
aagaacggtctgcggcacgaatttatctattccgaagacagcaacagccaggagaactaacctcctggctgttttttgtgtcaactgtacagtttatttttggtgttat

SEQ ID NO: 26475 - DNA, 260 bp, Unknown
  Description of Unknown: RightRegion for integrase B476 sequence
ataattcacgaatttgtgtacgccgacgaagaacctgttgccgaggcttcagagggctaaaaacgccgaaaaatccccgaaatacgctgatttcgaggatttttcttttggctcaaggaccttctaaaaaactgttatcgaatgaacatggcgtccccaatgaccacgggatatgagttttggtgcattggggaacctgcttgtaatcgtcgtaatgtactcattttataacagaagctggtttcttgtcaatccggctc

SEQ ID NO: 26476 - DNA, 260 bp, Unknown
  Description of Unknown: RightRegion for integrase B477 sequence
tgttatttctgggcggcgccggtaagcagggggcgggtcatagtattctttttcaaataaagttaatggcctatttttactgttactatagcctgtccaggtggctctttcaagtcctctgaatagggttcttttgcaacctttcccaaagaaggtatatctgctcgggcaagtgttcttcccacatgtccaaggcatcctccgtcaccgctatatgactctttaactgtctattttcttgtgtttacagtctttctatc

SEQ ID NO: 26477 - DNA, 109 bp, Unknown
  Description of Unknown: RightRegion for integrase B478 sequence
ataattcacgaatttgtgtacgacgacgaagagccagctcccgaacacaaagaggactaaaaatgccgaaaaatccccgaaatacgctgatttcgaggatttttctttt

SEQ ID NO: 26478 - DNA, 109 bp, Unknown
  Description of Unknown: RightRegion for integrase B479 sequence
ctggaattgcagtttttctacaaaaccgccgagacagcaaaaagcccgaaaaccttttgatttccgggctttttgttacttcgacttttcgtcgtctttcatgtttccg

SEQ ID NO: 26479 - DNA, 260 bp, Unknown
  Description of Unknown: RightRegion for integrase B480 sequence
ctgtccattcgctttaagaacggacttgaacacaaatttgtttacaaatccagcgtgtaggccgacataatatcacgcttcccgtaaacataggggacgccatgttcatcgccagcggtgcggtgccgcaggcttgagtatatcccctttgatacgcataaaaaatctcccttcgatagctgggtgtatgtaagacagtattgcgctaagattgacgaagcggcacgaaaccgcatgaagctgatcgtgcggtcactggc

SEQ ID NO: 26480 - DNA, 260 bp, Unknown
  Description of Unknown: RightRegion for integrase B481 sequence
ataattcacgaatttgtgtacgccgacgaagaacctgttgccgaggcttcagagggctaaaaacgccgaaaaatccccgaaatacgctgatttcgaggatttttcttttggctcaagggccttctaaaaaactgttatcgaatgaacatcgcatcccccatgaccacgggatatgagttttggcgcatcggggaacctgcttgtaatcgtcgtaatatactcattttatatcagaagcaggtttcttgtcaatccagtca

SEQ ID NO: 26481 - DNA, 260 bp, Unknown
  Description of Unknown: RightRegion for integrase B482 sequence
gcctccatccgcttcaaaaacggcattgagcaccaatttttctaccgtgacaaagagtagaaaaaagcccaggaaccgcttggctcccgggcttttcttcgtgcctctggaaatatttacatctgttatccaatgaacattgcatctccaaaggagaaaaaccgatagcgctgctccaccgcctccttataggcggccaggacatgctcccgccctgccagggcggaaaccagcatgataagcgtggattcgggcaggtg

SEQ ID NO: 26482 - DNA, 260 bp, Unknown
  Description of Unknown: RightRegion for integrase B483 sequence
ctctcaattcgcttcaaaaacggtcttgaacacaaattcttgtacaagtacgcagaatagcaaagagccgaaaaccctgcaattccaatggttttcggctctgttttttggcttgtgacatcctttacaggataagcattgcatctccaaatgagaaaaaccgataacggttttcaacggcaattttatatgcgttgaggatatgctcccgtccggccagcgccgagacgagcatgatgagcgtgctctccgggaggtga

SEQ ID NO: 26483 - DNA, 109 bp, Unknown
  Description of Unknown: RightRegion for integrase B484 sequence
acctcgattcgcttcaaaaacggcatagagcaccaatttttctaccgggacccagaatagcaaaaagcccaggaaccgcttggctcctgggcttttcagcacctcgctg

SEQ ID NO: 26484 - DNA, 214 bp, Unknown
  Description of Unknown: RightRegion for integrase B485 sequence
acctcgatccgcttcaaaaacggcatagagcaccaatttttctacaaggactcagagtagcaaaaagcccaggaaccccttggctcctgggcttttcagcgttccgctggaaatatttacatctggtctccaatgaacatcgcatcgccaaaggagaagaagcggtatttctcccgcaccgcctcctcataggcggccagcacgtgctcccgcc

SEQ ID NO: 26485 - DNA, 260 bp, Unknown
  Description of Unknown: RightRegion for integrase B486 sequence
ctctcaattcgcttcaaaaacggtcttgaacacaaatttttgtacaaggacgcagaatagcaaagagccgaaaaccctgcaattccaagggttttcggctctgctttttggcttgtggcatcctttacaggataagcattgcatcgccaaacgagaaaaaccgatagcggttttcgacggcgatccgataggcgttgaggatgtgttcccgtccggccaatgccgagacgagcatgatgagcgtactctccgggaggtgg

SEQ ID NO: 26486 - DNA, 260 bp, Unknown
  Description of Unknown: RightRegion for integrase B487 sequence
ctggaattgcagtttttctacaaaaccgccgagacagcaaaaagcccgaaaaccttttgatttccgggcttttttgttacttcgacttttcgtcgtctttcatgtttccgataaacatagcgtcgccaaacgaaaagaatctgtaacgctcctgaacggccactttatatgcggccatcgtcttttcgtaaccatagagggccgacacgagcatgatgagggtgctttcgggcagatggaagttggtgatgagaccgtcg

SEQ ID NO: 26487 - DNA, 260 bp, Unknown
  Description of Unknown: RightRegion for integrase B488 sequence
ctggaattgcagtttttctacaaaaccgccgagacagcaaaaagcccgaaaaccttttgatttccgggcttttttgttacttcgacttttcgtcgtctttcatgtttccgataaacatagcgtcccctatgctcacgggaaacatgataccgtaccggaaaaagtcgtcaaaatgttcgtttttggcttctgggaatgtctgatttcgtttggggctaccgaaaggaagatatatttgttcagcaaaaaagccccgtgaa

SEQ ID NO: 26488 - DNA, 109 bp, Unknown
  Description of Unknown: RightRegion for integrase B489 sequence
aaaaacggtttgcttcatcgttttatttattcttcagctgaaaagagccagggttcttagtttcctggctcttttttgtatcaactattcagtttatttttggtgtcat

SEQ ID NO: 26489 - DNA, 260 bp, Unknown
  Description of Unknown: RightRegion for integrase B490 sequence
gaatcgaacaggacggccgcccgcaggcggcaaaaaacaatccagcggattgttttttagtccgcgggagatggacgcacgggtcaccaaaaagcactacttcatttgaggtagtgcttttttcaatatagtgtactttttagggagtagaggagtgcgggaatcgaaaagcccgggccccgtgtccggcgtcccgcggggcaaaaacgcccctgcggggcgtttttagggcgggggagattcccgcacagtttttaata

SEQ ID NO: 26490 - DNA, 260 bp, Unknown
  Description of Unknown: RightRegion for integrase B491 sequence
caaaccattctacaacaaacggcgtttcatctgcgatgcgtccgattcagtcgaacatgaacaccagcagaatgtcaaacttgccttttcgggcataatctttgtcaggcccaggagctgaactgctcctcttccatctacggtgcgctcagcgagggcgcaccgttcttctttcttccagctttttgatggcccacgcgcccagccagccgcaggcagtgcccagcaccgcaccacccagaatatccgtcggaaagtgg

SEQ ID NO: 26491 - DNA, 260 bp, Unknown
  Description of Unknown: RightRegion for integrase B492 sequence
gaatcgaacaggacggccgcccgcaggcggcaaaaagcaatcctgcggattgttttttagtccgcgggttctttatttttcacgcaccgtttgctatggaataacggttcaggtatctgccaactatttttatatcgtataaattactcctccgccaactccaccaccaatttggcttcggtggcggcgatggcaagttggagtttattctctaagttcgtcttttgcagcatattgatgacgtggtactttacggtgga

SEQ ID NO: 26492 - DNA, 145 bp, Unknown
  Description of Unknown: RightRegion for integrase B493 sequence
acctccatccgcttcaaaaacggcatagagcaccaatttttctatcacgacgaagagtagcaaaaagcccaggaaccctttggctcctgggctttttctcattcctctggaagtttctgtatctggtctccaatgaacatcgcat

SEQ ID NO: 26493 - DNA, 260 bp, Unknown
  Description of Unknown: RightRegion for integrase B494 sequence
ggtcggatttcgttctgtatctctgcagcaggggcttttatgatggagagttcgagataaaaggagcatttcatgaactgaatgtaaggggacaagataaatgacaaaagtgggaatggacgggatatgatgggacgaggtgggaaaagatgagaattcagggattttcgaagggtcaaggcgaaacggaatttcgggttttgacaaataagctgtctttggagcttcgcaagtgggcggagctcttttttgtgcttgaa

SEQ ID NO: 26494 - DNA, 260 bp, Unknown
  Description of Unknown: RightRegion for integrase B495 sequence
aaaaacggtttgcttcatcgttttatttattcttcagctgaaaagagccagggttcttagtttcctggctcttttttgtatcaactattcagtttatttttggtgtcattctataaacatcgcatccccaaatgaaaagaacctgtatcgctcccgaatagcctcctcatatgccttcaggatatgctctcttcctgccagagcgctgactaacatcaccagcgtagattctggcagatggaaattggtaatcagagaat

SEQ ID NO: 26495 - DNA, 260 bp, Unknown
  Description of Unknown: RightRegion for integrase B496 sequence
ctgcatcggctgcgggcggcagcgccaggtgtggcggtgcagacggccaatgcgctgtagcagcaggtccatcgggcaaagttccgtcaccataacgtcaaaatcaatgtccaacgactgttcgagcacctgcgtgcccaccacaatgagtccatcccgccggaccggagtcgagtgcttgccgatccgctccatgagctcctgctcccgcgcggcgcggtccggcatcaggaattgtgcgtggaacacctgcacttctt

SEQ ID NO: 26496 - DNA, 260 bp, Unknown
  Description of Unknown: RightRegion for integrase B497 sequence
aacgacgagctcatcagccccttttttcaaacgttttttacagtgttgtccaacacataaagaggaaaaccacaaatgtgcactcaagaattaaaaattggcacaattccggctgtactgtacggcaaaccggcccccaacatctggttgttcgtgcatggccagggcggtaataaaacggaagccgcagcatttgcggcgcttgccgccccaaccggctggcaggtgctgggcattgacctgccggaacatggagaccg

SEQ ID NO: 26497 - DNA, 260 bp, Unknown
  Description of Unknown: RightRegion for integrase B498 sequence
gaatcgaacaggacggccgcccgcaggcggcaaaaaacaatcctgcggattgttttttagtccgcgggagatggacgcacgggtcaccaagaagcactacttcatttgaggtagtgcttttttctttttatttacttttcaataggtttcgagtgtaaacggtgagccgtgcgggaatcgaaaagcccaggctccgccctaaaaacgcccctgcggggcgtttttagggcgggggagattcccgcacagttttttataga

SEQ ID NO: 26498 - DNA, 260 bp, Unknown
  Description of Unknown: RightRegion for integrase B499 sequence
aaggatgtgtgttcctatgttagtgacaacacacgtcgaaaccgtgtgtctactttctaggaaataagcgggtttgcggacttgaaatgcggaagttcagtcgatttgccacccatttgccacccgcaaaaataaaatagaccgattttcaagaaaagctgctgaacactctgaactaaaatgagaagttcaaccgcttttttactatgcttttttgtgaatcgcattctcgaatacatcaactgccgtttgctgcatca

SEQ ID NO: 26499 - DNA, 260 bp, Unknown
  Description of Unknown: RightRegion for integrase B500 sequence
cctgccatacataagggcgacacaggcagctatcaaggaacagcgccaataaaaagttgacgcagcagcgtaggtaaaacaactgatataaatacggtcacacagtccgttgggattgtgtgaccgttatttttgccatgcaaaagcatggcaaaaataagaaatgtgccatttcctcgcccctgtggggcaaccggaaatgatgcacaaaaacttcatgcgccggcatttgcgcatttccgtggtgcgatgctcaggca

SEQ ID NO: 26500 - DNA, 260 bp, Unknown
  Description of Unknown: RightRegion for integrase B501 sequence
gaatcgaacaggacggccgcccgcaggcggcaaaaaacaatcctgcggattgttttttagtccgcgggagatggacgcacaggtcaccaaaaagcactacttcatttgaggtagtgcttttttcttttatttacttttcaaggggaaatgggagatgccggtaggcttcggcagggtgagggcaccccgccctacgcacggtttttaagtggggttgtagggcggccagtcctctggccgccgtggaggcttgcggcggc

SEQ ID NO: 26501 - DNA, 190 bp, Unknown
  Description of Unknown: RightRegion for integrase B502 sequence
ttcaaaaacggtttacttcaccgtttcatttattcttcagttgacaagagccaggaataataacttcccggctctttttcgtatcaactattcagtttatttttggtgtcattctataaacatggcatctccaaacgagaaaaagcgatatttctcccgaaccgcttcctcgtaagccgccagcacatga

SEQ ID NO: 26502 - DNA, 260 bp, Unknown
  Description of Unknown: RightRegion for integrase B503 sequence
cggccggtggaaattaccttcaagaatgggctgacgcacaaattcttataccgtgattaaaacggcccgatctgtatcaaaaccgggctaaaacgtatcaaaaccggcatttttcggaacgaaaggccggtttttggtattttatgccgtattttcggaactatcgcttttattcttccggcgggcagcaggacaaagaaaaccccaacttgtaaatcattcttacaagttggggttttgaaaaatcctttatttatgcg

SEQ ID NO: 26503 - DNA, 260 bp, Unknown
  Description of Unknown: RightRegion for integrase B504 sequence
ttcaaaaacggtttacttcaccgtttcatttattcttcagttgacaagagccaggaataataacttcccggctcttttttcgtatcaactattcagtttatttttggtgtcattcgataaacatcgcgtccccaaaactgaagaaacgatatctttcttttactgcctcctcatacgctgccatcacatgctcttttccggctaatgcagaaacaagcatgatcagtgtagattccggcagatggaagttcgtgatcagc

SEQ ID NO: 26504 - DNA, 260 bp, Unknown
  Description of Unknown: RightRegion for integrase B505 sequence
cggcgtgcggacgacaaaaaatattctgaagcagaaaagcctgatcggctttgtgcctgatttctttggcgtttatgaaaacttaaacgtgatagagtatctggaattttttgccgcatcgtatggaatttacgggcgggcaggaaccgtccgtgcgcgggaagtgctggagatggtcgaactatcgggaaaagaggagcagatggtggattcgctctcaaggggcatacagcagcggctctgtctggcgcgcgcgatga

SEQ ID NO: 26505 - DNA, 179 bp, Unknown
  Description of Unknown: RightRegion for integrase B506 sequence
ttcaaaaacggtttacttcaccgtttcatctattcttcagttgacaagagccaggaataataacttcccggctctttttcgtatcaactattcagtttatttttggtgtcattgtataaacatcgcatcccctatgattacgggtgtgctgaaaaaataaactctttgttttatcatac

SEQ ID NO: 26506 - DNA, 260 bp, Unknown
  Description of Unknown: RightRegion for integrase B507 sequence
gaaatgtgtggtgcttatttattgtctgcttgccatgcaaagcagcttatgataagataaacttgtattctccttctttagagattcgcaagacacagaagcaaaaacgtcaggaggccgcatatgccctatatttttttatatctttttttagcagtgctttgtcttttaaatatgcagttctgtccaaccggtgccgatatcaaaaagaccatgaaccgtctgcatgagctgcgctttgtttttgcagtactgatcat

SEQ ID NO: 26507 - DNA, 260 bp, Unknown
  Description of Unknown: RightRegion for integrase B508 sequence
tcaggcataaaaaatggcatgtctttatatcttgtatatattgtatgcgttggattttgattagccacagtaatcaatatactagaaaagcgaacagttacttatctatagttttgagtaactgttcgctcactgttatgttatcaggttttacatatcaagactggctaatcccacatattgaagcacctttctaataattgtcattcaaaactgtgtcaattgcagaatcaagactacaattcttcttctccaccagc

SEQ ID NO: 26508 - DNA, 260 bp, Unknown
  Description of Unknown: RightRegion for integrase B509 sequence
cgaccgattgaattagtatttaaaaatggactatctcacaaattcttatatcgtgattgaatttacattcgtatttgggtatggtaaaatttaatgtgaaaggtggattcacattatgaaaaagaaaatattatacgaagtgtctatgtcaatacttgcgataaccgctgttatattagcccttttggatcttgcaaaagggcttctttcatggcaaatcattatagataatatcattttaatgatttttgtcttagatt

SEQ ID NO: 26509 - DNA, 260 bp, Unknown
  Description of Unknown: RightRegion for integrase B510 sequence
ttcaaaaacggtttacttcaccgtttcatctattcttcagttgaaaagagccaggaataataacttcccggctctttttcgtatcaaccattcagtttatttttggtgtcattgtataaacatcgcatccccaaaactgaaaaaccggtatctttcccgaacggcttcctcataggcatgcatgactttttcctttccggccagagcggatacgagcatcagcagtgtggattccggcagatgaaaattcgtaatcaggg

SEQ ID NO: 26510 - DNA, 260 bp, Unknown
  Description of Unknown: RightRegion for integrase B511 sequence
cgcgtgtccgaaatcacctttgcgaatggcctgacccatgtctttttatatcgcgattgagcgcttttgttccgtttccgtgcagtttttcccggaaaatgtacagtttttcccgaaatcgttccgaaaacccggcgtttcgttcaggaatgccgggttttctgcctgctgccgcgctgggctgttatttttctacggtctgaacttccaacggactgactgccgttgtatccgtcattctggctttcttgtcaatcagg

SEQ ID NO: 26511 - DNA, 135 bp, Unknown
  Description of Unknown: RightRegion for integrase B512 sequence
ttcaaaaacggtttgcttcaccgtttcatctattcttcagttgacaagagccaggaataataacttccaggctctttttcgtatcaactattcagtttatttttggtgtcattgtataaacatcgcatccccaaa

SEQ ID NO: 26512 - DNA, 109 bp, Unknown
  Description of Unknown: RightRegion for integrase B513 sequence
ttcaaaaacggtttacttcaccgtttcatctattcttcagttgacaagagccaggaataatgacttcccggctctttttcgtatcaactattcagtttatttttggtgt

SEQ ID NO: 26513 - DNA, 109 bp, Unknown
  Description of Unknown: RightRegion for integrase B514 sequence
atctctatccgtttcaaaaacggtatcgaacacaaatttttgtataaaacgcaggaataagaaaaagccgaaaaccccagtaatactaaggttttcggctctctttttt

SEQ ID NO: 26514 - DNA, 260 bp, Unknown
  Description of Unknown: RightRegion for integrase B515 sequence
ttcaaaaacggtttacttcaccgtttcatttattcttcagttgacaagagccaggaataataacttcccggctctttttcgtatcaactattcagtttatttttggtgtcattctataaacattgcgtccccaaagctgaagaaccgatatcgctccttcacagcttcctcataggctgccagaacgtgttcccggcctgccagagccgataccagcatgacgagagtggactccggaagatggaaattcgtgatcagac

SEQ ID NO: 26515 - DNA, 260 bp, Unknown
  Description of Unknown: RightRegion for integrase B516 sequence
gaagcagaagaaagaagaaataacatttcaataagcaagcccaaaagcaagcccgattaatttcgggctttttttatgttatataatgaaatatttttatctttgtggtgtgacgggagaaatcgtcacacgttagacgtttaacaaagtggatagataaaactgacaattttaaactatttgaaccacagactgttaagcgtccgtgctcattgtatatacttgatgtatgcgataatgggtgcggacttgctttcatt

SEQ ID NO: 26516 - DNA, 260 bp, Unknown
  Description of Unknown: RightRegion for integrase B517 sequence
aatcaagaccgtcctttcaatgcctcaccctttgggagaggtggcattgcgaagcaatgacggagagggtcagtagttcagaccgaacccgctgcggtaatagttgccgtcggcgtcgcagtaagcgtagctgccgccgcgcaccccggcaaggatggccgggtcgatgtacgggtccttatcgtagccgggcacatcgttgggcgaagcgcagatctcacgcaccacaccgtcgatctcctgctcggtgatggcgatga

SEQ ID NO: 26517 - DNA, 109 bp, Unknown; identical to SEQ ID NO: 26513
  Description of Unknown: RightRegion for integrase B518 sequence

SEQ ID NO: 26518 - DNA, 260 bp, Unknown
  Description of Unknown: RightRegion for integrase B519 sequence
cttctcccggcgggaacggtcgggccgtgcgctgccttctcctcgaggagaaggtgctgagcgcagcgaggcggatgaggtggaaaggtcacgaccgcctccagtgccgccggtagtgcctccaaatccaacaacacttcatccgtcgcggcgtaccgccgcgccgccttcccctcaaggggaaggcttgcaagcccctctctggctccaccgctgctcagacgctttgggagaagccgtctatacgccccctcacaccc

SEQ ID NO: 26519 - DNA, 260 bp, Unknown
  Description of Unknown: RightRegion for integrase B520 sequence
atgtttgcaggccggtttttcagcaggctgctgcatcatccccttcaatgtacggcgtaaggtcgaacttgaaagtaatgttgagctgatacccacgataaacataaactaaaaaatccgccgaggactcctcccgaaaaaacgggaagaatcctcggcggatttcgtttatcgtgttggctctttttcggctgtgtcttttttctctgcaaaaaacatctctacatttttctgagctttcatcaactcctgcatctcat

SEQ ID NO: 26520 - DNA, 260 bp, Unknown
  Description of Unknown: RightRegion for integrase B521 sequence
gaaagttcgaccgagaagcgtttggtccgagtggcgagaatcgaactcacggcctcttgaaccccattgtgcttctctcgaaaacacaatgtacaatccgatactgcctagactcagtatcgttaaatttcaaatgcattataccattctgtttcattggatgtcaagacgtttcattccttttgtggtcaaattgtggtcaaacgaccccgacaaatgacctttctcccccagctaagttacatcgcgcaatttcgatt

SEQ ID NO: 26521 - DNA, 260 bp, Unknown
  Description of Unknown: RightRegion for integrase B522 sequence
gtttggatacacaggaaaggatttgtcgaaggtacgctcaagagtgggctgcctgattgaggcaccgggtgtatatcccaacatgacggcaaaggaaaatatcgagatgaagtgccgtctcttcggcatcagtaaaaagggctatgcagagggcatacttgataaggtaggtctgttaaatgtgggaaagaaaaaaacaaagaatttctcacttggtatgaagcagaggcttggaatcggcatggcgctggttggagagc

SEQ ID NO: 26522 - DNA, 260 bp, Unknown
  Description of Unknown: RightRegion for integrase B523 sequence
ctggaattgcagtttttctacaaacccgccgagacagcaaaaagcccggaaaccttctgatttccgggcttttctgttacttcgacttttcgtcgtctttcatgtttccgataaacatagcatcgccaaacgagaagaagcggtaccgttcctccaccgcctgctgataggccgccagcacgtgctctcgtcccgccaatgccgataccagcatgatgagtgtggactccggcagatgaaagtttgttaccagtgcgtcc

SEQ ID NO: 26523 - DNA, 260 bp, Unknown
  Description of Unknown: RightRegion for integrase B524 sequence
gtttggatacgctggaaaggatttgtcaaaggtacgctcaagagtgggctgcctgattgaggcaccgggtgtatatccaaacatgacggcgaaggaaaatatcgagatgaagtgccgtctcttcggcatcagtaaaaagagctatgcagagggcatactggataaggtaggtctgttaaatgtgggaaagaaaaagacaaagaatttttcacttggtatgaagcagaggcttggaatcggcatggcgctggttggagagc

SEQ ID NO: 26524 - DNA, 109 bp, Unknown
  Description of Unknown: RightRegion for integrase B525 sequence
cgttcctacagaactgagggagatagacggctgaagttgatgaagcaaacgaggatttgagggtacagcgcttgacagcaccccaagtccggcgtatgcttgtaacaat

SEQ ID NO: 26525 - DNA, 260 bp, Unknown
  Description of Unknown: RightRegion for integrase B526 sequence
gtttggatacgctggaaaggatttgtcaaaggtacgctcaagagtgggctgcctgattgaggcaccgggtgtatatccaaacatgacggcgaaggaaaatatcgagatgaagtgccgtctcttcggcatcagtaaaaagggctatgcagagggcatactggataaggtaggtctgttaaatgtgggaaagaaaaagacaaagaatttctcactcggtatgaagcagaggcttggaatcggcatggcgctggttggagagc

SEQ ID NO: 26526 - DNA, 260 bp, Unknown
  Description of Unknown: RightRegion for integrase B527 sequence
gtttggatacgctggaaaggatttgtcaaaggtacgctcaagagtgggctgcctgattgaggcaccgggtgtatatccgaacatgacggcgaaggaaaatatcgagatgaagtgccgtctcttcggcatcagtaaaaagggctatgcagagggcatacttgatagggtaggtctgttaaatgtgggaaagaaaaaaacaaagaatttctcacttggtatgaagcagaggcttggaatcggcatggcgctggttggagagc

SEQ ID NO: 26527 - DNA, 260 bp, Unknown
  Description of Unknown: RightRegion for integrase B528 sequence
gtttggatacgctggaaaggatttgtcaaaggtacgctcaagagtgggctgcctgattgaggcaccgggtgtatatccaaacatgacggcgaaggaaaatatcgagatgaagtgccgtctcttcggcatcagtaaaaagggatatgcagagggcatactggatagggtaggtctgttaaatgtgggaaagaaaaagacaaagaatttttcacttggtatgaagcaaaggcttggaatcggcatggcgctggttggagagc

SEQ ID NO: 26528 - DNA, 260 bp, Unknown
  Description of Unknown: RightRegion for integrase B529 sequence
atgtttgccgcccgttttttcagcaggctgctgcatcatccccttcaatgtacggcgtaaggtcgaagttgaaggtaatgttgagctgatacccacgataaacatctaccctgcggataagctgattgacaatcattttctttgcttcaaaactggcactgtcgtagagatcagaaaaagaaatcagttcttcgtacagttttgatacgttgtccatcagttcggcagttttttctgtttctgcataggaagattcataa

SEQ ID NO: 26529 - DNA, 260 bp, Unknown
  Description of Unknown: RightRegion for integrase B530 sequence
gtttggatacgctggaaaggatttgtcaaaggtacgctcaagagtgggctgcctgattgaggcaccgggtgtatatccaaacatgacggcgaaggaaaatatcgagatgaagtgtcgtctcttcggcatcagtaaaaagggctatgcagagtgcatacttgataaggtaggtctgttaaatgtgggaaagaaaaaaacaaagaatttctcacttggtatgaagcagaggcttggaatcggcatggcgctggttggagagc

SEQ ID NO: 26530 - DNA, 260 bp, Unknown
  Description of Unknown: RightRegion for integrase B531 sequence
gtttggatacgctggaaaggatttgtcaaaggtacgctcaagagtaggctgcctgattgaggcaccgggtgtatatccaaacatgacggcgaaggaaaatatcgagatgaagtgccgtctcttcggcatcagtaaaaagggctatgcagagggcatacttgataaggtaggtttgttaaatgtgggaaagaaaaaaacaaagaatttctcacttggtatgaagcagaggcttggaatcggcatggcgctggttggagagc

SEQ ID NO: 26531 - DNA, 260 bp, Unknown
  Description of Unknown: RightRegion for integrase B532 sequence
cattgtgttaaccagtataaaaggttttcaatagaattttctctctttgtaagattttaaactaacaaaagatgaaaaaagggcagaacctaccaaataaaattgccacggtgaagaacaagttcatcgtggcttttattataagatattctaatgcttaagtcaatattgcaaaaaataattgtctgaatttttcagaattgtttttttcggaatactaattggaatttttttgatacccccctgggtcttgttttcta

SEQ ID NO: 26532 - DNA, 260 bp, Unknown
  Description of Unknown: RightRegion for integrase B533 sequence
gtttggatacgctggaaaggatttgtcaaaggtacgctcaagagtgggctgtctgattgaggcaccgggtgtatatccaaacatgacggcgaaggaaaatatcgagatgaagtgccgtctcttcggcatcagtaaaaagggctatgcagagggcatactggataaggtaggtctgttaaatgtgggaaagaaaaagacaaagaatttttcacttggtatgaagcagaggcttggaatcggcatggcgctggttggagagc

SEQ ID NO: 26533 - DNA, 260 bp, Unknown
  Description of Unknown: RightRegion for integrase B534 sequence
ctggaattgcagtttttctacaaacccgccgagacagcaaaaagcccggaaaccttctgatttccgggcttttctgttacttcgacttttcgtcgtctttcatgtttccgataaacatagcatcgccgaaggaaaagaaccggtatcgctcctccaccgcctgccgataggcgttcagtatatgctcccgtccggccagcgccgaaacaagcatgatcagcgtggactccggcaggtgaaaattggtaataagcgcgtcc

SEQ ID NO: 26534 - DNA, 260 bp, Unknown
  Description of Unknown: RightRegion for integrase B535 sequence
atgtttgtagcccggctgttcagcagacagctgcatcatccccctcaatgtaccgcgtaagatcaaagttgccttttcgggcataatctttgtcaggctcaggagctgaactgctcctcttccatctacggtgcgctcagcgggggcgcaccgttcttctttcctccagctttttgatggcccacgcacccagccaaccgcaggcagtgcccagcaccgcgccgcccagaatatccgtcggaaagtggacgcagaggtac

SEQ ID NO: 26535 - DNA, 260 bp, Unknown
  Description of Unknown: RightRegion for integrase B536 sequence
gtttggatacgctggaaaggatttgtcaaaggtacgctcaagagtgggctgcctgattgaggcaccgggtgtatatccaaacatgacggcgaaggaaaatatcgagatgaagtgccgtctcttcggcatcagtaaaaagggctatgcagagggcatactggataaggtaggtctgttaaatgtgggaaagaaaaagacaaagaatttctcacttggtatgaagcagaggcttggaatcggcatggcgctggttggagagc

SEQ ID NO: 26536 - DNA, 260 bp, Unknown
  Description of Unknown: RightRegion for integrase B537 sequence
gtttggatacgctggaaaggatttgtcaaaggtacgctcaagagtgggctgcctgattgaggcaccgggtgtatatccaaacatgacggcgaaggaaaatatcgagatgaagtgccgtctcttcggcatcagtaaaaagggctatgcagagggcatactggataaggtaggtctgttaaatgtgggaaagaaaaaaacaaagaatttttcacttggtatgaagcagaggcttggaatcggcatggcgctggttggagagc

SEQ ID NO: 26537 - DNA, 260 bp, Unknown
  Description of Unknown: RightRegion for integrase B538 sequence
atgtttgcaggccggtttttcagcaggctgctgcatcatccccttcaatgtacggcgtaaggtcgaagttgaaggtaatgttgagctgataacccctcttctttgaagatctttctgatccgttctccaacaagggatgctagttcggctggttcagattcaggctgatctttcgcttttttcacagagaacacctcatttgcgggcaatcatcagatgccacgaaacgtaaaggtgaactccacgggcttggtcacatc

SEQ ID NO: 26538 - DNA, 260 bp, Unknown
  Description of Unknown: RightRegion for integrase B539 sequence
cattgtgtgaaccagtataaaagattttcaatagaattttctctctttgtaagattttaaactaacaaaagatgaaaaaagggcagaacctaccaaataaaattgccacggtgaagaacaagttcatcgtggctttgattataagctattctaatgtttaagtcaatattgcaagaaataattgtctgaatttttcagaattgtttttttcggaatactaattggaaattttttgataccccccctgggtctggttttct

SEQ ID NO: 26539 - DNA, 260 bp, Unknown
  Description of Unknown: RightRegion for integrase B540 sequence
gttcgccagcttcaaagcgcccaccagcagctcttcaaccgcctgatggcgctcgtttaaggagggatggccatgaataacgatcagcagattatggaaaacctgcttttgacgacaaagggcgtctgcgatttgtatctgcacggcgccatcgagtccgccacgccggacgtgcatcaggcgtttgacggcgcactgggcgaaagtctggacatgcagtcggatatctatgccgaaatgtccagccgcggctggtatca

SEQ ID NO: 26540 - DNA, 260 bp, Unknown
  Description of Unknown: RightRegion for integrase B541 sequence
gtttggatactctggaaaggatttgtcaaaggtacgctcaagagtgggctgcctgattgaggcaccgggtgtatatccaaacatgacggcgaaggaaaatatcgagatgaagtgccgtctcttcggcatcagtaaaaagggctatgcagagggcatacttgataaggtaggtctgttaaatgtgggaaagaaaaagacaaagaatttttcacttggtatgaagcagaggcttggaatcggcatggcgctggttggagagc

SEQ ID NO: 26541 - DNA, 260 bp, Unknown
  Description of Unknown: RightRegion for integrase B542 sequence
atgttttccgcccgttttttcagcaggctgttgtatcatccccttcaatgtacggcgtaaggtcgaagttgaaggtaatgttgagctgatacccacgataaacatctaccctgcggataagctgattgacgatcattttctttgcttcaaaactggcactgtcgtagagatcagaaaaagaaatcagttcttcgtacagttttgatacgttgtccatcagttcggcagttttttctgtttctgcataggaagattcataa

SEQ ID NO: 26542 - DNA, 260 bp, Unknown
  Description of Unknown: RightRegion for integrase B543 sequence
cattgtgtgaaccagtataaaagattttcaatagaattttctctctttgtaagattttaaactaacaaaagatgaaaaaagggcagaacctaccaaataaaattgccacggtgaagaacaagttcatcgtggctttgattataagctattctaatgtttaagtcaatattgcaagaaataattgtctgaatttttcagaattgtttttttcggaatactaattggaaattttttgatacccccccctgggtctggttttc

SEQ ID NO: 26543 - DNA, 260 bp, Unknown
  Description of Unknown: RightRegion for integrase B544 sequence
gatatgagacatatagggcattgtcgcaaaataacctttactgttcaaacgggcatatgatgacaaggaacagactcacatcaggtttgttcttttttatccgataatccaaaaaacactcgacaaaatcatccaaaaggtgtataatataaatactataaaacgaggggttgaaactatggcaaaatatgatgtacattttagctgcggacacacggagaccatacagttatttaaaaaagaaactgagcgaaaaagaa

SEQ ID NO: 26544 - DNA, 260 bp, Unknown
  Description of Unknown: RightRegion for integrase B545 sequence
gaaagttcgaccgagaagcgtttggtccgagtggcgagaatcgaactcacggcctcttgaaccccattgtgcttctatcgagaacacaatgtacgatccgatactgtctggactcagcatcgttaaattttaaatgcattataccattctgtttcattggatgtcaagacgtttcattccttttgtggtcaaattgtggtcaaacgaccctgacaaatgacctttctcccccggctaagttacatcgcgcaatttcgatt

SEQ ID NO: 26545 - DNA, 260 bp, Unknown
  Description of Unknown: RightRegion for integrase B546 sequence
gttcggatacaagggaaaggatttgcaaaaagttcgatcacggataggatgtctgattgaggcaccgggactttatggagatatgactgcatatgaaaatctgaatatcaaatgcaagctgtttggaataaagaaaaaaagttatattgaagaaatattgagaattatcggtctggaggatgtgggaaagaaaaaaacaaaacatttttcacttggaatgaaacagcgtttgggaattggtcttgctttggttggagaac

SEQ ID NO: 26546 - DNA, 260 bp, Unknown
  Description of Unknown: RightRegion for integrase B547 sequence
cattgtgtgaaccagtataaaagattttcaatagaattttctctctttgtaagattttaaactaacaaaagatgaaaaaggacagaacctaccaaataaaattgccaaggtgaagaacaagttcatcgtggcttttattataagatattctaatgtttaagtcaatattgcgagaaataattgtctgaattttttgaaattgttttttcggaatactaattggaaattttttgatacccccctgggtctggttttctact

SEQ ID NO: 26547 - DNA, 260 bp, Unknown
  Description of Unknown: RightRegion for integrase B548 sequence
gtttggatacgctggaaaggatttgtcaaaggtacgctcaagagtgggctgcctgattgaggcaccgggtgtatatccaaacatgacggcgaaggaaaatatcgagatgaagtgccgtctcttcggcatcagtaaaaagggatatgcagaggacatactggatagggtaggtctgttaaatgtgggaaagaaaaagacaaagaatttttcacttggtatgaagcaaaggcttggaatcggcatggcgctggttggagagc

SEQ ID NO: 26548 - DNA, 260 bp, Unknown; identical to SEQ ID NO: 26527
  Description of Unknown: RightRegion for integrase B549 sequence

SEQ ID NO: 26549 - DNA, 109 bp, Unknown
  Description of Unknown: RightRegion for integrase B550 sequence
caagaattaagactaattcaggtatcattggctatttttttcggcacaaccctgctataatgtttccacacaacaatgcgtctttaggagaacagagcaaatggaaagc

SEQ ID NO: 26550 - DNA, 109 bp, Unknown
  Description of Unknown: RightRegion for integrase B551 sequence
gcttcatcagttcatggcagcaaacaaagcttgatgctgctcacgtgcaccgctaaatgatgccttgaccccggcgcgcggtaagccgggcaagacagctgcctttaat

SEQ ID NO: 26551 - DNA, 254 bp, Unknown
  Description of Unknown: RightRegion for integrase B552 sequence
gtcttcaaaaacggtctgcgccaccggttcatttacaaagaaaatgcgccaaacggataagccgctggcgctcttttttcattttctaattgtgaactttttgtgaatttgcatgatttcttttgttttctgaaaataacagctttttactatctgtttttactattcagcagaatcttgtcatatacgataattcttacatatacttgtaaactactcagttgattttaggtcgtctgttatgaacatggcat

SEQ ID NO: 26552 - DNA, 260 bp, Unknown
  Description of Unknown: RightRegion for integrase B553 sequence
tatcggacagaccgtgaaaatgggatactatgcacaggaaatagcctcagaaaaaaatgaggatgcacaggagatcgatctgtcctatatggacccggcaaaacgggtgatcgattatgtaaaagatacggcagaatatattcggactgtggatggagtcatatccgcaacagtcttattggagcgttttttatttccaccggaaaaacagtacagtccgatcggaaagctgtccggtggagaaaagaaaagattaaatc

SEQ ID NO: 26553 - DNA, 260 bp, Unknown
  Description of Unknown: RightRegion for integrase B554 sequence
gttgccatcacgtttaagaacggactgactcacaaattcgcataccggctcctggaataattccggacaacaaaaaaactggtaaggacttttatgtccctaccagttttattatttttatacagccatgccattttcccagatttcctcacaagccaaatccagctcgtcattccatcctaccgcatatccaccaccgataacatttacgcttttgaacaactccgggttgtctcttatttcctggaataccggtatct

SEQ ID NO: 26554 - DNA, 260 bp, Unknown
  Description of Unknown: RightRegion for integrase B555 sequence
cctgtgatttccgagcctgttgttgcgaaatctacctctggacgcagaaaaacggcgtgaccattacggtcacaccgttctctgccccctcgcaaagctaaatagtaccttatcactattaagccttgaagttccagggtttttcatggttgcgggggatgaatttgaaccaccgacctccgggttatgagctgctaccggcagttcaatcctttgatttcaagtgctttccgacccttttcgttccagaaaactaccaa

SEQ ID NO: 26555 - DNA, 260 bp, Unknown
  Description of Unknown: RightRegion for integrase B556 sequence
ttttgtttttgcaacaacacactttataaccacttttgcccggatgcgggacaagggtgaatgatcggcacacagggcagcacacaagtaccatcgtaaatcggcataatgcccaattgtaagccccgctctgatggggtataatagcagcacaggaaggtggagcggatgaacaacgaagaattgattttgcagatgttgggcaaaatttcggacaagttagaggaacacgataagcactttgaatctattgacaatca

SEQ ID NO: 26556 - DNA, 260 bp, Unknown
  Description of Unknown: RightRegion for integrase B557 sequence
acggaagataggagccaggcaaatgagcatttgggacgcattcggcaaaggacggtataagggcttctcccgggaggcggggcagctgctggataaggcggtggagctggccggagggctgggctgcaaaaaggcagacaccggccacctgctgtgggcgatgctgcaagcggacggcggcccggcggctcgttttctggccgggaagaacatcacggagctggaagtgcggcgtcagctgtccgccgggcgggatggtt

SEQ ID NO: 26557 - DNA, 260 bp, Unknown
  Description of Unknown: RightRegion for integrase B558 sequence
cggattatcaaaattatcttcaaaaacggtgtttccatcacatttcaatacgcaaaataaaaaagtacccaatcatcatacgcgcgatgattgggtattgcctatttataatggtgctacttcttgatacattacgcattccccatgctcgtcagctcgtatcttctggtccgtatggaaggcagaatcgaaaagctgagtgccaatatcgacaccttaacccgtgtgctgcaggaaagacttgtaatgcaatttccata

SEQ ID NO: 26558 - DNA, 260 bp, Unknown
  Description of Unknown: RightRegion for integrase B559 sequence
cggattatcaaaattattttcaaaaacggtgtttccatcacattgcaatatgaaaaataaaaaaatacccaatcatcatacgtgcgatgattgggtattgcctgtttataagggtgctacttcttgatacactacgcattccccatgctcgtcagctcgtatcttctggtccgtatggaaggcagaatcgaaaagctgagtgccaatatcgacaccttaacccgtgtgctgcaggaaagacttgtgatgcaatttccata

SEQ ID NO: 26559 - DNA, 109 bp, Unknown
  Description of Unknown: RightRegion for integrase B560 sequence
cggattatcaaaattattttcaaaaacggtgtttccatcacattgcaatacgaaaaataaaaaagatacccaatcatcatacgtgcgatgattgggtattgcctgttta

SEQ ID NO: 26560 - DNA, 109 bp, Unknown
  Description of Unknown: RightRegion for integrase B561 sequence
cggattatcaaaattattttcaaaaacggtgtttccatcacattgcaatacgaaaaataaaaaaatacccaatcatcatacgtgcgatgattgggtattgcctgtttat

SEQ ID NO: 26561 - DNA, 260 bp, Unknown
  Description of Unknown: RightRegion for integrase B562 sequence
cggattatcaaaatcattttcaaaaatggtgttccgattacatttcaatatgcaaaataaaaaaagatacccagtcttaaagcgcattatgactgggtatcgcctgtttatatgtgtgctgcttcttgatgcattacgcattccccatgctcgtcagctcgtatcttctggtccgtatggaaggcagaattgaaaagctgagtgccaatatcgataccttaacccgcgttctgcaggaaagacttgtgatgcaatttcca

SEQ ID NO: 26562 - DNA, 260 bp, Unknown
  Description of Unknown: RightRegion for integrase B563 sequence
cggattatcaaaattattttcaaaaacggtgtttccatcacattgcaatacgaaaaataaaaaatacccaatcatcatacgtgcgatgattgggtattacctgtttataagggtgctactttttgatacactatggtttccccatgctcgtcagctcgtatcttctggtccgtatggaaggcagaatagaaaagctgagtgccaatatcgacaccttaacccgtgttctgcaggaaagacttgtgatgcaatttccatat

SEQ ID NO: 26563 - DNA, 109 bp, Unknown
  Description of Unknown: RightRegion for integrase B564 sequence
cgtgtcatgtcgatacgcttcagaaacggtattgagcacaattttttgtacaaaacatgacaagataaaaaacgccggaagcccttgatacattagggtttccggctta

SEQ ID NO: 26564 - DNA, 193 bp, Unknown
  Description of Unknown: RightRegion for integrase B565 sequence
cggattatcaaaattattttcaaaaacggtgtttccatcacattgcaatacgaaaaataaaaaaatacccaatcatcatacgtgcgatgattgggtattgcctgtttataagggtgctacttcttgatacactatgcgttccccatgctcgtcagctcgtatcttctggtccgtatggaaggcagaattgaaa

SEQ ID NO: 26565 - DNA, 260 bp, Unknown
  Description of Unknown: RightRegion for integrase B566 sequence
ctttgcgggatcaagttcgctttgtgcgaacttggtcgtccaccctatatggcgcattgagggctaatcgctgcgtacgtccgtacatggccggtacgcacgtacgcagaaaaaaaggaaagttctgacatataggggtgttctttcagctggtagtatggtatactcggctcaacaaatcggaagttaacggtatgtaaaagacctttgacacacggaaaacacagatgtcaatgtcctttgattgcgaaaatacaatc

SEQ ID NO: 26566 - DNA, 260 bp, Unknown
  Description of Unknown: RightRegion for integrase B567 sequence
cggattatcaaaattattttcaaaaacggtgtttccattacattgcaatacgaaaaataaaaaaatacccaatcatcatacgtgcgatgattgggtattgcctgtttataagggtgctacttcttgatacactatgcgttccccatgctcgtcagctcgtatcttctggtccgtatggaaggcagaatcgaaaagctgagtgccaatatcgacaccttaacccgcgtattgcaggaaagacttgtgatgcaatttccata

SEQ ID NO: 26567 - DNA, 260 bp, Unknown
  Description of Unknown: RightRegion for integrase B568 sequence
cggattatcaaaattattttcaaaaacggtgtttccatcacattgcaatacgaaaaataaaaaatacccaatcatcatacgtgcgatgattgggtattgcctgtttataagggtgctactttttgatacactatgcgttccctatgctcgtcagctcgtatcttctggtccgtatggaaggcagaattgaaaagctgagtgccaatatcgacactctaacccgcgtattgcaggaaagacttgtgatgcaatttccatat

SEQ ID NO: 26568 - DNA, 109 bp, Unknown; identical to SEQ ID NO: 26563
  Description of Unknown: RightRegion for integrase B569 sequence

SEQ ID NO: 26569 - DNA, 212 bp, Unknown
  Description of Unknown: RightRegion for integrase B570 sequence
cggattatcaaaattattttcaaaaacggtgtttccatcacattgcaatatgaaaaataaaaaaatacccaatcatcatacgtgcgatgattgggtattgcctgtttataagggtgctacttcttgatacactacgcattccccatgctcgtcagctcgtatcttctggtccgtatggaaggcagaattgaaaagctgagtgccaatatcga

SEQ ID NO: 26570 - DNA, 109 bp, Unknown; identical to SEQ ID NO: 26560
  Description of Unknown: RightRegion for integrase B571 sequence

SEQ ID NO: 26571 - DNA, 260 bp, Unknown
  Description of Unknown: RightRegion for integrase B572 sequence
tcgtttgtcagccagcgggctgaatcatcttacaggatgctgatgcggccggcaccgtaggggttctcgtagtccagcaggtagccggggtactctgccagcacactgttggcgctggaaaggtgcggcagaccctctgcgtccacaccgccaaaggtcatggcgtaggtggacatgacaaggtaatcttccgacacatagtccttgatgagctcggccccgtcaaacatggcaaagccatcgcccagattgcgcagggt

SEQ ID NO: 26572 - DNA, 109 bp, Unknown
  Description of Unknown: RightRegion for integrase B573 sequence
tggattaccacttcttattcttccaagttcaattgccattggagatataatttcatatgaaaatgaacaatctaaaactagagatggaagaaaggtaagatatactttt

SEQ ID NO: 26573 - DNA, 109 bp, Unknown; identical to SEQ ID NO: 26560
  Description of Unknown: RightRegion for integrase B574 sequence

SEQ ID NO: 26574 - DNA, 109 bp, Unknown; identical to SEQ ID NO: 26559
  Description of Unknown: RightRegion for integrase B575 sequence

SEQ ID NO: 26575 - DNA, 260 bp, Unknown
  Description of Unknown: RightRegion for integrase B576 sequence
agaattatcaaaattattttcaaaaacggtgtttccatcacattgcaatacgaaaaataaaaaaaatacccaatcatcatacgtgcgatgattgggtattgcctgtttataagggtgctacttcttgatacactatgcattccccatgctcgtcagctcgtatcttctggtccgtatggaaggcagaatcgaaaagctgagtgccaatatcgacaccctaacccgcgtactgcaggaaagacttgtgatgcaatttccat

SEQ ID NO: 26576 - DNA, 260 bp, Unknown
  Description of Unknown: RightRegion for integrase B577 sequence
cggattatcaaaatcattttcaaaaatggtgttccgattacatttcaatatgcaaaataaaaaaagatacccagtcttaaagcgcattatgactgggtatcgcctgtttatatgtgtgctgctttttgatgcattacgcattccccatgctcgtcagctcgtatcttctggtccgtatggaaggcagaattgaaaagctgagtgccaatatcgacaccctaacccgtgtgctgcaggaaagacttgtgatgcaatttcca

SEQ ID NO: 26577 - DNA, 260 bp, Unknown
  Description of Unknown: RightRegion for integrase B578 sequence
gagacagccaataaaaaagataaaaatgttgtcagcagattaggtttgcaatttctttaatagtaacaatacttgatatattaaatggatttttacatacagataaagaaaagataaaaatggtaaaaacatttaatgcaaataaaattcaagtattaactaaaattgtaattccatcaaatataccaacattttttaatacattaaaagtaaatatagggctttctttagtaggtgtaatttcaggagaatttctagtt

SEQ ID NO: 26578 - DNA, 109 bp, Unknown; identical to SEQ ID NO: 26563
  Description of Unknown: RightRegion for integrase B579 sequence

SEQ ID NO: 26579 - DNA, 260 bp, Unknown
  Description of Unknown: RightRegion for integrase B580 sequence
gatatacattggagctttgccccggaagccgccgaggttatcccggggcgctccgcataaaaaataaaggccgtccgtgcggggcggccttttcgcttaaattgctgaatcgctgaatttacgcgcacttttcgctgacttttcgcaaatcgcgcgaataacgcgattttgttgacgccgacaaaatcggcaggttatttgtctactctgatataactactgcaaacctccacatgacctgcccctattgcggaacaacc

SEQ ID NO: 26580 - DNA, 109 bp, Unknown
  Description of Unknown: RightRegion for integrase B581 sequence
cggattatcaaaattattttcaaaaacggtgtttccatcacattgcaatacgcaaaataaaaaagatacccaatcatcatacgcgcgatgattgggtattgcctgttta

SEQ ID NO: 26581 - DNA, 109 bp, Unknown
  Description of Unknown: RightRegion for integrase B582 sequence
cggattatcaaaattattttcaaaaacggtgtttccatcacattgcaatacgaaaaataaaaaaaatacccaatcatcatacgcgcgatgattgggtattgcctgttta

SEQ ID NO: 26582 - DNA, 260 bp, Unknown
  Description of Unknown: RightRegion for integrase B583 sequence
gggatcaaggtcgctttgtgcgaacttgatcgtccccctatatggcgcgtttgggggtaatcgctgcgtacgtgcgtaccgggagcctgtacacctctgacaatgtgtaacacactagactttgttccaaagtccgtgtgctaaggggcaggccccttagaattcctgtggagtgtgtacgcacgtacgcaggaaaacggcaaaatttcactatatcagggtgttctttcattggagagtatgatatactcggcttagtt

SEQ ID NO: 26583 - DNA, 260 bp, Unknown
  Description of Unknown: RightRegion for integrase B584 sequence
tttgatagggaaagtatgccgcagcaccatgtcccaatttgtattccaagacatgattaacaagcaaggtctcaccgaccaattttatattgattccgcggcaacaagccgcgaggaaatcggcaacggtccacattacggaacggtaaacaagatgcgggaagtagggattccggtacttccgcatcgcgctgtacagatgacaaaaaaagactatgagaaatatgattatctcataggaatggacgaagcgaacattc

SEQ ID NO: 26584 - DNA, 260 bp, Unknown
  Description of Unknown: RightRegion for integrase B585 sequence
cgatcaagaaacgcggcggcagtatctaagtcccagcccaacgccgccaaagcgctataaacatcaccggcgtatttaaccctcttgacgagagtgatctttctgtccggcagccgccgagcctcaaagcgccatttcttcgcatcgtcaccgatcttctggtgtagcctcgcctcggccaaaaacggcgtgtcctcacagatgtcaaactgccatacggccttctctctgttccagatgccatatttcgcgccgcgctt

SEQ ID NO: 26585 - DNA, 260 bp, Unknown
  Description of Unknown: RightRegion for integrase B586 sequence
cggattatcaaaattattttcaaaaacagtgtttccatcacattgcaatacgaaaaataaaaaaatacccaatcatcatacgtgcgatgattgggtattgcctgtttataagggtgctacttcttgatacactatgcgtttcccatgctcgtcagctcgtaccttctggtccgtatggaaggcagaatcgaaaagctgagtgctaatatcgaaagcctcactcatgtgctgcaagacagactcgtcatgcagttcccata

SEQ ID NO: 26586 - DNA, 109 bp, Unknown; identical to SEQ ID NO: 26563
  Description of Unknown: RightRegion for integrase B587 sequence

SEQ ID NO: 26587 - DNA, 193 bp, Unknown
  Description of Unknown: RightRegion for integrase B588 sequence
cggattatcaaaattattttcaaaaacggtgtttccatcacattgcaatacgaaaaataaaaaaatacccaatcatcatacgtgcgatgattgggtattgcctgtttataagggtgctacttcttgatacactatgcgttccccatgctcgtcagctcgtatcttctggtccgtatggaaggcagaatcgaaa

SEQ ID NO: 26588 - DNA, 260 bp, Unknown
  Description of Unknown: RightRegion for integrase B589 sequence
ggcattgatcgtgccgatggtcagcgtgcgataggcgatgagctggttcttcgtcgataaatagacggcgccaaactgctcttgcggcaaaaagcgcagattttccatgacatagccggcaatggcctggggcgtactgaagtcaggcgccgcttcctttacgtgctgccgggaaatacgccgtcccagctcgacggcggcacagaccgtgacggccttatccgtcccgatgccgggaatctgacagaggtcgccgatgc

SEQ ID NO: 26589 - DNA, 260 bp, Unknown
  Description of Unknown: RightRegion for integrase B590 sequence
cggattatcaaaattattttcaaaaacggtgtttccatcacattgcaatacgaaaaataaaaaatacccaatcatcatacgtgcgatgattgggtattgcctgtttataagggtgctactttttgatacactatgcgttccccatgctcgtcagctcgtatcttctggtccgtatggaaggcagaattgaaaagctgagtgccaatatcgacaccttaacccgtgttctgcaggaaagacttgtgatgcaatttccatat

SEQ ID NO: 26590 - DNA, 109 bp, Unknown
  Description of Unknown: RightRegion for integrase B591 sequence
cggattatcaaaatcattttcaagaatggtgtttccatcacattgcaatatgaaaaataaaaaaatacccaatcatcatatatgcgatgattgggtattgcctgtttat

SEQ ID NO: 26591 - DNA, 109 bp, Unknown
  Description of Unknown: RightRegion for integrase B592 sequence
cggattatcaaaattattttcaaaaacggtgtttccatcacattgcaatacgaaaaataaaaaaatacccaatcatcatacgtgagatgattgggtattgcctgtttat

SEQ ID NO: 26592 - DNA, 260 bp, Unknown
  Description of Unknown: RightRegion for integrase B593 sequence
cgtgtcatgtcgatacgcttcagaaacggtattgagcacaattttttgtacaaaacatgacaagataaaaaaagccggaagcccttgatacattagggtttccggcttaaatttttaatcgactacatcctgcttagaataagcatcgcatcgccaaaactgaaaaatctatatttttcccgaaaaacaattttatacgtattaatagtgttttcatatccgcagaaggcggagacgagcattataagcgtgctctcggg

SEQ ID NO: 26593 - DNA, 260 bp, Unknown
  Description of Unknown: RightRegion for integrase B594 sequence
ggactacttgtccgggtgaagaatggcctccagcccttcctcgatggcatcgtcatatagacgttcgtcctcgcggaaaatgtgctggtatgtggtcttgagcatgttgggcgtggcatgccccatacgcttggtgctgtacttgtccggtatcttcgcttccagcatgacggaggcgttcacatggcgcaggtcatggaaccgataatgcggaacacccgccttttcacagatacgggaaaagccgcaatatatcgcgt

SEQ ID NO: 26594 - DNA, 109 bp, Unknown
  Description of Unknown: RightRegion for integrase B595 sequence
cggattatcaaaattattttcaaaaacggtgtttccatcacattgcaatatgaaaaataaaaaaatacccaatcatcatacgtgcgatgattgggtattgcctgtttat

SEQ ID NO: 26595 - DNA, 260 bp, Unknown
  Description of Unknown: RightRegion for integrase B596 sequence
cctgacggcgctcgtttgctgggtttgtgcggggtacgcggaagaaacgcgggtcggtgatacggtcatgttcgggcaatatgaacaggatggaaatctggacaacggcagtgagcccattgcgtggcaggtgctggatgtgcagggcggcaaagcgctgctgatgagccgctatgcgctggactgcctgccgttccatgacgaaaaaaccgatgccgcgtggaatcaaagcgcgctgaatgcgtggcttcaggcggact

SEQ ID NO: 26596 - DNA, 109 bp, Unknown; identical to SEQ ID NO: 26591
  Description of Unknown: RightRegion for integrase B597 sequence

SEQ ID NO: 26597 - DNA, 260 bp, Unknown
  Description of Unknown: RightRegion for integrase B598 sequence
cgtgtgaccgaaattatattcgcgaatggtctttcccataaatttatataccgtgattaaaaatgcaacggaacgggcgacattatggaatacgaaaaataaaaatatcccaactttaggaattttcctattgttgggatattttaaaatcctttatttatgggcttttttacatcacggaaaccgcgttcatctgacatccgaatgttgtcacacaaaacgtcaatggtctttgcagttcatctgatatctgtttcaca

SEQ ID NO: 26598 - DNA, 260 bp, Unknown
  Description of Unknown: RightRegion for integrase B599 sequence
ccgcttctctggtctgaccagcgcaagctctatggctttgaagaaaggaaacaacaatgaacaataccaatcaatctgcccgctgccgttttgatgccgattttgctgtcagtgccagaattcggcaaatgcgtaatctgcttggacgctcgcaaatggatgttgccgcagccctcggactcacgtttcagcagctccaaaagtatgagaaagcgcaaaaccgaatatcagccggacggctccaccagcttgccgttgaa

SEQ ID NO: 26599 - DNA, 260 bp, Unknown
  Description of Unknown: RightRegion for integrase B600 sequence
cgtgtgtcctccatcgtgttccggaacggtctgacccataaattcaaatacaaatcgtgaccgacataaattccggtagcaaaaaccggcaggaacatttcgctcttgccggtttctttatcgctatacggttatgccattatcccacagttcctcacttgccagatccagtgtatcatcccacactaccccgtagccgcaacagcttacttccgctctgcagaacagttctggattgtctctcattttctcaaactccg

SEQ ID NO: 26600 - DNA, 260 bp, Unknown
  Description of Unknown: RightRegion for integrase B601 sequence
tgcgtgacggaaatcgtgttcgcgaatggtctttcccataaatttatataccgcgattaaaaatgcaacggaacgggcgttataaggtcccgcgctttcagtgtggattttgtgaagtggtacagaaacaagcggtttaattctcccacgacgcccggttcacattaaacccggccggaacttgtcaaacaacattacaacgccccgttgcaacccgtcagcatttacaagggcttcggaccttcacaatctcccgcggg

SEQ ID NO: 26601 - DNA, 260 bp, Unknown
  Description of Unknown: RightRegion for integrase B602 sequence
cgcgtgacggaaatcgtgttcgcgaatggtctttcccataaatttatataccgcgattaaaaatgcaacggaacgggcgttataaggtcccgcgctttcagtgtggattttgtgaagtggtacagaaacaagcggtttaattctcccacgacgcccggttcacattaaacccggccggaacttgtcaaacaacattacaacgccccgttgcaacccgtcagcatttacaagggcttcggaccttcacaatctcccgcggg

SEQ ID NO: 26602 - DNA, 109 bp, Unknown
  Description of Unknown: RightRegion for integrase B603 sequence
attactgctattacattcaaaaatgggctaactcatagattcatatacaaagacaagtaattggttctaaatgccaaaagccgggaaatcgctcccggctttctatgtt

SEQ ID NO: 26603 - DNA, 102 bp, Unknown
  Description of Unknown: RightRegion for integrase B604 sequence
cgtataacggaaatcgttttcgcgaatggtctttcgcataaatttgtatatcgtgattaaaaatgcaacggaacgggcgttataaggtcccgcactttcagt

SEQ ID NO: 26604 - DNA, 109 bp, Unknown
  Description of Unknown: RightRegion for integrase B605 sequence
attactgctattacattcaaaaatgggctaactcatagattcatatataaagacaagtaattggttctaaatgccaaaagccgggaaatcgctcccggctttctatgtt

SEQ ID NO: 26605 - DNA, 109 bp, Unknown; identical to SEQ ID NO: 26604
  Description of Unknown: RightRegion for integrase B606 sequence

SEQ ID NO: 26606 - DNA, 109 bp, Unknown
  Description of Unknown: RightRegion for integrase B607 sequence
attactgctattacattcaagaatgggctaactcatagattcatatataaagacaagtaattggttctaaatgccaaaagccgggaaatcactcccggctttctatgtt

SEQ ID NO: 26607 - DNA, 260 bp, Unknown
  Description of Unknown: RightRegion for integrase B608 sequence
cgtgtgtcctccatcgtgttccgcaacggtctgacccacaaattcaaatacaaatcgtgaccggcgtaaattccggcagtaaaaaaccggcaggaacatttcgctcttgccggtttctttatcgctatacggttatgccattatcccacagttcctcacttgccagatccagcgtatcatcccagactacgccgtagccgcaacagcctacttccgctctgcagaacagttctggattgtctctcattttctcaaactcc

SEQ ID NO: 26608 - DNA, 109 bp, Unknown; identical to SEQ ID NO: 26604
  Description of Unknown: RightRegion for integrase B609 sequence

SEQ ID NO: 26609 - DNA, 260 bp, Unknown
  Description of Unknown: RightRegion for integrase B610 sequence
cgcgtgacggaaatcgtgttcgcgaatggtctttcccataaatttatataccgtgattaaagatgcaacgaaacgggcgttataaggtcccgcgctttcagtgtggattttgtgaagtggtacagaaacaaacggtttaattctcccacgacgcccggttcacattaaacccggccggaacttgtcaaacaacattacaacgccccgttgcaacccgtcagcatttacaagggcttcggaccttcacaatctcccgcggg

SEQ ID NO: 26610 - DNA, 109 bp, Unknown; identical to SEQ ID NO: 26604
  Description of Unknown: RightRegion for integrase B611 sequence

SEQ ID NO: 26611 - DNA, 260 bp, Unknown
  Description of Unknown: RightRegion for integrase B612 sequence
cgtgtgtcctccatcgtgttccggaacggtctgacccacaaattcaaatacaaatcatgaccggcgtaaattccggcatcaaaaaaccggcaggaacatttcgctcttgccggtttctttatcgctatacggttatgccattatcccacagttcctcacttgccagatccagcgtatcatcccagactacgccgtagccgcaacagcttacttccgctctgcagaacagctctggattgtctctcattttctcaaactcc

SEQ ID NO: 26612 - DNA, 260 bp, Unknown; identical to SEQ ID NO: 26607
  Description of Unknown: RightRegion for integrase B613 sequence

SEQ ID NO: 26613 - DNA, 109 bp, Unknown; identical to SEQ ID NO: 26604
  Description of Unknown: RightRegion for integrase B614 sequence

SEQ ID NO: 26614 - DNA, 260 bp, Unknown
  Description of Unknown: RightRegion for integrase B615 sequence
cgtgtgtcctccatcgtgttccggaacggtctgacccacaaattcaaatacaaatcgtgaccggcgtaaattccggcagcaaaaaaccggcaggaacatttcgctcttgccggtttctttatcgctatacggttatgccattatcccacagttcctcacttgccagatccagcgtatcatcccagactacgccgtagccgcaacagcttacttccgctctgcagaacagttctggattgtctctcattttctcaaactcc

SEQ ID NO: 26615 - DNA, 260 bp, Unknown
  Description of Unknown: RightRegion for integrase B616 sequence
ggacgagggagtcatgaaattcccatccagatcaatatatgtttcttttcactgaattagaaaattcaaaatggaagaatagcctcgcgtcaagaacatatgctataatagaggagatagaatacgtctcgagagatcatgaaagcatggtctcttatttttatatctaaaaaaggaggaatgctcatgagtattacaccggagcagcttatcgaaaagtttcaatatgctctcgacaataattggggatacattcttgg

SEQ ID NO: 26616 - DNA, 260 bp, Unknown
  Description of Unknown: RightRegion for integrase B617 sequence
attactgctattacattcaaaaatgggctaactcatagattcatatataaagacaagtaattggttctaaatgccaaaagccgggaaatcgctcccggctttctatgttttatggtatctaacaaatgttagaaaacggtgtcatatcagaatcatggcatctccaaaagagaaaaatctgtacttttcctgcactgcagtctcataggcatgcatgatattctccttgcctgccagcgcagacaccaacatcacaagtg

SEQ ID NO: 26617 - DNA, 260 bp, Unknown
  Description of Unknown: RightRegion for integrase B618 sequence
tgcgtgacggaaatcgtgttcgcgaatggtctttcccataaatttatataccgcgattaaaaatgcaacggaacgggcgttataaggtcccgcgctttcagtgtggattttgtgaagtggtacagaaacaagcggtttaattctcccacgacgcccggttcgcattaaacccggccggaacttgtcaaacaacattacaacgccccgttgcaacccgtcagcatttacaagggcttcggaccttcacaatctcccgcggg

SEQ ID NO: 26618 - DNA, 260 bp, Unknown; identical to SEQ ID NO: 26611
  Description of Unknown: RightRegion for integrase B619 sequence

SEQ ID NO: 26619 - DNA, 260 bp, Unknown; identical to SEQ ID NO: 26600
  Description of Unknown: RightRegion for integrase B620 sequence

SEQ ID NO: 26620 - DNA, 260 bp, Unknown
  Description of Unknown: RightRegion for integrase B621 sequence
cgtgtgtcctccatcgtgttccggaacggtctgacccataaattcaaatacaaatcatgaccggcgtaaattccggcagcaaaaaaccggcgggaacatttcgctcttgccggtttctttattgctatacggttatgccattatcccacagttcctcacttgccagatccagcgtatcatcccagactacgccgtagccacaacagcttacttccgctctgcagaacagttctggattgtctctcattttctcaaactcc

SEQ ID NO: 26621 - DNA, 260 bp, Unknown
  Description of Unknown: RightRegion for integrase B622 sequence
cgcgtgacggaaatcgtgttcgcgaatggtctttcacataaatttatataccgtgattaaagatgcaacgaaacgggcgttataaggtcccgcgctttcagtgtggattttgtgaagtggtacagaaacaaacggtttaattctcccacgacgcccggttcacattaaacccggccggaacttgtcaaataacattacaacgccccgttgcaacccgtcagcatttataagggcttcggaccttcacaatctcccgcggg

SEQ ID NO: 26622 - DNA, 260 bp, Unknown; identical to SEQ ID NO: 26607
  Description of Unknown: RightRegion for integrase B623 sequence

SEQ ID NO: 26623 - DNA, 253 bp, Unknown
  Description of Unknown: RightRegion for integrase B624 sequence
attactgctattacattcaaaaatgggctaactcatagattcatatataaagacaagtaattggttctaaatgccaaaagccgggaaatcgctcccggcttttatgttttatggtatctaacaaatgttagaaaacggtgtcatatcagaatcatggcatctccaaaagagaaaaatctgtacttttcctgcactgcagtctcatagctgtctcttatacacatctccgagcccacgagaccgtactagatct

SEQ ID NO: 26624 - DNA, 260 bp, Unknown
  Description of Unknown: RightRegion for integrase B625 sequence
attactgctattacattcaaaaatgggctaactcatagattcatatataaagacaagtaattggttctaaatgccaaaagccgggaaatcgctcccggctttctatgttttatggtatctaacaaatgttagaaaacggtgtcatatcagaatcattgcatctccaaaagagaaaaatctatatctttcctgtactgccgtctcataggcacgcatgatattctccttgcctgccagtgcagataccagcatcagaagtg

SEQ ID NO: 26625 - DNA, 260 bp, Unknown
  Description of Unknown: RightRegion for integrase B626 sequence
aacaggattatcaaaattattttcaaaaacggtgttccgattacatttcaatatgcataatataaaaagatacccagtcataaaacgctttatgactgggtatcgcctgtttatatgtgtgctacttcttgatacactatgcattccccatgctcgtcagctcgtatcttctggtccgtatggaaggcagaatcgaaaagctgagtgccaatatcgacaccttaacccgtgtgctgcaggaaagacttgtgatgcaattt

SEQ ID NO: 26626 - DNA, 260 bp, Unknown
  Description of Unknown: RightRegion for integrase B627 sequence
gcgagtgcaaaagcggaaaactgcttatggcagataatgatgcacatatcgcagaggtagttgccggggaaaacaaagtatatgttgataccgggattttcccaacagcagaacgaaggcatatggcagacagggtacaaggaaacgaggcagagagggaaggtaaaaataattttgatgaccataccatatcggcaattataaaaagtgccgatatggtataatagaaaaacaaaagttattacagggaggagaatgga

SEQ ID NO: 26627 - DNA, 260 bp, Unknown; identical to SEQ ID NO: 26614
  Description of Unknown: RightRegion for integrase B628 sequence

SEQ ID NO: 26628 - DNA, 260 bp, Unknown
  Description of Unknown: RightRegion for integrase B629 sequence
cgtgtgtcctccatcgtgttccggaacggtctgacccacaaattcaaatacaaatcgtgaccggcgtaaattccggcagcaaaaaaaccggcaggaacatttcgctcttgccggtttctttatcgctatacggttatgccattatcccacagttcctcacttgccagatccagcgtatcatcccagactacgccgtagccgcaacagcttacttccgctctgcagaacagttctggattgtctctcattttctcaaactc

SEQ ID NO: 26629 - DNA, 260 bp, Unknown
  Description of Unknown: RightRegion for integrase B630 sequence
cgtgtgtcctccatcgtgttccggaacggtctgacccacaaattcaaatacaaatcgtgaccggcgtaaattccggcagcaaaaaaccggcaggaacatttcgatcttgccggtttctttatcgctatacggttatgccattatcccacagttcctcacttgccagatccagtgtatcatcccacactaccccgtaaccgcaacagcttacttccgctctgcagaacagttctggattgtttctcattttctcaaactcc

SEQ ID NO: 26630 - DNA, 260 bp, Unknown
  Description of Unknown: RightRegion for integrase B631 sequence
attactgctattacattcaaaaatgggctaactcatagattcatatacaaagacaagtaattggttctaaatgccaaaagccgggaaatcgctcccggctttctatgttttatggtatctaacaaatgttagaaaacggtgtcatatcagaatcatggcatctccaaaagagaaaaatctgtacttttcctgcactgcagtctcataggcatgcatgatattctccttgcctgccagcgcagacaccaacatcacaagtg

SEQ ID NO: 26631 - DNA, 260 bp, Unknown; identical to SEQ ID NO: 26611
  Description of Unknown: RightRegion for integrase B632 sequence

SEQ ID NO: 26632 - DNA, 260 bp, Unknown
  Description of Unknown: RightRegion for integrase B633 sequence
cgcgtgacggaaatcgtgttcgcgaatggtctttcacataaatttatataccgtgattaaagatgcaacgaaacgggcgttataaggtcccgcgctttcagtgtggattttgtgaagtggtacagaaacaaacggtttaattctcccacgacgcccggttcacattaaacccggccggaacttgtcaaacaacattacaacgccccgttgcaacccgtcagcatttacaagggcttcggaccttcacaatctcccgtggg

SEQ ID NO: 26633 - DNA, 260 bp, Unknown
  Description of Unknown: RightRegion for integrase B634 sequence
tgcgtgacggaaatcgtgttcgcgaatggtctttcccataaatttatataccgcgattaaaaatgcaacggaacgggcgttataaggtcccgcgctttcagtgtggattttgtgaagtggtacagaaacaagcggtttaattctcccacgacgcccggttcgcattaaacccggccggaacttgtcaaacagcattacaacgccccgttgcaacccgtcagcatttacaagggcttcggaccttcacaatctcccgcggg

SEQ ID NO: 26634 - DNA, 260 bp, Unknown
  Description of Unknown: RightRegion for integrase B635 sequence
ggacgagggagtcatgaaattcccatccagatcaatatatgtttcttttcactgaattagaaaattcaaaatggaagaaatagcctcgcgtcaagaacatatgctataatagaggagatagaatacgtctcgagagatcatgaaagcatggtctcttatttttatatctaaaaaaggaggaatgctcatgagtattacaccggagcagcttatcgaaaagtttcaatatgctctcgacaataattggggatacattcttg

SEQ ID NO: 26635 - DNA, 260 bp, Unknown
  Description of Unknown: RightRegion for integrase B636 sequence
attactgctattacattcaaaaatgggctaactcatagattcatatataaagacaagtaattggttctaaatgccaaaagccgggaaatcgctcccggctttctatgttttatggtatctaacaaatgttagaaaacggtgtcatatcaaaatcatggcatctccaaaagagaaaaatctgtacttttcctgcactgcagtctcataggcatgcatgatgttctccttgcctgccagcgcagacaccaacatcacaagtg

SEQ ID NO: 26636 - DNA, 260 bp, Unknown; identical to SEQ ID NO: 26597
  Description of Unknown: RightRegion for integrase B637 sequence

SEQ ID NO: 26637 - DNA, 260 bp, Unknown
  Description of Unknown: RightRegion for integrase B638 sequence
ggacgagggagtcatgaaattcccatccagatcaatatatgtttcttttcactgaattagaaaattcaaaatggaagaatcgcctcgcgtcaagaacatatgctataatagaggagatagaatacgtctcgagagatcatgaaagcatggtctcttatttttatatctaaaaaggaggaatgctcatgagtattacaccggagaagcttatcgaaaagtttcaatatgctctcgacaataattggggatacattcttgga

SEQ ID NO: 26638 - DNA, 260 bp, Unknown
  Description of Unknown: RightRegion for integrase B639 sequence
cgcgtgactgaaattgtattcgcgaatggtctttcccataaatttatataccgtgattaaagatgcagcggaacgggcgttataaggtcccgcgctttggcgtttgaaatcgacgacgcgtgaaagatcattcttgataaatctgatatccgaaattaaaaataagcgcatcaaacactttttttgtatttgatgcgcttattttttatagcagttctgcgtatgatatttctattgtgatgttgaattgattttccagt

SEQ ID NO: 26639 - DNA, 260 bp, Unknown
  Description of Unknown: RightRegion for integrase B640 sequence
cgcgtaacggaaatcgtgttcgcgaatggtctttcacataaatttatataccgtgattaaagatgcaacggaacgggcgacattatggaatatgaaaaatagaaaaatcccaactttaggaaatttcctattgttgggattttttagaagcctttatttacgggcttttttacatcacggaaaccgcgttcatctgacacccgaaggtctttaaaaacaaggttagtggtcttcccagttcttcggactttttcttgaca

SEQ ID NO: 26640 - DNA, 260 bp, Unknown
  Description of Unknown: RightRegion for integrase B641 sequence
cgcgtgacggaaattgtgttcgcgaatggtctttcacataaatttatataccgtgattaaagatgcaacgaaacgggcgttataaggtcccgcgctttcagtgtggattttgtgaagtggtacagaaacaaacggtttaattctcccacgacgcccggttcacattaaacccggccggaacttgtcaaacagcattacaacgccccgttgcaacccgtcagcatttacaagggcttcggaccttcacaatctcccgcggg

SEQ ID NO: 26641 - DNA, 109 bp, Unknown
  Description of Unknown: RightRegion for integrase B642 sequence
cgtgtgtcctccatcgtgttccggaacggtctgacccacaaattcaaatacaaatcgtgaccgacataaattccggtagcaaaaaccggcaggaacatttcgctcttgc

SEQ ID NO: 26642 - DNA, 260 bp, Unknown
  Description of Unknown: RightRegion for integrase B643 sequence
cgtgtgtcctccatcgtgttccggaacggtctgacccataaattcaaatacaaatcatgaccggcgtaaattccggcagcaaaaaaccggcaggaacatttcgctcttgccggtttctttatcgctatacggttatgccattatcccacagttcctcacttgccagatccagcgtatcatcccagactacgccgtagccgcaacagcttacttccgctctgcagaacagttctggattgtctctcattttctcaaactcc

SEQ ID NO: 26643 - DNA, 260 bp, Unknown
  Description of Unknown: RightRegion for integrase B644 sequence
cgcgtgacggaaatcgtgttcgcgaatggtctttcgcataaatttatataccgtgattaaagatgcaacgaaacgggcgttataaggtcccgcgctttcagtgtggattttgtgaagtggtacagaaacaaacggtttaattctcccacgacgcccggttcacattaaacccggccggaacttgtcaaacaacattacaacgccccgttgcaacccgtcagcatttacaagggcttcggaccttcacaatctcccgcggg

SEQ ID NO: 26644 - DNA, 260 bp, Unknown
  Description of Unknown: RightRegion for integrase B645 sequence
cgtgtgtcctccatcgtgttccggaacggtctgacccacaaattcaaatacaaatcgtgaccgacataaattccggtagcaaaaaccggcaggaacatttcgctcttgccggtttctttatcgctatacggttatgccattatcccacagttcctcacttgccagatccagtgtatcatcccacactaccccgtagccgcaacagcttacttccgctctgcagaacagttctggattgtctctcattttctcaaaccccg

SEQ ID NO: 26645 - DNA, 260 bp, Unknown
  Description of Unknown: RightRegion for integrase B646 sequence
cgtgtgtcctccatcgtgttccggaacggtctgacccacaaattcaaatacaaatcgtgaccggcgtaaattccggtagcaaaaaccggcaggaacatttcgctcttgccggtttctttatcgctatacggttatgccattatcccacagttcctcacttgccagatccagtgtatcatcccacactaccccgtagccgcaacagcttacttccgctctgcagaacagttctggattgtctctcattttctcaaactccg

SEQ ID NO: 26646 - DNA, 260 bp, Unknown
  Description of Unknown: RightRegion for integrase B647 sequence
cgcgtaacggaaatcgtgttcgcgaatggtctttcccataaatttatataccgcgattaaaaatgcaacggaacgggcgttataaggtcccgcactttcagtgtggattttgtgaagtggtacagaaacaagcggtttaattctcccacgacgcccggttcacattaaacccggccggaacttgtcaaacaacattacaacgccccgttgcaacccgtcagcatttacaagggcttcggaccttcacaatctcccgcggg

SEQ ID NO: 26647 - DNA, 260 bp, Unknown
  Description of Unknown: RightRegion for integrase B648 sequence
attactgctattacattcaaaaatgggctaactcatagattcatatataaagacaagtaattggttctaaatgccaaaagccgggaaatcgctcccggctttctatgttttatggtatctaacaaatgttagaaaacggtgtcatatcagaatcatggcatcccgcatgttaatggcaggtaaccagaatctaacatttgttaaatatatataaggaagcatttaatcttccttatattctataacatcctctatcttgc

SEQ ID NO: 26648 - DNA, 109 bp, Unknown; identical to SEQ ID NO: 26604
  Description of Unknown: RightRegion for integrase B649 sequence

SEQ ID NO: 26649 - DNA, 260 bp, Unknown
  Description of Unknown: RightRegion for integrase B650 sequence
agggcacatattgacgtcgcaaaagactattttgttgttgtgaccctatttggcaaataatggatatatgcttgctattttatagggttacccctataatagtaagcgtcaaccggataacccgagagggggtgaaagaaatgcaagattttttacgggatttggccgtcacaatccttggagtcatagctgcaaaggcgcttgatgaggggattgaggccataaaaagaaagacctctccacagcccggaaagcacgcg

SEQ ID NO: 26650 - DNA, 109 bp, Unknown
  Description of Unknown: RightRegion for integrase B651 sequence
cgtgtggagtatattgagtttcagagtgggttgaggcatacgtttatatataaggactgagatataaaacagcaccagccggagaattgcttccccggctggtgcttta

SEQ ID NO: 26651 - DNA, 109 bp, Unknown
  Description of Unknown: RightRegion for integrase B652 sequence
acctccgttctcttcaaaaatgggctcgaaatacgattctcttacaaacaggccgaataaagaaaaagcccagaaaccgcacagtttctgggcttttaagctacttcgt

SEQ ID NO: 26652 - DNA, 260 bp, Unknown
  Description of Unknown: RightRegion for integrase B653 sequence
cgtgtgtcctccatcgtgttccggaacggtctgacccacaaattcaaatacaaatcgtgaccggcgtaaattccggtagcaaaaaccggcaggaacatttcgctcttgccggtttctttatcgctatacggttatgccattatcccacagttcctcacttgccagatccagtgtatcatcccacactaccccgtagccgcaacagcttacttccgctctgcagaacagttctggattgtctctcattctctcaaactccg

SEQ ID NO: 26653 - DNA, 260 bp, Unknown
  Description of Unknown: RightRegion for integrase B654 sequence
cgcgtgacggaaatcgtgttcgcgaatggtctttcccataaatttatataccgtgattaaagatgcaacgaaacgggcgttataaggtcccgcgctttcagtgtggattttgtgaagtggtacagaaacaaacggtttaattctcccacgacgcccggttcacattaaacccggccggaacttgtcgaacaacattacaacgccccgttgcaacccgtcagcatttacaagggcttcggaccttcacaatctcccgcggg

SEQ ID NO: 26654 - DNA, 260 bp, Unknown
  Description of Unknown: RightRegion for integrase B655 sequence
attactgctattacattcaaaaatgggctaactcatagattcatatataaagacaagtaattggttctaaatgccaaaagccgggaaatcgctcccggctttctatgttttatggtatctaacaaatgttagaaaacggtgtcatatcagaatcatggcatctccaaaagagaaaaatctatatctttcctgtactgccgtctcataggcacgcatgatattctccttgcctgccagtgcagataccagcatcagaagtg

SEQ ID NO: 26655 - DNA, 260 bp, Unknown
  Description of Unknown: RightRegion for integrase B656 sequence
cgcgtgacggaaatcgtgttcgcgaatggtctttcccataaatttatataccgcgattaaaaatgcaacggaacgggcgttataaggtcccgcgctttcagtgtggattttgtgaagtggtacagaaacaagcggtttaattctcccacggcgcccggttcacattaaacccggccggaacttgtcaaacagcattacaacgccccgttgcaacccgtcagcatttacaagggcttcggaccttcacaatctcccgcggg

SEQ ID NO: 26656 - DNA, 260 bp, Unknown; identical to SEQ ID NO: 26629
  Description of Unknown: RightRegion for integrase B657 sequence

SEQ ID NO: 26657 - DNA, 260 bp, Unknown
  Description of Unknown: RightRegion for integrase B658 sequence
cgcgtgacggaaatcgtgttctcgaatggtctttctcataaatttatataccgcgattaaaaatgcaacggaacgggcgttataaggttccgcgctttcagtgtggattttgtgaagtggtacagaaacaagcggtttaattctcccacaacgcccggttcacattaaacccggccggaacttgtcaaacaacattacaacgccccgttgcaacccgtcagcatttacaagggcttcggaccttcacaatctcccgcggg

SEQ ID NO: 26658 - DNA, 260 bp, Unknown
  Description of Unknown: RightRegion for integrase B659 sequence
cgcgtgacggaaatcgtgttcgcgaatggtctttcccataaatttatataccgcgattaaaaatgcaacggaacgggcgttataaggtcccgcgctttcagtgtgtattttgtgaagtggtacagaaacaagcggtttaattctcccacgacgccctgttcacattaaacccggccggaacttgtcaaacaacattacaacgccccgttgcaacccgtcagcatttacaagggcttcggaccttcacaatctcccgcggg

SEQ ID NO: 26659 - DNA, 260 bp, Unknown
  Description of Unknown: RightRegion for integrase B660 sequence
cgtataatagaagtcgtgtttgcgaacggactttctcacaaattcatataccgtgaatgatgcatacaaaagcaaaaaaatcccaactttaggaaagttcctattgttgggattttttaagaatcctttatttacgggctttttcacatcggggaaatcgcattcatctgacaaccaaaggttgtgacactcgagattaatggtcggccgagttcttccgacattttctttacaagtgcacgtgccttctttatgaaata

SEQ ID NO: 26660 - DNA, 260 bp, Unknown; identical to SEQ ID NO: 26655
  Description of Unknown: RightRegion for integrase B661 sequence

SEQ ID NO: 26661 - DNA, 260 bp, Unknown
  Description of Unknown: RightRegion for integrase B662 sequence
cgcgtgacggaaattgtgttcgcgaatggtctttcccataaatttatataccgtgattaaaaatgcaacggaacgggcgttataagatcccgcgctttcagtgtggattttgtgaagtggtacagaaacaagcggtttaattctcccacgacgcccggttcacattaaacccggccggaacttgtcaaacaacattacaacgccccgttgcaacccgtcagcatttacaagggcttcggaccttcacaatctcccgcggg

SEQ ID NO: 26662 - DNA, 260 bp, Unknown
  Description of Unknown: RightRegion for integrase B663 sequence
cacaccgcccggcgggctttttcacgcaagccgaaaccaagctgcgtattttccgtctgaatgtgcaagacgctgtacctgggagcggcggcaagaattaagactaattcaggtatcattggctgtttttttctgcacaaccctgctataatgtttccacacaacaatgcgtctttaggagaacagagcaaatggcaagcacagaaccatcaatgaccgaacagcatacatgcagcgcggcggctctgccggagagagcc

SEQ ID NO: 26663 - DNA, 260 bp, Unknown; identical to SEQ ID NO: 26600
  Description of Unknown: RightRegion for integrase B664 sequence

SEQ ID NO: 26664 - DNA, 260 bp, Unknown
  Description of Unknown: RightRegion for integrase B665 sequence
cgcgtgacggaaatcgtgttcgcgaatggtctttcacataaatttatataccgtgattaaaaatgcaacgaaacgggcgttataaggtcccgcgctttcagtgtggattttgtgaagtggtacagaaacaaacggtttaattctcccacgacgcccggttcacattaaacccggccggaacttgtcaaacaacattacaacgccccgttgcaacccgtcagcatttacaagggcttcggaccttcacaatctcccgcggg

SEQ ID NO: 26665 - DNA, 260 bp, Unknown
  Description of Unknown: RightRegion for integrase B666 sequence
cgtgtgtcctccatcgtgttccggaacggtctgacccacaaattcaaatacaaatcgtgaccgacataaattccggtagcaaaaaccggcaggaacatttcgctcttgccggtttctttatcgctatacggttatgccattatcccacagttcctcacttgccagatccagtgtatcatcccacactaccccgtagccgcaacagcttacttccgctctgcagaacagttctggattgtctctcattttctcaaactccg

SEQ ID NO: 26666 - DNA, 109 bp, Unknown; identical to SEQ ID NO: 26604
  Description of Unknown: RightRegion for integrase B667 sequence

SEQ ID NO: 26667 - DNA, 260 bp, Unknown
  Description of Unknown: RightRegion for integrase B668 sequence
cacaccgcccggtgggctttttcgcgcaaggcgaaaccatgctgcgtattttccgtctgaatgtgcaggactctgtacctgggagcggtggcaagaattaagactaattcaagtatcattggctatttttttcggcataaccctgctataatgtttccacacaacaatgcgtctttaggagaacagagcaaatggcaagcacagaaccatcaatgaccgaacagcatgcatgcagcgcagcggctctgccggagggagcc

SEQ ID NO: 26668 - DNA, 212 bp, Unknown
  Description of Unknown: RightRegion for integrase B669 sequence
attactgctattacattcaaaaatgggctaactcatagattcatatataaagacaagtaattggttctaaatgccaaaagccgggaaatcgctcccggctttctgtgttttatggtatctaacaaatgttagaaaacggtgtcatatcagaatcatggcatctccaaaagagaaaaatctgtacttttcctgcactgcagtctcataggcat

SEQ ID NO: 26669 - DNA, 260 bp, Unknown
  Description of Unknown: RightRegion for integrase B670 sequence
cgcgtgacggaaatcgtgttcgcgaatggtctttcacataaatttatataccgtggttaaagatgcaacgaaacgggcgttataaggtcccgcgctttcagtgtggattttgtgaagtggtacagaaacaaacggtttaattctcccacgacgcccggttcacattaaacccggccggaacttgtcaaacaacattacaacgccccgttgcaacccgtcagcatttacaagggcttcggaccttcacaatctcccgcggg

SEQ ID NO: 26670 - DNA, 233 bp, Unknown
  Description of Unknown: RightRegion for integrase B671 sequence
attactgctattacattcaaaaatgggctaactcatagattcatatataaagacaagtaattggttctaaatgccaaaagccgggaaatcgctcccggctttctatgttttatggtatctaacaaatgttagaaaacggtgtcatatcagaatcatggcatctccaaaagagaaaaatctgtacttttcctgcactgcagtctcataggcatgcatgatattctccttgcctg

SEQ ID NO: 26671 - DNA, 260 bp, Unknown
  Description of Unknown: RightRegion for integrase B672 sequence
cgcgtggtggaaatcatgttcgcgaatggtctttcacataaatttatataccgtgattaaagatgcaacgaaacgggcgttataaggtcccgcgctttcagtgtggattttgtgaagtggtacagaaacaaacggtttaattctcccacgacgcccggttcacattaaacccggccggaacttgtcaaacaacattacaacgccccgttgcaacccgtcagcatttacaagggcttcggaccttcacaatctcccgcggg

SEQ ID NO: 26672 - DNA, 260 bp, Unknown
  Description of Unknown: RightRegion for integrase B673 sequence
tgttcgatgcccgactgttttgcaggcagacgtatcactccccctcaatgtaaggagtgagatcgaagttgaacgagatgttgatctgatacccacgataaacatctaccctgcggataagctgattgacaatcattttctttgcttcaaaactggcactgtcgtacaggtcagcataggaaatcagctcatcatacaagtgcctgtcgttatgcgatttttttcatcgttcagcatttcttcaaactgtgccatatatg

SEQ ID NO: 26673 - DNA, 260 bp, Unknown
  Description of Unknown: RightRegion for integrase B674 sequence
cgtgtgtcctccatcgtgttccggaacggtctgacccacaaattcaaatacaaatcgtgaccggcgtaaattccggcagcaaaaaaccggcaggaacatttcgctcttgccggtttctttatcgctatacggttatgccattatcccacagttcctcgcttgccagatccagcgtatcatcccagactacgccgtagccacaacagcttacttccgctctgcagaacagttctggattgtctctcattttctcaaactcc

SEQ ID NO: 26674 - DNA, 242 bp, Unknown
  Description of Unknown: RightRegion for integrase B675 sequence
attactgctattacattcaaaaatgggctaactcatagattcatatataaagacaagtaattggttctaaatgccaaaagccgggaaatcgctcccggctttctatgttttatggtatctaacaaatgttaggaaacggtgtcatatcagaatcatggcatctccaaaggagaagaaacgatatttctcctgcactgcagtctcataggcatgcatgatattctccttgcctgccagcgcag

SEQ ID NO: 26675 - DNA, 260 bp, Unknown
  Description of Unknown: RightRegion for integrase B676 sequence
ggcacaggcggagttgaggaaacatgggattggaaaaacggtatatacaaacttttctgaaaaacgagcaaggcaggtaacaaaagaagattacagatattatgattatctgctctgtgcagatgcaaacaacatcaaaaacaccatacgcatcacgggaccggatgtcgatggcaagataaaactgcttttggaccttgctacggatcccaaaagaaaaggaaaatccatttcagatccatggtattccggcaggtttg

SEQ ID NO: 26676 - DNA, 260 bp, Unknown
  Description of Unknown: RightRegion for integrase B677 sequence
cgcgtgacggaaatcgtgttcgcgaatggtctttcacataaatttatataccgtgattgaaaatgcaactatatgggcgttataaggtcccgcgctttcagtattgattttatgatgtggtacagaaacaagcggtttaattctcccacaacgcccggttcgcattaaacccggccgaaacttgtcaaacaacattacaacgccccgttgcaacccgtcagcatttataagggcttcggaccttcacaatcgcccgcggg

SEQ ID NO: 26677 - DNA, 260 bp, Unknown; identical to SEQ ID NO: 26655
  Description of Unknown: RightRegion for integrase B678 sequence

SEQ ID NO: 26678 - DNA, 260 bp, Unknown
  Description of Unknown: RightRegion for integrase B679 sequence
cgcgtgacggaaatcgtgttcgcgaatggtctttcccataaatttatataccgcgattaaaaatgcaacggaacgggcgttataagatcccgcgctttcagtgtggattttgtgaagtggtacagaaacaagcggtttaattctcccacgacgcccggttcacattaaacccggccggaacttgtcaaacaacattacaacgccccgttgcaacccgtcagcatttacaagggcttcggaccttcacaatctcccgcggg

SEQ ID NO: 26679 - DNA, 260 bp, Unknown; identical to SEQ ID NO: 26616
  Description of Unknown: RightRegion for integrase B680 sequence

SEQ ID NO: 26680 - DNA, 260 bp, Unknown
  Description of Unknown: RightRegion for integrase B681 sequence
ccgcttctctggtctgaccagcgcaagctctatggctttgaagaaaggaaacaacaatgaacaataccaatcaatctgcccgccgccgttttgatgccgattttgctgtcagtgccagaattcggcaaatgcgtaatctgcttggacgctcgcaaatggatgttgccgctgccctcggactcacgtttcagcaacttcaaaagtatgagaaagcgcaaaaccgaatatctgccggtcggctccaccagcttgccgttgaa

SEQ ID NO: 26681 - DNA, 109 bp, Unknown; identical to SEQ ID NO: 26606
  Description of Unknown: RightRegion for integrase B682 sequence

SEQ ID NO: 26682 - DNA, 260 bp, Unknown
  Description of Unknown: RightRegion for integrase B683 sequence
tttttttcgacaaattacgcatttggtgcttgcattcaaccattgcgtgaagtaaaataaaaaaagaataagcgtcattccgggcgggggcttatgctgtttttccattgcatggcctccgcccttacgttatattacattgctctatcccccaccttttatcggacggaggtttccgcatgaacaagcacctgtcacaggaagagaaaaatgcgctggcatcggaatttgcctatcatggtcaaaaatccggcatcatc

SEQ ID NO: 26683 - DNA, 238 bp, Unknown
  Description of Unknown: RightRegion for integrase B684 sequence
catgtaagctccattgtcttcaagaatggacttacgcacaaattcatctataaaaattgacaccgacataaatgtcaggcgcaaaaataaccaggaagcgtttatacctcctggttattctcatattcgctatattttcccttacccaacaaatgttagaaatagatgttaaatgataatcatcgcgtcgccgaaggagaaaaagcgatacttctggcgtactgcttcctcataagct

SEQ ID NO: 26684 - DNA, 260 bp, Unknown; identical to SEQ ID NO: 26682
  Description of Unknown: RightRegion for integrase B685 sequence

SEQ ID NO: 26685 - DNA, 260 bp, Unknown
  Description of Unknown: RightRegion for integrase B686 sequence
cgtataagttccattgtctttaaaaatggtcttacgcacaaattcatttataaaaattgacaccgacataaatgtcgggcacaaaaataaccaggaagtattcgtacctcctggttattcttatattttctgtgttttttctccatccaacaaatgttagaaatggatgttaaatgataagcatggcatccccaaaggagaaaaagcggtaacgttcttttactgcttcttcgtaagctgccatgatatattcttttcct

SEQ ID NO: 26686 - DNA, 260 bp, Unknown
  Description of Unknown: RightRegion for integrase B687 sequence
gtcaagtccattgtcttccgaaatggtcttgctgcaacatttgaatattccagtatataaaaacgcccgacaggtgtatgcctgccgggcgttttttgtggccgacataaatttcggtcagttacatttgtaagaatttggtctacaaaatgatcatcgcatccggcatgattctttttacaatcaaaaacttacttatataaggtaggttctcgatcaaaaaatatcggctcaatgccgatgcgcattaaaattccctg

SEQ ID NO: 26687 - DNA, 260 bp, Unknown
  Description of Unknown: RightRegion for integrase B688 sequence
gtcaagtccattgtcttccgaaatggtcttgctgcaacatttgaatattccagtatataaaaacacccggcaggcatacacctgtcgggtattttttgtggccgacatttatgacggtcagttacatttgtaagaatttggtctacaaaatgatcatcgcatccggcatgattctttttacaatcaaaaacttacttatataaggtaggttctcgatcaaaaaatatcggcttaatgccgatgcctattaaaaatccctg

SEQ ID NO: 26688 - DNA, 109 bp, Unknown
  Description of Unknown: RightRegion for integrase B689 sequence
ggttcttttgctgatggggaggggcacaccatcccttttccgggcagcctgcgtcggtgagctgcccggacagctctaattcaaaatgtacatcgttatatacacaagg

SEQ ID NO: 26689 - DNA, 260 bp, Unknown
  Description of Unknown: RightRegion for integrase B690 sequence
cgtataagttccattgtctttaaaaatggtcttacgcacaaattcatctataaaaattgacaccgacataaatgtcgggcacaaaaataaccaggaagtattcgtacctcctggttattcttatattttctgtgttttttctccatccaacaaatgttagaaatggatgttaaatgataagcatggcatcccggatatttatgaattgtaaccagaatccaacatttgttgggtatttatataggaagtaatttgatttt

SEQ ID NO: 26690 - DNA, 260 bp, Unknown
  Description of Unknown: RightRegion for integrase B691 sequence
ggtccttttgctgatgaggaggggcacaccatcccttttccgggcagcctgcgtcggtgagctgcccggacagctctaattcaaaatgtacatcgttatatacacaaggtatgtacggcgcaggctgccatcaaaaatccccgcaagtgattgcgtgagcgcttgaaaaagcacaaataaagcaaacgaaccgccccggtttccgcaatggaagccggggcggtttttgtgttgcaacgtacaggaaaagcagaaaatat

SEQ ID NO: 26691 - DNA, 260 bp, Unknown
  Description of Unknown: RightRegion for integrase B692 sequence
ataccgctgctctggtctgaccagcgtaagctctatggttttgaagaaaggaaacaataatgaacaataccaatcaatctgcccgccgccgttttgacgccgattttaccgtcggtgccagaattcgacaaatgcgtaatctgctcggacgctcacaaatggatgttgccgcagctctcggtctcacgtttcagcaacttcaaaagtatgagaaagcgcaaaaccgaatatcagccggacggctccaccagcttgccgtt

SEQ ID NO: 26692 - DNA, 260 bp, Unknown
  Description of Unknown: RightRegion for integrase B693 sequence
cttgtcatagaccgtaagccaataacaagatttggagggtatgattatgaagtacgatgaaagagcctgcaaattcaacatggacaccggatgtgtggaactgctgctccgggatgggtgcaagatctctatcgactgcaccggggtcgaggatgcgctggatattaccatggcgcagcagacagaactggactaccttatttacaacgacccacttggttatgcagatttgattctgaatggcaatccagaagaatact

SEQ ID NO: 26693 - DNA, 260 bp, Unknown
  Description of Unknown: RightRegion for integrase B694 sequence
ataccgctgctctggtctgaccagcgtaagctctatggttttgaagaaaggaaacaataatgaacaataccaatcaatctgcccgccgccgttttgatgccgattttaccgtcggtgccagaattcgacaaatgcgtaatctgctcggacgctcgcaaatggatgttgccagagctctcggactcacgtttcagcaacttcaaaagtatgagaaagcgcaaaaccgaatatcagccggacggcttcaccagcttgccgtt

SEQ ID NO: 26694 - DNA, 260 bp, Unknown
  Description of Unknown: RightRegion for integrase B695 sequence
cgtataagttccattgtctttaaaaatggtcttacgcacaaattcatctacaaaaattgacaccgacataaatgtcgggcacaaaaataaccaggaagtattcgtatctcctggttattcttacattttctgtgttttttctccatccaacaaatgttagaaattggtgttaaatgataagcatggcatcccggatatttatgaattgtaaccagaatccaacatttgtttggtatttatataggaaataatttgatttt

SEQ ID NO: 26695 - DNA, 260 bp, Unknown
  Description of Unknown: RightRegion for integrase B696 sequence
atgtggaatattatgaaaaagtatgggtatattaagaagatagatggagatagtaattaaacaaacaatccccagcccaccaattaaggcaagctggggtttataattaaaatttaggcagaaatcttagaccacctaccatttaccaaggcaaatctttgagccttatttgaagggatcataataaccttcttatagtagttaccgttatcggctgctgtagtagtcggacagtacttataatctatagtaccaaagtt

SEQ ID NO: 26696 - DNA, 260 bp, Unknown
  Description of Unknown: RightRegion for integrase B697 sequence
catgtaagctccatagtctttaagaatggccttacacacaaatttatctataaaaattgacaccgacataaatgtcgggcacaaaaataaccaggaagcgttcgtacctcctggttattcttatattttctgtgttttttctccatccaacaaatgttagaaatggatgttaaatgataagcatggcatccccaaaggagaaaaagcggtaacgttcttttactgcttcttcgtaagctgccatgatatattcttttcct

SEQ ID NO: 26697 - DNA, 260 bp, Unknown
  Description of Unknown: RightRegion for integrase B698 sequence
ggcacagtgacaaaaatcaccttcaaaaacaatatcgtacatacctttatctacaaataaaacccatgaaaaaaccctgattccgaccacagaatcagggtatattttttgcataaatttagcaaatatgcagttgcataacgcagaatctttataagccttgggttcgtattccgccataagaggtattttcaccttttttttgcagtttcctgacacgttttccaagcggcgaaaacccctgaaattaagcctttttc

SEQ ID NO: 26698 - DNA, 109 bp, Unknown
  Description of Unknown: RightRegion for integrase B699 sequence
catgtcagtgccattgtgtttaaaaatggtcttacacagaaattcatctacaaaaaataaagccaatataaatatcaaaaaataaccaggaagcattatacctcctggt

SEQ ID NO: 26699 - DNA, 260 bp, Unknown
  Description of Unknown: RightRegion for integrase B700 sequence
catgtaacctccatcgtctttaagaatggtcttacccacaaattcatctataaaaattgacaccggtatgaatgccgtacacaaaaataaccaggaagcttttatacctcctggttgttttttatgtcttctgtattttcttatacctaacaaatgttggaaaatggtgttattcgataaacatggcatcaccaaaactgaagaaacggtatctctccttcaccgcctcctcataggcagccataatatgctcttttcct

SEQ ID NO: 26700 - DNA, 109 bp, Unknown
  Description of Unknown: RightRegion for integrase B701 sequence
acctcaattctcttcaaaaacggcctcgaaatacaattttcctacaaatccacagaatgagaaaaaagccccgaaaccgcttggtttcagggcttttcagctacttctt

SEQ ID NO: 26701 - DNA, 138 bp, Unknown
  Description of Unknown: RightRegion for integrase B702 sequence
gtcatctttcgaaatggactctctcaaacctttatatacaaagaaaagccagggaaatagccccctggcttctttttcagtcctctttagacacccaacaaatgttagatttggagtctattcaattatcatggcatc

SEQ ID NO: 26702 - DNA, 260 bp, Unknown
  Description of Unknown: RightRegion for integrase B703 sequence
aacggaaaagttcagcggattgttttcagaaatggattatcacaaacatttgttcgataagtaaaagcaccagaattttagaactggtgcttttattttgtctgcattttgtcctctggactgtccacggacattatacggatattttacagacattccatagattttctacagactgtccatgcaaattacgttttattttttaaatcagcagcaatttgcactccctcaatatacctctgatagtctctttgatctcc

SEQ ID NO: 26703 - DNA, 260 bp, Unknown
  Description of Unknown: RightRegion for integrase B704 sequence
ttacaaccaacaccactgattacgttgacgccggtattaaactgcaatacacgccgatagtaagcagcgacggtatgataacatcagttgtgcatacggaagtcagtacccccacgcttatttccgaactgaaaaactacaaaataaccagccgcacagccgatactaccgtcaggatgcgcgacggagaaacgcttgtaataggcggtttaatcaatgaagaagaacaaaaacggctgcaaaaagtaccgtttttatca

SEQ ID NO: 26704 - DNA, 260 bp, Unknown
  Description of Unknown: RightRegion for integrase B705 sequence
attgaatacattgagttcaagagcggacttaggcatacattcatctataaagataaataattaatttacataccaaaacagccggagagcaattctccggctgttactctattcatacactttcgtgatatgaattacaggaattcgttatgaatgcctgtgtaaattatccaacatgaattttttctcttaaagcttcctggagtgtttgagaaaaattaatatttctttctaccgctgccgcattaagccacgcaggt

SEQ ID NO: 26705 - DNA, 260 bp, Unknown
  Description of Unknown: RightRegion for integrase B706 sequence
ttacaaccaacactaccgattacgttgacgccggtattaaactgcaatacacgccgatagtaagcagcgacggtatgataacctcggttgtgcatacggaagtcagtacccccacgcttatttccgaactaaaaaattacaaaataaccagccgcacagccgatactaccgtcaggatgcgcgacggtgaaactcttgtaataggcggtttaatcaatgaagaagaacaaaaacggctgcaaaaagtaccgttcttatca

SEQ ID NO: 26706 - DNA, 251 bp, Unknown
  Description of Unknown: RightRegion for integrase B707 sequence
cgtgtttcctccatcgtgtttagaaatggtcttactcatactttcatataccaaaaatgataccggcatgaatgtcgggaacaaaataacccagaagccgcatagctcctgggtttcattttatcccattattcaattatttttcagatgtgggattccttacttttgtaagaaaacggtgttattctataaacatggcatccccaaaactaaagaaacggtatttttcttctactgctttcttataggca

SEQ ID NO: 26707 - DNA, 260 bp, Unknown
  Description of Unknown: RightRegion for integrase B708 sequence
caagaaagaaaaacaaagtttgaaaaaaacaaatttactatattagaaattgaggtataaattagtacttcaatttttttaatttaaagaatataagggggttatataaatgaattatttttttaaatatctactaccacaattaatggagtattttaacaatgacaaagagactataaaggaattcttaccaaaagttattgaagaaaaatgttcaactttattgttggaaaatgacaaagaaattaataataaaaatg

SEQ ID NO: 26708 - DNA, 260 bp, Unknown
  Description of Unknown: RightRegion for integrase B709 sequence
cgtgtttcctccatcatattcaagaacggccttacccatacttttatatacaaaaaatgatgtcggtataactgcctggaataaaacaacccagaagcctcaacgctcctgggttttattttatcccattattcagttatttttcaggtatgggatttccttacaaaagtaagaaaacggtgttattcgataaacatcgcatccccaaagctaaagaaacgatatttctcctgcacggcaatttcatatgcgtttaacac

SEQ ID NO: 26709 - DNA, 260 bp, Unknown
  Description of Unknown: RightRegion for integrase B710 sequence
ttttcttgtttcgcagctgatttacggctgttcttgctagatggatttcctcactggtgaaaactgtttttttaccggccgagagagaatccactttcagtatcagctatctcgtttcacgccagtctgtgttcacagctctttgcaggtagtagtaatcacccaatgctttcagcaggataatcttgttggcgcgggtcagcttgatttttctcataatccaatcgcctttcccaacttttcctgcgccttgcgtttgt

SEQ ID NO: 26710 - DNA, 260 bp, Unknown
  Description of Unknown: RightRegion for integrase B711 sequence
gcaaagaccgcaggcttcaccgcccgtggcctttcggtcctgcaaatactcgtactgtaacaacaccctagcagaaatatcgcacttcctccccctaacgcaggtgggcaattgccctgaaacgatgtccgcctccgaaccgaaaagcgccccgattaacgttctctgttaaaatcaagaggtcgttccaaacgtagaatcaaacaaaccttgcaagtttatttgacttttactgtttcaaagaacagcaaaaagtccac

SEQ ID NO: 26711 - DNA, 260 bp, Unknown
  Description of Unknown: RightRegion for integrase B712 sequence
ttaggttctcaatcatcacttactcaaccgcttataatactgccggtactgctgcggtgaaagtcccgtggcgtccttaaatacacggcggaagtgtgctgttgtcaaaaagcctgtcttttcggagatgtccgagatgctctcgttggtcttttcaatcaggttttgcgcagccttgatccgcacgccgttgatatactcgatcaagctcaggttgatggactttttaaacagccggctcaggtagtacgggctgatgt

SEQ ID NO: 26712 - DNA, 260 bp, Unknown
  Description of Unknown: RightRegion for integrase B713 sequence
gtcatctttcgaaacgggctctctcaaacctttatatacaaagaaaagccagggaaataactccctggcttcttttttcagccctttttcaaaaccaacaaaagttagatttggagtctattcaattatcatggcatcgccgaaggagaaaaagcggtatttttctcttacagcctcttcataagctgccataatatgctcttttccagccagtgccgataccagcatcaccagtgtggactccggcagatggaaattgg

SEQ ID NO: 26713 - DNA, 260 bp, Unknown
  Description of Unknown: RightRegion for integrase B714 sequence
aatggaaaggttcagcggatcgtttttagaaacggactttctcaaacctttatcaggtaaataaaaagcaccagaaattttgaactggtgcttttattttgtcctcgtttggtcctctggactgtctgcggacattatatggatattttacggacattccatagattttatacggactgtccatgcaaattacattttattttttaggtcaatagcaatttgcactgcctgattgaacccctcaatataccactgatagt

SEQ ID NO: 26714 - DNA, 260 bp, Unknown
  Description of Unknown: RightRegion for integrase B715 sequence
aatggaaaggttcagcgaattgttttcagaaatggattgtctcaaacctttatcaggtaaataaaaagcaccagaaattttgaactggtgctttttattttgtctgcatagtgtccacggacattccataggacaaaatgcagatatttcacggacattccatagattttacacggactgtccaagcaaattacgttttattttttatgtcaatagcaatttgcactgcctgattgaacccctcaatatacccatgatag

SEQ ID NO: 26715 - DNA, 260 bp, Unknown
  Description of Unknown: RightRegion for integrase B716 sequence
cgtgtttcctccatcatctttaagaatggcctttcccatacttttgtataccagaattgacgttgagataaatgttgagaacaaaacaacccagaagcctcaaagctcctgggttttattttatcccattattcagttgtttttccggtatgggatttccttacaaaagtaagaaaacggtgttattcgataaacatggcatctccaaaggaaaagaaacgatatctttcctgtactgcttcttcatatgccgccaatac

SEQ ID NO: 26716 - DNA, 260 bp, Unknown
  Description of Unknown: RightRegion for integrase B717 sequence
aatggaaaggttcagcggatcgtttttagaaacggactttctcaaacctttatcaggtaaataaaaagcaccagaaattttgaactggtgcttttattttgtcctcgtttggtcctctggactgtctgcggacattatatggatattttacggacattccatagattttatacggactgtccatgcaaattacattttattttttaggtcaatagcaatttgcactgcctgattgaacccctctatatacccctgatagt

SEQ ID NO: 26717 - DNA, 260 bp, Unknown; identical to SEQ ID NO: 26709
  Description of Unknown: RightRegion for integrase B718 sequence

SEQ ID NO: 26718 - DNA, 260 bp, Unknown
  Description of Unknown: RightRegion for integrase B719 sequence
aatggaaaggttcagcgaattgttttcagaaatggattgtctcaaacctttatcaggtaaataaaaagcaccagaaattttgaactggtgctttttattttgtctgcatagtgtccacggacattccataggacaaaatgcagatatttcacggacattccatagattttacacggactgtccaagcaaattacgttttattttttatgtcaatagcaatttgcactgcctgattgaacccctctatatacccctgatag

SEQ ID NO: 26719 - DNA, 260 bp, Unknown
  Description of Unknown: RightRegion for integrase B720 sequence
aacggaaaggttcagcggatcgtttttagaaacggactttctcaaacctttatcaggtaaaaataaaagcaccagaatttttgaactggtgcttttattttgtctgcattttgtcctctggactgtccacggacattatacggatattttacggacgttccatagattttacacggactgtccaagcaaattacgttttattttttatgtcaatagcaatttgtaccgcctgattgggcccctcaatatacccctgatag

SEQ ID NO: 26720 - DNA, 260 bp, Unknown
  Description of Unknown: RightRegion for integrase B721 sequence
aatggaaaggttcagcgaattgttttcagaaatggattgtctcaaacctttatcaggtaaataaaaagcaccagaaattttgaactggtgctttttattttgtctgcatagtgtccacggacattccataggacaaaatgcagatatttcacggacattccatagattttacacggactgtccaagcaaattacgttttattttttatgtcaatagcaatttgcactgcctgtttgaacccctctatatacccctgatag

SEQ ID NO: 26721 - DNA, 260 bp, Unknown
  Description of Unknown: RightRegion for integrase B722 sequence
ttacaaccaacaccactgattacgttgacgccggtattaaactgcaatacacgccgatagttagcagcgacggtatgataacctcggttgtacatacggaagtcagtacccccacgcttatttccgaactgaaaaattacaaaataaccagccgaagtgccaccaccaccgtaagaatgcgcgacggagaaactcttgtaataggcggtttaatcaatgaagaagaacagaaacggctgcaaaaagtaccgttcttatca

SEQ ID NO: 26722 - DNA, 260 bp, Unknown
  Description of Unknown: RightRegion for integrase B723 sequence
gtcatctttcgaaatggactctctcaaacctttatatacaaagaaaagccagggaaatagccccctggcttctttttcagtcctctttagacacccaacaaatgttagatttggagtctattcaattatcatggcatcgccgaaggagaaaaagcggtatttttctcttacagcctcttcataagctgccataatatgctcttttccagccagtgccgataccagcatcaccagtgtggactccggcagatggaaattgg

SEQ ID NO: 26723 - DNA, 260 bp, Unknown
  Description of Unknown: RightRegion for integrase B724 sequence
ttacaaccaacactactgattacgttgacgccggtattaaactgcaatacacgccgatagtaagcagcgacggtatgataacatcggttgtacatacggaagtcagtacccccacacttatttccgaactgaaaaactacaaaataaccagccgaagtgccaccactaccgtcaggatgcgcgatggtgaaactcttgtaataggcggtttaatcaatgaagaagaacaaaaacgtctgcaaaaaataccgttcttatca

SEQ ID NO: 26724 - DNA, 260 bp, Unknown
  Description of Unknown: RightRegion for integrase B725 sequence
tcccatatcgcagacgaggtaaaagatgtgtgttcctatgttagtgacaatacacgttgagacagtggcgttaatttgccgtaaataagcgggtttccgggattgaaactgtaaagttcagtggatttgccacccatttgccacccacaaaattaaaataacgaattaataaggaaaacggttgaactctctgaaccaactagagttgctcaaccgttttttgtatttattgaactgcctgttcaaaaatatcaacagcg

SEQ ID NO: 26725 - DNA, 260 bp, Unknown
  Description of Unknown: RightRegion for integrase B726 sequence
ttacaaccaacaccactgattacgttgacgccggtattaaactgcaatacacgccgatagtaagcagcgacggtatgataacttcggttgtacatacggaagtcagtacccccacacttatttccgaactgaaaaactacaaaataaccagccgaagtgccactactaccgtaagaatgcgcaacggtgaaactcttgtaataggcggtttaattaatgaagaagaacaaaaacgtctgcaaaaagtaccgttcttatca

SEQ ID NO: 26726 - DNA, 260 bp, Unknown
  Description of Unknown: RightRegion for integrase B727 sequence
gtcatctttcgaaatggactctctcaaacctttatatacaaagaaaagccagggaaatagccccctggcttctttttcagtcctctttagacacccaacaaatgttagatttggagtctattcaattatcatggcatccccaaaggagaaaaagcggtatttttctctcacagcctcttcataagctgccataatatgctcttttccagccagtgccgataccagcatcaccagtgtggactccggcagatggaaattgg

SEQ ID NO: 26727 - DNA, 260 bp, Unknown
  Description of Unknown: RightRegion for integrase B728 sequence
aatggaaaggttcagaggatcgtttttagaaacggactttctcaaacctttatcaggtaaaaataaagcaccagaatttttgaactggtgcttttattttgtcctcgtttggtcctctggactgtctgcggacattatatggatattttacggacattccatagattttatacggactgtccatgcaaattacattttattttttaggtcaatagcaatttgcactgcctgattgaaccactcaatatacccctgatagt

SEQ ID NO: 26728 - DNA, 260 bp, Unknown
  Description of Unknown: RightRegion for integrase B729 sequence
attgctcaaatcagcttccaaaacggtatttcactaaaatttttgtatgcagctaaataaaacgaaaagaccgcaaaccattgaacttgcggtcttttctattacttttcgtcttcatcgtccgtcctgtctacaataagcattgcatcaccaaagctaaaaaatctgtacttctcttcaaccgctatcttataagcgttcatagtgttctcgtatcccataaatgcagaaacaagcattataagcgtgctttcaggcag

SEQ ID NO: 26729 - DNA, 109 bp, Unknown
  Description of Unknown: RightRegion for integrase B730 sequence
acctcgattttgctaaaaaacggcattgaactacgattttcatacaaaacatcagagtagcaaaaaagtccagaaacccgcatggtttctggactttttcattactttt

SEQ ID NO: 26730 - DNA, 109 bp, Unknown
  Description of Unknown: RightRegion for integrase B731 sequence
acctcaattttgctcaaaaacggcattgaactacgattttcgtacaaaaccgccgaataagaaaaaagtccagaaacccgcatggcttctggactttttcgttactttt

SEQ ID NO: 26731 - DNA, 260 bp, Unknown
  Description of Unknown: RightRegion for integrase B732 sequence
cgcgtggtggaaatcgtcttttccaatggcctctcccaccgcttcatataccgggaataaataacaaaagcccagtttcaggcatcatcctgttactgggctttcttaaaaaatcctttatttatgcgggtttggaacatctctcatttcaagttcatctgacatccgaatgtattgacgcagaacgtcatctttctgcctgtttctttctccatctgtgccaccagcatacgtgcctttgcgatgaaataatactgacg

SEQ ID NO: 26732 - DNA, 260 bp, Unknown
  Description of Unknown: RightRegion for integrase B733 sequence
acctcgattttgctcaaaaacggcattgaactacgattttcgtacaaaaccgcagaataagaaaaaagtccagaaacccgcatggcttctggactttttcattactttttatcttccgggtcgttcccgcctcgtataaacatcgcatcaccgaaactgaagaagcggtatttctcttccacggccaccttgtaggcatgcatggtcttgtcgtagccatacagtgcggcaatgagcatgatcaaggtgctctccggcag

SEQ ID NO: 26733 - DNA, 260 bp, Unknown
  Description of Unknown: RightRegion for integrase B734 sequence
acctcaattctcttcaaaaacggcctcgaaatacaattttcctacaaatccacagaatgagaaaaaagccccgaaaccgcttggtttcagggcttttcagctacttcttatcgtccagttctttcatgcttccaataaacatcgcatctccaaaggaaaaaaagcgatagcgttcccggaccgcttcctcataggccgctaaaatgggttcccgtccagccaatgcggaaaccagcataatgagggtggattccggcaga

SEQ ID NO: 26734 - DNA, 260 bp, Unknown
  Description of Unknown: RightRegion for integrase B735 sequence
cgcgtggtggaaatcgtcttttccaatggtctctcccaccgcttcatctaccgggaataaacaacaaaagcccagtttcaggcatcatcctgttactgggctttcttaaaaaatcctttatttatgcgggtttggaacatctctcatttcaagttcatctgacaaccgaatgtattgacgcagaacgtcatctttctgcctgtttctttctccatctgtgccaccagcatacgtgcctttgcgatgaaataatactgacg

SEQ ID NO: 26735 - DNA, 109 bp, Unknown
  Description of Unknown: RightRegion for integrase B736 sequence
acctcaattttgctcaaaaacggcattgaactacgattttcgtacaaaaccgccgaataagaaaaaagtccagaaacccgcatggcttctggactttttcattactttt

SEQ ID NO: 26736 - DNA, 260 bp, Unknown
  Description of Unknown: RightRegion for integrase B737 sequence
acctcaattttgctcaaaaacggcattgaactacgattttcgtacaaaaccgccgaataagaaaaaagtccagaaacccgcatggcttctggactttttcattactttttatcttccgggtcgttcccgcctcgtataaacatcgcatcgccaaaggagaagaaacggtacttctctgccacagctacctcataggcgtgcatggtcttttcgtagccgtacagggcggacaccaacatgatcagggtgctctccggcag

SEQ ID NO: 26737 - DNA, 260 bp, Unknown
  Description of Unknown: RightRegion for integrase B738 sequence
cgcgtggtggaaatcgtttttttcaacggtctctcccaccgtttcatataccgcgaataaacaacaaaagcccagcttcaggcatcatcctgttactgggctttcttaaaaaatcctttatttatgcgggtttggaacatctctcatttcaagttcatctgacaaccaaatgtattaacgcagaacgtcatctttctgcctgcttctttctccatctgcgtcaccagcgtacgtgcctttgcgatgaaataatactggcg

SEQ ID NO: 26738 - DNA, 260 bp, Unknown; identical to SEQ ID NO: 26714
  Description of Unknown: RightRegion for integrase B739 sequence

SEQ ID NO: 26739 - DNA, 260 bp, Unknown; identical to SEQ ID NO: 26718
  Description of Unknown: RightRegion for integrase B740 sequence

SEQ ID NO: 26740 - DNA, 109 bp, Unknown
  Description of Unknown: RightRegion for integrase B741 sequence
acctcgattttgctcaaaaacggcattgaactacgattttcgtacaaaaccgcagaataagaaaaaagtccagaaacccgcatggcttctggactttttcattactttt

SEQ ID NO: 26741 - DNA, 260 bp, Unknown
  Description of Unknown: RightRegion for integrase B742 sequence
acctcaattttgctcaaaaacggcattgaactacgattttcgtacaaaaccgccgaataagaaaaaagtccagaaacccgcatggcttctggactttttcgttactttttatcttccgggtcgttcccgcctcgtataaacatcgcatcgccaaagctgaagaaccgatatttctgctcgacagccaccttataggcggccatcgtcttttcgtagccgtacagcgccgacaccagcatgatgagggtgctttcgggcag

SEQ ID NO: 26742 - DNA, 109 bp, Unknown
  Description of Unknown: RightRegion for integrase B743 sequence
acctcaattttgctcaaaaacggcattgaactacgcttttcgtacaaaaccgccgaataagaaaaaagtccagaaacccgcatggcttctggactttttcatcactttt

SEQ ID NO: 26743 - DNA, 109 bp, Unknown
  Description of Unknown: RightRegion for integrase B744 sequence
acctcgattttgctcaaaaacggcattgaactacgattttcgtacaaaaccgccgaataagaaaaaagtccagaaacccgcatggcttctggactttttcatcactttt

SEQ ID NO: 26744 - DNA, 260 bp, Unknown
  Description of Unknown: RightRegion for integrase B745 sequence
tgcgattcagccagaactttttttgcacattgcccagtttcgcatgaaaactccagatgaaatcatcgatggacaaaatgtgtggtcatatagttgtccaaggcgctggagagtgcagtcaggtgtgatagccgctctgatgtaatgacaggcgttaaatagagaacgcccccctcgcgctgaaaagccggtatatgctgtcacattggtcaggagttttgacgaggcatatcgcacagtactacataatttttactctc

SEQ ID NO: 26745 - DNA, 260 bp, Unknown
  Description of Unknown: RightRegion for integrase B746 sequence
acctcaattttgctcaaaaacggcattgaactacgattttcgtacaaaaccgccgaataagaaaaaagtccagaaacccgcatagcttctggactttttcattactttttatctcccgggtcgttcccgcctcgtataaacatcgcatcgccaaagctgaagaaccgatatttctgatcgacagccaccttgtaggcggccatcgtcttttcgtagccatacagcgccgacaccagcatgatgagggtgctttcgggcag

SEQ ID NO: 26746 - DNA, 260 bp, Unknown
  Description of Unknown: RightRegion for integrase B747 sequence
acctcaattttgctcaaaaacggcattgaactacgcttttcgtacaaaaccgccgaataagaaaaaagtccagaaacccgcatggcttctggactttttcatcactttttatcttccgggtcgttcccgcctcgtataaacatcgcatcgccaaaactaaagaaacgatatttctcttctacggccactttataggccgccatggtcttttcgtagccgtacagcgcggacaccagcatgatgagggtgctctccggcag

SEQ ID NO: 26747 - DNA, 260 bp, Unknown
  Description of Unknown: RightRegion for integrase B748 sequence
acctcgattttgctcaaaaacggcattgaattacgattttcgtacaaaaccgcagaataagaaaaaagtccagaaacccgcatggcttctggactttttcattactttttatcttccgggtcgttcccgcctcgtataaacatcgcatcaccgaaactgaagaagcggtatttctcttccacggccaccttgtaggcatgcatggtcttgtcgtagccatacagtgcggcaatgagcatgatcaaggtgctctccggcag

SEQ ID NO: 26748 - DNA, 260 bp, Unknown
  Description of Unknown: RightRegion for integrase B749 sequence
acctcaattttgctcaaaaacggcattgaactacgattttcgtacaaaaccgccgaataagaaaaaagtccagaaacccgcatggcttctggactttttcgttactttttatcttccgggtcgttcccgcctcgtataaacatcgcatcgccaaagctgaagaaccgatatttctgctcgacagccaccttataggcggccatcgtcttttcgtagccatacagcgccgacaccagcatgatgagggtgctttcgggcag

SEQ ID NO: 26749 - DNA, 109 bp, Unknown
  Description of Unknown: RightRegion for integrase B750 sequence
acctcaattttgctcaaaaacggcattgaactacgattttcgtacaaaaccgccgaataagaaaaaagtccagaaacccgcatggcttctggactttttcgtcactttt

SEQ ID NO: 26750 - DNA, 260 bp, Unknown
  Description of Unknown: RightRegion for integrase B751 sequence
acctcaattttgctcaaaaacggcattgaactacgattttcgtacaaaaccgccgaataagaaaaaagtccagaaacccgcatggcttctggactttttcattactttttatcttccgggtcgttcccgcctcgtataaacatcgcatcgccaacgtgtcggaaacgtacagaatctctgcattctgcgatttcttttacgctgaaaaagtaaggtcgagtcgtcctatacattttactacgaaaaagtaatcctttcaa

SEQ ID NO: 26751 - DNA, 260 bp, Unknown
  Description of Unknown: RightRegion for integrase B752 sequence
acctcaattttgctcaaaaacggcattgaactacgcttttcgtacaaaaccgccgaataagaaaaaagtccagaaacccgcatggcttctggactttttcatcactttttatcttccgggtcgttcccgcctcgtataaacatcgcatccccaaaggagatacaggaatttttccagagggcggctgatttcttaatcaggcgggtagggaaagaaaatatcgtgtcggcggtggtacacatggacgagaaaacgcccca

SEQ ID NO: 26752 - DNA, 109 bp, Unknown; identical to SEQ ID NO: 26742
  Description of Unknown: RightRegion for integrase B753 sequence

SEQ ID NO: 26753 - DNA, 260 bp, Unknown
  Description of Unknown: RightRegion for integrase B754 sequence
aacggaaaggttcagcgaattgttttcagaaatggattatcgcaaacattcgttcgataagtaaaagcaccagaattttagaactggtgcttttttgtcctctggactgtccacggacattatacagacattccatagattttctacagactgtccatgcaaattacgttttatttttttggtcaatagcaatttgcaccgcctgattgaacccctcaatatacccctgatagtctctttgatctccatactcgcatatc

SEQ ID NO: 26754 - DNA, 260 bp, Unknown
  Description of Unknown: RightRegion for integrase B755 sequence
acctcgattttgctcaaaaacggcattgaactacgattttcgtacaaaaccgcagaatgagaaaaaagtccagaaacccgcatggcttctggactttttcattactttttatcttccgggtcgttcccgcctcgtataaacatcgcatcaccgaaactgaagaagcggtatttctcttccacggccaccttgtaggcatgcatggtcttgtcgtagccatacagtgcggcaatgagcatgatcaaggtgctctccggcag

SEQ ID NO: 26755 - DNA, 260 bp, Unknown
  Description of Unknown: RightRegion for integrase B756 sequence
acctcaattttgctcaaaaacggcattgagctacgattttcgtacaaaaccgccgaataagaaaaaagtccagaaacccgcatggcttctggactttttcatcactttttatcttccgggtcgttcccgcctcgtataaacatcgcatcgccaaaagagaagaatctataacgttcctccacagccaccttataggctgccatggtcttctcgtagccatacagggccgacaccagcatgataagggtgctttccggcag

SEQ ID NO: 26756 - DNA, 260 bp, Unknown
  Description of Unknown: RightRegion for integrase B757 sequence
tctttcattcaggcattctgtcagcttatctgcaaggctttgctttctggaagtgtctaaatgcccatagatattggcagtcgtttgaatgtcgctgtgtcccatccattcctgcacatctttcagaccgcagccgttgttcagcagcagactggcacagctatgacgaagctcatggaagcgaatgtgcggcattccgtaccgttcaagcatttttgaaaaatgatgcgtcacatagtccggagcaaatgtgcgcccat

SEQ ID NO: 26757 - DNA, 109 bp, Unknown
  Description of Unknown: RightRegion for integrase B758 sequence
acctcaattttgctcaaaaacggcattgaactacgattttcgtacaaaaccgccgaataagaaaaaagtccagaaacccgcatggattctggactttttcgttactttt

SEQ ID NO: 26758 - DNA, 109 bp, Unknown
  Description of Unknown: RightRegion for integrase B759 sequence
acctcaattttgctcaaaaacggcattgaactacgattttcgtacaaaactgccgaataagaaaaaagtccagaaacccgcatggcttctggactttttcattactttt

SEQ ID NO: 26759 - DNA, 260 bp, Unknown
  Description of Unknown: RightRegion for integrase B760 sequence
acctcaattttgctcaaaaacggcattgaactacgattttcgtacaaaactgccgaataagaaaaaagtccagaaacccgcatggcttctggactttttcattactttttatcttccgggtcgttcccgcctcgtataaacatcgcatcgccaaagctgaagaaacgatatttctgctcgacagccaccttgtaggcggccatcgtcttttcgtagccatacagcgccgacaccagcatgatgagggtactttcgggcag

SEQ ID NO: 26760 - DNA, 109 bp, Unknown; identical to SEQ ID NO: 26730
  Description of Unknown: RightRegion for integrase B761 sequence

SEQ ID NO: 26761 - DNA, 109 bp, Unknown; identical to SEQ ID NO: 26735
  Description of Unknown: RightRegion for integrase B762 sequence

SEQ ID NO: 26762 - DNA, 109 bp, Unknown; identical to SEQ ID NO: 26735
  Description of Unknown: RightRegion for integrase B763 sequence

SEQ ID NO: 26763 - DNA, 260 bp, Unknown
  Description of Unknown: RightRegion for integrase B764 sequence
acctcaattttgctcaaaaacggcattgaactacgattttcgtacaaaaccgccgaataagaaaaaagtccagaaacccgcatggcttctggactttttcgttactttttatcttccgggtcgttcccgcctcgtataaacatcgcatcgccaaaagagaagaatctataacgttcctccacagccaccttataggccgccatggtcttttcgtagccatacagcgccgacaccagcatgataagggtgctttccggcag

SEQ ID NO: 26764 - DNA, 260 bp, Unknown
  Description of Unknown: RightRegion for integrase B765 sequence
acctcaattttgctcaaaaacggcattgaactacgattttcgtacaaaaccgccgaataagaaaaaggtccagaaacccgcatggcttctggactttttcattactttttatcttccgggtcgttcccgcctcgtataaacatcgcatccccaaagctgaagaaccgatatttctgctcgacagccaccttgtaggcggccatcgtcttttcgtagccgtacagcgccgacaccagcatgatgagggtgctttcgggcag

SEQ ID NO: 26765 - DNA, 260 bp, Unknown
  Description of Unknown: RightRegion for integrase B766 sequence
acctcaattttgctcaaaaacggcattgaactacgattttcgtacaaaactgccgaataagaaaaaagtccagaaacccgcatggcttctggactttttcattactttttatcttccgggtcgttcccgcctcgtataaacatcgcatcgccaaagctgaagaaccgatatttctgctcgacagccaccttgtaggcagccatcgtcttttcgtagccatacagcgccgacaccagcatgatgagggtgctttcgggcag

SEQ ID NO: 26766 - DNA, 260 bp, Unknown
  Description of Unknown: RightRegion for integrase B767 sequence
acctcgattttgctcaaaaacggcattgaactacgattttcgtacaaaaccgcagaataagaaaaaggtccagaaacccgcatggcttctggactttttcattactttttatcttccgggtcgttcccgcctcgtataaacatcgcatcaccgaaactgaagaagcggtatttctcttccacggccaccttgtaggcatgcatggtcttgtcgtagccatacagtgcggcaataagcatgatcaaggtgctctccggcag

SEQ ID NO: 26767 - DNA, 260 bp, Unknown
  Description of Unknown: RightRegion for integrase B768 sequence
acctcaattttgctcaaaaacggcattgaactacgattttcgtacaaaaccgccgaataagaaaaaagtccagaaacccgcatggcttctggactttttcattactttttatcttccgggtcgttcccgcctcgtataaacatcgcatcgccaaaagagaagaatctataacgttcctccacagccaccttataggctgccatggtcttttcgtagccatacagggccgacaccagcatgataagggtgctttccggcag

SEQ ID NO: 26768 - DNA, 260 bp, Unknown
  Description of Unknown: RightRegion for integrase B769 sequence
acctcaattttgctcaaaaacggcattgaactacgcttttcgtacaaaaccgctgaataagaaaaaggtccagaaacccgcatggcttctggactttttcattactttttatcctccgggtcgttcccgcctcgtataaacatcgcatcgccaaagctgaagaaccgatatttctgctcgacagccaccttataggcggccatcgtcttttcgtagccgtacagcgccgacaccagcatgatgagggtgctttcgggcag

SEQ ID NO: 26769 - DNA, 260 bp, Unknown
  Description of Unknown: RightRegion for integrase B770 sequence
acctcaattttgctcaaaaacggcattgaactacgattttcgtacaaaactgccgaataagaaaaaagtccagaaacccgcatggcttctggactttttcattactttttatcttccgggtcgttcccgcctcgtataaacatcgcatccactaatctaaagaagaaaatctaaagcaaaataataaaactaactcccatgatttataagcacttgcctgcctgcaaaccatgggagttctctttatatcatcttaaaat

SEQ ID NO: 26770 - DNA, 109 bp, Unknown
  Description of Unknown: RightRegion for integrase B771 sequence
acctcaattttgctcaaaaacggcattgaactacgattttcgtacaaaaccgccgaataagaaaaaagtccagaaacccgcatggtttctggactttttcattactttt

SEQ ID NO: 26771 - DNA, 260 bp, Unknown; identical to SEQ ID NO: 26747
  Description of Unknown: RightRegion for integrase B772 sequence

SEQ ID NO: 26772 - DNA, 109 bp, Unknown
  Description of Unknown: RightRegion for integrase B773 sequence
agtaaagttacttcaattgttttcaagaacgggctcactcataactttatatacaaataacaaaaacagccgagggttatatattccttggctgttttcattttatatt

SEQ ID NO: 26773 - DNA, 260 bp, Unknown
  Description of Unknown: RightRegion for integrase B774 sequence
acctcaattttgctcaaaaacggcattgaactacggttttcgtacaaaaccgccgaataagaaaaaagtccagaaacccgcatggcttctggactttttcattactttttatcttccgggtcgttcccgcctcgtataaacatcgcatcgccaaaagagaagaatctataacgttcctccacagccaccttataggctgccatggtcttttcgtagccatacagggccgacaccagcatgataagggtgctttccggcag

SEQ ID NO: 26774 - DNA, 260 bp, Unknown
  Description of Unknown: RightRegion for integrase B775 sequence
gagaagttgataaaacaaaatgttgaagctaaaagaagaagaaagagcaagcccgaataaatttcgggcttttttatgttatgtaaggaaatatttttatctttgtggcgttcgggaaacatcgaacattcgttataagacatttaacgctgatttgtagttaaaaacagccaattttgaactatatgaatcaaagatgcgttgattgtctgcatctgtgtttatacgtatgtattagatataggtgcagacttactgca

SEQ ID NO: 26775 - DNA, 109 bp, Unknown
  Description of Unknown: RightRegion for integrase B776 sequence
acctcgattttgctcaaaaacggcattgaactacgattttcgtacaaaaccgccgaataagaaaaaagtccagaaacccgcatggcttctggactttttcattactttt

SEQ ID NO: 26776 - DNA, 260 bp, Unknown
  Description of Unknown: RightRegion for integrase B777 sequence
acctcaattttgctcaaaaacggcattgaactacgattttcgtacaaaaccgccgaataagaaaaaagtccagaaacccgcatggcttctggactttttcattactttttatcttccgtgtcgttcccgcctcgtataaacatcgcatcgccaaagctgaagaaccgatatttctgctcgacagccaccttataggcggccatcgtcttttcgtagccgtacagcgccgacaccagcatgatgagggtactttcgggcag

SEQ ID NO: 26777 - DNA, 109 bp, Unknown; identical to SEQ ID NO: 26729
  Description of Unknown: RightRegion for integrase B778 sequence

SEQ ID NO: 26778 - DNA, 260 bp, Unknown
  Description of Unknown: RightRegion for integrase B779 sequence
acctcaattttgctcaaaaacggcattgaactacgattttcgtacaaaactgccgaataagaaagaagtccagaaacccgcatggcttctggactttttcattactttttatcttccgggtcgttcccgcctcgtataaacatcgcatccccaaagctgaagaagcggtatttctcttccacagctaccttatacgcggccatggtcttctcatagccgtagaaggcggaaatgagcatgatgagggtgctttcgggcag

SEQ ID NO: 26779 - DNA, 260 bp, Unknown
  Description of Unknown: RightRegion for integrase B780 sequence
tacagtattatagattttgtaaattatctagatattgaggaaaacagaagatactactaacaaagaaagtcctgttggcataataaactggcaggactttttttgtcttgtaaactttacctatctttgcaccaacttctaaagttcaaggagttgaacctcttagaagggacatagttaattaagagcgtttgaaatattatcctattgtggaatctggacaattctatagtgcaaggataatagacagtaatcgctca

SEQ ID NO: 26780 - DNA, 109 bp, Unknown
  Description of Unknown: RightRegion for integrase B781 sequence
acctcaattttgctcaaaaacggcattgagctacgattttcgtacaaaaccaccgaataagaaaaaagtccagaaacccgcatggcttctggactttttcattactttt

SEQ ID NO: 26781 - DNA, 260 bp, Unknown
  Description of Unknown: RightRegion for integrase B782 sequence
cgcgtggtggaaatcgtcttttccaatggtctctcccaccgcttcatctaccgggaataaacaacaaaagcccagtttcaggcatcatcctgttactgggctttcttaaaaaatcctttatttatgcgggtttggaacatctctcatttcaagttcatctgacatccgaatgtattgacgcagaacgtcatctttctgcctgtttctttctccatctgtgccaccagcatacgtgcctttgcgatgaaataatactgacg

SEQ ID NO: 26782 - DNA, 260 bp, Unknown
  Description of Unknown: RightRegion for integrase B783 sequence
acctcaattttgctcaaaaacggcattgaactacgattttcgtacaaaactgccgaataagaaaaaagtccagaaacccgcatggcttctggactttttcattactttttatcttccgggtcgttcccgcctcgtataaacatcgcatcgccaaagctgaagaaccgatatttctgatcgacagccaccttgtaggcggccatcgtcttttcgtagccatacagcgccgacaccagcatgatgagggtgctttcgggcag

SEQ ID NO: 26783 - DNA, 260 bp, Unknown
  Description of Unknown: RightRegion for integrase B784 sequence
aacggaaaagttcagcggatcgttttcagaaatggactttctcaaacctttatcagataaaaataaagcaccagaatttttgaactggtgcttttattttgtcctctggactgtccaaggacattatacggatattttacagacattccatagattttctacagactgtccatgcaaattacattttattttttaaatcagcagcaatttgcactccctcaatatacctctgatagtctctttgatctccatactcgcat

SEQ ID NO: 26784 - DNA, 260 bp, Unknown
  Description of Unknown: RightRegion for integrase B785 sequence
acctcaattttgctcaaaaacggcattgaactacgattttcgtacaaaaccgccgaataagaaaaaagtccagaaacccgcatggcttctggactttttcattactttttatcttccgggtcgttcccgcctcgtataaacatcgcatcgccaaaagagaagaatctataacgttcctccacagccaccttataggctgccatggtcttttcgtagccatacagggccgacaccagcatgattagggtgctttccggcag

SEQ ID NO: 26785 - DNA, 109 bp, Unknown
  Description of Unknown: RightRegion for integrase B786 sequence
acctcaattttgctcaaaaacggcattgaactacggttttcgtacaaaaccgccgaataagaaaaaagtccagaaacccgcatggcttctggactttttcattactttt

SEQ ID NO: 26786 - DNA, 195 bp, Unknown
  Description of Unknown: RightRegion for integrase B787 sequence
acctcgattttgctcaaaaacggcattgaactacgattttcgtacaaaaccgccgaataagaaaaaagtccagaaacccgcatggcttctggactttttcattactttttatcttccgggtcgttcccgcctcgtataaacatcgcatcgccaaagctgaagaaccgatatttctgctcgacagccaccttatag

SEQ ID NO: 26787 - DNA, 195 bp, Unknown
  Description of Unknown: RightRegion for integrase B788 sequence
acctcaattttgctcaaaaacggcattgaactacgattttcgtacaaaaccgccgaataagaaaaaagtccagaaacccgcatggcttctggactttttcattactttttatcttccgggtcgttcccgcctcgtataaacatcgcatcgccaaaagagaagaatctataacgttcctccacagccaccttatag

SEQ ID NO: 26788 - DNA, 260 bp, Unknown
  Description of Unknown: RightRegion for integrase B789 sequence
acctcgattttgctcaaaaacggaatagaactacgattttcgtgcaaaactaccgaataagaaaaaagtccagaaacccgcatggcttctggactttttcattactttttatcttccgggtcgttcccgcctcgtataaacatcgcatcaccgaaactgaagaagcggtatttctcttccacggccaccttgtaggcatgcatggtcttgtcgtagccatacagtgcagcaatgagcatgatcaaggtgctctccggcag

SEQ ID NO: 26789 - DNA, 260 bp, Unknown
  Description of Unknown: RightRegion for integrase B790 sequence
cgcgtggtagaaatcgtcttttccaatggtctctcccaccgcttcatctaccgggaataaacaacaaaagcccagtttcaggcatcatcctgttactgggctttcttaaaaaatcctttatttatgcgggtttggaacatctctcatttcaagttcatctgacatccgaatgtattgacgcagaacgtcatctttctgcctgtttctttctccatctgtgccaccagcatacgtgcctttgcgatgaaataatactgacg

SEQ ID NO: 26790 - DNA, 260 bp, Unknown
  Description of Unknown: RightRegion for integrase B791 sequence
acctcaattttgctcaaaaacggcattgaactacgattttcgtacaaaaccgccgaataagaaaaaagtccagaaacccgcatggcttctggactttttcattactttttatcttccgggtcgttcccgcctcgtataaacatcgcatcgccgaaggaaaagaagcggtacttttcctctacggcaactttataggcagccatggtcttttcgtagccgtagagggcagagaccagcatgatgagggtgctttccggcag

SEQ ID NO: 26791 - DNA, 260 bp, Unknown
  Description of Unknown: RightRegion for integrase B792 sequence
agtaaagttacttcgattgttttcaagaacgggctcactcataactttatatacaaataacaaaaacagccgagggttatattccttggctgttttcattttgcatctatctaacatttgttagaaaatgatgttattcgatgaacatcgcatctccaaaagagaagaagcgatatctttccttcactgcctcctcatacgctgccataatatgctctttccctgccagtgcagatacaagcattaacaaagtagattct

SEQ ID NO: 26792 - DNA, 109 bp, Unknown
  Description of Unknown: RightRegion for integrase B793 sequence
ctcaagcccgcccatggcgggcttgatggggtttgcgcccaggtgagcgaggaagtctgattttcagacgcgcaaaccggggttcagattcccgataccgcgtccaaag

SEQ ID NO: 26793 - DNA, 260 bp, Unknown
  Description of Unknown: RightRegion for integrase B794 sequence
acctcgattttgctcaaaaacggcattgaactacgattttcgtacaaagccgcagaataagaaaaaagtccagaaacccgcatggcttctggactttttcattactttttatcttccgggtcgttcccgcctcgtataaacatcgcatcaccgaaactgaagaagcggtatttctcttccacggccaccttgtaggcatgcatggtcttgtcgtagccatacagtgcggcaatgagcatgatcaaggtactctccggcag

SEQ ID NO: 26794 - DNA, 260 bp, Unknown
  Description of Unknown: RightRegion for integrase B795 sequence
acctcaattttgctcaaaaacggcattgaactacgattttcgtacaaaactgccgaataagaaaaaagtccagaaacccgcatggcttctggactttttcattactttttatcttccgggtcgttcccgcctcgtataaacatcgcatcgccaaagctgaagaaccgatatttctgctcgacagccaccttataggcggccatcgtcttttcgtagccatacagcgccgacaccagcatgatgagggtgctttcgggcag

SEQ ID NO: 26795 - DNA, 260 bp, Unknown
  Description of Unknown: RightRegion for integrase B796 sequence
cgcgtagtagaaatcgtcttttccaacggtctctcccaccgcttcatatatcgcgaataaacaacaaaagcccagtttcaggcatcatcctgttactgggctttcttaaaaaatcctttatttatgcgggtttggaacatctctcatttcaagttcatctgacatccgaatgtattgacgcagaacgtcatctttctgcctgtttctttctccatctgtgccaccagcatacgtgcctttgcgatgaaataatactgacg

SEQ ID NO: 26796 - DNA, 109 bp, Unknown; identical to SEQ ID NO: 26740
  Description of Unknown: RightRegion for integrase B797 sequence

SEQ ID NO: 26797 - DNA, 195 bp, Unknown
  Description of Unknown: RightRegion for integrase B798 sequence
acctcaattttgctcaaaaacggcattgaactacgattttcgtacaaaaccgccgaataagaaaaaagtccagaaacccgcatggcttctggactttttcatcactttttattttccgggtcgttcccgcctcgtataaacatcgcatccccaaagctgaagaagcggtatttctcttccacagctaccttatac

SEQ ID NO: 26798 - DNA, 260 bp, Unknown
  Description of Unknown: RightRegion for integrase B799 sequence
acctcaattttgctcaaaaacggcattgaactacgattttcgtacaaaaccgccgaataagaaaaaagtccagaaacccgcatggcttctggactttttcattactttttatcttccgggtcgttcccgcctcgtataaacatcgcatcaccgaaactgaagaagcggtatttctcttccacggccaccttgtaggcatgcatggtcttgtcgtagccatacagtgcggcaatgagcatgatcaaggtgctctccggcag

SEQ ID NO: 26799 - DNA, 109 bp, Unknown; identical to SEQ ID NO: 26758
  Description of Unknown: RightRegion for integrase B800 sequence

SEQ ID NO: 26800 - DNA, 260 bp, Unknown
  Description of Unknown: RightRegion for integrase B801 sequence
cgcgtggtggaaatcgtcttttccaatggtctctcccaccgcttcatctaccgggaataaacaacaaaagcccagtttcaggcatcatcctgttactgggctttcttaaaaaatcctttatttatgcgggtttggaacatctctcatttcaagttcatctgacaaccaaaggtttcgacatgagagaaaagtggtctgcctaacttcgcggaaatttctgtgatatatttccgtgcctttgcaataaaataatactgtct

SEQ ID NO: 26801 - DNA, 260 bp, Unknown; identical to SEQ ID NO: 26732
  Description of Unknown: RightRegion for integrase B802 sequence

SEQ ID NO: 26802 - DNA, 109 bp, Unknown
  Description of Unknown: RightRegion for integrase B803 sequence
acctcaattttgctcaaaaacggcattgaactacgattttcgtacaaaaccgccgaataagaaaaaagtccagaaacccgcatagcttctggactttttcgttactttt

SEQ ID NO: 26803 - DNA, 260 bp, Unknown
  Description of Unknown: RightRegion for integrase B804 sequence
acctcaattttgctcaaaaacggcattgaactacgattttcgtacaaaactgccgaataagaaaaaagtccagaaacccgcatggcttctggactttttcattactttttatcttccgggtcgttcccgcctcgtataaacatcgcatcgccaaaagagaagaatctataacgttcctccacagccaccttataggctgccatggtcttttcgtagccatacagggccgacaccagcatgataagggtgctttccggcag

SEQ ID NO: 26804 - DNA, 260 bp, Unknown
  Description of Unknown: RightRegion for integrase B805 sequence
acctcaattttgctcaaaaacggcattgaactacgattttcgtacaaaaccgccgaataagaaaaaagtccagaaacccgcatggcttctggactttttcattactttttatcttccgggtcgttcccgcctcgtataaacatcgcatcgccaaagctgaagaaccgatatttctgctcgacagccaccttataggcggccatcgtcttttcgtagccatacagcgccgacaccagcatgatgagggtgctttcgggcag

SEQ ID NO: 26805 - DNA, 260 bp, Unknown
  Description of Unknown: RightRegion for integrase B806 sequence
cgcgtggtggaaatcgtcttttccaatggtctctcccaccgcttcatataccgcgaataaacaacaaaagcccagtttcaggcatcatcctgttactgggctttcttaaagaatcctttatttatgcgggtttggaacatctctcatttcaagttcatctgacaaccaaaggtattcacgcagaacgtcatctttctgcctgcttctttctccatttgagccaccaaagtccgagcctttgctataaaataatactgacg

SEQ ID NO: 26806 - DNA, 260 bp, Unknown; identical to SEQ ID NO: 26732
  Description of Unknown: RightRegion for integrase B807 sequence

SEQ ID NO: 26807 - DNA, 109 bp, Unknown; identical to SEQ ID NO: 26743
  Description of Unknown: RightRegion for integrase B808 sequence

SEQ ID NO: 26808 - DNA, 260 bp, Unknown
  Description of Unknown: RightRegion for integrase B809 sequence
cgcgtggtggaaatcgtcttttccaatggtctctcccaccgcttcatttaccgggaataaataacaaaagcccagtttcaggtgtcatcctgttactgggctttcttaaagaatcctttatttatgcgggtttggaacatctctcatttcaagttcatctgacaaccaaaggtattcacgcagaacgtcatctttctacctgcttctttctccatttgagccaccaaagtccgagcctttgctataaaataatactgacg

SEQ ID NO: 26809 - DNA, 109 bp, Unknown
  Description of Unknown: RightRegion for integrase B810 sequence
acctcgattttgctcagaaacggcattgaactacgattttcgtacaaaaccgcagaataagaaaaaagtccagaaacccgcatggcttctggactttttcattactttt

SEQ ID NO: 26810 - DNA, 109 bp, Unknown; identical to SEQ ID NO: 26735
  Description of Unknown: RightRegion for integrase B811 sequence

SEQ ID NO: 26811 - DNA, 260 bp, Unknown
  Description of Unknown: RightRegion for integrase B812 sequence
acctcgattttgctcaaaaacggcattgaactacgattttcgtacaaaactgcagaataagaaaaaagtccagaaatccgcatggcttctggactttttcattactttttatcttccgggtcgttcccgcctcgtataaacatcgcatcaccgaaactgaagaagcggtatttctcttccacggccaccttgtaggcatgcatggtcttgtcgtagccatacagtgcggcaatgagcatgatcaaggtgctctccggcag

SEQ ID NO: 26812 - DNA, 260 bp, Unknown; identical to SEQ ID NO: 26798
  Description of Unknown: RightRegion for integrase B813 sequence

SEQ ID NO: 26813 - DNA, 260 bp, Unknown
  Description of Unknown: RightRegion for integrase B814 sequence
acctcaattttgctcaaaaacggcattgaactacgattttcgtacaaaaccgccgaataagaaaaaagtccagaaacccgcatggcttctggactttttcattactttttatcttccgggtcgttcccgcctcgtataaacatcgcatcgccaaaggagaagaagcggtacttctctgccacggctacttcataggcgtgcatggtcttttcgtagccgtacagagcggacaccagcatgatcagggtgctctccggcag

SEQ ID NO: 26814 - DNA, 260 bp, Unknown
  Description of Unknown: RightRegion for integrase B815 sequence
acctcaattttgctcaaaaacggcattgaactacgattttcgtacaaaaccgccgaataagaaaaaagtccagaaacccgcatagcttctggactttttcattactttttatctcccgggtcgttcccgcctcgtataaacatcgcatcgccaaaagagaaaaatctataacgttcctccacagccaccttataggctgccatggtcttctcgtagccatacagggccgacaccagcatgataagggtgctttccggcag

SEQ ID NO: 26815 - DNA, 109 bp, Unknown
  Description of Unknown: RightRegion for integrase B816 sequence
acctcaattttgctcaaaaacggcattgaactacgcttttcgtacaaaaccgctgaataagaaaaaagtccagaaacccgcatggcttctggactttttcattactttt

SEQ ID NO: 26816 - DNA, 260 bp, Unknown
  Description of Unknown: RightRegion for integrase B817 sequence
acctcaattttgctcaaaaacggcattgaactacgattttcgtacaaaactgccgaataagaaaaaagtccagaaacccgcatggcttctggactttttcattactttttatcttccgggtcgttcccgcctcgtataaacatcgcatcaccgaaactgaagaagcggtatttctcttccacggccaccttgtaggcatgcatggtcttgtcgtagccatacagtgcggcaatgagcatgatcaaggtgctctccggcag

SEQ ID NO: 26817 - DNA, 109 bp, Unknown; identical to SEQ ID NO: 26730
  Description of Unknown: RightRegion for integrase B818 sequence

SEQ ID NO: 26818 - DNA, 109 bp, Unknown
  Description of Unknown: RightRegion for integrase B819 sequence
acctcgattttgctcaaaaacggcattgaactacgattttcgtacaaaactgcagaataagaaaaaagtccagaaacccgcatggcttctggactttttcattactttt

SEQ ID NO: 26819 - DNA, 258 bp, Unknown
  Description of Unknown: RightRegion for integrase B820 sequence
acctcaattttgctcaaaaacggcattgaactacgattttcgtacaaaaccgccgaataagaaaaaagtccagaaacccgcatagcttctggactttttcattactttttatctcccgggtcgttcccgcctcgtataaacatcgcatcgccaaaagagaagaagcggtacttttctgccacggctacctcataggcgtgcatagtcttttcgtagccgtacagagcggacaccagcatgatcagggtgctctccggc

SEQ ID NO: 26820 - DNA, 260 bp, Unknown; identical to SEQ ID NO: 26789
  Description of Unknown: RightRegion for integrase B821 sequence

SEQ ID NO: 26821 - DNA, 260 bp, Unknown
  Description of Unknown: RightRegion for integrase B822 sequence
acggaagataggagccaggcaaatgagcatttgggacgcattcggcaaaggacggtataagggcttctcccgggaggcggggcagctgctggataaggcggtggagctggccggagggctgggctgcaaaaaggcagacaccggccacctgctgtgggcgatgctgcaagcggacggcggcccggcggcccgctttctggccgggaagaacatctcggagctggaagtgcggcgtcagctgtccgccgggcgggatggtt

SEQ ID NO: 26822 - DNA, 109 bp, Unknown; identical to SEQ ID NO: 26735
  Description of Unknown: RightRegion for integrase B823 sequence

SEQ ID NO: 26823 - DNA, 260 bp, Unknown
  Description of Unknown: RightRegion for integrase B824 sequence
gaagtttttacgggtcacacgttcaagaagatgatcgagtcctacgagaagaacctgtaagcgtctgcgcagaaggaacttctctggaaaaaggaagagcggacggccgtccgctcttcctttttttcacaggatatgctataataccacgttacttacttgttctgatttccggcaaaagaaacggtccgggggagggattcgtatggaaaatatccatcagggacatcgtgaaaaaatgcggcagcgttttctgaaaa

SEQ ID NO: 26824 - DNA, 182 bp, Unknown
  Description of Unknown: RightRegion for integrase B825 sequence
acctcaattttgctcaaaaacggcattgaactacgcttttcgtacaaaaccgccgaataagaaaaaagtccagaaacccgcatggcttctggactttttcatcactttttatcttccgggtcgttcccgcctcgtataaacatcgcatcgccgaaggaaaagaagcggtacttttcctctac

SEQ ID NO: 26825 - DNA, 260 bp, Unknown
  Description of Unknown: RightRegion for integrase B826 sequence
acctcgattttgctcaaaaacggcattgaactacgattttcgtacaaaaccgccgaataagaataaagtccagaaacccgcatggcttctggactttttcgttactttttatcttccgggtcgttcccgcctcgtataaacatcgcatccccaaagctgaagaagcggtatttctcttccactgcgaccttatacgcggccatggtcttctcatagccgtagagggcggaaacgagcatgatgagggtgctttcgggcag

SEQ ID NO: 26826 - DNA, 260 bp, Unknown
  Description of Unknown: RightRegion for integrase B827 sequence
acctcgattttgctcaaaaacggcattgaactacgattttcgtacaaaaccgcagaataagaaaaaagtccagaaacccgcatggcttctggactttttcattactttttatcttccgggtcgttcccgcctcgtataaacatcgcatcaccgaaactgaagaagcggtatttctcttccacggccaccttgtaggcatgcatggtcttgtcgtagccatacagtgcagcaatgagcatgatcaaggtgctctccggcag

SEQ ID NO: 26827 - DNA, 260 bp, Unknown
  Description of Unknown: RightRegion for integrase B828 sequence
acctcgattttgctcaaaaacggcattgaactacgattttcgtacaaaaccgccgaataagaaaaaagtccagaaacccgcatggattctggactttttcatcactttttatcttccgggccgttcccgcctcgtataaacatcgcatcgccaacgtgtcggaaacgtacagaatctctacattctgcgatttcttttacgctgaaaaaataaggtcgagtcgtcctatacattttactacgaaaaagtaatcctttcaa

SEQ ID NO: 26828 - DNA, 260 bp, Unknown
  Description of Unknown: RightRegion for integrase B829 sequence
acggaagataggagccaggcaaatgagcatttgggacgcattcggcaaaggacggtataagggcttctcccgggaggcggggcagctgctggataaggcggtggagctggccggaggactgggctgcaaaaaggcagacaccggccacctgctgtgggcgatgctgcaagcggacggcggcccggcggcccgctttctggccgggaagaacatctcggagctggaagtgcggcgtcagctgtccgccgggcgggatggtt

SEQ ID NO: 26829 - DNA, 109 bp, Unknown
  Description of Unknown: RightRegion for integrase B830 sequence
acctcaattttgctcaaaaacggcattgaactacgattttcgtacaaaactgccgaataagaaaaaagtccagaaacccgcatggcttctggactttttcatcactttt

SEQ ID NO: 26830 - DNA, 260 bp, Unknown
  Description of Unknown: RightRegion for integrase B831 sequence
acctcaattttgctcaaaaacggcattgaactacgattttcgtacaaaaccgccgaataagaaaaaagtccagaaacccgcatggcttctggactttttcgttactttttatcttccgggtcgttcccgcctcgtataaacatcgcatcgccaacgtgtcggaaacgtacagaatctctacattctgcgatttcttttacgctgaaaaaataaggtcgagtcgtcctatacattctactacgaaaaagtaatcctttcaa

SEQ ID NO: 26831 - DNA, 260 bp, Unknown
  Description of Unknown: RightRegion for integrase B832 sequence
acctcaattttgctcaaaaacggcattgaactacgattttcgtacaaaaccgccgaataagaaaaaagtccagaaacccgcatggcttctggactttttcattactttttatcttccgggtcgttcccgcctcgtataaacatcgcatcgccaaagctgaagaaccgatatttctgctcgacagccaccttgtaggcggccatcgtcttttcgtagccatacagcgccgacaccagcatgatgagggtgctttcgggcag

SEQ ID NO: 26832 - DNA, 260 bp, Unknown; identical to SEQ ID NO: 26732
  Description of Unknown: RightRegion for integrase B833 sequence

SEQ ID NO: 26833 - DNA, 260 bp, Unknown
  Description of Unknown: RightRegion for integrase B834 sequence
acctcaattttgctcaaaaacggcattgaactacgattttcgtacaaaaccgccgaataagaaaaaagtccagaaacccgcatggcttctggactttttcgttactttttatcttccgggtcgttcccgcctcgtataaacatcgcatctcctatcggaaaaaagttcggattttgttgttgtggtgcacctccagggactcgaaccctgggcccactgattaagagagcaagccgccggttcgtctcaatttctggaag

SEQ ID NO: 26834 - DNA, 109 bp, Unknown
  Description of Unknown: RightRegion for integrase B835 sequence
acctcgattttgctcaaaaacggcattgaactacgattttcgtacaaaaccgccgaataagaaaaaagtccagaaacccgcatggattctggactttttcatcactttt

SEQ ID NO: 26835 - DNA, 260 bp, Unknown; identical to SEQ ID NO: 26747
  Description of Unknown: RightRegion for integrase B836 sequence

SEQ ID NO: 26836 - DNA, 260 bp, Unknown
  Description of Unknown: RightRegion for integrase B837 sequence
acctcaattttgctcaaaaacggcattgaactacgcttttcgtacaaaaccgctgaataagaaaaaagtccagaaacccgcatggcttctggactttttcattactttttatcttccgggtcgttcccgcctcgtataaacatcgcatcgccaaaagagaagaatctataacgttcctccacagccaccttataagcttccatggtcttttcgtagccatacagggccgacaccagcatgataagggtgctttccggcag

SEQ ID NO: 26837 - DNA, 109 bp, Unknown; identical to SEQ ID NO: 26740
  Description of Unknown: RightRegion for integrase B838 sequence

SEQ ID NO: 26838 - DNA, 260 bp, Unknown; identical to SEQ ID NO: 26747
  Description of Unknown: RightRegion for integrase B839 sequence

SEQ ID NO: 26839 - DNA, 260 bp, Unknown; identical to SEQ ID NO: 26781
  Description of Unknown: RightRegion for integrase B840 sequence

SEQ ID NO: 26840 - DNA, 109 bp, Unknown
  Description of Unknown: RightRegion for integrase B841 sequence
aaagaacctatcagaagccccgcgtcgcgcgcaagggtcgacggagagcaggaaacgtaaataatacgctcgggcaaagacgacaaaattgcggcgatgaccgagctat

SEQ ID NO: 26841 - DNA, 260 bp, Unknown; identical to SEQ ID NO: 26747
  Description of Unknown: RightRegion for integrase B842 sequence

SEQ ID NO: 26842 - DNA, 260 bp, Unknown; identical to SEQ ID NO: 26783
  Description of Unknown: RightRegion for integrase B843 sequence

SEQ ID NO: 26843 - DNA, 195 bp, Unknown
  Description of Unknown: RightRegion for integrase B844 sequence
acctcgattttgctcaaaaacggcattgaactacgattttcgtacaaaaccgcagaataaggaaaaagtccagaaacccgcatagcttctggactttttcattactttttatcttccgggtcgttcccgcctcgtataaacatcgcatcaccgaaactgaagaagcggtatttctcttccacggccaccttgtag

SEQ ID NO: 26844 - DNA, 260 bp, Unknown
  Description of Unknown: RightRegion for integrase B845 sequence
atcacattccgcaatggattgtctcacacgttcatctacagagaaaagccagaggtttaatcgcccctggctttcttcatatctccatattccgttgtatcgctattttgtagtgaatcgctctacaaaatcatcattgcatcccccatgtagagggcgtgccttcatttcactacttatgtaccgctactttgtagcttcttcttcctattataataaccgactttgcgccagttggcaagtcagtagtttacttttct

SEQ ID NO: 26845 - DNA, 109 bp, Unknown
  Description of Unknown: RightRegion for integrase B846 sequence
ttccgcaatggacttgcacatactttcttctacaaagacacagaaaaaccggaggcataaaacctccggtttctttcatcttttctagttacaaatgtacgatttgggt

SEQ ID NO: 26846 - DNA, 109 bp, Unknown
  Description of Unknown: RightRegion for integrase B847 sequence
atcacattccgcaacggattatctcacacattcatttacaaagaaaagccagaggtttaattgcccctggctttcttcatatctccatattctgttgtatcgctatttt

SEQ ID NO: 26847 - DNA, 149 bp, Unknown
  Description of Unknown: RightRegion for integrase B848 sequence
atcacattccgcaatggattgtctcacacgttcatctacagagaaaagccagaggtttaatcgcccctggctttcttcatatctccatattccgttgtatcgctattttgtagtgaatcgctctacaaaatcatcatcgcatccccaaa

SEQ ID NO: 26848 - DNA, 109 bp, Unknown
  Description of Unknown: RightRegion for integrase B849 sequence
atcacgttccgcaacggattgtctcacacgttcatctacaaagaaaagccagaggtttaatcgcccctggctttcttcatatctccatattccgttgtatcgctatttt

SEQ ID NO: 26849 - DNA, 260 bp, Unknown
  Description of Unknown: RightRegion for integrase B850 sequence
ttccgcaatggacttgcacatactttcttctacaaagacacagaaaaaccggaggcataaaacctccggtttctttcatcttttctagttacaaatgtacgatttgggtatcattctataaacatcgcatccccaaagctgaagaatcgatatctctctttaactgcttcttcatatgccgcaagcacatgctctcttccggcaagcgcacttaccagcatgatcagcgttgactccggtaaatggaagttcgtgatcag

SEQ ID NO: 26850 - DNA, 260 bp, Unknown
  Description of Unknown: RightRegion for integrase B851 sequence
atcacattccgcaatggattatctcacacgttcatttacaaagaaaagccagaggtttaatctcccctggctttcttcatatctccgtattctgttgtatcgctattttgtagtgaatcactctacaaaatcatcattgcatcccccatgtagagggcgtgccttcatttcactacttatgtaccgctactttgtagctccttcttcctattataataaccgactttacgccagttggcaagtcagtagtttacttttct

SEQ ID NO: 26851 - DNA, 260 bp, Unknown
  Description of Unknown: RightRegion for integrase B852 sequence
attacattccgcaacggattatctcatacgttcatctacaaagaaaagccagaggtttaatcacccctggctttcttcatatctccataatctgttgtatcgctattttgtagtgaatcactctacaaaatcatcatcgcatctccgaagctgaaaaaacgataccgttctttcactgcctcttcataggctgccatgacatgctcttttcccgccagtgcagataccagcatgatcagtgtagattccggcagatggaa

SEQ ID NO: 26852 - DNA, 260 bp, Unknown
  Description of Unknown: RightRegion for integrase B853 sequence
cacgccacggctccttccggacgttttccttccaccaatatgcttatcgttttgcattaatcttttaatgtttccaaaattttgttatgtttgcagaaaagatctatatgagaaagtatttcgaaatagactcaaaagagtttcctcccaaacttgtggatctggcttatgaagaggcgagggccgcactcaggaacgacttcgatgccatagccaagacccagcagcaggttcagacttttttgggatggtatctggct

SEQ ID NO: 26853 - DNA, 260 bp, Unknown
  Description of Unknown: RightRegion for integrase B854 sequence
ccgcggcacctttacgggcatgagacggaaattcgctatgattatcgcttagttatctaagtaaataaggggagcaggggcaaaatcaagtttaaaacagttctgattattcagacaacatggcagagaaaaatctctgtttttttgcgttttaggtagaattttcagacctaatatgctataattgttaaaaatatacaagtaaaaggggaggcactatgaaagacacaggagaagaaactaagaagtgtaaatactgt

SEQ ID NO: 26854 - DNA, 260 bp, Unknown
  Description of Unknown: RightRegion for integrase B855 sequence
ccgcggcacctttacgggcatgagacggaaattcgctatgattatcgcttagttatctaagtaaataaggggagcaggggcaaaatcaagtttaaaacagttctgattattcagacaacatggcagagaaaaatctctgtttttttgcgttttaggtagaattttcagacctaatatgctataattgttaaaaatgtacaagtaaaaggagaggcactatgaaagacacaggagaagaaactaagaagtgtaaatactgt

SEQ ID NO: 26855 - DNA, 109 bp, Unknown
  Description of Unknown: RightRegion for integrase B856 sequence
ttccgcaacgggcttgcacatactttttactacaaagacgcagaaaagccggaggcataaaacctccggttttctgttcttctatggttacaaatgtacgatttaggta

SEQ ID NO: 26856 - DNA, 109 bp, Unknown; identical to SEQ ID NO: 26848
  Description of Unknown: RightRegion for integrase B857 sequence

SEQ ID NO: 26857 - DNA, 260 bp, Unknown
  Description of Unknown: RightRegion for integrase B858 sequence
ccgcggcacctttacgggcatgagaccgaaattcgctatgattatcgcttagttatctaagtaaacaaggggagcaggggcaaaatcaagtttaaaacagttctgattattcagacaatggggcagagaaaaatctctgctttttttgcgtttaaaagtatgttttttaggggcgatgtgctataatgtatttagaaaatataagggggattattatggttgtattaattagtttgttaggatgcttgtcggtgatctgt

SEQ ID NO: 26858 - DNA, 109 bp, Unknown
  Description of Unknown: RightRegion for integrase B859 sequence
atcacattccgcaatggattatctcacacgttcatttacaaagaaaagccagaggtttaatcgcccctggctttcttcatatctccgtattctgttgtatcgctatttt

SEQ ID NO: 26859 - DNA, 260 bp, Unknown
  Description of Unknown: RightRegion for integrase B860 sequence
atcacattccgcaacggattatctcacacattcatttacaaagaaaagccagaggtttaattgcccctggctttcttcatatctccatattctgttgtatcgctattttgtagtgaatcgctctacaaaatcatcatggcatcaccaaagctgaaaaacctgtatctttcctctacagcctctttgtatgcattaaggacatgctctctgcctgctaatgctgacacaagcatgacaagtgtagactgtggcagatggaa

SEQ ID NO: 26860 - DNA, 109 bp, Unknown; identical to SEQ ID NO: 26848
  Description of Unknown: RightRegion for integrase B861 sequence

SEQ ID NO: 26861 - DNA, 260 bp, Unknown
  Description of Unknown: RightRegion for integrase B862 sequence
acctctgttttgttcaaaaatggtatagagctgcgattttgctacaaggcgcagcaataaaaaaacagcccagaaaaccgcatggcttctgggcttttctaatatttttgaatgttgttttacttcacgcttcggatgaacatcgcgtcgccgaaggaaaagaagcggtacttttcctctacggcaactttataggcagccatggtcttttcgtagccgtagagggcagagaccagcatgatgagggtgctttccggcag

SEQ ID NO: 26862 - DNA, 260 bp, Unknown; identical to SEQ ID NO: 26849
  Description of Unknown: RightRegion for integrase B863 sequence

SEQ ID NO: 26863 - DNA, 260 bp, Unknown
  Description of Unknown: RightRegion for integrase B864 sequence
cgcatcacagaaattacattccaaaatggacttacacacaagttcttgtaccgtgaataaatccataaatcaaaaaagaacacaagcttacttttacagttggcctgtgttctttttcattgtccgaattcgaaaagtgcagtgtttatgcgggtttaagccgtctcgagttcaggaaacatctgacagccaaaggtcaccgtgcacgcagtcagcggacgtcccagttcttctgctttctgtttcaggatggcacgggc

SEQ ID NO: 26864 - DNA, 260 bp, Unknown
  Description of Unknown: RightRegion for integrase B865 sequence
acctctgttttgttcaaaaatggtatagagctgcgattttgctacaaggcgcagcaataaaaaacagcccagaaaaccgcatggcttctgggcttttctaatatttttgaatgttgttttacttcacgcttcggatgaacatcgcgtcgccaaaactgaaaaagcggtacttctgttccacagcaaccttgtatgcagccatggtcttttcgtagccgtagagcgccgatatcagcatgatgagggtgctttcgggcagg

SEQ ID NO: 26865 - DNA, 109 bp, Unknown; identical to SEQ ID NO: 26858
  Description of Unknown: RightRegion for integrase B866 sequence

SEQ ID NO: 26866 - DNA, 260 bp, Unknown
  Description of Unknown: RightRegion for integrase B867 sequence
atcacattccgcaatggattgtctcacacgttcatctacagagaaaagccagaggtttaatcgcccctggctttcttcatatctccatattccgttgtatcgctattttgtagtgaatcgctctacaaaatcatcattgcatccccaaagctgaaaaacctgtatttttcctctacagcctctttgtatgcattgagtacatgctctctgcctgctaatgctgacacaagcatgacaagtgtagactgtggcagatggaa

SEQ ID NO: 26867 - DNA, 260 bp, Unknown; identical to SEQ ID NO: 26854
  Description of Unknown: RightRegion for integrase B868 sequence

SEQ ID NO: 26868 - DNA, 109 bp, Unknown
  Description of Unknown: RightRegion for integrase B869 sequence
ttccgcaatggacttgcgcacactttcttctacaaaggcgaagaaaaaccggaggcataaaacctccggtttctttcatcttttcttgttacaaatgtacgatttgggt

SEQ ID NO: 26869 - DNA, 260 bp, Unknown
  Description of Unknown: RightRegion for integrase B870 sequence
atcacattccgcaatggattgtctcacacgttcatctacagagaaaagccagaggtttaatcgcccctggctttcttcatatctccatattccgttgtatcgctattttgtagtgaatcgctctacaaaatcatcattgcatcccctatgtgtcgggttcgctttaatatctttcttttataagcatatttatcattttaccataggctgtcaagattaacaatcgttacatcataggtcattggaactatttgcactgt

SEQ ID NO: 26870 - DNA, 260 bp, Unknown
  Description of Unknown: RightRegion for integrase B871 sequence
atcacattccgcaatggattatctcacacgttcatttacaaagaaaagccagaggtttaatcgcccctggctttcttcacatctccgtattctgttgtatcgctattttgtagtgaatcactctacaaaatcatcattgcatcccgtatgattacgggtgtaccaccatttctaacatttgttagatttttactggttctcagaatgctcatatgtattctctccagtcatcattacggttccttttgattcttcgatgc

SEQ ID NO: 26871 - DNA, 260 bp, Unknown
  Description of Unknown: RightRegion for integrase B872 sequence
ccgaggcacctttacgggcatgagaccgaaattcgctatgattatcgcttagttatctaagtaaacaaggggagcaggggcaaaatcaagtttaaaacagttctgattattcagacaatggggcagagaaaaatctctgctttttttgcgtttaaaagtatgttttttaggggcgatgtgctatgatgtatttagaaaatataagggggattattatggttgtattaattagtttgttaggctgcttgtcggtgatctgt

SEQ ID NO: 26872 - DNA, 109 bp, Unknown
  Description of Unknown: RightRegion for integrase B873 sequence
atcacatttcgcaacggattatctcatacgttcatctacaaagaaaagccagaggtttaattgcccctggctttctctatatctccatattctgctgtatcgctatttt

SEQ ID NO: 26873 - DNA, 109 bp, Unknown; identical to SEQ ID NO: 26846
  Description of Unknown: RightRegion for integrase B874 sequence

SEQ ID NO: 26874 - DNA, 109 bp, Unknown; identical to SEQ ID NO: 26848
  Description of Unknown: RightRegion for integrase B875 sequence

SEQ ID NO: 26875 - DNA, 260 bp, Unknown
  Description of Unknown: RightRegion for integrase B876 sequence
atcacattccgcaacggattatctcacacattcatttacaaagaaaagccagaggtttaattgcccctggctttcttcatatctccatattctgttgtatcgctattttgtagtgaatcactctacaaaatcatcatggcatccccaaaactaaaaaacctgtaccgttcctgtactgccacttcatatgcatgcatgattttttctttccctgccagcgcagataccagcatcagtaacgtggactccggcagatggaa

SEQ ID NO: 26876 - DNA, 109 bp, Unknown
  Description of Unknown: RightRegion for integrase B877 sequence
atcgcattccgcaatggattatctcacacgttcatttacaaagaaaagccagaggtttaatcgcccctggctttcttcatatctccgtattctgttgtatcgctatttt

SEQ ID NO: 26877 - DNA, 260 bp, Unknown; identical to SEQ ID NO: 26541
  Description of Unknown: RightRegion for integrase B878 sequence

SEQ ID NO: 26878 - DNA, 260 bp, Unknown
  Description of Unknown: RightRegion for integrase B879 sequence
atcacattccgcaacggattatctcacacattcatttacaaagaaaagccagaggtttaattgcccctggctttcttcatatctccatattctgttgtatcgctattttgtagtgaatcgctctacaaaatcatcatggcatctccgaaggagaagaaacgatagcgttcttttacagcttcttcgtacgcagccataatgtactccttgccagccagtgcagacacaagcataagaagcgttgattccggaagatggaa

SEQ ID NO: 26879 - DNA, 260 bp, Unknown
  Description of Unknown: RightRegion for integrase B880 sequence
cgcatcacagaaattacatttcaaaatggacttacacacaagttcctgtaccgtgaataaattcataaatcaaaaaagaacacaagcttacttttacagttggcctgtgttctttttcattgtccgaattcgaaaagtgcagtgtttatgcgggtttaagccgtctcgagttcaggaaacatctgacagccaaaggtcaccgtgcacgcagtcagcggacgtcccagttcttctgctttctgtttcaggatggcacgggc

SEQ ID NO: 26880 - DNA, 260 bp, Unknown; identical to SEQ ID NO: 26851
  Description of Unknown: RightRegion for integrase B881 sequence

SEQ ID NO: 26881 - DNA, 109 bp, Unknown
  Description of Unknown: RightRegion for integrase B882 sequence
atcacattccgcaatggattatctcacacgttcatttacaaagaaaagccagaggtttaatcgcccctggctttcttcatatctccatattccgttgtatcgctatttt

SEQ ID NO: 26882 - DNA, 260 bp, Unknown
  Description of Unknown: RightRegion for integrase B883 sequence
ccgcggcacctttacgggcatgagaccgaaattcgctatgattatcgcttggttatctaagtaaacaaggggagcaggggcaaaatcaagtttaaaacagttctgattattcagacaattgggcagagaaaaatctctgctttttttgcgtttaaaagtatgttttttaggggcgatgtgctatgatgtatttagaaaatataagggggattattatggttgtattaattagtttgttaggatgcttgtcggtgatctgt

SEQ ID NO: 26883 - DNA, 260 bp, Unknown
  Description of Unknown: RightRegion for integrase B884 sequence
atcacattccgcaatggattatctcacacgttcatttacaaagaaaagccagaggtttaatcgcccctggctttcttcatatctccgtattctgttgtatcgctattttgtagtgaatcactctacaaaatcatcattgcatcgccgaaggagaaaaagcggtatttttctcttacagcctcttcataagctgccataatatgctcttttccagccagtgccgataccagcatcaccagtgtggactccggcagatggaa

SEQ ID NO: 26884 - DNA, 143 bp, Unknown
  Description of Unknown: RightRegion for integrase B885 sequence
atcacattccgcaatggattatctcacacgttcatttacaaagaaaagccagaggtttaatcgcccctggctttcttcatatctccgtattctgttgtatcgctattttgtagtgaatcactctacaaaatcatcattgcatc

SEQ ID NO: 26885 - DNA, 260 bp, Unknown
  Description of Unknown: RightRegion for integrase B886 sequence
ttacgcagctttccgggacacaaagagcccgtaaaatacacatatttctttgctttttgattaattactaaagagtaaattttaaggagcgaaaccgcagtaataatgattgaggaacgaagcatgaaagcattaggagatagtcataccgcatatgatgtaatgagagaatacatgattataggagcagaactggacggaaaatatcagataccgatgttagatagatatacagggcatccgggagaagatacggttga

SEQ ID NO: 26886 - DNA, 260 bp, Unknown
  Description of Unknown: RightRegion for integrase B887 sequence
atcacattccgcaacggattatctcacacattcatttacaaagaaaagccagaggtttaattgcccctggctttcttcatatctccatattctgttgtatcgctattttgtagtgaatcgctctacaaaatcatcatggcatccccgaacctttaggaatgtagtcgaaatgttacatttgtcagtatatcatatatataggaagtaatccagttctttttttctgtactattcctcataaataaatccgttgtctgtaa

SEQ ID NO: 26887 - DNA, 109 bp, Unknown; identical to SEQ ID NO: 26845
  Description of Unknown: RightRegion for integrase B888 sequence

SEQ ID NO: 26888 - DNA, 260 bp, Unknown
  Description of Unknown: RightRegion for integrase B889 sequence
ttacgtagctttccggggcacaaagagcccgtaaaatacacatatttctttgctttttgattaattactaaagagtaaattttaaggagcgaaaccgcagtaataatgattgaggaacgaagcatgaaagcattaggagatagtcataccgcatatgatgtaatgagagaatacatgattataggagcagaactggacggaaaatatcagataccgatgttagatagatacacagggcatccgggagaagatacggttga

SEQ ID NO: 26889 - DNA, 260 bp, Unknown
  Description of Unknown: RightRegion for integrase B890 sequence
ttacgcagctttccgggacacaaagagcccgtaaaatacacatatttctttgctttttgattaattactaaagagtaaatttcaaggagcgaaaccgcagtaataatgattgaggaacgaagcatgaaagcattaggagatagtcataccgcatatgatgtaatgagagaatacatgattataggagcagaactggacggaaaatatcagataccgatgttagatagatacacagggcatccgggagaagatacggttga

SEQ ID NO: 26890 - DNA, 109 bp, Unknown
  Description of Unknown: RightRegion for integrase B891 sequence
atcacattccgcaatggattgtctcacacgttcatctacaaagaaaagccagaggtttaatcgcccctggctttcttcatatctccatattccgttgtatcgctatttt

SEQ ID NO: 26891 - DNA, 260 bp, Unknown
  Description of Unknown: RightRegion for integrase B892 sequence
atcacattccgcaatggattatctcacacgttcatttacaaagaaaagccagaggtttaatcgtccctggctttcttcatatctccgtattctgttgtatcgctattttgtagtgaatcactctacaaaatcatcattgcatcaccaaaactgaagaatctgtatctttcttttacagcttcttcatatgccgcaagaacatgctcccttcctgccagtgccgataccagcattaccagagttgattccggcagatggaa

SEQ ID NO: 26892 - DNA, 109 bp, Unknown
  Description of Unknown: RightRegion for integrase B893 sequence
atcacattccgcaatggattgtctcacacgttcatctacagagaaaagccagaggtttaatcgcccctggctttcttcatatctccatattccgttgtatcgctatttt

SEQ ID NO: 26893 - DNA, 109 bp, Unknown; identical to SEQ ID NO: 26848
  Description of Unknown: RightRegion for integrase B894 sequence

SEQ ID NO: 26894 - DNA, 260 bp, Unknown
  Description of Unknown: RightRegion for integrase B895 sequence
gcggcctgtaactgctggaattgctcaaaggatacattgaactcaacctccagcgtgtagtcacgatagacatggatggacttgatgaactgcgatacgatcattttcttagccgcgaagttgcagttatcataaaggtctgcccatgttttcagcttgtcatattcctgctgttctgtctccatgtctgcggtacggctctcaagttcctgccgtgccgcttccgctgtctgtggcagagcttctacgtcggtctgcgt

SEQ ID NO: 26895 - DNA, 260 bp, Unknown
  Description of Unknown: RightRegion for integrase B896 sequence
atgaatttctccatcttggctgccgcgttttgcgacatatggttgctgacgtgtccgtaggtgtcgagcgtgaaggcgacggttgcatgtccgagtgacaaggaaagcgtcttgaagtcaatttcgctttgaatagcgagggtggcgtaggtgtggtgaatgtcgtggaagcgaacctccggacggttgagcctgctgaccagtgccttgaagtggacatacagcgtcttgaaacggatgaacatgccgttgtcacaagt

SEQ ID NO: 26896 - DNA, 260 bp, Unknown
  Description of Unknown: RightRegion for integrase B897 sequence
atcacattccgcaatggattgtctcacacgttcatctacagagaaaagccagaggtttaatcgcccctggctttcttcatatctccatattccgttgtatcgctattttgtagtgaatcgctctacaaaatcatcatcgcatccccaaaactgaagaaacgatatctttcttttactgcctcctcatacgctgccatcacatgctcttttccggctaatgcagaaacaagcatgatcagtgtagattccggcagatggaa

SEQ ID NO: 26897 - DNA, 260 bp, Unknown
  Description of Unknown: RightRegion for integrase B898 sequence
caaacgatcgtctttcggaacggactatgccatacgttcacttataaaaataattcttgatacaaaaatacccaggagcatttaaactcctgggttacttttatcccaacatttacattttcggattttgggataatttgcttttattcattctcccggtactcataagtatctgcaccagtcatcatgacgattccttttgattcttcaatacactcctcatcgtccagtgtgccgtaggttgctactgccggtgtact

SEQ ID NO: 26898 - DNA, 260 bp, Unknown
  Description of Unknown: RightRegion for integrase B899 sequence
ccgcggcacctttacgggcatgagacggaaattcgctatgattatcgcttagttatctaagtaaacaaggggagcaggggcaaaatcaagtttaaaacagttctgattattcagacaatgggacagagaaaaatttctgcttttttgcgtttaaaagtatgttttttaggggcgatgtgctatgatgtatttagaaaatataagggggatattattatggttgtattaattggtttgttagtattcttgtcggtgatctg

SEQ ID NO: 26899 - DNA, 109 bp, Unknown; identical to SEQ ID NO: 26858
  Description of Unknown: RightRegion for integrase B900 sequence

SEQ ID NO: 26900 - DNA, 260 bp, Unknown
  Description of Unknown: RightRegion for integrase B901 sequence
tcttttaccatctggccgccgatagagcctgcctgctttgcagtgagctcgccgttatagccattggagttcagcggaacgcctacctcgctggctgcctgcatcttcatggaattgagtgcgctcttggtctgcttattagaagccataatcttgttctcctttaataaaaccttttttattatacggaacttccgctccgtatcttttacaggagcggaagcgttttcacttcgcccttgcagttatattattttcac

SEQ ID NO: 26901 - DNA, 260 bp, Unknown
  Description of Unknown: RightRegion for integrase B902 sequence
attacattccgcaacggattatctcatacgttcatctacaaagaaaagccagaggtttaatcacccctggctttcttcatatctccataatctgttgtatcgctattttgtagtgaatcactctacaaaatcatcatcgcatcaccaaaactgaagaatctgtatctttcttttacagcttcttcatatgccgcaagaacatgctcccttcctgccagtgccgataccagcattaccagagttgattccggcagatggaa

SEQ ID NO: 26902 - DNA, 260 bp, Unknown
  Description of Unknown: RightRegion for integrase B903 sequence
atcacgttccgcaacggattgtctcacacgttcatctacaaagaaaagccagaggtttaatcgcccctggctttcttcatatctccatattccgttgtatcgctattttgtagtgaatcgttctacaaaatcatcatcgcatcccccatgtagagggtgtgccttcatttcactacttatgtaccgctactttgtagctccttcttcctattataataaccgactttacgccagttggcaagtcagtagtttacttttct

SEQ ID NO: 26903 - DNA, 174 bp, Unknown
  Description of Unknown: RightRegion for integrase B904 sequence
ttccgcaatggacttgcacatactttcttctacaaggacgcagaaaaaccggaggcataaaacctccggtttctttcatctttttcagttacaaatgtacgatttgggtatcattctataaacatcgcatcaccaaaactgaagaatctgtatctttcttttacagcttcttca

SEQ ID NO: 26904 - DNA, 260 bp, Unknown
  Description of Unknown: RightRegion for integrase B905 sequence
ccgaggcacctttacgggcatgagacgggaattcgctatgattatcgcttagttatctaagtaaataaggggagcaggggcaaaatcaagtttaaaacagttctgattattcagacaacatggcagagaaaaatctctgtttttttgcgttttaggtagaattttcagacctaatatgctacaattgttaaaaatgtacaagtaaaaggagaggcactatgaaagacacaggagaagaaactaagaagtgtaaatactgt

SEQ ID NO: 26905 - DNA, 109 bp, Unknown
  Description of Unknown: RightRegion for integrase B906 sequence
attacattccgcaacggattatctcatacgttcatctacaaagaaaagccagaggtttaatcacccctggctttcttcatatctccataatctgttgtatcgctatttt

SEQ ID NO: 26906 - DNA, 109 bp, Unknown; identical to SEQ ID NO: 26892
  Description of Unknown: RightRegion for integrase B907 sequence

SEQ ID NO: 26907 - DNA, 109 bp, Unknown
  Description of Unknown: RightRegion for integrase B908 sequence
ttccgcaatggacttgcacatactttcttctacaaaggcacagaaaaaccggaggcataaaacctccggtttctttcatcttttctagttacaaatgtacgatttgggt

SEQ ID NO: 26908 - DNA, 109 bp, Unknown
  Description of Unknown: RightRegion for integrase B909 sequence
acctctgttttgttcaaaaatggtatagagctgcgattttgctacaaggcgcagcaataaaaaaatagcccagaaaaccgcatggcttctgggcttttctaatattttt

SEQ ID NO: 26909 - DNA, 260 bp, Unknown
  Description of Unknown: RightRegion for integrase B910 sequence
atcacattccgcaacggattatctcacacattcatttacaaagaaaagccagaggtttaattgcccctggctttcttcatatctccatattctgttgtatcgctattttgtagtgaatcgctctacaaaatcatcatggcatcaccaaagctgaaaaacctgtatctttcctctacagcctctttgtatgcattgaggacatgctctctgcctgctaatgctgacacaagcatgacaagtgtagactgtggcagatggaa

SEQ ID NO: 26910 - DNA, 142 bp, Unknown
  Description of Unknown: RightRegion for integrase B911 sequence
atcacattccgcaacggattatctcacacattcatttacaaagaaaagccagaggtttaattgcccctggctttcttcatatctccatattctgttgtatcgctattttgtagtgaatcgctctacaaaatcatcatggcat

SEQ ID NO: 26911 - DNA, 260 bp, Unknown
  Description of Unknown: RightRegion for integrase B912 sequence
ttccgaaatggacttgctcacactttcttctacaaagacgaagaaaaaccggaggcataaaacctccggtttctttcatcttttctggttacaaatgtacgatttgggtatcattctataaacatcgcatctccaaaggaaaagaaacgatatttttcctttaccgcttcttcataagcatgcataatattttctttccctgccagtgcagaaaccagcatcagtaaggtagattccggaagatggaaatttgtaatcag

SEQ ID NO: 26912 - DNA, 260 bp, Unknown
  Description of Unknown: RightRegion for integrase B913 sequence
ccgaggcacctttacgggcatgagacggaaattcgctatgattatcgcttagttatctaagtaaataaggggagcaggggcaaaatcaagtttaaaacagttctgattattcagacaacatggcagagaaaaatctctgtttttttgcgttttaggtagaattttcagacctaatatgctacaattgttaaaaatgtacaagtaaaaggagaggcactatgaaagacacaggagaagaaactaagaagtgtaaatactgt

SEQ ID NO: 26913 - DNA, 260 bp, Unknown
  Description of Unknown: RightRegion for integrase B914 sequence
atcacgttccgcaacggattgtctcacacgttcatctacaaagaaaagccagaggtttaatcgcccctggctttcttcatatctccatattccgttgtatcgctattttgtagtgaatcgttctacaaaatcatcatcgcatcccccatgtagagggcgtgccttcatttcactacttatgtaccgctactttgtagctccttcttcctattataatagccgactttgcgccagttggcaagtcagtagtttacttttct

SEQ ID NO: 26914 - DNA, 260 bp, Unknown
  Description of Unknown: RightRegion for integrase B915 sequence
ggataccagatcaacatctcgttcaacttcgaccttactccgtacatcgagggagagtgatacgttcgcctgcaaaacagtcgggcatcgaaccagtattttcaaaaacaaccaaacagcaagaattgggggttgccgtccatgcgcctgcaaaatcaggcatttggctgattctcgatgcaacctctaagaaagcaaaaagaaaagcaccatacttcaaacgaagtacagtgcttttttggtggagctatcaggagtca

SEQ ID NO: 26915 - DNA, 260 bp, Unknown
  Description of Unknown: RightRegion for integrase B916 sequence
ttacgcagctttccgggacacaaagagcccgtaaaatacacatatttctttgctttttgattaattactaaagagtaaattttaaggagcgaaaccgcagtaataatgattgaggaacgaagcatgaaagcattaggagatagtcataccgcatatgatgtaatgagagaatacatgattataggagcagaactggacggaaaatatcagataccgatgttagatagatacacagggcatccgggagaagatacggttga

SEQ ID NO: 26916 - DNA, 260 bp, Unknown
  Description of Unknown: RightRegion for integrase B917 sequence
atcacattccgcaacggattatctcatacgttcatctacaaagaaaagccagaggtttaatcacccctggctttcttcatatctccataatctgttgtatcgctattttgtagtgaatcactctacaaaatcatcatcgcatcccgtatgattacgggtgtaccaccatttctaacatttgttagatttttactggttctcagaatgctcatatgtattctctccagtcatcattacggttccttttgattcttcgatgc

SEQ ID NO: 26917 - DNA, 260 bp, Unknown
  Description of Unknown: RightRegion for integrase B918 sequence
atcacattccgcaatggattatctcacacgttcatttacaaagaaaagccagaggtttaatctcccctggctttcttcatatctccgtattctgttgtatcgctattttgtagtgaatcactctacaaaatcatcattgcatctggtatcttaatcaacttccgtccatacagattatccccaaatacatatgccatataaatatttctaaaaatcccttctgcttgttcattgtggtaattcaagcattgaaaattcct

SEQ ID NO: 26918 - DNA, 109 bp, Unknown; identical to SEQ ID NO: 26846
  Description of Unknown: RightRegion for integrase B919 sequence

SEQ ID NO: 26919 - DNA, 109 bp, Unknown
  Description of Unknown: RightRegion for integrase B920 sequence
atcacgttccgcaacggattgtctcacacgttcatctacaaagaaaagccagaggtttaatcgcccctggctttcttcatatctccatattctgttgtatcgctatttt

SEQ ID NO: 26920 - DNA, 260 bp, Unknown
  Description of Unknown: RightRegion for integrase B921 sequence
gctatgaacattatgccgaaaagttcggcacacgtcactttgcgctgtcaagacgaatgatgcacgattttgcaaagaatggcaaaaagaagcgccgtatcgtttaacacgatacggcgctttatggactcgaagggagtcgaaccctcgacctttcggatgcgaaccgaacgctctcccaactgagctacgagcccatatttaagcccccaaaaaccgcttgggggcgcgtggtatataactccagattgtttaaggac

SEQ ID NO: 26921 - DNA, 260 bp, Unknown
  Description of Unknown: RightRegion for integrase B922 sequence
atcacattccgcaatggattgtctcacacgttcatctacaaagaaaagccagaggtttaatcgcccctggctttcttcatatctccatattccgttgtatcgctattttgtagtgaattgctctacacaatcatcatagcatccccaaagctaaaaaatctgtaccgttcctgtactgccacttcatatgcatgcatgattttttctttccctgccagcgcggacacaagcatcagtaatgtggactccggcagatggaa

SEQ ID NO: 26922 - DNA, 260 bp, Unknown
  Description of Unknown: RightRegion for integrase B923 sequence
atcacattccgcaatggattgtctcacacgttcatctacagagaaaagccagaggtttaatcgcccctggctttcttcatatctccatattccgttgtatcgctattttgtagtgaatcgctctacaaaatcatcattgcatctccgaaagaaaagaaacgatatctttcctgtactgcttcttcatatgctgccaatacgtgttctcttcctgccagtgctgatactaacataatcagtgttgactccggcagatggaa

SEQ ID NO: 26923 - DNA, 260 bp, Unknown; identical to SEQ ID NO: 26853
  Description of Unknown: RightRegion for integrase B924 sequence

SEQ ID NO: 26924 - DNA, 260 bp, Unknown
  Description of Unknown: RightRegion for integrase B925 sequence
atcacattccgcaacggattatctcacacattcatttacaaagaaaagccagaggtttaattgcccctggctttcttcatatctccatattctgttgtatcgctattttgtagtgaatcactctacaaaatcatcatggcatcaccaaagctgaaaaacctgtatctttcccctacagcctctttgtatgcattgaggacatgctctctgcctgctaatgctgacacaagcatgacaagtgtagactgtggcagatggaa

SEQ ID NO: 26925 - DNA, 260 bp, Unknown
  Description of Unknown: RightRegion for integrase B926 sequence
ttacgcagctttccgggacacaaagagcccgtaaaatacacatatttctttgctttttgattaattactaaagagtaaattttaaggagcgaaaccgcagtgataatgattgaggaacgaagcatgaaagcattaggagatagtcataccgcatatgatgtaatgagagaatacatgattataggagcagaactggacggaaaatatcagataccgatgttagatagatacacaggacatccgggagaagatacggttga

SEQ ID NO: 26926 - DNA, 260 bp, Unknown
  Description of Unknown: RightRegion for integrase B927 sequence
atcacattccgcaatggattgtctcacacgttcatctacaaagaaaagccagaggtttaatcgcccctggctttcttcatatctccatattccgttgtatcgctattttgtagtgaattgctctacaaaatcatcatggcatcccccatgtagagggcgtgccttcatttcactacttatgtaccgctactttgtagctccttcttcctattatagtaaccgactttgcgccagttggcaagtcagtagtttacttttct

SEQ ID NO: 26927 - DNA, 109 bp, Unknown
  Description of Unknown: RightRegion for integrase B928 sequence
tttaaaaacggactttcgcatatatttttttacaaagacaaaaaagaaccaggggcctaaagcccccggttttacttgattcttttgattacaaatgtacgatttgggt

SEQ ID NO: 26928 - DNA, 260 bp, Unknown
  Description of Unknown: RightRegion for integrase B929 sequence
atcacattccgcaacggattgtctcacacattcatctacaaagaaaagccagaggtttaatcgcccctggctttcttcatatctccacattctgttgtatcgctattttgtagtgaatcgctctacaaaatcatcatcgcatccccaaatgagaaaaagcgatatctttcttttactgcttcttcgtaagccgccatcacatgttcttttccggcaagtgcggacactaacataatcaatgttgattccggcagatggaa

SEQ ID NO: 26929 - DNA, 260 bp, Unknown
  Description of Unknown: RightRegion for integrase B930 sequence
gtgggaaaaaggtccactggacctttttctgattccacctcaccccatcttccgcgttaaaagagatgggctgcagagaaaacagcttgcccatataggataagtttggtaaaatataggtactatgggaaaagcgatatcttcaaaatttcataggatgcgtgcggaagatctgaagcgacaggtggaactcagtaaaagaaaagccgaatttaaaattccaccatttgttgtgaagcagtttgacattgacgagttgc

SEQ ID NO: 26930 - DNA, 260 bp, Unknown
  Description of Unknown: RightRegion for integrase B931 sequence
ttacgcagctttccgggacacaaagagcccgtaaaatacacatatttctttgctttttaattaattactaaagagtaaattttaaggagcgaaaccgcagtaataatgattgaggaacgaagcatgaaagcattaggagatagtcataccgcatatgatgtaatgagagaatacatgattataggagcagaactggacggaaaatatcagataccgatgttagatagatacacagggcatccgggagaagatacggttga

SEQ ID NO: 26931 - DNA, 109 bp, Unknown
  Description of Unknown: RightRegion for integrase B932 sequence
tcttttaccatctggccgccgatagagcctgcctgctttgcagtgagctcgccgttatagccattggagttcagcggaacgcctacctcgctggctgcctgcatcttca

SEQ ID NO: 26932 - DNA, 260 bp, Unknown
  Description of Unknown: RightRegion for integrase B933 sequence
atcacattccgcaacggattatctcacacattcatttacaaagaaaagccagaggtttaattgcccctggctttctttatatctccatattctgttgtatcgctattttgtagtgaatcgctctacaaaatcatcatggcatcaccaaagctgaaaaacctatatctttcctctacagcctctttgtatgcattgaggacatgctctctgcctgctaatgctgacacaagcatgacaagtgtagactgtggcagatggaa

SEQ ID NO: 26933 - DNA, 260 bp, Unknown
  Description of Unknown: RightRegion for integrase B934 sequence
acctctgttttgttcaaaaatggtatagagctgcgattttgctacaaggcgcagcaataaaaaaatagcccagaaaaccgcatggcttctgggcttttctaatatttttgaatgttgttttacttcacgcttcggatgaacatcgcgtcgccaaagctgaagaaacgatatttctgctcgacagccaccttgtaggcggccatcgtcttttcgtagccatacagcgccgacaccagcatgatgagggtactttcgggcag

SEQ ID NO: 26934 - DNA, 260 bp, Unknown
  Description of Unknown: RightRegion for integrase B935 sequence
ccgaggcacctttacgggcatgagaccgaaattcgctatgattatcgcttagttatctaagtaaacaaggggagcaggggcaaaatcaagtttaaaacagttctgattattcagacaatggggcagagaaaaatatctgcttttttgtggcttttagtgaaaaattattataaattttagctcatttattgtaatcttgcaaccatcgtgatatattaaaaatataaaaataaaggaggcaatttctatgaaaaaaatga

SEQ ID NO: 26935 - DNA, 260 bp, Unknown
  Description of Unknown: RightRegion for integrase B936 sequence
attcgtaaaaatgagtggcatgacctcacggtagccgtgggtatccgcacaaaagcttgaccgtaaagtactgtgtcagttgtgccggatgtgtcagaattttcgagaaacctttattatatattatctattctcttttatcctatcgctttatctaagagaaaaaatagagtagaagggataaaaataaagaaatatatagagagtttcataaaaacctgacacatttgacacacccgacacaagacgaagcgtatctg

SEQ ID NO: 26936 - DNA, 260 bp, Unknown
  Description of Unknown: RightRegion for integrase B937 sequence
ttacgcagctttccgggacacaaagagcccgtaaaatacacatatttctttgctttttgattaattactaaagagtaaattttaaggagcgaaaccgcagtaataatgattgaggaacgaagcatgaaagcattaggagatagtcataccgcatatgatgtaatgagagaatacatgattataggagcagaactggacggaaaatatcagataccgatgttagatagatacacaggacatccgggagaagatacgattga

SEQ ID NO: 26937 - DNA, 109 bp, Unknown
  Description of Unknown: RightRegion for integrase B938 sequence
atcacattccgcaacggattatctcacacattcatttacaaagaaaagccagaggtttaattgcccctggctttctttatatctccatattctgttgtatcgctatttt

SEQ ID NO: 26938 - DNA, 260 bp, Unknown; identical to SEQ ID NO: 26909
  Description of Unknown: RightRegion for integrase B939 sequence

SEQ ID NO: 26939 - DNA, 260 bp, Unknown
  Description of Unknown: RightRegion for integrase B940 sequence
atcacgttccgcaacggattgtctcacacgttcatctacaaagaaaagccagaggtttaatcgcccctggctttcttcatatctccatattccgttgtatcgctattttgtagtgaatcgttctacaaaatcatcatcgcatccccaaaactaaaaaacctgtaccgttcctgtactgccacttcatatgcatgcatgattttttctttccctgccagcgcagataccagcatcagtaacgtggactccggcagatggaa

SEQ ID NO: 26940 - DNA, 260 bp, Unknown
  Description of Unknown: RightRegion for integrase B941 sequence
acctctgttttgctcaaaaatggtatagagctgcgattttgctacaaggcgcagcaataaaaaaatagcccagaaaaccgcatggcttctgggcttttctaatatttttgaatgttgttttacttcacgcttcggatgaacatcgcgtcaccaaaggaaaaaaagcggtatttttctgccacagcaacctcataggcgtgcatggtcttttcgtagccatacagagcggacaccagcatgatcagggtgctctccggcag

SEQ ID NO: 26941 - DNA, 260 bp, Unknown
  Description of Unknown: RightRegion for integrase B942 sequence
ttccgcaatggacttgcacatactttcttctacaaaggcacagaaaaaccggaggcataaaacctccggtttctttcatcttttctagttacaaatgtacgatttgggtatcattctataaacatcgcatccccaaagctgaagaatcgatatctctctttaactgcttcttcatatgccgcaagcacatgctctcttccggcaagcgcacttaccagcatgatcagcgttgactccggtaaatggaagttcgtgatcag

SEQ ID NO: 26942 - DNA, 260 bp, Unknown
  Description of Unknown: RightRegion for integrase B943 sequence
ttacgcagctttccgggacacaaagagcccgtaaaatacacatatttctttgctttttgattaattactaaagagtaaattttaaggagcgaaaccgcagtaataatgattgaggaacgaagcatgaaagcattaggagatagtcataccgcatatgatgtaatgagagaatacatgattataggagcagaactggacggaaaatatcagatgccgatgttagatagatatacagggcatccgggagaagatacggttga

SEQ ID NO: 26943 - DNA, 260 bp, Unknown
  Description of Unknown: RightRegion for integrase B944 sequence
cgcatcacggaaattatattccaaaatggacttacacacaaattcctgtaccgtgaataaatccataaatcaaaaagaacacaagcttacttttacagttggcctgtgttctttttcattgtccgaattcgaaaagtgcagtgtttatgcgggtttaagccgtctcgagttcaggaaacatctgacagccaaaggtcaccgtgcacgcagtcagcggacgtcccagttcttctgctttctgtttcaggatggcacgggct

SEQ ID NO: 26944 - DNA, 260 bp, Unknown
  Description of Unknown: RightRegion for integrase B945 sequence
atcacattccgcaatggattgtctcacacgttcatctacagagaaaagccagaggtttaatcgcccctggctttcttcatatctccatattccgttgtatcgctattttgtagtgaatcgctctacaaaatcatcattgcatcaccaaagctgaaaaacctgtatttttcctctacagcctctttgtatgcattgagtacatgctctctgcctgctaatgctgacacaagcatgacaagtgtagactgtggcagatggaa

SEQ ID NO: 26945 - DNA, 260 bp, Unknown
  Description of Unknown: RightRegion for integrase B946 sequence
ttacgcagctttccggggcacaaagaacccgtaaaatacacatatttctttgctttttgattaattactaaagagtaaattttaaggagcgaaaccgcagtaataatgattgaggaacgaagcatgaaagcattaggagatagtcataccgcatatgatgtaatgagagaatacatgattataggagcagaactggacggaaaatatcagataccgatgttagatagatacataggacatccgggagaagatacggttga

SEQ ID NO: 26946 - DNA, 109 bp, Unknown; identical to SEQ ID NO: 26931
  Description of Unknown: RightRegion for integrase B947 sequence

SEQ ID NO: 26947 - DNA, 260 bp, Unknown
  Description of Unknown: RightRegion for integrase B948 sequence
atcacattccgcaatggattgtctcacacgttcatctacaaagaaaagccagaggtttaatcgcccctggctttcttcatatctccatattccgttgtatcgctattttgtagtgaattgctctacaaaatcagcatcgcatcaccaaagctgaaaaacctgtatctttcctctacagcctctttgtatgcattgaggacatgctctctgcctgctaatgctgacacaagcatgacaagtgtagactgcggcagatggaa

SEQ ID NO: 26948 - DNA, 109 bp, Unknown; identical to SEQ ID NO: 26908
  Description of Unknown: RightRegion for integrase B949 sequence

SEQ ID NO: 26949 - DNA, 109 bp, Unknown; identical to SEQ ID NO: 26846
  Description of Unknown: RightRegion for integrase B950 sequence

SEQ ID NO: 26950 - DNA, 260 bp, Unknown
  Description of Unknown: RightRegion for integrase B951 sequence
atcacattccgcaatggattatctcacacgttcatttacaaagaaaagccagaggtttaatctcccctggctttcttcatatctccgtattctgttgtatcgctattttgtagtgaatcactctacaaaatcatcattgcatccccaaacgaaaagaaccgatacctctcctccaccgcttcctcataagccctcataatattctctttcccagccaaagccgagacgagcatcagcagtgtagattccggcagatggaa

SEQ ID NO: 26951 - DNA, 109 bp, Unknown; identical to SEQ ID NO: 26890
  Description of Unknown: RightRegion for integrase B952 sequence

SEQ ID NO: 26952 - DNA, 260 bp, Unknown
  Description of Unknown: RightRegion for integrase B953 sequence
ttacgcagctttccgggacacaaagagcccgtaaaatacacatatttctttgctttttgattaattactaaagagtaaattttaaggagcgaaaccgcagtaataatgattgaggaacgaagcatgaaagcattaggagatagccataccgcatatgatataatgagagaatacatgattataggagcagaactggacggcaaatatcagataccgatgttagacagatacacagggcatccgggagaagatacggttga

SEQ ID NO: 26953 - DNA, 260 bp, Unknown; identical to SEQ ID NO: 26885
  Description of Unknown: RightRegion for integrase B954 sequence

SEQ ID NO: 26954 - DNA, 260 bp, Unknown
  Description of Unknown: RightRegion for integrase B955 sequence
atcaggtctataaccttcaaaaacggcataattcacgagttcgtgtataaagacgactaaacagcaaaaagcccagaaaccgcttgatttctgggcttttcctgtgtttttgctcgcctgagctatgatgctattgaatgaacatcgcgtcaccaaagctgaaaaagcgatacctttcctcaacggctgtcctataagcattcatgatattatcataccctgcgaacgccgaaacaagcataataagggtgctttcggga

SEQ ID NO: 26955 - DNA, 260 bp, Unknown
  Description of Unknown: RightRegion for integrase B956 sequence
attacattccgcaacggattatctcatacgttcatctacaaagaaaagccagaggtttaatcacccctggctttcttcatatctccataatctgttgtatcgctattttgtagtgaatcactctacaaaatcatcatcgcatccccaaagctgaagaatcgatatctctctttaactgcttcttcatatgccgcaagcacatgctctcttccggcaagcgcacttaccagcatgatcagcgttgactccggtaaatggaa

SEQ ID NO: 26956 - DNA, 109 bp, Unknown; identical to SEQ ID NO: 26881
  Description of Unknown: RightRegion for integrase B957 sequence

SEQ ID NO: 26957 - DNA, 260 bp, Unknown
  Description of Unknown: RightRegion for integrase B958 sequence
ctggctacaccggaagtctccctctccgcagcggcgataggtcccctggaagggatctaagcccagataaacaggccgcagctgttccggcgcctttggcacaaaaatcaccacaatgcggtttccctcgctgcgttcaatccgcacatcttccggccgcaataggttaacgctgacgcaagccggattttctacaatttcccagaactgtcttaccagttcttccggctccaggccagggacagagtacagtgacttgt

SEQ ID NO: 26958 - DNA, 260 bp, Unknown
  Description of Unknown: RightRegion for integrase B959 sequence
ccggaaacggttgtgttccgcaatgggctgtcccatacattcacttataaggattcttgatgcaaaatacccaggagcatttacactcctgggtttctctttgtcccattatttacttttcctgatttctgtgataacctcacatttgttagatttggaggctacacaatcatcatagcatcccgtatgattacgggtgtaccaccatttctaacatttgttagatttttactggttctcagaatgctcatatgtattct

SEQ ID NO: 26959 - DNA, 109 bp, Unknown
  Description of Unknown: RightRegion for integrase B960 sequence
ccggaaacggttgtgttccgcaatgggctgtcccatacattcacttataaggattcttgatgcaaaatacccaggagcatttacactcctgggtttctctttgtcccat

SEQ ID NO: 26960 - DNA, 260 bp, Unknown
  Description of Unknown: RightRegion for integrase B961 sequence
ccggaaacggttgtgttccgcaatgggctgtcccatacattcacttataaggattcttgatgcaaaaatacccaggagcatttacactcctgggtatctctttgtcccattatttactttttcctgatttctgggataacctcacatttgttagatttggaggctacacaatcatcatagcatcccgtatgattacgggtgtaccaccatttctaacatttgttagatttttactggttctcagaatgctcatatgtatt

SEQ ID NO: 26961 - DNA, 211 bp, Unknown
  Description of Unknown: RightRegion for integrase B962 sequence
gtgacattcagaaacggaatctctcatacattcacatataaaaataagccggaggattaaccccggcttaaatttccttgatattctaacatttgtgtgttttggtggttacttgataaacatagcatcaccaaagctgaaaaacctgtatctttcctctacagcctctttgtatgcattgaggacatgctctctgcctgctaatgctgac

SEQ ID NO: 26962 - DNA, 109 bp, Unknown
  Description of Unknown: RightRegion for integrase B963 sequence
cctgaaacggttgtattccgcaatgggctgtcccatacattcacttataaggattcttgatgcaaaaatacccaggagcatttacactcctgggtttctctttgtccca

SEQ ID NO: 26963 - DNA, 260 bp, Unknown
  Description of Unknown: RightRegion for integrase B964 sequence
aatttcataaaagtgcttgatgtccctaagaacaggcgttattatgagaaccagtcttaatatttgtgggaacggtaactgccaagaaagaatcgggcaatatgcctgcctttagaccaaattttactaaaatgggacagaatagttcagaccacaataaggataattattattacttttgtcccataattcaaacgattaaactttaaattcagattatgatagagaataccagcttggagttaaaactcgttgaaatt

SEQ ID NO: 26964 - DNA, 260 bp, Unknown
  Description of Unknown: RightRegion for integrase B965 sequence
tccgtttatctgcttgttcagaccatccgattggacggcaaaaaccggatcagctcttaacagtgaactttgcggaatcgagcagctggttgccgatgtagatggacagggtataatcgccgtcggtctgcggggtgcgcgggaagtagccgacgaacatattcttttcccacatatccttccagaccagcacggagctggacgaatcgacgatcttcccgtccgcgtcgcggacgacaaggttgaccatgaccgttccg

SEQ ID NO: 26965 - DNA, 260 bp, Unknown
  Description of Unknown: RightRegion for integrase B966 sequence
tcgtttatatttgtaaacggtgtgttcggaattgtcgtcgcccgcgagccgagcaactaaaaaagcccctcaccgtcgatatagacgagtggggggctttttctatgccttattattcagtttcgtcggccgcgctttcctcgccgcccgatttctgccgcaagacggcgaaagcgtctttcaacgccgggggcatgggaacgcccataatgccgagattttcgacgatgctcatgccgtcatttgcgcagaaaaagaga

SEQ ID NO: 26966 - DNA, 260 bp, Unknown
  Description of Unknown: RightRegion for integrase B967 sequence
ccggaaacggttgtgttccgcaatgggctgtcccatacattcacttataaggattcttgatgcaaaaatacccaggagcatttacactcctgggtttctctttgtcccattatttactttttcctgatctctgggataacctcacatttgttagatttggaggctacacaatcatcatagcatcccgtatgattacgggtgtaccaccatttctaacatttgttggtgttttactggttctcggaatactcatatgtgtc

SEQ ID NO: 26967 - DNA, 260 bp, Unknown
  Description of Unknown: RightRegion for integrase B968 sequence
ctctgcgatcatctgtgctactttttttgttgttccgcttgcactgaaaaatgccactaattttttactcataataaaaagcccctttctatacgtatttttcacaaaaaaatagatgtataagatttacattcatcttacacatctattttaagctctatcgcttcattatgtctaatgcttatattgaattttgttttatgcctgaaaagcattaatctcctcgatcattttacggactgccaaagaatatgggatat

SEQ ID NO: 26968 - DNA, 260 bp, Unknown
  Description of Unknown: RightRegion for integrase B969 sequence
tcatttatatttgtgaatggcgtgttcggtattgtcgtcgcccgcgagccgggcaactaaaaaaagcccctcaccgtcgatatagacgagtgaggggctttttctatgccttattattcagtttcatcggcggcagtttcctcgccgctcgatttctgccgcaagacggcgaaagcgtctttcaacgccgggggcatgggaacgcccataatgccgagattttcgacgatactcatgccgtcatttgcgcagaaaaagag

SEQ ID NO: 26969 - DNA, 260 bp, Unknown
  Description of Unknown: RightRegion for integrase B970 sequence
tccgtttatctgcttgttcagaccatccgattggacggcaaaaaccggatcagctcttaacggtgaactttgcggaatcgagcagctggttgccgatgtagatggacagggtataatcgccgtcggtctgcggggtgcgcgggaagtagccgacgaacatattcttttcccacatatccttccagaccagcacggagctggacgaatcgacgatcttcccgtccgcgtcgcggacgacaaggttgaccatgaccgttccg

SEQ ID NO: 26970 - DNA, 260 bp, Unknown
  Description of Unknown: RightRegion for integrase B971 sequence
ccggaaacggttgtattccgtaatgggctgtcccatacattcacttataaggattcttaatacaaaaatacccaggagcatttacactcctgggtttctctttgtcccattatttactttttcctgatttctggaataacctcacatttgttagatttggaggctacacgatcatcatagcatccccaaaagagaaaaatctgtatttctcctttaccgcctcttcatacgccttcaacacatggtctcttcctgcaaat

SEQ ID NO: 26971 - DNA, 260 bp, Unknown
  Description of Unknown: RightRegion for integrase B972 sequence
ccggaaacggttgtgttccgcaatgggctgtcccatacattcacttataaggattcttgatgcaaaaatacccaggagcatttacactcctgggtttctctttgtcccattatttactttttcctgatcctgatttctgggataacctcacatttgttagatttggaggctacacaatcatcatagcatccccaaaactgaagaaacgatatctttcttttactgcctcctcatacgctgccatcacatgctcttttccg

SEQ ID NO: 26972 - DNA, 109 bp, Unknown
  Description of Unknown: RightRegion for integrase B973 sequence
ccggaaacggttgtgttccgcaatgggctgtcccatacattcacttataaggattcttgatgcaaaaatacccaggagcatttacactcctgggtttctctttgtccca

SEQ ID NO: 26973 - DNA, 260 bp, Unknown
  Description of Unknown: RightRegion for integrase B974 sequence
ccggaaacgcttgtgttccgcaatgggctgtcccatacattcacttataaggattcttaatgcaaaaatacccaggagcatttacactcctgggtttctctttgtcccattatttacttttcctgatttctgggataacctcacatttgttagatttggaggctacacaatcatcatagcatccccgaagctgaagaaacgataacgctcctgaacagctgtctcgtaggcatgcataatatgctctttgcctgccagtg

SEQ ID NO: 26974 - DNA, 109 bp, Unknown
  Description of Unknown: RightRegion for integrase B975 sequence
ccggaaacggttgtgttccgcaatgggctgtcccatacattcacttataaggattcttgatgcaaaaatacccaggagcatttacactcctgggtttctccttgtccca

SEQ ID NO: 26975 - DNA, 178 bp, Unknown
  Description of Unknown: RightRegion for integrase B976 sequence
gtgacattcagaaacggaatctctcatacattcacatataaaaataagccggaggattaaccccggcttaaatttccctgatattctaacatttgtgtgttttggtggttacttgataaacatagcatccccaaagctgaaaaacctgtatctttcctctacagcctctttgtatgca

SEQ ID NO: 26976 - DNA, 260 bp, Unknown
  Description of Unknown: RightRegion for integrase B977 sequence
ccggaaacggttgtgttccgcaatgggctgtcccatacattcacttataaggattcttaatgcaaaaatacccaggagcatttgcgctcctgggtttctctttgtcccattatttactttttcctgatttctgggataacctcacatttgttagatttggaggctacacaatcatcatagcatcccgtatgattacgggtgtaccaccatttctaacatttgttagatttttactggttctcagaatgctcatatgtatt

SEQ ID NO: 26977 - DNA, 182 bp, Unknown
  Description of Unknown: RightRegion for integrase B978 sequence
ccggaaacggttgtgttccgcaatgggctgtcccatacattcacttataaggattcttgatgcaaaatacccaggagcatttacactcctgggtttctctttgtcccattatttacttttcctgatttctgggataacctcacatttgttagatttggaggctacacaatcatcatagcatc

SEQ ID NO: 26978 - DNA, 260 bp, Unknown
  Description of Unknown: RightRegion for integrase B979 sequence
tacaatggggtatcgaaacaaaggatacgattttacaattacttcatctacagcatatgatcagaaatggatttatggcagaaacatttttgaatcaattagtcttgttgtagataatatatttgatcaatatttatcaaggccagatgtaaggcagccaattcttacacagtattgtgatggaaaaagagtaacctgtccgaattggttaagccagtggggatcatgcaacttaggagagagagggtattctacaattg

SEQ ID NO: 26979 - DNA, 260 bp, Unknown
  Description of Unknown: RightRegion for integrase B980 sequence
gtgacattcagaaacggaatctctcatacattcacatataaaaataagccggagaattaaccccggcttaaatttccttgatattctaacatttgtgtgttttggtggttacttgataaacatagcatcaccaaagctgaaaaacctgtatctttcctctacagcctctttgtatgcattgaggacatgctctctgcctgctaatgctgacacaagcatgacaagtgtagactgtggcagatggaaatttgtaatcagac

SEQ ID NO: 26980 - DNA, 87 bp, Unknown
  Description of Unknown: RightRegion for integrase B981 sequence
aaaaataatgatgtgtcattatgtactaggaacgtgtccttgtttaattgcacctgctaatccgactttagttctttcagaacattt

SEQ ID NO: 26981 - DNA, 260 bp, Unknown
  Description of Unknown: RightRegion for integrase B982 sequence
ccggaaacggttgtgttccgcaatgggctgtcccatacattcacttataaggattcttgatacaaaaatacccaggagcatttacactcctgggtttctctttgtcccattatttactttttcctgatttctgggataacctcacatttgttagatttggaggctacacaatcatcatagcatcgccgaaggagaaaaagcggtatttttctctcacagcctcttcataagctgccataatatgctcttttccagccagt

SEQ ID NO: 26982 - DNA, 260 bp, Unknown
  Description of Unknown: RightRegion for integrase B983 sequence
accggggttcagaatccccggcgttccttatcatacgcgcgtgaggaaatatacccgtaagatgaagaacgggatgtccgaaagctgtgcggagtggaggctttcgtgtatagctcaatgacggcgtgtgccgtcttttttctttactaatgtgtactctgtatattggtgttcacttgccggcggtgtttgcgatttatgattatttgttctttttgcggctacgccgtgtcaccgtataatgcgataaatcgtgttga

SEQ ID NO: 26983 - DNA, 260 bp, Unknown; identical to SEQ ID NO: 26978
  Description of Unknown: RightRegion for integrase B984 sequence

SEQ ID NO: 26984 - DNA, 260 bp, Unknown
  Description of Unknown: RightRegion for integrase B985 sequence
ggacagttcgccagcctgcgggaaaatcccttcatccgcaccaaaatcctcgaacgttagttcggggattttttgctgcatatgaattgtggcgccaagcggcggggtgaaggcacccccgtcctgtaatttcacagtaaactgtccgcaccacgaatacacctatttcgctcataaaaacaaattttaatatttttttacatcgtcccatcgcaaaaaacgacgtgtttctctggctggtacaactgtccgtatcttgc

SEQ ID NO: 26985 - DNA, 109 bp, Unknown
  Description of Unknown: RightRegion for integrase B986 sequence
gtgatattcagaaacggaatctctcatacattcacatataaaaataagccggagaattaaccccggcttaaatttccttgatattctaacatttgtgtgttttggtggt

SEQ ID NO: 26986 - DNA, 260 bp, Unknown
  Description of Unknown: RightRegion for integrase B987 sequence
ccggaaacagttgtgttccgcaatgggttgtcccatacattcacttataaggattcttgacgcaaaaatacccaggagcatttacactcctgggtttctctttgccccattatttactttttcctgatttctgggataacctcacatttgttagatttggaggctacacaatcatcatagcatcccgtatgattacgggtgtaccaccatttctaacatttgttagatttttactggttctcagaatgctcatatgtatt

SEQ ID NO: 26987 - DNA, 109 bp, Unknown
  Description of Unknown: RightRegion for integrase B988 sequence
ccggaaacggttgtgttccgcaatgggctgtcccatacattcacttataaggattcttgatgcaaaaatacccaggagcatttacactcctgggtttctctttgtccta

SEQ ID NO: 26988 - DNA, 260 bp, Unknown
  Description of Unknown: RightRegion for integrase B989 sequence
ccggaaacggttgtgttccgcaatgggctgtcccatacattcacttataaggattcttgatgctaaaaatacccaggagtatttacactcctgggtttctctttgtcccattatttacttttcctgatttctgggataacctcacatttgttagatttggaggctacacaatcatcatagcatcaccaaagctgaaaaatctgtatctttcctctacagcctctttgtatgcattgaggacatgctctctgcctgctaat

SEQ ID NO: 26989 - DNA, 109 bp, Unknown; identical to SEQ ID NO: 26972
  Description of Unknown: RightRegion for integrase B990 sequence

SEQ ID NO: 26990 - DNA, 109 bp, Unknown; identical to SEQ ID NO: 26972
  Description of Unknown: RightRegion for integrase B991 sequence

SEQ ID NO: 26991 - DNA, 109 bp, Unknown
  Description of Unknown: RightRegion for integrase B992 sequence
gtgacattcagaaacggaatctctcatacattcacatataaaaataagccggaggattaaccccggcttaaatttccctgatattctaacatttgtgtgttttggtggt

SEQ ID NO: 26992 - DNA, 109 bp, Unknown
  Description of Unknown: RightRegion for integrase B993 sequence
ccggaaacggttgtgttccgcaatgggctgtcccatacattcacttataaggattcttgatacaaaaaatacccaggagcatttacactcctgggtttctctttgtccc

SEQ ID NO: 26993 - DNA, 109 bp, Unknown
  Description of Unknown: RightRegion for integrase B994 sequence
ccggaaacggttgtattccgtaatggactgtcccatacattcacttataaggattcttaatacaaaaatacccaggagcatttacactcctgggtttctctttgtccca

SEQ ID NO: 26994 - DNA, 260 bp, Unknown
  Description of Unknown: RightRegion for integrase B995 sequence
gcccttgggcgggatccttttctgagtcagcttatttggaaaatatttgaaatggagtgatcctatgaacgaaccgcggcccgccgccgaaaacaaaatgggcaccatgccggtccccaagctgctctttaccatgtcgatccccatggtcatctccatgctggtccaagcgctgtacaacgtggtggacagcgtgttcgtctcgcaggtcagcgagcaggcccttaccgccgtgacgctggccttcccggcccagaacc

SEQ ID NO: 26995 - DNA, 260 bp, Unknown
  Description of Unknown: RightRegion for integrase B996 sequence
cgaagccgctgcggtagtagttgccgtcggcatcgcagtaggcgtagctgccgcccttgacgttggcgaggatggcgggatcgatgtactgatccttatcgtagccgggcacatcgttgggagaggcgcagatctcgcgcaccacaccgtcgatctcctgctcggtgatggcaatgacggcggggtcagagaccatggtcaggctcagcttgccggtgggggcaaagtcgccgctgatgacatcgacctgagcgttcagg

SEQ ID NO: 26996 - DNA, 260 bp, Unknown
  Description of Unknown: RightRegion for integrase B997 sequence
gctgctatgatgaagaataagcagctgaagccagtagcaggtgtgaagaaggacaaataaaaacactatataaggctaaatcaaatgaaaaatcagatttacattctagcagatagaactgctatagactatatcctgaatggggatatagaggaactgaaggaatatctttcagaacctgatacctacatagacctttcagaacctattacctttgaaacggaagctgaagtagctgcttttggtgcagggttaggcta

SEQ ID NO: 26997 - DNA, 260 bp, Unknown
  Description of Unknown: RightRegion for integrase B998 sequence
gtgacattcagaaacggaatctctcatacattcacatataaaaataagccggaggattaaccccggcttaaatttccttgatattctaacatttgtgtgttttggtggttacttgataaacatagcatcccgtatgattacgggtgtaccaccatttctaacatttgttggtgttttactggttctcggaatactcatatgtgttctctccagtcatcattacggttccttttgattcctcgatgcactcctcattatcc

SEQ ID NO: 26998 - DNA, 260 bp, Unknown
  Description of Unknown: RightRegion for integrase B999 sequence
ctggccacgacatggacaggcgacgcttgtttgctacacagtccttcagatacagattgataagtgtctggtatgggatgcccacatcttcagactgcgccttgaaatagtcgatcgtattactgtcaatattgatcgtgatttgctttttcaaagcctttgcataggggtttttcttggcgttagagaaatcatattcaggaagcatagtacaaacctcactttccatagtatttagattcggtcttagtggcttttcg

SEQ ID NO: 26999 - DNA, 260 bp, Unknown
  Description of Unknown: RightRegion for integrase B1000 sequence
tgtccgcaggagaaggtggagtatattaaggatgcgttgaggtattttaaattgatttagtaaaattgatcgtgtgtcacggcaatatcaatagatactcccgcaaagcctgtaaataagccattccttagctgaaaaagtgctctactacacacttactatacgtttttagagaaatagctcggcatgattatattaaatggataattgacattatggtatatatgccatataatatttacaaaggtgattacatgaca

SEQ ID NO: 27000 - DNA, 260 bp, Unknown
  Description of Unknown: RightRegion for integrase B1001 sequence
aagagaacagaacatacaccaaatcaatttacttatgatgtttatgtagaaacattgtaagtattttttttgtgttatacttcatttataatatgaatctttagctgtgtcggaatggtaggaacgttcaaaattattactatgagtacagctattgaagaaaaagtaatagatatttataatgatcatttttatgactcaggaagtgttaagataaatggaacaagaataggttgttggaaatcaagtggacatgggga

SEQ ID NO: 27001 - DNA, 260 bp, Unknown
  Description of Unknown: RightRegion for integrase B1002 sequence
ccgggaactgtcgtgttccgcaacggactgtcccatacattcacttataaagattcttgatataaaaatacccaggagcatttctactcctgggtttctcattttcccattatctacttttccctggcttttgggatattctaacacttgttagatttcggggctacacaatcatcatagcatccccaaaactgaagaaacgatatctttcttttactgcctcctcatacgctgccatcacatgctcttttccggctaat

SEQ ID NO: 27002 - DNA, 260 bp, Unknown; identical to SEQ ID NO: 26978
  Description of Unknown: RightRegion for integrase B1003 sequence

SEQ ID NO: 27003 - DNA, 260 bp, Unknown; identical to SEQ ID NO: 26973
  Description of Unknown: RightRegion for integrase B1004 sequence

SEQ ID NO: 27004 - DNA, 200 bp, Unknown
  Description of Unknown: RightRegion for integrase B1005 sequence
gtgacattcagaaacggaatctctcatacattcacatataaaaataagccggagaattaaccccggcttaaatttccttgatattctaacatttgtgtgttttggtggttacttgataaacatagcatcaccaaagctgaaaaacctgtatctttcctctacagcctctttgtatgcattgaggacatgctctctgcctg

SEQ ID NO: 27005 - DNA, 90 bp, Unknown
  Description of Unknown: RightRegion for integrase B1006 sequence
gtcttccgcaatggacttgcacatactttcttctacgggagcatcccaaagtttgtgtaaacctccaaactgatgtaagataaaattact

SEQ ID NO: 27006 - DNA, 109 bp, Unknown; identical to SEQ ID NO: 26972
  Description of Unknown: RightRegion for integrase B1007 sequence

SEQ ID NO: 27007 - DNA, 109 bp, Unknown
  Description of Unknown: RightRegion for integrase B1008 sequence
ccggaaacggttgtattccgcaatgggctgtcccatacattcacttataaggattcttgatgcaaaaatacccaggagcatttacactcctgggtttctctttgtccca

SEQ ID NO: 27008 - DNA, 260 bp, Unknown; identical to SEQ ID NO: 26978
  Description of Unknown: RightRegion for integrase B1009 sequence

SEQ ID NO: 27009 - DNA, 109 bp, Unknown
  Description of Unknown: RightRegion for integrase B1010 sequence
gacggaagaattacatcaatacagtttaaaaacggtattgagcatgattttttatattaacagaatacaaagaaaatacccctgcattccatgaatacaggggtttctg

SEQ ID NO: 27010 - DNA, 260 bp, Unknown
  Description of Unknown: RightRegion for integrase B1011 sequence
accattcaaatggtcgggagcgtgttcgttctgtactgcgagataccaactcgccaataatggtaatccccggttctttcatgtttttggtgaaagagccggggattttttgttatttttacccgtttttcggaagaatttgccgaaagtagtagtttcctgccaaaatccagctaagccgatttgaaatcggtagaattttggataaaggagattggcttatgattaggattttactgtcaacgcgtctcggcgaaagg

SEQ ID NO: 27011 - DNA, 260 bp, Unknown
  Description of Unknown: RightRegion for integrase B1012 sequence
gtgcagcgtattacattcaaaaacggactgtcgcacactttcatcttcaaaaaatcataaatgcctccggcaacaaaaatatacccggtatgaagtttattactcctaccgggtatttctgtgtattcttatacagccaaacattctctgattttgctaatctcaatatcctctttaaatctactactgtcgtcattcattaaaagcacaaatcttattactgtatcattcatagcagcaccttcgatttccttgatcct

SEQ ID NO: 27012 - DNA, 109 bp, Unknown; identical to SEQ ID NO: 27009
  Description of Unknown: RightRegion for integrase B1013 sequence

SEQ ID NO: 27013 - DNA, 260 bp, Unknown; identical to SEQ ID NO: 27011
  Description of Unknown: RightRegion for integrase B1014 sequence

SEQ ID NO: 27014 - DNA, 260 bp, Unknown
  Description of Unknown: RightRegion for integrase B1015 sequence
gacggaagaattatatcaatacagtttaaaaacggtattgagcatgattttttatattaacagaatacaaagaaaatacccctgcattccatgaatacaggggttttctgatatttttatttctttttcggtctcacgtctcccacaagcatcgcatcgccaatgtttacgggaaacaatcattcttttaaggttacacaaatgtaatctcaatccttacagtgaaataaccgcccttgtacatataggacggttattgt

SEQ ID NO: 27015 - DNA, 260 bp, Unknown
  Description of Unknown: RightRegion for integrase B1016 sequence
acagattttattaatatgtttgatgttccagagaacagacattattatgagaatcagtaaatcactcatacctttgtagaattaaatagattacagacaatgaatccaatagacaagtttaccaatatagatgcagtttatcctacaactgacgcaagggaagaagatacaatattagattatgtttgggactttgctgtactgatacaccctgcaatgccaaagattatagacgaaaggtttgcattggaaggcagcca

SEQ ID NO: 27016 - DNA, 260 bp, Unknown
  Description of Unknown: RightRegion for integrase B1017 sequence
acagactttataaagatgtttgatattccaaagaacaggcgttattatgagaatcagtaaatcactcatacctttgtagaattaaatagattacatgcaatgaacccaatagacaaatttactaacatagatgcagtttaccctacaactgacgcaagggaggaagatataatattagattatgtttgggactttgccctgctgatacatcctgcagaacctaagattatagatgaaagatttgcattggagggcagtca

SEQ ID NO: 27017 - DNA, 260 bp, Unknown
  Description of Unknown: RightRegion for integrase B1018 sequence
cccgttatttccgagcctattgtcacacaaacaacctatgaacgcagaaaaacggcgtgaccttcgggtcacaccgttctctgcgacaaaatagttacttgtcactattaagccttgatttaacaggcttttttgtatatgcgataaatacttacatcaaatctgttgtctcacataagtaggctattttgtaatttttcaatcagtgatatatcagccggaagccaatcaacggtatataattcatctttattaagcca

SEQ ID NO: 27018 - DNA, 260 bp, Unknown
  Description of Unknown: RightRegion for integrase B1019 sequence
cccgttatttccgagcctattgtcacacaaacaacctatgaacgcagaaaaacggcgtgaccttcgggtcacaccgttctctgcgacaaaatagttacttgtcactattaagccttgattttaagggctttctaggtatcatttatgactatgtaaaatttatcgcatttatgcaaaacttgtccagcggtggcaaatcggtggcaatgccacccacgcggtatcggtataatcctaggtcaactacacacggagttttt

SEQ ID NO: 27019 - DNA, 260 bp, Unknown
  Description of Unknown: RightRegion for integrase B1020 sequence
acagattttattaatatgtttgatgttccagagaacagacattattatgagaatcagtaaatcactcatacctttatagaattaaatagattacagacaatgaatccaatagacaagtttaccaatatagatgcagtttaccctactattgacgcaagggaggaagatataatattagattatgtttgggacttcgccatgctgatacaccctgcagaaccaaaaattatagataaaaggtttgcattggagggtagttg

SEQ ID NO: 27020 - DNA, 260 bp, Unknown
  Description of Unknown: RightRegion for integrase B1021 sequence
aggctgccgtttgctccgacaacgcggtggcagggaatgatgatagagatcacattgtgaccgacagccccgcccacagcctgcgcagacatccgggaaaggccgcgctctgcggccagctgctttgccagtgcaccataggtcgtggtctggccgcaggggatgcggcgcagcagcgcccacacctcctgctgaaaggcagagccagcgggatggagcggcggggtaaagtccggctcctgcccgccgaaataaacatc

SEQ ID NO: 27021 - DNA, 260 bp, Unknown
  Description of Unknown: RightRegion for integrase B1022 sequence
aggctgccgtttgttccgacaacgcggtggcagggaatgatgatagagatcacattgtgaccgacagccccgcccacagcctgcgcagacattcgggaaaggccgcgctctgcagccagctgccttgccagtgccccataggtcgtggtctggccgcaggggatgcggcgcagcagcgcccacacctcctgctgaaaggcagagccagcgggatggagcggcggggtaaagtccggctcctgcccgccgaagtaaacatc

SEQ ID NO: 27022 - DNA, 260 bp, Unknown
  Description of Unknown: RightRegion for integrase B1023 sequence
cccgttatttccgagcctatcatcacgcaaacaacctatgaacacagaaaaacggcgtgaccttcgggtcacaccgttctctgcgacaaaatagttacttgtcactattaagccttgcaaaaaagtgttgacatccggcccggcgtatggtattatacttgagcgccaagcgctgagacaaaagaatgacttctgagtcccagctggaagtaaagcgaaaagaaccaatagacgtccgaaagttccggtcagcgccgaga

SEQ ID NO: 27023 - DNA, 68 bp, Unknown
  Description of Unknown: RightRegion for integrase B1024 sequence
tcattttgttcgccgcagcacaggcagctatcgctgagaagaatgcataattataaataatatataag

SEQ ID NO: 27024 - DNA, 260 bp, Unknown
  Description of Unknown: RightRegion for integrase B1025 sequence
ccagccagatgctggagaggttcagcttttaggcgaaaaagttaccagtcacagttatgaaatattcaaaaaggttggttctattattgagaatccatacttttacgataaaatgactgccagacaaaacttagagctgcactgtgagtatatgggatttcccaacaaggaacgaatcgatgaggttttgcatttggtggacttgcagaatgtcgagaaaaaacaagtttgtcattactcgttgggtatgaaacaacgac

SEQ ID NO: 27025 - DNA, 260 bp, Unknown
  Description of Unknown: RightRegion for integrase B1026 sequence
acagactttatcaatatgtttgacactccagagaacagacattattatgagaaccagtaaatcactcatacctttgtagaattaaatagttacatgcaatgaatccaatagacaagtttactaacatagatgcagtttaccctacaactgacgcaagggaagaagatataatattagattatgtttgggacttcgccctgctgatacacccagcagaacctaagattatagatgaaaggtttgcattggagggcactcat

SEQ ID NO: 27026 - DNA, 260 bp, Unknown
  Description of Unknown: RightRegion for integrase B1027 sequence
ccgcccattgaccaacctatgtatccgttgggagaggatagcgaatgtagtatggattgaagtaggcgtgagaaagaggctgtatatggatgaaaaaaagaggcgtaaaagggtatgcctgtgcgccctctgtgctggccggagcagcggtaatgggcgcattggcgacggcggtgcttattgtgctgtggtataacggatttcttacagacgttttgattcttatagtatttggcccgatggaagtggtcggatggatg

SEQ ID NO: 27027 - DNA, 109 bp, Unknown
  Description of Unknown: RightRegion for integrase B1028 sequence
cgaaggatctgtttctattttagggttagaccctcgaaagaaccgaaaagaactctttgagcaggttggcgtacaattccaggaagccagctactcggacaagattaag

SEQ ID NO: 27028 - DNA, 260 bp, Unknown
  Description of Unknown: RightRegion for integrase B1029 sequence
aactctatcacattccgcaatggattgtctcacacgttcatctatcgagtaggaggctaatcattaattagccgacctctcacaccaccgtgcataccgttcggtacacggcggttccttagttttcacaaaccactagataatagtcaagcatggatagatatccgagcttggctattattttcttggaaaagatttggttcaagactttcgccattctccaataaccttttctactacaggcaagttcctttgctttc

SEQ ID NO: 27029 - DNA, 260 bp, Unknown
  Description of Unknown: RightRegion for integrase B1030 sequence
acagactttataaagatgtttgatattccaaagaacagacattattatgagaaccactaaatcactcatacctttgtagaattaaatagttacatgcaatgaatccaatagacaagtttaccaacatagatgcagtttaccctacaactgacgcaagggaggaagatataatattagattatgtttgggattttgccctgctgatacatccagcagaacctaagattatagatgaaaggtttgcattggagggcactcat

SEQ ID NO: 27030 - DNA, 260 bp, Unknown
  Description of Unknown: RightRegion for integrase B1031 sequence
actgcctttgtaaagatgtttgacactcctaagaacaggcgttattatgagaatcaataaatcacttatatagttgttgaaccaaatagattacagaccatgaatccaatagataagtttaccaatatagatgcagtttatcctactactgatgcaagagaggaagatacaatattagattatgtttgggactttgccatgttgatacaccctgcaatgccaaaaattatagatgaaaggcttgcattggagggcagttg

SEQ ID NO: 27031 - DNA, 260 bp, Unknown; identical to SEQ ID NO: 27024
  Description of Unknown: RightRegion for integrase B1032 sequence

SEQ ID NO: 27032 - DNA, 260 bp, Unknown
  Description of Unknown: RightRegion for integrase B1033 sequence
atcaactatgtggatggatgcgaaaaggaatttaactacacttacgcatttgcaatctaaataatatacaaaagatgaacggaagagcagagatgtaattttttgacatttaagtgaatatctgatagtatgaaaacatactaatgacgacatcggttccaattcccggaacaagatgtctttttgtgtttttagggagtgttttttatgaatcataccgcatatgacgtaatgagagaatatatgatcgagggagcaga

SEQ ID NO: 27033 - DNA, 260 bp, Unknown
  Description of Unknown: RightRegion for integrase B1034 sequence
gtaaccattcaaatggtcgggagcgtgttcgttctgtactgcgagataccaactcgttaataatggtaagccccggttctttcatgtttttggtgaaagagccggggtatttttgttattttcacccgtttttcggaagaatttgccgaaagtagtagtttcctgccaaaatccagctaagccgatttgaaatcggtagaattttggataaaggagattggcttatgattaggattttactgtcaacgcgtctcggcgaa

SEQ ID NO: 27034 - DNA, 260 bp, Unknown
  Description of Unknown: RightRegion for integrase B1035 sequence
aaggtgcagcgtatcacattcaaaaacggactgtcacacgctttcattttcaaatcgtaatgtatgctcccgacacaaatgtcggggacaaaaaattacccggcaggtaatcttttttcgcctaccgggtatctctatgtattcttatactgccaagttctctctgatttttctaatctcaatgtcttccttgaatctgctgtcatcgctgttcatcagaagcacgaatctgattaccgtatcgttctgagcggcacctt

SEQ ID NO: 27035 - DNA, 260 bp, Unknown
  Description of Unknown: RightRegion for integrase B1036 sequence
gtggaaactttgacgttcaagaatggaatatctcataagttcacctatctcgcaatataaaaggcccggagccgctttcatgtggttctgggccttttgctgtattcgattcaaacgtcccggctgaccatgtgataggcgtaccagtggccccgccgctggaacaggcgataccagcttgtgaactcctgtcctgtgcagtcatagccggtttcatcctgccagtacttgaagatgcttttcccggttttcttgtgttc

SEQ ID NO: 27036 - DNA, 260 bp, Unknown
  Description of Unknown: RightRegion for integrase B1037 sequence
atcaactatgtggatggatgtgaaaaggaatttaactacacttacgcatttgcaatctaaataatatacaaaagatgaacggaggagcagagatgtaattttttgacatttaaccaaatatctgatagtgtcaactacccatcacttaaaggtaatgagcttgtaactgcccagtcgtagtaacggcttacgcctccgaccttttatccccaataggcattactgcctaaagtggcgttacatcatagggtggttgacag

SEQ ID NO: 27037 - DNA, 260 bp, Unknown
  Description of Unknown: RightRegion for integrase B1038 sequence
atcaactatgtggatggatgcgaaaaggaatttaactacacttacgcatttgcaatctaaataatatacaaaagatgaacggaagagcagagatgtaattttttgacatttaagtgaatatctgatagtatgaaaacatactaatgacgacatcggttccaattcccggaacaagatgtctttttgtatttttaaggggtgataaccatgaatcatactgcatatgacgtaatgagagaatatatgatcgagggagcaga

SEQ ID NO: 27038 - DNA, 260 bp, Unknown
  Description of Unknown: RightRegion for integrase B1039 sequence
atcaactatgtggatgggtgcgaaaaggaatttaattacacttacgcatttgcaatctaaataatatacaaaagatgaacggaagagcagagatgcaattttttgacatttaactaaatatctgatagtatgaaaacatactaatgacgacatcggttccaattcccggaacaggatgtctttttgcatttttagggagtgataagcatgaatcatactgcatacgatgtaatgagagaatatatgatcgagggagcaga

SEQ ID NO: 27039 - DNA, 260 bp, Unknown
  Description of Unknown: RightRegion for integrase B1040 sequence
atcaactatgtggatggatgcgaaaaggaatttaactacacttacgcatttgcaatctaaataatatacaaaagatgaacggaagagcagagatgtaattttttgacatttaactaaatatctgatagtatgaaaacatactaatgacgacatcggttccaattcccggaacaggatgtctttttgtgtttttaaggggtgataaccatgaatcataccgcatatgacgtaatgagagaatatatgatcgagggagcaga

SEQ ID NO: 27040 - DNA, 260 bp, Unknown
  Description of Unknown: RightRegion for integrase B1041 sequence
atcaactatgtggatggatgcgaaaaggaatttaactacacttacgcatttgcaatctaaataatatacaaaagatgaacggaagagcagagatacatttttttgacatttaattaaatatctggtagtatggaaacatactaatgatgacatcggttccaattcccggaacaggatgtctttttgtgtttttaaggggtgataaccatgaatcataccgcatatgacgtaatgagagaatatatgatcgagggagcaga

SEQ ID NO: 27041 - DNA, 260 bp, Unknown
  Description of Unknown: RightRegion for integrase B1042 sequence
atcaactacgtggagagatatgaaaaggaatttaactacacttacgcatttgcaatctaaataatatacaaaagatgaacggaagagcagagatgtaattttttgacatttaactaaatatctgatagtatggaaacatactaatgatgacatcggttccaattcccggaacaggatgtctttttgcgttttagaggtgataaccatgaatcataccgcatacgatgtaatgagagaatatatgatcgagggcgcagagt

SEQ ID NO: 27042 - DNA, 260 bp, Unknown
  Description of Unknown: RightRegion for integrase B1043 sequence
gtcattggtgcttcggcaggtcagaggatgccggttcagctgacgatttccagcatctgatcgaacacctcttccatctggcgcaccagtgtgaactgggtgcgggcgcggtcaaggttgtggtcggggcgggcggtgtggaaatagtgatcgccctccagatagtcggtcagaaagcggatgccgcactccagcgtcatcagcttggcaccccaggcaaggctctttttctccgcagggctcatggaagccccggcggt

SEQ ID NO: 27043 - DNA, 260 bp, Unknown
  Description of Unknown: RightRegion for integrase B1044 sequence
gtcattggtgcttcggcaggtcagaaggtgccggttcagctgacgatctccagcatctgatcgaacacctcttccatctgccgcaccagcgtgaactgggtgcgggcgcggtcaaggttgtggtcggggcgggcggtgtggaaatagtggtcgccctccagatagtcggtcagaaagcggatgccgcactccagcgtcatcagcttggcaccccaggcaaggctctttttctccgcagggctcatggaagccccggcggt

SEQ ID NO: 27044 - DNA, 260 bp, Unknown
  Description of Unknown: RightRegion for integrase B1045 sequence
gtggaaacgctgacgttcaagaacggaatatctcacaagtttacctatctcgcaatataaaaggcccggagccgctttcctgcggttctgggccttttgctgtattcggttcaaacgtcccgactgaccatgtgataggcgtaccagtggccccgccgctggaacaggtgataccagcttgtgaactcctgcccggtgcagtcataggggctgttgtaggcttccagatagcagttatcatcgaaccactcagcggcgtc

SEQ ID NO: 27045 - DNA, 260 bp, Unknown
  Description of Unknown: RightRegion for integrase B1046 sequence
gtcattggtgcttcggcaggtcagaaggtgccggttcagctgacgatctccagcatctgatcgaacacctcttccatctggcgcaccagcgtgaactgggtgcgggcgcggtcaaggttgtggccggggcgggcggtgtggaaatagtgatcgccctccagatagtcggtcagaaagcggatgccgcactccagcgtcatcagcttggcaccccaggcaaggctctttttctccgcagggctcatggaggccccggcagt

SEQ ID NO: 27046 - DNA, 260 bp, Unknown
  Description of Unknown: RightRegion for integrase B1047 sequence
aaagaagcattatcgcggcagcttttatctggacggaaccgatatcgcggaagatcatgagtggtcgatgaaccggatcggatttgtctctgaggagcggttgtttttgcggcagaagagtgcaagagagaatgcaaggatgctgggcagcttctatgatacctttgatatggatcagtttgctgcgctgatggagcagatggatcttaccacggcacggaccgtggagaagatgtcgcgcggtgagaatatgaagtttc

SEQ ID NO: 27047 - DNA, 260 bp, Unknown
  Description of Unknown: RightRegion for integrase B1048 sequence
gtcattggtgcttcggcaggtcagaaggtgccggttcagctgacgatctccagcatctgatcgaacacctcttccatctgccgcaccagcgtgaactgggtgcgggcgcggtcaaggttgtggccggggcgggcggtgtggaaatagtgatcgccctccagatagtcggtcagaaagcggatgccgcactccagcgtcatcagcttggcaccccaggcaaggctctttttctccgcagggctcatggaagccccggcggt

SEQ ID NO: 27048 - DNA, 260 bp, Unknown
  Description of Unknown: RightRegion for integrase B1049 sequence
gtggaaatgctgacgttcaagaatggaatttctcacaagttcacttataaggcaatataaaaggcccggagccgctttcctgcggttctgggccttttgctgtattcggttcaaacgtcccgactgaccatgtgataggcgtaccagtggccccgccgctggaacaggtgataccagcttgtgaactcctgcccggtgcagtcataggggctgttgcaggcttccagatagcagttatcatcgaaccactcagcggcgtc

SEQ ID NO: 27049 - DNA, 260 bp, Unknown
  Description of Unknown: RightRegion for integrase B1050 sequence
atcaactatgtagatggatgcgaaaaggagtttaattacacttacgcatttgcaatctaaataatatacaaaagatgaacggaagagcagagatgtaattttttgacatttaatcaaatatctgatagtatgaaaacatactaatgacgacatcggttccaattcccggaacaggatgtctttttgcgtttttagggagtgtttttatgaatcatactgcatatgacgtaatgagagaatatatgatcgagggagcagaa

SEQ ID NO: 27050 - DNA, 260 bp, Unknown
  Description of Unknown: RightRegion for integrase B1051 sequence
gtggaaactttgacgttcaagaacggaatatctcataagttcacctatctcgcaatataaaaggcccggagccgctttcatgtggttctgggccttttgctgtattcgattcaaacgtcccggctgaccatgtgataggcgtaccagtggccccgccgctggaacaggcgatgccagcttgtgaactcctgtcctgtgcagtcataggggctgttgcaggcttccagatagcagttatcatcgaaccactcagcggcgtc

SEQ ID NO: 27051 - DNA, 260 bp, Unknown
  Description of Unknown: RightRegion for integrase B1052 sequence
gacgaaggtctgcacgaggcgcttctgacactccctgtccttaacgtccagatcccgtagccgcaagaggaagtactcgatatgttctcgcgtgatgcggatgccggaggtcagctccaaatcggccagagaagcggtcagggcggctttctgcgcgtccagttcatccatgcgggactttgtagcggcgttgaagatacccgcctctatggcccgcacaaggttgtttatggctttgtctatttctgcaagctgtgctt

SEQ ID NO: 27052 - DNA, 260 bp, Unknown; identical to SEQ ID NO: 27040
  Description of Unknown: RightRegion for integrase B1053 sequence

SEQ ID NO: 27053 - DNA, 260 bp, Unknown; identical to SEQ ID NO: 27048
  Description of Unknown: RightRegion for integrase B1054 sequence

SEQ ID NO: 27054 - DNA, 260 bp, Unknown
  Description of Unknown: RightRegion for integrase B1055 sequence
gtagagattttgacgttcaagaacggaatttctcacacgtttacctataaggcaatataataagccccagagccgcgttcttgcggttctggggctttctttttattcgtccgtgtagtcgctggcgttgaaaagccctgcggaatagatgtgcccgattctgcggccgttactgtcgatcgcggtgcgccgcactgtttcctgaccgtacatattcggccccagctcatagaggtacttcttcgtgcggtactgcccgg

SEQ ID NO: 27055 - DNA, 260 bp, Unknown
  Description of Unknown: RightRegion for integrase B1056 sequence
atcaactatgtggatggatgcgaaaaggaatttaactacacttacgcatttgcaatctaaataatatacaaaagatgaacggaagagcagagatgtaattttttgacatttaactaaatatttgatagtatggaaacatactaatgatgacatcggttccaattcccggaacaggatgtctttttgtgtttttaaggggtgataaccatgaatcataccgcatatgacgtaatgagagaatatatgatcgagggagcaga

SEQ ID NO: 27056 - DNA, 260 bp, Unknown
  Description of Unknown: RightRegion for integrase B1057 sequence
atcaactatgtggatggatgcgaaaaggaatttaactacacttacgcatttgcaatctaaataatatacaaaagatgaacggaagagcagagatgtaattttttgacatttaactaaatatctgatagtatgaaaacatactaatgacgacatcggttccaattcccggaacaggatgtctttttgtgtttttagggagtgttttttatgaatcataccgcatatgacgtaatgagagaatatatgatcgagggagcaga

SEQ ID NO: 27057 - DNA, 260 bp, Unknown
  Description of Unknown: RightRegion for integrase B1058 sequence
atcaactatgtggatggatgcgaaaaggaatttaactacacttacgcatttgcaatctaaataatatacaaaagatgaacggaagagcagagatgtaattttttgacatttaactaaatatctgatagtatgaaaacatactaatgacgacatcggttccaattcccggaacaagatgtctttttgcgttttttagggagtgtttttatgaatcatactgcatatgacgtaatgagagaatatatgatcgagggagcaga

SEQ ID NO: 27058 - DNA, 260 bp, Unknown; identical to SEQ ID NO: 27044
  Description of Unknown: RightRegion for integrase B1059 sequence

SEQ ID NO: 27059 - DNA, 260 bp, Unknown
  Description of Unknown: RightRegion for integrase B1060 sequence
atcaactatgtggatggatgtgaaaaggaatttaactacacttacgcatttgcaatctaaataatatacaaaagatgaacggaagagcagagatacatttttttgacatttaattaaatatctggtagtatggaaacatactaatgatgacatcggttccaattcccggaacaggatgtctttttgtgtttttaaggggtgataaccatgaatcataccgcatatgacgtaatgagagaatatatgatcgagggagcaga

SEQ ID NO: 27060 - DNA, 260 bp, Unknown
  Description of Unknown: RightRegion for integrase B1061 sequence
gtcattggtgcttcggcaggtcagaggatgccggttcagctgacgatctccagcatctgatcgaacacctcttccatctggcgcaccagcgtgaactgggtgcgggcgcggtcaaggttgtggtcggggcgggcggtgtggaaatagtgatcgccctccagatagtcggtcagaaagcggatgccgcactccagcgtcatcagcttggcaccccaggcaaggctctttttctccgcagggctcatggaagccccggcggt

SEQ ID NO: 27061 - DNA, 260 bp, Unknown
  Description of Unknown: RightRegion for integrase B1062 sequence
atcaactatgtggatggatgcgaaaaggaatttaactacacttacgcatttgcaatctaaataatatacaaaagatgaacggaagagcagagatgtaattttttgacatttaaccaaatatctgatagtatgaaaacatactaatgacgacatcggttccaattcccggaacaggatgtctttttgtgtttttaaggggcgataaccatgaatcataccgcatacgacgtaatgagagaatatatgatcgagggagcaga

SEQ ID NO: 27062 - DNA, 260 bp, Unknown; identical to SEQ ID NO: 27037
  Description of Unknown: RightRegion for integrase B1063 sequence

SEQ ID NO: 27063 - DNA, 260 bp, Unknown
  Description of Unknown: RightRegion for integrase B1064 sequence
atcaactatgtggatggatgcgaaaaggaatttaactacacttacgcatttgcaatctaaataatatacaaaagatgaacggaagagcagagatgtaattttttgacatttaactaaatatctgatagtatgaaaacatactaatgacgacatcggttccaattcccggaacaggatgtctttttgtgtttttaaggggtgttttttatgaatcataccgcatatgacgtaatgagagaatatatgatcgagggagcaga

SEQ ID NO: 27064 - DNA, 260 bp, Unknown
  Description of Unknown: RightRegion for integrase B1065 sequence
atcaactatgtggatggatgcgaaaaggaatttaactacacttacgcatttgcaatctaaataatatacaaaagatgaacggaagagcagagatgtaattttttgacatttaactaaatatctgatagtatggaaacatactaatgatgacatcggttccaattcccggaacaggatgtctttttgtgcttttagggagtgataagcatgaatcatactgcatacgatgtaatgagagaatatatgattgagggcgcaga

SEQ ID NO: 27065 - DNA, 260 bp, Unknown
  Description of Unknown: RightRegion for integrase B1066 sequence
atcaactatgtggatggatgtgaaaaggaatttaactacacttacgcatttgcaatctaaataatatacaaaagatgaacggaagagcagagatgtaattttttgacatttaactaaatatctggtagtatgaaaacatactaatgacgacatcggttccaattcccggaacaggatgtctttttgtgtttttaaggggtgataaccatgaatcataccgcatatgacataatgagagaatatatgatcgagggagcaga

SEQ ID NO: 27066 - DNA, 260 bp, Unknown
  Description of Unknown: RightRegion for integrase B1067 sequence
ttagagaattataggtactggaataaagatatagggctgtatgtgcagttggtagcataattctatataggggttatctaaatataggagcctcctgtgattaagttatttataacgatcacaggaggttaattttatgataacagtagaaaagatagggcaaggtacttattttgaggatgcttttaagctctcttttaagtatgatcctgttacagtaagtaaggtaaaagagctggcacagcggagatatttaccag

SEQ ID NO: 27067 - DNA, 260 bp, Unknown; identical to SEQ ID NO: 27034
  Description of Unknown: RightRegion for integrase B1068 sequence

SEQ ID NO: 27068 - DNA, 260 bp, Unknown
  Description of Unknown: RightRegion for integrase B1069 sequence
atcaactatgtggatggatgcgaaaaggaatttaactacacttacgcatttgcaatctaaataatatacaaaagatgaacggaagagcagagatgtaattttttgacatttaactaaatatctggtagtatgaaaacatactaatgacgacatcggttccaattcccggaacaagatgtctttttgtgtttttagggagtgttttttatgaatcataccgcatatgacgtaatgagagaatatatgatcgagggagcaga

SEQ ID NO: 27069 - DNA, 260 bp, Unknown
  Description of Unknown: RightRegion for integrase B1070 sequence
gatttcgcacgatggagcaatctgctcttctatggaacggcggcttgtaaaaaatcatgatttatggtacgatattgccgatctaccacattcatcgcatggtggaagaaacaggtgctgttttcaatgaccagtcacatatcatctatgtgaactcgcagatcaaggatgaatctgcgcttggaaaactgatgcacgattttttctgtaccgatgcaaaggatatgttttatccggtgcttgcagagcgagtacaatac

SEQ ID NO: 27070 - DNA, 260 bp, Unknown
  Description of Unknown: RightRegion for integrase B1071 sequence
gatgggtgtgtacctcagtgcccggcccgactggggatcgtctggagctcgaagcggtagatctgcccggcgtccgggtatttttcgcggtcgaccgggctcagaaacatatccagcggccggacccagaggccgccgtcgccgtaaagcttgcggtagatcacgcagggctcgttcgtctcggaatcacgggcaagcgcctccaccagataataatctcccttgaaatggcggtagacccgccccggctgtacgtcacg

SEQ ID NO: 27071 - DNA, 260 bp, Unknown
  Description of Unknown: RightRegion for integrase B1072 sequence
atcaactatgtggatggatgcgaaaaggaatttaactacacttacgcatttgcaatctaaataatatacaaaagatgaacggaagagcagagatgtaattttttgacatttaagtgaatatctgatagtatgaaaacatactaatgacgacatcggttccaattcccggaacaagatgtctttttgcgtttttaaggggtgataaccatgaatcataccgcatatgatgtaatgagagaatatatgatcgagggagcaga

SEQ ID NO: 27072 - DNA, 260 bp, Unknown
  Description of Unknown: RightRegion for integrase B1073 sequence
atcaactatgtggatggatgcgaaaaggagtttaattacacttatgcatttgcaatctaaataatatacaaaagatgaacggaagagcagagatgtaattttttgacatttaactaaatatctggtagtatgaaaacatactaatgacgacatcggttccaattcccggaacaagatgtctttttgtttttttagggagtgttttttatgaatcataccgcatatgacgtaatgagagaatatatgatcgagggagcaga

SEQ ID NO: 27073 - DNA, 260 bp, Unknown
  Description of Unknown: RightRegion for integrase B1074 sequence
atcaactatgtggatggatgcgaaaaggaatttaactacacttacgcatttgcaatctaaataatatacaaaagatgaacggaagagcagagatacatttttttgacatttaattaaatatctggtagtatggaaacatactaatgatgacatcggttccaattcccggaacaggatgtctttttgtgtttttaaggggtgataactatgaatcataccgcatatgacgtgatgagagaatatatgatcgagggagcaga

SEQ ID NO: 27074 - DNA, 260 bp, Unknown; identical to SEQ ID NO: 27038
  Description of Unknown: RightRegion for integrase B1075 sequence

SEQ ID NO: 27075 - DNA, 260 bp, Unknown; identical to SEQ ID NO: 27040
  Description of Unknown: RightRegion for integrase B1076 sequence

SEQ ID NO: 27076 - DNA, 260 bp, Unknown
  Description of Unknown: RightRegion for integrase B1077 sequence
atcaactatgtggatggatgcgaaaaggaatttaactacacttacgcatttgcaatctaaataatatacaaaagatgaacggaagagcagagatgtaattttttgacatttaagtgaatatctgatagtatgaaaacatactaatgacgacatcggttccaattcccggaacaggatgtctttttgtgtttttagggagtgataatcatgaatcataccgcatatgatgtaatgagagagtacatgatcgagggagcaga

SEQ ID NO: 27077 - DNA, 260 bp, Unknown
  Description of Unknown: RightRegion for integrase B1078 sequence
agcgattgcggaaaagaggaaataggaatagacaatcatatatttacctctgtacgctaatggtaactaaagcagatgtgcaggcctttatggctgaacgttcagagtatacaaaagcgaacagatttgaagatattgaagtaaaagtctatatataaagttctgcgagggaaagcaacattgctttccctcgtttcatgtttgggaataaaccctaattatcagggtttgttcctttttttattttcattatacgagga

SEQ ID NO: 27078 - DNA, 260 bp, Unknown; identical to SEQ ID NO: 27044
  Description of Unknown: RightRegion for integrase B1079 sequence

SEQ ID NO: 27079 - DNA, 260 bp, Unknown
  Description of Unknown: RightRegion for integrase B1080 sequence
atcaactacgtggagggatatgaaaaggaatttaactacacttacgcatttgcaatctaaataatatacaaaagatgaacggaagagcagagatgtaattttttgacatttaactaaatatctgatagtatggaaacatactaatgatgacatcggttccaattcccggaacaggatgtctttttgcgttttagaggtgataaccatgaatcataccgcatacgatgtaatgagagaatatatgatcgagggcgcagagt

SEQ ID NO: 27080 - DNA, 260 bp, Unknown
  Description of Unknown: RightRegion for integrase B1081 sequence
gtagagattttgacgttcaagaacggaatttctcatacgttcacctataaggcaatataataagccccagagccgcgctcttgcggttctggggctttctttttattcgtccgtgtagtcgctggcgttaaaaagccctgcggaatagacgtgccctattctgcggccgttgctgtcgatcgcggtgcgccgcaccgtttcctgaccgtacatattcggccccagctcatagaggtacttcttcgtgcggtactgcccgg

SEQ ID NO: 27081 - DNA, 260 bp, Unknown
  Description of Unknown: RightRegion for integrase B1082 sequence
gtggaaatgctgacgttcaagaatggaatttctcacaagttcacttataaggcaatataaaaggcccggagccgctttcctgcggttctgggcctttttgctgtattcggtattaaacgtccctgctgactctgtgatatgcgtaccagtgaccccggcggcggaacagtttgtaatgggttgtaaattcttgcccggtgcagtcgtaggggctgtcgtaggcttccagatagcagttgtcccggaaccagtcggccgct

SEQ ID NO: 27082 - DNA, 260 bp, Unknown
  Description of Unknown: RightRegion for integrase B1083 sequence
gtggaaacgctgacattcaagaacggaatatctcacaagtttacctatctcgcaatataaaaggcccggagccgctttcctgcggttctgggccttttgctgtattcggttcaaacgtcccgactgaccatgtgataggcgtaccagtggccccgccgctggaacaggtgataccagcttgtgaactcctgcccggtgcagtcataggggctgttgtaggcttccagatagcagttatcatcgaaccactcagcggcgtc

SEQ ID NO: 27083 - DNA, 260 bp, Unknown; identical to SEQ ID NO: 27071
  Description of Unknown: RightRegion for integrase B1084 sequence

SEQ ID NO: 27084 - DNA, 260 bp, Unknown
  Description of Unknown: RightRegion for integrase B1085 sequence
gtggaaatgctgacgttcaagaatggaatttctcacaagttcacttataaggcaatataaaaggcccggagccgctttcctgcggttctgggccttttgctgtattcggttcaaacgtcccggctgaccatgtgataggcgtaccagtggccccgccgctggaacaggtgataccagcttgtgaactcctgcccggtgcagtcataggggctgttgcaggcttccagatagcagttatcatcgaaccactcagcggcgtc

SEQ ID NO: 27085 - DNA, 260 bp, Unknown
  Description of Unknown: RightRegion for integrase B1086 sequence
atcaactatgtggatggatgcgaaaaggaatttaactacacttacgcatttgcaatctaaataatatacaaaagatgaacggaagagcagagatgtaattttttgacatttaactaaatatttgatagtatggaaacatactaatgatgacatcggttccaattcccggaacaggatgtctttttgcatttttagggggtgataaccatgaaccataccgcatatgatgtaatgagagaatatatgatcgagggagcaga

SEQ ID NO: 27086 - DNA, 260 bp, Unknown; identical to SEQ ID NO: 27068
  Description of Unknown: RightRegion for integrase B1087 sequence

SEQ ID NO: 27087 - DNA, 260 bp, Unknown; identical to SEQ ID NO: 27085
  Description of Unknown: RightRegion for integrase B1088 sequence

SEQ ID NO: 27088 - DNA, 260 bp, Unknown
  Description of Unknown: RightRegion for integrase B1089 sequence
gtagagactttgacgttcaagaacggaatttctcatacgtttacctataaggcaatataataagccccagagccgcgctcttgcggttctggggctttctttttattcgtccgtgtagtcgctggcgttgaaaagccctgcggaatagacgtgcccgattctgcggccgttgctgtcgatcgcggtgcgccgcactgtttcctgaccgtacatattcggccccagctcatagaggtacttcttcgtgcggtactgcccgg

SEQ ID NO: 27089 - DNA, 260 bp, Unknown
  Description of Unknown: RightRegion for integrase B1090 sequence
gtagagactttgacgttcaagaacggaatttctcatacgtttacctataaggcaatataataagccccagagccgcgctcttgcggttctggggccttctttttattcgtccgtgtagtcactggcattaaaaagccctgcggaatagacgtgccctattctgcggccgttactgtcgatcgcggtgcgccgcaccgtttcctgaccgtacatattcggccccagctcatagaggtacttcttcgtgcggtactgcccgg

SEQ ID NO: 27090 - DNA, 260 bp, Unknown; identical to SEQ ID NO: 27059
  Description of Unknown: RightRegion for integrase B1091 sequence

SEQ ID NO: 27091 - DNA, 260 bp, Unknown
  Description of Unknown: RightRegion for integrase B1092 sequence
atcaactatgtggatggatgcgaaaaggaatttaactacacttacgcatttgcaatctaaataatatacaaaagatgaacggaagagcagagatgtaattttttgacatttaactaaatatttgatagtatggaaacatactaatgatgacatcggttccaattcccggaacaggatgtctttttgcatttttaggggggtgataaccatgaaccataccgcatatgatgtaatgagagaatatatgatcgagggagcag

SEQ ID NO: 27092 - DNA, 260 bp, Unknown
  Description of Unknown: RightRegion for integrase B1093 sequence
atcaactatgtggatggatgcgaaaaggaatttaactacacttacgcatttgcaatctaaataatatacaaaagatgaacggaagagcagagatgtaattttttgacatttaagtgaatatctgatagtatgaaaacatactaatgacgacatcggttccaattcccggaacaggatgtctttttgtgtttttaaggggtgataaccatgaatcataccgcatatgacgtaatgagagaatatatgatcgagggagcaga

SEQ ID NO: 27093 - DNA, 260 bp, Unknown
  Description of Unknown: RightRegion for integrase B1094 sequence
gtggaaatgctgacgttcaagaatggaatttctcacaagttcacttataaggcaatataaaaggcccggagccgctttcctgcggttctgggccttttgctgtattcggttcaaacgtcccgactgaccatgtgataggcgtaccagtggccccgccgctggaacaggtgataccagcttgtgagctcctgttcggtgcagtcataggggctgttgtaggcttccagatagcagttatcatcgaaccactcagcggcgtc

SEQ ID NO: 27094 - DNA, 260 bp, Unknown; identical to SEQ ID NO: 27033
  Description of Unknown: RightRegion for integrase B1095 sequence

SEQ ID NO: 27095 - DNA, 260 bp, Unknown; identical to SEQ ID NO: 27037
  Description of Unknown: RightRegion for integrase B1096 sequence

SEQ ID NO: 27096 - DNA, 260 bp, Unknown
  Description of Unknown: RightRegion for integrase B1097 sequence
gtaaccattcaaatggtcgggagcgtgttcgttctgtactgcgagataccaactcgttaataatggtaagccccggttctttcatgtttttggtgaaagagccggggtatttttgttatttttacccgtttttcggaagaatttgccgaaagtagtagtttcctgccaaaatccagctaagccgatttgaaatcggtagaattttggataaaggagattggcttatgattaggattttactgtcaacgcgtctcggcgaa

SEQ ID NO: 27097 - DNA, 260 bp, Unknown
  Description of Unknown: RightRegion for integrase B1098 sequence
atcaactatgtggatgggtgcgaaaaggaatttaattacacttacgcatttgcaatctaaataatatacaaaagatgaacggaagagcagagatgcaattttttgacatttaactaaatatctgatagaatgaaaacatactaatgacgacatcggttccaattcccggaacaggatgtctttttgcatttttagggagtgataagcatgaatcataccgcatacgatgtaatgagagaatatatgatcgagggcgcaga

SEQ ID NO: 27098 - DNA, 260 bp, Unknown
  Description of Unknown: RightRegion for integrase B1099 sequence
ggtctggtgtcaaatatcgtgttcaagaacggcttatgtcacacatttattttcaggtaagcaaaaaagcagggaattaacaccctgctttctttatttctgctatccttaaaaatataagatttcaagttacaaaattagcatagcatccgcaacttttaaaaatcctgcaatattcgcgcctgcaatgaggtttccatccatgccgtatttctttgccgcactgtcgatattgttaaaaatatttttcataatctttt

SEQ ID NO: 27099 - DNA, 109 bp, Unknown
  Description of Unknown: RightRegion for integrase B1100 sequence
ggccaggtgcaaaccatcgtgttcaagaacggcctctcacacactttcatcctgaaatgacaaaagacccgacggcataatcgccatcgggtctttacttttttctaca

SEQ ID NO: 27100 - DNA, 260 bp, Unknown
  Description of Unknown: RightRegion for integrase B1101 sequence
aatggaaaggttcagcggatcgtttttagaaacggactttctcaaacctttatcaggtaaaaataaagcaccagaatttttgaactggtgcttttattttgtcctcgtttggtcctctggactgtctgcggacattatatggatattttacggacattccatagattttatacggactgtccatgcaaattgcattttattttttaggtcagtagcaatttgcactgcctgattgaaccactcaatataccactgatagt

SEQ ID NO: 27101 - DNA, 260 bp, Unknown
  Description of Unknown: RightRegion for integrase B1102 sequence
gatgggtgtgtacctcagtgcccagcccggctggggatcgtctggagctcgaagcggtaggtctgcccggcgtccgggtatttttcgcggtcgaccgggctcaggaacatatccagcggccggacccagaggccgccgtcgccgtaaagcttgcggtagatcacgcagggctcgttcgtctcggaatcacgggcaagcgcctccaccagataataatcccccttgaaatggcggtagacctgccccagctgtacgtcacg

SEQ ID NO: 27102 - DNA, 260 bp, Unknown
  Description of Unknown: RightRegion for integrase B1103 sequence
caaagatattgccgcagcttttttctttgctgtatcgcacaaaatcggcaaaggcgatgaccgattttcaaagtgcgttttatagagatgtccaactgcttccgggcggttggattttttcaggctgtcgaaaaactcttgtaggggcgagcattgctcgcccgcgcccgtttgccttgcaagaaactatcccggaaaatgcgttgctgcggtaagttgacgggcgaccaatggtcgcccctacacacgcaatagagcaa

SEQ ID NO: 27103 - DNA, 260 bp, Unknown
  Description of Unknown: RightRegion for integrase B1104 sequence
tgggggaaaactatatcaaccatacatattaaaaagtatctcagaaaaagaaacgggtaacattattaagaagaatagcaagaaattcattcgtcaaactattagtaaagaaacttctaatacaatgcgcagagcattagaaaatgttgttgccaaaggtggaggaaaggctgcatatattgacggataccgtattggtggaaaaacaggaactgcacaaaaagtagaaaatggcgtttacctagtaaataattacatta

SEQ ID NO: 27104 - DNA, 260 bp, Unknown
  Description of Unknown: RightRegion for integrase B1105 sequence
ggtctggtgtcaaacattgtattcaagaacggcttatgtcacacattcattttcaggtaagcaaaaagcagggaactaagccctgcttttcttcttttccgttatccttataaatataagattttaagttacaaaattagcatagcgtctccaaaactgaagaatctgtatttctcctgcaccgcaacttcatatgcatgaagcacatgttctcttcctgcaagtgctgataccagcataacaagtgttgattctggaag

SEQ ID NO: 27105 - DNA, 114 bp, Unknown
  Description of Unknown: RightRegion for integrase B1106 sequence
gtttcctcattttgttcaccgcagcacaggcagctatcgctgagaagaatgcataattagcataaaatatagattcatgcgcgagcatgagagtgtccaaacgtaaaatggctc

SEQ ID NO: 27106 - DNA, 260 bp, Unknown
  Description of Unknown: RightRegion for integrase B1107 sequence
ggccgggtgcaaaccatcgtgttcaagaacggcctctcacacactttcatcctgaaatgacaaaagacccgacggcataatcgccatcgggtctttacttttttctacatacaaatatcgcaaaaagcgcgaattttgtatcaaactatcagcatagcatcgccaaaggaaaagaagcgatacttttcctccacagctacgcggtaagcttccatggtcttttcgtaaccatagaaagcggacaccagcatgatcagggt

SEQ ID NO: 27107 - DNA, 260 bp, Unknown
  Description of Unknown: RightRegion for integrase B1108 sequence
ggtctggtgtcaaatatcgtgttcaagaacggattatgtcacacatttattttcagataagcaaaaagcagggagctaagccctgcttttcttcttttccgttatccttataaatataagattttaagttacaaaattagcatagcgtctccaaagctgaagaatctgtatttttcctgcacagcaacctcataggcatgaagcacatgctctcttccagcaagtgctgataccagcataacaagtgttgattctggaag

SEQ ID NO: 27108 - DNA, 260 bp, Unknown
  Description of Unknown: RightRegion for integrase B1109 sequence
ggtctggtgtcaaatatcgtgttcaagaacggattatgtcacacatttattttcagataagcaaaaagcagggagctaagccctgcttttcttcttttccgttatccttataaatataagattttaagttacaaaattagcatagcgtctccaaatgagaagaatctgtacttctcctccaccgcaatcttatatgcttcaagaatcttctcgcggtcatacaatgcagaaaccagcatcaacaatgtggattccggcaa

SEQ ID NO: 27109 - DNA, 260 bp, Unknown
  Description of Unknown: RightRegion for integrase B1110 sequence
ccagctgggctgttgctgttttacatagcacgaccaaggcaaagagaccgcagatcgtagtctgcggtctcttcttttttttggtgcgggggattaatgctgtactacatagcagtagtacgccgcggccttgtcctcgacggcgtccttgtcatcgagccaagcgtgcgccatgtccgcgtaaaactcggcgttgccgccaagaccgtactttttcgcgacctcgcaaaaatcggagtacatcgcgcacattatcgcgt

SEQ ID NO: 27110 - DNA, 260 bp, Unknown
  Description of Unknown: RightRegion for integrase B1111 sequence
ggtctggtgtcaaatatcgtgttcaagaatggattatgtcacacatttattttcagataagcaaaaagcagggagctaagccctgcttttcttcttttcagttatccttataaatataagattttaagttacaaaattagcatagcgtcaccaaagctgaaaaacctatatctttcctctacagcctctttgtatgcattgaggacatgctctctgcctgctaatgctgacacaagcatgacaagtgtagactgtggcag

SEQ ID NO: 27111 - DNA, 260 bp, Unknown
  Description of Unknown: RightRegion for integrase B1112 sequence
ggtctggtgtcaaatatcgtgttcaaaaacggcttatgccatacatttattttcaggtaagcaaaaagcagggaactaagccctgcttttcttcttttccgttatccttacaaatataagattttaagttacaaaattagcatagcgtcaccaaagctgaaaaacctgtatctttcctctacagcctctttgtatgcattgaggacatgctctctgcctgctaatgctgacacaagcatgacaagtgtagactgtggcag

SEQ ID NO: 27112 - DNA, 201 bp, Unknown
  Description of Unknown: RightRegion for integrase B1113 sequence
ggtctggtgtcaaacattgtattcaagaacggcttatgtcacacattcattttcaggtaagcaaaaagcagggaactaagccctgcttttcttcttttccgttatccttataaatataagattttaagttacaaaattagcatagcgtcaccaaagctgaaaaacctgtatctttcctctacagcctctttgtatgcattg

SEQ ID NO: 27113 - DNA, 260 bp, Unknown
  Description of Unknown: RightRegion for integrase B1114 sequence
ggccgggtgcaaaccatcgtgttcaagaacggtctctcgcacaccttcatcctgaaatgacaaaagacccgacggcataatcgccatcgggtctttacttttttctacatacaaatatcgcaaaaagcgcgaattttgtatcagactatcagcatagcatcgccaaaggagaagaaacggtacttctctgccacagctacctcataggcgtgcatggtcttttcgtagccgtatagggcggacgccaacatgatcagggt

SEQ ID NO: 27114 - DNA, 198 bp, Unknown
  Description of Unknown: RightRegion for integrase B1115 sequence
ggccgggtgcaaaccatcgtgttcaagaacggcctctcacacactttcatcctgaaatgacaaaagacccgacggcataatcgccatcgggtctttacttttttctacatacaaatatcgcaaaaagcgcgaattttgtatcaaactatcagcatcgcatcgccaaaggagaagaaacggtacttctctgccacagct

SEQ ID NO: 27115 - DNA, 260 bp, Unknown; identical to SEQ ID NO: 27070
  Description of Unknown: RightRegion for integrase B1116 sequence

SEQ ID NO: 27116 - DNA, 260 bp, Unknown
  Description of Unknown: RightRegion for integrase B1117 sequence
agaaataatagccacaatggcacatcagcttatggaaaacgcttcaataaaagaacttgaagaagcaggtcttggtggacactatgtagaccataaaaaagcaacattttatacagatgctacaggtaatgctattgtttcctaactgcatagggatacagttagggatgataaaattctataaaaaaagtcttatcaacttcattatattttacagacttaacaatatttctaattaattgtcttttaacctttatatc

SEQ ID NO: 27117 - DNA, 260 bp, Unknown
  Description of Unknown: RightRegion for integrase B1118 sequence
gtttccgcattttgttcaccgcagcacaggcagctatcgctgagaagaatgcataattagcataaaatatagattcatgcgcgagcatgagagtgtccaaacgtaaaatggctcctggaactttagaaaaatctgaagctccaggagctttttgatgtattttgtagtgaaacgtggaataatcatttgtagaaagttttaattatgtgatctttgcatttatgatcaggagatttgatttcaaaactccggaatgcgag

SEQ ID NO: 27118 - DNA, 260 bp, Unknown
  Description of Unknown: RightRegion for integrase B1119 sequence
ggccgggtgcaaaccatcgtgttcaagaacggtctctcacacactttcatcctgaaatgacaaaagacccgacggcataatagccatcgggtctttacttttttctacatacaaatatcgcaaaaagcgcgaattttgtatcaaactatcagcatcgcatcgccgaaggaaaagaagcggtacttttcctctacagcaactttataggcagccatggtcttttcgtagccgtagagggcagagaccagcatgatgagggt

SEQ ID NO: 27119 - DNA, 260 bp, Unknown
  Description of Unknown: RightRegion for integrase B1120 sequence
gttaccttggaaaagtttccgacacttgagacggttgttcttttgtcccaactgaaataaaagccggatgattacattaatgtcacgattgaacttgatgatgtggatatttcttctggaaagtctgggtctagtggaacactacatttagaaaatccaatcgctattatactatatatggtatgatagcgattggatttttctttatagagtttttttccaatcattggtatatacgaaatgattgaaatcaggtataa

SEQ ID NO: 27120 - DNA, 260 bp, Unknown
  Description of Unknown: RightRegion for integrase B1121 sequence
ggtctggtgtcaaatatcgtgttcaagaacggattatgtcacacatttattttcagataagcaaaaagcagggagctaagccctgcttttcttcttttccgttatccttataaatataagattttaagttacaaaattagcatagcgtctccaaaactgaagaatctgtatttttcctgcacagcaacctcataggcatgaagcacatgctctcttccagcaagtgctgataccagcataacaagtgttgattctggaag

SEQ ID NO: 27121 - DNA, 109 bp, Unknown
  Description of Unknown: RightRegion for integrase B1122 sequence
gtttcctcattttgttcgccgcagcacaggcagctatcgcagagaagaatgcataattagcatattgttaaggggcaaagcgaaatatcctctaaagaggtaaaatagt

SEQ ID NO: 27122 - DNA, 260 bp, Unknown
  Description of Unknown: RightRegion for integrase B1123 sequence
acgaataagtttatatataaggccacaaagccccctaagaacgcttctacgaaaccgtgacatagcaatagccgcccgacgaatcgggcggctatttttatccatttttgcacttgcatccgcaatttctgcatgtctcggcggagacctcttttcccgtgcgcttgcagtagaaccgcgggccacttccctgccgtatgtgccggcagttcgggaatcctctttccatcaagacgcttttcttcggcttctctattttt

SEQ ID NO: 27123 - DNA, 260 bp, Unknown
  Description of Unknown: RightRegion for integrase B1124 sequence
cgcattgtagaaatcgtgttctccaatgggctttcacaccaattcatatatcgcaaataaataagtcccaacaataggatttgcccatatctcctatcgttgggattttgcaaatgctttatttacgggatttcttgcatctcggaaaccacgttcatctgacacccaaaggttgtgacgcagaaagtcatcggccttcctgcttcttctgcttcttttcttacgtattctttcgctttttctatgaaataatattgtct

SEQ ID NO: 27124 - DNA, 109 bp, Unknown
  Description of Unknown: RightRegion for integrase B1125 sequence
agggtggctgccatcaccttcaaaaacggaatagagcaccgcttcacctataaggcgtgaaaaagcccccggccgtgtggtcgggggcttcgctcttctcatgcgcaat

SEQ ID NO: 27125 - DNA, 109 bp, Unknown
  Description of Unknown: RightRegion for integrase B1126 sequence
ggccgggtgcaaaccatcgtgttcaagaacggtctctcacacactttcatcctgaaatgacaaaagacccgacggcataatcgccatcgggtctttacttttttctaca

SEQ ID NO: 27126 - DNA, 260 bp, Unknown
  Description of Unknown: RightRegion for integrase B1127 sequence
cggttcagaaatggcatagaacaccgcttcgtttacaagcaaatcgaaccggcagaataacgaaaaagccggacggcataaggatttcacccttgtcgtccggctttgtttggttacttgtttagtatcagcatggcatccccgaaagaaaaaaaccggtaacgttccttcaccgcctcacggtagacgcgcagcgcctcctcacgccccatcagggcggaaatgagcatcaaaagcgtgctctgcggcaggtggaagtt

SEQ ID NO: 27127 - DNA, 260 bp, Unknown
  Description of Unknown: RightRegion for integrase B1128 sequence
aatggaaaggttcagcggatcgtttttagaaacggactttctcaaacctttatcaggtaaaaataaagcaccagaatttttgaactggtgcttttattttgtctgcatagtgtccacggacattccataggacaaaatgcagatatttcacggacattccatagattttacacggactgtccaagcaaattacgttttattttttatgtcaatagcaatttgcactgcctgattgaacccctctatatacccctgatagt

SEQ ID NO: 27128 - DNA, 260 bp, Unknown
  Description of Unknown: RightRegion for integrase B1129 sequence
agtaacggcaccaaccaaaggaagcattggaatgaatggccgtgtggcatctatgcttgaagtaggaacgggatttcatccggaattaacgggacgtgaaaacatttatatgaatggggcaatattggggatgagccgtgcagaaatcggagaaaaactggatcagattatcgcattttccgaatgtggagagtttatcgatacgcctgtaaaacgatattccagtgggatgtatgttaaacttgcattttctgtggcag

SEQ ID NO: 27129 - DNA, 260 bp, Unknown
  Description of Unknown: RightRegion for integrase B1130 sequence
acgaataagtttatatataaggccacaaagccccctaagaacgcttctacgaagccgtgacatagcaatagccgcccgacgaatcgggcggctatttttatccatttttgcacttgcatccgcaatttctgcatgtctcggcggagacctcttttcccgtgcgcttgcagtagaaccgcgggccacttccctgccgtatgtgccggcagttcgggaatcctctttccatcaagacgcttttcttcggcttctctattttt

SEQ ID NO: 27130 - DNA, 260 bp, Unknown
  Description of Unknown: RightRegion for integrase B1131 sequence
ggccgggtgcaaaccatcgtgttcaagaacggcctctcacacactttcatcctgaaatgacaaaagacccgacggcataatcgccatcgggtctttacttttttctacatacaaatatcgcaaaaagcgcgaattttgtatcaaactatcagcatagcatcgccaacgtgtcggaaacgtacagaatctctacattctgcgatttcttttacgctgaaaaaataaggtcgagtcgtcctatacattctactacgaaaaag

SEQ ID NO: 27131 - DNA, 260 bp, Unknown
  Description of Unknown: RightRegion for integrase B1132 sequence
cttaacaaatccgacttccggggaggtcaaaatctggggaaaacccttgcaggggaatgaaaagaaattgctgccccgtatcggcagcttgattgagtcccccggtttttatcccaatctgaccggcacagagaacctgcgtatctttgctaccctgcggggcgtgccaaacaatcatgccatcaaagacgctctggatttggtgggactgccctacaaagataaaaagctcttttcacagtattctcttggtatgaagc

SEQ ID NO: 27132 - DNA, 260 bp, Unknown
  Description of Unknown: RightRegion for integrase B1133 sequence
cgcattgtggaaatcgtgttctccaatgggctttcacaccaattcatatatcgcaaataaataagtcccaacaataggatttgcccatgtctcctatcgttgggattttgtaaatgctttattttacgggatttcttacatctcggaaaccacgttcatctgacacccaaaggttgtgacgcagaaagtcatcggccttcctgcttcttctgcttcttttcttacgtattctttcgctttttctatgaaataatattgtc

SEQ ID NO: 27133 - DNA, 260 bp, Unknown
  Description of Unknown: RightRegion for integrase B1134 sequence
acgaataagtttatatataaggccacaaagccccctaagagcgcttctacgaagccgtgacatagcaatagccgcccgacgaatcgggcggctattttttatccatttttgcacttgcatccgcaatttctgcacgtctcggcggccacttctttccctgttcgcttgcagtagaaccgcgggccacttccctgccgtatgtgccggcagttcgggaatcctctttccatcaagacgcttttcttcggcttctctatttt

SEQ ID NO: 27134 - DNA, 260 bp, Unknown
  Description of Unknown: RightRegion for integrase B1135 sequence
ggccgggtgcaaaccatcgtgttcaagaacggcctctcacacactttcatcctgaaatgacaaaagacccgacggcataatagccatcgggtctttacttttttctacatacaaatatcgcaaaaagcgcgaattttgtattaaactatcagcatagcatcgccaaaactgaaaaagcggtacttctgttccacagcaaccttgtatgcagccatggtcttttcgtagccgtagagcgccgatatcagcatgatgagggt

SEQ ID NO: 27135 - DNA, 260 bp, Unknown
  Description of Unknown: RightRegion for integrase B1136 sequence
acaatgagtgtttccgttcactggccagaacaatatctcatgcgaaggattccagcatgacggagaaggcaaaacagaccccctgttttcagataattatgataatgcgtaagtagttgattttcaacggtcttgctttttccgacacaacttttcgcttatattcgttctatatataaaaagaaaaaacctgtcatattgtgaaggcagttaaaaaaaaggagaaaacaaaaatgctgaaaagacacgttgatggagaa

SEQ ID NO: 27136 - DNA, 260 bp, Unknown
  Description of Unknown: RightRegion for integrase B1137 sequence
gtttcctcattttgttcaccgcagcacaggcagctatcgctgagaagaatgcataattaacataaaatatagattcatgcgcgagcatgagagtgtccaaacgtaaaatggctcctggaactttagaaaaatctgaagctccaggagctttttgatgtatttgtagtgaaacgtggaataatcatttgtcagaaagttttaattatgtgatctttgcatttatgatcaggagatttgatttcaaaactccggaatgcgag

SEQ ID NO: 27137 - DNA, 260 bp, Unknown
  Description of Unknown: RightRegion for integrase B1138 sequence
aattgcatgacatcggggacgtcatacaggcggaaacagcccagaaggcacaatggctgaagctgagcgagcagaaccggctgtatgacaaaatcgagaccgtcacagcccgccagctggcacggatacaggaatatctgatcgcgctcaaggccacggacgatgtcgataccgcccgccggctgctgaagcagatcgtcattttgggaacctatatcaagcggcgcagcaaccttgtttttgtttgcgacaaggcggag

SEQ ID NO: 27138 - DNA, 260 bp, Unknown
  Description of Unknown: RightRegion for integrase B1139 sequence
ggtctggtgtcaaacattgtattcaagaacggcttatgtcacacattcattttcaggtaagcaaaaagcagggaactaagccctgcttttcttcttttccgttatccttataaatataagattttaagttacaaaattagcatagcgtccccaaaactaaagaaacggtatttttcttctactgctttcttataggcagccagaatatgttccctgcctgcaagagcagacaccaacatcacaagggtagactgtggcag

SEQ ID NO: 27139 - DNA, 109 bp, Unknown
  Description of Unknown: RightRegion for integrase B1140 sequence
cgtgtgacggccatcacattcaaaaacggcattgagcaccgcttcacctacaagacatgaggaaagcccccgaccacaaggccgggggcttcgtcatacattatattca

SEQ ID NO: 27140 - DNA, 260 bp, Unknown
  Description of Unknown: RightRegion for integrase B1141 sequence
ggccgggtgcaaaccatcgtgttcaagaacggcctctcacacactttcatcctgaaatgacaaaagacccgacggcataatcgccatcgggtctttacttttttctacatacaaatatcgcaaaaaacgcgaattttgtatcaaactatcagcatagcatccacgatactaccgggaagcgtgataccggagtggaaagtatcgaaaatacgcacgttatctttctttctgggcttaaaaaggcatcgtgttatcatctg

SEQ ID NO: 27141 - DNA, 260 bp, Unknown
  Description of Unknown: RightRegion for integrase B1142 sequence
ggtctggtgtcaaatatcgtgttcaaaaacggcttatgccatacatttattttcaggtaagcaaaaagcagggaactaagccctgcttttcttcttttccgttatccttataaatataagattttaagttacaaaattagcatagcatcaccaaagctgaaaaacctgtatctttcctctacagcctctttgtatgcattgaggacatgctctctgcctgctaatgctgacacaagcatgacaagtgtagactgcggcag

SEQ ID NO: 27142 - DNA, 260 bp, Unknown
  Description of Unknown: RightRegion for integrase B1143 sequence
gtaacctctattcaattcacaaatgagttaatcgttcggtttatatatgaccgaagataatcctaaaagcctatcaaaaatacccagtcctgaaatgtgcagaactgggtatttattcatttttcggctgttttgtgtggaaaattattcatttgcttcgaagcggttttatatacatcggctaataaattgaagaagcatgatccaaaaacagccaattttcttgtgttcaaagcatcagaacgcgccgaaaaagcctt

SEQ ID NO: 27143 - DNA, 260 bp, Unknown
  Description of Unknown: RightRegion for integrase B1144 sequence
ggtctggtgtcaaacattgtattcaagaacggcttatgtcacacattcattttcaggtaagcaaaaagcagggaactaagccctgcttttcttcttttccgttatccttataaatataagattttaagttacaaaattagcatagcatccccgaacctttaggaatgtagccgaaatgttacatttgtcagtatatcatatatataggaagtaatccagttctttttttctgtactattcctcataaataaatccgttgt

SEQ ID NO: 27144 - DNA, 109 bp, Unknown; identical to SEQ ID NO: 27125
  Description of Unknown: RightRegion for integrase B1145 sequence

SEQ ID NO: 27145 - DNA, 260 bp, Unknown
  Description of Unknown: RightRegion for integrase B1146 sequence
ggccgggtgcaaaccatcgtgttcaagaacggcctctcacacactttcatcctgaaatgacaaaagacccgacggcataatcgccatcgggtcttttactatgactaaatcacggaagcatttcttcgattttcaaaatgtcaacagggtcaagtgagccaatcttcacaataaaatcggatgctacgacatttaatcgttttccaatccgaacagttgtttccttatgcagtccagcctctcgccatttaacaagagtg

SEQ ID NO: 27146 - DNA, 260 bp, Unknown; identical to SEQ ID NO: 26718
  Description of Unknown: RightRegion for integrase B1147 sequence

SEQ ID NO: 27147 - DNA, 260 bp, Unknown
  Description of Unknown: RightRegion for integrase B1148 sequence
ggtctggtgtcaaatatcgtgttcaaaaacggcttatgccatacatttattttcaggtaagcaaaaagcagggaactaagccctgcttttcttcttttctgctgtccttataaatataagattttaagttacaaaattagcatagcgtccccaaaactaaagaatctgtaacgttcttttactgcaacttcataagcattaagaacattttctcttcctgcaagtgctgacacaagcattacaagagttgattctgggag

SEQ ID NO: 27148 - DNA, 109 bp, Unknown
  Description of Unknown: RightRegion for integrase B1149 sequence
ggtctggtgtcaaatatcgtgtttaagaacggcttatgtcacacatttattttcaggtaagcaaaaaagcagggaattaacaccctgctttctttatttctgctatcct

SEQ ID NO: 27149 - DNA, 109 bp, Unknown
  Description of Unknown: RightRegion for integrase B1150 sequence
ggtctggtgtcaaatatcgtgttcaagaatggattatgtcacacatttattttcagataagcaaaagcagggagctaagccctgcttttcttcttttcagttatcctta

SEQ ID NO: 27150 - DNA, 260 bp, Unknown
  Description of Unknown: RightRegion for integrase B1151 sequence
ggtctggtgtcaaacattgtattcaagaacggcttatgtcacacattcattttcaggtaagcaaaaagcagggaactaagccctgcttttcttcttttccgttatccttataaatataagattttaagttacaaaattagcatagcgtcaccaaaggagaagaaacgatatctctccttcacagcctcctcataagccgccatgatcttgtctctgcctgccagtgcagacaccagcatcatcagcgtggactccggcag

SEQ ID NO: 27151 - DNA, 260 bp, Unknown
  Description of Unknown: RightRegion for integrase B1152 sequence
ggccgggtgcaaaccatcgtgttcaagaacggtctctcgcacaccttcatcatgaaatgacaaaagacccgacggcataatcgccatcgggtctttacttttttctacatacaaatattgcaaaaagcgcgaattttgtatcaaactatcagcatagcatcgccaaaggagaagaaacggtacttctctgccacagctacctcataggcgtgcatggtcttttcgtagccgtacagggcggacaccaacatgatcagggt

SEQ ID NO: 27152 - DNA, 260 bp, Unknown
  Description of Unknown: RightRegion for integrase B1153 sequence
ggccgggtgcaaaccatcgtgttcaagaacggtctctcacacactttcatcctgaaatgacaaaagacccgacggcataatcgccatcgggtctttacttttttctacatacaaatatcgcaaaaagcgcgaattttgtatcaaactatcagcatagcatcgccgaaggaaaagaagcggtacttttcctctacggcaactttataggcagccatggtcttttcgtagccgtagagggcagagaccagcatgatgagggt

SEQ ID NO: 27153 - DNA, 260 bp, Unknown
  Description of Unknown: RightRegion for integrase B1154 sequence
cgcattgtggaaatcgtgttctccaatggtctttcacatcaattcatatatcgcaaataaataagtcccaacaataggatttgcccatgtctcctatcgttgggattttgtaaatgctttattttacgggatttcttacatctcggaaaccacgttcatttgacatccaaaggttgtgatatgcgcgaaaagtggacgtcctagtttttctgattctcttctgacatattctttcgctttttttataaaataatactgtc

SEQ ID NO: 27154 - DNA, 260 bp, Unknown
  Description of Unknown: RightRegion for integrase B1155 sequence
ttccgaaacggtcttactcatacattttactataaggacgtagaaaaaccagaggcataaacctctggttttattgtctgaattacattacaaatgtaagatgtaggtactattcgataaacatcgcatctccaaaggagaagaaacgatatttctcctgtactgcaacctcataggcatgcatgatattctccttacctgccagtgcagataccagcataacgagtgtagattccggcaggtggaagtttgtaatcagg

SEQ ID NO: 27155 - DNA, 109 bp, Unknown
  Description of Unknown: RightRegion for integrase B1156 sequence
gatgggtgtgtacctcagtgcccagcccggctggggatcgtctggagctcgaagcggtaggtctgcccggcgtccgggtatttttcgcggtcgaccgggctcaggaaca

SEQ ID NO: 27156 - DNA, 109 bp, Unknown
  Description of Unknown: RightRegion for integrase B1157 sequence
ggccgggtgcaaaccatcgtgttcaagaacggcctctcacacactttcatcctgaaatgacaaaagacccgacggcataatcgccatcgggtctttacttttttctaca

SEQ ID NO: 27157 - DNA, 260 bp, Unknown; identical to SEQ ID NO: 26718
  Description of Unknown: RightRegion for integrase B1158 sequence

SEQ ID NO: 27158 - DNA, 260 bp, Unknown
  Description of Unknown: RightRegion for integrase B1159 sequence
ctaagctcctataaatactggaataagaaaatagatctctatgtgaggttagtagcataatttttatatatggggtatctaaaattatatacctcctgtgattaagttaagtatcaaaatcacaggaggtatatttttatggtatcggttgaaaagctggataaaggtacctattttgaggatgcctttaaggtttcttttaagtacgatcctactacggtagctaagataaaaaagctggcggaaaggagatacttacc

SEQ ID NO: 27159 - DNA, 260 bp, Unknown
  Description of Unknown: RightRegion for integrase B1160 sequence
ggtctggtgtcaaatatcgtgttcaaaaacggcttatgccatacatttattttcaggtaagcaaaaagcagggaactaagccctgcttttcttcttttccgttatccttacaaatataagattttaagttacaaaattagcatagcgtcccctatgtgtcgggttcgctttaatatctttcttttataagcatatttatcattttaccataggctgtcaagattaacaatcgttacatcataggtcattggaactatttg

SEQ ID NO: 27160 - DNA, 260 bp, Unknown
  Description of Unknown: RightRegion for integrase B1161 sequence
gtttccgcattttgttcaccgcagcacaggcagctatcgcagagaagaatgcataattagcatattgttaaggggcaaagcgaaatatcctctaaagaggtaaaatagccaaccagccctaaagtgtccaaacgtaaaatttgaccttggagaattgtagaaatacagttcttcagggtcttttttgttacattacacagcggtattcttttgtttaacaaccgtagcaagaattccctcacctctataggaaggccact

SEQ ID NO: 27161 - DNA, 260 bp, Unknown
  Description of Unknown: RightRegion for integrase B1162 sequence
ggtctggtgtcaaatatcgtgttcaaaaacggcttatgccatacatttattttcaggtaagcaaaaagcagggaactaagccctgcttttcttcttttctgctgtccttataaatataagattttaagttacaaaattagcatagcgtcgccaaaactgaagaacctgtatttttcctgtacagcaacttcatatgcatgaagtacatgttctcttccagcaagtgctgatacaagcataacaagcgttgattctggaag

SEQ ID NO: 27162 - DNA, 260 bp, Unknown
  Description of Unknown: RightRegion for integrase B1163 sequence
ccagctgggctgttgctgttttacatagcacgaccaaggcaaagagaccgcagatcgtaatctgcggtctcttcttttttttggcgggggattaatgctgtactacatagcagtagtacaccgcggccttgtcatcgacggcgtccttgtcatcgagccaagcgtgcgccatgtccgcgtaaaactcggcgttgccgccgagaccgtacttttttgcgacctcgcaaaaatcggagtacatcgcgcacattatcgcgtgc

SEQ ID NO: 27163 - DNA, 260 bp, Unknown
  Description of Unknown: RightRegion for integrase B1164 sequence
ttccgaaacggtcttactcatacattttactataaggacgcagaaaaaccagaggcataaacctctggttttattgtctgaattacattacaaatgtaagatgtaggtactattcgataaacatcgcatcccggatatttatgaattgtaaccagaattcaacatttgttgggtatttatataggaagtaatttgatttttccttaatgaaatggtaatccttcatcatcagcgctcataaagccatcaggacttgtctg

SEQ ID NO: 27164 - DNA, 260 bp, Unknown
  Description of Unknown: RightRegion for integrase B1165 sequence
ggtctggtgtcaaacattgtattcaagaacggcttatgtcacacattcattttcaggtaagcaaaaagcagggaactaagccctgcttttcttcttttccgttatccttataaatataagattttaagttacaaaattagcatagcgtctccaaagctgaaaaatctgtatttttcatggattgcttcttcgtaggcgtgcaggatatgttctctacccgcaagtgccgataccagcattaccagagtagactccggcag

SEQ ID NO: 27165 - DNA, 260 bp, Unknown
  Description of Unknown: RightRegion for integrase B1166 sequence
ggcaaagtatcctcgattgagttcaaaaacggtatcacgttggaattcagctacgaatagcagctttttctattgttttttagtcgtaaatgacaaactgattggtgtgctgcaaagcctcattttccccaaaaaagttcagaaaacaacggcaaccagcctatacggttggttgccgttttcttgtaaaaagttcggttttctccttgcaacaacaggcacttttcatacacataggctacaaagtgtataaaattttt

SEQ ID NO: 27166 - DNA, 260 bp, Unknown
  Description of Unknown: RightRegion for integrase B1167 sequence
ggccgggtgcaaacaatcgtgttcaagaacggcctctcacacactttcatcctgaaatgacaaaagacccgacggcataatcgccatcgggtctttacttttttctacatacaaatatcgcaaaaagcgcgaattttgtatcaaactatcagcatagcatcgccgaaggaaaagaagcggtacttttcctctacggcaactttataggcagccatggtcttttcgtagccgtagagggcagagaccagcatgatgagggt

SEQ ID NO: 27167 - DNA, 260 bp, Unknown; identical to SEQ ID NO: 27129
  Description of Unknown: RightRegion for integrase B1168 sequence

SEQ ID NO: 27168 - DNA, 260 bp, Unknown
  Description of Unknown: RightRegion for integrase B1169 sequence
acgaataagtttatatataaggccacaaagccccctaagagcgcttctacgaagccgtgacatagcaatagccgcccgacgaatcgggcggctattttttatccatttttgcacttgcatccgcaatttctgcacgtctcggcggccacttctttccctgttcgcttgcagtagaaccgcgggccacttccctgccgtatgtgccggcagttcggaaatcctctttccatcaagacgcttttcttcggcttctctatttt

SEQ ID NO: 27169 - DNA, 260 bp, Unknown
  Description of Unknown: RightRegion for integrase B1170 sequence
cgcattgtggaaatcgtgttctccaatgggctttcacaccaattcatatatcgcaaataaataagtcccaacaataggatttgcccatgtctcctatcgttgggattttgtaaatgctttatttacgggatttcttacatctcggaaaccacgttcatctgacacccaaaggttgtgacgcagaaagtcatcggccttcctgcttcttctgcttcttttcttacgtattctttcgctttttctatgaaataatattgtct

SEQ ID NO: 27170 - DNA, 260 bp, Unknown
  Description of Unknown: RightRegion for integrase B1171 sequence
gtttcctcattttgttcaccgcagcacaggcagctatcgctgagaagaatgcataattagcataaaatatagattcatgcgcgagcatgagagtgtccaaacgtaaaatggctcctggaactttagaaaaatctgaagctccaggagctttttgatgtatttgtagtgaaacgtggaataatcatttgtcagaaagttttaattatgtgatctttgcatttatgatcaggagatttgatttcaaaactccggaatgcgag

SEQ ID NO: 27171 - DNA, 260 bp, Unknown
  Description of Unknown: RightRegion for integrase B1172 sequence
atgtggaacattatggataaatatggttacatacaagatcatcctaaagtaaaaaaatagtcaaaagcatctcatactcatattctagaaagttagaacaaactatcttgatataaaatatattatacaaatacttctagtcatttttttagtttgtggcaggaactttaagccagttccctagaaacttgctacttttgttcatgagaaataatctcgactgataacatagttgagaatattatattcagatagttata

SEQ ID NO: 27172 - DNA, 260 bp, Unknown
  Description of Unknown: RightRegion for integrase B1173 sequence
ggcttctatgctgctatgatgcagaacaaacagctgaagccagtagcagttaagaaatagaaactgaaggacataaggctgtggtttgaatgtagttagctgaccttcttcaatttaataggcaaatattccctgaatcataggggctatttgcctaattttttgtacctttgcagcctaatatacccttccaaatgaagcctatcattaaatataggggcggtaaatcgaaagaaatcccccagtttatagcctatata

SEQ ID NO: 27173 - DNA, 180 bp, Unknown
  Description of Unknown: RightRegion for integrase B1174 sequence
ttccgaaacggtcttactcatacattttactataaggacacagaaaaaccagaggcataaacctctggttttattgtctgaattacattacaaatgtaagatgtaggtactattcgataaacatcgcatctccaaaagagaaaaatctgtacttttcctgcactgcagtctcataggcat

SEQ ID NO: 27174 - DNA, 260 bp, Unknown
  Description of Unknown: RightRegion for integrase B1175 sequence
ttgtcgcactctgcggagtgctccaaacgctattttcacaggaggggccgcaatggttaaagagcagtctaaatcacaaaatgcagttgacctctacgaccccactggtgaaaaggggattcagaaaagcccacaggcttttctgaatcccgaataaaaaaaccgattccgctaattatgcgcagagcggagcggagcgcatttccaatcgttcgtacccgcacacacaaaaaccgggcagcccgcagactgcccggttt

SEQ ID NO: 27175 - DNA, 109 bp, Unknown
  Description of Unknown: RightRegion for integrase B1176 sequence
gatgggtgtgtacctcagtgctcagcccggctggggatcgtctggagctcgaagcggtaggtctgtccggcgtccgggtatttttcgcggtcgaccgggctcagaaaca

SEQ ID NO: 27176 - DNA, 260 bp, Unknown; identical to SEQ ID NO: 27129
  Description of Unknown: RightRegion for integrase B1177 sequence

SEQ ID NO: 27177 - DNA, 260 bp, Unknown
  Description of Unknown: RightRegion for integrase B1178 sequence
acgaataagtttatatataaggccacaaagccccctaagaacgcttctacgaagccgtgacatagcaatagccgcccgacgaatcgggcggctatttttatccatttttgcacttgcatccgcaatttctgcatgtctcggcggagacctcttttcccgtgcgcttgcagtagaaccgcaggccacttccctgccgtatgtgccggcagttcgggaatcctctttccatcaagacgcttttcttcggcttctctattttt

SEQ ID NO: 27178 - DNA, 260 bp, Unknown
  Description of Unknown: RightRegion for integrase B1179 sequence
aaagaactagaagctaattttaacccccaacaatgggatatacaaagccaaattctataaaacaattaaagctagctatcattgataactagctttatatttataaataccctctactttatatattaacatcttataaattacagttattactaggtaataatactactagtccatactaatagagctattagaagcaagtacatgggaatttactaaagtaaggtaggatatatggttatacaaagactttatatcct

SEQ ID NO: 27179 - DNA, 260 bp, Unknown
  Description of Unknown: RightRegion for integrase B1180 sequence
ttagaggattatatgtactgtactagaaaactggggctttatgtgcagttagtagcataaattatataggggttatctaaatatatttacctcctgtgattaagttatataaagactaaatcacaggaggtttatttttatgataacagtagaaaaactggaaaaaggtacttattttgatgatgcttttaagatctcatttagatacgatcccactactgtagctaaggtaaaagaactggcagagcggagatatttac

SEQ ID NO: 27180 - DNA, 260 bp, Unknown
  Description of Unknown: RightRegion for integrase B1181 sequence
cgcgtcatctccatcactttcaagaacggatcgacccacacgttcacctacaagacatgagaaaagccccggcctcatatactgaggtcggggccatcttatgcagtctatgcagcatcaccgcaacattatgcgccaaaaaagttgttcaattttataagcatcccctcaaagctaacgatgcgtgatgcttttcagttatccatgcggctttttctgctttttgcgccggttaagccgtttcccccgaaaacccttat

SEQ ID NO: 27181 - DNA, 260 bp, Unknown
  Description of Unknown: RightRegion for integrase B1182 sequence
cgcgtcacctccatcacattcaagaacggtgcgacccacacattcacctacaagacatgagaaaagccccggcctcatatactgaggtcggggccatcttatgcagtctatgcagtatcgccgcaacattatgcgccaaaaaagttgttcaattttataagcatcccctcaaagctaacgatgcgtgatgcttttcggttatccacgcggctttttcaggtttttacggcggttaaggcgttttccctgaaaacccttat

SEQ ID NO: 27182 - DNA, 260 bp, Unknown
  Description of Unknown: RightRegion for integrase B1183 sequence
cgcgtcatctccatcactttcaagaacggatcgacccacacgttcacctacaagacatgagaaaagccccggcctcatatactgaggtcggggccatcttatgcagtctatgcagtatcaccgcaacattatgcgtcaaaaaagttgttcaattttataagcatcccctcaaagctaacgatgcgtgatgcttttcagttgtccatgcggctttttctgctttttgcgccggttaagccgtttcccctgaaaacccttat

SEQ ID NO: 27183 - DNA, 260 bp, Unknown
  Description of Unknown: RightRegion for integrase B1184 sequence
cgcgtcatctccatcacgttcaagaacggatcgacccacacgttcacctacaagacatgagaaaagccccggcctcatatactgaggtcggggccatcttatgcagtctatgcagtatcgccgcaacattatgcgtcaaaaaagttgttcaattttataagcatcccctcaaagctaacgatgcgtgatgcttttcggttatccacgcggctttttcaggtttttgcggcggttaagtcgtttcccccgaaaacccttat

SEQ ID NO: 27184 - DNA, 260 bp, Unknown
  Description of Unknown: RightRegion for integrase B1185 sequence
ttagaggattatatgtactgtactagaaagctggggctttatgtgcaattagtggcataaattatataggggttatctaaatatatttacctcctgtgattaagttatataaagactaaatcacaggaggtttatttttatgataacagtagaaaaactggaaaaaggtacttattttgatgatgcttttaaaatctcatttagatacgatcccactactgtagctaaggtaaaagagctggcagagcggagatatttac

SEQ ID NO: 27185 - DNA, 260 bp, Unknown
  Description of Unknown: RightRegion for integrase B1186 sequence
ttagaggattatatgtactgtactagaaaactggggctttatgtgcagttagtagcataaattatataggggttatctaaatatatttacctcctgtgattaagttatataaagacttaacacaggaggtttatttttatgataacagtagaaaaactggaaaaaggtacttattttgatgatgcttttaagatctcatttagatatgatcccactactgtagctaaggtaaaagagctggcagagcggagatatttacc

SEQ ID NO: 27186 - DNA, 260 bp, Unknown
  Description of Unknown: RightRegion for integrase B1187 sequence
ttagaggattatatgtactgtactagaaagctggggctttatgtgcagttagtagcataaattatataggggttatctaaatatatttacctcctgtgattaagttatataaagactaaatcacaggaggtttatttttatgataacagtagaaaaactggaaaaaggtacttattttgatgatgcttttaaaatctcatttagatacgatcccactactgtagctaaggtaaaagagctggcagagcggagatacttac

SEQ ID NO: 27187 - DNA, 260 bp, Unknown
  Description of Unknown: RightRegion for integrase B1188 sequence
ttagaggattatatgtactgtactagaaagctggggctttatgtgcagttagtagcataaattatataggggttatctaaatatatttacctcctgtgattaagttatataaagactaaatcacaggaggtttatttttatgataacagtagaaaaactggaaaaaggtacttattttgatgatgcttttaaaatctcatttagatacgatcccactactgtagctaaggtaaaagagctggcagagcggagatatttac

SEQ ID NO: 27188 - DNA, 260 bp, Unknown
  Description of Unknown: RightRegion for integrase B1189 sequence
attgtattcaaaaacggacttcgaaaccgctttgtctatcaggacgacgccaccgtgtaaaatgccccgtctgcgctctcctgcgccccgtcctgcccgttttaaccctctgcccttatatttctaccctaaacaaaaaagccgcgtttaagcggctttttcaatctcgtgttcggtattcatttgacagccgaacgtcgtgacatgaaaggtcagcggactgcctttttttgcagagagctgttccacataatttttag

SEQ ID NO: 27189 - DNA, 260 bp, Unknown
  Description of Unknown: RightRegion for integrase B1190 sequence
cgcgtcatctccatcaccttcaagaacggatcgacccacacgttcacctacaagacatgagaaaagccccggcctcatatactgaggtcggggccatcttatgcagtctatgcagcatcgccgcaacattatgcgccaaaaaagttgttcaattttataagcatcccctcaaagctaacgatgcgtgatgcttttcgcttatccacgcggcttttcctgattttctcgtcggctaagccattttccccgaaaacccttat

SEQ ID NO: 27190 - DNA, 260 bp, Unknown
  Description of Unknown: RightRegion for integrase B1191 sequence
aaagaactagaagctaattttaacccccaacaatgggatatacaaagccaaattctataaaacaattaaagctagctatcattgataactagctttatatttataaacaccctctactttatatattaacatcttataaattacagttattactaggtaataatactactagtccatactaatagagctattagaagcaagtacatgggaatttactaaagtaaggtaggatattatacagagaatttatatcctacgtt

SEQ ID NO: 27191 - DNA, 260 bp, Unknown; identical to SEQ ID NO: 27187
  Description of Unknown: RightRegion for integrase B1192 sequence

SEQ ID NO: 27192 - DNA, 260 bp, Unknown; identical to SEQ ID NO: 27187
  Description of Unknown: RightRegion for integrase B1193 sequence

SEQ ID NO: 27193 - DNA, 109 bp, Unknown
  Description of Unknown: RightRegion for integrase B1194 sequence
cgcgtcatctccatcactttcaagaacggatcgacccacacgttcgcctacaagacatgagaaaagccccggcctcatatactgaggtcggggccatcttatgcagtct

SEQ ID NO: 27194 - DNA, 260 bp, Unknown; identical to SEQ ID NO: 27187
  Description of Unknown: RightRegion for integrase B1195 sequence

SEQ ID NO: 27195 - DNA, 260 bp, Unknown
  Description of Unknown: RightRegion for integrase B1196 sequence
ttagaggattatatgtactgtactagaaaactggggctttatgtgcagttagtagcataaattatataggggttatctaaatatatttacctcctgtgattaagttatataaagactaaatcacaggaggtttatttttatgataacagtagaaaaactggaaaaaggtacttattttgatgatgcttttaagatctcatttagatacgatcccactactgtagctaaggtaaaagagctggcagagcggagatacttac

SEQ ID NO: 27196 - DNA, 109 bp, Unknown
  Description of Unknown: RightRegion for integrase B1197 sequence
cgcgtcatctccatcactttcaagaacggatcgacccacacgttcacctacaaggcatgagaaaagccccggcctcatatactgaggtcggggccatcttatgcagtct

SEQ ID NO: 27197 - DNA, 260 bp, Unknown
  Description of Unknown: RightRegion for integrase B1198 sequence
cgcgtcacctccatcacattcaagaacggtgcgacccacacattcacctacaagacatgagaaaagccccggcctcatatactgaggtcggggccatcttatgcagtctatgcagtaccgccgcaacattatgcgccaaaaaagttgttcaattttataagcatcccctcaaagctaacgatgcgtgatgcttttcggttatccacgcggctttttcaggtttttgcggcggttaaggcattttccctgaaaacccttat

SEQ ID NO: 27198 - DNA, 260 bp, Unknown
  Description of Unknown: RightRegion for integrase B1199 sequence
cgcgtcatctccatcactttcaagaacggatcgacccacacgttcacctacaagacatgagaaaagccccggcctcatatactgaggtcggggccatcttatgcagtctatgcagcatcaccgcaacattatgcgccaaaaaagttgttcaattttataagcatcccctcaaagctaacgatgcgtgatgcttttcagttatccatgcggctttttctgctttttgcgccggttaagccgtttccccagaaaacccttat

SEQ ID NO: 27199 - DNA, 260 bp, Unknown
  Description of Unknown: RightRegion for integrase B1200 sequence
ttagaggattatatgtactgtactagaaagctggggctttatgtgcagttagtagcataaattatataggggttatctaaatatatttacctcctgtgattaagttatataaagacttaacacaggaggtttatttttatgataacagtagaaaaactggaaaaaggtacttattttgatgatgcttttaagatctcatttagatacgatcccactactgtagctaaggtaaaagagatggcagagcggaggtatttacc

SEQ ID NO: 27200 - DNA, 109 bp, Unknown
  Description of Unknown: RightRegion for integrase B1201 sequence
ctgataacatcaatttctttcaaaaacggaatgacgcacaggtttatctacaaggcataaaataacccagggctccatataagagccctgggttttattcagcagtatt

SEQ ID NO: 27201 - DNA, 260 bp, Unknown
  Description of Unknown: RightRegion for integrase B1202 sequence
ttagaggattatatgtactgtactagaaagcttgggctttatgtgcagttagtagcataaattatataggggttatctaaatatatttacctcctgtgattaagttatataaagactaaatcacaggaggtttatttttatgataacagtagaaaaactggaaaaaggtacttattttgatgatgcttttaagatctcatttagatacgatcccactactgtagctaaagtaaaagagctggcagagcggagatacttac

SEQ ID NO: 27202 - DNA, 109 bp, Unknown
  Description of Unknown: RightRegion for integrase B1203 sequence
cgcgtcacctccatcacattcaagaacggtgcgacccacacattcacctacaagacatgagaaaagccccggcctcatatactgaggtcggggccatcttatgcagtct

SEQ ID NO: 27203 - DNA, 260 bp, Unknown
  Description of Unknown: RightRegion for integrase B1204 sequence
cgcgtcacctccatcacattcaagaacggtgcgacccacacattcacctacaagacatgagaaaagccccggcctcatatactgaggtcggggccatcttatgcagtctatgcagtatcgccgcaacattatgcgtcaaaaaagttgttcaattttataagcatcccctcaaagctaacgatgcgtgatgcttttcagttatccatgcggctttttctgctttttgcgccggttaagccgtttcccacgaaaacccttat

SEQ ID NO: 27204 - DNA, 260 bp, Unknown
  Description of Unknown: RightRegion for integrase B1205 sequence
cgcgtcatctccatcactttcaagaacggatcgacccacacgttcacctacaaggcatgagaaaagccccggcctcatatactgaggtcggggccatcttatgcagtctatgcagtatcaccgcaacattatgcgtcaaaaaagttgttcaattttataagcatcccctcaaagctaacgatgcgtgatgcttttcagttatccatgcggctttttctgctttttgcgccggttaagccgtttcccccgaaaacccttat

SEQ ID NO: 27205 - DNA, 260 bp, Unknown
  Description of Unknown: RightRegion for integrase B1206 sequence
cgcgtcacctccatcacattcaagaacggtgcgacccacacattcacctacaagacatgagaaaagccccggcctcatatactgaggtcggggccatcttatgcagtctatgcagtatcgccgcaacattatgcgccaaaaaagttgttcaattttataagcatcccctcaaagctaacgatgcgtgatgcttttcggttatccacgcggctttttcaggtttttgcggcggttaaggcgttttcctcgaaaacccttat

SEQ ID NO: 27206 - DNA, 109 bp, Unknown
  Description of Unknown: RightRegion for integrase B1207 sequence
gcgggcgtggttatggaatatccgcgggccgggcggcgtaaaagtttaaccacacggtaaaattgaccggcacgcaaaaagagggccccgggagcaatcccgaggccct

SEQ ID NO: 27207 - DNA, 260 bp, Unknown
  Description of Unknown: RightRegion for integrase B1208 sequence
attgtattcaaaaacggacttcggaaccgctttgtctatcaggacgacgccaccgtgtaaaatgccccgtctgcgctcccctgcgccccgtcctgcccgttttaactctctgcccttatatttctaccctaaacagaaaaagccgcattttagcggctttttcaatctcgcgttcggtattcatttgacagcccatgcacaccgaacacgcatataacgggcgtcctaattcctccgacttcttttttacgatttcccgg

SEQ ID NO: 27208 - DNA, 260 bp, Unknown; identical to SEQ ID NO: 27184
  Description of Unknown: RightRegion for integrase B1209 sequence

SEQ ID NO: 27209 - DNA, 260 bp, Unknown
  Description of Unknown: RightRegion for integrase B1210 sequence
cgcgtcatctccatcactttcaagaacggatcgacccacacgttcacctacaagacatgagaaaagccccggcctcatatactgaggtcggggccatcttatgcagtctatgcagtatcaccgcaacattatgcgtcaaaaaagttgttcaattttataagcatcccctcaaagctaacgatgcgtgatgcttttcagttgtccatgcggctttttctgctttttgcgccggttaagccgtttcccccgaaaacccttat

SEQ ID NO: 27210 - DNA, 260 bp, Unknown
  Description of Unknown: RightRegion for integrase B1211 sequence
cgcgtcatctccatcaccttcaagaacggatcgacccacacgttcacctacaagacatgagaaaagccccggcctcatatactgaggtcggggccatcttgtgcagtctatgcagtatcgccgcaacattatgcgtcaaaaaagttgttcaattttataagcatcccctcaaagctaacgatgcgtgatgcttttcggttatccacgcggctttttctgctttttgtgccggttaagccgttttccccgaaaaccctaat

SEQ ID NO: 27211 - DNA, 260 bp, Unknown
  Description of Unknown: RightRegion for integrase B1212 sequence
cgcgtcatctccatcaccttcaagaacggatcgacccacacgttcacctacaagacatgagaaaagccccggcctcatatactgaggtcggggtcatcttatgcagtctatgcagcatcgccgcaacattatgcgccaaaaaagttgttcaattttataagcatcccctcaaagctaacgatgcgtgatgcttttcggttatccacgcggctttttctgctttttgtgccggttaagccgttttccccgaaaacccttat

SEQ ID NO: 27212 - DNA, 260 bp, Unknown
  Description of Unknown: RightRegion for integrase B1213 sequence
gagtatggagataattatacatggcgtactatggatctttatgtacagctagtagcctgatttatataggggttatctaaaagtataagcctcctgtgattaagttatttaagactttcacaggaggtaattttttatgataagagtacagcgactagaaaaaggtacttattttgataatgcctatatgatctcttttcggtatgatcctagaacagtggcaaaggtaaaagagctggctcagaggcggtacttgcctg

SEQ ID NO: 27213 - DNA, 260 bp, Unknown; identical to SEQ ID NO: 27187
  Description of Unknown: RightRegion for integrase B1214 sequence

SEQ ID NO: 27214 - DNA, 260 bp, Unknown
  Description of Unknown: RightRegion for integrase B1215 sequence
cgcgtcatctccatcaccttcaagaacggatcgacccacacgttcacctacaagacatgagaaaagccccggcctcatatactgaggtcggggccatcttatgcagtctatgcagcatcgccgcaacattatgcgccaaaaaagttgttcaattttataagcatcccctcaaagctaacgatgcgtgatgcttttcgcttatccactcggcttttcctgattttctcgtcggctaagccgttttccccgaaaacccttat

SEQ ID NO: 27215 - DNA, 260 bp, Unknown
  Description of Unknown: RightRegion for integrase B1216 sequence
ttagaggattatatgtactgtactagaaagctggggctttatgtgcagttagtagcataaattatataggggttatctaaatatatttacctcctgtgattaggttatataaagactaaatcacaggaggtttatttttatgataacagtagaaaaactggaaaaaggtacttattttgatgatgcttttaaaatctcatttagatacgatcccactactgtagctaaagtaaaagagctggcagagcggagatacttac

SEQ ID NO: 27216 - DNA, 260 bp, Unknown
  Description of Unknown: RightRegion for integrase B1217 sequence
ttagaggattatatgtactgtactagaaagctggggctttatgtgcagttagtagcataaattatataggggttatctaaatatatttacctcctgtgattaagttatataaagacttaacacaggaggtttatttttatgataacagtagaaaaactggaaaaaggtacttattttgatgatgcttttaaaatctcatttagatacgatcccactactgtagctaaggtaaaagagctggcagagcggagatatttacc

SEQ ID NO: 27217 - DNA, 260 bp, Unknown
  Description of Unknown: RightRegion for integrase B1218 sequence
cgcgtcacctccatcacattcaagaacggtgcgacccacacattcacctacaagacatgagaaaagccccagcctcatatactgaggttggggccatcttatgcagtctatgcagtatcgccgcaacattatgcgccaaaaaagttgttcaattttataagcatcccctcaaagctaacgatgcgtgatgcttttcggttatccacgcggctttttcaggtttttgcggcggttaaggcgttttccctgaaaacccttat

SEQ ID NO: 27218 - DNA, 260 bp, Unknown; identical to SEQ ID NO: 27187
  Description of Unknown: RightRegion for integrase B1219 sequence

SEQ ID NO: 27219 - DNA, 260 bp, Unknown; identical to SEQ ID NO: 27187
  Description of Unknown: RightRegion for integrase B1220 sequence

SEQ ID NO: 27220 - DNA, 260 bp, Unknown
  Description of Unknown: RightRegion for integrase B1221 sequence
cgcgtcacctccatcacattcaagaacggtgcgacccacacattcacctacaagacatgagaaaagccccggcctcatatactgaggtcggggccatcttatgcagtctatgcagtaccgccgcaacattatgcgccaaaaaagttgttcaattttataagcatcccctcaaagctaacgatgcgtgatgcttttcggttatccacgcggctttttcaggtttttgcggcggttaaggcgttttccctaaaaacccttat

SEQ ID NO: 27221 - DNA, 109 bp, Unknown; identical to SEQ ID NO: 27196
  Description of Unknown: RightRegion for integrase B1222 sequence

SEQ ID NO: 27222 - DNA, 260 bp, Unknown
  Description of Unknown: RightRegion for integrase B1223 sequence
cgcgtcacctccatcacattcaagaacggtgcgacccacacattcacctacaagacatgagaaaagccccggcctcatatactgaggtcggggccatcttatgcagtctatgcagtatcgccgcaacattatgcgtcaaaaaagttgttcaattttataagcatcccctcaaagctaacgatgcgtgatgctcttcggttatccacgcggctttttcaggtttttgcgtcggttaaggcgttttccctgaaaacccttat

SEQ ID NO: 27223 - DNA, 260 bp, Unknown
  Description of Unknown: RightRegion for integrase B1224 sequence
cgcgtcacctccatcacattcaagaacggtgcgacccacacattcacctacaagacatgagaaaagccccggcctcatatactgaggtcggggccatcttatgcagtctatgcagtatcgccgcaacattatgcgtcaaaaaagttgtttaattttataagcatcccctcaaagctaacgatgcgtgatgcttttcggttatccacgcggctttttcaggtttttacggcggttaaggcattttccctgaaaacccttat

SEQ ID NO: 27224 - DNA, 260 bp, Unknown; identical to SEQ ID NO: 27187
  Description of Unknown: RightRegion for integrase B1225 sequence

SEQ ID NO: 27225 - DNA, 260 bp, Unknown
  Description of Unknown: RightRegion for integrase B1226 sequence
cgcgtcacctccatcacattcaagaacggtgcgacccacacattcacctacaagacatgagaaaagccccggcctcatatactgaggtcggggccatcttatgcagtctatgcagtatcgccgcaacattatacgtcaaaaaagttgttcaattttataagcatcccctcaaagctaacgatgcgtgatgcttttcggttatccacgcggctttttcaggtttttgcgtcggttaaggcgttttccctgaaaacccttat

SEQ ID NO: 27226 - DNA, 260 bp, Unknown
  Description of Unknown: RightRegion for integrase B1227 sequence
cgcgtcgtctccatcacgttcaagaacggttcgacccacacgttcacctacaagacatgagaaaagccccggcctcatatactgaggtcggggccatcttatgcagtctatgcagcatcaccgcaacattatgcgccaaaaaagttgttcaattttataagcatcccctcaaagctaacgatgcgtgatgcttttcggttatccacgcggcttttcctgctttttgcgccggttaagctgttttccccgaaaacccttat

SEQ ID NO: 27227 - DNA, 260 bp, Unknown; identical to SEQ ID NO: 27214
  Description of Unknown: RightRegion for integrase B1228 sequence

SEQ ID NO: 27228 - DNA, 260 bp, Unknown
  Description of Unknown: RightRegion for integrase B1229 sequence
cgcgtcatctccatcacgttcaagaacggatcgacccacacgttcacctacaagacatgagaaaagccccggcctcatatactgaggtcggggccatcttatgcagtctatgcagtatcgccgcaacattatgcgtcaaaaaagttgttcaattttataagcatcccctcaaagctaacgatgcgtgatgcttttcagttgtccatgcggctttttctgctttttgcgccggttaagccgtttcccctggaaacccttat

SEQ ID NO: 27229 - DNA, 260 bp, Unknown
  Description of Unknown: RightRegion for integrase B1230 sequence
ttagaggattatatgtactgtactagaaagctggggctttatgtgcaattagtggcataaattatataggggttatctaaatatatttacctcctgtgattaagttatataaagactaaatcacaggaggtttatttttatgataacagtagaaaaactggaaaaaggtacttattttgatgatgcttttaaaatctcatttagatacgatcccactactgtagctaaagtaaaagagctggcagagcggagatatttac

SEQ ID NO: 27230 - DNA, 260 bp, Unknown
  Description of Unknown: RightRegion for integrase B1231 sequence
cgcgtcacctccatcacattcaagaacggtgcgacccacacattcacctacaagacatgagaaaagccccggcctcatatactgaggtcggggccatcttatgcagtctatgcagtatcgccgcaacattatgcgtcaaaaaagttgttcaattttataagcatcccctcaaagctaacgatgcgtgatgctttccggttatccacgcggctttttctgctttttgcgccggttaagccgttttcctcgaaaacctttat

SEQ ID NO: 27231 - DNA, 260 bp, Unknown
  Description of Unknown: RightRegion for integrase B1232 sequence
cgcgtcacctccatcacattcaagaacggtgcgacccacacattcacctacaagacatgagaaaagccccggcctcatatactgaggtcggggccatcttatgcagtctatgcagtatcgccgcaacattatgcgtcaaaaaagttgttcaattttataagcatcccatcaaagctaacgatgcgtgatgcttttcagttatccatgcggctttttctgctttttgcgccggttaagccgtttcccacgaaaacccttat

SEQ ID NO: 27232 - DNA, 260 bp, Unknown
  Description of Unknown: RightRegion for integrase B1233 sequence
gatgggtgtgtacctcagtgcccggcccggctggggatcgtctggagctcgaagcggtaggtctgcccggcgtccgggtatttttcgcggtcgaccgggctcaggaacatatccagcggccggacccagaggccgccgtcgccgtaaagcttgcggtagatcacgcagggctcgttcgtctcggaatcacgggcaagcgcctccaccagataataatcccccttgaaatggcggtagacctgccccagctgtacgtcacg

SEQ ID NO: 27233 - DNA, 109 bp, Unknown
  Description of Unknown: RightRegion for integrase B1234 sequence
cgcgtcatatccatcacattcaagaacggatcgacccacacattcacctacaagacatgagaaaagccccggcctcatatactgaggtcggggccatcttatgcagtct

SEQ ID NO: 27234 - DNA, 260 bp, Unknown
  Description of Unknown: RightRegion for integrase B1235 sequence
ttagaggattatatgtactgtactagaaagctagggctttatgtgcagttagtagcataaattatataggggttatctaaatatatttacctcctgtgattaagttatataaagactaaatcacaggaggtttatttttatgataacagtagaaaaactggaaaaaggtacttattttgatgatgcttttaaaatctcatttagatacgatcccactactgtagctaaggtaaaagagctggcagagcggagatatttac

SEQ ID NO: 27235 - DNA, 260 bp, Unknown
  Description of Unknown: RightRegion for integrase B1236 sequence
ttagaggattatatgtactgtactagaaaactggggctctatgtgcagttagtagcctaaattatataggggctatctaaatatatttacctcctgtgattaagttatataaagacttaacacaggaggtttatttttatgataacagtagaaaaactggaaaaaggtacttattttgatgatgcttttaagatctcatttagatacgatcccactactgtagctaaggtaaaagagctggcagagcggagatacttacc

SEQ ID NO: 27236 - DNA, 260 bp, Unknown
  Description of Unknown: RightRegion for integrase B1237 sequence
ttagaggattatatgtactgtactagaaagctggggctttatgtgcagttagtagcataaattatataggggttatctaaatatatttacctcctgtgattaagttatataaagacttaacacaggaggtttatttttatgataacagtagaaaaactggaaaaaggtacttattttgatgatgcttttaagatctcatttagatacgatcccactactgtagctaagataaaagagctggcagagcggagatacttacc

SEQ ID NO: 27237 - DNA, 260 bp, Unknown
  Description of Unknown: RightRegion for integrase B1238 sequence
ttagaggattatatgtactgtactagaaaactggggctttatgtgcagttagtagcataaattatataggggttatctaaatatatttacctcctgtgattaagttatataaagactaaatcacaggaggtttatttttatgataacagtagaaaaactggaaaaaggtacttattttgatgatgcttttaaaatctcatttagatacgatcccactactgtagctaaggtaaaagagctggcagagcggagatatttac

SEQ ID NO: 27238 - DNA, 260 bp, Unknown
  Description of Unknown: RightRegion for integrase B1239 sequence
cgcgtcatctccatcactttcaagaacggatcgacccacacgttcgcctacaagacatgagaaaagccccggcctcatatactgaggtcggggccatcttatgcagtctatgcagtatcgccgcaacattatgcgtcaaaaaagttgttcaattttataagcatcccctcaaagctaacgatgcgtgatgcttttcagttatccatgcggctttttctgctttttgcgccggttaagccgtttcccccgaaaacccttat

SEQ ID NO: 27239 - DNA, 260 bp, Unknown
  Description of Unknown: RightRegion for integrase B1240 sequence
cgcgtcatctccatcactttcaagaacggatcgacccacacgttcacctacaagacatgagaaaagccccggcctcatatactgaggtcggggccatcttatgcagtctatgcagtatcaccgcaacattatgcgtcaaaaaagttgttcaattttataagcatcccctcaaagctaacgatgcgtgatgcttttcagttatccatgcggctttttctgctttttgcgccggttaagccgtttcccccgaaaacccttat

SEQ ID NO: 27240 - DNA, 109 bp, Unknown
  Description of Unknown: RightRegion for integrase B1241 sequence
cgcgtcatctccatcaccttcaagaacggatcgacccacacgttcacctacaagacatgagaaaagccccggcctcatatactgaggtcggggccaacttatgcagtct

SEQ ID NO: 27241 - DNA, 260 bp, Unknown
  Description of Unknown: RightRegion for integrase B1242 sequence
cgcgtcacctccatcacattcaagaacggtgcgacccacacattcacctacaagacatgagaaaagccccggcctcatatactgaggtcggggccatcttatgcagtctatgcagtatcgccgcaacattatgcgccaaaaaagttgttcagttttataagcatcccctcaaagctaacgatgcgtgatgcttttcggttatccacgcggctttttcaggtttttacggcggttaaggcgttttccatgaaaacccttat

SEQ ID NO: 27242 - DNA, 260 bp, Unknown
  Description of Unknown: RightRegion for integrase B1243 sequence
ttagaggattatatgtactgtactagaaagctggggctttatgtgcagttagtagcataaattatataggggttatctaaatatatttacctcctgtgattaagttatataaagactaaatcacaggaggtttatttttatgataacagtagaaaaactggaaaaaggtacttattttgatgatgcttttaaaatctcttttagatacgatcccactactgtagctaaggtaaaagagctggcagagcggagatatttac

SEQ ID NO: 27243 - DNA, 260 bp, Unknown
  Description of Unknown: RightRegion for integrase B1244 sequence
gatgggggtgttcctcagtgcccggcccgactggggatcgtctggagctcgaagcggtaggtctgcccggcgtccgggtatttttcgcggtcgaccgggctcaggaacatatccagcggccggacccagaggccgccgtcgccgtaaagcttgcggtagatcacgcagggctcgttcgtctcggaatcacgggcaagcgcctccaccagataataatctcccttgaaatggcggtagacccgtcccggctgtacgtcacg

SEQ ID NO: 27244 - DNA, 109 bp, Unknown
  Description of Unknown: RightRegion for integrase B1245 sequence
cgcgttacctccatcacgttcaagaacggttcaacccacacgtttacctacaagacatgagaaaagccccggcctcatatactgaggtcggggccatcttatgcagtct

SEQ ID NO: 27245 - DNA, 260 bp, Unknown
  Description of Unknown: RightRegion for integrase B1246 sequence
cgcgtcacctccatcacattcaagaacggtgcgacccacacattcacctacaagacatgagaaaagccccggcctcatatactgaggtcggggccatcttatgcagtctatgcagtatcgccgcaacattatgcgtcaaaaaagttgttcaattttataagcatcccctcaaagctaacgatgcgtgatgcttttcggttatccacgcggctttttcaggtttttgcggcggttaaggcattttccctgaaaacccttat

SEQ ID NO: 27246 - DNA, 260 bp, Unknown
  Description of Unknown: RightRegion for integrase B1247 sequence
cgcgtcatctccatcaccttcaagaacggatcgacccacacgttcacctacaagatatgagaaaagccccggcctcatatactgaggtcggggccatcttatgcagtctatgcagcatcgccgcaacattatgcgccaaaaaagttgttcaattttataagcatcccctcaaagctaacgatgcgtgatgcttttcgcttatccactcggcttttcctgattttctcgtcggctaagccgttttccccgaaaacccttat

SEQ ID NO: 27247 - DNA, 260 bp, Unknown
  Description of Unknown: RightRegion for integrase B1248 sequence
ttagaggattatatgtactgtactagaaagctggggctttatgtgcagttagtagcataaattatataggggttatctaaatatatttacctcctgtgattaagttatataaagactaaatcacaggaggtttatttttatgataacagtagaaaaactggaaaaaggtacttattttgatgatgcttttaaaatctcatttagatatgatcccactactgtagctaaggtaaaagagctggcagagcggagatacttac

SEQ ID NO: 27248 - DNA, 260 bp, Unknown; identical to SEQ ID NO: 27197
  Description of Unknown: RightRegion for integrase B1249 sequence

SEQ ID NO: 27249 - DNA, 260 bp, Unknown
  Description of Unknown: RightRegion for integrase B1250 sequence
ttagaggattatatgtactgtactagaaagctggggctttatgtgcagttagtagcataaattatataggggttatctaaatatatttacctcctgtgattaggttatataaagactaaatcacaggaggtttatttttatgataatagtagaaaaactggaaaagggtacttattttgatgatgcttttaaaatctcatttagatacgatcccactactgtagctaaggtaaaagagctggcagagcggagatacttac

SEQ ID NO: 27250 - DNA, 260 bp, Unknown
  Description of Unknown: RightRegion for integrase B1251 sequence
tcagaaatcaccgcaatgaaagatcagcttgcgctaattcgtcaagaactggcggcataattttatttccctttcccgcctcaaatcaccgccagtaatcatggacctggtagtccggcggattattcagcttctctcgtactttttcaagtttttctctatacaaagtttcttcatcccttttccagtcataatagttttgcccacggtaatcatataaacatgccggatcgacacggttggccatatccggccgatat

SEQ ID NO: 27251 - DNA, 260 bp, Unknown
  Description of Unknown: RightRegion for integrase B1252 sequence
ttagaggattatatgtactgtactagaaagctggggctttatgtgcagttagtagcataaattatataggggttatctaaatatatttacctcctgtgattaagttatataaagactaaatcacaggaggtttatttttatgataacagtagaaaaactggaaaaaggtacttattttgatgatgcttttaaaatttcatttagatatgatcccactactgtagctaaggtaaaagagctggcagagcggagatatttac

SEQ ID NO: 27252 - DNA, 260 bp, Unknown; identical to SEQ ID NO: 27214
  Description of Unknown: RightRegion for integrase B1253 sequence

SEQ ID NO: 27253 - DNA, 260 bp, Unknown
  Description of Unknown: RightRegion for integrase B1254 sequence
cgcgtcacctccatcacattcaagaacggatcgacccacacgttcacctacaagacatgagaaaagccccggcctcatatactgaggtcggggccatcttatgcagtctatgcagtatcgccgcaacattatgcgtcaaaaaagttgttcaattttataagcatcccctcaaagctaacgatgcgtgatgcttttcagttatccatgcggctttttctgctttttgcgccggttaagccatttcccccgaaaacccttat

SEQ ID NO: 27254 - DNA, 109 bp, Unknown; identical to SEQ ID NO: 27200
  Description of Unknown: RightRegion for integrase B1255 sequence

SEQ ID NO: 27255 - DNA, 260 bp, Unknown; identical to SEQ ID NO: 27239
  Description of Unknown: RightRegion for integrase B1256 sequence

SEQ ID NO: 27256 - DNA, 260 bp, Unknown
  Description of Unknown: RightRegion for integrase B1257 sequence
ttagaggattatatgtactgtactagaaaactggggctttatgtacagttagtagcataagttatataggggctatctaaatatatttacctcctgtgattaagttatataaagacttaacacaggaggtttatttttatgataacagtagaaaaactggaaaaaggtacttattttgatgatgcttttaagatctcatttagatacgatcccactactgtagctaaggtaaaagagctggcagagcggagatacttacc

SEQ ID NO: 27257 - DNA, 260 bp, Unknown
  Description of Unknown: RightRegion for integrase B1258 sequence
gctgtcgctacggcaatagctgacagcagagaatacgaaaaaaagaaaaaggctgcgtaactgcgatgttacgcaaccttatcttcaaatcacataaactgctttatgtgcgccgccctaaagtgccgctttttttttgcaataagatctgcacaacgcaaaaaccgccgcagacgttaatctacggcgggtatttggcggagaaggagggagtaaaaacagccctgttctccccttttacgccacatcatgaacacgcc

SEQ ID NO: 27258 - DNA, 109 bp, Unknown
  Description of Unknown: RightRegion for integrase B1259 sequence
cgcgtcatctccatcaccttcaagaacggatcgacccacacattcacctacaagacatgagaaaagccccggcctcatatactgaggtcggggccatcttatgcagtct

SEQ ID NO: 27259 - DNA, 260 bp, Unknown; identical to SEQ ID NO: 27204
  Description of Unknown: RightRegion for integrase B1260 sequence

SEQ ID NO: 27260 - DNA, 260 bp, Unknown
  Description of Unknown: RightRegion for integrase B1261 sequence
attgtattcaagaacgggcttcgcaatcgctttatttatcaggacaacggcgacgcatagacgcccgtctgcgcgtcctgctgccccgtcctgcccctttgtttcctctgccctaaatttataccctgatagaaaaaagccgctatttaagcggctttacttatctcgtgttcggtattcacttgacacccgaatgtttgagcaaaaaaggtcatgggacgtcctaattcagcggacttccgcttcacgtagtccctggc

SEQ ID NO: 27261 - DNA, 260 bp, Unknown
  Description of Unknown: RightRegion for integrase B1262 sequence
cgcgtcacctccatcacattcaagaacggtgcgacccacacattcacctacaagacatgagaaaagccccggcctcatatactgaggtcggggccatcttatgcagtctatgcagtatcgccgcaacattatgcgtcaaaaagttgttcaattttataagcatcccctcaaagctaacgatgcgtgatgcttttcagttatccatgcggctttttctgctttttgcgccggttaagccgtttcccacgaaaacccttatt

SEQ ID NO: 27262 - DNA, 260 bp, Unknown
  Description of Unknown: RightRegion for integrase B1263 sequence
cgcgtcacctccatcacattcaagaacggtgcgacccacacattcacctacaagacatgagaaaagccccggcctcatatactgaggtcggggccatcttatgcagtctatgcagtatcgccgcaacattatgcgtcaaaaaagttgttcaattttataagcatcccctcaaagctaacgatgcgtgatgcttttcagttatccatgcggctttttctgctttttgcgccggttaagccgtttcccccgaaaacccttat

SEQ ID NO: 27263 - DNA, 260 bp, Unknown
  Description of Unknown: RightRegion for integrase B1264 sequence
atcgtattcaaaaacggacttcggaaccgctttgtctatcgggacgacgccgacgcatagaacgccccgtcctgcccgtttcttccctctgcccttatatttctaccctaaagaaaaaagccgcttaaacgcggcttttacaatctcgttttcggtattcatttgacagccgaacgtcgtgacatgaaaggtcagcggactgcctttttttgcagagagctgttccacataatttttagcaatgtccataaagtaatact

SEQ ID NO: 27264 - DNA, 109 bp, Unknown; identical to SEQ ID NO: 27202
  Description of Unknown: RightRegion for integrase B1265 sequence

SEQ ID NO: 27265 - DNA, 109 bp, Unknown; identical to SEQ ID NO: 27202
  Description of Unknown: RightRegion for integrase B1266 sequence

SEQ ID NO: 27266 - DNA, 260 bp, Unknown
  Description of Unknown: RightRegion for integrase B1267 sequence
ttagaggattatatgtactgtactagaaagctggggctttatgtgcagttagtagcataaattatataggggttatctaaatatatttacctcctgtgattaagttatataaagactaaatcacaggaggtttatttttatgataacagtagaaaaactggaaaaaggtacttattttgatgatgcttttaaaatctcatttagatacgatcctactactgtagctaaggtaaaagagctggcagagcggagatacttac

SEQ ID NO: 27267 - DNA, 109 bp, Unknown; identical to SEQ ID NO: 27202
  Description of Unknown: RightRegion for integrase B1268 sequence

SEQ ID NO: 27268 - DNA, 109 bp, Unknown; identical to SEQ ID NO: 27202
  Description of Unknown: RightRegion for integrase B1269 sequence

SEQ ID NO: 27269 - DNA, 260 bp, Unknown; identical to SEQ ID NO: 27203
  Description of Unknown: RightRegion for integrase B1270 sequence

SEQ ID NO: 27270 - DNA, 109 bp, Unknown
  Description of Unknown: RightRegion for integrase B1271 sequence
cgcgtcatctccatcactttcaagaacggatcgacccacacgttcacctacaagacatgagaaaagccccggcctcatatactgaggtcggggccatcttatgcagtct

SEQ ID NO: 27271 - DNA, 260 bp, Unknown
  Description of Unknown: RightRegion for integrase B1272 sequence
cgcgtcacctccatcacattcaagaacggtgcgacccacacattcacctacaagacatgagaaaagccccggcctcatatactgaggtcggggccatcttatgcagtctatgcagtatcgccgcaacattatgcgtcaaaaaagttgttcaattttataagcatcccctcaaagctaacgatgcgtgatgcttttcggttatccacgcggctttttcaggtttttgcgtcggttaaggcgttttccctgaaaacccttat

SEQ ID NO: 27272 - DNA, 260 bp, Unknown
  Description of Unknown: RightRegion for integrase B1273 sequence
cgcgtcatctccatcactttcaagaacggatcgacccacacgttcacctacaagacatgagaaaagccccggcctcatatactgaggtcggggccatcttatgcagtctatgcagtatcgccgcaacattatgcgtcaaaaaagttgttcaattttataagcatcccctcaaagctaacgatgcgtgatgcttttcagttatccatgcggctttttcaggtttttgcggcggttaaggcgttttccctgaaaacccttat

SEQ ID NO: 27273 - DNA, 260 bp, Unknown; identical to SEQ ID NO: 27187
  Description of Unknown: RightRegion for integrase B1274 sequence

SEQ ID NO: 27274 - DNA, 260 bp, Unknown
  Description of Unknown: RightRegion for integrase B1275 sequence
cgcgtcacctccatcacattcaagaacggtgcgacccacacattcacctacaagacatgagaaaagccccggcctcatatactgaggtcggggccatcttatgcagtctatgcagtatcgccgcaacattatgcgccaaaaaagttgttcaattttataagcatcccctcaaagctaacgatgcgtgatgcttttcggttatccacgcggctttttcaggtttttgcggcggttaaggcgttttccctgaaaacccttat

SEQ ID NO: 27275 - DNA, 260 bp, Unknown
  Description of Unknown: RightRegion for integrase B1276 sequence
cgcgtcatctccatcaccttcaagaacggatcgacccacacgttcacctacaagacatgagaaaagccccggcctcatatactgaggtcggggccatcttatgcagtctatgcagcatcaccgcaacattatgcgccaaaaaagttgttcaattttataagcatcccctcaaagctaacgatgcgtgatgcttttcggttatccacacggcttttcctgattttctcgtcggctaagccattttccccgaaaacccttat

SEQ ID NO: 27276 - DNA, 260 bp, Unknown
  Description of Unknown: RightRegion for integrase B1277 sequence
ttagaggattatatgtactgtactagaaagctagggctttatgtgcagttagtagcataaattatataagggttatctaaatatatttacctcctgtgattaagttatataaagactaaatcacaggaggtttatttttatgataacagtagaaaaactggaaaaaggtacttattttgatgatgcttttaaaatctcatttagatacgatcccactactgtagctaaagtaaaagagctggcagagcggagatatttac

SEQ ID NO: 27277 - DNA, 260 bp, Unknown
  Description of Unknown: RightRegion for integrase B1278 sequence
cgcgtcacctccatcacattcaagaacggtgcgacccacacattcacctacaagacatgagaaaagccccggcctcatatactgaggtcggggccatcttatgcagtctatgcagtatcgccgcaacattatgcgtcaaaaaagttgttcaattttataagcatcccctcaaagctaacgatgcgtgatgcttttcggttatccacgcggctttttcaggtttttacggcggttaagccgtttcccccgaaaacccttat

SEQ ID NO: 27278 - DNA, 109 bp, Unknown
  Description of Unknown: RightRegion for integrase B1279 sequence
cgcgtcatctccatcaccttcaagaacggatcgacccacacgttcacctacaagacatgagaaaagccccggcctcatatactgaggtcggggccatcttatgcagtct

SEQ ID NO: 27279 - DNA, 260 bp, Unknown
  Description of Unknown: RightRegion for integrase B1280 sequence
ttagaggattatatgtactgtactagaaagctggggctttatgtgcagttagtagcataaattatataggggttatctaaatatatttacctcctgtgattaagttatataaagactaaatcacaggaggtttatttttatgataacagtagaaaaactggaaaaaggtacttattttgatgatgcttttaagatctcatttagatacgatcccactactgtagctaaggtaaaagagctggcagagcggagatacttac

SEQ ID NO: 27280 - DNA, 109 bp, Unknown
  Description of Unknown: RightRegion for integrase B1281 sequence
gaggttctttttatcccgacgccgtccaaaggaggatctcatggtctacaccatcggtgaaatggcaaagatgctgggcgttccggcatccaccctgcgctactatgac

SEQ ID NO: 27281 - DNA, 260 bp, Unknown; identical to SEQ ID NO: 27277
  Description of Unknown: RightRegion for integrase B1282 sequence

SEQ ID NO: 27282 - DNA, 260 bp, Unknown
  Description of Unknown: RightRegion for integrase B1283 sequence
cggatcaccgccatcaccttccgaaacggcacagcccaccggttcaaatacaagacataaaacaagccccgaccacaccggccggggcttttccgtatccgcagttatgcgaggaatattcggtttttatgcagaaaaaagttggtcaatttcatacacataccctcgatgttgcggagtcgggacgtgcatttcattaccggtcggtttcgccattctcgccatccggtacggtcgcatcctccgaaacgcttgaaatt

SEQ ID NO: 27283 - DNA, 260 bp, Unknown
  Description of Unknown: RightRegion for integrase B1284 sequence
tataacggacaatttaaaagcggatcggggatgcgtctattacgatggagatccgattagtaaattgggaagtaaatatcgtgaaaaaataggatatatgccgcaacaacaggagatttatgacaattttaccggtgaagagtttctgtggtatatggcagctttaaagggattagaaaaaagtatgcaaaaaataagatagataaccttttgaaagtggtgaatttgacttctgagaaaaacaaaaaaataggttcgta

SEQ ID NO: 27284 - DNA, 260 bp, Unknown
  Description of Unknown: RightRegion for integrase B1285 sequence
acgtgcatttctggggcgagtgaaattgcatttaactatgaatatagaatggtaatctaatatgcaaagaggaatggagtcaatgaacaatatacataccgcatatgatgtaatgaaagaatacttaataaccgatgcagaacttgacggccagttccaggtgccgatgcttccaaaggtgaatctggtaccgaataggggaatagatttcgtatcctctaagtccagatcgctaaaagggcataaggacctgaccgtga

SEQ ID NO: 27285 - DNA, 260 bp, Unknown
  Description of Unknown: RightRegion for integrase B1286 sequence
gggcaagtaaaacaaatcatattcaaaaatggtctgtcacacactttcatattcaaataaaataagccggggcaattactgctccggctttcgttctgtattcactatgctgatacctgtactccgttttcaaaaatcgctgccacccagtatccgtatttctcatggcgagccttatttgagtctgtcttgatgactgctgttcttttcccattgctcatcacatatactggagcgttcttctgctcactgaacttctt

SEQ ID NO: 27286 - DNA, 109 bp, Unknown
  Description of Unknown: RightRegion for integrase B1287 sequence
attaaagaaatgcagcaattaatgttgcatttctgttctcatagcatgtccagtatctaataaaattatattttctgcaaattcttttaaagcatattgctgacaaacc

SEQ ID NO: 27287 - DNA, 260 bp, Unknown
  Description of Unknown: RightRegion for integrase B1288 sequence
tgttttttcatagccataacggatttcgttataatctaccaaaatccagcgagattctaaaatcgttgttagaatctaccgtaaaggagcatggctatgattaggattttactgtccacccggcttggcgagcggaggtggtcacaagctgaccttgcaagggcaacaggcattcgaccttcgacgatcaatgacctgtaccatgagatcgcagaaagggtaaacctggagcatctggatcttatttgtgaggcgctggg

SEQ ID NO: 27288 - DNA, 260 bp, Unknown
  Description of Unknown: RightRegion for integrase B1289 sequence
gggcaggtaaaacaaatcatattcaaaaacggtctgtcacacactttcatattcaaataaaatgagccggggcaattactgctccggctttcattctgtgttcattatgctgatacctgtactccattttcaaaaattgctgccacccagtatccgtatttctcgtgacgagccttatttgagtccgtcttgataactgctgttctttttccattgctcatcacatataccggagcgttcttctgctcactgaatttctt

SEQ ID NO: 27289 - DNA, 260 bp, Unknown
  Description of Unknown: RightRegion for integrase B1290 sequence
gggcaggtaaaacaaatcatattcaaaaacggtctgtcacacactttcatattcaaataaaatgagccggggcaattactgctccggctttcattctgtgttcattacgctgatacctgtactccattttcaaaaatcgctgccacccagtatccgtatttctcgtggcgagccttgtttgagtccgtcttgatgactgctgttctttttccattgctcatcacatataccggagtgttcttctgctcactgaatttctt

SEQ ID NO: 27290 - DNA, 260 bp, Unknown
  Description of Unknown: RightRegion for integrase B1291 sequence
aattgcattttgaatgcaagtgaaatcgcatttgattacacgtatgaagcagtaatctaaaatataaaatgtggaggaatggagtcatgacagtacataccgcatatgatgtgatgagagaatacatgattacaggagctgaactggatggtagataccagattccaatgatggatagatatgtggacgagataccacaagatacagtagattttaaagatagcttcagccgaaagataaagaatcatcgcgatttgtgc

SEQ ID NO: 27291 - DNA, 260 bp, Unknown; identical to SEQ ID NO: 27288
  Description of Unknown: RightRegion for integrase B1292 sequence

SEQ ID NO: 27292 - DNA, 260 bp, Unknown
  Description of Unknown: RightRegion for integrase B1293 sequence
cacttttgttcccagcccagagagaccataaacgaaagggtatcgcaatcagggctatgatttcacaattacatcttctacggcttttgatcacaaatggattccggaacgaaatgtttttgactccatttctacagtggtggacgaactgtttgcagattatctttccagaccgaatgtaaggcagccgattctgacacaatactgtgacggaagacaggttcagtgtccgaactggatgaccaaattgtcacaaccta

SEQ ID NO: 27293 - DNA, 260 bp, Unknown
  Description of Unknown: RightRegion for integrase B1294 sequence
caaagcacacacaggcgaaccgttggtaataatcaatggttcgcttttgttatcagttaagagaataaaataaaaaaccgccgccgataagagctccacagctcttaccgacggcgaattttttatcttacattgatttaataaatgcacccggataatcttttttcactgttttaaggtatgcctcagcattctcccgagacttgaaagccccgacctgcacatagaacatctgattgctttcgacagcaggcataaac

SEQ ID NO: 27294 - DNA, 260 bp, Unknown
  Description of Unknown: RightRegion for integrase B1295 sequence
aattgcattttgaatgcaagtgaaattgcatttgattacacgtatgaagcagtaatctaaaatataaaatgtggaggaatggagtcatgacagtacataccgcatatgatgtgatgagagaatacatgattacaggagctgaactggatggtagataccagattccaatgatggataggtacgtggatgagataccgcaagacacagtggattttaaagacagtttcagtcgcaagataaagaattatcgcgatttgtgc

SEQ ID NO: 27295 - DNA, 260 bp, Unknown
  Description of Unknown: RightRegion for integrase B1296 sequence
cggatcaccgccatcaccttccgaaacggcacagctcaccggttcaaatacaagacataaaacaagccccgaccacaccggtcggggcttttccgtatccgcagttatgcgaggaatattcggtttttatgcagaaaaaagttggtcaatttcatacacataccctcgatgttgcggagtcgggacgcgcatttcattaccggtcggttttgtcattctcgccatccggtacggtcgcatcctccgaaacgcttgaaatt

SEQ ID NO: 27296 - DNA, 260 bp, Unknown
  Description of Unknown: RightRegion for integrase B1297 sequence
cacttttgtccccaaccacgaatgaccgttaacgaaagggtatcgcaatcagggctatgatttcacaattacatcttctacggcttttgatcacaaatggattccggaacgaaatgtttttgactccatttctacagtggtggacgaactgtttgcagattatctttccagaccgaatgtaaggcagccgattctgacacaatactgtgacggaagacaggttcagtgtccgaactggatgaccaaattgccacaaccga

SEQ ID NO: 27297 - DNA, 109 bp, Unknown
  Description of Unknown: RightRegion for integrase B1298 sequence
aataagcactgctacattattgatatggctcactgcctgagccttactgaatcaatataaccgggcaaccgttccagctaccatcacttatttacgtgacgaattgttc

SEQ ID NO: 27298 - DNA, 260 bp, Unknown
  Description of Unknown: RightRegion for integrase B1299 sequence
acttgcatttctggagcgagcgaaattgcatttaactatgaatatagaatggtaatctaatatacaaagaggaatggagtcgatgaacaatatacatactgcatatgatgtaatgaaagaatacttaataaccgatgcagaacttgacggccagtttcaggtgccgatgttgtcaaaatcggatgtcgtgccgagtaagggaatagatttcgtatcttcgaagtccagaaccctgaaagggcataaggacctgaccgtga

SEQ ID NO: 27299 - DNA, 260 bp, Unknown
  Description of Unknown: RightRegion for integrase B1300 sequence
caatggaattctgcgtcccacctcaggagaagtgctgatcaacggagaagatatcaataaccgatctactgcaaaatggtctaaagaggtaggatatgtattccagaacccggatgatcagctgtttctggaatctgtccgcaaggagtttgagttcggacccaagcagatcggtatgccagaggacgagatccagaaaagaatcgaatgggtagcagagcttgtaggactgaaggacaagctggatatgcatccctttg

SEQ ID NO: 27300 - DNA, 260 bp, Unknown
  Description of Unknown: RightRegion for integrase B1301 sequence
gggcaagtaaagcaaatcatattcaaaaatggtctgtcacacactttcatattcaaataaaataagccggggcaattactgctccggctttcgttctgtattcactatgctgatacctgtactccgttttcaaaaatcgctgccacccagtatccgtatttctcatggcgagccttatttgagtctgtcttgatgactgctgttcttttcccattgctcatcacatataccggagcgttcttctgctcactgaacttctt

SEQ ID NO: 27301 - DNA, 260 bp, Unknown
  Description of Unknown: RightRegion for integrase B1302 sequence
tatcagcaattcttggaaatcacagaggaacagaaacttataccgctgattagtgcgtaaaagaaaattgaccagcgccacacaaaaacggtgctggtcaatgactttgtataggacatatttagtgattttgatcgttagaaaagtgctttttattacaacagcatacaccatgagtgtgagcaactaaggagagcaactgactcttaatcagtgggtcctgggttcgagtccccgatggtgcaccaaagaatgcctta

SEQ ID NO: 27302 - DNA, 260 bp, Unknown
  Description of Unknown: RightRegion for integrase B1303 sequence
ggacaagtaaaacaaatcatattcaaaaatggtctgtcacacactttcatattcaaataaaataagccggggcaattactgctccggctttcgttctgtattcactatgctgatacctgtactccgttttcaaaaatcgctgccacccagtatccgtatttctcatggcgagccttatttgagtctgtcttgatgactgctgttcttttcccattgctcatcacatataccggagcgttcttctgctcactgaacttctt

SEQ ID NO: 27303 - DNA, 260 bp, Unknown
  Description of Unknown: RightRegion for integrase B1304 sequence
aattgcattttgaatgcaagtgaaatcgcatttgattacacgtatgaagcagtaatctaaaatataaaatacggaggaatggagtcgtgacagtacataccgcatatgatgtgatgagagaatacatgattacaggagccgaactggatggtaaataccagattccaatgatggatagatatgtggacgagataccacaagatacagtagattttaaagatagcttcagccgaaagataaagaatcatcgcgaattgtgc

SEQ ID NO: 27304 - DNA, 260 bp, Unknown; identical to SEQ ID NO: 27298
  Description of Unknown: RightRegion for integrase B1305 sequence

SEQ ID NO: 27305 - DNA, 260 bp, Unknown
  Description of Unknown: RightRegion for integrase B1306 sequence
cggatcaccgccatcgccttccgaaacggcacagctcaccggttcaaatacaagacataaaacaagccccgaccacaccggtcggggcttttccgtgtccgcagttatgcgaggaatattcggtttttatgcagaaaaaagttggtcaatttcatacacataccctcgatgttgcggagtcgggacgcgcatttcattaccggtcggttttgtcattctcgccatccggtacggtcgcatcctccgaaacgcttgaaatt

SEQ ID NO: 27306 - DNA, 260 bp, Unknown
  Description of Unknown: RightRegion for integrase B1307 sequence
gtcaacaccagaaaaggtgtgttcgtgagctacacgaccgacgacagacccgctgtttgagcagaaaaaagcgagtgtcctcacagcttttcaaatgctgtaagaacactcgccatggtacgggtaacaggaatcgaacctgcacggttgcccaccagatcctaaatctggcgcgtctgccagttccgccatacccgcatatttcccatcgcaattatatagccgtcgccatacaacaagagatgcgaccatctcatacg

SEQ ID NO: 27307 - DNA, 260 bp, Unknown
  Description of Unknown: RightRegion for integrase B1308 sequence
gggcaagtaaaacaaatcatattcaaaaatggtctgtcacacactttcatattcaaataaaatgagccggggcaattaccgctccggctttcattctgtgttcattatgctgatacctgtactccattttcaaaaattgctgccacccagtatccgtatttctcgtgacgagccttatttgagtccgtcttgatgactgctgttctttttccattgctcatcacatataccggagcgttcttctgctcactgaatttctt

SEQ ID NO: 27308 - DNA, 260 bp, Unknown
  Description of Unknown: RightRegion for integrase B1309 sequence
gataaagctgttgatattattgagtttcagaatggtttagcattacattttaactattaatatcgtagttgcgtagaggtatctaaaaaatcgtagttgaggcaacatacggacagccaaatgtttgtataataaaagattttctttttccagtttttataaactcatcctcattctttctatgaagcatttctatatatttttcttgctcttctattttttccttggatatttctatctgttttctttccgacacttta

SEQ ID NO: 27309 - DNA, 260 bp, Unknown
  Description of Unknown: RightRegion for integrase B1310 sequence
ggaaaagtcacttcagtggtgtttaaaaacgcaatcacggttcgcttcaagtatgaataacaaaagcgcccagatccagtaatcagatcagggcgctttctattgccttgttcgtgaataatcacacacaagtcatcaataatcattcatttcttggggacgattgaaaaatttcctttttctggaatatcgtatacatcgggtacataaaatttgcaaagtcgtaaaaatcgctcaaaaacggtcattcatgcacaaaa

SEQ ID NO: 27310 - DNA, 260 bp, Unknown
  Description of Unknown: RightRegion for integrase B1311 sequence
cacttttgttcccagcccagagagaccataaacgaaagggtatcgcaatcagggctatgatttcacaattacatcttctacggcttttgatcacaaatggattccggaacgaaatgtttttgactccatttctacagtggtggacgaactgtttgcagattatctttccagaccgaatgtaaggcagccgattctgacacaatactgtgacggaagacaggttcagtgtccgaactggatgaccaaattgccacaaccta

SEQ ID NO: 27311 - DNA, 260 bp, Unknown
  Description of Unknown: RightRegion for integrase B1312 sequence
gggcaagtaaaacaaatcatattcaaaaatggtctgtcacacactttcatattcaaataaaatgagccggggcaattactgctccggctttcattctgtgttcattatgctgatacctgtactccattttcaaaaattgctgccacccagtatccgtatttctcgtgacgagccttatttgagtccgtcttgacgactgctgttctttttccattgctcatcacatataccggagcattcttctgctcactgaatttctt

SEQ ID NO: 27312 - DNA, 260 bp, Unknown
  Description of Unknown: RightRegion for integrase B1313 sequence
cacttttgtccccaacccagaatgaccaattacgatggggtaccggaaccagggctatgattttactattacatcttccactgcatttgaccataaatggattcctgaacggaatatttacgattctatttcaatcatcgtagatgaattatttgccgactatcttgcaagaccaaatgtaagacagccgatacttacacagtattgcgatggaagacaggttcaatgtccaaattggatgaccattttgtaaggacgta

SEQ ID NO: 27313 - DNA, 260 bp, Unknown; identical to SEQ ID NO: 27288
  Description of Unknown: RightRegion for integrase B1314 sequence

SEQ ID NO: 27314 - DNA, 260 bp, Unknown
  Description of Unknown: RightRegion for integrase B1315 sequence
tatcagcaattcctggaaatcacagaagaacaaaaacttataccgctgattagtgcgtaaaagaaaattgaccagcgccacacaaaaacggtgctggtcaatgactttgcataggatatatttagtgattttgatcgttagaaaagtgctttttattacaacagcatacaccatgagtgtgagcaactaaggagagcaactgactcttaatcagtgggtcctgggttcgagtccccgatggtgcaccaaaaaaagcctta

SEQ ID NO: 27315 - DNA, 260 bp, Unknown
  Description of Unknown: RightRegion for integrase B1316 sequence
gggcaggtaaaacaaatcatattcaaaaacggtctgtcacacactttcatattcaaataaaatgagccggggcaattactgctccggctttcattctgtgttcattccgctgatacctgtactccattttcaaaaatcgctgccacccagtatccgtatttctcgtggcgagccttgtttgagtccgtcttgatgactgctgttcttttcccattgctcatcacatataccggagcgttcttctgctcactgaatttctt

SEQ ID NO: 27316 - DNA, 260 bp, Unknown
  Description of Unknown: RightRegion for integrase B1317 sequence
gagctaaatttgccgcccatagggcagcttatgtgtccgtcaggagaggatagcgaatgaaattttgatgtactttcgcagtcggaagaaattacagggcgaggtgtcgctcaacgattcgctcgattccgacgccgacggcgagtcgctctacctcatggatgtcgtcggcgtcgaggacacgatgtatttggacattcaggaccgcgacgactgcctgcgcgtgcgaaggctcgtgcacgagtgcctgaccgagcggg

SEQ ID NO: 27317 - DNA, 260 bp, Unknown; identical to SEQ ID NO: 27298
  Description of Unknown: RightRegion for integrase B1318 sequence

SEQ ID NO: 27318 - DNA, 260 bp, Unknown
  Description of Unknown: RightRegion for integrase B1319 sequence
attaaagaaatgcagcaactaatgttgcatttctattctcatagcatgtccagtatctaaaagtattatattttctgcaaattcttttaaagcatattgttgacatactttagagctaagcttatcataattgatgtcttccttaggaacttctaaaataacacaacctgttctatctaactcttcaacaatttcctttgacaagctttctttagctaacttacatgaacctgaaattgctcctaatgtatcctgatctc

SEQ ID NO: 27319 - DNA, 260 bp, Unknown
  Description of Unknown: RightRegion for integrase B1320 sequence
gggcaggtaaaacaaatcatattcaaaaacggtctgtcacacactttcatattcaaataaaatgagccggggcaattactgctccggctttcattctgtgttcattatgctgatacctgtactccattttcaaaaatcgctgccacccagtatccgtatttctcgtggcgagccttgtttgagtctgtcttgatgactgctgttcttttcccattgctcatcacatataccggagcgttcttctgctcactgaacttctt

SEQ ID NO: 27320 - DNA, 260 bp, Unknown
  Description of Unknown: RightRegion for integrase B1321 sequence
cggatcaccgccatcaccttccgaaacggcacagcccaccggttcaaatacaagacataaaacaagccccgaccacaccggccggggcttttccgcatccacagttatgcgaggaatattcggtttttatgcagaaaaaagttggtcaatttcatacacataccctcgatgttgcggagtcgggacgcgcatttcattaccggtcggttttgtcattctcgccatccggtacggtcgcatcctccgaaacgcttgaaatt

SEQ ID NO: 27321 - DNA, 260 bp, Unknown
  Description of Unknown: RightRegion for integrase B1322 sequence
acttgcattaagacacaagatatggtatttttcaaatataagtaccttttagcactataagagaaaaaatgggagtggaatcaatgatacatacagcttatgacgtaatgaaagagtttttaatcacggatgcagaccttgatggtaagtacggaataccgaaaattccaaagacttttatccatccaggcaaagatactgtagactttgcagagagcttcagtagaaagataaagaaacaccgggaactggatgtaaac

SEQ ID NO: 27322 - DNA, 260 bp, Unknown
  Description of Unknown: RightRegion for integrase B1323 sequence
acttgcattaagacacaagatatggtatttttcaaatataagtaccttttagcactataagagaaaaaatgggagtggaatcaatgatacatacagcttatgacgtaatgaaagagtttttaatcacggatgcagaccttgatggtaagtacggaatcccgaaaattccaaagacttttatccatcctggcaaagatactgtagactttgcagagagcttcagtagaaagataaagaaacaccgggaactggatgtaaac

SEQ ID NO: 27323 - DNA, 260 bp, Unknown
  Description of Unknown: RightRegion for integrase B1324 sequence
acttgcattaagacacaagatatggtatttttcaaatataagtaccttttagcactataagagaaaaaatgggagtggaatcaatgatacatacagcttatgacgtaatgaaagagtttttaatcacggatgcagacctcgatggcaagtacggaattccgaaaattccaaagacttttatccatccagggaaagatactgtagactttgcggagagtttcagtagaaagataaagaaccaccgggaactggatgtaaat

SEQ ID NO: 27324 - DNA, 260 bp, Unknown
  Description of Unknown: RightRegion for integrase B1325 sequence
acttgcatcaagacacaacatatggtattttacaaatataagtaccttttagcactataagagaaaaaatgggagtggaatcaatgatacatacagcttatgacgtaatgaaagagtttctaataactggtgcggaactggatggcaagtacggaatcccgaaaatcccaaagacatttatccatcctggaaaagatactgtagactttgcggagagcttcagccggaggataaagaatcatcgggaattggatgtaaat

SEQ ID NO: 27325 - DNA, 260 bp, Unknown
  Description of Unknown: RightRegion for integrase B1326 sequence
acttgtatcaagacacaagatatggtattttacaaatataagtaccttttagcactataagagaaaaatgggagtggaatcaatgatacatacagcttatgacgcaatgaaagagtttttaatcacggatgcagaccttgatggtaagtacgaaatcccgaaaatcccaaagacttttatccatcctggaaaagatactgtagactttgcggagagctttagccggaagattaagaaccatcgggaacttgatgtaaatt

SEQ ID NO: 27326 - DNA, 260 bp, Unknown
  Description of Unknown: RightRegion for integrase B1327 sequence
acttgcattaagacacaagatatggtatttttcaaatataagtaccttttagcactataagagaaaaaatgggagtggaatcaatgatacatacagcttatgacgtaatgaaagagtttttaatcacggatgcagaccttgatggtaagtacggaataccgaaaattccaaagacatttatccatcctggaaaagatactgtagactttgcagagagcttcagcagaaagataaagaaccatcgggaactggatgtaaac

SEQ ID NO: 27327 - DNA, 260 bp, Unknown
  Description of Unknown: RightRegion for integrase B1328 sequence
acttgcattaagacacaagatatggtatttttcaaatataagtaccttttagcactataagagaaaaaatgggagtggaatcaatgatacatacagcttatgacgtaatgaaagagtttttaatcacggatgcagaccttgatggtaagtacgaaatcccgaaaattccaaagacttttatccatccagggaaagatactgtagactttgcggagagcttcagccggaagattaagaaccacaaggaacttgatgtgaat

SEQ ID NO: 27328 - DNA, 260 bp, Unknown
  Description of Unknown: RightRegion for integrase B1329 sequence
acttgcatcaagacacaacatatggtattttacaaatataagtaccttttagcgctataagagaaaaaatgggagtggaatcaatgatacatacagcttatgacgtaatgaaagagtttttaatcactgatgcagaccttgaaggaaagtacggaatcccgaaaattccaaagacttttatccatcctgggaaagatactgtagactttgcggagagtttcagtagaaagataaagaaccaccgggaactggatgtaaac

SEQ ID NO: 27329 - DNA, 260 bp, Unknown
  Description of Unknown: RightRegion for integrase B1330 sequence
acttgcattaagacacaagatatggtatttttcaaatataagtaccttttagcactataagagaaaaaatgggagtggaatcaatgatacatacagcttatgacgtaatgaaagggtttttaatcacggatgcagaccctggaagaggcggaagaggcagcgaacgagtatgacggagagtcctatataatgctttaaaaaaataaagcaatgccaaatttggctcgaaatggaagaagaggaggaataaaaaataaagc

SEQ ID NO: 27330 - DNA, 260 bp, Unknown
  Description of Unknown: RightRegion for integrase B1331 sequence
acttgcatcaagacacaacatatggtattttacaaatataagtaccttttagcactataagagaaaaaaatgggagtggaatcaatgatacatacagcttatgacgtaatgaaagagtttttaatcacggatgcagaccttgatggcaaatatggaatcccgaaaattccaaaaacttttatccatcctggcaaagatactgtagactttgcggaaagcttcagccggaagattaagaatcatcgggaactggatgtaaa

SEQ ID NO: 27331 - DNA, 260 bp, Unknown; identical to SEQ ID NO: 27323
  Description of Unknown: RightRegion for integrase B1332 sequence

SEQ ID NO: 27332 - DNA, 260 bp, Unknown
  Description of Unknown: RightRegion for integrase B1333 sequence
acttgcattaagacacaagatatggtatttttcaaatataagtaccttttagcactataagagaaaaaatgggagtggaatcaatgatacatacagcttatgacgtaatgaaagagtttttaatcacgaatgcagaccttgatggcaagtacggaatcccgaaaattccaaagacctttatccatccagggaaagatactgtagactttgcagagagcttcagtcgaaagattaagaaccatcgggaacttgatgtaaac

SEQ ID NO: 27333 - DNA, 260 bp, Unknown
  Description of Unknown: RightRegion for integrase B1334 sequence
acttgtatcaagacacaagatatggtattttacaaatataagtaccttttagcactataagagaaaaatgggagtggaatcaatgatacatacagcttatgacgcaatgaaagagtttttaatcacggatgcagaccttgatggtaagtacgaaatccagaaaatcccaaagacttttatccatcctggaaaagatactgtagactttgcggagagctttagccggaagattaagaaccatcgggaacttgatgtaaatt

SEQ ID NO: 27334 - DNA, 260 bp, Unknown
  Description of Unknown: RightRegion for integrase B1335 sequence
aagtacagacagtttctggaatgcacagcagaaacttacaatacagaaattggtgcataacagaaaaggcggactgttcacgcaggaaagtgaatagtccactttttgtgctatggacagcactattgcaaaaagtaaagaaacagcgtataataaaggcaaggaaaggaggcgcttatcccatgcagcaggaagaaaattatttggcgcagagtatatcccaagtggatgccgatgcccgctacgatgagggtgttaag

SEQ ID NO: 27335 - DNA, 260 bp, Unknown
  Description of Unknown: RightRegion for integrase B1336 sequence
ggtaagatctccagcatcgtattccgaaatggactttgccacaactttgtattcaaataatttttaactacgcagcaaaaaatctgctgtaatttaaaaaaaggtgccttatttttaacaaaggcaccttgtcttgtttaaaaatgatctatcttgcattaaaacaaggtggatcatgcttaatcctgatcgtggcttgaccagatcaactctcttttttgaggaagttcagctatttcttgaatcagcgtataacaagc

SEQ ID NO: 27336 - DNA, 260 bp, Unknown
  Description of Unknown: RightRegion for integrase B1337 sequence
acttgtattaagacacaacatatggtattttacaaatataagtaccttttagcactataagagaaaaaatgggagtggaatcaatgatacatacagcttacgacgtaatgaaagagtttttaatcacggatgcagaccttgacggcaagtatggaatcccgaaaattccaaagaattttatccatcctggcaaagatactgtagactttgcagagagcttcagcagaaagataaagaaccatcgggaactggatgtaaat

SEQ ID NO: 27337 - DNA, 260 bp, Unknown
  Description of Unknown: RightRegion for integrase B1338 sequence
acttgcattaagacacaagatatggtatttttcaaatataagtaccttttagcactataagagaaaaaaatgggagtggaatcaatgatacatacagcttatgacgtaatgaaagagtttttaatcacggatgcagagcttgttggacagtacggaatccctaaaattccaaagacttttatccatccagggaaaaatactgtagattttgcggagagctttagccggaagattaagaaccaccgggaactggatgtaaa

SEQ ID NO: 27338 - DNA, 260 bp, Unknown
  Description of Unknown: RightRegion for integrase B1339 sequence
acttgcattaagacacaagatatggtatttttcaaatataagtaccttttagcactataagagaaaaaatgggagtggaatcaatgatacatacagcttatgacgtaatgaaagagtttttaatcacggatgcagagcttgttggacagtacggaatccctaaaattccaaagacttttatccatccagggaaaaatactgtagattttgcggagagctttagccgaaaaattaagaaccaccgggaactagacgtaaat

SEQ ID NO: 27339 - DNA, 260 bp, Unknown; identical to SEQ ID NO: 27338
  Description of Unknown: RightRegion for integrase B1340 sequence

SEQ ID NO: 27340 - DNA, 260 bp, Unknown
  Description of Unknown: RightRegion for integrase B1341 sequence
actttcattaagacacaagatatggtatttttcaaatataagtaccttttagcactataagagaaaaaaatgggagtggaatcaatgatacatacagcttatgacgtaatgaaagagtttttaatcactgatgcagaccttgaaggaaagtacggaatcccgaaaattccaaagacttttatccatccagggaaagatactgtagactttgcggagagcttcagccgtaagattaagaaccaccgggaactggatgtaaa

SEQ ID NO: 27341 - DNA, 260 bp, Unknown; identical to SEQ ID NO: 27338
  Description of Unknown: RightRegion for integrase B1342 sequence

SEQ ID NO: 27342 - DNA, 260 bp, Unknown; identical to SEQ ID NO: 27328
  Description of Unknown: RightRegion for integrase B1343 sequence

SEQ ID NO: 27343 - DNA, 260 bp, Unknown
  Description of Unknown: RightRegion for integrase B1344 sequence
gcaaatggagcagccgcacagctatcagatcaggatccattctgccgcagaataccgtgaccgctgcctttgcttgccgtgatggaaaacatgatttttatgcctgcgtggatcagaaaaaccaccggattttccgctgccaaagaaattacccgctaaaaattcagataattttgctgtctgcgggcgaattggtgttgcatcggtcggaaaaaagctataagctattatggaatcatgtaagcaaatagcagcgaggg

SEQ ID NO: 27344 - DNA, 260 bp, Unknown
  Description of Unknown: RightRegion for integrase B1345 sequence
gatttgcggtgttctaaagcctacttccggcagtatctgtttgaacggaaagagcattgacgagttgggagaagattattatgctcacttgggctatatgccgcaggatttcggcttttacccggattttacagcccgtgagtttatgctctatatggcggcagtaaagggactggataggaaagaagcaacgacacggacgggggaattgttgaaattagttaatctgcatgaggtggcagacaaaaaaattaagtcct

SEQ ID NO: 27345 - DNA, 260 bp, Unknown
  Description of Unknown: RightRegion for integrase B1346 sequence
gatcacttcccttactcatgggaagatcaaagacgtgaactcggttttaacccagcataaaataataaacaaattgctctttttatatctatgtatgcgtgaaaaacatacatagatatttaattttataaatttttcaaccggttattgaaaaaaaactaaactaatgaatatatggccttttgtattaaacattaacaaaaggttaaaaatgaaatatttatttgatggactaccaccaaaggtaattacttatatca

SEQ ID NO: 27346 - DNA, 260 bp, Unknown
  Description of Unknown: RightRegion for integrase B1347 sequence
tataacggacaatttaaaagcggatcggggatgcgtctattacgatggagatccgattagtaaattgggaagtaaatatcgtgaaaaaataggatatatgccgcaacaacaggagatttatgacaattttaccggtgacgagtttctgtggtatatggcagctttaaagggattagaaaaaaagtatgcaaaaaataagatagataaccttttgaaagtggtgaatttgacttctgagaaaaacaaaaaaataggttcgt

SEQ ID NO: 27347 - DNA, 260 bp, Unknown
  Description of Unknown: RightRegion for integrase B1348 sequence
gacaaaggcaatagtgataaaaataatgaggtgtcattatgtactaggaatatgacttgacttaattgctccattaagtccaaatttagttctttccgatacaatttcaatttctaactgtgataatactgttagcattcttacaaagaatcttccgttagcagtagaagtattaacatcatctctatcacaaacaagataacaattatatttttctaactctaatataagttcttctaaatcacgaactgaacgagtaa

SEQ ID NO: 27348 - DNA, 260 bp, Unknown; identical to SEQ ID NO: 27323
  Description of Unknown: RightRegion for integrase B1349 sequence

SEQ ID NO: 27349 - DNA, 260 bp, Unknown
  Description of Unknown: RightRegion for integrase B1350 sequence
acttgcattaagacacaagatatggtatttttcaaatataagtattttttagcactataagagaaaaaaatgggagtggaatcaatgatacatacagcttatgacgtaatgaaagaatttttaatcacggatgcagaccttgatggtaagtacgaaatcccgaaaatcccaaagacttttatccatcctggaaaagatactgtagactttgcggagagctttagccggaagattaagaaccaccgggaactggatgtaaa

SEQ ID NO: 27350 - DNA, 260 bp, Unknown; identical to SEQ ID NO: 27337
  Description of Unknown: RightRegion for integrase B1351 sequence

SEQ ID NO: 27351 - DNA, 260 bp, Unknown; identical to SEQ ID NO: 27338
  Description of Unknown: RightRegion for integrase B1352 sequence

SEQ ID NO: 27352 - DNA, 260 bp, Unknown
  Description of Unknown: RightRegion for integrase B1353 sequence
gcaaatggagcagccgcacagctatcagatcaggatccattctgccgcagaataccgtgaccgctgcctttgcttgccgtgatggaaaacatgatttttatgcctgcgtggatcagaaaaaccaccggatttttccgctgccaaagaaattacccgctaaaaattcagataattttgctgtctgcgggcgaattggtgttgcatcggtcggaaaaaagctataagctattatggaatcatgtaagcaaatagcagcgagg

SEQ ID NO: 27353 - DNA, 260 bp, Unknown
  Description of Unknown: RightRegion for integrase B1354 sequence
acttgcattaagacacaagatatggtatttttcaaatataagtaccttttagcactataagagaaaaaaatgggagtggaatcaatgatacatacagcttatgacgtaatgaaagagtttttaatcactgatgcagaccttgaaggaaagtacggaatcccgaaaattccaaagacttttatccatccagggaaagatactgtagactttgcggagagcttcagccggaagattaagaaccaccgggaactggatgtaaa

SEQ ID NO: 27354 - DNA, 260 bp, Unknown
  Description of Unknown: RightRegion for integrase B1355 sequence
acttgcattaagacacaagatatggtatttttcaaatataagtaccttttagcactataagagaaaaaaatgggagtggaatcaatgatacatacagcttatgacgtaatgaaagagtttttaatcactgatgcagaccttgaaggaaagtacggaatcccgaaaattccaaagacttttatccatccagggaaagatactgtagactttgcggagagcttcagcagaaagattaagaaccacaaggaacttgatgtgaa

SEQ ID NO: 27355 - DNA, 260 bp, Unknown
  Description of Unknown: RightRegion for integrase B1356 sequence
aaaaggcattcaccgataggtgggtgcctttttttggctgccagcaggattccctgttagccgccagatgctgaaacttatcgaaaaagctcaagttgctttgccggcaggttttgatataataaaaatataaatttacttattttattcaggtggagattgcagtgaaaaatacaaaaacttgtcctaaatgtcactcttccgatatagtaatagtgaaaggtcaaaaaactaattatgcaaaaggtaatgttattttt

SEQ ID NO: 27356 - DNA, 260 bp, Unknown; identical to SEQ ID NO: 27323
  Description of Unknown: RightRegion for integrase B1357 sequence

SEQ ID NO: 27357 - DNA, 260 bp, Unknown
  Description of Unknown: RightRegion for integrase B1358 sequence
acttgcattaagacacaagatatggtatttttcaagtataagtaccttttagcactataagagaaaaaatgggagtggaatcaatgatacatacagcttatgacgtaatgaaagagtttttaatcacggatgcagaccttgaaggtaagtacggaatcccgaaaattcaaaagacttttattcatcccggcaaagatactgtagactttacggagagctttagccggaagattaagaaccaccgggaactggatgtaaac

SEQ ID NO: 27358 - DNA, 260 bp, Unknown; identical to SEQ ID NO: 27326
  Description of Unknown: RightRegion for integrase B1359 sequence

SEQ ID NO: 27359 - DNA, 260 bp, Unknown
  Description of Unknown: RightRegion for integrase B1360 sequence
acttgcattaagacacaagatatggtatttttcaaatataagtaccttttagcactataagagaaaaaatgggagtggaatcaatgatacatacagcttatgacgtaatgaaagaatttttaatcacggatgcagaccttgatggtaagtacgaaatcccgaaaatcccaaagacttttatccatcctggaaaagatactgtagactttgcggagagctttagccggaagattaagaaccaccgggaactggatgtaaat

SEQ ID NO: 27360 - DNA, 260 bp, Unknown
  Description of Unknown: RightRegion for integrase B1361 sequence
tgccgcctgcatatccggtcaggctgccgtttgttccgacaacgcggtggcagggaatgatgatagagatcacattgtgtccgacagccccgcccacagcctgcgcagacatccgggaaagaccgcgctctgcggcaagctgccttgccagtgccccataggtcgtggtctggccacaggggatgcggcgcagcagcgcccacacctcctgctgaaaggcagagccagcaggatggagcggcggggtaaagtccggctcc

SEQ ID NO: 27361 - DNA, 260 bp, Unknown
  Description of Unknown: RightRegion for integrase B1362 sequence
gggcgtgtgaagcaaattatcttcaaaaacggactctctcatatattcgtgtataaatagcagaaatagccctaagacaatgcaatcttagggctattatattaagctatgttatttgctatttcagaaacactaatgtcttccttgaaacgttctccatcagcagtacgtaacaaaacgaaacgaatagtagtatcattacagtgtggaccttcaatctctttgattcttgccgttccatccgcaacacttctgattgt

SEQ ID NO: 27362 - DNA, 260 bp, Unknown
  Description of Unknown: RightRegion for integrase B1363 sequence
acttgcattaagacacaaaatatggtatttttcaaatataagtaccttttagcactataagagaaaaatgggagtggaatcaatgatacatacagcttatgacgtaatgaaagagtttttaatcacggatgtagaccttgatggtaagtacggaataccgaaaattccaaagacttttattcatcccggcaaagatactgtagactttgcggagagcttcaaccggaagattaagaaccaccgggaactggatgtaaact

SEQ ID NO: 27363 - DNA, 260 bp, Unknown; identical to SEQ ID NO: 27338
  Description of Unknown: RightRegion for integrase B1364 sequence

SEQ ID NO: 27364 - DNA, 260 bp, Unknown
  Description of Unknown: RightRegion for integrase B1365 sequence
acttgcattaagacacaagatatggtatttttcaaatataagtaccttttagcactataagagaaaaaatgggagtggaatcaatgatacatacagcttatgacgtaatgaaagagtttttaatcacggatgcagacctcgatggcaagtacgaaatcccgaaaattccaaagacttttatccatcctggaaaagatactgtagactttgcggagagctttagccggaagattaagaaccaccgggaactggatgtaaat

SEQ ID NO: 27365 - DNA, 260 bp, Unknown
  Description of Unknown: RightRegion for integrase B1366 sequence
acttgcattaagacacaagatatggtatttttcaaatataagtaccttttagcactataagagaaaaaatgggagtggaatcaatgatacatacagcttatgacgtaatgaaagagtttttaatcacggatgcagaccttgatggtaagtacggaatcccgaaaattccaaagacttttatccatactggcaaagatactgtagactttgcagagagcttcagcagaaaaataaaaaaccatcgggaacttgatgtaaat

SEQ ID NO: 27366 - DNA, 260 bp, Unknown
  Description of Unknown: RightRegion for integrase B1367 sequence
tggtcgggtttttgcctttgcgtgggcttcgtggtcctcgtaatcgttgaaagagcgtaaatcgttgaattacaagggcaatcgttgttttagtggggtattcgttgaattacagagataatcgttgatttacagcattccctattgataaaaggtgtgggaatttataatgtggtctcgctcaagtcgctgcctttttcagaatctcaaaggctgccttgatttttgccgccatcaatttcctgcgctcaatcaggaag

SEQ ID NO: 27367 - DNA, 260 bp, Unknown
  Description of Unknown: RightRegion for integrase B1368 sequence
actttcattaagacacaagatatggtatttttcaaatataagtaccttttagcactataagagaaaaaaatgggagtggaatcaatgatacatacagcttatgacgtaatgaaagagtttttaatcactgatgcagaccttgaaggaaagtacggaatcccgaaaattccaaagacttttatccatccagggaaagatactgtagactttgcggagagcttcagccggaagattaagaaccaccgggaactggatgtaaa

SEQ ID NO: 27368 - DNA, 260 bp, Unknown
  Description of Unknown: RightRegion for integrase B1369 sequence
acttgcattaagacacaagatatggtatttttcaaatataagtaccttttagcactataagagaaaaaatgggagtggaatcaatgatacatacagcttatgacgtaatgaaagggtttttaatcacggatgcagagcttgttggacagtacggaatccctaaaattccaaagacttttatccatccagggaaaaatactgtagattttgcggagagctttagccgaaaaattaagaaccaccgggaactagacgtaaat

SEQ ID NO: 27369 - DNA, 260 bp, Unknown
  Description of Unknown: RightRegion for integrase B1370 sequence
acttgcatcaagacacaacatatggtattttacaaatataagtaccttttagcactataagagaaaaaatgggagtggaatcaatgatacatacagcttatgacgtaatgaaagagtttttaatcacggatgcagaccttgacggcaagtatggaatccctaaaatccaaaagacatttatccatcctggaaaagatactgtagactttgcggagagctttagccgaaagataaagaaccaccgggagctggatgtaaat

SEQ ID NO: 27370 - DNA, 260 bp, Unknown
  Description of Unknown: RightRegion for integrase B1371 sequence
acttgcattaagacacaagatatggtatttttcaaatataagtaccttttagcactataagagaaaaaatgggagtggaatcaatgatacatacagcttatgacgtaatgaaagagtttttaatcacggatgcagaccttgatggtaagtacggaatcccgaaaattccaaagacttttatccatactggcaaagatactgtagactttgcagagagcttcagcagaaaaattaagaaccaccgggaactggatgtaaac

SEQ ID NO: 27371 - DNA, 260 bp, Unknown
  Description of Unknown: RightRegion for integrase B1372 sequence
acttgcattaagacacaagatatggtatttttcaaatataagtaccttttagcactataagagaaaaaatgggagtggaatcaatgatacatacagcttatgacgtaatgaaagagtttttaatcacggatgcagaccttgatggtaagtacggaatcccgaaaattccaaagacttttatccatccaggcaaagatactgtagactttgcggagagcttcaacaggaagattaagaaccatctggaacttgatgtaaat

SEQ ID NO: 27372 - DNA, 260 bp, Unknown
  Description of Unknown: RightRegion for integrase B1373 sequence
acttgcattaagacacaagatatggtatttttcaaatataagtaccttttagcactataagagaaaaaatgggagtggaatcaatgatacatacagcttatgacgtaatgaaagagtttttaatcacgaatgcagaccttgatggcaagtacggaatcccgaaaattccaaagacctttatccatccagggaaagatactgtagactttgcagagagcttcagtcgaaagattaagaaccatcgggaacttgatgtaaat

SEQ ID NO: 27373 - DNA, 260 bp, Unknown
  Description of Unknown: RightRegion for integrase B1374 sequence
acttgcattaagacacaagatatggtatttttcaaatataagtaccttttagcactataagagaaaaaatgggagtggaatcaatgatacatacagcttatgacgtaatgaaagagtttttaatcacggatgcagaccttgatggtaagtacggaataccgaaaattccaaagacatttatccatcctggaaaagatactgtagactttgcggagagctttagccggaagattaagaaccaccgggaacttgatgtaaat

SEQ ID NO: 27374 - DNA, 260 bp, Unknown
  Description of Unknown: RightRegion for integrase B1375 sequence
acttgcattaagacacaagatatggtatttttcaaatataagtaccttttagcactataagagaaaaaaatgggagtggaatcaatgatacatacagcttatgacgtaatgaaagaatttttaatcacggatgcagaccttgatggtaagtacgaaatcccgaaaatcccaaagacttttatccatcctggaaaagatactgtagactttgcggagagctttagccggaagattaagaaccaccgggaactggatgtaaa

SEQ ID NO: 27375 - DNA, 260 bp, Unknown; identical to SEQ ID NO: 27371
  Description of Unknown: RightRegion for integrase B1376 sequence

SEQ ID NO: 27376 - DNA, 260 bp, Unknown
  Description of Unknown: RightRegion for integrase B1377 sequence
tacagtattatagattttgtaaattatctagatattgaggaaaacagaagatactactaacaaagaaagtcctgttggcataataaactggcaggactttttttgtcttgtaaactttacctacctttgcaccaacttctaaagttcaaggagttgagcctcttagaagggacatagttaataagagcgtttgaaatattatccttaatctggaatctggacaattctaaaacacagggataatagacagtaatcgctca

SEQ ID NO: 27377 - DNA, 260 bp, Unknown
  Description of Unknown: RightRegion for integrase B1378 sequence
tataacggacaatttaaaagcggatcggggatgcgtctattacgatggagatccgattagtaaattgggaagtaaatatcgtgaaaaaataggatatatgccgcaacaacaggagatttatgacaattttactggtgaagagtttctgtggtatatggcagctttaaagggattagaaaaaaagtatgcaaaaaataagatagataaccttttgaaagtggtgaatttgacttctgagaaaaacaaaaaaataggttcgt

SEQ ID NO: 27378 - DNA, 260 bp, Unknown
  Description of Unknown: RightRegion for integrase B1379 sequence
acttgcattaagacacaagatatggtatttttcaaatataagtaccttttagcactataagagaaaaaatgggagtggaatcaatgatacatacagcttatgatgtaatgaaagagtttttaatcacggatgcagacctcgatggcaagtacggaatcccgaaaattccaaagacttttattcatccaggcaaagatactgtagacttttcggagagcttcagccgaaagactaagaaccatcgggaacttgatgtaaac

SEQ ID NO: 27379 - DNA, 260 bp, Unknown
  Description of Unknown: RightRegion for integrase B1380 sequence
acttgcattaagacacaagatatggtatttttcaaatataagtaccttttagcactataagagaaaaaatgggagtggaatcaatgatacatacagcttatgacgtaatgaaagagtttttaatcacggatgcagaccttgatagcaagtacggaatcccgaaaattccaaagacttttatccatccagggaaagatactgtagacttttcagagagcttcagccggaagattaagaaccaccgggaactggatgtaaat

SEQ ID NO: 27380 - DNA, 260 bp, Unknown
  Description of Unknown: RightRegion for integrase B1381 sequence
gcaaatggagcagccgcacagctatcagatcaggatccattctgccgcagaataccgtgaccgctgcctttgcttgccgtgatggaaaacatgatttttatgcctgcgtgaatcagaaaaaccaccggattttccgctgccaaagaaattacccgctaaaaattcagataattttgctgtctgcgggcgaattggtgttgcatcggtcggaaaaaagctataagctattatggaatcatgtaagcaaatagcagcgaggg

SEQ ID NO: 27381 - DNA, 260 bp, Unknown
  Description of Unknown: RightRegion for integrase B1382 sequence
acttgcattaagacacaagatatggtatttttcaaatataagtaccttttagcgctataagagaaaaaatgggagtggaatcaatgatacatacagcttatgacgtaatgaaagagtttttgatcacggatgcagaccttgatggtaagtacggaataccgaaaattccaaagacttttatccatccaggaaaagatactgtagactttgcggagagcttcagtcgaaaaattaagaaccaccgggaactggatgtaaac

SEQ ID NO: 27382 - DNA, 260 bp, Unknown; identical to SEQ ID NO: 27361
  Description of Unknown: RightRegion for integrase B1383 sequence

SEQ ID NO: 27383 - DNA, 260 bp, Unknown
  Description of Unknown: RightRegion for integrase B1384 sequence
acttgcattaagacacaagatatggtatttttcaaatataagtaccttttagcactataagagaaaaaaatgggagtggaatcaatgatacatacagcttatgacgtaatgaaagagtttttaatcacggatgcagagcttgttggacagtacggaatccctaaaattccaaagacttttatccatccagggaaaaatactgtagattttgcggagagctttagccgaaaaattaagaaccaccgggagctagacgtaaa

SEQ ID NO: 27384 - DNA, 260 bp, Unknown
  Description of Unknown: RightRegion for integrase B1385 sequence
gaagaaaaaagacaatttgaaaagttgtctttttattcacacagcatgtccagtatctaataaaacaacattttctgcaaactccttaagagcatattgctgacaaacctttgtgtttaatttatcataattaacatcttcttttggaatcttaagaacaacacatcctttttcatcaagctcttttcttatttcctctgaaagagtttcttttgcaagtttacatgaaccactaaatgctcctagttcatctccaactc

SEQ ID NO: 27385 - DNA, 260 bp, Unknown
  Description of Unknown: RightRegion for integrase B1386 sequence
tatgtgtgggcagataaaaaaggacagcggaaaaatagtaatctgcggcaaagatactgagaaaaatttcaacagtgtttcatcggatatcggtgtagtttttcaaaactccgtacttgataaagcgctgtcggtaaaagataatctgcgcagtcgtgccgctctgtatggcataacgggcaaagaatttaaaaatcgtcttgatgggttatcggaacttctcggttttgaagatattcttaacagaaccgtcggaaaac

SEQ ID NO: 27386 - DNA, 260 bp, Unknown
  Description of Unknown: RightRegion for integrase B1387 sequence
acttgcattaagacacaagatatggtatttttcaaatataagtaccttttagcactataagagaaaaaatgggagtggaatcaatgatacatacagcttatgacgtaatgaaagagtttttaatcacggatgcagacctcgatggcaagtacggaattccgaaaattccaaagacttttatccatccaggcaaagatactgtagactttgcggagagcttcaacaggaagattaagaaccaccgggaactggatgtaaat

SEQ ID NO: 27387 - DNA, 260 bp, Unknown
  Description of Unknown: RightRegion for integrase B1388 sequence
acttgcattaagacacaagatatggtattttttaaatataagtaccttttagcactataagagaaaaaaatgggagtggaatcaatgatacatacagcttatgacgtaatgaaagagtttttaatcactgatgcagaccttgaaggaaagtacggaatcccgaaaattccaaagacttttatccatccagggaaagatactgtagactttgcggagagcttcagccggaagattaagaaccaccgggaactggatgtaaa

SEQ ID NO: 27388 - DNA, 260 bp, Unknown; identical to SEQ ID NO: 27338
  Description of Unknown: RightRegion for integrase B1389 sequence

SEQ ID NO: 27389 - DNA, 260 bp, Unknown
  Description of Unknown: RightRegion for integrase B1390 sequence
ggtaagatctccagcatcgtattccgaaatggactttgccacaactttgtattcaaataatttttaactacgcagcaaaaaatctgctgtaattaaaaaaaaggtgccttatttttaacaaaggcaccttgtcttgtttaaaaatgatctatcttgcattaatacaaggtggatcatgcttaatcctgatcgtggcttgaccagatcaactctcttttttgaggaagttcagctatttcttgaataagtgtataacatgc

SEQ ID NO: 27390 - DNA, 260 bp, Unknown
  Description of Unknown: RightRegion for integrase B1391 sequence
acttgcattaagacacaagatatggtatttttcaaatataagtaccttttagcactataagagaaaaaatgggagtggaatcaatgatacatacagcttatgacgtaatgaaagagtttttaatcacggatgcagaccttgatggtaagtacgaaatcccgaaaattccaaagacttttattcatccaggcaaagatactgtagactttgcggagagcttcagccggaagattaagaaccaccgggaactggatgtaaac

SEQ ID NO: 27391 - DNA, 260 bp, Unknown
  Description of Unknown: RightRegion for integrase B1392 sequence
acttgcattaagacacaagatatggtatttttcaaatataagtaccttttagcactataagagaaaaaatgggagtggaatcaatgatacacacagcttatgacgtaatgaaggagtttttaatcacggatgcagagcttgttggacagtacggaatccctaaaattccaaagacttttattcatccggggaaagatactgtagactttgcggagagtttcagtagaaagataaagaaccaccgggaactggatgtaaac

SEQ ID NO: 27392 - DNA, 260 bp, Unknown; identical to SEQ ID NO: 27357
  Description of Unknown: RightRegion for integrase B1393 sequence

SEQ ID NO: 27393 - DNA, 260 bp, Unknown; identical to SEQ ID NO: 27359
  Description of Unknown: RightRegion for integrase B1394 sequence

SEQ ID NO: 27394 - DNA, 260 bp, Unknown; identical to SEQ ID NO: 27338
  Description of Unknown: RightRegion for integrase B1395 sequence

SEQ ID NO: 27395 - DNA, 260 bp, Unknown; identical to SEQ ID NO: 27326
  Description of Unknown: RightRegion for integrase B1396 sequence

SEQ ID NO: 27396 - DNA, 260 bp, Unknown
  Description of Unknown: RightRegion for integrase B1397 sequence
acttgcattaagacacaagatatggtatttttcaaatataagtaccttttagcactataagagaaaaaatgggagtggaatcaatgatacatacagcttatgacgtaatgaaagagtttttaatcacggatgcagacctcgatggcaagtacggaattccgaaaattccaaagacttttattcatccggggaaagatactgtagattttgcggagagcttcaacaggaagattaagaatcatcgggaacttgatgtaaat

SEQ ID NO: 27397 - DNA, 260 bp, Unknown; identical to SEQ ID NO: 27353
  Description of Unknown: RightRegion for integrase B1398 sequence

SEQ ID NO: 27398 - DNA, 260 bp, Unknown; identical to SEQ ID NO: 27372
  Description of Unknown: RightRegion for integrase B1399 sequence

SEQ ID NO: 27399 - DNA, 260 bp, Unknown; identical to SEQ ID NO: 27325
  Description of Unknown: RightRegion for integrase B1400 sequence

SEQ ID NO: 27400 - DNA, 109 bp, Unknown
  Description of Unknown: RightRegion for integrase B1401 sequence
gaagaaaaaagacaatttgaaaagttgtctttttattcacacagcatgtccagtatctaataaaacaacattttctgcaaattccttaagagcatattgctgacaaacc

SEQ ID NO: 27401 - DNA, 260 bp, Unknown
  Description of Unknown: RightRegion for integrase B1402 sequence
tacagtattatagattttgtaaattatctagatattgaggaaaacagaagatactattaataaagaaagtcctgttggcataataaactggcaggactttttttgtcttgtaaactttacctatctttgcaccaacttctaaagttcaaggagttgaacctcttagaagggacatagttaattaagagcgtttgaaatattatcctattgtggaatctggacaattctatatactgggataatagacagtaatcgctcac

SEQ ID NO: 27402 - DNA, 260 bp, Unknown; identical to SEQ ID NO: 27325
  Description of Unknown: RightRegion for integrase B1403 sequence

SEQ ID NO: 27403 - DNA, 260 bp, Unknown
  Description of Unknown: RightRegion for integrase B1404 sequence
acttgcattaagacacaacatatggtattttacaaatataagtaccttttagcactataagataaaaaatgggagtggaatcaatgatacatacagcttatgacgtaatgaaagagtttttaatcacggatgcagagcttgacggacagtacggaatccccaaaattccaaagacttttatccatccggggaaagataccgtagattttgcagagagcttcagcagaaagattaagaaccacaaggagcttgatgtaaat

SEQ ID NO: 27404 - DNA, 260 bp, Unknown
  Description of Unknown: RightRegion for integrase B1405 sequence
acttgcatcaagacacaagatatggtatttttcaaatataagtaccttttagcactataagagaaaaaatgggagtggaatcaatgatacatacagcttatgacgtaatgaaagagtttttaatcacggatgcagaccttgatggtaagtacgaaatcccgaaaattccaaagacttttatccatccagggaaagatactgtagattttgcagagagcttcagcaggaagatcaagaatcacaaggaacttgatgtaaat

SEQ ID NO: 27405 - DNA, 109 bp, Unknown
  Description of Unknown: RightRegion for integrase B1406 sequence
gacggaaaggtatgctggattcgattccgcaacggcatcacacataaattcatgtactaatgttgcattaaaaatcggacagaattttacattctgtccgattttcatt

SEQ ID NO: 27406 - DNA, 260 bp, Unknown
  Description of Unknown: RightRegion for integrase B1407 sequence
tataacggacaatttaaaagcggatcggggatgcgtctattacgatggaaatccgattagtaaattgggaagtaaatatcgtgaaaaaataggatatatgccacaacaacaggagatttatgataattttaccggtgaagagtttctgtggtatatggcagctttaaagggattagaaaaaaagtatgcaaaaaataagatagagaaccttttgaaagtggtgaatttgacttctgagaaaaacaaaaaaataggttcgt

SEQ ID NO: 27407 - DNA, 260 bp, Unknown
  Description of Unknown: RightRegion for integrase B1408 sequence
acttgcattaatacacaagatatggtatttttcaaatataagtaccttttagcactataagagaaaaaaaatgggagtggaatcaatgatacatacagcttatgacgtaatgaaagagtttttaatcacggatgcagaactcgatggcaagtacggaattccgaaaattccaaagacttttatccatccagggaaagatactgtagactttgcggagagcttcagccggaagattaagaaccaccgggaacttgatgtaa

SEQ ID NO: 27408 - DNA, 260 bp, Unknown
  Description of Unknown: RightRegion for integrase B1409 sequence
tacagtattatagattttgtaaattatctagatattgaggaaaacagaagatactactaacaaagaaagtcctgttggcataataaactggcaggacttttttgtcttgtaaactttacctatctttgcatcaacttctaaagttcaaggagttgaacctcttagaagggacatagttaattaagagcgtttgaaatattatccttaatctggaatctggacaattctaaaacacagggataatagacagtaatcgctca

SEQ ID NO: 27409 - DNA, 260 bp, Unknown
  Description of Unknown: RightRegion for integrase B1410 sequence
acttgcataaagacacaacatatggtattttacaaatataagtaccttttagcactataagagaaagaatgggagtggaatcaatgatacacacagcttatgacgtaatgaaagagtttttaatcacggatgcagaccttgatggtaaatacggaatcccgaaaattccaaagacttttatccatcccgggaaagatactgtagactttgcagagagcttcagccgaaagattaagaaccaccgggaactattagacacc

SEQ ID NO: 27410 - DNA, 260 bp, Unknown; identical to SEQ ID NO: 27343
  Description of Unknown: RightRegion for integrase B1411 sequence

SEQ ID NO: 27411 - DNA, 260 bp, Unknown
  Description of Unknown: RightRegion for integrase B1412 sequence
aaagctcaacttcgcaagaggttgagcttttttctttttattgtacattgtaaggagtagaggagtacgggaatcgaacagcccgggccccgcgtccgcgtcccgcggggcaaaaacagccccgcgggctgtttttagggcgcgggagatggacgggagggtcaccaaaggggctgttgtacatcccctcgttttcttttgcctattcctccggcctgaccaccgttacggtacactgcgctgtaaaaccgccgcagtcg

SEQ ID NO: 27412 - DNA, 260 bp, Unknown
  Description of Unknown: RightRegion for integrase B1413 sequence
aggcatattacagagattgttttcaagaatggattaacccacacattattatacagatagcaaaaagccccggaaaatcaatgctttcggggctttttgtatgttcaatataaatgcttaataattctctattaccgggttcatctgacaaccaaaggttgtaacgcagaacgtcagcggacgaccaagttcttcggattcacgctgtacatatgcctttgccttttcgatgaaataatactgacgggcagtatcatccg

SEQ ID NO: 27413 - DNA, 260 bp, Unknown
  Description of Unknown: RightRegion for integrase B1414 sequence
aattgcattaagacacaagatattgtattgtataattatacgtacaaattagcactgtaaatgaattttgggagtggaatcaatgatacacacagcttatgacgtaatgaaagagtttttgataacagattcagagccggtggggcagtacggaatacctaaaatcccaaggacatatatcacacctggaactgatactgtagactttgctgaaagttttagcaagaagattaagaaccaccgggaactagatgtgaatt

SEQ ID NO: 27414 - DNA, 260 bp, Unknown
  Description of Unknown: RightRegion for integrase B1415 sequence
tttgatttggcacaatatcaggtagaaataccgaaagaagaactagaaagaaaaaactaaatagaagaatcgaaagcagttttgcagctgttttcgatttttcgtttctaattgtcgcacaagaatcggtggcgtggggtttcagcggcttcatgcttaaaatttaaccccatacccctataaacgaaaagaaggctaccaccgaagtgatagcccccttaaaatgcaaatataatattctatagatactttatttttct

SEQ ID NO: 27415 - DNA, 260 bp, Unknown
  Description of Unknown: RightRegion for integrase B1416 sequence
cgtaagattgtagaaattgtattcaccaatgggctttcccatacgttactctacaaataaaaacaccccccgtaagcactgagtttacgggggttattgattatgacgtcatacatatcaaattctttattaccgagtacatctgacacccaaaggttgtgacgcagaaagtcatcggccttcctgcttcttctgcttcttttcttacgtattctttcgctttttctatgaaataatattgtctttccggttccttatgc

SEQ ID NO: 27416 - DNA, 260 bp, Unknown
  Description of Unknown: RightRegion for integrase B1417 sequence
aattgcatcaagacgcaagatgttgtattgtataattatacgtacaaattagcactgtaaacaaaattttgggagtggaatcaatgatacacacagcttatgacgtaatgaaagagtttttgataacagattcagagccggcaggacagtacaatattcctaaaattccaaagacatacatcacacctggaatagatactgtagactttgccgaaagcttcagtaagaaagttaagaaccaccgggaactggatgtgaat

SEQ ID NO: 27417 - DNA, 109 bp, Unknown
  Description of Unknown: RightRegion for integrase B1418 sequence
aatagccttgtcacagcacctttgcatgacacccaaaaaactgaatatcagtctcagtagctcagctggatagagcacacgcctcctaagcgtggggtcggaggttcaa

SEQ ID NO: 27418 - DNA, 260 bp, Unknown
  Description of Unknown: RightRegion for integrase B1419 sequence
aggcatattacagagattgttttcaagaatggattaactcacacattattatacagatagcaaaaaagccccggaaaatcaatgctttcggggctttaagtgtgttcaatataaatgcttaataattctctattaccgggttcatctgacaaccaaaggttgtaacgcagaacgtcagcggacgaccaagttcttcggattcacgctgtacatatgcctttgccttttcgatgaaataatactgacgggcagtatcatcc

SEQ ID NO: 27419 - DNA, 260 bp, Unknown
  Description of Unknown: RightRegion for integrase B1420 sequence
atcatggaaacgagaaaaggcgtagcactcagctacgccccggaacaggttgcagtataaggaggtacgacacgatgaaagcctatttttattgccgggtcgctcacgacgatagcttttccttggaacagcaggtcgccaaacttcgccgttatgcggaacaggccgggtacaccatcgttggtgttgccgccgagcatggctctggattgacccttgaccgtccggctctgcaagagctgacggaggccgttcttgcc

SEQ ID NO: 27420 - DNA, 260 bp, Unknown
  Description of Unknown: RightRegion for integrase B1421 sequence
aggcatattacagagattgttttcaagaatggattaactcacacattattatacagatagcaaaaaagccccggaaaatcaatgctttcggggctttaagtgtgttcaatataaatgcttaataattctctattaccgggttcatctgacaaccaaaggttgtaacacagaacgtcagcggacgaccaagttcttcggattcacgctgtacatatgcctttgccttttcgatgaaataatactgacgggcagtatcatcc

SEQ ID NO: 27421 - DNA, 260 bp, Unknown
  Description of Unknown: RightRegion for integrase B1422 sequence
agagtcacttcaatctatttcaggaatggaatcgtaaacacgttcacatatgcagaataacagaaagcaccccgcatcaaacgatgtgaggtgctttttctttagtgacatgtaggtcggcttttacccaagaaatccatacactttcagatgagctatatgctattggatgacagcgagctaataccgcgaatttttattctgcttttatgtataaatactcaaaaataaattccacggattataagcatcgggttcaa

SEQ ID NO: 27422 - DNA, 260 bp, Unknown
  Description of Unknown: RightRegion for integrase B1423 sequence
tcggtgaatacaagaaaaggcgtagttgtcaactacgccccaggtcaactcgctgtatgaaaaaagcgagtgttcttaacagcctttcaaatgctgtaagaacactcgcgatggtgcggataacactaaatccttgaaaaataaggctttcagggcttgtttgttagttgtgcgtcagttgttaaatacagcttaaaatatcacaagtcatcttagcacactttgatattatagctgcatcgccgtttaagtcaatatct

SEQ ID NO: 27423 - DNA, 260 bp, Unknown
  Description of Unknown: RightRegion for integrase B1424 sequence
atcatggaaacgaggaaaggcgtagcactaagctacgccccggaacaggttgcggtataaggaggtacgacacgatgaaagcctatttttattgccgggtcgctcacgacgatagcttttctttggaacagcaggccgccaagctccgccgttatgcggaacaggctgggtacaccatcgttggtgttgccgccgaacatggctcaggattgacccttgaccgtccggctctgcaagagctgacggaggccgttcttgcc

SEQ ID NO: 27424 - DNA, 260 bp, Unknown
  Description of Unknown: RightRegion for integrase B1425 sequence
tactgcattacagattttgtaaattatctggatattgaagataatagaagatattactaataaaagtcctgccagtaattacgctagcaggactttcttattaaatattttccagaaaatcagattctgacataatttctatatctattccagatgcttttaaatcaatcgctttcttttgcttagaggacataccagaatccccaaccactctaaagtcctgtaatccaaccactaaaatgtcggttttcttggtaaca

SEQ ID NO: 27425 - DNA, 260 bp, Unknown
  Description of Unknown: RightRegion for integrase B1426 sequence
tccgtaaatacaagaaaaggcgtagtcgtcaactacgccccctgtgaactcgctgtataaaaagcgagtgttcttacagcttttcaaatgctgtaagaacactcgccatgtcatgcgtgaccaatttagatacacgctgaaaataggaaaaatcgagagctgaagcggctttgggctgtttcagccatatttttttgctttcaatttcccatgatagcggagaattgggtatttttaagagtgaccaaaatagatacagc

SEQ ID NO: 27426 - DNA, 260 bp, Unknown
  Description of Unknown: RightRegion for integrase B1427 sequence
aggcatattacagagattgttttcaagaatggattaacccacacattattatacagatagcaaaaaagccccggaaaatcaatgctttcggggcttttgtatgttcaatataaatgcttaataattctctattaccgggttcatctgacaaccaaaggttacggtagcaaagaaaagggggcgccccaatttttcagactcttcctttacatattttcttgcttttttgataaaataatactgtctttcggtatcatccg

SEQ ID NO: 27427 - DNA, 260 bp, Unknown
  Description of Unknown: RightRegion for integrase B1428 sequence
caattccgctttactttatgtaaggcggattttttgttgccgctcatcaattttatctaaaacccaaccattgtttctccgtgacgggcatttcccgtcaaggttttttgtaaacacacaaagtctccgctgtgataatttgtgtgtcacttttacaaattcagggggcgtgcccctgcacccgatccgctttactttatgtaaggcggttttttattgccgctcatggatcattatttataaacccaactttgttattt

SEQ ID NO: 27428 - DNA, 260 bp, Unknown
  Description of Unknown: RightRegion for integrase B1429 sequence
tttgatttggcacaatatcaggtagaaataccgaaagaagaactagaaagaaaaaactaaatagaagaatcgaaagcagttttgcagctgttttcgatttttcgtttctaattgtcgcacaagaatcggtagggctggggtttagcggcttcatgcttaaaatttaaccccatacccctataaacgaaaagaaggctaccaccgaagtgataaccctctctatgactatttgacgatagcgctgtatcggtaccaagcgt

SEQ ID NO: 27429 - DNA, 260 bp, Unknown
  Description of Unknown: RightRegion for integrase B1430 sequence
cgcaagattgtagaaattgtgttcgtcaatggactttctcacacattactctacaaataaaaacaaccccgtaagcactgagtttacgggggttattgattatgacgtcatacatatcaaattctttgttaccgagcgcatctgacacccaaaggttgtgacgcagaaagtcatcggccttcctgcttcttctgcttcttttcttacgtattctttcgctttttctatgaaataatattgtctttccggttccttatgcg

SEQ ID NO: 27430 - DNA, 260 bp, Unknown
  Description of Unknown: RightRegion for integrase B1431 sequence
tcggtaaatacaagaaaaggcgtagttgtcaactacgccccaggtcaactcgctgtatgaaaaagcgagtgttcttaacagcctttcaaatgctgtaagaacactcgccatggtgcggataacactaaatccttgaaaaataaggctttcggggcttgtttgttagttgtgcgtcagttgttaaatacaacctaaaatatcacaagtcatcttagcacactttgatattatagccgcatcgccgtttaagtcaatatctt

SEQ ID NO: 27431 - DNA, 260 bp, Unknown
  Description of Unknown: RightRegion for integrase B1432 sequence
acagtcaacactcgcagaggtgtctatgtcagttacgaaccggcgcaaaatagacaataaaaatgacgggtgttctcaaaggatcaaatcctataagaacactcgtcatggtacacctgacccgcccaaatacgaacccgggagggcgccgacgaaatcagacgtagccgcattttgcaccgctgagaacggcaccaaagccgctccggcgctgtctacgttgaatataattttcatataatcgtcgtaaacaaatacgg

SEQ ID NO: 27432 - DNA, 260 bp, Unknown
  Description of Unknown: RightRegion for integrase B1433 sequence
cgcaagattgtagaaattgtgttcgtcaatggactttctcacacattactctacaaataaaaacaaccccgtaagcactgagtttacggggtttattgattatgacgccatacagattaaattctttattaccgagtacatctgacacccaaaggttgtgacgcagaaagtcatcggccttcctgcttcttctgcttcttttcttacgtattctttcgctttttctatgaaataatattgtctttccggttccttatgcg

SEQ ID NO: 27433 - DNA, 74 bp, Unknown
  Description of Unknown: RightRegion for integrase B1434 sequence
tttaatttgtggattacaaaaagcaacagagggagatttttcgctatacggaataaataattactctaaagaga

SEQ ID NO: 27434 - DNA, 260 bp, Unknown
  Description of Unknown: RightRegion for integrase B1435 sequence
aggcatattacagagatcgtttttaagaatggattaacccacacattattatacagatagcaaaaaagccccggaaaatcaatgctttccggagctttaagtatgttcaatataaatgcttaataattctctattaccgggttcatctgacaaccaaaggttgtaacgcagaacgtcagcggacgaccaagttcttcggattcacgctgtacatatgcctttgccttttcgatgaaataatactgacgggcagtatcatc

SEQ ID NO: 27435 - DNA, 260 bp, Unknown
  Description of Unknown: RightRegion for integrase B1436 sequence
tcggtgaatacaagaaaaggcgtagttgtcaactacgccccaggtcaactcgctgtatgaaaaaagcgagtgttcttaacagcctttcaaatgctgtaagaacactcgccatggtgcgggtagcaggacttgaacctgcttctgtatacgtgaaaatcgttgatacatcaacatttttgcggaatgctgacttgcatttgacttgcatttttatttttatttcaaagctcgccccatattcgccccatatctcgcccgta

SEQ ID NO: 27436 - DNA, 260 bp, Unknown
  Description of Unknown: RightRegion for integrase B1437 sequence
cgcaagattgtagaaattgtattcatcaatggtctttcccatacgttactctacaaataaaaacaaccccgtaagcgctgagtttacggggtttattgattatgacgtcatacatatcaaattctttgttaccgagtgcatctgacacccaaaggttgtgacgcagaaagtcatcggccttcctgcttcttctgcttcttttcttacgtattctttcgctttttctatgaaataatattgtctttccggttccttatgcg

SEQ ID NO: 27437 - DNA, 260 bp, Unknown
  Description of Unknown: RightRegion for integrase B1438 sequence
aaagctcaacttcgcaagaggttgagcttttttctttttattgtacattgtaaggagtagaggagtacgggaatcgaacagcccgggccccgcgtccgcgtcccgcggggcaaaaacagccccgcgggctgtttttagggcgcgggagatggacgggagggtcaccaaaggggctgttgtacatccccttgttttcttttgcctattcctccggcctgaccaccgttacggtacactgcgctgtaaacccgccgcagtcg

SEQ ID NO: 27438 - DNA, 260 bp, Unknown
  Description of Unknown: RightRegion for integrase B1439 sequence
atcatggaaacgagaaaaggcgtagcactcagctacgccccagaacaggttgcggtataggaggtacgacacgatgaaagcctatttctattgccgcgtcgctcacgatgatagcttttctttggaacggcaggccgaggagcttcgccgctatgcggaacaagccgggtacaccatcgttggtgctgccgccgagcatggctctggaatgacccttgaccgtccggctctgcaagaggtgatggaggccgtccttgccg

SEQ ID NO: 27439 - DNA, 260 bp, Unknown
  Description of Unknown: RightRegion for integrase B1440 sequence
cgcaagattgtagaaattgtattcatcaatggtctttcccatacgttactctacaaataaaaacaaccccgtaagcactgagtttacggggtttattgattatgacgtcatacatatcaaattctttattaccgagtacatctgacacccaaaggttgtgacgcagaaagtcatcggccttcctgcttcttctgcttcttttcttacgtattctttcgctttttctatgaaataatattgtctttccggttccttatgcg

SEQ ID NO: 27440 - DNA, 260 bp, Unknown
  Description of Unknown: RightRegion for integrase B1441 sequence
atcatggaaacgagaaaaggcgtagcactcagctacgccccagaacaggttgcggtataggaggtacgacacgatgaaagcctatttctattgccgcgtcgctcacgatgatagcttttctttggaacggcaggccgaggagcttcgccgctatgcggaacaagccgggtacaccatcgttggtgctgctgccgagcatggctctggaatgacccttgaccgtccggctctgcaagaggtgatggaggacgtccttgccg

SEQ ID NO: 27441 - DNA, 260 bp, Unknown
  Description of Unknown: RightRegion for integrase B1442 sequence
aggcatattacagagattgttttcaagaatggattaacccacacattattatacagatagcaaaaaagccccggaaaatcaacatttccgaggctttaagtatgttcaatataaatgcttaataattctctattacagggttcatctgacaaccaaaggttgtaacgcagaacgtcagcggacgaccaagttcttcggattcacgctgtacatatgcctttgccttttcgatgaaataatactgacgggcagtatcatcc

SEQ ID NO: 27442 - DNA, 260 bp, Unknown
  Description of Unknown: RightRegion for integrase B1443 sequence
aattgcattaagacgcaagatgttgtattgtataattatacgtacaaattagcactgtaaacaaaattttgggagtggaatcaatgatacacacagcttatgacgtaatgaaagagtttttgataacagattcagagccggcaggacagtacaatattcctaaaattccaaagacatacatcacacctggaatagatactgtagactttgctgaaagcttcagtaagaaaattaagaaccaccgggaactggatgtgaat

SEQ ID NO: 27443 - DNA, 260 bp, Unknown
  Description of Unknown: RightRegion for integrase B1444 sequence
cgcaagattgtagaaattgtattcatcaatggtctttcccatacgttactctacaaataaaaacaaccccgtaagcactgagtttacggggtttattgattatgacgtcatacagattgaattctttgttaccgagtacatctgacacccaaaggttgtgacgcagaaagtcatcggccttcctgcttcttctgcttcttttcttacgtattctttcgctttttctatgaaataatattgtctttctggttccttatgag

SEQ ID NO: 27444 - DNA, 260 bp, Unknown
  Description of Unknown: RightRegion for integrase B1445 sequence
aggcatattacagagattgttttcaagaatggattaacccacacattattatacagatagcaaaaaagccccggaaaatcaacatttccgaggctttcagtatgttcattataaatgcttaacaattccctattaccgcgttcatctgacaaccaaaggttgtaacgcagaacgtcagcggacgaccaagttcttcggattcacgctgtacatatgcctttgccttttcgatgaaataatactgacgggcagtatcatcc

SEQ ID NO: 27445 - DNA, 260 bp, Unknown
  Description of Unknown: RightRegion for integrase B1446 sequence
aggcatattacagagattgttttcaagaatggattaacccacacattattatacagatagcaaaaagccccggaaaatcaatgctttcggggctttttgtatgttcaatataaatgcttaataattctctattaccgggttcatctgacaaccaaaggttacggtagcaaagaaaagaggacgtcccaatttttcagactcttcctttacatattttcttgcttttttgataaaataatactgtctttcggtatcatccg

SEQ ID NO: 27446 - DNA, 260 bp, Unknown
  Description of Unknown: RightRegion for integrase B1447 sequence
gaggcggatttgccgcccattgaccaacctatgtatccgttgggagtggatagcgaatgaaatcctcatgtccctgcgtgcggaaaagaagcagaacggcgaagtgtatttgatggagccaataggtacggacaacgacggcaacgagatttcgctttgcgacatactgggcacggatgcggaccatgtgcataacgaggcggagcgcagcatggaggcggagcggctttggcaggcgatagacgacgtgctcagcgtgc

SEQ ID NO: 27447 - DNA, 260 bp, Unknown
  Description of Unknown: RightRegion for integrase B1448 sequence
aattgcattaagacacaagatattgtattgtataattatacgtacaaattagcactgtaaacaaaattttgggagtggaatcaatgatacacacagcttatgacgtaatgaaagagtttttgataacagattcagagccggcaggacagtacaatattcctaaaattccaaagacatacatcacacctggaatagatactgtagactttgccgaaagcttcagtaagaaaattaagaaccaccgggaactagatgtgaat

SEQ ID NO: 27448 - DNA, 260 bp, Unknown
  Description of Unknown: RightRegion for integrase B1449 sequence
cgcaagattgtagaaattgtattcatcaatggtctttcccatacgttactctacaaataaaaacaaccccgtaagcactgagtttacgaggtttattgattatgacgtcatacatatcaaattctttgttaccgagtacatctgacacccaaaggttgtgacgcagaaagtcatcggccttcctgcttcttctgcttcttttcttacgtattctttcgctttttctatgaaataatattgtctttccggttccttatgcg

SEQ ID NO: 27449 - DNA, 260 bp, Unknown
  Description of Unknown: RightRegion for integrase B1450 sequence
aaagctcaacttcgcaagaggttgagcttttttctttttattatacatggtaaggagtagaggagtgcgggaatcgaaaagcccgggccccgcgtccagcgtaccgcggggcaaaaacagccccgcgggctgtttttagggcgcgggtgctttactttttacgcaccacagttgaaattgattcatatcccgcagttcctgcggcccgatgacatttacatagctgccttggctcagcagccacatcaaaattccttttc

SEQ ID NO: 27450 - DNA, 260 bp, Unknown
  Description of Unknown: RightRegion for integrase B1451 sequence
aggcatattacagaaattgttttcaagaatggattaacccacacattattatacagatagcaaaaaagccccggaaaatcaacatttccgaggctttcagtatgttcaatataaatgcttaataattctctattaccgggttcatctgacaaccaaaggttgtaacgcagaacgtcagcggacgaccaagttcttcggattcacgctgtacatatgcctttgccttttcgatgaaataatactgacgggcagtatcatcc

SEQ ID NO: 27451 - DNA, 260 bp, Unknown
  Description of Unknown: RightRegion for integrase B1452 sequence
cgcaagattgtagaaattgtgttcgtcaatggactttctcacacattactctacaaataaaaacaaccccgtaagcactgagtttacgggggtttattgattatgacgccatacagattaaattctttattaccgagtgcatctgacacccaaaggttacggtagcaaaggtcaatggtctaccagccttttctgattctcttctgacatattctttcgctttttttataaaataatactgtctctcaggctcagttgtt

SEQ ID NO: 27452 - DNA, 260 bp, Unknown
  Description of Unknown: RightRegion for integrase B1453 sequence
aattgcattaagacgcaagatgttgtattgtataattatacgtacaaattagcactgtaaacaaaattttgggagtggaatcaatgatacacacagcttatgacgtaatgaaagagtttttgataacagattcagaaccggcaggacagtacaatattcctaaaattccaaagacatacatcacacctggaatagatactgtagactttgccgaaagcttcagcaagagaattaagaaccaccgggaactagatgtgaat

SEQ ID NO: 27453 - DNA, 109 bp, Unknown
  Description of Unknown: RightRegion for integrase B1454 sequence
cgcaagattgtagaaattgtattcatcaatggtctttcccatacgttactctacaaataaaaacaaccccgtaagcactgagtttacggggtttattgattatgacgtc

SEQ ID NO: 27454 - DNA, 260 bp, Unknown
  Description of Unknown: RightRegion for integrase B1455 sequence
aggcatattacagagattgttttcaagaatggattaacccacacattattatacagatagcaaagaagccccgaaaaatcaatgctttcggggctttttgtatgttcaatataaatgcttaataattctctattaccgggttcatctgacaaccaaaggttgtaacgcagaacgtcagcggacgaccaagttcttcggattcacgctgtacatatgcctttgccttttcgatgaaataatactgacgggcagtatcatcc

SEQ ID NO: 27455 - DNA, 260 bp, Unknown
  Description of Unknown: RightRegion for integrase B1456 sequence
gaatatgatgaccggttatatcggagccacatcaggaaccgtaaaagtgtgtggacatgatatttttaaagaggcagaggcagcaaaacgggagattggttatttgccggaaattccacctctttatacagatatgacggtatatgaatatttaagcttttgtgcggaattaaaaggcattggaaaaaaagaacgcgatgatagcgtggtagaggttatggaaaaaacaggagtagctgaaatggagggacgcctgatac

SEQ ID NO: 27456 - DNA, 260 bp, Unknown
  Description of Unknown: RightRegion for integrase B1457 sequence
aaagccaacactcggaagggcgtagatgtggagtatattcccacagtgaaatccgcttaagacaaaaggtgagcaggcacaaaacctgctcaccacgtacaaaccggatgaaattgaataaaagaatgagtgtccataacataaatccgttatgaacactcatactggtgcgggcgacaggacttgaacctgcacatcggttgacactagaacctaaatctagcgcgtctgccaattccgccacgcccgcacgtgtgtat

SEQ ID NO: 27457 - DNA, 260 bp, Unknown
  Description of Unknown: RightRegion for integrase B1458 sequence
atatctgtaagcagcccggcaacttccctgtatggcatagaatatctttgcgagatgtaacgcatagaagcaccaagctcgccgtccggtccaccatacttcaataaggtatactgctgaaaaaccagcatatatgcgggtttgacaacttggtaaaaatatagtaagtaaaatgtttgctatttatttttgtaaaaagaagtatatctccagcttatcattttccttatcatacacacaatggtcaacaacacttctta

SEQ ID NO: 27458 - DNA, 260 bp, Unknown
  Description of Unknown: RightRegion for integrase B1459 sequence
attcgaggacacttcccttacatatgggaggatcagcggcgggagctcggttttaaataagacgagtaccttatttatacctatgtatgggttaaacctacataggtattttctgtatattggattttcaaccctgcattgaaagaatttgaacttattaatatatagccttttgtattaatcattaacaaaaggttaaaaaatgacacctagtttattcaatgggctaccgccaaaagtagtcacatatataaaagtac

SEQ ID NO: 27459 - DNA, 260 bp, Unknown
  Description of Unknown: RightRegion for integrase B1460 sequence
ctgcgtgaacggttcccttactcttgggaggaacaaaaacgcgaattaggctttatataattaagccatctccgttttatttaaattaaatttaatgcagatattctctgcatttcaaatttcaagtgcgcattgaaagaaattaaacttatgaatatatagccttttgtataaatcattaacaaaaggttaaaatatgacacaaaatttattcaatggactaccacccagggtagtaacatatatcaagattcatttgc

SEQ ID NO: 27460 - DNA, 260 bp, Unknown
  Description of Unknown: RightRegion for integrase B1461 sequence
tcaaaacgtaaagcccaaggggcaaggcacatagtaccttgccccttgggctttttataattgatggtaaagttgtgtctgcaggcataactttaccgcaatgtacgacgaactaatgctactaaaaaatatgataaaaggaaataaccaatgatactttccgtagcaatcagacataaaagcaaataattttctggaattaccaagagtggactatatcctaacccaataaatgcaaagcaagaattgatgatgctatc

SEQ ID NO: 27461 - DNA, 260 bp, Unknown
  Description of Unknown: RightRegion for integrase B1462 sequence
ctgcgtgaacgttttccttactcttgggaagaacaaaaacgcgaattaggctttatataattacgccttctcggctttatttaaattaaatttaatgcagatattctctgccttccaaatttcaagtgcgcattgaaagaaattaaacttatgaatatatagccttttgtataaatcattaacaaaaggttaaaatatggcacaaaatttattcaatggactaccacccagggtagtaacatatatcaagattcatttgc

SEQ ID NO: 27462 - DNA, 260 bp, Unknown
  Description of Unknown: RightRegion for integrase B1463 sequence
ttcagtgcagcccccgagtcattggtgtttcggcaggtcagaaggtgccggttcagctgacgatctccagcatctgatcgaacacctcttccatctgccgcaccagcgtgaactgggtgcgggcgcggtcaaggttgtggccggggcgggcggtgtggaaatagtgatcgccctccagatagtcggtcagaaagcggatgccgcactccagcgtcatcagcttggcaccccaggcaaggctctttttctccgcaggactc

SEQ ID NO: 27463 - DNA, 260 bp, Unknown
  Description of Unknown: RightRegion for integrase B1464 sequence
ttttttgcatgtattgatgggtgtgtacctcagtgcccggcccggctggggatcgtctgaagctcgaagcggtaggtctgtccggcgtccgggtatttttcgcggtcgaccgggctcagaaacatatccagcggccggacccagaggccgccgtcgccgtaaagcttgcggtagatcacgcagggctcgttcgtctcggaatcacgggcaagcgcctccaccagataataatcccccttgaaatggcggtagacccgccc

SEQ ID NO: 27464 - DNA, 260 bp, Unknown
  Description of Unknown: RightRegion for integrase B1465 sequence
ctgcgtgaacggtttccttactcttgggaggaacaaaaacgcgaattaggctttatataattacgccttctcggctttatttaaattaaatttaatggagatattctccgtcttccgaatttcaagtgctcattgcaagacattaaacttatgagtatatagccttttgtataaatcattaacaaaaggttaaaatatgacacaaaatttattcaatggactaccacctagggtggtaacatatatcaagattcatttgc

SEQ ID NO: 27465 - DNA, 260 bp, Unknown
  Description of Unknown: RightRegion for integrase B1466 sequence
cccgctcaaagcggaaaaatgaaaaaaggctaccgtttagggatttcccctattcggtagccttttttcatgttttgtaacctatttcgttatttcctaacaaaagcctgcgggattctaaaatgactgttagaatctaacgaaaaggagcatggctatgattaggattttactgtccacccggcttggcgagcggaggtggactcaggctgatctggcccgagcaactggaatcaggccgtccaccatcaacgacctgt

SEQ ID NO: 27466 - DNA, 260 bp, Unknown
  Description of Unknown: RightRegion for integrase B1467 sequence
ctgcgtgaacggtttccttactcttgggaggaacaaaaacgcgaattaggctttatataattaatccatctccgttttattgaaattaaatttaatgcagatattctctgcatttcaaatttcaagtgcgcattgaaagaaattaaacttatgaatatatagccttttgtataaatcattaacaaaaggttaaaatgtgacacagaatttattcaatggactaccacccagggtagtaacatatatcaagattcatttgc

SEQ ID NO: 27467 - DNA, 260 bp, Unknown
  Description of Unknown: RightRegion for integrase B1468 sequence
gagacggtggcatggcttgagcaatatcggtcagaggataccaatcatgacagtaattaaaaatatataagaaattgacaacgtatagtttttcactaaaatttaattcgaaataatctgaaaaatatatctaatttagggtaaaaagtttgtgattttatgtcacaaacttttttgataattatatatgatgcaaacgataataagtatcgtatgattttataaaaacaaactttatagtttactagacgtaaatgttg

SEQ ID NO: 27468 - DNA, 260 bp, Unknown
  Description of Unknown: RightRegion for integrase B1469 sequence
aaatctccaattcctgcctcgtggtcagagcagcgtactaaatatgggtttaactcttaataaatccacaacccatattagaaaaagtttggcccaatagaactatcatttgaaaatgtaagcctttctaacattttgaaaggtttacataaatgtatgacaaactttttgacggcataccagactatgtccgtattaccattttttcttgtgtaagaaaattatccacctttgcaaattttaataatcacgaagatatt

SEQ ID NO: 27469 - DNA, 260 bp, Unknown
  Description of Unknown: RightRegion for integrase B1470 sequence
aagcgcatcactgaaatagtattcaaaaacggactcacgcacaagctactctataaatagcaaaaagccctagaaattaacgtttccggggctttctttatgttcttacagattcggtgttgccagtaccatctgacaaccaaatgtttgaattgctgcgactaatgggcgtcccagttcctctgacattttagcaacatattcttttgctttttccataaaataatactgacgcgcaggttcttctaacggagcatccg

SEQ ID NO: 27470 - DNA, 260 bp, Unknown
  Description of Unknown: RightRegion for integrase B1471 sequence
aatgcgtatgctttgtacgattgttcaaccatcagaaggacaaatattatggaatggtaaagatatatggaaactaggaggtgaataccgagaagttctgggatatttaccacaggattttggatattatccagatttgaccgtatatgattatatgatgtacatttcttctataaaagggttaaaaatgccgtttgccagaaaaaaggtgaagcaattattaaatcaagtaggaatggaaaaatttagtaaaagaaaaa

SEQ ID NO: 27471 - DNA, 260 bp, Unknown
  Description of Unknown: RightRegion for integrase B1472 sequence
aagcgaatagtaaaaatagtttttaggaacggtttgtcgcacacactcttataccgataaaactcaagaaagcccgtaaattaaggctacggactttctgagggatgactgagacttataaattctcgcttacggcattcatctggcaaccaaaggttacggtactcgcggttaaaggacgtcccagcttttcagacatctcctttacatactttcgtgctttttcaataaaataatactgacgctccggctcagtggtc

SEQ ID NO: 27472 - DNA, 260 bp, Unknown
  Description of Unknown: RightRegion for integrase B1473 sequence
aaagccgaaacccgccggggcgttgccgtggagtacctgaccgagccgaaaacggcataacagaaatgcggtatcgggcataagcaaaaggagcagacttaaagcctgctccgtacataaaaccgtatcacaatatataaaaatcgagtgctcataggtcaaataccttatgaacactcgatatggtcggagtggcgggatttgaagaaacggcgacgataggctcaaacgcttatatatcaacggttacactgcttttt

SEQ ID NO: 27473 - DNA, 260 bp, Unknown
  Description of Unknown: RightRegion for integrase B1474 sequence
attgcggacacacgcaaaggtgttgccgtagagtatataaccgaacaattcacggcataaaaaagagcaaggtgttacccttgcccgtacataaaaattatatgataaaacaaaaagagtgttcataagtcaaatcccttatgaacactcgatatggtcgaggtgacaggacttgaacctgcggcatcttggtcccaaaccaagcactctaccaaactgagctacacctcgaaatgttgtttaataacaacagcttgatt

SEQ ID NO: 27474 - DNA, 260 bp, Unknown
  Description of Unknown: RightRegion for integrase B1475 sequence
aatgcgtatgctttgtacgattgttcaaccatcagaaggacaaatattatggaatggtaaagatatatggaaactaggaggtgaataccgagaagttctgggatatttaccacaggattttggatattatccagatttgaccgtatatgattacatgatgtacatttcttctataaaagggttaaaaataccgtttgccagaaaaaaagtgaagcaattattaaatcaagtaggaatggaaaaattcagtaaaagaaaaa

SEQ ID NO: 27475 - DNA, 260 bp, Unknown
  Description of Unknown: RightRegion for integrase B1476 sequence
gtaaagcaaataactttcagaaatggtttgtctcatatttttgtatacaaagagcattaaaaaatccgggagccgaacagttcccggattgcttatgtttgaaacatcatttttaattttcaccattcaccttaaaaagatatgcatgaagtttttcgtgttcttctgaaaaaggcatttcctctccattgatctcaaccattccagcaagtgtgcatccattctgttgaaaaagccacgcagtatctactgctccgctc

SEQ ID NO: 27476 - DNA, 260 bp, Unknown; identical to SEQ ID NO: 27473
  Description of Unknown: RightRegion for integrase B1477 sequence

SEQ ID NO: 27477 - DNA, 260 bp, Unknown
  Description of Unknown: RightRegion for integrase B1478 sequence
aagcgaatagtaaaaatagtttttaggaacggtttgtcgcacacactcttataccgataaaactcaagaaagcccgtaaattaaggctacggactttctgagggatgactgagacttataaattctcgcttacggcattcatctgacaaccgaaagtcgtaacacagaacgtcagtgtcctgtcggcttctttacatttttctgcaaaaatatcttttgctttttcaataaaataatactgacgatccggttcctgcagc

SEQ ID NO: 27478 - DNA, 260 bp, Unknown
  Description of Unknown: RightRegion for integrase B1479 sequence
aagcgcatcactgaaatagtattcaaaaacggactcacgcacaagctactctataaataacaaaaagccctagaaatcaacgtttccggggctttcttcctgtctttataaattctgtgttgccaataccatctgacaaccaaatgtcgtcacacacgcagttaatggatgccccagtttctcagacatttcagcaacatattcttttgctttttccataaaataatactggcgtgcaggttcttccaacggagcgttct

SEQ ID NO: 27479 - DNA, 260 bp, Unknown
  Description of Unknown: RightRegion for integrase B1480 sequence
aagcatatcactaaaatagtattcaaaaacggactcacgcataaactactctataaataacaaaaagccctagaaatcaacgtttccggggctttcttcctgtctttataaattctgtgttgccagtaccatctgacaaccaaatgtcgtcacacacgcagttaatggacgccccagtttctcagacatttcagcaacatattcttttgctttttccataaaataatactggcgtgcaggctcttccaacggagcattct

SEQ ID NO: 27480 - DNA, 260 bp, Unknown
  Description of Unknown: RightRegion for integrase B1481 sequence
aaagccaacacccgaaaaggcgtagacgtggagtatatcccaacagcaaaatcagcataagagaaaaggtgagcaggcacatcaacctgctcaccacgtacaaaccggatgaaattgaataaaaaatgagtgtccataacataaatccgttatgaacactcatactggtgcgggtgacaggacttgaacctgcacggggttaccactagaacctaaatctagcgcgtctgccaatttcgccacacccgcaaactattaat

SEQ ID NO: 27481 - DNA, 260 bp, Unknown
  Description of Unknown: RightRegion for integrase B1482 sequence
aagcatatcactgaaatagtattcaaaaacggactcacgcataaactactctataaataacaaaaagccctagaaatcaacgtttccggggctttcttcatgtctttataaattctgtgttgccaataccatctgacaaccaaatgtcgtcacacacgcagttaatggacgccccagtttctcagacatttcagcaacgtattcttttgctttttccataaaataatactgacgggcaggttcttccaacggtgcatttt

SEQ ID NO: 27482 - DNA, 260 bp, Unknown
  Description of Unknown: RightRegion for integrase B1483 sequence
cgcaaacggctcgggagggtcattcttgttgccatgcaccgcggcaatatgctatactaaagaaaaaacagaaggggaggcactgcggatgacccgcattgcaatcgtagaggatgaggccgccgtccgggagcagctggcggggtatgtgcagcgctacacgcggcagtatggcacccagtttgaggtgacaatgttcaccgacggcgtcgaaatccttgaggattaccgcccggtctacgacataatttttcttgatg

SEQ ID NO: 27483 - DNA, 260 bp, Unknown
  Description of Unknown: RightRegion for integrase B1484 sequence
attgcggatacacgcaaaggtgttgccgtagagtatataaccgaacaattcacggcataaaaaagagcaaggtattacccttgcccggacataaaaattatatgataaaacaaaaagagtgttcataagtcaaatcccttatgaacactcgatatggtcgaggtgacaggacttgaacctgcggcatcttggtcccaaaccaagcactctaccaaactgagctacacctcgaaatgttgcttaataacaacagcttgatt

SEQ ID NO: 27484 - DNA, 260 bp, Unknown
  Description of Unknown: RightRegion for integrase B1485 sequence
cccacacaaagccgtctgaaatcatcaaaggaaacacgaaattcaacctccaaacggtaatcccggtacacatagacggccttgataagctgcgatacaatcatcttcttcgcttcaaaggtgcagttgtcgtaaagatcagcccagctttccagtttctcaaattcggcctgttcctgcgcggcgctttccagttgatgctccatgtcggctttttgtgcgtctacctcctgtgaaagctctgcgatctcttctttgca

SEQ ID NO: 27485 - DNA, 260 bp, Unknown
  Description of Unknown: RightRegion for integrase B1486 sequence
aaacatattactgaaatagtattcaaaaacggactcacgcataaactactctataaataacaaaaagccctagaaatcaacgtttccggggctttcttcctgtctttataaattctgtgttgccaataccatctgacaaccaaatgtcgtcacacacgcagttaatggacgccccagtttctcagacatttcagcaacgtattcttttgctttttccataaaataatactgacgggcaggttcttccaacggtgcatttt

SEQ ID NO: 27486 - DNA, 260 bp, Unknown
  Description of Unknown: RightRegion for integrase B1487 sequence
aagcgcatcactgaaataatattcaaaaacggactcacgcataaactactctataaataacaaaaagccctagaaatcaacgtttccggggctttcttcctgtctttataaattctgtgttgccaataccatctgacaaccaaatgtcgtcacacacgcagttaatggacgccccagtttctcagacatttcagcaacatattcttttgctttttccataaaataatactggcgtgcaggctcttccaacggagcattct

SEQ ID NO: 27487 - DNA, 260 bp, Unknown
  Description of Unknown: RightRegion for integrase B1488 sequence
aagcgcatcactgaaatagtattcaaaaacggactcacgcacaagctactctataaataacaaaaagccctagaaatcaacgtttccggggctttcttcctgtctttatcaattctgtgttgccagtaccatctgacaaccaaatgtttgaattaccgcgactaatggacgccccagtttctcagacatttcagcaacgtattcttttgctttttccataaaataatactgacgggcaggttcttccaatggtgcatttt

SEQ ID NO: 27488 - DNA, 260 bp, Unknown
  Description of Unknown: RightRegion for integrase B1489 sequence
aagcatatcactgaaatagtattcaaaaacggactcacgcataaactactctataaataacaaaaagccctagaaatcaacgtttccggggctttcttcctgtctttatcaattctgtgttgccagtaccatctgacaaccaaatgtcgtcacacacgcagttaatggacgccccagtttctcagacatttcagcaacgtattcttttgctttttccataaaataatactgacgggcaggttcttccaacggtgcatttt

SEQ ID NO: 27489 - DNA, 260 bp, Unknown
  Description of Unknown: RightRegion for integrase B1490 sequence
aagcgaatagtaaaaatagtttttaggaacggtttgtcgcacacactcttataccgataaaactcaagaaagcccgtaaattaaggctacggactttctgagggatgactgagacttataaattctcgcttacggcattcatctggcaaccgaaagtcgtaacacagaacgtcagtgtcctgtcggcttctttacatttttctgcaaaaatatcttttgctttttcaataaaataatactgacgatccggttcctgcagc

SEQ ID NO: 27490 - DNA, 260 bp, Unknown
  Description of Unknown: RightRegion for integrase B1491 sequence
aagcatatcactgaaatagtattcaaaaacggactcacgcataaactactctataaataacaaaaagccctagaaatcaacgtttccggggctttcttcatgtctttataaattctgtgttgccaataccatctgacaaccaaatgtcgtcacacacgcagttaatggacgccccagtttctcagacatttcagcaacatattcttttgctttttccataaaataatactggcgtgcaggttcttccaacggagcgttct

SEQ ID NO: 27491 - DNA, 260 bp, Unknown
  Description of Unknown: RightRegion for integrase B1492 sequence
aggcatgtgaccgaaatcgtattcaaaaatggactcacacacaagctactctataaataacaaaaagccctagaaatcaatgtttccggggctttcttcatgttcttacagattatgtgttgccagtaccatctgacaaccaaatgtcgtcacacacgcagttaatggacgccccagtttctcagacattttagcaacgtattcttttgctttttccataaaataatactgacgggcaggctcttccaacggagcattct

SEQ ID NO: 27492 - DNA, 260 bp, Unknown; identical to SEQ ID NO: 27471
  Description of Unknown: RightRegion for integrase B1493 sequence

SEQ ID NO: 27493 - DNA, 260 bp, Unknown
  Description of Unknown: RightRegion for integrase B1494 sequence
aagcgcatcactgaaatagtattcaaaaacggactcacgcacaagctactctataaataacaaaaagccccagaaattaacgtttccggggctttcttcctgtctttatcaattctgtgttgccagtaccatctgacaaccaaatgtttgaattaccgcgactaatggacgccccagtttctcagacatttcagcaacatattcttttgctttttccataaaataatactggcgtgcaggctcttccaacggagcattct

SEQ ID NO: 27494 - DNA, 150 bp, Unknown
  Description of Unknown: RightRegion for integrase B1495 sequence
aagcgcatcactgaaatagtattcaaaaacggactcacgcataagctactctataaataacaaaaagccctagaaatcaacgtttccggggctttcttcctgtctttataaattctgtgttgccaataccatctgacaaccaaatgtcgt

SEQ ID NO: 27495 - DNA, 260 bp, Unknown
  Description of Unknown: RightRegion for integrase B1496 sequence
aagcgcatcactgaaatagtattcaaaaacggactcacgcacaagctactctataaataacaaaaagccctagaaatcaacgtttccggggctttcttcctgtctttatcaattctgtgttgccagtaccatctgacaaccaaatgtcgtcacacacgcagttaatggacgccccagtttctcagacatttcagcaacatattcttttgctttttccataaaataatactggcgtgcaggctcttccaacggagcattct

SEQ ID NO: 27496 - DNA, 260 bp, Unknown
  Description of Unknown: RightRegion for integrase B1497 sequence
tacaggcagctatcgctaacaagtaatacactgattagtgaaaagaatataattacttaaaataatgaactcctgtatactagaaatggtgtgcaggagttttttgacataaaattaagctgtgctacattctgctttagggaaggatgaaaaaggttatttaatggatacatgtctaacagcgcaagatagatataaggcatatttagactattttgaaataaagtatgaaaagaattgaaaggagagaacgatgaaag

SEQ ID NO: 27497 - DNA, 260 bp, Unknown
  Description of Unknown: RightRegion for integrase B1498 sequence
aagcgcatcactgaaatagtattcaaaaacggactcacgcataagctactctataaataacaaaaagccctagaaatcaacgtttccggggctttcttcctgtctttataaattctgtgttgccaataccatctgacaaccaaatgtcgtcacacacgcagttaatggatgccccagtttctcagacatttcagcaacatattcttttgctttttccataaaataatactggcgtgcaggttcttccaacggagcgttct

SEQ ID NO: 27498 - DNA, 260 bp, Unknown
  Description of Unknown: RightRegion for integrase B1499 sequence
aagcatatcactgaaatagtattcaaaaacggactcacgcataaactactctataaataacaaaaagccctggaaatcaacgtttcctgggctttcttcctgtctttataaattctgtgttgccagtaccatctgacaaccaaatgtcgtcacacacgcagttaatggacgccccagtttctcagacatttcagcaacatattcttttgctttttccataaaataatactggcgtgcaggttcttccaacggagcgttct

SEQ ID NO: 27499 - DNA, 260 bp, Unknown
  Description of Unknown: RightRegion for integrase B1500 sequence
aaacatattactgaaatagtattcaaaaacggactcacacacaagttactctataaataacaaaaagccctagaaatcaacgtttccggggctttctttatgttcttacagattcggtgttgccagtaccatctgacaaccaaatgtttgaattaccgcgactaatgggcgccccagctcctctgacattttagcaacatattcttttgctttttccataaaataatactgacgcgcaggttcttctaacggagcatctg

SEQ ID NO: 27500 - DNA, 260 bp, Unknown
  Description of Unknown: RightRegion for integrase B1501 sequence
agtggccaggaaggaagggtcactgattacgttgatgttaagcctgatagtgatgcctgaaacgccctttatagcgttctgaagactgttctaagagagattttatcactactattggctggattttcaagctgatcgcagagagcacaatgtcaaacacaatcaggaataaaagcacttggatcacagcatttttcagcttcgtagttgggtgtgttactggagccagcggatttttggatggtcttaacaagattcct

SEQ ID NO: 27501 - DNA, 260 bp, Unknown
  Description of Unknown: RightRegion for integrase B1502 sequence
cgcatcctatctatcgagttcaagaacggcgtcgtacatcgcttcttgtaccgtgaatgatccacaacatacttgcaatcgcccctacattcgtatatactatgtatatacggaggtgatagtaatgttagcaacgatttctaaatggggaaatgggcatggcatccgtctttctcgaaaattgatggaagaagccaatctttcgtcgtctgataagctggaggttatagtcaaagcagacaaatctatcatcctgcgcc

SEQ ID NO: 27502 - DNA, 260 bp, Unknown
  Description of Unknown: RightRegion for integrase B1503 sequence
gtaaagcaaataactttcagaaatggtttgtctcatatttttgtatacaaagagcattaaaaaatccgggagcctaacagttcccggattgcttatgtttgaaacatcatttttaattttcaccattcaccttaaaaagatatgcatgaagtttttcgtgttcttctgaaaaaggcatttcctctccattgatctcaaccattccagcaagtgtgcatccattctgttgaaaaagccacgcagtatctactgctccgctc

SEQ ID NO: 27503 - DNA, 260 bp, Unknown
  Description of Unknown: RightRegion for integrase B1504 sequence
aagcgcatcactgaaatagtattcaaaaacggactcacgcataaactactctataaataacaaaaagccctagaaatcaacgtttccggggctttcttcctgtctttataaattctgtgttgccaataccatctgacaaccaaatgtcttggtagcacataacaatggtctgcctagtttttcagacattgcttttacatatctcttcgcaacatccataaagtaatactgtcttgccggttcttccgtaggtgcattat

SEQ ID NO: 27504 - DNA, 260 bp, Unknown
  Description of Unknown: RightRegion for integrase B1505 sequence
attgcagacacacgcaaaggtgttgccgtagagtatataaccgagcaattcacggcataaaaaagagcaaggtgttacccttgctcgtacatacgaattatatgataaaacaaaaagagtgttcataagtcaaatcccttatgaacactcgatatggtcgaggtgacaggacttgaacctgcggcatcttggtcccaaaccacttaataaatgtgtgaaaaacttagtgtttatcggacttttcaagtttagttgcctaa

SEQ ID NO: 27505 - DNA, 260 bp, Unknown
  Description of Unknown: RightRegion for integrase B1506 sequence
aagcgcatcactgaaataatattcaaaaacggactcacgcataaactactctataaataacaaaaagccctagaaatcaacgtttccggggctttcttcctgtctttataaattctgtgttgccaataccatctgacaaccaaatgtcttggtagcacataacaatggcctgcctagtttttcagacattgcttttacatatctcttcgcaacatccataaagtaatactgtcttgccggttcttccgtaggtgcattat

SEQ ID NO: 27506 - DNA, 260 bp, Unknown
  Description of Unknown: RightRegion for integrase B1507 sequence
tttatcacgatgataggtaatgtgttcgttttgctttgtccgtttccgggcctgaaatagaaataaattaagtctaatttgtgaacaaatagaacatcattagagacccattacaacaaaataagcggcgggctacccctattttcaggggaaggcccgccgcttttgttatggattatttaacttgctgatcagttgtctttgcttgcctgcttgataacctgatccgcgccggtggcagccaggccggaaacaatgcc

SEQ ID NO: 27507 - DNA, 260 bp, Unknown
  Description of Unknown: RightRegion for integrase B1508 sequence
aagcgcatcactgaaatagtattcaaaaacggactcacgcacaagctactctataaataacaaaaagccctagaaatcaacgtttccggggctttcttcctgtctttataaattctgtgttgccaataccatctgacaaccaaatgtcgtcacacacgcagttaatggacgccccagtttctcagacatttcagcaacatattcttttgctttttccataaaataatactggcgtgcaggctcttccaacggagcattct

SEQ ID NO: 27508 - DNA, 260 bp, Unknown
  Description of Unknown: RightRegion for integrase B1509 sequence
gaaacggttatgattcttgattatggcttgattgccgcagagttatcaatcgcacgctaaacccaaaaagcactcagcgaatgctgggtgctttttttgcatacttttcaaattatttttgtaactctcttgacttatgcacccattgagtgtataatatagacaagataagaaccaaaggcaccaacacaacacaggaggaaaataaaatgactaacaacgaactgatttccatcgccaccaaaaccgctactgatatt

SEQ ID NO: 27509 - DNA, 260 bp, Unknown
  Description of Unknown: RightRegion for integrase B1510 sequence
cggcgctcccggtctgctacttatctctcccttgtggagaaatccgggcaggctggttgaaaatacgccccatcttcaagacaatcgacattttctcttttatccagtttctttcccggcaaacaaactacataataaaattctttttgctaaaagtgctttatttggtgtgcgtcacaaattagagaaagttgacttgaattatcagaaccatatactaattgtcggtcaggacatagaggaagtagtcgctttgatgt

SEQ ID NO: 27510 - DNA, 260 bp, Unknown
  Description of Unknown: RightRegion for integrase B1511 sequence
aggcagattaccgaaatagtgtttaaaaatggcttatcgcataaattattatacagataaaaagtccccggaaaggttgattttccggggtttctttatgaaataatatcaatttataaaacctctactaccgcgttcatctgacaaccgaaagtcgtcacgcaaaaagtcagatctcttccgatctcctgtgctttttcgcttacatacttccgcgctttggcaatgtaatagtactgtctctccggctcggtgaccgg

SEQ ID NO: 27511 - DNA, 260 bp, Unknown
  Description of Unknown: RightRegion for integrase B1512 sequence
aactatgaaaatgctgctaaacctcatagaaccgacatcaggttccatacgtatttttaatagagatataaggcttgaagagaaaaaaatattacctcgaataggatcactgattgaaagtcctggattttaccctaatttgacaggtacggaaaatcttagaatttttgcgaaattgagaggaatcccaagaactgatgctatcgaacaggcattaaaacttgttaatttaccatataaagataaaaagttatattcgc

SEQ ID NO: 27512 - DNA, 260 bp, Unknown
  Description of Unknown: RightRegion for integrase B1513 sequence
cttcggtcggtgcattaccatcgtccaccggacgatgtgcaccctgttatccgcacttgataaatccgtaaactgcacagtttgtttttgtgtagctataaatcttgaatctggtttcaagctctcctctccggtcggtgcatagcaccatgttatccgaccttgataaatccgtaaactgcacacttgttaagactataaaagaatttaaaggtatgaaggcaaacgatgttgtaaaatatattgaaggtgaaccatat

SEQ ID NO: 27513 - DNA, 179 bp, Unknown
  Description of Unknown: RightRegion for integrase B1514 sequence
aggcagattaccgaaatagtgtttaaaaatggcttatcgcataaattattatacagataaaaagtccccggaaaggttgattttccggggtttctttatgaaataatatcaatttataaaaaaccgagagtatgaaactttttctgtaaaataatgtttataaggttcttctatgatac

SEQ ID NO: 27514 - DNA, 72 bp, Unknown
  Description of Unknown: RightRegion for integrase B1515 sequence
cgaaaacacaggcaattaatcccagatagcttgatgacgctttttcaaaattatctttgatttcttttgaat

SEQ ID NO: 27515 - DNA, 260 bp, Unknown
  Description of Unknown: RightRegion for integrase B1516 sequence
atcattagtttaagtgaaagtaagccaacgcttgctagattaatctcccttgtagcatgatttcagcatagatgacatgaaagaaacatgagtttttgtggtgattgtggtctttgctttagctaacatgaattattgtgatttctaaaacacccacctcatctgctccatagaacgctaaaagccgagaaacatcggcttttttttcgctttctgaaagttggccaacatcttgaccaacaaatttcaggagcagatga

SEQ ID NO: 27516 - DNA, 260 bp, Unknown
  Description of Unknown: RightRegion for integrase B1517 sequence
ccagaagcactggaagtaccgcaaactcaggacacagagaagccccggcaggcatcgtaaacacgatgacctgccggggtatcccaggaatcacttgttacccctgtgaggggagaacatatgtttgaagctctttttctatgctttttacggtgttaagttttgtgatgtaatttgtgaaaaaccggtgtctaccacaagtgtctaccaaactcgcagcgcttcattttagtgttgattttagtgcaggttcagcacct

SEQ ID NO: 27517 - DNA, 260 bp, Unknown
  Description of Unknown: RightRegion for integrase B1518 sequence
attaatgagattgatttgtggtgttttgcagccaacggggggaagtatttattgcgataatattgagattgccagtatgggagcagagtatcgtaggttattgggctatttaccacaggagtttggatattatggtgattttactgcggaacgtttcctgcgatatatggcggcattgaaagcacttccggaagattatgccgatagtcgtattgacgaacttttagatatggtagagttgaaaaatgtgaaaaagaaaa

SEQ ID NO: 27518 - DNA, 260 bp, Unknown
  Description of Unknown: RightRegion for integrase B1519 sequence
gctcgcgctgtaattcaggagtgtacttgggacggggagcggctttttattacgctctaaacctcactatttcataatggtggggttccgcccgcaatataaaaaagtgaatgtaaaataaaggaggtgattcagcgtggcttgtaaaattaaaacgctcctgcagtgcaagcactgcaggcatgatcttgagtttgcgacagtgtgtggtaatcgtcgtgtgccgcttctctggtgtccggactgcgatattttatatc

SEQ ID NO: 27519 - DNA, 260 bp, Unknown
  Description of Unknown: RightRegion for integrase B1520 sequence
gaaacgattacagtccttgattacggcttgattgccgcagaactatcaatcgttcgctaaaaagtaaaagggccactaggcgcaatgcctagtggccctttttggcttacttgctcgcctgcttaatgatctgatccgcgccggtcgcagcaaggccggaaacaatgcccacggccagggcggtcaacggatcagtggcagggaagtccggcacgttgatgtacatggcggccagacccagcaggccgccaagcgcgccg

SEQ ID NO: 27520 - DNA, 99 bp, Unknown
  Description of Unknown: RightRegion for integrase B1521 sequence
atgtcaaaacagaaagcgagggtcaagattttatgccttgaccctcgcttttataattgaaatctcgctcatcgagcattttttcaaggttttcttttg

SEQ ID NO: 27521 - DNA, 260 bp, Unknown
  Description of Unknown: RightRegion for integrase B1522 sequence
aggcagattaccgaaatagtgtttaaaaatggcttatcgcacaaattattatacagataaaaagtccccggaacggttgattttccggggtttctttatgaaataatatcaattttatcaaacctctactaccgcgttcatctgacaaccgaaagtcgtcacgcaaaaagtcagatttcttccgatctcctgtgctttttcgcttacatacttccgcgctttggcaatgtaatagtactgtctctccggctcagtgaccg

SEQ ID NO: 27522 - DNA, 260 bp, Unknown
  Description of Unknown: RightRegion for integrase B1523 sequence
atacaaaagatgctgggcactcagagcgttcccccaagcaccccgcagatattatactgattactgctctacgtacatagaacgaaatctactgttgattattgaattttattttctccccaaagagcggcacaaattttgaataacaaagtaggggcagcaggcggcggtaatcctctgccgccgcgagactttcccttttctttttctctgacataaatgcagccccggttttgctgacgaaaccggggctgtactta

SEQ ID NO: 27523 - DNA, 260 bp, Unknown
  Description of Unknown: RightRegion for integrase B1524 sequence
tttgatttgacaaagtatcaggtagaaataccgaaagaagaattagaacaaaaattttaaatagaagaatcgaaggcagttttgcagctgttttcgatttttcgtttctaattgtcgcacaagaatcggtagggctggggtttagcggctttatcccttaaaatttaaccccataccccttatagcaaaaagaaggctaccacggaagtgataaccctctttaaagcaatataattgttatctactaattaattctagcc

SEQ ID NO: 27524 - DNA, 260 bp, Unknown
  Description of Unknown: RightRegion for integrase B1525 sequence
tcttcttttatgttgagaaatgttggaataagtatgctgaatttagatattgctatataaagaatagttaatgaaaataaaacaaaaaagataaaattttcaattgaaaaatggtaatatttaaaagataatataagtaataatgtaaaatatttcgaaaataagaattaaatgagggaggtataaaaaatgagtatttggttatttagagcaggggcaaatggagaatacgaaagtaagtttttgaaggatggaagagt

SEQ ID NO: 27525 - DNA, 260 bp, Unknown
  Description of Unknown: RightRegion for integrase B1526 sequence
tacctttttgcggatggcagccggtattttaaagccggacgaaggaagcattacggttgatgatgagacagtatttgagaatacaaaggtaaaggcacggtgcttttatatcccggatgagccgtatttcttaagcaatggaacggcggaagacatgaaagtattttatcaggggatttatccgaagtttgatgcagcccggtttgataaactgctaaagaattttgaactggaaagccggcggaaggtgcagacctttt

SEQ ID NO: 27526 - DNA, 260 bp, Unknown
  Description of Unknown: RightRegion for integrase B1527 sequence
tttgatttgacaaagtatcaggtagaaataccgaaagaagaattagaaagaaaagactaaatagaagaatcgaaggcagttttgcagctgttttcgatttttcgtttctaattgtcgcacaagaatcggtggcgtggggtttcagcggcttcatgcttaaaatttaaccccatacccctataaacgaaaaaaaaggctactctggttagaatagccttcatttcattagtagaagtattgattaattctgctgctgattc

SEQ ID NO: 27527 - DNA, 260 bp, Unknown
  Description of Unknown: RightRegion for integrase B1528 sequence
aggcagattaccgaaatagtgtttaaaaatggcttatcgcataaattattatacagataaaaagtccccggaaaggttgattttccggggtttctttatgaaataatatcaattttatcaaacctctactaccgcgttcatctgacaaccgaaagtcgtcacgcaaaaagtcagatttcttccgatctcctgtgctttttcgcttacatacttccgcgctttggcaatgtaatagtactgtctctccggctcagtgaccg

SEQ ID NO: 27528 - DNA, 260 bp, Unknown
  Description of Unknown: RightRegion for integrase B1529 sequence
tttgatttgacaaagtatcaggtagaaataccgaaagaagaattagaaagaaaagactaaatagaagaatcgaagacagttttgcagctgttttcgatttttcgtttctaaatgtcgcacaagaatcggtggcgtggggtttcagcggcttcatgcttaaaatttaaccccatacccctataaacgaaaaaaaggctactctggttagaatagccttcatttcattagtagaagtattgattaattctgctgctgattct

SEQ ID NO: 27529 - DNA, 260 bp, Unknown
  Description of Unknown: RightRegion for integrase B1530 sequence
gattttgtttttgaggcgattgatttgcggtgttcaagtaccgatttcgtgagcagatgagcctccgttgcctttcagcttttccatcaccagcgcatcaacctcctgctccaatctcaaaatttctttctgcaaagtcaaacagtgggcatcgaggactggtttcctcaatgcccactgtttttgcaactgtgtgaccttttttagttccgctgcatattgttcccgcagcttttctgtataatcccagacagctttat

SEQ ID NO: 27530 - DNA, 60 bp, Unknown
  Description of Unknown: RightRegion for integrase B1531 sequence
cactttgatgagggttcttacaactgttttaaaacaaacggaaggaatggtttcccttga

SEQ ID NO: 27531 - DNA, 260 bp, Unknown
  Description of Unknown: RightRegion for integrase B1532 sequence
gaaacgattacagtccttgattacggcttgattgccgcagaactatcaatcgttcgctaaaaagtaaaagggccactaggcgcaatgcctagtggccctttttggcttacttgctcgcctgcttaatgatctgatccgcgccggtcgcagccaggccggaaacaatgcccacggccagggcggtcaggggatcggcggccggaaagtccggcacgttgatgtacatggcggccaggcccagcaggccgccaagggcgccg

SEQ ID NO: 27532 - DNA, 260 bp, Unknown
  Description of Unknown: RightRegion for integrase B1533 sequence
aagcgtattacagagattgtttttaaaaacggattgacgcacacattattgtacagatagaaaaagccccggaaatccaatgtttccagggcttttgtatgttcgtaattaatgcttaataattcaaggataccgggttcatctgacaaccaaaggttgtaacgcagaacgtcagcggacgaccaagttcttcagattcacgctgtacatatgcctttgccttttcgatgaaataatactgacgggcagtatcatccgcc

SEQ ID NO: 27533 - DNA, 260 bp, Unknown
  Description of Unknown: RightRegion for integrase B1534 sequence
aggcagattaccgaaatagtgtttaaaaatggattatcgcacaaattattatacagataaaaagtccccggaacggttggcttaacagtgataaggaactaatttacttatcaactgttagctgacggtttccggggtgcatacggacaaatcccgtctgatttctaacaggaagtcagacgggattttcgctttatattacgaattatggaggacataccatgaaaaccttaatatcttgtgcctacaatatggataat

SEQ ID NO: 27534 - DNA, 260 bp, Unknown
  Description of Unknown: RightRegion for integrase B1535 sequence
ggaaaacatcaagaaaaacttcggttttggctgtatgcgcctgcccttgaaggatggtgagatcgatctggccgaaaccagccggatggtcgattattttctggagcagggcttcaactacttcgacacggcccacggttaccttcagggccggagcgagacggcgctgaaggcctgcctgaccagccgccacccccgcgacagctacatcctgaccaacaagctgaccggcactttcttcaaaactgaggctgacatcc

SEQ ID NO: 27535 - DNA, 260 bp, Unknown
  Description of Unknown: RightRegion for integrase B1536 sequence
aacaaagtaaccaaaataaaatttataaacggtatcgaacattcatttatttgtaaataaaaaaaacacccctattttgagtaatcaacttaaaataggggtgtttctatgttatttccaaatatttttttaatcgtgtaatgtgcttatttattggtcttttttaacttctgtcctactcacacactagggcagccaaaagtctgaatacacatagttttctttcttccctctgtttcttcaaacttttcatttatgct

SEQ ID NO: 27536 - DNA, 260 bp, Unknown
  Description of Unknown: RightRegion for integrase B1537 sequence
aggcagattaccgaaatagtgtttaaaaatggattatcgcacaaattattatacagataaaaagtccccggaacggttgattttccggggtttctttatgaaataatatcaatttataaaacatctactaccgcgttcatctgacaaccgaaagtcgtcacgcaaaaagtcagatctcttccgatctcctgtgctttttcacttacatacttccgcgctttggcaatgtaatagtactgtctctccggctcggtgaccgg

SEQ ID NO: 27537 - DNA, 260 bp, Unknown
  Description of Unknown: RightRegion for integrase B1538 sequence
tttgatttgacaaagtatcaggtagaaataccgaaagaagaattagaaagaaaagactaaatagaagaatcgaaggcagttttgcagctgttttcgatttttcgtttctaaatgtcgcacaagcatcggtggcgtggggtttcagcggcttcatgcttaaaatttaaccccatacccctataaacgaaaaaaaggctactctggttagaatagccttcatttcattagtagaagtattgattaattctgctgctgaatct

SEQ ID NO: 27538 - DNA, 260 bp, Unknown
  Description of Unknown: RightRegion for integrase B1539 sequence
aacaaagtaaccaaaataaaatttataaacggtatcgaacattcatttattcgtaaataaaaataacacccctattttgagtaatcaacttaaaatgggggtgtttttatgttattttcaaatatttttttaatcgtgtaatgtgcttatttattggtcttttttaacttctgtcctactcacacactagggcagccaaaagtctgaatgcacatagttttctttcttccctctgtttcttcaaacttttcatttatgct

SEQ ID NO: 27539 - DNA, 260 bp, Unknown
  Description of Unknown: RightRegion for integrase B1540 sequence
tacaactataagaattattatggatgtatttcatgccaattcaggagaaatatttcttgatggtaaaaaatttaatccaaaggagcatcttataggatatctgccggaagagagaggattatatcctaagaaaaaagtatcagaacagcttgtgtatcttggcaggttaagaggcttatctaaggctgaagctaagaagaatactgataaatggcttaaaagactgcaggtatcacaatatacagatgtgaagttagaga

SEQ ID NO: 27540 - DNA, 260 bp, Unknown
  Description of Unknown: RightRegion for integrase B1541 sequence
cactttgatgagagtgcttacaactgttttaaaacaaacggaaggaatggtttcccttgatggaattctgtataacgagggaaattatgagaaaatacagaaaaagattggttatcttccacaggaaatcgacttatatccgaatcttacggtgaaagaatgtcttgtatatatggggggactgtcaggagtagccagaaatgacctcgaacaaagaattacctattatctggaaaagacttctcttacagagcatcaga

SEQ ID NO: 27541 - DNA, 260 bp, Unknown
  Description of Unknown: RightRegion for integrase B1542 sequence
aagcgtattacagagatcgtttttaaaaacggattaacgcatacattattatacagatagaaaaagccccggaaatccaatgtttccagggcttttgtatgtttcgtatttaatgcttaataattcacggataccgggttcatctgacaaccgaatgttgtgacacagaatgtcagcggacgtcccagttcttcggattcgcgctgtacataagcttttgctttttcgataaaataatactgacgggcagtatcatccgc

SEQ ID NO: 27542 - DNA, 260 bp, Unknown
  Description of Unknown: RightRegion for integrase B1543 sequence
ttcaccgttgagcgcaaggaacagcttaatatccagcataaagacattaaaactgcataaatcaagattccgaggggcgaaatttcccctcggttgtaaaagaaatattttcttataataatgatattacgcagatgcaatgctgttcaacattctttcctatatgtccaacaagttattaggtgagggcaacaccgttgcatcaatagacgagctatatttgttcctttcaaatctcacagcaattgagtatatacgca

SEQ ID NO: 27543 - DNA, 260 bp, Unknown
  Description of Unknown: RightRegion for integrase B1544 sequence
aggcagattaccgaaatagtgtttaaaaatggcttatcgcataaattattatacagataaaaagtccccggaacgattgattttccggggtttctttatgaaataatatcaatttataaaacatctactaccgcgttcatctgacaaccgaaagtcgtcacgcaaaaagtcagatttcttccgatctcctgtgctttttcgcttacatacttccgcgctttggcaatgtaatagtactgtctctccggctcagtgaccgg

SEQ ID NO: 27544 - DNA, 260 bp, Unknown
  Description of Unknown: RightRegion for integrase B1545 sequence
aggcagattaccgaaatagtgtttaaaaatggcttatcgcacaaattattatacagataaaaagtccccggaacggttgattttccggggtttctttatgaaataatatcaattttatcaaacctctactaccgaggtcatctgacaaccgaaagtcgtcacgcaaaaagtcagatctcttccgatctcctgtgctttttcgcttacatacttccgcgctttggcaatgtaatagtactgtctctccggctcggtgaccg

SEQ ID NO: 27545 - DNA, 260 bp, Unknown
  Description of Unknown: RightRegion for integrase B1546 sequence
ggaaaacatcaagaaaaacttcggttttggctgtatgcgcctgcccttgaaggatggtgagatcgatctggctgagaccagccggatggtcgattattttctggagcagggcttcaactacttcgacacggcccacggctaccttcagggccggagcgaaacggcgctgaagacctgcctgaccagccgccacccccgcgacagctacatcctgaccgacaagctgaccggcagtttcttcaaaactgaggctgacatcc

SEQ ID NO: 27546 - DNA, 260 bp, Unknown
  Description of Unknown: RightRegion for integrase B1547 sequence
tacaactataagaattattatggatgtatttcatgccaattcaggagaaatatttcttgatggtaaaaaatttaatccaaaggagcatctgataggatatctgccggaagagagaggattatatcctaagaaaaaagtatcagaacagcttgtgtatcttggcaggttaagaggcttatctaaggctgaagctaagaagaatactgataaatggcttaaaagactgcaggtatcacagtatacagatgtgaagttagaga

SEQ ID NO: 27547 - DNA, 260 bp, Unknown
  Description of Unknown: RightRegion for integrase B1548 sequence
cactttgatgagggttcttacaactgttttaaaacaaacggaaggaatggtttcccttgatggaattctgtataacgagggaaattatgagaaaatacagaaaaagattggttatcttccacaggaaatcgacttatatccgaatcttacggtgaaagaatgtcttgtatatatggggggactgtcaggagtagccagaaatgacctcgaacaaagaattacctattatctggaaaagacttctcttacagagcatcaga

SEQ ID NO: 27548 - DNA, 76 bp, Unknown
  Description of Unknown: RightRegion for integrase B1549 sequence
taccacattgaaaatgttgactggtatgatgaaaccaactgcaggaaagatttactttgatggaaaacttttggat

SEQ ID NO: 27549 - DNA, 260 bp, Unknown
  Description of Unknown: RightRegion for integrase B1550 sequence
tcactacccacgtcgttgagtattccggctacttctctgtacggcatggaacagcgctgagaaaggtagcgcagcgaagctccgagctcgccgtgaggacctccatacttcaaatgcgtataattagaggcggaaataaatttttatagcagtattaggccgtgaaaatacgatactttcaacgatttcccccagagccgcccttttaatagcgtcttcagaatcggaggataaaaggtcgactatctcagcgaattgcc

SEQ ID NO: 27550 - DNA, 187 bp, Unknown
  Description of Unknown: RightRegion for integrase B1551 sequence
aggcagattaccgaaatagtgtttaaaaatggattatcgcacaaattattatacagataaaaagtccccggaacggttgattttccggggtttctttatgaaataatatcaatttataaaacatctactaccgcgttcatctgacaaccgaaagtcgtcacgcaaaaagtcagatttcttccgatct

SEQ ID NO: 27551 - DNA, 260 bp, Unknown
  Description of Unknown: RightRegion for integrase B1552 sequence
cgctcggggtatcagggcacgtatgaggtgcggtactgtgtgcggtggcaccttgggtagcagacgaaaaaacagcaaacctgcaaggtttgctgttttcttttttcaaaacttttcttttattatttcccgcttatcttgacagaaccgccatttcgcagtacgataaggccagaaatcaaaatcaccctaagtattacttcctttcgtttgatgagatacacatctcacaggcgcaggtatcccgtttggagaagggc

SEQ ID NO: 27552 - DNA, 260 bp, Unknown
  Description of Unknown: RightRegion for integrase B1553 sequence
cacaaccatgaaaatgctgttggggttgaccaatcccacaaaaggcagctttaccattgatgggaaacagtttccgcaggatcggattgccattctcaaagagatcggctctttcatcgaagcgccgtctttctacgcgaatctcaccgggcgggaaaatcttgacattatccgccgcattttgggactgctgaaagcggatgtggaagatgctctggaactggtagggctgaccgagtttggcgaccggctggcaaaac

SEQ ID NO: 27553 - DNA, 260 bp, Unknown
  Description of Unknown: RightRegion for integrase B1554 sequence
aaaaacgaccactatgaaaatgctacttggattgacaaagccaacttccggcgaagttaaaatatggggaaagtctttgcaggggaatgaaaagaaattgttgccccgtatcggtagtctgattgagtcgcccggtttttaccctaatttgactgctacggaaaacttacaaatttttgctaccttacggggagtaccaaaccgccacgcaatcaaagacgctttagatttggtgggattgccttataaagacaaaaaac

SEQ ID NO: 27554 - DNA, 260 bp, Unknown
  Description of Unknown: RightRegion for integrase B1555 sequence
aacccttatgagaatgattgcagatattatgacaccaaccagcggaaccatttactttgatggtactgatattcgtaaaatgggaaaaaactaccgcaatttgtttggatttttaccgcaagactttgggtataatcgagattttactgttaaggattatctcgaatatatggctgctttaaaggatgtccctgcaagagaaaccagcaggaaaatcaattatttgttggatattcttactctttcagatgtaaagcaca

SEQ ID NO: 27555 - DNA, 189 bp, Unknown
  Description of Unknown: RightRegion for integrase B1556 sequence
taccacattgaaaatgttgaccggtatgatgaaacccactgcaggaaagatttactttgatggaaaactttgggataggaaagatttatcaaaaataggagcgttaattgagaatccgcctatttatgaaaatctttccgccagagagaatttgaaggtaagacaattattgcttggtacagatgaaaa

SEQ ID NO: 27556 - DNA, 260 bp, Unknown
  Description of Unknown: RightRegion for integrase B1557 sequence
aaatttcaggctacttctaccattactatcagttcctcgctgctgtcaggatgccgctgaccgtgtttaccgcctggatctgggtgtctttggtgacgtgggcgtaggtgtccagcgtgaatccggcgctgtaatggcccatcattccagagactgttttcacgtttcccccgttctgccgggcgatacgccgctggatacggagcgtttttctctggaagtcaatgcctgtccattttaatcccaacagctctccccgc

SEQ ID NO: 27557 - DNA, 260 bp, Unknown
  Description of Unknown: RightRegion for integrase B1558 sequence
agctctgccggtggggcgccccgtaaaaagagctttaatatcaaacatcgagtgaagtgagccgctaacatgaaccttccgctaatagaaatctgctattagaacggtgattgcccgtttacgggctgtaggcaagtgacgtaagcggaataaagttccgtgcatcccctgggacgcttgtcagtaatagccccttatagagtctccttatctcccctccttagccggtgggggttgactcttttcagctttcgaacttc

SEQ ID NO: 27558 - DNA, 260 bp, Unknown
  Description of Unknown: RightRegion for integrase B1559 sequence
gaaacgattacagtccttgattacggcttgattgccgcagaactatcaatcgttcgctaaaaagtaaaagggccactaggcgcaatgcctagtggccctttttggcttacttgctcgcctgcttaatgatctgatccgcgccggtcgcagccaggccggaaacaatgcccacggccagggcggtcaggggatcggcggccggaaagtccggcacgttgatgtacatggcggccaccccccggcaggccgccatgggcacc

SEQ ID NO: 27559 - DNA, 260 bp, Unknown; identical to SEQ ID NO: 27521
  Description of Unknown: RightRegion for integrase B1560 sequence

SEQ ID NO: 27560 - DNA, 260 bp, Unknown
  Description of Unknown: RightRegion for integrase B1561 sequence
ggaaaacatcaagaaaaacttcggttttggctgtatgcgcctgcccttgaaggatggtgagattgatctgactgagaccagccggatggtcgattattttctggagcagggcttcaactacttcgacacggcccgcggctaccttcagggccggagcgaaacggcgctgaagacctgcctgaccagccgccacccccgcgacagttacatcctgaccaacaagctgaccggcactttcttcaaaactgaggctgacatcc

SEQ ID NO: 27561 - DNA, 260 bp, Unknown
  Description of Unknown: RightRegion for integrase B1562 sequence
ggccatgtcacgcagatcaccttcgtcaacggcgaaacccatacattcctctaccactgaaaaaaaagccttcccgcatagggaaggcttttactgtcacatcattcttttttctcggcctcagcctcgcgctgtcggtcgagctcctcgagttctttgagctcttcggctcgctccgcgtctggttgcttgcgtgagcagaacattgcatcgccaaacgagaaaaagcggtacttcatctcgacggcggtcttgtaggc

SEQ ID NO: 27562 - DNA, 260 bp, Unknown
  Description of Unknown: RightRegion for integrase B1563 sequence
cccttggaaactgaaacaactgtcgaggtttgcagtagttatatcagggcggataaataacctgcctacgtttcttattctcaagcgagctcccaacgcctcacaaaaaggcgacaaaaaactctcagaaatttagtaaatagcataaaggccgcccagcacggacggcctttgtgcttttattctttgtacgctccaatgctcctaaagaaagccgattcttgaatgtattgcacatcctctgcgattgaccgcacaga

SEQ ID NO: 27563 - DNA, 260 bp, Unknown
  Description of Unknown: RightRegion for integrase B1564 sequence
aagatgatcgaacagcaggaacgtcagatgtccggaagttcccagaacgaacagtactgagcattctgatcaataacctaaactcctgaattattcaggataaagacagtgcagctccaaaatctgtaatcagattccggactgcactgtttttttgtataaattttcaagaaataattgccaattttttgttgacttgttataatatatgagaatagctatattataactaaaaaaccagtaatgtattggtgaaaatg

SEQ ID NO: 27564 - DNA, 260 bp, Unknown
  Description of Unknown: RightRegion for integrase B1565 sequence
cgccgtggcaggcatttcccgtcaagttttttttgtaaacacacaaagtcaccgctgtgataatttgtgtgtcacttttacaaattcaggggcgtgcccctgcacccgatccgctttacttatgtaaggcggtttttttattgccgctcatggatcattatttataaacccaactttgttatttcaccatggcagacgctgatataatagaaaaagagtgcattaccacctcagataatgcactcttatattttacccta

SEQ ID NO: 27565 - DNA, 260 bp, Unknown
  Description of Unknown: RightRegion for integrase B1566 sequence
gaggcttctctaccaatatcggtcaagaggcctttgagctcaggatacggcatgctgtagcgctggctgagataccgcagcgaagcgccgagttcgccgtccgggcctccacacggaaaaaaccgataacacgtctaacgcttcatttacatgcaacatatcatcccctcatgcaaaagtcaaggacagcgcgtttgcgctgtcctttttctcattttgcgtttaattcgttgtagactttttgacctattgccacgctg

SEQ ID NO: 27566 - DNA, 260 bp, Unknown
  Description of Unknown: RightRegion for integrase B1567 sequence
atcaaaagccttatggctaaaatcaaagcaaatccacaggaatacaggcttaccgcctaaaaaagagaaaacggtgcaaccccgattgtggggttacaccgtatccctgccaaaaaacatccttatggggctttggcaaaggcaggcctccttttataatatatggggctttgcggcggggggggggagatcactccaccacgggaagctttttcaccacggcggcgcagcgggggcacaggtcggggtgctgggcatcg

SEQ ID NO: 27567 - DNA, 260 bp, Unknown
  Description of Unknown: RightRegion for integrase B1568 sequence
cccttggaaactgaaacaactgtcgagacggtagtattgatgtcaagaaaagataaataagtgccagaaaatggtgtatttccgggcctttttcggaagttgggattagaagcctaacttctgaaaaggcttggttgttttatatggaaacatatctattgtgaaaatgtgtgtcaggttgtgaattcggattagatgtcgcgatttgagacagtggattagatgtcaggcattttgaagtgatttttgaaagaggaaaa

SEQ ID NO: 27568 - DNA, 260 bp, Unknown; identical to SEQ ID NO: 27565
  Description of Unknown: RightRegion for integrase B1569 sequence

SEQ ID NO: 27569 - DNA, 260 bp, Unknown
  Description of Unknown: RightRegion for integrase B1570 sequence
attactttcaaaaatggaatagtccatcactttatatacaaaaatgaacacaaaatataaaaaatacccaagtgactttttcttacagccacttgggtttcattatatcatatttgattatacacacggacaacctagagtataaaaactgactgttttcttcatttaaagttcattccttacaatatatttaggttttattttgtctcctatagacattacatttcttacgaaatcaattacttgtctattttagcacg

SEQ ID NO: 27570 - DNA, 260 bp, Unknown
  Description of Unknown: RightRegion for integrase B1571 sequence
atttatatggatgcgaaccgagcgtttccggcgaattttggagattttagggagtattgaccccaatcggttcgcatcccttgcgatcatatactcttttcaaaccgcattaccttaccgtcccgccggtgacggaggaactcctcaaggccttgccggtactggtgtttgccgtctttttcagcgatgaccgcaaggacattctgcccgcggccatgtccgtcggcatcggcttttctattttggagaacaccgccatc

SEQ ID NO: 27571 - DNA, 260 bp, Unknown
  Description of Unknown: RightRegion for integrase B1572 sequence
tgttgttttctcccgctgcttttttctgacccaaacgctgaccccaacgggagcggatagcggaaaggtctataccgcacgggagaggatgctccccatcgtttgcgccgccttgagctgtgcgtcggtggtgacgtgggcataggtgtccagcgtgaagcctgcggagtagtggcccagcatcgaggacaccgggatgcagcaagatagccccgcagatgtactggcagatccgtcatgccgccaatcaggcgtaagac

SEQ ID NO: 27572 - DNA, 109 bp, Unknown
  Description of Unknown: RightRegion for integrase B1573 sequence
ggccgcgtcacgcagattaccttccgcaatggcgaggtgcacaccttcctctatgcatgaaaaaagccttcccgcagttgggaaggctttcttgctatatcattctttt

SEQ ID NO: 27573 - DNA, 109 bp, Unknown
  Description of Unknown: RightRegion for integrase B1574 sequence
attactttcaaaaatggaatagtccatcactttatatacaaaaatgaacacaaaatataaaaaatacccaagtgactttttcttacagccacttgggtttcattatatc

SEQ ID NO: 27574 - DNA, 109 bp, Unknown
  Description of Unknown: RightRegion for integrase B1575 sequence
ggccatgtcacgcagatcaccttcgccaatgacgaaatccacacattcctctaccactgaaaaaaagccttcccgcgcagggaaggcttttactgtcacatcattcttt

SEQ ID NO: 27575 - DNA, 260 bp, Unknown
  Description of Unknown: RightRegion for integrase B1576 sequence
attactttcaaaaatggaatagtccatcactttatatacaaaaatgaacacaaaatataaaaaatacccaagtgactttttcttacagccacttgggtttcattatatcatatttgattatacacacggacaaccgcaatgtgataaatgcaacttttttattcatttttattctctctttctatataaaaaagacgaatattgagtattttaaaaatattatatattcgtcctatattttatcttgatgcttttccttc

SEQ ID NO: 27576 - DNA, 260 bp, Unknown
  Description of Unknown: RightRegion for integrase B1577 sequence
gaactgacgattactttgcgccttgaaaaaggtagccacgaagccgtttttgtcgcataaatcaaagggaaacgcccaaccacacggaagggcgttttattgtttattcgtttttgttatgctcggtcttgtcgggtattttctctttattgaccttctcttccgccgccttgaaaagaaaatcaagaattttgcggaacagagtatttatgggcgtaattttgaaaatattataaaaagtctgattgagcgcatatatc

SEQ ID NO: 27577 - DNA, 260 bp, Unknown
  Description of Unknown: RightRegion for integrase B1578 sequence
ttccgttttttggtactgcttttttctgacccaaacgctgacccaaacgggagcgggtagcggaaagcatcagacggcacgggataggatactccccatggtctgggcagctttgagttgggcgtcggtggtaacgtgggcgtaggtgtccagcgtgaagcccgccgagtagtgaccgagcatggaggacacggtcttgacgtccacgccgttttgcagcgccatggtcgcgaaggtgtgcccttacggtataattacga

SEQ ID NO: 27578 - DNA, 260 bp, Unknown
  Description of Unknown: RightRegion for integrase B1579 sequence
atcaaaagccttatggctaaaatcaaagcaaacccgcaggaatacaggcttaccgcctgaaaaaagagaaaacggcgcaaccccgattgtggggttacaccgtatccctgccaaaaaacatccttatggggctttggctgatgaggctccacctttttttaacttcacaggaaggggcattcccgcagacgggcgctcactcatgcagcttctgcgaggcaatgtagagcgggatcgccgcaagctgagagacgaccgac

SEQ ID NO: 27579 - DNA, 260 bp, Unknown
  Description of Unknown: RightRegion for integrase B1580 sequence
ggcagcgagcccttgcgtggctggtgttggatgtgcagggcggcgattgccccggggtgacgctggcggatacggcggcggatgggaatccggaatggcagaatacggatgctgaaccggcggaaacgcacgttttcctgctcagctacgcgcaggtgatgcagtatcttccggagcaggagcagcggaaagtcagcggcacggaatatgcccggtcacggggcgcgaagtttctgggctttaccactatcggcatcggc

SEQ ID NO: 27580 - DNA, 260 bp, Unknown
  Description of Unknown: RightRegion for integrase B1581 sequence
acaaaacttatcgcgcactcactttgctgctcctcgcttccaaaccgaagcccagcgtagcgggttcggtttggtttttggcacagacctgtagccactgcatcttttttgtccacacaatacacactcgggagatctcgttttgagatttgccgagttttttcatactttcaggatgcgcgatagtacacactcttgtctccctccggatgcaggaagtcgaagaattgtgtgacgctgatcttgaattccacttcaat

SEQ ID NO: 27581 - DNA, 260 bp, Unknown
  Description of Unknown: RightRegion for integrase B1582 sequence
aaggtcatggagatcaccttccgaaatggcatgacacacaccttccaatacgacgcataagaaaagcccgcctccttctggaagcgggctttcccatacgttcatggcctggatggctcattcgttgtcgtggtcatgcatgtgctccagctcgtagagctctttatctcgctcttccttcggttgttgagctgaaatatacattgcatcgccgaaggagaagaagcggtacttctgttcgacggctgtcttgtaggcgc

SEQ ID NO: 27582 - DNA, 260 bp, Unknown
  Description of Unknown: RightRegion for integrase B1583 sequence
aagatgatcgaacagcaggaacgccagatgtccggaagttcccagaacgaacagtactgagcattctgatcaataacctaaactcctgaattattcaggataaagacagtgcagctccaaaatctgtaatcagattccggactgcactgtttttttgtataaattttcaagaaataattgccaattttttgttgacttgttataatatatgagaatagctatattataactaaaaaaccagtaatgtattggtgaaaatg

SEQ ID NO: 27583 - DNA, 260 bp, Unknown
  Description of Unknown: RightRegion for integrase B1584 sequence
ctccgtggtgggcatttcccgtcaagttttttttgtaaacacacaaagtcaccgctgtgataattcgtgtgtcacttttacaaattcagggacttgtccctgcacccgatccgctttactttatgtagggcggttttttattgccgctcatggatcattatttataaacccaactttgttatttcaccatggcagacactgatataataaaaaaagagtgcattaccacccatgataatgcactcttaaattttacccta

SEQ ID NO: 27584 - DNA, 260 bp, Unknown
  Description of Unknown: RightRegion for integrase B1585 sequence
aagcgtattacagagatcgtttttaaaaacggattgacacacacattattatacagatagaaaaagccccggaaatacaatgtttccagggcttttgtatgtttcgtatttaatgcttaataattcaaggataccgggttcatctgacaaccgaatgttgtgacacagaatgtcagcggacgtcccagttcttcggattcgcgctgtacataagcttttgctttttcgataaaataatactgacgggcagtatcatccac

SEQ ID NO: 27585 - DNA, 260 bp, Unknown
  Description of Unknown: RightRegion for integrase B1586 sequence
aagcgtattacagagatcgtttttaaaaacggattaacgcacacattattgtacagatagaaaaagccccggaaatccaatgtttccagggcttttgtatgtttcatattgaatgcttaataattcacggataccgggttcatctgacaaccgaatgttgtgacacagaatgtcagcggacgtcccagttcttcggattcgcgctgtacataagcttttgctttttcgataaaataatactgacgggcagtatcatccgc

SEQ ID NO: 27586 - DNA, 260 bp, Unknown
  Description of Unknown: RightRegion for integrase B1587 sequence
aaccagattcaagttgtcggtttgatttttatccaaaccaaaagacacgccttgccgtaacggtgggcgtgtcttttatatgtttgtgcgttttattttttgtacatcccctgcagcacgccaacctccgccgcatcatcgatcatccggcggtgtaaataatcgtacagggccagcatttccgccggaggttcgccgtgcatcctccggtgattttcgatccggcgcacgacgtctttgtgcagcatgttcatgtgatt

SEQ ID NO: 27587 - DNA, 260 bp, Unknown
  Description of Unknown: RightRegion for integrase B1588 sequence
ctggaagcaccggaatccctacaaacccaggacacagagaagccccggcaggcatcgtaaacacgatgacctgccggggtatcccaggaatcacttgttacccctgtgagggggaaacaaaaggctcggggctgttttttgctttatccagtccgcgtcataaccgaggacaagacagcaatattctttcccgctggtattgaactgcgaggatgccatatatccgccagagtcgctgtctaacgtctgcgatacccggc

SEQ ID NO: 27588 - DNA, 260 bp, Unknown
  Description of Unknown: RightRegion for integrase B1589 sequence
ttcatttctgcccaacgcacaaagtatcttcggccggaaatatttgcgccgcaaatgtgaaaagcgccggatgcttcgcacagcgcgccgaatgcgctgtttttctgcacgccggtgcatttttcacgcaggacatacaaacacattgcaatattctgccctatgcggcagcgcgaacgccccaagaattaagactaattaagatgtcgccgtatgcttttcttgctataatattggccgcagaacaaaaaataccatca

SEQ ID NO: 27589 - DNA, 260 bp, Unknown
  Description of Unknown: RightRegion for integrase B1590 sequence
ctgatgagtgggatcacgcacgagttcgtatactgcaatgaaacaaaaaaagagggctagaaatcaagcgatttctagcctttctgtgtatgtgaaaatcctgcctccaaagcactttgctttaggatatgttgttgccgcattgtcaaaatacgccatcgtcttcctccttgctcagcagagtttttttatgacttccatcagtatctggcgcttttcttgttctgagatcgagtgccccatagcatcaagcgaggccg

SEQ ID NO: 27590 - DNA, 260 bp, Unknown
  Description of Unknown: RightRegion for integrase B1591 sequence
gatttttcttgtttgcagttggtattgtcgcggaatgaattcaaaaaggaggatgcatgacccatggtcgatcatatgcttgtacgtggagcaaaggtccacaacctgaaaaatattgacgtggacattccgctgaatcagatcgtcggcatcgcgggcgtgtccggttccggcaagtcgtcgctggcgctgggcgtgctgtatgccgagggctcgcgccgctatctggaggcgctgtcgacctacacgcgccgccggat

SEQ ID NO: 27591 - DNA, 260 bp, Unknown
  Description of Unknown: RightRegion for integrase B1592 sequence
aataccgttgaaactgtcgtgaaacttgtgcggaaaatcaaggattctgaggaaatgtaaggttgaaaataggctttttgcctacctcctgcctacccttttttaagatggtaggcaggatttttctttttatgaagtggcttgcgtgaacagcttcacagcatcgtccttcattttgtccgtgttaaagacgtagcgctccatagtggttttaagatctttgtgccccagtcgttccattacagtcttaggttgtgcgc

SEQ ID NO: 27592 - DNA, 260 bp, Unknown
  Description of Unknown: RightRegion for integrase B1593 sequence
ctgatgagtgggatcacgcacgagttcgtatacggcaatgaaacaaaaaaagagggctagaaatcaagcgatttctagcctttctgtgtatgtgaaaatcctgcctccaaagcactttgcttttgtgaaatgtgtcagctcgtcgaaatacagccagtggatttccgcgccctgatatttcagcagcccctgcccctcgtcgctcaggtggcagaaatggatgacgcttccgttgctcagcctcagctcgtgcgcactgg

SEQ ID NO: 27593 - DNA, 260 bp, Unknown
  Description of Unknown: RightRegion for integrase B1594 sequence
acaatagtcgaggtgattgtttgtttgtcacgcgacccaggcggcagcagtaacggctaaagaataagaaaaggcagggcgcaagccccgccttttttagttttcaggagcgaacagccagtgaatggttatatcttccccatcaatatcaatgcggccaatcagagaatgaacaagggcgcgcttttgctccggcgttccgttttcgatgaccgccgaggcaccggccagcatttcctgcgcaacggccagcctgtcca

SEQ ID NO: 27594 - DNA, 260 bp, Unknown
  Description of Unknown: RightRegion for integrase B1595 sequence
aagcgtattgcagagatcgtttttaaaaacggattaacgcacacattattgtacagatagaaaaagccccggaaatccaatgtttccagggcttttgtatgtttcatattgaatgcttaataattcacggataccgggttcatctgacaaccgaatgttgtgacacagaatgtcagcggacgtcccagtttttcagattcgcgctgtacataagcttttgctttttcgataaaataatactgacgggcagtatcatccgc

SEQ ID NO: 27595 - DNA, 260 bp, Unknown
  Description of Unknown: RightRegion for integrase B1596 sequence
gctacaagcaataaacaacattcaaataatactgcaaccagagagaaacaacgcatgtagaatgcattgctgtgttatatttaaaataaactctacataagaaaaaatattaaaatagataaattcaagaaataaagaggagaatttatattacgaaaaaagtttatataattatataagtactaaaaagtagatattttaaaatactaaatctaaaatatctacttttttctaatgtcaatgttacctttattaaaaaa

SEQ ID NO: 27596 - DNA, 260 bp, Unknown
  Description of Unknown: RightRegion for integrase B1597 sequence
gggcacccgacggcgcataaggcgcttgtgccttgcggcgcggcgtgccgcatggtataatacatgcagcttttggaaaggcgggcacgggtgcctgtctttcataacactgcaaggagtctgccatgtcgataagaaaacgggccgccgccgcgcttgccgccctgctggggctctgcgtgctgctggccatccttgtaatggcctgtgccccgcgcaccgaaaccgccgatgtcgcgatcctcatgtaccacgccttc

SEQ ID NO: 27597 - DNA, 260 bp, Unknown
  Description of Unknown: RightRegion for integrase B1598 sequence
acaatggtcgaggtgattgtttgtttgtcacgcgacccaggcggcagcagtaacggctaaagaataagaaaaggcagggcgcaagccccgccttttttagttttcaggagcgaacagccagtgaatggttatatcctccccatcaatatcaatgcgaccaatcagagagtgaacaagggcgcgcttttgctctggcgttccgttttcgatgaccgccgaggcaccggccagcatttcctgcgcaacagccaacctgtcca

SEQ ID NO: 27598 - DNA, 260 bp, Unknown
  Description of Unknown: RightRegion for integrase B1599 sequence
gacaacttcacagtgaatgtcctgggctacaaaatcatcgatatagatacgcaattttgatacagaggtacctgtatctgtatcaaaattgcgtattattcctaaaaaaagaggggagggctatagccctcccctcttttttacgctttcatcaatgctccacaatccggagcaaattcattgccggctgcactaccgaatggatgtagccgtttcctccatcttcctcataatccttgaacagttcccaaaacgcctct

SEQ ID NO: 27599 - DNA, 260 bp, Unknown
  Description of Unknown: RightRegion for integrase B1600 sequence
acgctgctggaatatctgagctccacccggcagcgaaaggaaacaccgaagataaaataagaacaaagcgcggagaacggtataaaagccgctctccgctttcccagcagcaactccttgatctccttggagatgatcgcctgaaaatcgcgcacgatggtggggagcagttccctgcaccctcaaaggactttctctgttgtcattctgcctgtatctcttccaccagcggcagatagtcgacacagtatttccggtac

SEQ ID NO: 27600 - DNA, 260 bp, Unknown
  Description of Unknown: RightRegion for integrase B1601 sequence
aaagacgacaaccgtaaaattgcttaccggagtcctgagcccgtctggaggatcatgtgaaattatgggtgtcaatcctaatattcagccagaaaaagtgcatctccttgcagggattgtgactgaacacgcacagatgtatgacaatctgactggtattgaaaatctgatgttttatgctgcggcttttggcatggaacaaaaaggaaaatggcgtgctgagtcactactcaaggaattagagttgacagaagcgaaag

SEQ ID NO: 27601 - DNA, 260 bp, Unknown
  Description of Unknown: RightRegion for integrase B1602 sequence
ctgatgagtgggatcacgcacgagttcgtatacggcaatgaaacaaaaaaagagggctagaaatcaagcgatttctagcctttctgtgtatgtgaaaatcctgcctccaaagcactttgcttttgtgaaatgcgtcagctcgtcgaaatacagccagtggatttccgcgccctgatacttgagcagcccttcgccctcgttgctcaggtggcagaagtggatgacgctcccgttgctcagccgcagctcatgcgcgctgg

SEQ ID NO: 27602 - DNA, 260 bp, Unknown
  Description of Unknown: RightRegion for integrase B1603 sequence
aaagacgacttgcctgaagatgatcagtggacttgcaagaccgacagccggagagattgagatgttcgggtgtaaaggaaaagaactggagaggattcgttctcgtgtggggtgtctgattgaagcaccggggctgtatggcaacatgaatgcatatacaaacctgaaaataaaatgtgaattgtttggtattcggaaaaagggatacatcgaagatatcttagagacggtcggactggaaggtgtcggaaagaaaaaaa

SEQ ID NO: 27603 - DNA, 260 bp, Unknown
  Description of Unknown: RightRegion for integrase B1604 sequence
ctgatgagtgggatcacgcacgagttcgtatactgcaatgaaacaaaaaaagagggctagaaatcaagcgatttctagcctttctgtgtatgtgaaaatcctgcctccaaagcactttgctttggtgaaatgcgtcagctcgtcgaagtagagccactggatctccgcgccctgataggtgagcatgtccttgccctcgttgctcaaatgacaaaaatggagcacactcccgttgaccagtctcatccggtgtgtgctcg

SEQ ID NO: 27604 - DNA, 260 bp, Unknown
  Description of Unknown: RightRegion for integrase B1605 sequence
aaaaacgaccactatgaaaatgctacttggattgacaaagccaacttccggcgaagttaaaatatggggaaagtctttgcaggggaatgaaaagaaattgttgccccgtatcggtagtctgattgagtcacccggtttttaccctaatttgactgctacggaaaacttacaaatttttgctaccttacggggcatacccaaccgtcattcaattaaaaacacattggatttggtaggattgccttataaagacaaaaaac

SEQ ID NO: 27605 - DNA, 260 bp, Unknown
  Description of Unknown: RightRegion for integrase B1606 sequence
gttgtcccgaatgcaaaggcatggttcaaatctgaaaaaagcacaacaaagaccgcatagattgtggtatactatttaaggtagcaaggcacctgctgttttatcagtagcaggtgcaatgatataaaaacattcataaggagggcttgattatggctgatcagactttaccattgaatgttagttatgagatgaaagcagacgatgaaagacagaattgtgtaggaatggagagcaacgaagaattgtgttcttcttca

SEQ ID NO: 27606 - DNA, 260 bp, Unknown
  Description of Unknown: RightRegion for integrase B1607 sequence
ctgatgagtgggatcacgcacgagttcgtatactgcaatgaaacaaaaaaagagggctagaaatcaagcgatttctagcctttctgtgtatgtgaaaatcctgcctccaaagcactttgcttttgtgaaatgcgtcagctcgtcgaagtacagccagtggatttccgcgccctgatacttgagcagcccatcgccctcgttgctcaggtggcagaagtggatgacgctcccgttgctcagccgcagctcatgcgcgctgg

SEQ ID NO: 27607 - DNA, 260 bp, Unknown
  Description of Unknown: RightRegion for integrase B1608 sequence
tattcacttgaaactaaatctcccaaaatagttaatgactgctcaggctgcaatcgctgaaaagaactaatcactacttgtaaaagtattttagggggttgcccatatggacagcccccatttttatatttattttgagtattcattcgaatactctttttttatattgtgccggttacagtaatagttgaaactccaggtgttatgctaactgcacctgtcgtgtcatcccttgtagttgtagcagaaggaactgtaat

SEQ ID NO: 27608 - DNA, 260 bp, Unknown
  Description of Unknown: RightRegion for integrase B1609 sequence
ctgataagtgggatcacgcacgagttcgtatactgcaatgaaacaaaaaaagagggctagaaatcaagcgatttctagcctttctgtgtatgtgaaaatcctgcctccaaagcactttgcttttgtgaaatgcgtcagctcgtcgaagtacagccagtggatttccgcgccctgatacttgagcagcccttcgccctcgttgctcaggtggcagaagtggatgacgctcccgttgctcagccgcagctcatgcgcgctgg

SEQ ID NO: 27609 - DNA, 260 bp, Unknown
  Description of Unknown: RightRegion for integrase B1610 sequence
ctggaagcaccggaatccctacaaacccaggacacagagaagccccggcaggcatcgtaaacacgatgacctgccggggtatcccaggaatcacttgttacccctgtgaggggggaacaaaactactcccgttgttgtcttaatacgaattctttttgaaaagcaaattccccaaaaacgaaatagtcacaattatacagaaagcagagatatggaagaataaacgaaacggaaatgcgcatatccgcaatatattacgc

SEQ ID NO: 27610 - DNA, 260 bp, Unknown
  Description of Unknown: RightRegion for integrase B1611 sequence
gttgttcctaatgcgaaggagtggtttaaggctgaaaaaagtgcaatacagccggcgtagattgtggtatactaaggtaacaaggcacttgtttctatatggtagggacaggtgccctgatataaaaacattcataaggagggcttgattatggctaatcagacacaaattttgaatgttagtgatgagatgaaattaaacgataatgtgcagatgaaaaatgtgaaagaacaggaagaaaatatgtattcttcttcatc

SEQ ID NO: 27611 - DNA, 260 bp, Unknown
  Description of Unknown: RightRegion for integrase B1612 sequence
aaggtagataatgcgaaagcagactacagagcaaatcagaaagggaaaaaggtgtcataaatggagcagaataaggcagagcgattgaatgaaaatgtaactgaaaaaatgtgttcatcagacggtaacgtggttggggaaatgtgttccccagccgatgccgacacacgtagaaagtgcagtaaaacttgtgagggaataaggggatttgcaggattttaggtgcaaagttcagtcgttttgccacccatttgccaccc

SEQ ID NO: 27612 - DNA, 109 bp, Unknown
  Description of Unknown: RightRegion for integrase B1613 sequence
agcatctgtacagatgccgcgaatcgagacagcggagcactttattttatggttttgtgaaacgttattcaaacagcagaatcaagaccgtcctgccattgcctcaccc

SEQ ID NO: 27613 - DNA, 260 bp, Unknown
  Description of Unknown: RightRegion for integrase B1614 sequence
aggaaaaacaacttttttaaatctgcgcgggaaaaaagggtttatactgatatcgcatgacagggatattttagatgcatgcattgatcatgtactggttttaaatcgaaagacgatcgaggtacagagcggcaatttttcaagctggtgggaaaacaagacgcggatggatcattttgcgatggaggaaaatgaaaaacatttgaaagaaatcgcatctttaaaacaggcggcggcaagaagccgaaagtgggcggata

SEQ ID NO: 27614 - DNA, 260 bp, Unknown
  Description of Unknown: RightRegion for integrase B1615 sequence
aaaattaaatcaatgacattcagaaacggtattacaaatacatttgtctatgatgattaaaagttataaatatttatttttatgaataatactggttatcataactgttggtgacgctatgtttttaaaaacaaatgcacccaaaacaggtaagttcagggtttaaagattgagttgaataaacatataacgaaattattcattaaaagtaggtttaaacgccctgcttttacaaaagtttgattgaataaaaactttat

SEQ ID NO: 27615 - DNA, 260 bp, Unknown
  Description of Unknown: RightRegion for integrase B1616 sequence
agagttgactcaatagtatttaaaaatggattaacacatacttttatatacaaaaaatagaaaaataacctagtaaacaacgtgaaagcattgatattactaggttatttcttcattgtgtaccagttcatctgacacccgaacgtaccacagcccacgacaggacggcggtgttttttctttgcccactggtcattaagttctctaaccttatccatgaacacttcctgttcttctaattttttagggtctaatacttt

SEQ ID NO: 27616 - DNA, 260 bp, Unknown
  Description of Unknown: RightRegion for integrase B1617 sequence
gacgggcatatagactccattcttttccgcaacggtttataccacaaatttatttattagtttgcaggaggtttattttgattagacactccagttatcactataaaatagcaattactattgttgcagttcttttcacggggatgtgtttttccgggtgtaaagataagcaagacgctccctcatccgcttcggtatccagtcagcaagagaagatttctgatccgacaaaagccagtgaaaaatcagtgcttgctaaa

SEQ ID NO: 27617 - DNA, 260 bp, Unknown
  Description of Unknown: RightRegion for integrase B1618 sequence
aaaattaaatcaatgacattcagaaacggtattacaaatacatttgtctatgatgattaaaagttataaatatttatttttatgaataatactggttaccgtaactgttggtgacgctatgtttttaaaaacaaatgcacccaaaacaggtaagttcagggtttaaagattgagttgaataaacatataaccaaattattcattaaaagtaggtttaaatcgccctatttttacaaaagtttgattgaataaaaacttca

SEQ ID NO: 27618 - DNA, 260 bp, Unknown
  Description of Unknown: RightRegion for integrase B1619 sequence
ttcatttctgcccaacgcacaaagtatcttcggccggaaatatttgcgccgcaaatgtgaaaagcgccggatgcttcgcacagcgcgccgaatgcactgtttttctgcacgccggtgcatttttcacgcaggacatacaaacacattgcaatatcctgccctatgcgacagcgcgaacgtcccaagaattaagactaattaagatgtcaccgtatgcttttcttgctataatactggccgcagaacaaaaaacaccatca

SEQ ID NO: 27619 - DNA, 260 bp, Unknown
  Description of Unknown: RightRegion for integrase B1620 sequence
gacgggcatatagactccattcttttccgcaacggtttataccacaaatttatttattagtttgcaggaggtttattttgattagacgctccaattatcactataaaatagcccttactattgttgcagttcttttcacagggatgtgtttttccgggtgtaaagataagcaagacgctccctcatccgcttcggtatccagtcagcaagagaagatttctgatccgacaaaagccagtgaaaaatcagtgcttgctaaa

SEQ ID NO: 27620 - DNA, 260 bp, Unknown
  Description of Unknown: RightRegion for integrase B1621 sequence
gatttttcttgtttgcagttggtattgtcgcggaatgaattcaaaaaggaggatgcatgacccatggtcgatcatatgctcgtgcgtggcgcaaaggtccacaacctgaaaaatattgacgtagacattccgctgggtaagatcgtcggcatcgcgggcgtgtccggttccggcaagtcgtcgctggcgctgggtgtgctgtacgccgagggctcgcgccgctatctggaggcgctgtcaacctacacgcgccgccggat

SEQ ID NO: 27621 - DNA, 260 bp, Unknown
  Description of Unknown: RightRegion for integrase B1622 sequence
gcgttaaacgagcaaaggcagggtatcactatgacggtggtatcctgccttttgctttgaggaatcaagttcgctttgtgcgaacttggtcgtcaccctatatgacgcattgggggcaatcgctgtgtacgtgcgtaccgggagagcgtgtacacctctggcaaggtgtaacacactagactttgttccaaagtctgtgtgccaaggggcatagcccctttggaatccctgcggagcgtgtacgcacgtacgcagggaac

SEQ ID NO: 27622 - DNA, 260 bp, Unknown
  Description of Unknown: RightRegion for integrase B1623 sequence
ggcgaggcgcagccgcacattgcgccgcccctaagcgaggtattcgagcttcccgcataataaaaaacagagaaaaaacgcaagaaagcggacagcaaccgctgtccgcctccttgcaagatatggtgtcaacttgtgtccttatgaacattacccgaacggttacagggttttgtcatgccctttgcacctttattgagctttacgccaaccagactgtttcgccggtcatgttccataagaccggcagccgtaggcgg

SEQ ID NO: 27623 - DNA, 260 bp, Unknown
  Description of Unknown: RightRegion for integrase B1624 sequence
gggcacccgacggcgcgtaaggcgcttgtgccttgcggcgcggcgtgccgcatggcataatacatacagcttttggaaaggcgggcacgggtgcctgcctttcataacactgcaaggagtctgccatgtcgataagaaaacgggccgccgccgcgcttgccgccctgctggggctctgcgtgctgctggccatccttgtaatggcctgtgccccgcgcaccgaaaccgccgacgttgcgatcctcatgtaccacgccttc

SEQ ID NO: 27624 - DNA, 260 bp, Unknown
  Description of Unknown: RightRegion for integrase B1625 sequence
aagaaacgtggagcgtcaacgctcctggccctgggcgaaaatgtagggcaggcggtttgaccgcttgccccggtttaatcggatggtagtcaacggcgctataagtgacaggaacatttttcgacattccgttttcgtgcaagttaaatgcctgcaagcaactaacaccaaaaaatatcttttgctaaaaccgcaccgcttgccataggataaaacgaaaggagaatattatgcaaaaagttaaaaccttgaaaagagtc

SEQ ID NO: 27625 - DNA, 260 bp, Unknown
  Description of Unknown: RightRegion for integrase B1626 sequence
aaggtggaaaatgcaaaaaaagattacaaagcaaatcagaaaggaaaaaaggtgtcataaatggagcagggtagagagatgttattgagtagaaaaatgtgcccatttgcttataacggggtaaattatatgttttctttatgcgataacgatgcatgtggagacggtatgtttgctgtcaaggaaagataaataagagctgaaaagtggcgtatttccgggctttttgctaggttagcatcatcagagaagccttgcag

SEQ ID NO: 27626 - DNA, 260 bp, Unknown
  Description of Unknown: RightRegion for integrase B1627 sequence
aaaattaaatcaatgacattcagaaacggtattacaaatacatttgtctatgatgattaaaagttataaatatttatttttatgaataatactggttaccataactgttggtgacgctatgtttttaaaaacaaatgcacccaaaacaggtaagttcagggtttaaagattgagttgaataaacatataaccaaattattcattaaaagtaggtttaaatcgccctatttttacaaaagtttgattgaataaaaacttta

SEQ ID NO: 27627 - DNA, 260 bp, Unknown
  Description of Unknown: RightRegion for integrase B1628 sequence
gatttttcttgtttgcagttggtattgtcgcggaatgaattcaaaaaggaggatgcatgacccatggtcgatcatatgcttgtacgtggagcaaaggtccacaacctgaaaaatattgacttggacattccgctgggtaagatcgtcggcatcgcgggcgtgtccggttccggcaagtcgtcgctggcgctgggcgtgctgtatgccgagggctcgcgccgctatctggaggcgctgtcgacctacacgcgccgccggat

SEQ ID NO: 27628 - DNA, 249 bp, Unknown
  Description of Unknown: RightRegion for integrase B1629 sequence
tcagcgtttttgagcatttatgcggcaggatttcccctaaaaatgtctgtgttattttaggaaaagtgcttcgcgaaaatccacgggaactggcttgacccacaccgtgacccacacggcgaaatgtccaaagagcggcggagaggatatgtatctcatcctctccgccgctcttttgtttttacatgacctgtgccatgaaattgcccatcttttcggcggcgctttcctgcatctgccgtgtgacgt

SEQ ID NO: 27629 - DNA, 260 bp, Unknown
  Description of Unknown: RightRegion for integrase B1630 sequence
gccgccgggttcccggcggcgtttgcttacagatgcagctgctgcttcaatgcagcttgaagcgttgcagagaaattgattccggcccgttccgccatgtcgttcagccaggagggaaccgtcagcgttttcttgacagctctattgtcaaaaaatttccggtattccactgtatcgcaggggataaaattcacaaactcccgctctcccaccggaacgtcgtgaattccggaaggggccgggattttctccccattctg

SEQ ID NO: 27630 - DNA, 260 bp, Unknown
  Description of Unknown: RightRegion for integrase B1631 sequence
aaggatgggcgaaaaggtattggttcacctaccactctgtatacaccctgttcagcgtaaaggacataatagccagtgtattggcataaatggcagactcaggccaggtagcgtagatttctgaagatacaacatttttgatgtaatcagtataacgtacataataattctgagcggtgggatcctgcggaacaccatcatggacaatgacgtattcaggaatgaccacacggctgaggacaatttcgccggattcatcc

SEQ ID NO: 27631 - DNA, 260 bp, Unknown
  Description of Unknown: RightRegion for integrase B1632 sequence
ggtgcggaaagcacgcacgggtataaagtgaaaggaagtcgtgtagccgaaatcttttaacggctgcatattctccctgccgtttactcatccgaatacgagtaagacaataaaaaacgtcgcagacaaaatcgtctgcgaacgttttttatggaaggtaaaaatgaaattatatattttacgctttgttgctgctgccgagaacgtttactatcttgtgtctcacacattcggtaataagagttcttgcaggtccgaga

SEQ ID NO: 27632 - DNA, 260 bp, Unknown
  Description of Unknown: RightRegion for integrase B1633 sequence
ggcgaggcgcagccgcacattgcgccgcccctgagtgaggtattccagcttcccgcataataaaaaacagagaaaaaacgcaagaagcggacagcaaacgctgtccgcccccttgcaagatatggtgtcaacttgtgtccctatgaacattacccgaatggttacagggtttttattttgtcaggtacacacgaaggtacacacttttcattttgccttgataatttcagaaaatgcttcttcagtaaaggcggctgcct

SEQ ID NO: 27633 - DNA, 260 bp, Unknown
  Description of Unknown: RightRegion for integrase B1634 sequence
accacagagcctgctcctgccgcaaggcatcaaagcagcagtccagatacattttgttgaccgccgcaaaaatggtgctgcgcagcagcagacgctcgtcgttgagcacagtctccggctgggctgccttgccgccgaacaccacagaaagactgccctccagttcctcgcagaagatatcgtaggctgtcccggcggagcagtgctcccgctgcattttgaacagggtgtcgatattttcgatcgagagcaccgttttg

SEQ ID NO: 27634 - DNA, 260 bp, Unknown
  Description of Unknown: RightRegion for integrase B1635 sequence
tttaacaaatttttgctgcttttctgttcacgccagggatgcggctgttgtgattgctaataacatatgctctaatgaaaaagaatttgttaagttaatgaataagaaggccttagaaataggaatgactggtactacttatatgaatagtcatggtcttgatgaagaaactaaaaattattctacggctcatgatatggctttactttctagttatatttatagaacttcaaaagaatatcgaaaaattacaaagactt

SEQ ID NO: 27635 - DNA, 260 bp, Unknown
  Description of Unknown: RightRegion for integrase B1636 sequence
ggcgaggcgcagccgcgcattgcgccgcccctgagtgaggtattccagcttcccgcataataaaaaagcagagaaaaaacgcaagaaagcggacagcaaacgctgtccgcccccttgcaagatatggtgtcaacttgtgtccctacgaacattacccgaacggttctaaggttttttcgtacccaaatttgaggttgggataaaaagataccgaagtgaatatcgaggggttagacaggatttgaaccgaagcccccgcc

SEQ ID NO: 27636 - DNA, 260 bp, Unknown
  Description of Unknown: RightRegion for integrase B1637 sequence
caacagcttattgatacaatggaaagagtaaaacagaaaaatgcggagaaatccgcttaaataaagaaaaaggtgtaacccctttatcgggattacaccataattccttaaatactgccttattagcccgtggctaactactaccgtgtttcgtcctctgtcagccattccatactaaccctcagcacttccgcaaatacttttagctcataatctgttacaaatcttgtgccgatctctatacggcttatgctgtctct

SEQ ID NO: 27637 - DNA, 260 bp, Unknown
  Description of Unknown: RightRegion for integrase B1638 sequence
gacggtcatatagactccattcttttccgcaacggtttataccataaatttatttattagtttgcaggaggtttattttgattagacgctccaattatcaccataaaatagccattactattgttgcagttcttttcacagggatgtgtttttccgggtgtaaggatacgcaagacgctcccccatctgcgtcggtatccagtcagcaagagcaggtttctgattcgacaaaagccagtgaaaaatcagtgcttgctaaa

SEQ ID NO: 27638 - DNA, 260 bp, Unknown
  Description of Unknown: RightRegion for integrase B1639 sequence
gacgggcatatagactccattcttttccgcaacggtttataccacaaatttatttattagtttgcaggaggtttattttgattagacgctccaattatcactataaaatagcaattactattgttgcagttcttttcgcagggatgtgtttttccgggtgtaaagataagcaagacgctcccccatctgcgtcggtatccagtcagcaagagaaggtttctgattcgacaaaagccagtgaaaaatcagtgcttgctaaa

SEQ ID NO: 27639 - DNA, 260 bp, Unknown
  Description of Unknown: RightRegion for integrase B1640 sequence
aaaattaaatcaatgacattcagaaacggtattacaaatacatttgtctatgatgattaaaagttataaatatttatttttatgaataatactggttaccataacggttggtgacgctatgtttttaaaaacaaatgcacccaaaacaggtaagttcagggcttaaagattaggttggataaacatataaccgaattattcattcaaagtaggtttaaacgccctgcttttacaaaagtttgattgaataaaaacttcat

SEQ ID NO: 27640 - DNA, 260 bp, Unknown; identical to SEQ ID NO: 27638
  Description of Unknown: RightRegion for integrase B1641 sequence

SEQ ID NO: 27641 - DNA, 260 bp, Unknown
  Description of Unknown: RightRegion for integrase B1642 sequence
tttgttttggggcaaatcgggtgcgaatcaactaccaatttcaactgttttgtgctataatggaagcgaaaacggcagagggggaatggaaaatgaaaaagctgcttgctgtgtgcctgatggcgctcgtttgctgggtttgcgcggggtacgcggaagaaacgcgggttggcgatacggtcattttcgggcagtatgagcaggatggcaatctggataacggcagcgagcccattgcgtggctggtgctggatgtgcag

SEQ ID NO: 27642 - DNA, 260 bp, Unknown
  Description of Unknown: RightRegion for integrase B1643 sequence
aggaaaaacgacttttttaaatctgtgcggcaaaaaagggtttattctgatatcgcatgacagggatattttagatgcattgatcatgtactggttttaaatcgaaagacgatcgaggtacagagcggcaatttttcaagctggtgggaaaacaagacgcggatggatcattttgcgatggaggaaaatgaaaaacatttgaaagaaatcgcatctttaaaacaggcggcggtaagaagccgaaagtgggcagataaaaa

SEQ ID NO: 27643 - DNA, 260 bp, Unknown
  Description of Unknown: RightRegion for integrase B1644 sequence
aaaattaaatcaatgacattcagaaacggtattacaaatacatttgtctatgatgattaaaagttataaatatttatttttatgaataatactggttaccgtaactgttggtgacgctatgtttttaaaaacaaatgcacccaaaacaggtaagttcagggtttaaagattgagttgaataaacatataaccaaattattcattaaaagtaggtttaaatcgccctatttttacaaaagtttgattgaataaaaacttta

SEQ ID NO: 27644 - DNA, 260 bp, Unknown
  Description of Unknown: RightRegion for integrase B1645 sequence
gatttttcttgtttgcagttggtattgtcgcggaatgaattcaaaaaggaggatgcatgacccatggtcgatcatatgctcgtgcgtggcgcaaaggtccacaacctgaaaaatattgacgtggacattccgctgggtaagatcgtcggcatcgcgggcgtgtccggttccggcaagtcgtcgctggcgctgggcgtgctgtatgccgagggctcgcgccgctatctggaggcgctgtcgacctacacgcgccgccggat

SEQ ID NO: 27645 - DNA, 260 bp, Unknown
  Description of Unknown: RightRegion for integrase B1646 sequence
ttatttgtcagaactaatgaactgcaagttgagtgcgtggtgaagctgacgcgcggataaaagaagtggagatgtaaaatggcgatacctaagtacaacgaactatatgaccccttccttaccgcaatcagcgatggaaaaattcatactgctaaagaagttgcctctactgtagcaaatattcttcagctttccccggaagatttagctgagcagctgccgagccagcggcagactacgtttgtcaatcggttgaattg

SEQ ID NO: 27646 - DNA, 260 bp, Unknown
  Description of Unknown: RightRegion for integrase B1647 sequence
aaaattaaatcaatgacattcagaaacggtattacaaatacatttgtctatgatgattagaagttataaatatttatttttatgaataatactggttaccataactgttggtgacgctatgtttttaaaaacaaatgcacccaaaacaggtaagttcagggtttaaagattgagttgaataaacatataaccaaattattcattaaaagtaggtttaaatcgccctatttttacaaaagtttgattgaataaaaacttta

SEQ ID NO: 27647 - DNA, 260 bp, Unknown
  Description of Unknown: RightRegion for integrase B1648 sequence
gagacagagcgcagaatacggcgtgaagttttcgggttttacgggcgtttccgtgaataggaatagaataagaaaagccatgtacgaagatgtatacttcgtatgtggctttttttgatgctgtgttacagtgcagtgataatgaatcagcgagatgctcatataaagaaagagactgattcaacggccgggccattcggtgcggcgcgcactccactgttcgttcagccagccgaccacctgctctttgccctccggcg

SEQ ID NO: 27648 - DNA, 260 bp, Unknown
  Description of Unknown: RightRegion for integrase B1649 sequence
aaaattaaatcaatgacattcagaaacggtattacaaatacatttgtctatgatgattagaagatataaatatttatttttatgaataatactggttaccataactgttggtgatgctatgtttttaaaaacaaatgcacccaaaacaggtaaattcagggcttaaagattgaattgaataaacatataaccaaattattcattcaaaacaggtttaaatcgccctacttttacaaaagtttgattgaataaaaatttat

SEQ ID NO: 27649 - DNA, 260 bp, Unknown
  Description of Unknown: RightRegion for integrase B1650 sequence
gatttttcttgtttgcagttggtattgtcgcggaatgaattcaaaaaggaggatgcatgacccatggtcgatcatatgctcgtgcgtggcgcaaaggtccacaacctgaaaaatattgacgtagacattccgctgggtaagatcgtcggcatcgcgggcgtgtccggttccggcaagtcgtcgctggcgctgggtgtgctgtacgccgagggctcgcgccgctatctggaggcgctgtcgacctacacgcgccgccggat

SEQ ID NO: 27650 - DNA, 260 bp, Unknown
  Description of Unknown: RightRegion for integrase B1651 sequence
caacagcttattgatacaatggaaagagtaaaacagaaaaaagcggagaaatccgcttaaataataaagaaaaaggtgtaaccccctttatcgggattacaccataattccttaaatactgccttattagcccgtggctaaacgtgcggggcgttttgcgtatatttttatttgagcgagttgccggcgctgaacgcctttgcgactgcctcgccgaggacaacataggtgttgttgaacgggtcgaaggttatcggctg

SEQ ID NO: 27651 - DNA, 260 bp, Unknown
  Description of Unknown: RightRegion for integrase B1652 sequence
gacaacgagagtacagatgagacggtctgtcaaattatccctcaaaaaagatacacctaagattgaggttacaatggagcctgatgaagagagtaattatacaccacaagaaaaggctacttattcaaagattaaggaatatgtgaaggaaaagtatggtgtgaatgtgcatacttcttatattgcacaggtaaagcggatgtgtggtctggacatgggtgagaattataataagtccaagaaagagaatccagaggtaa

SEQ ID NO: 27652 - DNA, 260 bp, Unknown; identical to SEQ ID NO: 27620
  Description of Unknown: RightRegion for integrase B1653 sequence

SEQ ID NO: 27653 - DNA, 260 bp, Unknown
  Description of Unknown: RightRegion for integrase B1654 sequence
gagacagagcgcagaatacggcgtgaagttttcgggttttacgggcgtttccgtgaataggaatagaataagaaaagccatgtacgaagatgtatacttcgtatgtggctttttttgatgctgcgttacagtgcagtgataatgaatcagcgagatgctcatataaagaaagagactgattcaacggccgggccattcggtgcggcgcgcactccactgttcgttcagccagccgaccacctgctctttgccctccggcg

SEQ ID NO: 27654 - DNA, 260 bp, Unknown
  Description of Unknown: RightRegion for integrase B1655 sequence
atctataatattactttcaaaaatggaatagtacatcactttatatataaaaatcagtaaaaatcatcaaaaatacccaagtggtttttacttacagccacttgggttttactatatcatatttgattatacacacggacaaccgcaaggtaattattgacaccactttcttcttttctttttccatattcagtttatcctctcctatttgttctatcatttcttcttatgccaaaatccatcatctattctgattttgg

SEQ ID NO: 27655 - DNA, 260 bp, Unknown
  Description of Unknown: RightRegion for integrase B1656 sequence
ttggacaacgaacagcaagttgagaccgtcgtggaactatcacgcaaaatcaaggattgacggactatctgacatctttattggttgccctgcctacctcttgcctacgcttttttgagtggtaggcaaggttgctatgatatagcatctgccaggattacaatggcatcgttctgcattttttccgtgttaaacacataacggtccatggtggtcttgatgtccttgtggcccagacgctccatgacggtcttgggctg

SEQ ID NO: 27656 - DNA, 260 bp, Unknown
  Description of Unknown: RightRegion for integrase B1657 sequence
tgttgggacaacgaaagtaccgttgaaactgtttgtttgctggcaagaaaagataaataaaggctgaaaagtggcgtatttccgggctttttgcgaggttagtatcatcagagaagccttgtggaaagctcggttttcttgcatggaaacatatctactttttagtctgactggagaaaaagtgaatgatcgaaaaaatacagtagggtttaggctgcggattagatgtcataggttgtggcactgggattgttgtcaga

SEQ ID NO: 27657 - DNA, 260 bp, Unknown
  Description of Unknown: RightRegion for integrase B1658 sequence
atctataatattaccttcaaaaatggaatagtacatcactttaattataaaaatcaataaaaatatcaaaaatacccaaatggtttttacttacagccatttgggttttactatatcatatttgattatacacacggacaaccgtagtgtataaaaagctactctttttgccatgtttatttccccttttttagcaagaaagcccctttatttggggtttcttgttttattcattatttacagtctcagcagttttgttt

SEQ ID NO: 27658 - DNA, 260 bp, Unknown
  Description of Unknown: RightRegion for integrase B1659 sequence
cgcgggaaaaagtacgttattaaagattattgcaggagtcttaaaaccaactgctggtaaggttacacttaaaggaaatgtagtgccgatgctggaacttggctccggatttgatcaggagctaagcggaagcgaaaatatattccttaacggctcgatccttggatacgataaggaattcctggaatctaagtatgatgagatcgtggaattttctgaactgaaggaatttattcatatgccgatccgcaactactctt

SEQ ID NO: 27659 - DNA, 260 bp, Unknown
  Description of Unknown: RightRegion for integrase B1660 sequence
gcaatctatatggtcggcggagtcttcgttttggtctgtccgctcgacgcggaagaataaaaaagaggctactgcacaggattgttcctgcgcggtagcctctttgtgttttttcatagccataacggatttcgttataatctaccaaaatccagcgagattctaaaatcgttgttagaatctaccgtaaaggagcatggctatgattaggattttactgtccacccggcttggcgagcggaggtggtcacaagctgacc

SEQ ID NO: 27660 - DNA, 260 bp, Unknown
  Description of Unknown: RightRegion for integrase B1661 sequence
cgcaggtgtcatagttattcagaagtacttcttcgattgtatcggcaaacggcagtgtaatgccgtctgcgagagaagttgtgaagatcagaatatcgtttttttcatcctttcgacggtatgccaaaacgccgctcaccgtctcgtattccggaatcagcgttccgtagaggaaggtttcttccagatcttcacgtcgtcttactgccaccattttgcggtagaaccacagcagggaatcaggatctttttcctcggcc

SEQ ID NO: 27661 - DNA, 260 bp, Unknown
  Description of Unknown: RightRegion for integrase B1662 sequence
aaagaacttcccttggaaactgaaacaactgttgagacggtttgcctgctggtgaagtaaggcggtaagtttgaaacctatttggcctttttgctatgcgcggccctgcacgatacatggcagaaagcgctgtgctgtccgattctggtcgtggacggcacggcgcttctggacgaaacggcagcccgcgtggagggattgctatgatctgcaaactgacccctgaagaagaagtccggatgcacattcttttgaaaggg

SEQ ID NO: 27662 - DNA, 260 bp, Unknown
  Description of Unknown: RightRegion for integrase B1663 sequence
ttatttgcacattcgattcctgaccgctctcctgctacaatgattgcagaaaatcattaggaggacggaacaatgaaaaaaatcaacacagacgaaaggacaggcttgcactatgagcttgtcggggactactaccttatcgccggggatgatgggccggaggaagatcagccaatcggggtatggggacagcggcatctccactatctcaaggagcatcgccgtgggcgctatgccaccctgctgaccagcggtgaatt

SEQ ID NO: 27663 - DNA, 260 bp, Unknown
  Description of Unknown: RightRegion for integrase B1664 sequence
aaaattaaccttgacgattatttacctgaatcccgaatgactaataacgatatggtatagaaacaaagggtatgattttacgatcacttcatctacagcattcgatcataagtggataccggaaagaaatgtatatgaaagcatttccgtgatcgtagatgaattgtttgcaaattatctttcaagaccgaacgtgcggcagccgatattgacacagtattgtgacgggaaaatggtgagctgtccgaattggttgacct

SEQ ID NO: 27664 - DNA, 260 bp, Unknown
  Description of Unknown: RightRegion for integrase B1665 sequence
aacaccatgttcatgataggcatgttgtttgggtacacagcaaagcaccgccatccctgagaggggtcggcggtgctttctcattctccagtaaaaccgttggcttttgcacagcgaagtgcattgaggatcaggagatctcgttccagctccttctctctactccggtaggtcgatacagggccggaacccatcaggttccgtttgtcccgtaccaccttgccgatgtagtatgagatcacatcatcaatgtccatgct

SEQ ID NO: 27665 - DNA, 260 bp, Unknown
  Description of Unknown: RightRegion for integrase B1666 sequence
aaaacaggaacgaaacagactcttgctgattggggacgattgatcattcaaactctctaagctcaacataacagattctacggcagcaatcaatttttcgattgctgcctttttattttttaccgtttcagaacagcatatttatttaaaaattcaagaccatgttttgaattttatcaaaaataaatgttgaattttcctcttgtttactattaagttttccaattttttctttatattggaatgtaaccaaaaaaatt

SEQ ID NO: 27666 - DNA, 260 bp, Unknown
  Description of Unknown: RightRegion for integrase B1667 sequence
agccggaaaaaccacaactatgaaaatgctgttgggtttaacgaagcctacttccggtgaggtcaaaatctggggaaagtctttgcaaggaaatgaaaagaagttgctgccccgcattggcagtttgattgagtcccctggtttttatcccaatctgaccggtacggagaacctgcgtatctttgctaccctgcgtggagtaccaaacaatcatgccatcaaagacgctctggatttggtcgggctaccttataaggata

SEQ ID NO: 27667 - DNA, 260 bp, Unknown
  Description of Unknown: RightRegion for integrase B1668 sequence
tactacaaaggtatcgggattttggaaatgtccaaagtatttgatagcaggcaaaaatgaaagaaacggcatagccgaagctataccgtttctctctcgccttagaatgttttcttaactggacacccctaaacgtgtggtgtttttctttttatacagacgcagaaaaaggcgggagcttcccacaaaagggaaagccaccgcctttgttgatcatcggatgagccagccgtaatcctgtctgcaatctaccacatgat

SEQ ID NO: 27668 - DNA, 260 bp, Unknown
  Description of Unknown: RightRegion for integrase B1669 sequence
agcaggaaagacaacactgttcaattgcatcaatttagatattaccaaggatgcaggtgagtgttatctgataaagaatggtcagaagcaacaggtgactccggagcacgtgggatatgtgctctcggcgccgactgtgccggagttcctgacagcaagggagttccttaagttttttatagatatcaatagcgatacaatgtcactaataaaaccgcttgatgcatattttgatgagatgaggattgaacctgaggaca

SEQ ID NO: 27669 - DNA, 260 bp, Unknown
  Description of Unknown: RightRegion for integrase B1670 sequence
atcgcaatcgctgacgctggattgcgattttgttgctctaatttgataattgatccatagtgttcagatcatacacgccgctatgagcatccgggctgcagcctgcggtgcggtcatgccggagccgggcggcttgcgcatacagggtgcagagaagcgtttcgcaggagtgcgatcattttaacatattctgcttaaacccatagcctctttttcaaatgctccatgaaatttatcaaatcgtgcacaaaacgacaaaa

SEQ ID NO: 27670 - DNA, 260 bp, Unknown
  Description of Unknown: RightRegion for integrase B1671 sequence
  modified_base (1)..(7): a, c, t, g, unknown or other
nnnnnnnaaaaggtgcgatttacggatttatcggaagaaatgttccaagatacatactgaaagtatgatccactacttagaggattatatgtactgtactagaaagctggggctttatgtgcagttagtagcataaattatataggggttatctaaatatatttacctcctgtgattaagttatataaagactaaatcacaggaggtttatttttatgataacagtagaaaaactggaaaaaggtacttattttgatgat

SEQ ID NO: 27671 - DNA, 260 bp, Unknown
  Description of Unknown: RightRegion for integrase B1672 sequence
atctataatattaccttcaaaaatggaatagtacatcactttaattataaaaatcaataaaaatatcaaaaatacccaaatggtttttacttacagccatttgggttttactatatcatatttgattatacacacggacatcctaaagtacaaaacgctactgttttcatataattcctctttctattattacttagaatattataacatatatgtcaagaaaaaataaaatggcaacttaaaagttaccattttttatt

SEQ ID NO: 27672 - DNA, 260 bp, Unknown
  Description of Unknown: RightRegion for integrase B1673 sequence
tccgtagcccccataaaaacaaaaacagaatccgtcgttgcaacggattctattgcttgacgaatgtggtgcgtaaaaagtaaagcgcccgcgccctaaaaacagcccgcggggctgtttttgccccgcggtacgctggacgcggggcccgggcttttcgattcccacacgggtcaccttttacgcccgacacctattaaaaagcgcatacaaagaaaaaagcactacctcaaatgaagtagtgctttttggtgaaccaa

SEQ ID NO: 27673 - DNA, 91 bp, Unknown
  Description of Unknown: RightRegion for integrase B1674 sequence
gcgacggtacgcccatttttatgcagttattacaggatgctgatgcggcctgcgccgtagggattctcgtaatccagcagatagcccgggt

SEQ ID NO: 27674 - DNA, 260 bp, Unknown
  Description of Unknown: RightRegion for integrase B1675 sequence
tactataagggtattggagccctggaagtatccaaagtcacttcatcaaggcaagaatgagaaaaacggcatagccgaagctataccgtttctctcttgccccacgatgttttcttatcgggatgtgccttgcggagcgctctggttgctatcaaagaaggtccatgactgcgcctatttccatactagcttcataagcacatgcgttaatcattagctgtatgtcatccacgtcatgccctgttttttctttcagcttt

SEQ ID NO: 27675 - DNA, 260 bp, Unknown
  Description of Unknown: RightRegion for integrase B1676 sequence
gattgggacaacgagagtacagatgagactgaggtgggactacacagaaaggatatgtagaaatccttgaatttacgcactttgtagagtttttcagtttcaacaaaattagtgaaaatcacagggaaaaagagcttgtgaggaaagtaactgttgttgtagcgttagacctcggttgtgggaacacaaagaattctgaatatgaaagtgaatagagagctatcagatatattgatagaacatagggatacttgaaagag

SEQ ID NO: 27676 - DNA, 260 bp, Unknown
  Description of Unknown: RightRegion for integrase B1677 sequence
aggcggaagaaggtgtcgagtcgcagcgagacggatgaaggggaacgcagcagccgttagcaaaacgatataacatcccgccgcagcggcgttcctcgttcctccctctcgttcccccttcccgcccatcctttcccagctccttccagctaactgccagcgccctcgtcactcttccgcattattcgcctgcaatcgcgcgggataaaaaacattgcttcattatagtgcatcacaaaatttggatgttattcttattt

SEQ ID NO: 27677 - DNA, 260 bp, Unknown; identical to SEQ ID NO: 27675
  Description of Unknown: RightRegion for integrase B1678 sequence

SEQ ID NO: 27678 - DNA, 260 bp, Unknown
  Description of Unknown: RightRegion for integrase B1679 sequence
tatcttttgggctttttgcggaaaaccgggatgttcccgcagataagcgggtccccataacaaaagggaccgccgtacagcaagctgctgtacggcggtctcttcttcttttttcagttccgcgggatggccattcggcgctctgctttctttacgagccatgctcccgcccatccgcaggcggctcccaaaatggcaccgcccagaatatccgtcgggtaatggacacagaggtacatccgcgagaatgcgatgagaac

SEQ ID NO: 27679 - DNA, 260 bp, Unknown
  Description of Unknown: RightRegion for integrase B1680 sequence
tgcgaacctgatggaacaggtaaagcggggaaaaggtggcaaaaagaagcggaatggtgaggatatccgtggtgctgtcgttgtctttgtgattggggcggctgcttcgatcattctggttgccttttctttaggaagccgtctgtaccagacgcagagacagaaacgtctgaatacggaaattacaaaaaatgagtcagcagaaacgatttacaatgagtataaatcgatgaaggaaaagtacagccagtatgagcaaa

SEQ ID NO: 27680 - DNA, 260 bp, Unknown; identical to SEQ ID NO: 27675
  Description of Unknown: RightRegion for integrase B1681 sequence

SEQ ID NO: 27681 - DNA, 260 bp, Unknown
  Description of Unknown: RightRegion for integrase B1682 sequence
ccattttgcagacggatttgcagacgcaatcagtccttgcccttgacgatgctgcagtagtaagcggacatcctggcctttggccccagtccgtccggcatctatacggatacaccatgataaaaataaggccatctgcctttggcagatggccttatttttgggcttcgcccgcgcggcgcgcgggaacgaatttactcgatggcgtgcaggaagtcctcccaggcgttgtccacggcgttacccatgtgctgcatggt

SEQ ID NO: 27682 - DNA, 260 bp, Unknown
  Description of Unknown: RightRegion for integrase B1683 sequence
tctatattagatgtaattcaagaagatataagtaataatgagggtttaaggctgttgtaaaatgtaccaaccaagattcattgtatagtacaatttacaaccgatatgttgactaatgtttaagtatatttgattaccgaaaagtgcgtacatcaaatatacttatttatttgtcaaaaagcttgactttttattgtatttatgatacatttttggtaacaagtaaatagtacggttatcaaaacggtaaacgtaaatag

SEQ ID NO: 27683 - DNA, 260 bp, Unknown
  Description of Unknown: RightRegion for integrase B1684 sequence
tgtgatgaaagggatttcccttttttgcgaagcatgcttgggaacttcgtgctatgctgagcacagtaattcgcgcaggggcgcagaaacggggcagcagatgtatttgtgggtgatcgcggcggtagctgcatattttatcaagggcctgtgcggctttgccaatacgctcgtgctcacgtcgatcctgagcttcggcgcagccaacgccaacatctcgcctatcgacctgctgctgggctatcccgccaatctgatcc

SEQ ID NO: 27684 - DNA, 260 bp, Unknown
  Description of Unknown: RightRegion for integrase B1685 sequence
tactacaagggcatcggagccttggaaatgtcgaaagtcacggcatcaatggaaaaatgagaaaacggtacagccgaagctataccgttctctctttcctcacgatgttttcttatcgggagcagcctttcggatgtctcttttttgttggtgcgcgaggcgggacttgaatttaacaaagagaattttcagcaacaaattacatcaaattatgtgatattcagttctgaaactataaaacatggtatcagtcagtccag

SEQ ID NO: 27685 - DNA, 260 bp, Unknown
  Description of Unknown: RightRegion for integrase B1686 sequence
tactataagggcattggagccctggaagtatcgaaagttacttcatcaaggcaagaatgagaaaaacggcatagccgaagctataccgtttctctcttgccccacgatgttttcttatcgggaggcacctttcggggttcgcctttttttgtttgggttggaagtcatcgccccagtaatcgaacgcgaaatatagcttgagttcatccccgtctacttcaatgagccgcacgaacgtctcgatgatttcagccgcatct

SEQ ID NO: 27686 - DNA, 260 bp, Unknown
  Description of Unknown: RightRegion for integrase B1687 sequence
cagaagccatacagaccaaggaatagaaaggggaatgtcagaagccaaggggacacataaaaagccactttccctgtccccttggctttcttttttattgacgaatacacaaaaataaggatataatccttactagaagattgacgaggagaagttgaatgagtcaggacattattaataatcgttttttggaagagtcggtatttgctattgcggatgggtactgcgtgatcaatctcacaaagaatatcgtacgtggt

SEQ ID NO: 27687 - DNA, 109 bp, Unknown
  Description of Unknown: RightRegion for integrase B1688 sequence
gcaggcgatctacaacattcccgccgcgccacgccgatcgtcaggctagcgcattggtagcttcatgagttcctgccggtccgcaaagcttaagtccgttcaggtgctg

SEQ ID NO: 27688 - DNA, 260 bp, Unknown
  Description of Unknown: RightRegion for integrase B1689 sequence
tatcttttgggctttttgcggaaaaccgagatgttcccgcagataagcgggcccccataacagaagagatcgccgtacagcaagctgctgtacggcgatttcttcttcttttttcagttccgcgggatggccattcggcgctctgctttctttacgagccatgctcccgcccatccgcaggcagctcccaaaatgacgccacccagaatatccgtcgggtaatggacacagaggtacatccgcgagaatgcgatgagaac

SEQ ID NO: 27689 - DNA, 260 bp, Unknown; identical to SEQ ID NO: 27675
  Description of Unknown: RightRegion for integrase B1690 sequence

SEQ ID NO: 27690 - DNA, 260 bp, Unknown
  Description of Unknown: RightRegion for integrase B1691 sequence
cgtgtggcttcgatagagtttaaaaatggactcattcacgagttcctttacagagagtgagagcaggctgaggaggcagcctgctctcttttttgtatgtatgagtaagattagattaacaagaaaggttgattttacaaggttttaggcatcttgtttttagagttcatctgacacccgaatgtctttacaaaataagtcataggacggccgatttctttagatttcttttcaacaaaatcctttgcctttgccatgta

SEQ ID NO: 27691 - DNA, 260 bp, Unknown
  Description of Unknown: RightRegion for integrase B1692 sequence
cgtgtggcttcgatagagtttaagaacggactcgttcacgagttcctttacagagaataagagcaggcttaggcagcctgctctctttatgtgtgtatgagtaagattagattaacaagaaaggttgattttacaaggttttaggcatcttgtttttagagttcatctgacagccgaatgtctttacaaaataagtcataggacggccgatttctttagatttcttttcaacaaaatcctttgcctttgccatgtagtaa

SEQ ID NO: 27692 - DNA, 260 bp, Unknown
  Description of Unknown: RightRegion for integrase B1693 sequence
cgcgtagcttcgatagagtttaagaacggactcgttcacgagttcctttacagagaataagagcaggctgaggaggcagcctgctctctttatgtgtgtatgagtaagattagattaacaagaaaggttgattttacgcggttttaggcatcttgtttttagagttactcaaaaggcggcgggtaacccgccacaccttgcccttgcagagggcaatcaccctccgaagtcgggtgatttcttattatgaactgataata

SEQ ID NO: 27693 - DNA, 231 bp, Unknown
  Description of Unknown: RightRegion for integrase B1694 sequence
cgtgtggcttcgatagagtttaaaaatggactcgttcacgagttcctttacagagagtgagagcaggctgaggagacagcctgctctcttttttgtatgtatgagtaagattagattaacaagaaaggttgattttacaaggttttaggcatcttgtttttagagttcatctgacacccgaaggtcttgacgaaataagtcatgggacggccgatttctttagatttcttt

SEQ ID NO: 27694 - DNA, 260 bp, Unknown
  Description of Unknown: RightRegion for integrase B1695 sequence
cgcgtagcttcgatagagtttaagaacggactcgtgcacgagttcctttacagagagtgagagcaggctgaggaggcagcctgctctctttttatgtgtatgagtaagatcagattaacaagaaaggttgattttacaaggttttaggcatcttgtttttagagttcatcgtgcagccgaaggtctttacaaaataagtcataggacggccgatttctttagatttcttttcaacaaaattctttgcctttgccatgtag

SEQ ID NO: 27695 - DNA, 260 bp, Unknown
  Description of Unknown: RightRegion for integrase B1696 sequence
cgcgtggcttcgatagagtttaagaacggactcgttcacgagttcctttacagagaataagagcaggcttaggcagcctgctctctttatgtgtgtatgagtaagattagattaacaagaaaggttgattttacaaggttttaggcatcttgtttttagagttcatctgacacccgaaggtctttaaaaacaaggttagtggtcttcccagttcttcggactttttcttgacatactgcctagcctttgccatgtagtag

SEQ ID NO: 27696 - DNA, 260 bp, Unknown
  Description of Unknown: RightRegion for integrase B1697 sequence
cgcgtggcttcgatagagtttaagaacggactcgttcacgagttcctttacagagaataagagcaggcttaggcagcctgctctctttatgtgtgtatgagtaagattagattaacaagaaaggttgattttacaaggttttaggcatcttgtttttagagttcatctgacagccgaaggtctttacaaaataagtcataggacggccgatttctttagatttcttttcaacaaaatcctttgcctttgccatgtagtaa

SEQ ID NO: 27697 - DNA, 260 bp, Unknown
  Description of Unknown: RightRegion for integrase B1698 sequence
cgcgtggcttcgatagagtttaagaacagactcgttcacgagttcctttacagagagtgagagcaggctgaggaggcagcctgctctcttttttgtatgtatgagtaagattagattaacaagaaaggttgattttacaaggttttaggcatcttgtttttagagttcatctgacagccgaaagtctttacaaaataagtcataggacggcagatttctttagatttcttttcaacaaaatcctttgcctttgccatgta

SEQ ID NO: 27698 - DNA, 260 bp, Unknown
  Description of Unknown: RightRegion for integrase B1699 sequence
cgcgtagcttcgatagagtttaagaacggactcgtgcacgagttcctttacagagagtgagagcaggctgaggaggcagcctgctctctttttatgtgtatgagtaagatcagattaacaagaaaggttgattttacaaggttttaggcatcttgtttttagagttcatcgtgcagccgaaggtctttacaaaataagtcataggacggccgatttctttagatttcttttcaacaaaatcctttgcctttgccatgtag

SEQ ID NO: 27699 - DNA, 236 bp, Unknown
  Description of Unknown: RightRegion for integrase B1700 sequence
cgtgtggcttcgatagagtttaagaacggactcgttcacgagttcctttacagagaataagagcaggctgaggaggcagcctgctctctttatgtgtgtatgagtaagattagattaacaagaaaggttgattttacaaggttttaggcatcttgtttttagagttcatctgacagccgaaggtctttacaaaataagtcataggacggccgatttctttagatttcttttcaaca

SEQ ID NO: 27700 - DNA, 260 bp, Unknown
  Description of Unknown: RightRegion for integrase B1701 sequence
aaatggagcgggaaagacaacaacgcttcgcatgttagcaacgctgatcaaaccggataaaggtgatgctctgattgacggaagcagtattgtgacagatccgaacggtgttcggaaaaagatcggatttctgacgagtgaattaaaactggaagaattttttactccgaactatctgtttgattttttctcagaattatacggtgtcgatcaggcagagcgggatgagagaaaacgtatcctgtttcagaaatttggtg

SEQ ID NO: 27701 - DNA, 260 bp, Unknown
  Description of Unknown: RightRegion for integrase B1702 sequence
gataagaactggaaaccagaagaagaaataccaggtccattacaagaatttggaatttaagctaatgaagatgattaagattttaggtttaattttatctatgaattcttgcttggcattggcaaccgtagaccaagaaatgcgtagaccgctaacctatagagaagatgctttcattgatggagcacataagacattgaaattgctatgtcaaaagaccaccagtaattacgatgaatacagaaaatgttatgaggaat

SEQ ID NO: 27702 - DNA, 257 bp, Unknown
  Description of Unknown: RightRegion for integrase B1703 sequence
cgtgtggcttcgatagagtttaagaacggactcgttcacgagttcctttacagagaataagagcaggctgaggaggcagcctgctctctttatgtgtgtatgagtaagattagattaacaagaaaggttgattttacaaggttttaggcatcttgtttttagagttcatctgacagccgaatgtctttacaaaataagtcataggacggccgatttctttagatttcttttcaacaaaatcctttgcctttgccatg

SEQ ID NO: 27703 - DNA, 260 bp, Unknown
  Description of Unknown: RightRegion for integrase B1704 sequence
gataagaactggaaaccagaggaagaaataccaggtccattacaggaatttggaatttaagcggcctaaatcgacgtataacgagctaaaacagttaaggggtacatatgtacccctttttaatttaattgcgttaggcagcgtctaagagagtattaaagtattcatccattaaatcaggactgtcgtcatcaatacagaaaaattccggtttattgatgccgtagaagtgagtatgtagcttgaatgtatcgtcatca

SEQ ID NO: 27704 - DNA, 260 bp, Unknown
  Description of Unknown: RightRegion for integrase B1705 sequence
cgcgtggcttcgatagagtttaagaatggactcgttcacgagttcctttacagagaataagagcaggcttaggcagcctgctctctttatgtgtgtatgagtaagattagattaacaagaaaggttgattttacaaggttttaggcatcttgtttttagagttcatctgacagccgaaagtctttacaaaataagtcataggacggccgatttctttagatttcttttcaacaaaatcctttgcctttgccatgtagtaa

SEQ ID NO: 27705 - DNA, 245 bp, Unknown
  Description of Unknown: RightRegion for integrase B1706 sequence
cgcgtggcttcgatagagtttaagaatggactcgttcacgagttcctttacagagaataagagcaggctgaggaggcagcctgctctctttatgtgtgtatgagtaagattagattaacaagaaaggttgattttacaaggttttaggcatcttgtttttagagttcatctgacacccgaatgtctttacaaaataagtcataggacggccgatttctttagatttcttttcaacaaaatccttt

SEQ ID NO: 27706 - DNA, 260 bp, Unknown
  Description of Unknown: RightRegion for integrase B1707 sequence
cgtgtggcttcgatagagtttaagaacggactcgttcacgagttcctttacagagaataagagcaggctgaggagacagcctgctctctttatatgtgtatgagtaagattagattaacaagaaaggttgattttacaaggttttaggcatcttgtttttagagttcatctgacacccgaatgtctttacaaaataagtcataggacggccgatttctttagatttcttttcaacaaaatcctttgccttttccatgtag

SEQ ID NO: 27707 - DNA, 260 bp, Unknown
  Description of Unknown: RightRegion for integrase B1708 sequence
cgcgtggcttcgatagagtttaagaacggactcgttcacgagttcctttacagagagtgagagcaggctgaggaggcagcctgctctcttttttgtatgtatgagtaagattagattaacaagaaaggttgattttacaaggttttaggcatcttgtttttagagttcatctgacagccgaaagtctttacaaaataagtcataggacggccgatttctttagatttcttttcaacaaaatcctttgcctttgccatgta

SEQ ID NO: 27708 - DNA, 260 bp, Unknown
  Description of Unknown: RightRegion for integrase B1709 sequence
cgcgtagcttcgatagagtttaagaacggactcgttcacgagttcctttacagagaataagagcaggctgaggaggcagcctgctctctttatgtgtgtatgagtaagattagattaacaagaaaggttgattttacgcggttttaggcatcttgtttttagagttcatctgacacccgaaggtctttaaaaacaaggttagtggtcttcccagttcttcggactttttcttgacatactgcctagcctttgccatgtag

SEQ ID NO: 27709 - DNA, 260 bp, Unknown
  Description of Unknown: RightRegion for integrase B1710 sequence
gataagaactggaaaccagaagaggaaataccaggtccattacaggaatttggaatttaagcggcctaaatcgacgtataacgagctaaaacagttaaggggtacttcgtacccctttttaatttaattgcgttagagagcctctaagagagtattaaagtattcatccattaaatcaggactgtcgtcatcaatacagaaaaattccggtttattgatgccgtagaagtgagtatgtagcttgaatgtatcgtcatcaa

SEQ ID NO: 27710 - DNA, 260 bp, Unknown
  Description of Unknown: RightRegion for integrase B1711 sequence
catgacggacacatggggttctgtttcagaaacggaatgaaatgtgagtatccacaataaaaactaataacgaaaaggcctgatggtctgcttataatgcgggcaatcaggctttttatagtttgatctctgatgaaatgcgaaatccatgaaaatgtcacaaaatatctgattctgcgacggcgttggatgaagtaggcaaacatggaaacatcctaccatccattacaatattatacgtggaaagccttaccatgtca

SEQ ID NO: 27711 - DNA, 260 bp, Unknown
  Description of Unknown: RightRegion for integrase B1712 sequence
tctcttttctctactgtgtctgggcggcttttccagataaaagataagagagaaaagtgaaaagtggtgtgtatcaatcgtttcgcgatcagcgaaacgccttcggcgatgtattttttcagcttcgccttgccgctttgcggcttttcgccttcggcgatgctgaatgcaaaatctcgacttgtacctcttgacaacgccccccatatcagtgtataataatatcgttaatatgtaaactaattttgtgcattttgtat

SEQ ID NO: 27712 - DNA, 258 bp, Unknown
  Description of Unknown: RightRegion for integrase B1713 sequence
cgtgtggcttcgatagagtttaagaacggactcgttcacgagttcctttacagagaataagagcaggctgaggagacagcctgctctctttatatgtgtatgagtaagattagattaacaagaaaggttgattttacaaggttttaggcatcttgtttttagagttcatctgacagccgaatgtctttacaaaataagtcataggacggccgatttctttagatttcttttcaacaaaatcctttgcctttgccatgt

SEQ ID NO: 27713 - DNA, 260 bp, Unknown
  Description of Unknown: RightRegion for integrase B1714 sequence
tcaacgcctatgtctgtaagcaatcccttgagttcgggatacggcattgaatatcgctgagaaagatagcgaagcgacgcaccgagttccccgtgcggcccaccgtattgcttttagatataggtcaaagataaaaataaatagcgaggttattagcttctttttcgtatgttatatggtctataactgagcggagtgcttcatttttaactgcttcgtctgtttcgggcgatttaattgtttttaaaacgcttgcaacc

SEQ ID NO: 27714 - DNA, 260 bp, Unknown
  Description of Unknown: RightRegion for integrase B1715 sequence
gataagaactggaaaccagaagaggaaataccaggtccattacaggaatttggaatttaagcggcctaaatctacgtataacgagctaaaacagttaaggggtacattcgtacccctttttaatttaattgcgttagagagcctctaagagagtattaaagtattcatccattaaatcaggactgtcgtcatcaatacagaaaaattccggtttattgatgccgtagaagtgagtatgtagcttgaatgtatcgtcatca

SEQ ID NO: 27715 - DNA, 260 bp, Unknown
  Description of Unknown: RightRegion for integrase B1716 sequence
cgtgtggcttcgatagagtttaagaacggactcgtgcacgagttcctttacagagagtgagagcaggctgaggaggcagcctgctctcttttttgtatgtatgagtaagattagattaacaagaaaggttgattttacaagattttaggcatcttgtttttagagttcatctgacagccgaatgtctttacaaaataagtcataggacggccgatttctttagatttcttttcaacaaaatcctttgcctttgccatgta

SEQ ID NO: 27716 - DNA, 260 bp, Unknown
  Description of Unknown: RightRegion for integrase B1717 sequence
cgtgtggcttcgatagagtttaagaacggactcgttcacgagttcctttacagagaataagagcaggctgaggaggcagcctgctctctttatgtgtgtatgagtaagattagattaacaagaaaggttgattttacaaggttttaggcatcttgtttttagagttcatctgacacccgaatgtctttacaaaataagtcataggacgaccgatttctttagatttcttttcaacaaaatcctttgcctttgccatgtag

SEQ ID NO: 27717 - DNA, 260 bp, Unknown
  Description of Unknown: RightRegion for integrase B1718 sequence
atgatcccgtacagcagccagggatttaaccgccggttgggagggctggacctaaattaggcagccagggcgagctgctgacgctgcgcgcccttgaaagaaacaactttgccaattagttggctgtacccctgtttatcgtggcgaggagaccacggcctgctgcccctgtcaaaactatcatgtcgaaaccagtcacccccggtttcaaacgctgtcaatgagcaacactaagtatatacgcaacatttcgatattca

SEQ ID NO: 27718 - DNA, 260 bp, Unknown
  Description of Unknown: RightRegion for integrase B1719 sequence
cgtgtggcttcgatagagtttaagaacggactcgttcacgagttcctttacagagaataagagcaggctgaggaggcagcctgctctctttttggtacgtatgagtaagattagattaacaagaaaggttgattttacgcggttttaggcatcttgtttttagagttcatctgacacccgaaggtcttgacgaaataagtcatgggacggccgatttctttagatttcttttcaacaaaatcctttgcctttgccatgta

SEQ ID NO: 27719 - DNA, 260 bp, Unknown
  Description of Unknown: RightRegion for integrase B1720 sequence
cgtgtggcttcgatagagtttaagaatggactcgttcacgagttcctttacagagaataagagcaggctgaggaggcagcctgctctctttatgtgtgtatgagtaagattagattaacaagaaaggttgattttacaaggttttaggcatcttgtttttagagttcatctgacagccgaaggtctttaaaaacaaggttagtggtcttcccagttcttcggactttttcttgacatactgcctagcctttgccatgtag

SEQ ID NO: 27720 - DNA, 236 bp, Unknown
  Description of Unknown: RightRegion for integrase B1721 sequence
cgtgtggcttcgatagagtttaagaatggactcgttcacgagttcctttacagagaataagagcaggctgaggaggcagcctgctctctttatgtgtgtatgagtaagattagattaacaagaaaggttgattttacaaggttttaggcatcttgtttttagagttcatctgacagccgaaggtctttacaaaataagtcataggacggccgatttctttagatttcttttcaaca

SEQ ID NO: 27721 - DNA, 260 bp, Unknown
  Description of Unknown: RightRegion for integrase B1722 sequence
cgtgtggcttcggtagagtttaagaacggactcgttcacgagttcctttacagagaataagagcaggctgaggaggcagcctgctctctttttggtacgtatgagtaagattagattaacaagaaaggttgattttacgcggttttaggcatcttgtttttagagttcatctgacacccgaatgtctttacaaaataagtcataggacggccgatttctttagatttcttttcaacaaaatcctttgccttttccatgta

SEQ ID NO: 27722 - DNA, 260 bp, Unknown
  Description of Unknown: RightRegion for integrase B1723 sequence
gataagaactggaaaccagaagaagaaataccaggtccgttacaggaatttgggatttaagcggcctaaatcgacgtataacgagttaaacactttcaggggtacagatgtacccctttttaatttaattgcgttatacagcctctaaagggcttaaatcaagttctgctaaattactgtaatattcctcatcgctggtatctgggaacatgaattgtgattcatcgaatacaaaatcatctttgatcgctgaccagtat

SEQ ID NO: 27723 - DNA, 260 bp, Unknown
  Description of Unknown: RightRegion for integrase B1724 sequence
gaactttgttgggacaacgaaagtaccgttgagacggtatgcaaattagtgcggaaataggcggttttgtaggctttcaggtatgaagttcagtctatttgccacccttttgccacccaaaaaaatgaaatgaacaaaaaatgaagaaaagcggttgaacactctgaactaaatcggaatgtccaaccgctttttttatgcctgtaaagatttttcgaatatatcaacagctgcctgttgcatcacatctgtgttaaaag

SEQ ID NO: 27724 - DNA, 260 bp, Unknown
  Description of Unknown: RightRegion for integrase B1725 sequence
aaacggagcaggaaagacaacacttttaaatatcttagcaggaatcaggctagactataaaggtgaaatcacttatttcggacagtattccgacaaacagaaggaaaactcgggagatattaaaaaccgcataggctataccggccccggcaaatactatctgccgcagtggacagttaaggatatcgaggaaatcagcaagctgatgtttgatgatttttcagcagatgattttcacagatattgtgaggagcttgcaa

SEQ ID NO: 27725 - DNA, 215 bp, Unknown
  Description of Unknown: RightRegion for integrase B1726 sequence
cgcgtggcttcgatagagtttaagaacggactcgttcacgagttcctttacagagaataagagcaggcttaggcagcctgctctctttatgtgtgtatgagtaagattagattaacaagaaaggttgattttacaaggttttaggcatcttgtttttagagttcatctgacagccgaaggtctttacaaaataagtcataggacggccgatttct

SEQ ID NO: 27726 - DNA, 254 bp, Unknown
  Description of Unknown: RightRegion for integrase B1727 sequence
cgtgtggcttcgatagagtttaagaacggactcgttcacgagttcctttacagagaataagagcaggcttaggcagcctgctctctttatgtgtgtatgagtaagattagattaacaagaaaggttgattttacaaggttttaggcatcttgtttttagagttcatctgacagccgaaggtcttgacgaaataagtcatgggacggccgatttctttagatttcttttcaacaaaatcctttgcctttgccatg

SEQ ID NO: 27727 - DNA, 260 bp, Unknown
  Description of Unknown: RightRegion for integrase B1728 sequence
cgtgtggcttcgatagagtttaaaaatggactcgttcacgagttcctttacagagagtgagagcaggctgaggagacagcctgctctcttttttgtatgtatgagtaagattagattaacaagaaaggttgattttacaaggttttaggcatcttgtttttagagttcatctgacacccgaatgtctttacaaaataagtcatgggacggccgatttctttagatttcttttcaacaaaatcctttgcctttgccatgta

SEQ ID NO: 27728 - DNA, 260 bp, Unknown
  Description of Unknown: RightRegion for integrase B1729 sequence
cgtgtggcttcggtagagtttaagaacggactcgttcacgagttcctttacagagaataagagcaggctgaggaggcagcctgctctctttatgtgtgtatgagtaagattagattaacaagaaaggttgattttacaaggttttaggcatcttgtttttagagttcatctgacagccgaaggtctttacaaaataagtcataggacggccgatttctttagatttcttttcaacaaaatcctttgcctttgccatgtag

SEQ ID NO: 27729 - DNA, 260 bp, Unknown
  Description of Unknown: RightRegion for integrase B1730 sequence
cgtgtggcttcgatagagtttaagaatggactcgttcacgagttcctttacagagaataagagcaggctgaggaggcagcctgctctctttatgtgtgtatgagtaagattagattaacaagaaaggttgattttacaaggttttaggcatcttgtttttagagttcatctgacagccgaaagtctttacaaaataagtcataggacggccgatttctttagatttcttttcaacaaaatcctttgcctttgccatgtag

SEQ ID NO: 27730 - DNA, 260 bp, Unknown
  Description of Unknown: RightRegion for integrase B1731 sequence
atggtcacatcagaatggctgtcctgtgtattatgcaggacagtcattttgtcgtcatagaggtaaatcctgttgacaaaagtatccaccagtgcctgccgatatttcaggtcattcacatcgcctttgcggaactggttcaggaagaaccgcacttcattgaccgtgggcgtagggtgggaggaagtctccaaaagaatctgctgttccagctcgttgcgttcccgtttcttctgggagatacgctccgcaatcacatc

SEQ ID NO: 27731 - DNA, 260 bp, Unknown
  Description of Unknown: RightRegion for integrase B1732 sequence
tcctgcgggttcgaccgcatgcagtctgccgcgtttacacggccgctgcgcgaaatgtaactcgaggagtattctcttcagtttcatcagaaatccattataattttgataaaactacggcggattctttgttgcacggcattttcgtggatgatataatgagcgttagagaaagtaatttttggggaggaatagtatgatttaccacggttcgtgtatttctgggctgcacacaatcaaggcaaattcaaaatctcatt

SEQ ID NO: 27732 - DNA, 260 bp, Unknown
  Description of Unknown: RightRegion for integrase B1733 sequence
cgtgtggcttcgatagaatttaagaatggactcgttcacgagttcctttacagagagtgagatcaggctgaggaggcagcctgctctcttttttgtatgtatgagtaagattagattaacaagaaaggttgattttacaaggttttaggcatcttgtttttagagttcatctgacagccgaatgtctttacaaaataagtcataggacggccgatttctttagatttcttttcaacaaaatcctttgccttttccatgta

SEQ ID NO: 27733 - DNA, 258 bp, Unknown
  Description of Unknown: RightRegion for integrase B1734 sequence
cgtgtggcttcgatagagtttaaaaatggactcgttcacgagttcctttacagagagtgagatcaggctgaggaggcagcctgctctcttttttgtatgtatgagtaagattagattaacaagaaaggttgattttacaaggttttaggcatcttgtttttagagttcatctgacagccgaaagtctttacaaaataagtcataggacggccgatttctttagatttcttttcaacaaaatcctttgcctttgccatg

SEQ ID NO: 27734 - DNA, 260 bp, Unknown
  Description of Unknown: RightRegion for integrase B1735 sequence
catgtggcttcgatagagtttaaaaatggactcgttcacgagttcctttacagagagtgagagcaggctgaggagacagcctgctctcttttttgtatgtatgagtaagattagattaacaagaaaggttgattttacaaggttttaggcatcttgtttttagagttcatctgacacccgaatgtctttacaaaataagtcataggacgaccgatttctttagatttcttttcaacaaaatcctttgcctttgccatgta

SEQ ID NO: 27735 - DNA, 260 bp, Unknown
  Description of Unknown: RightRegion for integrase B1736 sequence
gagctgcctcagagtatggcggattccgtggcagaagcaatccaaaatgaggttgcatgagcagaaaagagaggctgtgccgaaacacagcctccctccacaggaacaaatattaagttatatgggtaggttcataaattgtccctatggaacgccggagaacgggcggcagttttttattgcagtgcgtcaatgtaagcgttcagcgcggcaaaatcgccgcggggataggcgtttaggtcgcggtttttcgcgttgat

SEQ ID NO: 27736 - DNA, 258 bp, Unknown
  Description of Unknown: RightRegion for integrase B1737 sequence
cgcgtagcttcgatagagtttaagaacggactcgttcacgagttcctttacagagaataagagcaggctgaggaggcagcctgctctctttttggtacgtatgagtaagattagattaacaagaaaggttgattttacgcggttttaggcatcttgtttttagagttcatctgacagccgaaggtcttgacgaaataagtcatgggacggccgatttctttagatttcttttcaacaaaatcctttgcctttgccatg

SEQ ID NO: 27737 - DNA, 260 bp, Unknown
  Description of Unknown: RightRegion for integrase B1738 sequence
cgtgtggcttcgatagagtttaagaacggactcgttcacgagttcctttacagagaataagagcaggctgaggaggcagcctgctctctttatgtgtgtatgagtaagattagattaacaagaaaggttgattttacaaggttttaggcatcttgtttttagagttcatctgacagccgaaggtcttgacgaaataagtcatgggacggccgatttctttagatttcttttcaacaaaatcctttgcctttgccatgtag

SEQ ID NO: 27738 - DNA, 260 bp, Unknown
  Description of Unknown: RightRegion for integrase B1739 sequence
cgtgtggcttcgatagagtttaagaatggactcgttcacgagttcctttacagagagtgagagcaggctgaggaggcagcctgctctctttatgtatgtatgagtaagattagattaacaagaaaggttgattttacaaggttttaggcatcttgtttttagagttcatctgacagccgaaggtctttacaaaataagtcataggacggccgatttctttagatttcttttcaacaaaatcctttgcctttgccatgtag

SEQ ID NO: 27739 - DNA, 260 bp, Unknown
  Description of Unknown: RightRegion for integrase B1740 sequence
cgcgtagcttcgatagagtttaagaacggactcgtgcacgagttcctttacagagagtgagagcaggctgaggaggcagcctgctctctttttatgtgtatgagtaagatcagattaacaagaaaggttgattttacaaggttttaggcatcttgtttttagagttcatcgtgcacccgaatgtctttacaaaataagtcataggacggccgatttctttagatttcttttcaacaaaatcctttgcctttgccatgtag

SEQ ID NO: 27740 - DNA, 260 bp, Unknown
  Description of Unknown: RightRegion for integrase B1741 sequence
cgtgtggcttcgatagagtttaaaaatggactcgttcacgagttcctttacagagagtgagagcaggctgaggagacagcctgctctcttttttgtatgtatgagtaagattagattaacaagaaaggttgattttacaaggttttaggcatcttgtttttagagttcatctgacagccgaaagtctttacaaaataagtcataggacggccgatttctttagatttcttttcaacaaaatcctttgcctttgccatgta

SEQ ID NO: 27741 - DNA, 260 bp, Unknown
  Description of Unknown: RightRegion for integrase B1742 sequence
gcactatccacgggtacgaagatgaacatggtgtttggcttcttccacaagctgccgtaggctggtacgtgtactgaaagattttttcgcttttgccgtccaccagccagttgacttttttgcaaatcgagaatacactgtatgcagtgatcgtgctgtggatacttgtgaggcccacagcccggaaggaggttcctaaacataggagcctcctttttatatgtcgtgaagaaacatctacctgtaaaagattcgtctga

SEQ ID NO: 27742 - DNA, 260 bp, Unknown
  Description of Unknown: RightRegion for integrase B1743 sequence
cgcgtggcttcgatagagtttaagaacggactcgttcacgagttcctttacagagaataagagcaggcttaggcagcctgctctctttatgtgtgtatgagtaagattagattaacaagaaaggttgattttacaaggttttaggcatcttgtttttagagttcatctgacagccgaatgtctttacaaaataagtcataggacggccgatttctttagatttcttttcaacaaaatcctttgcctttgccatgtagtaa

SEQ ID NO: 27743 - DNA, 260 bp, Unknown
  Description of Unknown: RightRegion for integrase B1744 sequence
aaatggagcgggaaagacaacaacgcttcgcatgttagcaacgttgatcaaaccggatgagggggatgctgtcattggtggttattccgtgcaaaaagaagcagagcaggttcggcgtaagattggatttttgaccagtgaacttcgattggaagaatttttcactccaaattatttgtttgattttttctcaaatctccatcaggtgccggctaatcttcgtaaagagcgaaagaagcacttattcgagatctttggca

SEQ ID NO: 27744 - DNA, 260 bp, Unknown
  Description of Unknown: RightRegion for integrase B1745 sequence
ctttgttgggacaatgaaagtaccgttgaaacagtctgcttgctgtcgaagaaaccttgagtttatgcgggttagcgggcttttatgcaaaatatgaacctgtgtttttagcaggaaaaaatgtatatagaatttagtaattgcagaggggtgcaaaaatttgttgagaccgaagttgtgcgccggaatagtatcggtagagatttggtgtccgcgaatagttgcacccagtatattagataagacgttttttaattagg

SEQ ID NO: 27745 - DNA, 260 bp, Unknown
  Description of Unknown: RightRegion for integrase B1746 sequence
cgcgtggcttcgatagagtttaagaacggactcgttcacgagttcctttacagagagtgagagcaggctgaggaggcagcctgctctcttttttgtatgtatgagtaagattagattaacaagaaagattgattttacaaggttttaggcatcttgtttttagagttcatctgacacccgaaggtcttgacgaaataagtcataggacggccgatttctttagatttcttttcaacaaaatcctttgcctttgccatgta

SEQ ID NO: 27746 - DNA, 260 bp, Unknown
  Description of Unknown: RightRegion for integrase B1747 sequence
cgtgtggcttcgatagagtttaaaaatggactcgttcacgagttcctttacagagagtgagatcaggctgaggaggcagcctgctctcttttttgtatgtatgagtaagattagattaacaagaaaggttgattttacaaggttttaggcatcttgtttttagagttcatctgacacccgaaggtcttgacgaaataagtcataggacggccgatttctttagatttcttttcaacaaaatcctttgcctttgccatgta

SEQ ID NO: 27747 - DNA, 260 bp, Unknown
  Description of Unknown: RightRegion for integrase B1748 sequence
cgtgtggcttcgatagagtttaagaatggactcgttcacgagttcctttacagagaataagagcaggctgaggaggcagcctgctctctttatgtgtgtatgagtaagattagattaacaagaaaggttgattttacaaggttttaggcatcttgtttttagagttcatctgacagccgaaggtctttacaaaataagtcataggacggccgatttctttagatttcttttcaacaaaatcctttgcctttgccatgtag

SEQ ID NO: 27748 - DNA, 109 bp, Unknown
  Description of Unknown: RightRegion for integrase B1749 sequence
tatcctacagagtttcccttaaagcctataggaatcagccttaaggtatcccactattgactgtcattcctcacccgcgggaggaggctcagagacagttagcagatta

SEQ ID NO: 27749 - DNA, 260 bp, Unknown
  Description of Unknown: RightRegion for integrase B1750 sequence
cgtgtggcttcgatagagtttaaaaatggactcgttcacgagttcctttacagagagtgagagcaggctgaggagacagcctgctctcttttttgtatgtatgagtaagattagattaacaagaaaggttgattttacaaggttttaggcatcttgtttttagagttcatctgacagccgaatgtctttacaaaataagtcataggacggccgatttctttagatttcttttcaacaaaatcctttgcctttgccatgta

SEQ ID NO: 27750 - DNA, 260 bp, Unknown
  Description of Unknown: RightRegion for integrase B1751 sequence
cgcgtagcttcgatagagtttaagaacggactcgtgcacgagttcctttacagagagtgagagcaggctgaggaggcagcctgctctctttttatgtgtatgagtaagatcagattaacaagaaaggttgattttacaaggttttaggcatcttgtttttagagttcatcgtgcagccgaaagtctttacaaaataagtcataggacggccgatttctttagatttcttttcaacaaaatcctttgcctttgccatgtag

SEQ ID NO: 27751 - DNA, 260 bp, Unknown
  Description of Unknown: RightRegion for integrase B1752 sequence
ttgtgtttggacaatggaagtcacgtggagtgtatcacggcatttgcccgcatgaaataaggatctccggcattttcaaggcgtaaaaaatgcccatttgccaccattgaactttgaacatgaaaaagagggttgaaccgttgaacttttcagcggctcagccctctttttcgttatgatgttttcttctgccctatcgcctgttcaaagatgtcaacagaacgatttgccattgtttccgtatcgtgtacataggtttg

SEQ ID NO: 27752 - DNA, 260 bp, Unknown
  Description of Unknown: RightRegion for integrase B1753 sequence
gataagaactggaaaccagaagaagaaataccaggtccattacaggaatttggaatttaagctaatgaagatgattaagattttaggtttgattttatctatgaattcttgcctggcattggcaaccgtagaccaagaaatgcgtagaccgctaacctatagagaagatgctttcattgatggagcacataaaacattgaaattgctatgtcaaaagaccaccagtaattacggtgaatacagaaaatgttatgaggaat

SEQ ID NO: 27753 - DNA, 260 bp, Unknown
  Description of Unknown: RightRegion for integrase B1754 sequence
cgcgtggcttcgatagagtttaagaacagactcgttcacgagttcctttacagagagtgagagcaggctgaggaggcagcctgctctcttttttgtatgtatgagtaagattagattaacaagaaaggttgattttacaaggttttaggcatcttgtttttagagttcatctgacagccgaaggtctttacaaaataagtcataggacggccgatttctttagatttcttttcaacaaaatcctttgcctttgccatgta

SEQ ID NO: 27754 - DNA, 260 bp, Unknown
  Description of Unknown: RightRegion for integrase B1755 sequence
tccaagcggcgtcccaaggcacggagaaaggagagcggagaaaagtggcaaagacagtaagggccatcccggccaccatcagccgttatacggcggctccgattaacagccggaagaagcggagagtagcgggctatgccagggtttccacggaccatgatgaccagatcagcagctatgaagcacaggtcgattattatacgaactatatcagggaacgggatgactgggaattcattggcatctatacagaaatgaaa

SEQ ID NO: 27755 - DNA, 260 bp, Unknown
  Description of Unknown: RightRegion for integrase B1756 sequence
cgtgtggcttcgatagagtttaagaacggactcgttcacgagttcctttacagagagtgagagcaggctgaggaggcagcctgctctcttttttgtatgtatgagtaagattagattaacaagaaaggttgattttacaaggttttaggcatcttgtttttagagttcatctgacagccgaaagtctttaaaaacaaggttagtggtcttcccagttcttcggactttttcttgacatactgcctagcctttgccatgta

SEQ ID NO: 27756 - DNA, 260 bp, Unknown
  Description of Unknown: RightRegion for integrase B1757 sequence
gataagaactggaaaccagaagaagaaataccaggtccattacaagaatttggaatttaagctaatgaagatgattaagattttaggtttgattttatctatgaattcttgcttggcattggcaaccgtagaccaagaaatgcgtagaccgctaacctatagagaagatgctttcattgatggagcacataagacattgaaattgctatgtcaaaagaccaccagtaattacgatgaatacagaaaatgttatgaggaat

SEQ ID NO: 27757 - DNA, 260 bp, Unknown
  Description of Unknown: RightRegion for integrase B1758 sequence
cgtgtggcttcgatagagtttaaaaatggactcgttcacgagttcctttacagagagtgagagcaggctgaggagacagcctgctctcttttttgtatgtatgagtaagattagattaacaagaaaggttgattttacaaggttttaggcatcttgtttttagagttcatctgacacccgaatgtctttacaaaataagtcataggacggccgatttctttagatttcttttcaacaaaatcctttgcctttgccatgta

SEQ ID NO: 27758 - DNA, 260 bp, Unknown
  Description of Unknown: RightRegion for integrase B1759 sequence
gatttttcttgtttgcagttggtattgtcgcggaatgaattcaaaatggaggatgcatgacccatggtcgatcatatgcttgtacgtggagcaaaggtccacaacctgaaaaatattgacgtggacattccgctgaatcagatcgtcggcattgcgggcgtgtccggttccggcaagtcgtcgctggcgctgggcgtgctgtatgccgagggctcgcgccgctatctggaggcgctgtcgacctacacgcgccgccggat

SEQ ID NO: 27759 - DNA, 260 bp, Unknown
  Description of Unknown: RightRegion for integrase B1760 sequence
gcgacggtacgcccatttttatgcagttattacaggatgctgatgcggcctgcgccgtagggattctcgtaatccagcagatagcccgggtaatcggccagcgggctgtttgcggtggtcaaatgcggcagaccctctgcatctacaccgccaaaggtcatggcataggtagacatcacaaggtaatcctcagacacatagtccttgatcagctctgcgccatcaaacatggcaaagccatcgcccagattgcgcagagt

SEQ ID NO: 27760 - DNA, 260 bp, Unknown
  Description of Unknown: RightRegion for integrase B1761 sequence
gccgagcgcagtgctggcgacgcaaccatctacatccaaatcgaacggcggtttgaatagcaaaccttagccggtcgattatatgtatcataaaacaacttattcataagtcatgagtagcacatcgtctgccgctgcgccaagcgcggcataatcgtgcgactcatacagcagtcccggctggtcggccgaggtcttgggcgcaagcgccaccatgaccgtcaacccggacggctccagccgcgtgcgcaccgcgcgga

SEQ ID NO: 27761 - DNA, 260 bp, Unknown
  Description of Unknown: RightRegion for integrase B1762 sequence
aaccatatcggagtattcgaccactcaaaggtcactttgtggaaagggaaagcggtatagtacgcaacatactataccgcaaaacctaaatcttaaaaacatccttaccaaaccctcacatttacaagggtttcaagcggagacggtgggattcgaacccaacctaggatcttataaaatcaaggcctatgcagtatcgtgttgcatttcgtgttgcacgcattattaaaacctaaaaagatgatacaatattttgggaa

SEQ ID NO: 27762 - DNA, 260 bp, Unknown
  Description of Unknown: RightRegion for integrase B1763 sequence
cttatttgccggttgttctgctctttgtgcgtggcgggtcattcggcacccactctataatttcagacggttggcaatgtaacgcctcgcatatcaagtcaagatgctcaaggctgatgcgctcggcaatgccatgataatactcgttgatagtattcggtctgataccggtagcccttgcaagatccgcctgtgaccacttagcctcgccgagcttcgtagacagtaaaaatcttatcatatgtagttcctcctttcta

SEQ ID NO: 27763 - DNA, 260 bp, Unknown
  Description of Unknown: RightRegion for integrase B1764 sequence
cttatttgccggttgttctgctttttgttcgtggcgggttatttggcacccactctataatgtcagacggctggcaatgtaacgcctcacagatcaagtcaagatgctcaaggctgatgcgctcggcaatgccatgataatactcattgatcgtatttggtcttatgcctgtagctcttgcaagatccgcctgtgtccacttgacttcgccgagcttcgtggacagtaaaaatcttatcatatgtagttcctccttccta

SEQ ID NO: 27764 - DNA, 260 bp, Unknown
  Description of Unknown: RightRegion for integrase B1765 sequence
gcgacggtacgcccatttttatgcagttattacagaatgctgatgcggcctgcgccgtagggattctcgtaatccagcagatagcccgggtaatcggccagcgggctgtttgcggtggtcaaatgcggcagaccctctgcatctacaccgccaaaggtcatggcataggtagacatcacaaggtaatcctcagacacatagtccttgatcagctctgcgccatcaaacatggcaaagccatcgcccagattgcgcagagt

SEQ ID NO: 27765 - DNA, 260 bp, Unknown
  Description of Unknown: RightRegion for integrase B1766 sequence
actgaaagtatctcctattttagacagataggagccgacgtaaagagttatgctatctaacatatatcaaaaagaggtaagataacgccctctatgaaaaaggttacgttatcttacctcatcaaaggtcgtgccgctgaccccatcatcgcagtagacggagcagtcgttccagccctgttcctcacaatatttcatgagcatcagcttttggttttcaatgctgaccgactcgcccgcccgttcgtcatccttgctga

SEQ ID NO: 27766 - DNA, 260 bp, Unknown
  Description of Unknown: RightRegion for integrase B1767 sequence
tccgcgtgcgtgtcggcgcacggcagtgcgccgagcgttcctcttcgtctccaccaatgacacgaatactgcttttgcggtgttcgtgttatttttatacccacgcccgatttcctaatcttcgtttaatctttacacgctatgataaaatctgtataattataccggagggtgatccaatgcgtattctgcttgccgaggacgagaagagtctcaacaggataatcacaaagcagctcaaggctgccggctacagcgta

SEQ ID NO: 27767 - DNA, 260 bp, Unknown; identical to SEQ ID NO: 27763
  Description of Unknown: RightRegion for integrase B1768 sequence

SEQ ID NO: 27768 - DNA, 260 bp, Unknown
  Description of Unknown: RightRegion for integrase B1769 sequence
ttcacaatagctgttttttggacggtttttgtgcaaacgagaagacacgccctgccatgattggcaaggcgtgtctttgttatgatacggggatgcttgactcctatttcttatacattgcctggagaatcccgaccttttctgcttcctccacggcctcaccgtggagatatctgtagagaatcaacatggacgccggtgtctcgcctttctctcggcggcagttttcaatgattctcactacctccttatgaagagaa

SEQ ID NO: 27769 - DNA, 260 bp, Unknown
  Description of Unknown: RightRegion for integrase B1770 sequence
cttatttgccggttgttctgctctttgtgcgtggcgggtcattcggcacccactctataatttcagacggttggcaatgtaatgcctcgcatatcaggtcaagatgctcaaggctgatgcgctcggcaatgccatgataatactcgttgatagtattcggtctgataccggtagcccttgcaagatccgcctgtgaccacttagcctcgccgagcttcgtagacagtaaaaatcttatcatatgtagttcctcctttcta

SEQ ID NO: 27770 - DNA, 260 bp, Unknown; identical to SEQ ID NO: 27763
  Description of Unknown: RightRegion for integrase B1771 sequence

SEQ ID NO: 27771 - DNA, 260 bp, Unknown
  Description of Unknown: RightRegion for integrase B1772 sequence
gcgacggtacgtccatttttatgcagttattacagaatgctgatgcggcctgcgccgtagggattctcgtaatccagcagatagcccgggtaatcggccagcgggctgtttgcggtggtcagatgcggcagaccctctgcatctacaccgccaaaggtcatggcataggtagacatcacaaggtaatcctcagacacatagtccttgatcagctctgcgccatcaaacatggcaaagccatcgcccagattgcgcagagt

SEQ ID NO: 27772 - DNA, 260 bp, Unknown; identical to SEQ ID NO: 27769
  Description of Unknown: RightRegion for integrase B1773 sequence

SEQ ID NO: 27773 - DNA, 260 bp, Unknown
  Description of Unknown: RightRegion for integrase B1774 sequence
tttttggacgaaaaattacttgaaaacaatggctccgatttatcgcggaaagggctataattttaatattacttcgtccacggcatatgaccacaaattcatctatggcagaaatatatatgacaatatctcgctgatagtaaatgaaatgtttgaaaactatctgtcgagacctaatgtgaagcagccgattctgacgcagtactgtgacggacagaaggtctcctgtccgagctggatgaccagattgcgtttgcgta

SEQ ID NO: 27774 - DNA, 260 bp, Unknown
  Description of Unknown: RightRegion for integrase B1775 sequence
gaactaacttctagagagctaggggaagctgctgctaggtacgctaagaagcaagaataatcataaataagcataaaatccagtcttttggctggatttgtgctttattaaataaacataaataaaattccaagattgcctagttttatatttatttattacttttgtgataacaataatcaaaaactatctattatggttaattttgtagcactagatttagaaacagataatatttaagaatatgaagcagtcaatat

SEQ ID NO: 27775 - DNA, 260 bp, Unknown
  Description of Unknown: RightRegion for integrase B1776 sequence
gagaaatggtgcaggaaagactacaataataaattgcatcttaaaaatgataaaacctgatcaaggaattatagagtggaatgggaagaatattgccaagttaaaaaacagaatatatttttctgaagtaggggcgttattggagacaagcatcaatatatacgattatttgactggcatgcaaaatatagaatattttgcggggttaatgaatcttgataaaggatgtctggaaaaagctagtaaatatattaagcagt

SEQ ID NO: 27776 - DNA, 260 bp, Unknown
  Description of Unknown: RightRegion for integrase B1777 sequence
ggacacacttttaaaacaaattgccggactttcgcaaaaaatttccaagtatcaaattaaaatttagaaccggtgtggaatcttttaacccgaaaatcagacaatttttgaataaaggtattcctcaagccgtaacagcctacgatatcgcgaaagattttgatggagtctgcttgctaattggatttgtcgggcaaactcgcgatgacataataaaagacataaatatggcccgtaaatattttgagtacacaagcgta

SEQ ID NO: 27777 - DNA, 260 bp, Unknown
  Description of Unknown: RightRegion for integrase B1778 sequence
aaccatatcggagtattcgaccactcaaaggtcactttgtggaaaggaaaagcggtatagtacgcaacatactataccgcaaaacctaaatcttaaaaacatccttaccaaaccctcacattttcaaggctttttctttttgtgagaaccttcgtgagaaccaccagataacaaatcttcaaaatgttcatttgcaagcttattcatttcctgtgctttatctgacagtgcatgtctgtaaacagctttaagcgttccat

SEQ ID NO: 27778 - DNA, 260 bp, Unknown
  Description of Unknown: RightRegion for integrase B1779 sequence
aatgacaaccttttaaagaagatgatcgaggagcaggagaagaagatggcgggcaaataagggttagagcctgagcatctgagggagaggccttcgcgatgggatgggatttcagagattctatctgatcgcgggggcttttttctgtgtaaaattggttggcgaggggtacgcggtgagcttccgcctgggagcgcccggggatgcggggatggttcctctaagcttgcgggagactgctaaaggcggaaaaaagatga

SEQ ID NO: 27779 - DNA, 219 bp, Unknown
  Description of Unknown: RightRegion for integrase B1780 sequence
tccgcgtgcgtgtcggcgcacggcagtgcgccgagcgatcctcttcgtctccaccagtaacacgaatactgcttttgcagtgttcgtgttatttttttagaagaggatcgaacaggacggttctgcaaagcagaattccgagcgtccggtggacggtcggaaagtccgcgtgcgtgtcggcgcacggcagtgcgccgagcgatcctcttcgtctccacc

SEQ ID NO: 27780 - DNA, 260 bp, Unknown
  Description of Unknown: RightRegion for integrase B1781 sequence
atggtcacatcagaatggctgtcctgtgtattatacaggacagtcattttgtcgtcataaaggtaaatcctgttgacaaaagtatccaccagtgcctgccgatatttcaggtcattcacatcgcctttgcggaactggttcaggaagaaccgcacttcattgaccgtgggcgtagggtgggaggaagtctccaaaagaatctgctgttccagctcgttgcgttcccgtttcttctgggagatacgctccgcaatacacgc

SEQ ID NO: 27781 - DNA, 260 bp, Unknown
  Description of Unknown: RightRegion for integrase B1782 sequence
tccgcgtgcgtgtcggcgcacggcagtgcgccgagcgatcctcttcgtctccaccaatgacacgaatactgcttttgcagtgttcgtgttatttttatacccacgcccgatttcctaatcttcgtttaatctttacacgctatgataaaatctgtataattataccggagggtgatccaatgcgtattctgcttgccgaggacgagaagagtctcaacaggataatcacaaagcagctcaaggctgccggctacagcgta

SEQ ID NO: 27782 - DNA, 260 bp, Unknown
  Description of Unknown: RightRegion for integrase B1783 sequence
ttcacaatagctgttattggaacggtttttgtgcaaacgagaagacacgccctgccatgattagcaaggcgtgtctttgttatgatacagggatgttttgacccctacttcttatacatcgcctgaagaatcccgactttctcggcctccttcacgacctcaccgtgaaggtatctgtagaggaccaacatggacgccggtgtctcgcctttctctcggcggcagttttcaatgattctcactacctccttatgaagaga

SEQ ID NO: 27783 - DNA, 248 bp, Unknown
  Description of Unknown: RightRegion for integrase B1784 sequence
ggcaagcgggataattctaatttcactttaaatgtttggcccaaacttcctcatgcctaattaccaatagcattaatgcgcaaacgtatacccccattcgtaggtcatgaggagtacgctgtccgccgcccttcccagtccttcataatcctttccttcatagagaaggccggtctgggtatcggatatcttgggcgcgagcgcgacggaaagggtgtagccttccgcattggccgccgccctcgttt

SEQ ID NO: 27784 - DNA, 260 bp, Unknown
  Description of Unknown: RightRegion for integrase B1785 sequence
gcgacggtacgcccatttttatgcagttattacaggatgctgatgcggcctgcgccgtagggattctcgtaatccagcagatagcccgggtaatcggccagcgggctgtttgcggtggtcagatgcggcagaccctctgcatctacaccgccaaaggtcatggcataggtagacatcacaaggtaatcctcagacacatagtccttgatcagctctgcgccatcaaacatggcaaagccatcgcccagattgcgcagagt

SEQ ID NO: 27785 - DNA, 109 bp, Unknown
  Description of Unknown: RightRegion for integrase B1786 sequence
tcaaaaagacgcaggaatcaaattcctgcgtcttttttgcatgtattgatgggtgtgtaactcagtgcccggcccgactggggatcgtctggagctcgaagcggtaggt

SEQ ID NO: 27786 - DNA, 113 bp, Unknown
  Description of Unknown: RightRegion for integrase B1787 sequence
tccgcgtgcgtgtcggcgcacggcagtgcgccgagcgatcctcttcgtctccaccaatgacacgaatactgcttttgcagtgttcgtgttatttttttagaagaggatcgaac

SEQ ID NO: 27787 - DNA, 260 bp, Unknown; identical to SEQ ID NO: 27781
  Description of Unknown: RightRegion for integrase B1788 sequence

SEQ ID NO: 27788 - DNA, 109 bp, Unknown
  Description of Unknown: RightRegion for integrase B1789 sequence
aatgacaaccttttaaagaagatgatcgaagagcaggaaaagaagatggcaggtaaataaagcctgagcatccggaaagccttcgcaggaaagacgggacctcatcagt

SEQ ID NO: 27789 - DNA, 260 bp, Unknown
  Description of Unknown: RightRegion for integrase B1790 sequence
tccgcgtgcgtgtcggcgcacggcagtgcgccgagcgatcctcttcgtctccaccaataacacgaatactgcttttgcagtgttcgtgttatttttttagaagaggatcgaacaggacggttctgcaaagcagaattccgagcgtccggtggacggtcggaaagtccgcgtgcgtgtcggcgcacggcagtgcgccgagcgatcctcttcgtctccaccaataacacgaatactgcttttgcagtgttcgtgttattttt

SEQ ID NO: 27790 - DNA, 109 bp, Unknown
  Description of Unknown: RightRegion for integrase B1791 sequence
ttccgctgttttcagaacgctttgaggaagtggcttctgattcagccggaaaatggatgattgagtttgctatcgccctgtacgagaagaacaccttgcagcaataaaa

SEQ ID NO: 27791 - DNA, 260 bp, Unknown
  Description of Unknown: RightRegion for integrase B1792 sequence
gaactaacttctagagagctaggggaagctgctgctaggtacgctaagaagcaagaataatcataaataagcataaaatccagtcttttggctggatttgtgctttattaaataaacataaataaaattccaagattgcctagttttatatttatttattaattttgtgataacaataatcaaaaactatctattatggttaattttgtagcactagatttagaaacagataatatttaagaatatgaagcagtcaatat

SEQ ID NO: 27792 - DNA, 260 bp, Unknown
  Description of Unknown: RightRegion for integrase B1793 sequence
tcggctttcattgccgggtgcttattttttgctcgaatagttttgacagaatgcctctaaaagagatcaatctttggtatgaagttcccgctctttttcgttgaagcgttccagaaagctgtgctccacaccttcggacttatagcccggcatggtgtccagcgccacggcgtggatgctgcggaaaatgctgttttcgatgttgggattctcacgcttcaggcggcgcagcagagtcttgacctcctgccgtttggaac

SEQ ID NO: 27793 - DNA, 260 bp, Unknown
  Description of Unknown: RightRegion for integrase B1794 sequence
caattcagtttagacaaaaaggattggcttgagaatgtgatggtattggctaaactgtaagcgtacataaggataacgagaatacaaatatgagggaaaaagcagtgaacaacgaaatgaaagcccacagcaaatcattagcggaagcggcgcagatgccggaagatttgccgatcccggaaaagagtatcaggcagattggaagcgagcagaagaaacaattgagcggaaagtaaaagtgaaaaatcctcttgaaatgg

SEQ ID NO: 27794 - DNA, 260 bp, Unknown; identical to SEQ ID NO: 27762
  Description of Unknown: RightRegion for integrase B1795 sequence

SEQ ID NO: 27795 - DNA, 260 bp, Unknown
  Description of Unknown: RightRegion for integrase B1796 sequence
aatgacaaccttttaaagaagatgatcgaagagcaggaaaagaagatggcaggtaaataaagcctgagcatccggaaagccttcgcaggaaagacgggacctcatcagttccatctgccctgtgagggctttttccgtgtcacgattcacgccttgccgcagacagtaactgagtatgttacagcaaaaaatacttgtataatagaaaaaatgcgattataatgggtatgctttcttacggtcagcgtagcaagtgcgca

SEQ ID NO: 27796 - DNA, 260 bp, Unknown
  Description of Unknown: RightRegion for integrase B1797 sequence
cccttggaaaatgaaacaatagtcgagaccgtagtcttgatgtcaagaaaagaggagtaaatcgggataggtggcttaacggtgtggtttgtgcgtattggtcaggctgtgctgttttggcaggttggctttgatttggatacaaataagggaatgcagacagcacactaggagaaacgaatggatagattttcagagaagagtcttctttcactcggagatcattatgtgtatggactcatagatccacgcagtaagca

SEQ ID NO: 27797 - DNA, 260 bp, Unknown
  Description of Unknown: RightRegion for integrase B1798 sequence
cttatttgccggttgttctgctttttgttcgtggcgggttatttggcacccactctataatatcagacggctggcaatgtaacgcctcacagatcaagtcaagatgctcaaggctgatgcgctcggcaatgccatgataatactcattgatcgtatttggtcttatgcctgtagctcttgcaagatccgcctgtgtccacttgacttcgccgagcttcgtggacagtaaaaatcttatcatatgtagttcctccttccta

SEQ ID NO: 27798 - DNA, 109 bp, Unknown; identical to SEQ ID NO: 27788
  Description of Unknown: RightRegion for integrase B1799 sequence

SEQ ID NO: 27799 - DNA, 260 bp, Unknown
  Description of Unknown: RightRegion for integrase B1800 sequence
tccgcgtgcgtgtcggcgcacggcagtgcgccgagcgatcctcttcgtctccaccaatgacacgaatactgcttttgcggtgttcgtgttatttttatacccacgcccgatttcctaatcttcgtttaatctttacacgctatgataaaatctgtataattataccggagggtgatccaatgcgtattctgcttgccgaggacgagaagagtctcaacaggataatcacaaagcaactcaaggctgccggttacagcgtg

SEQ ID NO: 27800 - DNA, 260 bp, Unknown
  Description of Unknown: RightRegion for integrase B1801 sequence
tccgcgtgcgtgtcggcgcacggcagtgcgccgagcgatcctcttcgtctccaccagtaacacgaatactgcttttgcagtgttcgtgttatttttttagaagaggatcgaacaggacggttctgcaaagcagaattccgagcgtccggtggacggtcggaaagtccgcgtgcgtgtcggcgcacggcagtgcgccgagcgatcctcttcgtctccaccaatgacacgaatactgcttttgcggtgttcgtgttattttt

SEQ ID NO: 27801 - DNA, 260 bp, Unknown; identical to SEQ ID NO: 27763
  Description of Unknown: RightRegion for integrase B1802 sequence

SEQ ID NO: 27802 - DNA, 210 bp, Unknown
  Description of Unknown: RightRegion for integrase B1803 sequence
tccgcgtgcgtgtcggcgcacggcagtgcgccgagcgatcctcttcgtctccaccagtaacacgaatactgcttttgcagtgttcgtgttatttttatacccacacccgatttcctaatcttcgtttaatctttacacgctatgataaaatctgtataattataccggagggtgatccaatgcgtattctgcttgccgaggacgagaaga

SEQ ID NO: 27803 - DNA, 260 bp, Unknown
  Description of Unknown: RightRegion for integrase B1804 sequence
cttatttgccggttgttctgctttttgtacgcggcgggtcattcggtacccactctataatctcagacggttggcaatgtaacgcctcgcatatcaggtcaagatgctcaaggctgatgcgctcggcaatgccatgataatactcgttgatagtattcggtctgataccggtagcccttgcaagatccgcctgcgaccacttagcttcgtagacagtaaaaatcttatcatatgtagttcctcctttctataattctaca

SEQ ID NO: 27804 - DNA, 260 bp, Unknown; identical to SEQ ID NO: 27784
  Description of Unknown: RightRegion for integrase B1805 sequence

SEQ ID NO: 27805 - DNA, 260 bp, Unknown
  Description of Unknown: RightRegion for integrase B1806 sequence
tccgcgtgcgtgtcggcgcactgccgtgcgccgagtgatcctcttcgtctccaccaatgacacgaatactgcttttgcggtgttcgtgttatttttatacccacgcccgattttctaatcttcgtttaatctttacacactatgataaaatctgtataattataccggagggtgatccaatgcgtattctgcttgccgaggacgagaagagtctcaacaggataatcacaaagcagctcaaggctgctggctacagcgta

SEQ ID NO: 27806 - DNA, 93 bp, Unknown
  Description of Unknown: RightRegion for integrase B1807 sequence
tccgcgtgcgtgtcggcgcacggcagtgcgccgagcgatcctcttcgtctccaccagtaacacgaatactgcttttgcagtgttcgtgttatt

SEQ ID NO: 27807 - DNA, 260 bp, Unknown
  Description of Unknown: RightRegion for integrase B1808 sequence
aaccatatcggagtattcgaccactcaaaggtcactttgtggaaaggaaaagcggtatagtacgcaacatactataccgcaaaacctaaatcttaaaaacatccttaccaaaccctcacatttactgggcttgcgggtattttacctgtataggaaaaagtagattttaagagaatcgttcttgcgatcgtagataattttatcaatgatctgcttcagagcttcgttcttttgaatgtatgtataattgttggagatga

SEQ ID NO: 27808 - DNA, 260 bp, Unknown
  Description of Unknown: RightRegion for integrase B1809 sequence
atgagtttggacagtgatacacatgtcgaagcgatagtttcgctacaaagagaaatctagtgaaaatcctccgttttacgttattttctcgtcacgttgtgttcgatggcgagggcgataaactccgcaacaaacgcattgaaaatcacattactgtttcggtggtaattgatatggagtgcggaaacacaaagaattgaatatctaacaatcggcatagccgcagactttcacaaaaagcctgcggctttttctttgcc

SEQ ID NO: 27809 - DNA, 260 bp, Unknown; identical to SEQ ID NO: 27762
  Description of Unknown: RightRegion for integrase B1810 sequence

SEQ ID NO: 27810 - DNA, 260 bp, Unknown
  Description of Unknown: RightRegion for integrase B1811 sequence
gccattacggtgaggtttaagggcgggtttgaaatcagaaaggacttaaatggaaattgaaatcccaacatggctttatgaaatgcttctgatcgaagcggcagaaactggttccgcgatagaagatatcgcggaattttgctttagggcaacaccgcataatcgcccccaaaaacgggacacagtttcaaacattcggtaaatgccagtgtatctcttaaaatgtccgccaaggcgcactgaatcaagccgtcagacaa

SEQ ID NO: 27811 - DNA, 260 bp, Unknown; identical to SEQ ID NO: 27781
  Description of Unknown: RightRegion for integrase B1812 sequence

SEQ ID NO: 27812 - DNA, 260 bp, Unknown; identical to SEQ ID NO: 27763
  Description of Unknown: RightRegion for integrase B1813 sequence

SEQ ID NO: 27813 - DNA, 260 bp, Unknown
  Description of Unknown: RightRegion for integrase B1814 sequence
tcaccatgcaggcgggccagtgacacccccgatctcaatcgaaaccgttatctgatttaacgcttgcagtgttttccgcgccgcgccagcagtaaggcaagctgggcggcgaaacggcaagagcgactggatgccgttaacaacgatttgacggcgttgcgtcaatctggtaaaatcaaattgaccggaactgctgttacccctcctgcgttgccaaacaccctaagttttgagggccacgctatcgagcaaatgggaaa

SEQ ID NO: 27814 - DNA, 260 bp, Unknown
  Description of Unknown: RightRegion for integrase B1815 sequence
aaagcgaactccatactttttttccagcgcgcttttggaatcattgtaaaactgcaataattttaccacactttttctgaaacgccaatcgcttcgtacaaaaggtgcttttgctttgtggttgcgtttggcacagccttgtcgatggcatctttctttttccggctggcagagttggtaatcgtcttaccgttctcgtccttgtcgccggtgatgccgcgggcagcaaagtatgcggcatagtactggtcataggtaac

SEQ ID NO: 27815 - DNA, 260 bp, Unknown
  Description of Unknown: RightRegion for integrase B1816 sequence
agcgcggttcgtttttgctcgggtttggttcaccaaaaagcactacttcatttgaggtagtgcttttttctttgtatgcgctttttaataggtgtcgggcgtaaaaggtgacccgtgtgggaatcgaaaagcccgggccccgcgtccagcgtaccgcggggcaaaaacagccccgcgggctgtttttagggcgcgggcgctttactttttacgcaccacattcgtcaagcaatagaatccgttgcaacgacggattctgt

SEQ ID NO: 27816 - DNA, 260 bp, Unknown
  Description of Unknown: RightRegion for integrase B1817 sequence
gcactgtacagccaaaaacggttgtacagtgcgtttttttatgcatttaaaatgctgtgacaacgaaatgagaacatcttttatgccctgttcgtttccgtgccggccaaacagacccgcatggcaggaagaaagggcatgctgctattttttacttcaataattttccgccttgatttcggtatagctctgggaatgcccgcatacagggcaaacttccggcgagcatgcggcatacgttacgtttccgcataccatgc

SEQ ID NO: 27817 - DNA, 260 bp, Unknown
  Description of Unknown: RightRegion for integrase B1818 sequence
ccaacgataacttttatcgggttcctgctggtgcaaacacaaagatattccctgccataaccggcaggggatatttttttgaaaaaattgtgattcgcccattgacataccgtactcagtgtggtattatatcaacacaaagtgaagagccaaggagggcaaaaacaatgacaactgagcaaatcaaggcctgcggacgcatttatgcgctgcttcgcaaggccctcggcaaggacagcctcgctgacaaccgcaacgtg

SEQ ID NO: 27818 - DNA, 260 bp, Unknown
  Description of Unknown: RightRegion for integrase B1819 sequence
cttttgtgggacaaagggaataccgttgagactgttgcactaattacccgcataaaataagggattgcggagtgcttgagatatcttaaatgtagtcttgcctaccatttgcctacgcttttttaaacggtaggcaagaatttaagatatagcgtgctttaaaatggtcattgcatcgtcctgcattttctcagtgttgaagatatacctttctattgttgtcttgatgtctttgtgtcccaggcgctccattacggttt

SEQ ID NO: 27819 - DNA, 260 bp, Unknown
  Description of Unknown: RightRegion for integrase B1820 sequence
gaaaaagaaataccgcttttatggtctgagcagcgaattaaatacggcttcggcgactgatttccacaagaaaattacataagattctcgctcaaaagtagcgcaaatccacagcctttaccttattctagttttagttgcacaaatacaatattgtatcgtaacggtaagttgagatgatgaacttctcattaactttcagaggagtttatcatgaatatcaacgtgtttaacggactacccaagtatgtccgcataac

SEQ ID NO: 27820 - DNA, 260 bp, Unknown
  Description of Unknown: RightRegion for integrase B1821 sequence
tttgatttcgacccccaaattgggccgttgctatggatgaaaattccactcacagaatagagattgtttccctaaaatctggaagtgtgttaaaaagtgtgttattttcccggcttcagcagcctcaaaaacgttgcgttgacggcctgcgctgtggcgacatcctcgccggtcagggcgtggctgtaaatgccgaaggtatccatatcttcggagtggcctacaagctccttgacttccccggcgggcagcgtcttgac

SEQ ID NO: 27821 - DNA, 260 bp, Unknown
  Description of Unknown: RightRegion for integrase B1822 sequence
agcgcggttcgtttttgttcgggtttggttcaccaaaaagcactatctcaaatgaggtagtgcttttttcttgtgctataaacttttaagggagtagaggagtacgggaatcgaacagcccgggccccgcgtccagcgtcccgcggggcaaaaacagccccgcgggctgtttttagggcgcgggagatggacgggagggtcaccaaaaagcactacttcatttgaggtagtgcttttttctttgtatacgctttttaata

SEQ ID NO: 27822 - DNA, 260 bp, Unknown
  Description of Unknown: RightRegion for integrase B1823 sequence
tttagaccgcggcttgcgaatccaccagctcccaccaaaaagctgtggcaaagatattgacgcagctttttttctttgctgcattgcacaaaatcggcaaaggcgatgaccgattttcaaagtgcgttttatagagatgtccaactgcttccgggcggttggatttttttgttaccaaccttttctgctgctttcggaatgttaaggcaataccgcataattctaagtgccgatacggcgagcgaggtgcggcagccgcc

SEQ ID NO: 27823 - DNA, 260 bp, Unknown
  Description of Unknown: RightRegion for integrase B1824 sequence
agcgcggttcgtttttgttcgtgtttggttcaccaaaaagcactacttcatttgaggtagtgcttttttctttgtatgcgctttttaataggtgtcgggcgtaaaaggtgacccgtgtgggaatcgaaaagcccgggccccgcgtccagcgtaccgcggggcaaaaacagccccgcgggctgtttttagggcgcgggagattccgcgcgggcggaagctgatgtggccggggtggttggcgtgggatgttgttgtttaag

SEQ ID NO: 27824 - DNA, 260 bp, Unknown
  Description of Unknown: RightRegion for integrase B1825 sequence
gtgtgctctgcacctatatccgtcagcaggccttttaattcgggcagcggcatagaatagcgctgggaaaggtagcgcagtgacgcacccaattcgccgtccggccctcttgacggcaaaaagagatgatttaagtataaaaaataatatcaagccggttttccggcttaacatatatgattttgctgatgatcgtccgcagggcttcgttctttgcctgttctgaaacatcgggtgatttaatgaaatcaagcacattt

SEQ ID NO: 27825 - DNA, 260 bp, Unknown
  Description of Unknown: RightRegion for integrase B1826 sequence
gaatcggaaattccaatactttggacggaacagcgaataaaatatggatttactgcctgatttaggcaaagaaaatctagcttagaatatttaatcgtataacattattaaatgttcacctactgattaacaataaaacttattgtctattattcgtatttatagaaaataagcctctctacaattttttagcgaggtttatattatgaatcttaaaatttttaacggactgcctccgtatgtccgaataacaatcttat

SEQ ID NO: 27826 - DNA, 260 bp, Unknown
  Description of Unknown: RightRegion for integrase B1827 sequence
cccacgataacttttatcgggttcctgctggtgcaaacacaaagatattccctgccttaacggcggggaatattttttgtggaaaattgcgatttgcccattgacataccacactcagtgtggtattatatcaacacaaagcgaagagccaaggagggcaaaaacaatgacaactgagcaaatcaaggcctgcggacgcatttatgcgctgcttcgcaaggccctcggcaaggacaacctcgctgacaaccgcaacgtga

SEQ ID NO: 27827 - DNA, 260 bp, Unknown
  Description of Unknown: RightRegion for integrase B1828 sequence
cccacgataacttttgttgggttcctgctggtgcaaacacggagatattccctgccttaacggcagggaatatttttcggggaaaattgcgatttgcctattgacataccacactcagtgtggtattatatcaacacaaagagagacacaaaggagctgaccacaatggcccgtgaaaaaatggtttgccaatccacaatcctggaaatgggatggacaaagagcatgatctcccggcttctgcctgagcctgtgctgcg

SEQ ID NO: 27828 - DNA, 260 bp, Unknown
  Description of Unknown: RightRegion for integrase B1829 sequence
gcactgtacagccaaaaacggttgtacagtgcggttttttatgcatttaaaatgctgtgacaacgaaatgagaacatcttttatgccctgttcgtttccgtgccggccaaacagacccgcatggcatgaagaaagggcatgctgctattttttacttcaataattttccgccttgatttcggtatagctctgggaatgcccgcatacagggcaaacttccggcgagcatgcggcatacgttacgtttccgcataccatgc

SEQ ID NO: 27829 - DNA, 260 bp, Unknown
  Description of Unknown: RightRegion for integrase B1830 sequence
tcgccatgcaggcgggccagtgacacccccgatctcaaacgaaaccgttatccgatttaacgcatgcagtgttttccgcgccgcgccgacagctccatgccaagaatcgcctgcgtatctctacgctgacgttttttatgggcgcgggtggattacgcaagccgcgctgctaaaaacagcccactgggctgtttttgcgctgtcttctgcgacagcgccgcagctgttcgaatccacccttgcggtgctttatagaagtt

SEQ ID NO: 27830 - DNA, 260 bp, Unknown; identical to SEQ ID NO: 27822
  Description of Unknown: RightRegion for integrase B1831 sequence

SEQ ID NO: 27831 - DNA, 260 bp, Unknown
  Description of Unknown: RightRegion for integrase B1832 sequence
tttcccttggaatcgcaatcaaccgttgaagcgatagtttcgctacgaagagaaatctagtggaaatcattcgttttacgttgttttctcgtcatgttgtgttcgatggcgagggcgataaactccacaataaacgcattgaaaatcacatcaccgtttcggtggtaattgatatggagtgcggaaacacaaaaaatgaatgttcagaatggaaaggatatcgtgagaacggtgtcctttcctcataggctttgccgcag

SEQ ID NO: 27832 - DNA, 260 bp, Unknown
  Description of Unknown: RightRegion for integrase B1833 sequence
tcgccatgcaggcgggccagtgacacccccgatctcaatcgaaaccgttatctgatttaacgcttgcagtgttttccgcgccgcgccgccagctccatgccaaggccggcggcagagccgacagcgcccgcaccaatgtggcagggtttggtagcagtgccagcagtaaggttggcttcattgcccgtaaacaaaaacgtttcgatgcagccaatacagagttgcagcagatgcgggaaactggtacaataaaggccaga

SEQ ID NO: 27833 - DNA, 260 bp, Unknown
  Description of Unknown: RightRegion for integrase B1834 sequence
cactcttccctcactccctgctctttcctttcgaaacttgccgatttagggaatcggtaatcgtgaatacgcatagaaagcggatattgcagcgacacagaaatgcccggcaaatgcacggagctgaaaaaaatctggatcgcctccgtcaacaccgcgaagaaaaaccgcacatgatccgcccgcccacaccgtgggcgggtttttgctgctccgccccccctcacgctcccggtgcgctcaggcgcgcggccagctcc

SEQ ID NO: 27834 - DNA, 260 bp, Unknown
  Description of Unknown: RightRegion for integrase B1835 sequence
tctgattctgactccaaaattgtgccgttgctatggctgaaaattccactcacagaatagagcttgtttccctaaaatctggaagtgtgttaaaaagtgtgttattttcccggcttcagcagcttcaaaaacgttgcgttgacggcctgcgctgtggcgacatcctcgccggtcagggcgtggctgtaaatgccgaaggtgtccatatcttcggagtggcctacaagctccttgacttccccggcgggcagcgtcttgac

SEQ ID NO: 27835 - DNA, 260 bp, Unknown
  Description of Unknown: RightRegion for integrase B1836 sequence
gaatcggaaattccattgctttggtctcagcaacgattaaagtatggcttcagtttttgattgtacacagatttttacacaagcgatattttattaaaataatgtcaagtccttatctatgatacactttcaacttgtaattgttttatctgtgtattgcacgcaaatgtattaaacctgaaaataagcctctattcaattatttaacgaggcttatcaatgaacttgaatatttttaacggactacctcagtatgtccg

SEQ ID NO: 27836 - DNA, 260 bp, Unknown
  Description of Unknown: RightRegion for integrase B1837 sequence
tcatcgcaattaagacatccatgccgaagctatatgtacaggcaccctagctggccataattcagtaagactagcactaggattgccacttcttatccttccaagttcaattgctattggagatataatttcatatgaaaatgaacaatctaaaactagagatggaagaaaggtaagatatacttttgcaggtgctggctactttaagagaatgcaagaactaggactatatacacttaatataaaagaaatcaagaata

SEQ ID NO: 27837 - DNA, 260 bp, Unknown
  Description of Unknown: RightRegion for integrase B1838 sequence
tctagggagaaacggcgcaggaaaaacaactttaacaaagcttcttatgagactttatgagccaacagagggaaggattcttcttaatggagttgatgtaaagaagtatgacagagatacatattttaaaatatttgcgcctgtgttccaaaacattgaaatttttgcttttccggtatggcagaatatttcaatgaagcctgaaaatgagacggacaaaaacagaacaatggaggctttggaaaaaagtggtttggatg

SEQ ID NO: 27838 - DNA, 260 bp, Unknown
  Description of Unknown: RightRegion for integrase B1839 sequence
tctagggagaaacggtgcaggaaagtctacgctgctaagagttctgtcagggatatataaggcagataagggagaagcaataatcgatggaattaatgtgtatgagaatacatacatgaagaataagctggtgttcgttgcagatgaattattctttcttgcaggtgcgaacatgaagagcatggctaagttctatagttcaatatatgataattttgatatggacagattcgcagagcttacgaaaacatttggacttg

SEQ ID NO: 27839 - DNA, 260 bp, Unknown
  Description of Unknown: RightRegion for integrase B1840 sequence
gtctatatgaccggcgggatatttgtcctggtgtttccacttgcctatgccaagaaataaagaaagaggctactacacagggaatttcctgtgtggtagcctctttgtgttctctcatagccataacggatttcgttataatctaccaaaatccagcgagattctaaaatcgttgttagaatctaccgtaaaggagcatggctatgattaggattttactgtccacccggcttggcgagcggaggtggtcacaagctgac

SEQ ID NO: 27840 - DNA, 260 bp, Unknown
  Description of Unknown: RightRegion for integrase B1841 sequence
tgttatttaacaatacgtaagaacgacacaaggcattttataggcgaacttgtagcttaaaaatagcccgcaaacactgatatttactggttttttaacacatttaacaggagtggaatcaatgaataatacgcataccgcatatgacgtaatgaaagaatatttaataaccgatgcagagtttgacggactgtaccagataccgatgttgccgaagtcagatgccgtaccgggcaaaggaatagatttcgtatcttcaa

SEQ ID NO: 27841 - DNA, 260 bp, Unknown
  Description of Unknown: RightRegion for integrase B1842 sequence
atctacatggtcagcggcattttcgttctggtctgtccgttcgatcatgctcggaaatgaaaaaagcggctaccgcacagtttctctgctgtgtggtagccgcttcgttttttatcatagccataacggttttcgttatattctaccaaaaccctgcggaattctaaaatcgttgttagaatctaccgtaaaggagcatggctatgattaggattttactgtccacccggcttggcgagcgaaggtggacgcaagctgac

SEQ ID NO: 27842 - DNA, 260 bp, Unknown
  Description of Unknown: RightRegion for integrase B1843 sequence
gaatcggaaattccattgctttggtctcagcagcgattaaagtatggcttcagtttttgattgtacacagatttttacacaagcgatattttattaaaataatgtcaagtccttatctatgacatgctttcaacttgtaattgttttatctacatattgcacgcaagtgtattaaacctgaaaataagcctctattcaattatttaacggggcttatcaatgaacttgaatatttttaacggactacctcagtatgtccg

SEQ ID NO: 27843 - DNA, 260 bp, Unknown
  Description of Unknown: RightRegion for integrase B1844 sequence
tcatcgcaattaagacatccatgcagaagctatatgtacaggcaccctagctggccataattcagtaagacttgcactaggattgccacttcttatccttccaagttcaattgctattggagatataatttcatatgaaaatgaacaatctaaaactagagatggaagaaaggtaagatatacttttgcaggtgctggctactttaagagaatgcaagaactaggactatatacacttaatataaaagaaatcaagaata

SEQ ID NO: 27844 - DNA, 260 bp, Unknown
  Description of Unknown: RightRegion for integrase B1845 sequence
aaaagagttgactctatagtttttagaaatggattagtacataaattttactataaataaaaagagggctagtgttttactagtcctcttttacttctatattaactttttcaattttatcatcagctatattattttttttgattttttcaattttatcatttatatcatcagctattacttttaaaaattcattgtacttttcttcattccaattatcactatctttttctaagttatattcttgattaataataggc

SEQ ID NO: 27845 - DNA, 260 bp, Unknown
  Description of Unknown: RightRegion for integrase B1846 sequence
gaatcggaaattccattgctttggtctcagcagcgattaaagtatggcttcagtttttgatagtacacagatttttacacaagcaacattttattaaaataatgtcaagtccttatctatgacacgctttcaacttgtaattgttttatctgtatattgcacgcaagtgtattaaacctgaaaataagcctctattcaattatttaacggggcttatcaatgaacttgaatatttttaacggactacctcagtatgtccg

SEQ ID NO: 27846 - DNA, 260 bp, Unknown
  Description of Unknown: RightRegion for integrase B1847 sequence
atggtcacatcagaatggctgtcctgtgtgttatacaggacagtcattttgtcatcatagaggtaaatcttgttgacaaaggtatccaccagagcctgacggtatttcaggtcatttacatcgcctttacggaactggttcaggaagaaccgcacttcattgaccgtgggcgtagggtgggaggaagtctccacaagaatctgctgttccagctcgttgcgttcccgtttcttctgggagatacgctccgcaatcacatc

SEQ ID NO: 27847 - DNA, 260 bp, Unknown
  Description of Unknown: RightRegion for integrase B1848 sequence
gaatcggaaattccattgctttggtctcagcaacgattaaagtatggcttcagtttttgattgtacacagatttttacacaagcgatattttattaaaataatgtcaagtccttatctatgacacgttttcaacttgtaattgttttatctgcatattgcacgcaaatgtattaaacctgaaaataagcctctattcaattatttaacggggcttatcaatgaacttgaatatttttaacggactacctcagtatgtccg

SEQ ID NO: 27848 - DNA, 260 bp, Unknown
  Description of Unknown: RightRegion for integrase B1849 sequence
tcgcgtgtctcttatttttttggttcactcatttcattcgttcaccccaagggtaattaaaatgctcgatggaaatgaatcccacctccgccaagattttgctgcgcaaaatgcttgcacggcgcaaatgcgccggttttggtatccgtgggacatttaacagcgcacaagcaggtgaattgcttgtgcaccaaggttttcgcacagcgaaaacacttgtgacgcgccgctcggcgcgtttttttgtttttccgcagacg

SEQ ID NO: 27849 - DNA, 260 bp, Unknown
  Description of Unknown: RightRegion for integrase B1850 sequence
tatctaaaacccaaccattgtttcgccgtggcggacatttcccgtcaaggttttttgtaaacacacaaagtcaccgctgtgataatttgtgtgtcacttttacaaattcaggggcgtgcccctgcacccaatccgctttactttatgtaaggcggttttttattgccgctcatggatcattatttataaacccaactttgttatttcaccatggcagacgctgacataataaaaaagagtgcattaccacctcagataat

SEQ ID NO: 27850 - DNA, 260 bp, Unknown
  Description of Unknown: RightRegion for integrase B1851 sequence
ctgatttcgaggacttttgcttttcataagtcaccattttcagataccgtttttttctgacccaaacgctgaccccaacgggagcgggtagcggaaagcatcagacggcacgggagaggatattgcccatcgtctgcgccgccttgagctgcgcgtcggtggtcacatgagcataagtgtccagcgtgaacccggctgagtagtggcccagcatactgctgacggttttcacgtccacgccgttctggagtgccatggtc

SEQ ID NO: 27851 - DNA, 260 bp, Unknown
  Description of Unknown: RightRegion for integrase B1852 sequence
tgttatttaacaatacgtaagaacgacacaaggtattttataggcgaacttgtagcttaaaaatagcccgcaaacactgatatttactggcttttaacacatttaacaggagtggagtcgatgaataatacgcataccgcatatgacgtaatgaaagaatatctgataaccggcgcagagttggatggtccataccagataccggttattccaccgatgcagctggcgccaaagaaaagcatagatttcgtttcttcaaa

SEQ ID NO: 27852 - DNA, 260 bp, Unknown
  Description of Unknown: RightRegion for integrase B1853 sequence
tctaggaagaaatggagcgggaaagacaactttgatgagagttttgaccactgtgcttaaacctacaaacggaatggttacattagacggaattttgtatagcgaaggaaactatgaaaaaatccaaagaaagatagggtatttaccacaggaaattgaactgtatcctaatttgacggttcaggagtgtttggagtatatgggagatctggcaggtgttccgaaagcagaatgtagaaagcggatagaatattatttga

SEQ ID NO: 27853 - DNA, 260 bp, Unknown
  Description of Unknown: RightRegion for integrase B1854 sequence
ggatttccgccgcttccggcggcgatatctttgccatggtgcagtatgtggctctggtaatgaacggtatcgttatggcggcctttgccctggtgatgtacccccatgccaaggtggccgcgggccgcatcggtgaagtgatggacgccaacatgatgaccgagaccgccgaggaggatgacaatatcacctttgccggggacatccgcatggagaatgtgacctttcggtatgagggtgctgacgccgcggcggtaagc

SEQ ID NO: 27854 - DNA, 260 bp, Unknown
  Description of Unknown: RightRegion for integrase B1855 sequence
gaatcggaaattccattgctttggtctcagcagcgattaaagtatggcttcagtttttgattgtacacagatttttacacaagcgacattttattaaaataacgtcaagtccttatctatggcgcactttcaacttatgattgttttatctgcgtattgcacgcaaatatattaaacctgaaaataagcctctattcaattatttaacgaggcttatcaatgaacttgaatatttttaacggactacctcagtatgtccg

SEQ ID NO: 27855 - DNA, 260 bp, Unknown
  Description of Unknown: RightRegion for integrase B1856 sequence
tctagggagaaacggagcaggcaagacaactcttttacgctgcctgatgggactgtataggtcaacaggagacatagtgatagatggacacaatttaaacagcgatgaggcagccgccagggaagtaatagcggtagtaggtgatgagggattttttgatgagaatataaatctcgaaaagctcggaaaatactatgggcagatgtatgtgcggtttgatatggaaaagtatctgggatatcttgaaagatttaaccttg

SEQ ID NO: 27856 - DNA, 100 bp, Unknown
  Description of Unknown: RightRegion for integrase B1857 sequence
tcatcgcaattaagacatccatgcagaagctatatgtacaggcaccctagctggccataattcagtaagacttgcactaggattgccacttcttatcctt

SEQ ID NO: 27857 - DNA, 260 bp, Unknown
  Description of Unknown: RightRegion for integrase B1858 sequence
tcgagggctttttctttggttacggaaaccaccggctctgccggtggaggcacctcgtaaaagctttagctttaagcatcgagcgaagcgagctacaagtagaaggcttgataaaagattagccacaagtagaacatgaatcgcccgtttacgggctgtaggacaaaaaatgcaagtgaaataaaactcagtgccccttgaggggcttgccagtaacaggcccttatagggccaaatcaaacctccggcttagccggagg

SEQ ID NO: 27858 - DNA, 260 bp, Unknown
  Description of Unknown: RightRegion for integrase B1859 sequence
aatttcagctgttttgtgctacaatggaagcgaaaacggcagagggggaacggaaaatgaaaaagctgcttgctgtgtgcctgacggcgctcgtttgctgggtttgcgcggggtacgcggaagaaacgcaggtcggcgatacggtcatgttcgggcaatatgaacaggatggaaatctggacaacggcagtgagcccattgcgtggcaggtgctggatgtgcagggcggcaaagcgctgctgatgagccggtacgcgctg

SEQ ID NO: 27859 - DNA, 260 bp, Unknown
  Description of Unknown: RightRegion for integrase B1860 sequence
tgttatttaacaatacgtaagaacgacacaaggcattttataggcgagcttgtagcttaaaaatagcccgcaaacactgatatttactggttttaacacatttaacaggagtggaatcaatgaataatacacataccgcatatgacgtaatgaaagaatatctgataaccggagcagagcttgacggactgtaccagataccgatgttgccgaagttagatgccgtaccgggcaagggaatagattttgtatcttcaaaa

SEQ ID NO: 27860 - DNA, 260 bp, Unknown; identical to SEQ ID NO: 27849
  Description of Unknown: RightRegion for integrase B1861 sequence

SEQ ID NO: 27861 - DNA, 260 bp, Unknown
  Description of Unknown: RightRegion for integrase B1862 sequence
tctagggagaaacggagcaggaaaatctacgtttctgcgtctggcagccgggatccttaaagcagatgagggccatgtgaccatagacggagaagaggtatttgaaaacataaaagcaaagaaaaagtttttctatataccggacgatgctcattttttcagcaatgcttctcctcttgatatgatggaatattacagcgttgtgtatgaacgttttgacaaggcccgtttccataaattaatgggtaatttcggcttag

SEQ ID NO: 27862 - DNA, 260 bp, Unknown
  Description of Unknown: RightRegion for integrase B1863 sequence
cgcaaagccaggcgcatcaaccgtttccgggctttttcgagcccggatttcttcttttgaaccatagatttttatggaggtctcggagcaactgaccggatttgaaccggaggacctcatgccttggacagtttccaacctccagcgcccttttagagaggacttttctctcgaaaaaagcggcatcatcgcagaaaaagaatcacaaatatttgggcgtcgttttgtcggctttgacgggccgaaaaaagcggcgccct

SEQ ID NO: 27863 - DNA, 109 bp, Unknown
  Description of Unknown: RightRegion for integrase B1864 sequence
tctatcgaaattcatttcaatctcaaacccatcccggaagtggagcaggtcacagcctgacctgccccgccggggcggttcttaaaaaactccatagatatttcttgac

SEQ ID NO: 27864 - DNA, 260 bp, Unknown
  Description of Unknown: RightRegion for integrase B1865 sequence
tgttatttaacaatacgtaagaacgacacaaggcattttataggcgaacttgtagcttaaaaatagcccgcaaacactgatatttactggttttttaacacatttaacaggagtggaatcaatgaataatacgcataccgcatatgacgtaatgaaagaatatttaataaccgatgcagagcttgacgggctgtaccagataccgatgttgccgaagtcagatgccgtaccgggcaaaggaatagatttcgtatcttcaa

SEQ ID NO: 27865 - DNA, 260 bp, Unknown; identical to SEQ ID NO: 27843
  Description of Unknown: RightRegion for integrase B1866 sequence

SEQ ID NO: 27866 - DNA, 260 bp, Unknown
  Description of Unknown: RightRegion for integrase B1867 sequence
gtctatatgaccggcgggatatttgtcttggtgtttccacttgcctatgccaagaaataaagaaagaggctactacacagggaatttcctgtgtggtagcctctttgtgttctctcatagccataacggatttcgttataatctaccaaaatccagcgagattctaaaatcgttgttagaatctaccgtaaaggagcatggctatgattaggattttactgtccacccggcttggcgagcggaggtggtcacaagctgac

SEQ ID NO: 27867 - DNA, 260 bp, Unknown
  Description of Unknown: RightRegion for integrase B1868 sequence
atctatatggtcagcgatgttttcgtcttggtctgcccgttcagccatgctcggaaataagaaaagcggctaccgcacagtttctctgctgtgtggtagccgcttcgtttttcgtcatagccataacctatttcgttatattctaccaaaaccctgcggaattctaaaattgttgttagaatctaccgtaaaggagcatggctatgattaggattttactgtccacccggcttggcgagcggaggtggacgcaagctgac

SEQ ID NO: 27868 - DNA, 70 bp, Unknown
  Description of Unknown: RightRegion for integrase B1869 sequence
tctagggagaaacggtgcgggaaaaacaaccactttacggacgattttagagcttactaatcgaacttct

SEQ ID NO: 27869 - DNA, 260 bp, Unknown
  Description of Unknown: RightRegion for integrase B1870 sequence
gaaacggaaattccattgctttggtctcagcagcgattaaagtatggcttcagtttttgattgtacacagatttttacacaagcgatattttattaaaataatgtcaagtccttatctatgacacgctttcaacttgtaattgttttatctgtgtattgcacgcaaatgtattaaacctgaaaataagcctctattcaattatttaacggggcttatcaatgaacttgaatatttttaacggactgcctacgtatgtccg

SEQ ID NO: 27870 - DNA, 260 bp, Unknown
  Description of Unknown: RightRegion for integrase B1871 sequence
gaatcggaaattccaattctttggcgggaccagcgaattaaatatggattttccgtttgattttacacagatttttacacaagatgaataaataaaaaaacattgggcgtacatactgtcaagcgtaattctatttagagttgaatttatttaacattgttcatttataatttaggaaacacaataaacctctaatcaatagtttaagaggtttattttatgaactcaaatatttttagcggactacccgagtatgtccg

SEQ ID NO: 27871 - DNA, 260 bp, Unknown
  Description of Unknown: RightRegion for integrase B1872 sequence
gagagcgcggttcgtttttgttcgggtttggttcaccaagacagcataatccgaacttaattctttatgagaatgggttcggattttgtttttgtattgatgatttatatacgaaatagtacacaagaagtgacagtaatctatgcgattactgtcactcttatatttgaaaatttcagtttgagatgtgactgtacagcgataaaaaagattctttgtttactttaaggagcaattgtggtatattaatcatataagct

SEQ ID NO: 27872 - DNA, 260 bp, Unknown
  Description of Unknown: RightRegion for integrase B1873 sequence
atctacatggtcagcggcatttttgttctggtctgtccgttcgatcatgctcggaaatgaaaaaagcggctaccgcacagtttctctgctgtgtggtagccgcttcgttttttgtcatagccataacggttttcgttatattctaccaaaaccctgcggaattctaaaatcattgttagaatctaccgtaaaggagcatggctatgattaggattttactgtccacccggcttggcgagcggaggtggtcacaagctgac

SEQ ID NO: 27873 - DNA, 260 bp, Unknown
  Description of Unknown: RightRegion for integrase B1874 sequence
tgttatttaacaatacgtaagaacgacacaagacattttataggcgaacttgtagcttaaaaatagcccgcaaacactgatatttactggttttttaacacatttaacaggagtggaatcaatgaataatacgcataccgcatatgacgtaatgaaagaatatttaataaccggtgcagagcttgacggactgtaccagataccgatgttaccgaagtcagatgccgtaccgggcaagggaatagatttcgtatcttcaa

SEQ ID NO: 27874 - DNA, 260 bp, Unknown
  Description of Unknown: RightRegion for integrase B1875 sequence
gaatcggaaattccaattctttggcgggaccaacgaattaaatatggattttctgtttgattttacacagatttttacacaagatgaataaataaaaaaacattgggcgcacatactgtcaaacgtaattctatttatagttgaatttatttggcattgttcatttataatttaggaaacacaataaacctctaatcaatagtttaagaggtttattttatgaactcaaatatttttagcggactacccgagtatgtccg

SEQ ID NO: 27875 - DNA, 260 bp, Unknown
  Description of Unknown: RightRegion for integrase B1876 sequence
tgttatttaacaatacgtaagaacgacacaaggcattttataggcgaacttgtagcttaaaaatagcccgcaaacactgatatttactggttttttaacacatttaacaggagtggagtcgatgaataatacgcataccgcatatgatatagtgaaagaatatctgataaccggagcagagcttgacgggcaatttcagatacccatgctgccaaaagtagatttctcaccgggcaagtcgattgacttcgtttcttcga

SEQ ID NO: 27876 - DNA, 260 bp, Unknown
  Description of Unknown: RightRegion for integrase B1877 sequence
gttcgtacgggacacacgtttaaaaagatgattgaatcatacgaaaacagtatgaaataatttgatttaataaataaatcataaaaatatatcggggcatatggcaacagctgtatgctccgatgtttattatgcaatattattcttaaaatatcagttgattttcaaattatgctcttttatgtactccaaaagtgctctgcaaccattgtcaatgtcggtgtaagtaacatcaaaattgcctgtgtaccatggatctg

SEQ ID NO: 27877 - DNA, 260 bp, Unknown
  Description of Unknown: RightRegion for integrase B1878 sequence
gacgggatcacctacgataaggaaaagaataggctgtattttaactttttcatttcataaaaaacgccggaagcccttataaaatggggcttcccggcgatttgtagggtattgcaatccgggccaccgtattgtgatgcaataatcttcgcgatccgtgcatccgttttcgtgatatttaccggatattgcaatcgtttttcatatatccacatacactaacacctgcctttcccggatctttcccatggccatggctg

SEQ ID NO: 27878 - DNA, 260 bp, Unknown
  Description of Unknown: RightRegion for integrase B1879 sequence
ccagcaatctacatggtcggcggcgcgtttgtcctcgtgtgctctcttgtgcaagaatagaaaaagagcacctgcccttcagcgaagatgggcaggtgctcttttctacattttttcataacgtaagccgttataacctaacgattccatgaaaaatgagaaaatacttgttatattttctcgtaaaggagcatggctatgattaggattttactgtccacgcgcctcggcgaaaggcgctggacgcaggctgatctcgc

SEQ ID NO: 27879 - DNA, 260 bp, Unknown
  Description of Unknown: RightRegion for integrase B1880 sequence
gtatctagggagaaacggagcaggaaagacgacgcttttaagacttatgtcaggaattaaaaagcctatatccggtaaggtgaaagtgaatggaagatgtgcggtgcttccgcagaatccaatggcactgcttagtcagataagtgttgaggaagaattagcatcagcagttatggataagggaaattcgtctgttaagaatatggacaggaaacagaggattgtgcttgttgagaatatgctggagcggacgggacttc

SEQ ID NO: 27880 - DNA, 260 bp, Unknown
  Description of Unknown: RightRegion for integrase B1881 sequence
gaaatggaagaagccttccagcaccaccttaccgagcgtaacaaagagaaaacggcatagccacaagggttacaccgtttccgagaacttataaaactgtgatacaagagccgccccggggcaccttccttatggagggtgccccgatagggtggtgtttttggagcgggcgacgaggctcgaactcgcttcccggcatcccgcgaatggcatagccattcgcaggaaccctgcctcacctctgaatttgacgcgcttcg

SEQ ID NO: 27881 - DNA, 260 bp, Unknown
  Description of Unknown: RightRegion for integrase B1882 sequence
gctgtatcgacctacgatggtgcggagatttttgaagaaatttccgagaagggggcataaaagcgatgcgcttgcccgcagcactctgcaaaatgcaaagaaagaagcgtgaaaccgatggattttcaaaaaatatattgatgaccccgcccggttcgcatccgacttcagggttcggagcccggcacggtctgccaatgttttttaggcataaaaaacgccgcatcgtacaaaacgatgcggcaaattggtggagctgg

SEQ ID NO: 27882 - DNA, 260 bp, Unknown
  Description of Unknown: RightRegion for integrase B1883 sequence
gtttctgtggataaggacggggaaaagatgaaaatcatccggcggcacaaggacttgtaacccatgctgaaaccatgagcatttgacaaacaacgcgctggcggggcatactggaaacctctctaatcctattggcggtcgttccgccccgtcagacagcggctttttttatgcccaaaatgggctgttacctatcactggtcggggtagagaccggatatacaacacccgaaaggggaaatccggacgcggtaccaata

SEQ ID NO: 27883 - DNA, 260 bp, Unknown
  Description of Unknown: RightRegion for integrase B1884 sequence
tttttcactgttaccttgtcagagctgcggttttttggtaaagtaaaaagtaagaagtaatagtgaataggtaaggtgtatttcaattcgcggaattgaaataccgattgaaagttggtgcgtaaaatgagcgtcagtccgcttatcggcaaatccaagacttttgcattagaaaccataaaggtctgcaacgaggtgaaggcttcaaagcgcgaatcggtgctcaccaatcagctcatccgctcgggcacaagcattgg

SEQ ID NO: 27884 - DNA, 223 bp, Unknown
  Description of Unknown: RightRegion for integrase B1885 sequence
tgttcaactctcatttcctgtgagtctcgaggattttattcaggggaatcaggagtatgatggtgaacctgggcgtcggcgtgcgctttgtgagctcggagcgaatttttctcgcacgaaagtttccttttgcgcacgcaatcggtcatttcgctagactgggcgcacggcctgatcgttcgaacgaagcatgaggaagatgagcaacaaacagtctgacact

SEQ ID NO: 27885 - DNA, 260 bp, Unknown
  Description of Unknown: RightRegion for integrase B1886 sequence
ttgcttcgcctgcatgtcttttgggctttttgcgaaaaaccgggatgttcccgcagataagcgggtccccataacaaaagagaccgccgtacagcaagctgctgtacggcggtctcttcttcttttttcagttccgcgggatggccattcggcgctctgctttctttacgagccatgctcccgcccatccgcaggcggctcccaaaatggcaccacccagaatatccgtcgggtaatggacacagaggtacatccgcgag

SEQ ID NO: 27886 - DNA, 260 bp, Unknown
  Description of Unknown: RightRegion for integrase B1887 sequence
gctgtgtcaacctacgatggtgcggaaatttttgaagaaatttccgagaagggggcataaaagcgatgcgcttgcccgcagcactctgcaaaatgcaaagaaagaagcgtgaaaccgatggattttcaaaaagtacatggatgaccccgcccggttcgcatccgacttcagggttcggagcccggcacggtctgccaaagttttttaggcataaaaaacgccgcatcgtacaaaacgacgcggcaaattggtggactcga

SEQ ID NO: 27887 - DNA, 260 bp, Unknown
  Description of Unknown: RightRegion for integrase B1888 sequence
gagcatccttttggtacgaactatacatatgataaaagtagaagtagaaagcacatttgaacctataataggtagtgaactccaaagtaaagaattaatagatcatctaaccaaaagtgacgacaatgaaaatatatggaaaagcgaaatatttggtcgcagtctagatgtaatagttcaagaaggaatacaagcaaaattatcaatgatgccagataatgtaagatttaaattatgtcaaaccctaacaaaaataataa

SEQ ID NO: 27888 - DNA, 260 bp, Unknown
  Description of Unknown: RightRegion for integrase B1889 sequence
gaaccctacattgtgtggggaacggtgttcgttcaaactaaaagacactccttaccttaatcggtagggagtgtcttcttttattcttcgccggaatacccgttcgctctggcgcatttcagcgcacccaagatcatcttgtcctgagccagtgttcgttctttcagctcatagagtggagtacggcgatgatcgtcccattcaatgagctgctttttgtcgtgaacgacttgaccctcatagagattgataaccttgtc

SEQ ID NO: 27889 - DNA, 260 bp, Unknown
  Description of Unknown: RightRegion for integrase B1890 sequence
tatagaagaatagcaccatgcttgcaagccggttgccctcccacgcgggggagggcttagggggactggatttttacgttggatttgctataataagcgtaaaggatgcaggcatcgacttctgcagcaaacggagagcaatataagaggtaaacaccatgcaatacgtcaatttcggcaccacaggcttacaaatctcccgccttgggtttggcggcattcccattcagcgcatcgaccagcccggcacgcgggagctg

SEQ ID NO: 27890 - DNA, 260 bp, Unknown
  Description of Unknown: RightRegion for integrase B1891 sequence
gaaccctacattgtgtggggaacggtattcgttcaaaccaaaagacactccttaccttaattggtagggagtgtcttcttttattcttcgccggaatacccgttcgctctggcgcatttcagcgcacccaaaatcatcttgtcctgagccagtgttcgttctttcagctcatagagtggagtacggcgatgatcgtcccattcaatgagctgctttttatcatgaacgacttgaccctcatagagattgataaccttgtc

SEQ ID NO: 27891 - DNA, 260 bp, Unknown
  Description of Unknown: RightRegion for integrase B1892 sequence
ttagtatcccgtcaggaatggtgcaggaaaaagcactactatcaatctgatattaaatgaactaaacaaagatagcggacagatacaggtctttggaatagaccacacaattccaacagtcaaagacaatattggcgttgtttttgatgaatgtaattttcatgatgtgtttacagccacagatattgaaaaaatcttaaaaggcatttataagacatgggatagtaacctctttttgcaatacttgaaaaaattcaaaa

SEQ ID NO: 27892 - DNA, 260 bp, Unknown
  Description of Unknown: RightRegion for integrase B1893 sequence
ggtgtggcggtatcgactatatccgttgaaacaggtaaatatggaaaaaaggtcgcataaccgacggtgttatgcgactacactaagggagaaaaaacttctatatcactactgtgctttcgcaccggggttatcattaccgtaaccttccagaaggtttacaacgccccatacaccaacacctgcaccgatcaggcagataacgctcttgagtacggtacaagcagtagaaatgaaagaagaagtatcaacagcacccg

SEQ ID NO: 27893 - DNA, 260 bp, Unknown
  Description of Unknown: RightRegion for integrase B1894 sequence
ccattgttatcatataaagaacttggtgaagctgctgctgaatatgccaaaacacattaaataaaaggtggggagatttttaagatttccctacctttcttctatataaatcagcatactaagtttaaagaagcttaaataattggctatcatttctatagtttctatattttcattacttttgtggtatatttataaactaacaattcaaagctatatgaacaactttgtagcgatagattttgaaaccgccaatgcag

SEQ ID NO: 27894 - DNA, 260 bp, Unknown
  Description of Unknown: RightRegion for integrase B1895 sequence
gagatggaagaagccttccagcaccacctcgctgagcgtagcaaagagaaaacggcgtaaccacaagggttacaccgtttccaagaatttattaaattgagatacaagagccgccccggggcaccttccttacggagggtgccccgagggcggcttttctaagaaattgaagttagcgaaagctaaccaccataacagaggtcggaggggaatgattatgcggtttgcagcacttggcgaaagaaaaaatccagcggtac

SEQ ID NO: 27895 - DNA, 260 bp, Unknown
  Description of Unknown: RightRegion for integrase B1896 sequence
ggtttgagtgctgattataaggtcaagatagaatttatgcaaattgttatctttgtataaatcgtgccataagatatactttattttaaaataaacagcctttagttattttatagcacctatggtattgacaattaatagatactatgcaactttacgaaccttggataagaaaggattaattgttggtgcatctgaaaaaaacggaaatatgccatttcgtacagtatattcaataagtgaaaagggtaaagaagagt

SEQ ID NO: 27896 - DNA, 260 bp, Unknown
  Description of Unknown: RightRegion for integrase B1897 sequence
gcgtccggtagtccgtgccgtacttggcggcgatgcccgagagcgtgtctccgctcttgaccgtgtaggtcttcttggacgacgccccgaggcggtcgttgaccacgccctgcacctccgcgtagcgcccgccgagcacgcgcttgcgaagctcgccgctgccgagctgcccacggattaccgcgtcggccagctccgtggcccccgtcttcaggacgtagttcaccaactcctgcacctcgtcgtagcggtccccgagc

SEQ ID NO: 27897 - DNA, 260 bp, Unknown
  Description of Unknown: RightRegion for integrase B1898 sequence
acggagcttttgtgggacaaagggaataccgttgagacggtctgtttgctctgtcattgacagtggggataattggattgcgatatagtacagacattgtgttagcggtagcaactgtggcggctattcaagagaaataccatgtgatgaaaaaaattaatcggaggtgcaacatgagcgaaaagctgaaggtactgataataaacggctcgccgcgagtcggcggcaacacgtcgatagcgctgcgcgagatggaaact

SEQ ID NO: 27898 - DNA, 260 bp, Unknown
  Description of Unknown: RightRegion for integrase B1899 sequence
gctgtatcaacctacgatggtgcggaaatttttgaagaaatttccgcaaagggggcataaaagcgatgcgcttgcccgcagcactgtgtaaaattcaaagaaagaagcgtgaaaccgatggattttcaaaaagtacatttatgaccccgcccggttcgcatccgacttcagggttcggaacccggcacagtctgccaaagttttttaggcataaaaaacgccgcatcgtacaaaacgatgcggcaaattggtggaggcaa

SEQ ID NO: 27899 - DNA, 260 bp, Unknown; identical to SEQ ID NO: 27659
  Description of Unknown: RightRegion for integrase B1900 sequence

SEQ ID NO: 27900 - DNA, 260 bp, Unknown
  Description of Unknown: RightRegion for integrase B1901 sequence
agttatgatataatactatcggaagttctaagtgtttatattgataatgagtatttatgaaaagagaaaagatatcatataatggagatactttgttacaaagggcaacattatgaaatataacgggggattatttcaaaacagaaagtttatagagcaaaaattgctcttgtatggtttttcttttgaaaaagagcgatatgtctattctgtcggtcttatgcacagtgatttcagaatggatatatcaatcgacaaag

SEQ ID NO: 27901 - DNA, 260 bp, Unknown
  Description of Unknown: RightRegion for integrase B1902 sequence
gagatggaagaggcctttcagcagcacctcgcccagcgcaacaaagagaaaacggcgtaaccgcaaaggctacaccgtttcaaagaaacaaatttaattgagatacaagagccaccttggggcaccttccttacggagggtgccccaatggggtggctgttcttttgcaaaatttttaagcgtacatcataacggtgtgcgctgtttttatgcctgtttttaaagaatctaaaatgaaaggaagtggtgaatatggcgac

SEQ ID NO: 27902 - DNA, 260 bp, Unknown; identical to SEQ ID NO: 27883
  Description of Unknown: RightRegion for integrase B1903 sequence

SEQ ID NO: 27903 - DNA, 260 bp, Unknown
  Description of Unknown: RightRegion for integrase B1904 sequence
aacaccataacggtagttggaatggtatttgtccaaaccagaaaacacgccctgccttaattggcaaggcgtgcattttttatctcttgtacatattttggagtgccccagcctctccggctttctcgatagcccgcttatgcagatactcataaacggccatatcgtcctccgggaatttgtctccgcttcggtgatgggcatcgatcattcgaaccacgttcttgtgcagggcattcgcatggttcacctcttcgccg

SEQ ID NO: 27904 - DNA, 260 bp, Unknown
  Description of Unknown: RightRegion for integrase B1905 sequence
ctgatttcgaggacttttgcttttcataagttccgtttttatggtgttgcttttttctgacccaaacgctgaccccaacgggagcgggtagcggaaagcatcagacggcacgggagaggatattgcccattgtttgcgccgctttgagttgggcgtcggtggtgacgtgggcgtaagtgtccagcgtgaaacccgccgagtagtggccaagcatactgctgacagtcttgacgtccacgccgttttgcagggccatggtt

SEQ ID NO: 27905 - DNA, 260 bp, Unknown
  Description of Unknown: RightRegion for integrase B1906 sequence
ctgatttcgaggacttttgcttttcgtaagttgctattttcggacgctgctttttcctgacccaaacgctgaccccaacgggagcgggtagcggaaagcatcagacggcacgggataggatactccccatcgtctgggccgctttgagctgggcatcggtggtgacgtgggcgtaggtgtccagtgtgaagcccgcggagtagtgacccagcatactgctgacggtcttgacgtccacgccgttctgcagggccatcgtc

SEQ ID NO: 27906 - DNA, 260 bp, Unknown
  Description of Unknown: RightRegion for integrase B1907 sequence
ctgatttcgaggacttttgcttttcataagttccgttttttgggtgttgcttttttctgacccaaacgctgaccccaacgggagcggatagcggaaaccatcaaacggcacgggataggatactccccatggtctgggcggctttgagttgggcgtcggtggtgacgtgggcgtaggtgtccagcgtaaagcccgcggagtagtgcccgagcatactgctgacggtcttgacgtccacgccgttttgcagggccatggtc

SEQ ID NO: 27907 - DNA, 260 bp, Unknown
  Description of Unknown: RightRegion for integrase B1908 sequence
ctggtttcgaggacttttgcttttcataagttccgttttttgggtactgcttttttctgacccaaacgctgaccccaacgggagcgggtagcggaaaggtctataccgcacgggataggatattgcccattgtttgcgccgctttgagttgggcgtcggtggtgacgtgggcgtaggtgtccagcgtgaagcctgcggagtagtgtccgagcatactgctgaccgttttcacgtccacgccgttttgcagggccatcgtc

SEQ ID NO: 27908 - DNA, 260 bp, Unknown; identical to SEQ ID NO: 27906
  Description of Unknown: RightRegion for integrase B1909 sequence

SEQ ID NO: 27909 - DNA, 260 bp, Unknown
  Description of Unknown: RightRegion for integrase B1910 sequence
acctttgacactatcattaccgagcgggatatggatgaataccgcatcaccgtatcgtgacgccctgctttattcaaatcgaggggtgggaatatttatagttcccgcccctctccctttcatttgcgattatccgagatactgattcagcaaatcaaaggtagcctgctctcggctctgattctcttctttgtgaggattcataatttcatccgcctgctcccgtgtcagctggttgattttctcttccatttgagcgg

SEQ ID NO: 27910 - DNA, 260 bp, Unknown
  Description of Unknown: RightRegion for integrase B1911 sequence
gaaccctacattgtgtggggaacggtgttcgttcaaaccaaaagacattccttgtcttaaagcaaggggtgtctttttgtttaggtgataaaggtgagtaatcgggcgtttttcctataaactatctctaatacgcgcgtactaaggagaagttatagggattttgacccgattactcacctttatcaccttatacaattgaatgtaaaaatccccggaagctgaaacctccggggatgccgttatataaatatcactta

SEQ ID NO: 27911 - DNA, 260 bp, Unknown
  Description of Unknown: RightRegion for integrase B1912 sequence
gctgttctctatatgatcggcggcctgttcgtgttggaatgctcccttgaggagagataaaaaagaggttatccgtcctgcgttgcagcgggagggataacctctttttgcgtttcattctaacgaaatcggttattttttaccaaagccatgcggaaatctaaaattgtagttatattctaccgtaaaggagcatggctatgattaggattttactgtccacccggcttggcgagcggaggtggacgcaagctgacctt

SEQ ID NO: 27912 - DNA, 260 bp, Unknown
  Description of Unknown: RightRegion for integrase B1913 sequence
acctttgacactatcattaccgagcgggatatggatgaataccgcatcaccgtatcgtgacgccctgctttattcaaatcgaggggtgggaatatttatagttcccgcccctctccctttcatttgcgattatccgagatactgattcagcaaatcaaaggtagcctgctctcggctctgattctctcctttgtgaggattcataatttcatccgcctgctcccgtgtcaactggttgattttctcttccatttgagcgg

SEQ ID NO: 27913 - DNA, 260 bp, Unknown
  Description of Unknown: RightRegion for integrase B1914 sequence
atgatttcgaggacttttgcttttcataagttccgttttttgggtgttgcttttttctgacccaaacgctgaccccaacgggagcgggtagtggaaaggtctataccgcacgggagaggatgctccccatggtttgggctgccttgagttgggcgtcggtggtgacgtgggcgtaagtgtccagcgtgaaacccgcggagtagtggcccagcatcgaggacaccgttttcacgtccacgccattctggagcgccatggtt

SEQ ID NO: 27914 - DNA, 82 bp, Unknown
  Description of Unknown: RightRegion for integrase B1915 sequence
ctggtaggtttcataactggcgttcaacgacaagacaatggtgaacatggacgtaaatagcagcgttgtcagcgcaatggca

SEQ ID NO: 27915 - DNA, 260 bp, Unknown
  Description of Unknown: RightRegion for integrase B1916 sequence
tgcaaagaaaaaaataatattatattttttgaagttcttcaaaattggcttgctgcttagtgtttagcagccgtttaaatttttacccaaaaatataatgaaaaatataacaaattttattccaatttcaaaaggaattgcccacacgttgaagcatgggcaaactattcaagaagtagaatcacaaagattttataaatttttccatatcgttcagcctattcagccaaccattcagaaattttttctgatttccgtat

SEQ ID NO: 27916 - DNA, 115 bp, Unknown
  Description of Unknown: RightRegion for integrase B1917 sequence
taccagcaaactcgaacttggtcttgtatgagagcgggttcgggtttgttttttgtctgaacatgattttaaagtagagcaagcaggccgcacaggagagatatcttctgcgcgg

SEQ ID NO: 27917 - DNA, 260 bp, Unknown
  Description of Unknown: RightRegion for integrase B1918 sequence
gaaccctacgttgtgtggggaacggtgttcgttcaaaccaaaagacacttcttaccttaatcggtagggagtgtctttttttacgtttaggtgataaaggtgagtaatcgggcgtttttcctataaactctctcttatacgtgcgtactatagaaaagttatagggattttagcccgattactcacctaactcacctaaacagtgaatctacttctgcaaattacaggttattcgcccggataccccggtctcacggcgc

SEQ ID NO: 27918 - DNA, 260 bp, Unknown
  Description of Unknown: RightRegion for integrase B1919 sequence
aaatcctacaccaaatccggcagcgacatgcacgtcaccctctaccccctcgcggattgaacattatacatttattcggtacgcatgaatgaatcccatttaaatgtagattttatagcaagtgaaaatccctcctggtgacaggagggatttctttattttgcgatatgctcataatacgccatgagcttctgttccggccccgggccgtccttgtcgagcagaaacgcctttgccagcgcggcgtagaattccgggcg

SEQ ID NO: 27919 - DNA, 260 bp, Unknown
  Description of Unknown: RightRegion for integrase B1920 sequence
tatgtatctagggagaaacggcgcagggaaaagtacaatgtttggtatgctgacggataatttgcgcccggataagggaagcataacggcagacggagaagatatttataagatgggagcggattaccgggcgaagatcgggtatatgccacagcagcagagtctttatgaagcatttactgcagaaaagttcctttggtatatggctgctttaaaaggaatgaacagaaaagatgccagagaacagattgaaaatttat

SEQ ID NO: 27920 - DNA, 260 bp, Unknown
  Description of Unknown: RightRegion for integrase B1921 sequence
aacacgataaccgtttccggaatggtcttcgtccaaaccagaaaacacgccttgccgtaattggcagggcgtgtcctttttatgttctaaactggtcgatttcggccagtttactttttgtacatcccttgcaggacaccgaccttctccgctttctcgatcgcccgcttatgcaggtactcgtagaccgccatcatgtccgcaggcggttcacccttctcccggcggtaagcatcgatcaggcggaccacgttcttatg

SEQ ID NO: 27921 - DNA, 260 bp, Unknown
  Description of Unknown: RightRegion for integrase B1922 sequence
ctgatttcgaggacttttgcttttcataagttgtcattttcggatgttgctttttcctgacccaaacgctgaccccaacgggagtattttttacaagtcatctgattacgggcaaaccaagcgaggtacttgagcgccgctccaaggcatcggccaaagcccagcataaagagattgggggcagactggagcggcaatcagcgaagtatcatcggagatgggcatcttctttgatgtcccagcaggtgcttaatatgcca

SEQ ID NO: 27922 - DNA, 109 bp, Unknown
  Description of Unknown: RightRegion for integrase B1923 sequence
gcgacggtacgcccatttttatgcagttattacagaatgctgatgcggcctgcgccgtagggattctcgtaatccagcagatagcccgggtaatcggccagcgggctgt

SEQ ID NO: 27923 - DNA, 260 bp, Unknown
  Description of Unknown: RightRegion for integrase B1924 sequence
ctgatttcgagggcttttgcttttcataagttgtcattttgggataccgcttttccctgacccaaacgctgaccccaacgggagcgggtagcggaaagcatcagacggcacgggagaggatatttcccatggtttgcgccgctttgagctgggcgtcggtggtgacgtgggcgtaggtgtccagcgtgaagcctgcggagtagtgtcccagcatactgctgaccgttttcacgtccacgccgttctggagcgccatcgtc

SEQ ID NO: 27924 - DNA, 260 bp, Unknown
  Description of Unknown: RightRegion for integrase B1925 sequence
gaaccctatattgtatggggtacggtctttgtccaaaccaaaagacactccttgtcttaaagcaaggggtgtctttttgtttaggtgataaaggtgagtaatcgggcgtttttcctataaactctctcttatacgcgcgtactaaggagaagttatagggattttgacccgattactcacctttatcaccttgtacgattaaatgtaaaaatccccggaagttttagcttccggggatgctgttatatggatatcactta

SEQ ID NO: 27925 - DNA, 260 bp, Unknown
  Description of Unknown: RightRegion for integrase B1926 sequence
cagttcgaacttggcttggaaacggaagttgagtatgaagcacagaacattgtttcatgaaaaaagcgctgtctgacagtgcgctcattcagcctctctaattgacagaaattccgaaacacgctaaaatagtcacagaaagtgtgctgtaggaatttgatggagatatgacccctgatgctcgtgggggtgcttaaccgatcactcgggagagcgcttgaatggcattcaagaggtcagcggttcgatcccgcttatct

SEQ ID NO: 27926 - DNA, 260 bp, Unknown
  Description of Unknown: RightRegion for integrase B1927 sequence
taccagcaaactcgaacttggtcttgtatgagagcgggttcgggtttgttttttgtctgaacatgattttaaagtagagcaagcaggccgcacaggagagatatcttctgcgcggtctgtttgctttctatggaatttgaatgcattccgcaaactgctcgaaggacatctcccctacctggtatttgaccattgccttctgcgcggtatcacgccatttgttgtagccctcgcgcattttggcgttcccctgtgcgcgg

SEQ ID NO: 27927 - DNA, 260 bp, Unknown
  Description of Unknown: RightRegion for integrase B1928 sequence
ctgatttcgaggacttttgcttttcataagttccgttttttgggagttgctttttcctgacccaaacgctgaccccaacgggagcgggtagcggaaaggtctataccgcacgggataggatattgcccatggtctgggcggctttcagttgggcgtcggtggtaacgtgggcgtaagtgtccagtgtgaagcctgcggagtagtgtccgagcatactgctgaccgttttcacgtccacgccgttttgcagcgccatggtt

SEQ ID NO: 27928 - DNA, 260 bp, Unknown
  Description of Unknown: RightRegion for integrase B1929 sequence
ctgatttcgaggacttttgcttttcataagttccgtttttttggtactgcttttttctgacccaaacgctgacccaaacgggagcgggtagcggaaaccgtcagacggcacgggagaggatgttccccatggtttgtgctgccttgagttgggcgtcggtggtgacatgggcgtaggtatccagcgtgaaccctgccgagtagtgacccagcatactgctgacggtcttgacgtccacgccgttttgcagggccatcgtc

SEQ ID NO: 27929 - DNA, 260 bp, Unknown
  Description of Unknown: RightRegion for integrase B1930 sequence
gttcgtacagccccacttccgccgcaccaaaccatgaaaatccgaaccttttctcgataggagaagggctcggattttttgttttcttcggaaacgagaacaatggctcttcccttacggctgtgtgtccaaaaccttatcagaagaaagaccgtatcacgaaggtcacaacagtaagagtgccgtaaggcagaagggacgcaagattatgaagtacgatgcaagagcctgtcagtttaacatgggcaccggctgtgtgg

SEQ ID NO: 27930 - DNA, 260 bp, Unknown
  Description of Unknown: RightRegion for integrase B1931 sequence
tcgatttcgaggacttttgctttttataagttgccattttcggatgtcgcttttttctgacccaaacgctgaccccaacgggagcggatagcggaaagcatcagacggcacgggagaggatattgcccatcgtctgggcggctttgagctgcgcgtcggtggtgacgtgggcgtaggtgtccagcgtgaaacccgccgagtagtggcccagcatcgtggacaccgtttttacgtccacgccgttctggagcgccatggtc

SEQ ID NO: 27931 - DNA, 260 bp, Unknown; identical to SEQ ID NO: 27920
  Description of Unknown: RightRegion for integrase B1932 sequence

SEQ ID NO: 27932 - DNA, 260 bp, Unknown
  Description of Unknown: RightRegion for integrase B1933 sequence
cctacgaacggaaactttggaaaaagttttctgaaaggctatgagattgttcaaacataaaagtccccaataaaattcaaatgaactggggacttttgatggggaaaatgacatcgaactgcaaaatggagaaattcaaagaaatttgcattgtaataaatgctaaatcaaaaagaaaaaaaccacagtttttcagcaattttgcataaaactgtggattaaatggtcgaggtgacaggacttgaacctgcggcatcttg

SEQ ID NO: 27933 - DNA, 260 bp, Unknown
  Description of Unknown: RightRegion for integrase B1934 sequence
aaatcctacaccaaatccggcagcgacatgcacgtcaccctctaccccctcgcggattgatggttatacatttattcggtacgcatgaatgcgacccgaccgtcgaccagtgcaccgactgcctgtccttcgtcaagaagtaaatttcccgcaccccgcgccgcggcaaccgccgcggcgcggggatctttgttccgtgatccgctgtttacgatcgcgcgatcgcgtcccactgttcccctatcgcaaattccgcgcag

SEQ ID NO: 27934 - DNA, 136 bp, Unknown
  Description of Unknown: RightRegion for integrase B1935 sequence
ctgatttcgagggcttttgcttttcataagttccgtttttttggtgctgcttttttctgacccaaacgctgaccccaacgggagctaaactgtacccaagaaaatggacacgagattttgacccatggccccgttc

SEQ ID NO: 27935 - DNA, 260 bp, Unknown
  Description of Unknown: RightRegion for integrase B1936 sequence
aaatcctacaccaaatccggcagcgacatgcacgtcaccctctaccccctcgcggattgatggttatacatttattcggtacgcatgaatgaatcccatctaaatatagattctatagcaagctgaaatccctcctggtgacaggagggatttctttattttgcgatatgctcataatacgccatgagcttctgttccggccccgggccgtctttatcgagcagaaacgcttttgccagcgcggcgtagaactccgggcg

SEQ ID NO: 27936 - DNA, 260 bp, Unknown
  Description of Unknown: RightRegion for integrase B1937 sequence
ctgatttcgaggacttttgcttttcataagttccgttttttgggtgttgcttttttctgacccaaacgctgaccccaacgggagcgggtagcggaaagcatcagacggcacgggagaggatattgcccattgtttgcgccgctttgagttgggcgtcggtggtgacgtgggcgtaggtgtccagcgtgaagcccgccgagtagtgacccagcatcgaggacaccgttttcacgtccacgccgttttgcagggccatggtc

SEQ ID NO: 27937 - DNA, 260 bp, Unknown
  Description of Unknown: RightRegion for integrase B1938 sequence
ctgatttcgaggacttttgcttttcataagttgctatttgtgggtgttgcttttttctgacccaaacgctgaccccaacgggagcggatagcggaaaggtctatacagcacgggagaggatgttccccatcgtctgggctgctttcagctgcgcgtcggtggtaacgtgggcgtaggtgtccagtgtgaagcccgcagagtagtgacccagcatggaggacaccgtttttacatccacaccgttttgcagggccatcgtg

SEQ ID NO: 27938 - DNA, 73 bp, Unknown
  Description of Unknown: RightRegion for integrase B1939 sequence
ctgatttcgaggacttttgcttttcataagttccgttttttgggtactgcttttttctgacccaaacgctgac

SEQ ID NO: 27939 - DNA, 260 bp, Unknown
  Description of Unknown: RightRegion for integrase B1940 sequence
ctgatttcgatgacttttgcttttcataagttgctattttcggatgttgctttttcctgacccaaacgcttaccccaacgggacagtggaaaggtctataccgcacgggataggatattgcccatcgtttgcgccaccttgagctgcgcgtcggtggtgacgtgggcgtaggtgtccagcgtgaagcccgccgagtagtggtcgagcatactgctgacggtcttgacgtccacgccgttttgcagggccataaataacct

SEQ ID NO: 27940 - DNA, 260 bp, Unknown
  Description of Unknown: RightRegion for integrase B1941 sequence
aaatcctacaccaaatccggcagcgacatgcacgtcaccctctaccccctcgcggattgatggttatacatttattcggtacgcatgaatgaatcccatctaaatatagattctatggcaagcggaaatccctcctggtgacaggagggatttctttattttgcgatatgctcataatacgccatgagcttctgttccggccccgggccgtctttatcgagcagaaacgcctttgccagcgcggcgtagaactccgggcg

SEQ ID NO: 27941 - DNA, 260 bp, Unknown
  Description of Unknown: RightRegion for integrase B1942 sequence
ctgatttcgaggacttttgctttttataagttgccattttcggacgctgctttttcctgacccaaacgctgaccccaacgggagcgggtagcggaacgcattagacagcacgggataggatattgcccatcgtttgcgccgctttgagttgggcgttggtggtgacatgggcgtaggtatccagcgtgaagcccaccgagtagtggcccagcatggaggacaccgtttttacatccacgccgttttggagcgccatcgtc

SEQ ID NO: 27942 - DNA, 260 bp, Unknown
  Description of Unknown: RightRegion for integrase B1943 sequence
tatgtatctagggagaaatggagccggaaaaagtacactgatgaatcttctgacggataatctcctgagggattccgggagtgtcctgtatgagggagaggaaatattgaaccttggggcatcttatcgggaaattatgggatatatgccgcagcagcaacagctttatgatacctttacggtaacgcattttatttcttatatgggtacgctgaaagggatgaagagcagaaccatccagagaagaatggacgagctgc

SEQ ID NO: 27943 - DNA, 260 bp, Unknown
  Description of Unknown: RightRegion for integrase B1944 sequence
tatgtatctagggagaaacggcgcagggaaaagtacaatgtttggtatgctgacggataatttgcgcccggataagggaagcataacggcagacggagaagatatttataagatgggagcggattaccgggcgaagatcgggtatatgccacagcagcagagtctttatgaagcatttactgcagaaaagttcctttggtatatggctgctttaaaaggaatgaacagaaaagatgccagagaacagattgaaaatttgt

SEQ ID NO: 27944 - DNA, 201 bp, Unknown
  Description of Unknown: RightRegion for integrase B1945 sequence
ccgatttcgaggacttttgcttttcataagttccgtttttatggtgttgcttttttctgacccaaacgctgaccccaacggggcgttaaagtgctccctaaagtgctccccaagtcaaggacattttcatttgacccatagcggctgcataccggcggggtactcacctgtggtgatgtagtggtaatattcgttagggga

SEQ ID NO: 27945 - DNA, 260 bp, Unknown
  Description of Unknown: RightRegion for integrase B1946 sequence
acctttgacgctatcattaccgagcgggatatggatgaataccgcatcaccgtatcgtgatgctctgctttattcaaatcgaggggtgggaatacttatagttcccgcccctctttttccaatatccgctatccgagatactgattcagcaaatcaaaggtcgcctgctctcggctctgattctctcctttgtgaggattcataatttcatccgcctgctcccgtgtcaactgattgattttctcttccatttgagcggt

SEQ ID NO: 27946 - DNA, 260 bp, Unknown
  Description of Unknown: RightRegion for integrase B1947 sequence
aacaccataacggtagttggaatggtatttgtccaaaccagaaaacatgccttgccttaattggcagggcattttttcttgactattacagcgtacaatgatatgattattttgcaggaatcggaattgcgcacagaaaggaactgatgaatatggccgttgcaaacaaaaaggttgaaccgaacaaaaaagaatggcttgaaagtttgtcggatgatgacttttgtgttcttgttgaacccaactatgcctatgataag

SEQ ID NO: 27947 - DNA, 260 bp, Unknown
  Description of Unknown: RightRegion for integrase B1948 sequence
acctttgacgctatcattaccgagcgagatatggatgaataccgcatcaccgtatcgtgacgccctgctttattcaaatcgaggggtgggaatatttatagttcccgcccctctttttccaatatctactatccgagatactgattcagcaaatcaaaggtagcctgctctcggctctgattctctcctttgtgaggattcataatttcatccgcctgctcccgtgtcaactgattgattttctcttccatttgagcggt

SEQ ID NO: 27948 - DNA, 260 bp, Unknown; identical to SEQ ID NO: 27919
  Description of Unknown: RightRegion for integrase B1949 sequence

SEQ ID NO: 27949 - DNA, 260 bp, Unknown
  Description of Unknown: RightRegion for integrase B1950 sequence
ggcggagataaattcgcagggcggttgcagcatgccggtggcatgctgcagtcgccttgactttttccgcagaaaagcgagtcagcctatgcgctgcgggcaatccaaaaagcgaagaaagagtctgtgaaaacctcggcgattgtgcatgaaagagggcccgcatgatgcgaacatggggctgtgtggaggaagggacgctgcgaacaaaagtgctgcttttgaatttttgaacatggaaaaatcgagaaataaagagg

SEQ ID NO: 27950 - DNA, 260 bp, Unknown
  Description of Unknown: RightRegion for integrase B1951 sequence
gcattttggaacacatcttcttcacgatgtgcgccacaagacgcaggttgtgctcgatgagcacgttgcgcgcctcaaggtcgcccgcagcgaagcgttccaaatacgccttttcctcggcggcggagagcgggcgcgggaatgagccgggattgccggcaaggcgcagggagaaaaacaggctgttgcacaaaagccaaacggcggcggaaagcatatacatcaactcctcccctcaccctatgtcggggcaggaagtc

SEQ ID NO: 27951 - DNA, 260 bp, Unknown
  Description of Unknown: RightRegion for integrase B1952 sequence
atttcaacttcattggcgatacttttcccagccaaatcgagatcaaccacgatgatgtgaaaaagattacagagcagcagatagccaagcgtaaaaagtaccaaaaaacatctggagaaaaccgcaagaaaaaacgagcggctttgagagaagctgctaaaactgacccgcaggcagcagccgaatacgaagcactcttgcagaaaaaccgggaacgctgccgccaatatgcccaaaagaaaaagctggctcaacaagag

SEQ ID NO: 27952 - DNA, 260 bp, Unknown
  Description of Unknown: RightRegion for integrase B1953 sequence
gaaccctacattgtgtggggaacggtattcgtccaaaccagaagacactccttgtcttaaaacaaggggtgtcttttttttgtttaggtgataaaggtgagtaatcgggcgtttttcctataaactatctctaatacgcgcgtactaagaagaagttatagggattttgacccgattactcacctttatcaccttatacgattatttatccgccaagccgagtaactaaaactacacgtttaacctccttcacgtgcttt

SEQ ID NO: 27953 - DNA, 260 bp, Unknown
  Description of Unknown: RightRegion for integrase B1954 sequence
aaatcctacaccaaatccggcagcgacatgcacgtcaccctctaccccctcgcagattgacggttatacatttattcggtacgcatgaatgaatcccatttaaatgtagattctatagcaagcggaaatccctcctggtgacaggagggatttctttattttgcgatatgctcataatacgccatgagcttctgttccggccccgggccgtctttatcgagcaggaacgcctttgccagcgcggcgtagaattccgggcg

SEQ ID NO: 27954 - DNA, 260 bp, Unknown
  Description of Unknown: RightRegion for integrase B1955 sequence
gggtcatgggggggatttcttgttattcaaagaaaagaagcgagatcacgcatccgctgatgggaggaattcgcatgaaagcacagatcatcgccgcactgctttttctgattctgggcatcgtgtttgcctgcggaaaaggcacatttttgatcgcgggctataatacgctcccggaggagaaaaaggcacggtatgatgcgcgcaggatcctaaaaagcatgagccggatgatgttttcctgcgtgggctgcatggcg

SEQ ID NO: 27955 - DNA, 260 bp, Unknown
  Description of Unknown: RightRegion for integrase B1956 sequence
gaaccctacattgtgtggggaacggtattcgtccaaaccaaaagacactctttaccttaatcggtggagagtgtctttttttgcgtttaggtgataaaggtgagtaatcgggtgcatttccctataactatttctatatacgcgcgtataagagagagttataggcatttatgcccgattactcacctaactcacctaaaatacgaaaaacaatttttcaaaacacgccaatttgaaaaaagtctttgcaaaaacactca

SEQ ID NO: 27956 - DNA, 260 bp, Unknown
  Description of Unknown: RightRegion for integrase B1957 sequence
gaaccctacattgtgtggggaacggtgttcgttcaaaccaaaagacactccttaccttaatcggtagggagtgtcttcttttattcttcgccggaatacccgttcgctctggcgcatttcagcgcacccaagatcatcttgtcctgagccagcgttcgttctttcagctcatagagtggagtacggcgatgatcgtcccattcaatgagctgctttttatcgtgaacgacttgaccctcatagagattgataaccttgtc

SEQ ID NO: 27957 - DNA, 260 bp, Unknown
  Description of Unknown: RightRegion for integrase B1958 sequence
gaaccctacattgtgtggggaacggtattcgttcaaaccaaaagacactccttaccttaatcggtagggagtgtcttcttttattctttgccggaatacccgttcgctctggcgcatttcagcgcacccaagatcatcttgtcctgagccagagttcgttctttcagctcatagagtggtgtgcggcgatgatcgtcccattcaatgagctgctttttgtcatgaacgacttgaccctcatagagattgataaccttgtc

SEQ ID NO: 27958 - DNA, 260 bp, Unknown
  Description of Unknown: RightRegion for integrase B1959 sequence
gaaccctacattgtgtggggaacggtgttcgttcaaaccaaaagacactccttaccttaatcggtagggagtgtcttcttttattcttcgccggaatacccgttcgctctggcgcatttcagcgcacccaagatcatcttgtcctgagccagagttcgttctttcagctcatagagtggagtgcggcgatgatcgtcccattcaatgagctgctttttgtcgtgaacgacttgaccctcgtagagattgataaccttgtc

SEQ ID NO: 27959 - DNA, 260 bp, Unknown
  Description of Unknown: RightRegion for integrase B1960 sequence
gaaccctacattgtgtggggaacgatttgtgttcaaacaaaaattcaccccctaccgtaatggtagagggtggattttttactcttcgccggtaaacccgttctctctggcacagcgcaaggcaccgagtatcatggtatcttgggccaaggttctctgtttcaattcataaagcggagtcttccgatgatcgtcccactcaatgagttgcttcttatcatgaaccacaatgccggtgtagaggtttatcagcttgtcca

SEQ ID NO: 27960 - DNA, 260 bp, Unknown
  Description of Unknown: RightRegion for integrase B1961 sequence
aacaccataacggtggttggaatggtttttgtccagaccagaaaacacgccttgccttaatcggcagggcgtgttatttttatctcttgtacatattttgaagtacgccaaccttttctgctttctcaatctcacgctggtggagataattgtaaatagccatcatctcggcgggcggttcgcctttttccctgcggtagttttctatcaagcgaacgacttccttatgaagtgcgttcatgtgattctgttcctcacca

SEQ ID NO: 27961 - DNA, 260 bp, Unknown
  Description of Unknown: RightRegion for integrase B1962 sequence
aacaccatttccgtaatagggatggtattcatccaaaccaaaagacacgctttgccgtaattggcagggcatattctcttgactattgcaacgtacgatgatattattattttgcaggaatcaatattgcgcacggaaaggaattggtgaatatggccgttgtaaacaaaaatattgaaccgagtacaaaggtatggcttgaaagtttgtctgatgatgacttttgcattccagttgaagtctactcttactacgataag

SEQ ID NO: 27962 - DNA, 260 bp, Unknown
  Description of Unknown: RightRegion for integrase B1963 sequence
aacaccatttccgtaatagggatggtattcatccaaaccaaaagacacgccttgccttaattggcagggcattttttcttgactattacagcgtacaatgatatgattattttgcaggaatcggaattgcgcacagaaaggaactgatgaatatggccgttgcaaacaaaaaggttgaaccgaacaaaaaagaatggcttgaaagtttgtcggatgatgacttttgtgttcttgttgaacccaactatgcctatgataag

SEQ ID NO: 27963 - DNA, 260 bp, Unknown
  Description of Unknown: RightRegion for integrase B1964 sequence
ttcgacgaatttttcaaggccatgcccgtcgaagaatacgagatcccgataacggaatgaaaaaagagggcgattgctgtaatggcaatcgtccccttttcggttcggttaaacgaccgaacaattaaagatgttcccgtaacagatcaaggattatctgttcttgtgtctgcgtagaggttttgcgggcattttggattttatccgcctgccattgggtaagattctttaatttttcttccatttcagaagtgtaggcg

SEQ ID NO: 27964 - DNA, 260 bp, Unknown
  Description of Unknown: RightRegion for integrase B1965 sequence
gaaccctacattgtgtggggaacggtattcgttcaaaccaaaagacactccttaccttaatcggtagggagtgtcttcttttattcttcgccggaatacccgttcgctctggcgcatttcagcgcacccaagatcatcttgtcctgagccagcgttcgttctttcagctcatagagtggagtgcggcgatgatcgtcccattcaatgagctgctttttgtcgtgaacgacttgaccctcgtagagattgataaccttgtc

SEQ ID NO: 27965 - DNA, 260 bp, Unknown
  Description of Unknown: RightRegion for integrase B1966 sequence
gaaccctacattgtgtggggaacggtgttcgttcaaaccaaaagacactccttaccttaatcggtagggagtgtctttttttattcttcgccggaatacccgttcgctctggcgcatttcagcgcacccaagatcatcttgtcctgagccagtgttcgttctttcagctcatagagtggagtacggcgatgatcgtcccattcaatgagctgctttttgtcgtgaacgacttgaccctcatagagattgataaccttgtc

SEQ ID NO: 27966 - DNA, 260 bp, Unknown
  Description of Unknown: RightRegion for integrase B1967 sequence
aacggtttcgggtctttttgtctgcataagttgttgttttctcccgctgcttttttctgacccaaccgctgaccccaacgggagcgaggagcggaaagcatcagacggcacgggagaggatattccccatcgtctgggcggctttgagttgggcgtcggtggtgacgtgggcgtaggtgtccagcgtgaagcccgccgaatagtgacccagcatggaggacacggttttcacgtccacgccgttttgcagggccatggtc

SEQ ID NO: 27967 - DNA, 260 bp, Unknown
  Description of Unknown: RightRegion for integrase B1968 sequence
gaaccctacattgtgtggggaacggtgttcgttcaaaccaaaagacactccttaccttaatcggtagggagtgtcttcttttattcttcgccggaatacccgttcgctctggcgcatttcagcgcacccaagatcatattgtcctgagccagcgttcgttctttcagctcatagagtggagtacggcgatgatcgtcccattcaatgagctgctttttgtcatgaacgacttgcccctcatagagattgataaccttgtc

SEQ ID NO: 27968 - DNA, 260 bp, Unknown
  Description of Unknown: RightRegion for integrase B1969 sequence
gaaccctacattgtgtggggaacggtgttcgttcaaaccaaaagacactccttaccttaatcggtagggagtgtcttcttttattcttcgccggaatacccgttcgctctggcgcatttcagcgcacccaagatcatcttgtcttgagccagagttcgttcttttagctcatagagtggagtgcggcgatgatcgtcccattcaatgagctgctttttgtcgtgaacgacttgaccctcatagagattgataaccttgtc

SEQ ID NO: 27969 - DNA, 260 bp, Unknown
  Description of Unknown: RightRegion for integrase B1970 sequence
ttcgacgaatttttcaaggccatgcccgtcgaagaatacgagatcccgataacggaatgaaagaaaaagcattgctggaaaattctcctgcaatgctttttccctatttttcaaattagcccattcgcctcatattgttaagcacctgcggagttagccatatgctgtttcgcttcccgattccttccataaattccacaaaatcgggtgatagctttacattatgaagattaaaattagtagcacctcccatatcaaga

SEQ ID NO: 27970 - DNA, 260 bp, Unknown
  Description of Unknown: RightRegion for integrase B1971 sequence
gaaccctacattgtatggggaacggtgttcgttcaaaccaaaagacactccttaccttaatcggtagggagtgtcttcttttattcttcgccggaatacccgttcgctctggcgcatttcagcgcacccaagatcatcttgtcttgagccaacgttcgttctttcagctcatagagtggagtgcggcgatgatcgtcccattcaatgagctgctttttgtcgtgaacgacttgaccctcgtagagattgataaccttgtc

SEQ ID NO: 27971 - DNA, 260 bp, Unknown
  Description of Unknown: RightRegion for integrase B1972 sequence
gaaccctacatcgtgtggggtacggtattcgttcaaaccaaaagacactccttaccttaatcggtagggagtgtcttcttttatttttcgccggaatacccgtttgctctggcgcatttcagcgcacccaagatcatcttgtcctgagccagcgttcgttctttcagctcatagagtggagtacggcgatgatcgtcccattcaatgagctgctttttatcatgaacgacttgaccctcatagagattgataaccttgtc

SEQ ID NO: 27972 - DNA, 260 bp, Unknown
  Description of Unknown: RightRegion for integrase B1973 sequence
gaaccctacattgtgtggggaacggtattcgttcaaaccaaaagacactccttaccttaattggtagggagtgtcttcttttattcttcgccggaatacccgttcgctctggcgcatttcagtgcacccaaaatcatcttgtcctgagccagtattcgttctttcagctcatagagtggagtgcggcgatgatcgtcccattcaatgagctgctttttatcatgaacgacttgaccctcgtagagattgataaccttgtc

SEQ ID NO: 27973 - DNA, 260 bp, Unknown
  Description of Unknown: RightRegion for integrase B1974 sequence
gaaccctacattgtgtggggaacggtgttcgttcaaaccaaaagacactccttaccttaattggtagggagtgtcttcttttattcttcgccggaatacccgttcgctctggcgcatttcagcgcacccaagatcatcttgtcctgagccagtgttcgttctttcagctcatagagtggagtacggcgatgatcgtcccattcaatgagctgctttttgtcgtgaacgacttgaccctcatagagattgataaccttgtc

SEQ ID NO: 27974 - DNA, 260 bp, Unknown
  Description of Unknown: RightRegion for integrase B1975 sequence
gaaccctacattgtatggggaaagatattcgttcaaacaaaaagacaccctttaccataacggtagagggtgtcttcctttattctccggtgaaaccgttcgctttggcacatttcagcgcacccaaaatcattttgtcctgcgccaatgtccgttgcttgatctcgtagataggtgtcccacagtgtccatcccattccacaatctgttttctgtcatggactaccacaccctcatagagatttatcagcttgtccagc

SEQ ID NO: 27975 - DNA, 260 bp, Unknown
  Description of Unknown: RightRegion for integrase B1976 sequence
cagtatgtatctagggagaaatggagccggaaaaagcacaactatcaatgctattcttgatttaattcataaagatgatggaacagttactttttgggggcaggaattatcgtccacaaaacaaatcaaagaggatgttggcgtagtgtttgacggaattaacttctatgaaacgctcactccggccaaagtcgggaaaattgctggtgctgcctacaaacagtgggacggccatctgtttcaagactatctaaagcggt

SEQ ID NO: 27976 - DNA, 260 bp, Unknown
  Description of Unknown: RightRegion for integrase B1977 sequence
gaaccctacattgtgtggggaacggtgttcgttcaaaccaaaagacactccttaccttaatcggtagggagtgtcttcttttattcttcgccggaatacccgttcgctctggcgcatttcagcgcacccaagatcatcttgtcctgagccagcgttcgttctttcagctcatagagtggagtacggcgatgatcgtcccattcaatgagctgctttttgtcgtgaacgacttgaccctcatagagattgataaccttatc

SEQ ID NO: 27977 - DNA, 260 bp, Unknown
  Description of Unknown: RightRegion for integrase B1978 sequence
gaaccctacattgtgtggggaacggtgttcgttcaaaccaaaagacactccttaccttaatcggtagggagtgtcttcttttattcttcgccggaatacccgttcgctctggcacatttcagcgcacccaagatcatcttgtcctgagccagcgttcgttctttcagctcatagagtggagtacggcgatgatcgtcccattcaatgagctgctttttgtcgtgaacgacttgaccctcatagagattgataaccttgtc

SEQ ID NO: 27978 - DNA, 260 bp, Unknown
  Description of Unknown: RightRegion for integrase B1979 sequence
tcatggatcattatttataaacccaactttgttatttcaccatggcagacgctgatataatagaaaaagagtgcattaccacctcagataatgcactcttatattttaccctatttctcctccagcccgctgagcgaaagcctgctctccattttctgaacagtcttgctctcctgctttgcgatctttgcttcaaaccagaaggtcgagcctttgccctcctccgattgaacgccgtatgcaaagccgtgggctttgag

SEQ ID NO: 27979 - DNA, 260 bp, Unknown
  Description of Unknown: RightRegion for integrase B1980 sequence
gaaccctacattgtgtggggaacggtgttcgttcaaaccaaaagacactccttaccttaatcggtagggagtgtcttcttttattcttcaccagaatacccgttcgctctggcgcatttcagcgcacccaaaatcatcttgtcctgagccagtgttcgttctttcagctcatagagtggagtacggcgatgatcgtcccattcaatgagctgctttttgtcatgaacgacttgaccctcatagagattgataaccttgtc

SEQ ID NO: 27980 - DNA, 260 bp, Unknown
  Description of Unknown: RightRegion for integrase B1981 sequence
gaaccctacattgtgtggggaacggtattcgttcaaaccaaaagacactccttaccttaatcggtagggagtgtcttcttttattcttcgccggaatacccgttcgctctggcgcatttcagcgcacccaagatcatcttgtcttgagccagagttcgttcttttagctcatagagtggagtgcggcgatgatcgtcccattcaatgagctgctttttgtcgtgaacgacttgaccctcatagagattgataaccttgtc

SEQ ID NO: 27981 - DNA, 260 bp, Unknown
  Description of Unknown: RightRegion for integrase B1982 sequence
gaaccctacatagtatggggaacggtattcgttcaaaccaaaagacactccttaccttaatcggtagggagtgtcttcttttattcttcgtcagaatacccgttcgctctggcgcatttcagcgcacccaagatcatcttgtcctgagccagcgttcgttctttcagctcatagagtggagtacggcgatgatcgtcccattcaatgagctgctttttgtcgtgaacgacttgaccctcatagagattgataaccttgtc

SEQ ID NO: 27982 - DNA, 260 bp, Unknown
  Description of Unknown: RightRegion for integrase B1983 sequence
aacacaattaccgttgtgggaatggttttcatccaaaccaaaagacacgccctgccttgattggtagggcgtgtttctttattttttatacatcccctgcaccactccgacgttctccgcccgctcaatatcccgcttgtgcaggtactcatagacggccatcatggccgcaggcggttcgcccttctgcttgcggtattcctcgatgtgggaaacaacggccttgtgcagggcgttcatgtggttcatttcctccccgc

SEQ ID NO: 27983 - DNA, 260 bp, Unknown
  Description of Unknown: RightRegion for integrase B1984 sequence
gaaccatacattgtgtggggaacggtgttcgttcaaaccaaaagacactccttaccttaatcggtagggagtgtcttcttttattcttcgccggaatacccgttcgctctggcacatttcagcgcacccaagatcatcttgtcctgagccagcgttcgttctttcagctcatagagtggagtgcggcgatgatcgtcccattcaatgagctgctttttgtcatgaacgacttgaccctcatagagattgataaccttatc

SEQ ID NO: 27984 - DNA, 260 bp, Unknown
  Description of Unknown: RightRegion for integrase B1985 sequence
gaaccctacattgtgtggggaacggtattcgttcaaaccaaaagacactccttaccttaatcggtagggagtgtcttcttttattctttaccggaatacccgttcgctctggcgcatttcagcgcacccaagatcatcttgtcttgagccagcgttcgttctttcagctcatagagtggagtacggcgatgatcgtcccattcaatgagctgctttttgtcgtgaacgacttgaccctcatagagattgataaccttgtc

SEQ ID NO: 27985 - DNA, 260 bp, Unknown
  Description of Unknown: RightRegion for integrase B1986 sequence
aacacaattaccgttgtgggaatggttttcatccaaaccaaaagacacgccctgccttgattggcagggcgtattttcttgactattgcaacgtacgatgatattattatttcgcaggaatcaatattgcgcacggaaaggaatttgtgaatatggccgttgtaaacaaaaatattgaaccgagtacaaaggaatggcttgaaagtttgtcggatgatgacttttgcattccagttgaagtctacccttactacgataag

SEQ ID NO: 27986 - DNA, 260 bp, Unknown
  Description of Unknown: RightRegion for integrase B1987 sequence
gtaatgaaccaaaagcgaactccatactttttttccagcgcgcttttggaatcattgtaaaactgcaataattttaccacactttttctgaaacgccaatcgcttcgtacaaaaggtgcttttgctttgtggttgcgtttggcacagccttgtcgatggcatctttctttttccggctggcagagttggtaatcgtcttaccgttctcgtccttgtcgccggtgatgccgcgggcagcaaagtatgcggcatagtactgg

SEQ ID NO: 27987 - DNA, 260 bp, Unknown
  Description of Unknown: RightRegion for integrase B1988 sequence
gaaccctacattgtatggggaacggtattcgttcaaaccaaaagacactccttaccttaatcggtagggagtgtcttcttttattcttcgccagaatacccgttcgctctggcgcatttcagcgcacccaagatcatcttgtcctgagccagtgttcgttctttcagctcatagagtggagtacggcgatgatcgtcccattcaatgagctgctttttgtcgtgaacgacttgaccctcatagagattgataaccttgtc

SEQ ID NO: 27988 - DNA, 260 bp, Unknown
  Description of Unknown: RightRegion for integrase B1989 sequence
gaaccctacattgtgtggggaacggtattcgttcaaaccaaaagacactccttaccttaatcggtagggagtgtcttcttttattcttcgccggaatacccgttcgctctggcgcatttcagcgcacccaagatcatcttgtcctgagccagcgttcgttctttcagctcatagagtggagtgcggcgatgatcgtcccattcaatgagctgctttttgtcatgaacgacttgaccttcatagagattgataaccttgtc

SEQ ID NO: 27989 - DNA, 260 bp, Unknown
  Description of Unknown: RightRegion for integrase B1990 sequence
aacacaattaccgttgtgggaatggttttcatccaaaccagaagacacgccctgccttgattggcagggcgtgtttctttattttttatacataccctgcaccactccgacgttctccgcccgctcaatatctcgcttgtgcaggtactcatagacggccatcatggccgcaggcggttcgcccttctgcttgcggtattcctcaatgtgggaaacaacggccttgtgcagggcgttcatgtggttcatttcctccccgc

SEQ ID NO: 27990 - DNA, 260 bp, Unknown; identical to SEQ ID NO: 27979
  Description of Unknown: RightRegion for integrase B1991 sequence

SEQ ID NO: 27991 - DNA, 260 bp, Unknown
  Description of Unknown: RightRegion for integrase B1992 sequence
gaaccctacattgtgtggggaacggtgttcgttcaaaccaaaagacactccttaccttaattggtagggagtgtcttcttttattcttcgccggaatacccgtttgctctggcgcatttcagcgcacccaaaatcatcttgtcctgagccagcgttcgttctttcagctcatagagtggagtgcggcgatgatcgtcccattcaatgagctgctttttatcatgaacgacttgaccctcatagagattgataaccttgtc

SEQ ID NO: 27992 - DNA, 260 bp, Unknown
  Description of Unknown: RightRegion for integrase B1993 sequence
gaaccctacattgtgtggggaacggtgttcgttcaaaccaaaagacactccttaccttaatcggtagggagtgtcttcttttattcttcgccggaatacccgttcgctctggcgcatttcagcgcacccaagatcatcttgtcctgagccagcgttcgttctttcagctcatagagtggagtgcggcgatgatcgtcccattcaatgagctgctttttgtcatgaacgacttgaccttcatagagattgataaccttgtc

SEQ ID NO: 27993 - DNA, 260 bp, Unknown
  Description of Unknown: RightRegion for integrase B1994 sequence
gaaccctacattgtgtggggaacggtgttcgttcaaaccaaaagacactccttaccttaattggtagggagtgtcttcttttattcttcgccggaatacccgttcgctctggcgcatttcagcgcacccaagatcatcttgtcctgagccagagttcgttctttcagctcatagagtggagtgcggcgatgatcgtcccattcaatgagctgctttttgtcatgaacgacttgaccctcatagagattgataaccttgtc

SEQ ID NO: 27994 - DNA, 260 bp, Unknown
  Description of Unknown: RightRegion for integrase B1995 sequence
gaaccctacattgtgtggggaacggtgttcgttcaaaccaaaagacactccttaccttaatcggtagggagtgtcttcttttattcttcaccagaatacccgttcgctctggcgcatttcagcgcacccaagatcatcttgtcctgagccagtgttcgttctttcagctcatagagtggagtacggcgatgatcgtcccattcaatgagctgctttttgtcatgaacgacttgaccctcatagagattgataaccttgtc

SEQ ID NO: 27995 - DNA, 260 bp, Unknown
  Description of Unknown: RightRegion for integrase B1996 sequence
gtcgaactcttcttttacaagaatgagtttgcgcttgtgtataggttgggggacgcctgatggcgtcccctttccgttttcgttgctgtgaaacgccgtattttgcgttttaaggcgttttaagcctgttggggtactcgtgtacccctcgggctttttccgtgccttaaaacgcctctgaagcggtctgtggacattcgagcgcccatgcgcatctcgcatccgctcgatgcaagaaagcaacgactgcggcaagaggt

SEQ ID NO: 27996 - DNA, 260 bp, Unknown
  Description of Unknown: RightRegion for integrase B1997 sequence
gaaccctacattgtgtggggaacggtgttcgttcaaaccaaaagacactccttaccttaatcggtagggagtgtcttcttttattcttcgccggaatacccgttcgctctggcgcatttcagcgcacccaagatcatcttgtcttgagccagcgttcgttctttcagctcatagagtggagtgcggcgatgatcgtcccattcaatgagctgctttttgtcatgaacgacttgaccttcatagagattgataaccttgtc

SEQ ID NO: 27997 - DNA, 260 bp, Unknown
  Description of Unknown: RightRegion for integrase B1998 sequence
aacacgattactgttgtgggaatggttttcatccaagccaaaagacacgccctgccttaataggctgggcgtgttgctttattttttgtacatagcctgtaccactccgacgttttccgcccgttcaatatcccgcctgtgcagatactcatacaccgccatcatggccgcaggcggttcgcccttttgcttgcggtattcctcaatgtgggaaacaacggccttgtgcagggcgttcatgtggttcatttcctccccgc

SEQ ID NO: 27998 - DNA, 260 bp, Unknown
  Description of Unknown: RightRegion for integrase B1999 sequence
gaaccctacattgtgtggggaacggtgttcgttcaaaccaaaagacactccttaccttaatcggtagggagtgtcttcttttattcttcgccggaatacccgtttgctctggcgcatttcagcgcacccaagatcatcttgtcctgagccagagttcgttcttttagctcatagagtggagtgcggcgatgatcgtcccattcaatgagctgctttttatcatgaacgacttgaccctcatagagattgataaccttgtc

SEQ ID NO: 27999 - DNA, 260 bp, Unknown
  Description of Unknown: RightRegion for integrase B2000 sequence
gaaccctacattgtgtggggaacggtattcgttcaaaccaaaagacactccttaccttaatcggtagggagtgtcttcttttattcttcgccggaatacccgttcgctctggcgcatttcagcgcacccaagatcatcttgtcctgagccagagttcgttctttcagctcatagagtggagtgcggcgatgatcgtcccattcaatgagctgctttttgtcgtgaacgacttgaccctcgtagagattgataaccttgtc

SEQ ID NO: 28000 - DNA, 260 bp, Unknown; identical to SEQ ID NO: 27989
  Description of Unknown: RightRegion for integrase B2001 sequence

SEQ ID NO: 28001 - DNA, 260 bp, Unknown
  Description of Unknown: RightRegion for integrase B2002 sequence
gcggaaaacccttgtcggacagggcgaaaatatggtataatacactggttgtgtctgtaaaggacgcttcattcggtatgcctgtctttttcgggcatatgaaggaggaaatgcctttgaccctgcgcgaagaagcgccgatgaccaaagatgatgtacgccgcctgaatccactccagctggcgtatatcggggatacggtctatgatttgctgacccggtcgcgcctgctgtaccgggggtataatctgcatcactgc

SEQ ID NO: 28002 - DNA, 260 bp, Unknown
  Description of Unknown: RightRegion for integrase B2003 sequence
cgtggttacgtactttggccggggaattggaaagacctgacagttaaggttcttctataaatcctatcaagtcccgaattgcttgtatctgcaattcgggactttttgttttattttgccatgttttgtacattttcctgaaaatatacacggtttgatgggtcagacaaaaaagcgcacacccctcggtgtgcgcttggattttacgtctgcgtcgattcccgcaggcttacctggtaacctaactccatgcgggtttc

SEQ ID NO: 28003 - DNA, 260 bp, Unknown
  Description of Unknown: RightRegion for integrase B2004 sequence
aacacaattgttgttgtgggtatggttttcgtccagaccaaaaaacacgccctgccttaattggccgggcgtgtttctttattttttatacatcccctgcaccactccgacgttctccgctcgttcaatatcacgcttgtgcaggtactcatagacagccatcatggccgcaggcggttcacccttctgcttgcggtattcctcgatgtgagaaacaacggccttgtgcagggcgttcatatggttcatttcctcgcctg

SEQ ID NO: 28004 - DNA, 260 bp, Unknown
  Description of Unknown: RightRegion for integrase B2005 sequence
gaaccctacattgtgtggggaaaggtattcgttcaaaccaaaagacactccttaccttaatcggtagggagtgtcttcttttatttttcgccggaatacccgttcgctctggcgtatttcagcgcacccaagatcatcttgtcctgagccagcgttcgttctttcagctcatagagcggaatgcggcgatgattgtcccattcaatgagctgctttttgtcatgaacgacttgaccttcatagagattgataaccttgcc

SEQ ID NO: 28005 - DNA, 260 bp, Unknown; identical to SEQ ID NO: 27981
  Description of Unknown: RightRegion for integrase B2006 sequence

SEQ ID NO: 28006 - DNA, 260 bp, Unknown
  Description of Unknown: RightRegion for integrase B2007 sequence
gaaccctacattgtgtggggaacggtgttcgttcaaaccaaaagacactccttaccttaatcggtagggagtgtcttcttttattcttcgccggaatacccgttcgctctggcgcatttcagcgcacccaaaatcatcttgtcctgagccagagttcgttctttcagctcatagagtggagtgcggcgatgatcgtcccattcaatgagctgctttttgttgtgaacgacttgaccctcgtagagattgataaccttgtc

SEQ ID NO: 28007 - DNA, 260 bp, Unknown
  Description of Unknown: RightRegion for integrase B2008 sequence
gctgttctctatatgatcggcggcctgttcgtgttggaatgctcccttgaggagagataaaaaaagaggttatccgtcctgcgttgcagcgggagggataacctctttttgcgtttcattctaacgaaatcggttattttttaccaaatccatgcggaaatctaaaattgtagttatattctaccgtaaaggagcatggctatgattaggattttactgtccacccggcttggcgagcggaggtggacgcaagctgacct

SEQ ID NO: 28008 - DNA, 260 bp, Unknown
  Description of Unknown: RightRegion for integrase B2009 sequence
gaaccctacattgtgtggggaacggtgttcgttcaaaccaaaagacactccttaccttaatcggtagggagtgtcttcttttattcttcgccagaatacccgttcgctctggcgcatttcagcgcacccaagatcatcttgtcttgagccagcgttcgttctttcagctcatagagtggagtacggcgatgatcgtcccattcaatgagctgctttttgtcatgaacgacttgaccctcatagagattgataaccttgtc

SEQ ID NO: 28009 - DNA, 260 bp, Unknown
  Description of Unknown: RightRegion for integrase B2010 sequence
gaaccctacattgtgtggggaaaggtattcgttcaaaccaaaagacactccttaccttaatcggtagggagtgtcttcttttatttttcgccggaatacccgttcgctctggcgcatttcagcgcacccaagatcatcttgtcctgagccagcgttcgttctttcagctcatagagcggagtgcggcgatgatcgtcccattcaatgagctgctttttgtcatgaacgacttgaccttcatagagattgataaccttgtc

SEQ ID NO: 28010 - DNA, 260 bp, Unknown
  Description of Unknown: RightRegion for integrase B2011 sequence
gaaccctacattgtgtggggaacggtgttcgttcaaaccaaaagacactccttaccttaatcggtagggagtgtcttcttttattcttcgccggaatacccgttcgctctggcgcatttcagcgcacccaagatcatcttgtcctgagccagtgttcgttctttcagctcatagagtggagtacggcgatgatcgtcccattcaatgagctgctttttgtcgtgaacgacttgaccctcgtagagattgataaccttgtc

SEQ ID NO: 28011 - DNA, 260 bp, Unknown
  Description of Unknown: RightRegion for integrase B2012 sequence
aacacgataaccgtcttcggaatggtcttcgtccaaaccaaaagccacgccttgccgtaattggcagggcgtggctttttatagcctaaactggtcgatttccaccagtttactttttatacatcccttgcagcgccccagcctctccggctttttcgatagcccgcttatgcagatactcataaacggccatatcgtcctccgggaatttgtctccgcttcggtgataggcatcaatcattcgaatcacgttcttgtgc

SEQ ID NO: 28012 - DNA, 260 bp, Unknown
  Description of Unknown: RightRegion for integrase B2013 sequence
gaaccctacattgtgtggggaacggtattcgttcaaaccaaaaaacactccttaccttaatcggtagggagtgtcttcttttattctttaccggaatacccgttcgctctggcgcatttcagcgcacccaagatcatcttgtcttgagccagcgttcgttctttcagctcatagagtggagtacggcgatgatcgtcccattcaatgagctgctttttgtcgtgaacgacttgaccctcatagagattgataaccttgtc

SEQ ID NO: 28013 - DNA, 260 bp, Unknown
  Description of Unknown: RightRegion for integrase B2014 sequence
gaaccctacattgtgtggggaacggtgttcgttcaaaccaaaagacactccttaccttaatcggtagggagtgtcttcttttattcttcgcctattcttcgccggaatacccgttcgctctggcgcatttcagcgcacccaagatcatcttgtcttgagccagcgttcgttctttcagctcatagagcggggtacggcgatgatcgtcccattcaatgagttgcttcttgtcgtgaacgacttgaccctcatagagattg

SEQ ID NO: 28014 - DNA, 260 bp, Unknown
  Description of Unknown: RightRegion for integrase B2015 sequence
ttcgacgaatttttcaaggccatgcccgtcgaagaatacgagatcccgataacggaatgaaagaaaaagcattgctggaaaattctcctgcaatgctttttccctatttttcaaattagcccattcgcctcacattgttaagcacctgcggagttagccatatgctgtttcgcttcccgattccttccataaattccacaaaatcgggtgatagctttacattatgaagattaaaattagtagcacctcccatatcaaga

SEQ ID NO: 28015 - DNA, 260 bp, Unknown
  Description of Unknown: RightRegion for integrase B2016 sequence
aacacaattgttgttgtgggtatggttttcgtccagaccaagaaacacgccctgccttgattggctgggcgtgtcttctttattttttgtacatagcctgtaccactccgacgttctccgcccgttcaatatcccgcttgtgcaggtactcatagacggccatcatggccgcaggcggttcacccttctgcttgcggtattcctcaatgtgagaaacaacggccttgtgcagggcgttcatgtggttcatttcctcgccg

SEQ ID NO: 28016 - DNA, 260 bp, Unknown
  Description of Unknown: RightRegion for integrase B2017 sequence
gaaccctacattgtgtggggaacggtattcgttcaaaccaaaagacactccttaccttaatcggtagggagtgtcttcttttattcttcgccggaatacccgtttgctctggcacatttcagcgcacctaagatcatcttgtcctgagccagtgttcgttctttcagctcatagagtggagtacggcgatgattgtcccattcaatgagctgctttttgtcgtgaacgacttgaccctcgtagagattgataaccttgtc

SEQ ID NO: 28017 - DNA, 260 bp, Unknown
  Description of Unknown: RightRegion for integrase B2018 sequence
cagtatgtatctagggagaaatggtgcaggcaagacaactttaatgagaatactttctaatttgcaaagtccatcctcaggaacagttgttaaatctgaaaatattaaaatcggtgccattattgaaacacctgcattatatcctaccttaagtgcaaaaggaaatttgaagtatcagcttaaaatttgtggatgcccatcaaaggaagtaaagtcgaagattgctgaactattagaactggtacatctgaaagatactc

SEQ ID NO: 28018 - DNA, 260 bp, Unknown; identical to SEQ ID NO: 27989
  Description of Unknown: RightRegion for integrase B2019 sequence

SEQ ID NO: 28019 - DNA, 260 bp, Unknown
  Description of Unknown: RightRegion for integrase B2020 sequence
ttcgacgaattttttaaggctatgcctgtcgaggaataccaaattccaataacagaatgaaaaaagagggcgattgctataatggcaatcgtccccttttcaattcggttaaatggtcgaatattaaagatgttcccgtagcaggtcaaggattacctgttcttgtgtctgcgtagaggttttgcgggcattttgaattttctccgcttgccattgggtaagtttttttaatttctcctctatttcaagagtgtaggccg

SEQ ID NO: 28020 - DNA, 260 bp, Unknown
  Description of Unknown: RightRegion for integrase B2021 sequence
aacacaattgttgttgtgggtatggttttcgtccagaccaagaaacacgccctgccttaattggccgggcgtgtttcttacttcttgtacattgcctgtagcactccgacttcctccgcccgctcaatatcacgcttgtgcaggtactcatagacagccatcatggccgcaggcggttcacccttctgcttgcggtattcctcaatgtgagaaacaacggccttgtgcagggcgttcatatggttcatttcctcgcctga

SEQ ID NO: 28021 - DNA, 260 bp, Unknown
  Description of Unknown: RightRegion for integrase B2022 sequence
aacacgataaccgtcttcggaatgattttcgtccaaaccagaaaacacgccttgccgtaattggcagggcgtgttctttttttcttggataaactggctggaatcgggctggttactttttatacatcccctgcaaaaccccaaccctttcggcctcggcgatgaaacgcttgtgcagatgttcgtaccttgccatcatgtctgcggggagttcacctttcttctgccggtaggcctcaatcatacgaaccacatcctta

SEQ ID NO: 28022 - DNA, 260 bp, Unknown
  Description of Unknown: RightRegion for integrase B2023 sequence
aactcaatagtagttgttgggatggtttttgtccaaaccaagagacacgccctgccttaataggctgggcgtgtctcttttattttttgtacattgcctgaaggattccgaccttctcggcttcttccatggcttccccgtggaggtacttgtagaggatcatcatgggttccgggacttcgcccttttccttgcggtagttttcgatcagccggaccacgtctctgtggagggcggtcatgtgattcagttcctctccg

SEQ ID NO: 28023 - DNA, 260 bp, Unknown
  Description of Unknown: RightRegion for integrase B2024 sequence
gaaccctacattgtgtggggaacggtattcgttcaaaccaaaagacactccttaccttaatcggtagggagtgtcttcttttattcttcgccggaatacccgttcgctctggcacatttcagcgcacccaagatcatcttgtcctgagccagcgttcgttctttcagctcatagagtggagtacggcgatgatcgtcccattcaatgagctgctttttgtcgtgaacgacttgaccctcatagagattgataaccttgtc

SEQ ID NO: 28024 - DNA, 260 bp, Unknown
  Description of Unknown: RightRegion for integrase B2025 sequence
ttcgacgaatttttcaaagctatgcccgtcgaagaatacgagatcccgataacggaatgaaagaaaaagcattgctggaaaattctcctgcaatgctttttccctatttttcaaattagcccattcgcctcatattgttaagcacttgcggagttagccatatgctgtttcgcttcccgattccttccataaattccacaaaatcgggtgatagctttacattatgaagattaaaattagtagcacctcccatatcaaga

SEQ ID NO: 28025 - DNA, 260 bp, Unknown
  Description of Unknown: RightRegion for integrase B2026 sequence
gaaccctacattgtgtggggaacggtattcgttcaaaccaaaagacactccttaccttaatcggtagggagtgtcttcttttattcttcgccggaatacccgttcgctctggcgcatttcagcgcacccaaaatcatcttgtcctgagccagagttcgttctttcagctcatagagtggagtgcggcgatgatcgtcccattcaatgagctgatttttgtcgtgaacgacttgaccctcatagagattgataaccttgtc

SEQ ID NO: 28026 - DNA, 260 bp, Unknown
  Description of Unknown: RightRegion for integrase B2027 sequence
gacaaccgttttattgacctcggcaaatgccgggggtcatatgtggtatttaagaggtgataaaatgtttggaaaaattaagataaaaaactgcatactgactattataggaagtgcggtattagcctttgggctatataatgtgcactcgctttccggagtaactgaaggcggcgtacttggacttactctgctcttggaacaccattttggcatttctccgtccgtttcaggccttattctgaatcttgcgtgctatc

SEQ ID NO: 28027 - DNA, 260 bp, Unknown
  Description of Unknown: RightRegion for integrase B2028 sequence
gaaccatacatagcatacgggtcgattcttgttcaaaccaaaagacactctttaccttaattggtagagagtgtctttttttgcgtttaggtgataaaggtgagtaatcgggtgtttttcctataaactctttctaatacgcgcgtactaagaggaagttatagggattttaacccgattactcacctaactcacctaatttgacttatttgcggctccgcagcaccatcgctgcgacttcttcgcgtttggcgtagccg

SEQ ID NO: 28028 - DNA, 260 bp, Unknown
  Description of Unknown: RightRegion for integrase B2029 sequence
atttcgccgtacagcgttgttttcatcatcccgcttcccggaaaactggtacgccgataaaatccgcctgccgtttcacgcaatataatttgcttctacgttctttattttcattctttcggacagaggtttatattccgtcacctccacagacaacaaaaaaatcccccgccagctttcctttcagattgccagcgggggattttcagttatgcggttttagtgcaggaatgtagccagttcataggccacaaagcccg

SEQ ID NO: 28029 - DNA, 260 bp, Unknown
  Description of Unknown: RightRegion for integrase B2030 sequence
tatggcacaatcaaaaagacgcaggaattcaaattcctgcgtcttttttgcatgtattgatgggtgtgtacctcagtgcccggcccgactggggatcgtctggagctcgaagcggtaggtctgcccggcgtccgggtatttttcgcggtcgaccgggctcaggaacatatccagcggccggacccagaggccgccgtcgccgtaaagcttgcggtagatcacgcagggctcgttcgtctcggaatcacgggcaagcgcct

SEQ ID NO: 28030 - DNA, 260 bp, Unknown; identical to SEQ ID NO: 27958
  Description of Unknown: RightRegion for integrase B2031 sequence

SEQ ID NO: 28031 - DNA, 260 bp, Unknown
  Description of Unknown: RightRegion for integrase B2032 sequence
aacacaattaccgttgtgggaatggttttcatccaaaccaaaagacacgccctgccttgattggtagggcgtgtttctttattttttatacatcccctgcaccactccgacgttctccgcccgctcaatatcccgcttgtgcaggtactcatagacggccatcatggccgcaggcggttcgcccttctgcttgcggtattcctcaatgtgggaaacaacggccttgtgcagggcgttcatgtggttcatttcctccccgc

SEQ ID NO: 28032 - DNA, 260 bp, Unknown
  Description of Unknown: RightRegion for integrase B2033 sequence
aacacaatagttgttgtgggtatggttttcgtccagaccaagaagcacgccctgccttaattggccgggcgtgtttcttacttcttgtacattgcctgtagcactccgacttcctccgcccgctcaatatcacgcttgtgcaggtactcatagacagccatcatggccgcaggcggttcacccttctgcttgcggtattcctcaatgtgagaaacaacggccttgtgcagggcattcatgtggttcatttcctcgccgct

SEQ ID NO: 28033 - DNA, 260 bp, Unknown; identical to SEQ ID NO: 27982
  Description of Unknown: RightRegion for integrase B2034 sequence

SEQ ID NO: 28034 - DNA, 260 bp, Unknown
  Description of Unknown: RightRegion for integrase B2035 sequence
aacacaattgttgttgtgggtatggttttcgtccaagccaagaaacacgccctgccttaattggccgggcgtgtttcttacttcttgtacatagcctgtaccactccgacgttctccgcccgttcaatatcccgcttgtgcaggtactcatagacggccatcatggccgcaggcggttcacccttctgcttgcggtattcctcaatgtgagaaacaacggccttgtgcagggcgttcatatggttcatttcctcgcctga

SEQ ID NO: 28035 - DNA, 260 bp, Unknown
  Description of Unknown: RightRegion for integrase B2036 sequence
gaaccctacattgtgtggggaacggtgttcgttcaaaccaaaagacactccttaccttaatcggtagggagtgtcttcttttattcttcgccggaatacccgtttgctctggcacatttcagcgcacccaagatcatcttgtcctgagccagtgttcgttctttcagctcatagagtggagtgcggcgatgatcgtcccattcaatgagctgctttttatcatgaacgacttgaccctcatagagattgataaccttgtc

SEQ ID NO: 28036 - DNA, 260 bp, Unknown
  Description of Unknown: RightRegion for integrase B2037 sequence
aactccatcacagttgtgggcatggtttttgtgtgcacaagaagacacgctctgccgtaatggcggggcgtgtctctttttattttttgtacattgcctgaaggattccgaccttctcggcttcttccatggcttccccgtggaggtacttgtagaggatcatcatgggttccgggacttcgcccttttccttgcggtagttttcgatcagccggaccacgtccttgtggagggcggtcatgtgattcagttcctctccg

SEQ ID NO: 28037 - DNA, 260 bp, Unknown
  Description of Unknown: RightRegion for integrase B2038 sequence
gaaccctacatcgtgtggggaacggtgttcgttcaaaccaaaagacactccttaccttaatcggtagggagtgtcttcttttattcttcgccggaatacccgttcgctctggcgcatttcagcgcacccaaaatcatcttgtcctgagccagagttcgttctttcagctcatagagtggagtgcggcgatgatcgtcccattcaatgagctgctttttgtcgtgaacgacttgaccctcgtagagattgataaccttgtc

SEQ ID NO: 28038 - DNA, 260 bp, Unknown
  Description of Unknown: RightRegion for integrase B2039 sequence
gaaccctacattgtgtggggaacggtgttcgttcaaaccaaaagacactccttaccttaatcggtagggagtgtcttcttttattcttcgccggaatacccgttcgctctggcgcatttcagcgcacccaagatcatcttgtcctgagccagtgttcgttctttcagttcatagagtggagtacggcgatgatcgtcccattcaatgagctgctttttgtcatgaacgacttgaccctcgtagagattgataaccttgtc

SEQ ID NO: 28039 - DNA, 260 bp, Unknown
  Description of Unknown: RightRegion for integrase B2040 sequence
gaaccctacattgtatggggaacggtgttcgttcaaaccaaaagacactccttaccttaatcggtagggagtgtcttcttttattcttcgccggaatacccgttcgctctggcgcatttcagcgcacccaagatcatcttgtcttgagccagcgttcgttctttcagctcatagagtggagtacggcgatgatcgtcccattcaatgagctgctttttgtcgtgaacgacttgaccctcgtagagattgataaccttgtc

SEQ ID NO: 28040 - DNA, 260 bp, Unknown
  Description of Unknown: RightRegion for integrase B2041 sequence
gaaccctacattgtgtggggaacggtgttcgttcaaaccaaaagacactccttaccttaatcggtagggagtgtcttcttttattcttcgccggaatacccgtttgctctggcacatttcagcgcacccaagatcatcttgtcctgagccagtgttcgttctttcagctcatagagtggagtgcggcgataattgtcccattcaatgagctgctttttgtcgtgaacgacttgaccctcgtagagattgataaccttgtc

SEQ ID NO: 28041 - DNA, 260 bp, Unknown
  Description of Unknown: RightRegion for integrase B2042 sequence
ctgatttcgaggacttttgcttttcataagttccgttttggggataccgcttttttctgacccaaacgccgaccccaacgggagctaaactgtacccaagaaaatggacacgagattttgacccatggccccgttcggcggacacgcatttgacccatagggtcagaagcgccgcacctgtgttatgatagaactaccgaacggaggtgctgtatgggcacgaagaagaaattcacaccagaggaactgaagcatctgca

SEQ ID NO: 28042 - DNA, 260 bp, Unknown
  Description of Unknown: RightRegion for integrase B2043 sequence
gaaccctacattgtgtggggaacggtattcgttcaaaccaaaagacactccttaccttaatcggtagggagtgtcttcttttattcttcgccggaatacccgttcgctctggcgcatttcagcgcacccaagatcatcttgtcctgagccagtgttcgttctttcagctcatagagtggagtgcggcgatgatcgtcccattcaatgagctgctttttatcatgaacgacttgaccctcatagagattgataaccttgtc

SEQ ID NO: 28043 - DNA, 156 bp, Unknown
  Description of Unknown: RightRegion for integrase B2044 sequence
gcggtactggcggtaatccatgacggggataggttcagtcttgttgttcttcataaatgagttctttcataaagccgataacctccttgaatgaatttattgttaaatattcgtgcaaagtattgttttcttcgtgcaaatggcatatactataat

SEQ ID NO: 28044 - DNA, 260 bp, Unknown
  Description of Unknown: RightRegion for integrase B2045 sequence
gaaccctacattgtgtggggaacggtattcgttcaaaccaaaagacactccttaccttaattggtagggagtgtcttcttttattcttcgccggaatacccgttcgctctggcgcatttcagcgcacccaagatcatcttgtcctgagccagtgttcgttctttcagttcatagagtggagtgcggcgatgatcgtcccattcaatgagctgctttttatcatgaacgacttgaccttcatagagattgataaccttgtc

SEQ ID NO: 28045 - DNA, 260 bp, Unknown
  Description of Unknown: RightRegion for integrase B2046 sequence
gaaccctacattgtgcggggaacggtgttcgttcaaaccaaaagacactccttaccttaattggtagggagtgtcttcttttattcttcgccggaatacccgttcgctctggcgcatttcagcgcacccaagatcatcttgtcctgagccagcgttcgttctttcagctcatagagcggggtacggcgatgatcgtcccattcaatgagttgcttcttgtcgtgaacgacttgaccctcatagagattgataaccttgtc

SEQ ID NO: 28046 - DNA, 260 bp, Unknown; identical to SEQ ID NO: 28010
  Description of Unknown: RightRegion for integrase B2047 sequence

SEQ ID NO: 28047 - DNA, 260 bp, Unknown; identical to SEQ ID NO: 28034
  Description of Unknown: RightRegion for integrase B2048 sequence

SEQ ID NO: 28048 - DNA, 260 bp, Unknown
  Description of Unknown: RightRegion for integrase B2049 sequence
gaaccctacattgtgtggggaacggtgttcgttcaaaccaaaagacactccttaccttaatcggtagggagtgtcttcttttattcttcgccggaatacccgttcgctctggcgcatttcagcgcacccaagatcatcttgtcctgagccagcgttcgttctttcagctcatagagtggagtgcggcgatgatcgtcccattcaatgagctgctttttgtcgtgaacgacttgaccctcgtagagattgataaccttgtc

SEQ ID NO: 28049 - DNA, 260 bp, Unknown; identical to SEQ ID NO: 27984
  Description of Unknown: RightRegion for integrase B2050 sequence

SEQ ID NO: 28050 - DNA, 260 bp, Unknown
  Description of Unknown: RightRegion for integrase B2051 sequence
gaaccctacattgtgtggggaacggtgttcgttcaaaccaaaagacactccttaccttaatcggtagggagtgtcttcttttattcttcgccggaatacccgttcgctctggcgcatttcagcgcacccaagatcatcttgtcctgagccagtgttcgttctttcagctcatagagtggagtacggcgatgatcgtcccattcaatgagctgctttttgtcgtgaacgacttgaccctcatagagattgataaccttatc

SEQ ID NO: 28051 - DNA, 260 bp, Unknown; identical to SEQ ID NO: 27979
  Description of Unknown: RightRegion for integrase B2052 sequence

SEQ ID NO: 28052 - DNA, 260 bp, Unknown
  Description of Unknown: RightRegion for integrase B2053 sequence
ccgtattatattatttacggtacgatatttgtccaaaccaaaagacactccttgtcttaaagcaaggggtgtctttttttcggttaggtgataaaggtgagtaatcgggcgtttttcctataaactatctctaatacgcgcgtactaaggaaaagttatagggattttgacccgattactcacctttatcaccttatgcaattaaatgtaaaaatccccggaagctaaaacctccggggatgctgttatatgaatatcac

SEQ ID NO: 28053 - DNA, 260 bp, Unknown
  Description of Unknown: RightRegion for integrase B2054 sequence
ttcgacgaatttttcaaagctatgcccgtcgaagaatacgagatcccgataacggaatgaaaaaagagggcgattgctataatggcaatcgtccccttttcggttcggctaaacgaccgaacaattaaagatgttcccgtaacagatcaaggattacttgttcttgtgtctgcgtagaggttttgcgggcattttggattttatccgcctgccattgggcaagtttttttaatttctcctctatttcaagcgtgtaggcc

SEQ ID NO: 28054 - DNA, 260 bp, Unknown
  Description of Unknown: RightRegion for integrase B2055 sequence
aacacaattaccgttgtgggaatggttttcatccaaaccagaagacacgccctgccttgattggtagggcgtgtttctttatttttttatacataccctgcaccactccgacgttctccgcccgttcaatatcccgcttgtgcaggtactcatagacggccatcatggccgcaggcggcgcgcccttctgcttgcggtattcctcgatgtgggaaacaacggccttgtgcagggcgttcatgtggttcatttcctccccg

SEQ ID NO: 28055 - DNA, 260 bp, Unknown
  Description of Unknown: RightRegion for integrase B2056 sequence
gaaccctacattgtgtggggaacggtgttcgttcaaaccaaaagacactccttaccttaatcggtagggagtgtcttcttttattcttcgccggaatacccgttcgctctggcgcatttcagcgcacccaagatcatcttgtcctgagccagtgttcgttctttcagctcatagagtggagtacggcgatgatcgtcccattcaatgagctgctttttgtcatgaacgacctgaccctcgtagagattgataaccttgtc

SEQ ID NO: 28056 - DNA, 260 bp, Unknown
  Description of Unknown: RightRegion for integrase B2057 sequence
gaaccctacattgtgtggggaaaggtattcgttcaaaccaaaagacactccttaccttaatcggtagggagtgtcttcttttatttttcgccggaatacccattcgctctggcgcatttcagcgcacccaagatcatcttgtcctgagccagcgttcgttctttcagctcatagagcggagtgcggcgatgatcgtcccattcaatgagctgctttttgtcatgaacgacttgaccttcatagagattgataaccttgtc

SEQ ID NO: 28057 - DNA, 260 bp, Unknown
  Description of Unknown: RightRegion for integrase B2058 sequence
aacaccatagcagtggttggaatggtatttgtccaaaccaaaatacacgccttgccttaattggcagggcgtgttattttttaccgtttatacatggcttggagaacgccaaccttttctgctttctcaatctcacgctggtggagataattgtaaatcgccatcatctcggcgggcggttcgcctttctcccggcggtatttttcaattagccgaacaacttctttatgtagagctgtgaagtggccctgctcctcgcc

SEQ ID NO: 28058 - DNA, 260 bp, Unknown
  Description of Unknown: RightRegion for integrase B2059 sequence
gaaccctacattgtgtggggaacggtattcgttcaaaccaaaagacactccttaccttaatcggtagggagtgtcttcttttattcttcgccggaatacccgttcgctctggcgcatttcagcgcacccaagatcatcttgtcctgagccagagttcgttctttcagctcatagagtggagtgcggcgatgatcgtcccattcaatgagctgctttttatcatgaacgacttgaccctcatagagattgataaccttgtc

SEQ ID NO: 28059 - DNA, 109 bp, Unknown
  Description of Unknown: RightRegion for integrase B2060 sequence
attactgataacaaattatcgcaatttagtgtgcctagcttctgtatgtcctacaaataaaccgcttttttctccagcacagaaaagattatctactcctataaccttc

SEQ ID NO: 28060 - DNA, 260 bp, Unknown; identical to SEQ ID NO: 27958
  Description of Unknown: RightRegion for integrase B2061 sequence

SEQ ID NO: 28061 - DNA, 260 bp, Unknown
  Description of Unknown: RightRegion for integrase B2062 sequence
aacacaattgttgttgtgggtatggttttcgtccagaccaaaaaacacgccctgccttaattggccgggcgtgtttctttattttttatacatcccctgcaccactccgacgttctccgctcgttcaatatcacgcttgtgcaggtactcatagacagccatcatggccgcaggcggttcacccttctgcttgcggtattcctcaatgtgggaaacaacggctttgtgcagggcgttcatgtggttcatttcttccccgc

SEQ ID NO: 28062 - DNA, 260 bp, Unknown
  Description of Unknown: RightRegion for integrase B2063 sequence
aacacaattaccgttgtgggaatggttttcatccaaaccaaaagacacgccctgccttgattggtagggcgtgtttctttattttttatacatcccctgcaccactccgacgttctccgcccgctcaatatcccgcttgtgcaggtactcatagacggccatcatggccgcaggcggctcgcccttctgcttgcggtattcctcaatgtgggaaacaacggccttgtgcagggcgttcatgtggttcatttcctccccgc

SEQ ID NO: 28063 - DNA, 260 bp, Unknown
  Description of Unknown: RightRegion for integrase B2064 sequence
aacacaattaccgttgtggggatggttttcatccaaaccagaagacacgccctgccttgattggtagggcgtgttgctttattttttgtacatagcctgtacaactccgacgttctccgcccgttcaatatcccgcttgtgcaggtactcatagacggccatcatggccgcaggcggtgtggttcatttcctccccgctcagcctgtaaaacaggtctgccagctccgggtcgtcgtgcttgtattccacggccagttct

SEQ ID NO: 28064 - DNA, 260 bp, Unknown; identical to SEQ ID NO: 27992
  Description of Unknown: RightRegion for integrase B2065 sequence

SEQ ID NO: 28065 - DNA, 260 bp, Unknown
  Description of Unknown: RightRegion for integrase B2066 sequence
aacacaattaccgttgtgggaatggttttcatccaaaccaaaagacacgccctgccttgattggtagggcgtgttgctttattttttgtacatagcctgcaccactccgacgttctccgcccgttcaatatcccgcttgtgcagatactcatagacggccatcatggccgcaggcggctcgcccttctgcttgcggtattcctcaatgtgggaaacaacggccttgtgcagggcgttcatgtggttcatttcctccccgc

SEQ ID NO: 28066 - DNA, 260 bp, Unknown
  Description of Unknown: RightRegion for integrase B2067 sequence
ttcgacgaattttttaaggctatgcctgtcgaggaataccaaattccaataacagaatgaaaaaagagggcgattgctataatggcaatcgtccccttttcgattcggttaaatggccgaatattaaagatgttcccgtagcaggtcaaggattacctgttcttgtgtctgcgtagaggttttgcgggcattttgaattttttccgcttgccattgggtaagtttttttaatttctcctctatttcaagagtgtaggccg

SEQ ID NO: 28067 - DNA, 260 bp, Unknown
  Description of Unknown: RightRegion for integrase B2068 sequence
gaaccctacatcgtgtggggaacggtgttcgttcaaaccaaaagacactccttaccttaatcggtagggagtgtcttcttttattcttcgccggaatacccgtttgctctggcacatttcagcgcacccaagatcatcttgtcttgagccagagttcgttcttttagctcatagagtggagtgcggcgatgatcgtcccattcaatgagctgctttttgtcatgaacgacttgaccttcatagagattgataaccttgtc

SEQ ID NO: 28068 - DNA, 260 bp, Unknown
  Description of Unknown: RightRegion for integrase B2069 sequence
gaaccctacattgtgtggggaacggtgttcgttcaaaccaaaagacactccttgccttaattggtagggagtgtcttcttttattcttcgccggaatacccgtttgctctggcacatttcagcgcacccaagatcatcttgtcctgagccagtgttcgttctttcagctcatagagtggagtgcggcgatgattgtcccattcaatgagctgctttttgtcgtgaacgacttgaccctcgtagagattgataaccttgtc

SEQ ID NO: 28069 - DNA, 260 bp, Unknown
  Description of Unknown: RightRegion for integrase B2070 sequence
gaaccctacattgtgtggggaacggtgttcgttcaaaccaaaagacactccttaccttaatcggtagggagtgtcttcttttattcttcgccggaatacccgttcgctctggcgcatttcagcgcacccaaaatcatcttgtcctgagccagtgttcgttctttcagctcatagagtggagtacggcgatgatcgttccattcaatgagctgctttttgtcatgaacgacttgaccctcatagagattgataaccttgtc

SEQ ID NO: 28070 - DNA, 260 bp, Unknown
  Description of Unknown: RightRegion for integrase B2071 sequence
caaaaagataatcatattataggcgaaattcgtgtaaaagaacgagaaaaagttagttaaaaataaaattatggaggtaaaattaaatggaaaataaagagataaaacaaaatagatatggaattgaatatataaaacaaggcgattattatatgccaaatctagtattagaaaaagaaaaactagaattaaataagtatggtagagcaagattaaactatctaaaaacaaataaaaaagcagaatatatgataatgtct

SEQ ID NO: 28071 - DNA, 75 bp, Unknown
  Description of Unknown: RightRegion for integrase B2072 sequence
actcagtatgtatctagggagaaatggctcggggaaaagtacaataacaactttttttgataaagctggtaaata

SEQ ID NO: 28072 - DNA, 260 bp, Unknown
  Description of Unknown: RightRegion for integrase B2073 sequence
agatttgttcgtacagccccacttccgccgcataaaaagaccccccaagcttacgcttgaggggctttttattttgcttattttacaccttgccgccgtgcagctctgcatacatcttggaacggcactcggccacagccggggtcatgttcacatagtgcttatgcgggcactccagacgcagctcgctctcccaggtctcctcggtgagctgctttgcaatgtaggccttcttctctgcgatcgaaggcagctcaatg

SEQ ID NO: 28073 - DNA, 109 bp, Unknown
  Description of Unknown: RightRegion for integrase B2074 sequence
aaagttataagcattcaatttacgaatggtctaatatcaacattcatatacgaggtctaaacccttatttttactagcctttcaattcttcttttcttctactaacgca

SEQ ID NO: 28074 - DNA, 260 bp, Unknown; identical to SEQ ID NO: 28070
  Description of Unknown: RightRegion for integrase B2075 sequence

SEQ ID NO: 28075 - DNA, 260 bp, Unknown
  Description of Unknown: RightRegion for integrase B2076 sequence
gaaccctacattgtgtggggaacggtgttcgttcaaaccaaaagacactccttaccttaattggtagggagtgtcttcttttattcttcgccggaatacccgttcgctctggcacatttcagcgcacccaagatcatcttgtcctgagccagcgttcgttctttcagctcatagagtggagtacggcgatgatcgtcccattcaatgagctgctttttgtcgtgaacgacttgaccctcatagagattgataaccttatc

SEQ ID NO: 28076 - DNA, 260 bp, Unknown
  Description of Unknown: RightRegion for integrase B2077 sequence
atttttgttgttgcggcgttttctgttttgcgcgaacataaaaataaggagagggtttaaccctctccttatttttattccgccacaatcccgtgataatatgccgcaagttttgcttccggccccggcccgtctttgtcaaacagaaacgcctttgcgagatcagcgtaaaactccaccttgctgcacccatatcttgtcgccacgctgcaatagtcagagtacatcatattcatggcggcgttccactcctccggggt

SEQ ID NO: 28077 - DNA, 260 bp, Unknown
  Description of Unknown: RightRegion for integrase B2078 sequence
agatttgttcgtacagccccacttccgccgcataaaaagaccccccaagcttacgcttgaggggctttttattttgcttattttacaccttgccgccgtgcagctctgcatacatcttggaacggcactcggccacagccggggtcatgttcacatagtgcttatgcgggcactccagacgcagttcgctctcccaggtctcctcggtgagctgctttgcaatgtaggccttcttctctgcgatcgaaggcagctcaatg

SEQ ID NO: 28078 - DNA, 260 bp, Unknown; identical to SEQ ID NO: 28076
  Description of Unknown: RightRegion for integrase B2079 sequence

SEQ ID NO: 28079 - DNA, 260 bp, Unknown; identical to SEQ ID NO: 28076
  Description of Unknown: RightRegion for integrase B2080 sequence

SEQ ID NO: 28080 - DNA, 260 bp, Unknown
  Description of Unknown: RightRegion for integrase B2081 sequence
ccgtgttatatcatttacggtacgatatttgtccaaaccagaagacactccttgtcttaaaacaaggggtgtctttttttgtttaggtgataaaggtgagtaatcgggtgtttttcctataaactctctctaatacgcgcgtactaagaagaagttatagggattttgacccgattactcacctttatcaccttatacacttaaatgtaaaaatccccggaagctgaaacctccggggatgctgttatatatcacttatc

SEQ ID NO: 28081 - DNA, 260 bp, Unknown
  Description of Unknown: RightRegion for integrase B2082 sequence
ctaaaaacagaaagagcgttgctgctagcggctgaccctttcgatctatcacgaaactagttcatgctgaccgtttggggggctaccaagcggtcagcaagcttttatggacagtgccagggccaaaatgaccacgcacactaaaaatttcaaaagaaatttatccacttcggcttcaccccccttcacggagagtggccaaccacttttttcgcaacaacgcatctttccggcccctttgacggggccttttgatttta

SEQ ID NO: 28082 - DNA, 260 bp, Unknown
  Description of Unknown: RightRegion for integrase B2083 sequence
tatggcacgatcaaaaagacgcaggaattcaaattcctgcgtcttttttgcatgtattgatgggtgtgtacctcagtgcccggcccggctggggatcgtctggagctcgaagcggtaggtctgcccggcgtccgggtatttttcgcggtcgaccgggctcaggaacatatccagcggccggacccagaggccgccgtcgccgtaaagcttgcggtagatcacgcagggctcgttcgtctcggaatcacgggcaagcgcct

SEQ ID NO: 28083 - DNA, 260 bp, Unknown
  Description of Unknown: RightRegion for integrase B2084 sequence
aacagcgtaccgtctttgcgacggtacgcccatttttatgcagttattacagaatgctgatgcggcctgcgccgtagggattctcgtaatccagcagatagcccgggtaatcggccagcgggctgtttgcggtggtcaaatgcggcagaccctctgcatctacaccgccaaaggtcatggcataggtagacatcacaaggtaatcctcagacacatagtccttgatcagctctgcgccatcaaacatggcaaagccatcg

SEQ ID NO: 28084 - DNA, 260 bp, Unknown; identical to SEQ ID NO: 28076
  Description of Unknown: RightRegion for integrase B2085 sequence

SEQ ID NO: 28085 - DNA, 260 bp, Unknown
  Description of Unknown: RightRegion for integrase B2086 sequence
gagatttctccttacagcgttattttcatcattccgcttcccggaaaactggtacgctgataaaatccacctgccgctttgcataatacaattcgcttctacgttctttattctttcggacagaggtttacattccgtcacctccacagacagcaaaaaatcccccgccagctttcctttcggattgccagcgggggatttttagttatgcagttttaatgcactgattcgtcagtttgccgtacacgtcctcgtacagc

SEQ ID NO: 28086 - DNA, 260 bp, Unknown
  Description of Unknown: RightRegion for integrase B2087 sequence
agatttgttcgtacagccccacttccgccgcataaaaagaccccccaagcttacgcttgaggggctttttattttgcttattttacaccttgccgccgtgcagctctgcgtacatcttggaacggcactcggccacagccggggtcatgttcacatagtgcttatgcgggcactccagacgcagctcgctctcccaggtctcctcggtgagctgctttgcaatgtaggccttcttctctgcgatcgaaggcagctcaatg

SEQ ID NO: 28087 - DNA, 260 bp, Unknown
  Description of Unknown: RightRegion for integrase B2088 sequence
agatttgttcgtacagccccacttccgccgcataaaaagaccccccaagcttacgcttgaggggctttttattttgcttattttacaccttgccgccgtgcagctctgcatacatcttggaacggcactcggccacagccggggtcatgttcacatagtgcttatgcgggcactccagacgcagttcgctctcccaggtctcctcggtgagctgctttgcaatgtatgccttcttctctgcgatcgaaggcagctcaatg

SEQ ID NO: 28088 - DNA, 260 bp, Unknown
  Description of Unknown: RightRegion for integrase B2089 sequence
actcagtatgtatctagggagaaatgtgccaagaaaaaagacgtttttaagcgaagttaaaagtggaagtgtgccaatgactatctggaaatatgaagatgtaggttcgacgcaggatgcaaaaaaagaagtgaagcagattaatcctgaggatccatttgctacaccaaaaccagaaaagttaattgaacgtattctagaaattgccacaaagccaggagatattatcttggattcttttttgggatcaggtacaacta

SEQ ID NO: 28089 - DNA, 260 bp, Unknown
  Description of Unknown: RightRegion for integrase B2090 sequence
gagatttcgccttacagcgttattttcattatcccacttcccggaaaaatggtacgctgataaaatccatctgccgctttgcataatataattcgcttctacgttctttattctttcggacagaggtttacattccgtcgcctccacagacagcaaaaaaatcccccgccagctttcctttcggattgccagcgggggatttttagttatgcagttttaatgcactgattcgtcagtttgccgtacacgtcctcgtacaa

SEQ ID NO: 28090 - DNA, 260 bp, Unknown
  Description of Unknown: RightRegion for integrase B2091 sequence
ttcatgataatagaatgttcacggagcgcgcattctattatttgctcttggatgagataaaaattaaatatgggcgaaatatatagaagatagaggtgatttcatccattttataatagaaattcatttaacatacaagaaaatgggtgaaaaaggatgagatttcattataatagcccacgaaaatcaaaaagtcagggtgaaaacagcagaaatgaaggagtttcgcccaaaatgatagaggaagaagttgaaaatag

SEQ ID NO: 28091 - DNA, 260 bp, Unknown
  Description of Unknown: RightRegion for integrase B2092 sequence
gagatttcgccttatagcgttattttcattatcccacttcctggaaaactggtacgctgataaaatccatctgccgctttgcataatataattcgcttctacgttctttattctttcggacagaggtttacattccgtcacctccacagacagcaaaaaatcccccgccagctttcctttcggattgccagcgggggatttttagttatgcagttttaatgcactgattcgtcagcttgccgtacacgtcctcgtacaac

SEQ ID NO: 28092 - DNA, 260 bp, Unknown
  Description of Unknown: RightRegion for integrase B2093 sequence
gttttgctttgtcctcttccaacagtcgacagaaagccgacgctcgtcaaccggcattgagaaaggcccgaaaccttgcgttatgcacgcgggtttcgggccttttttcgtttcagttttccgtatttcgttctaatttgccgtattttgtacttttctgccaaaatcctgacaagccggtttcaaatcggtaaaattcttggcaaaggagatacaggctatgattaggattatgctgtccacccgccttggcgaacgac

SEQ ID NO: 28093 - DNA, 109 bp, Unknown
  Description of Unknown: RightRegion for integrase B2094 sequence
agatttgttcgtacagccccacttccgccgcataaaaagaccccccaagcttacgcttgaggggctttttattttgcttattttacaccttgccgccgtgcagctctgc

SEQ ID NO: 28094 - DNA, 260 bp, Unknown
  Description of Unknown: RightRegion for integrase B2095 sequence
gaaaatcttcaaatcaatctatttgggcaagatatactaaaaaaaaacagcgtaagctaatccattcagaggctgtatcccctacgcctttgtgcaaggatagcaaatgctataccaactgcagaaggcgccatccaatatgccatgcaaaatagtgaaattacacttaatgatagtaaatgccttatccttggctttggtagatgtggaaaaattcttgcccataaactaaaaggtattggggctagagtctatgtaga

SEQ ID NO: 28095 - DNA, 260 bp, Unknown
  Description of Unknown: RightRegion for integrase B2096 sequence
agatttgttcgtacagccccacttccgccgcataaaaagaccccccaagcttacgcttgaggggctttttattttgcttattttacaccttgccgccgtgcagctctgcatacatcttggaacgacactcggccacagccggggtcatgttcacatagtgcttatgcgggcattccagacgcagttcgctctcccaggtctcctcggtgagctgctttgcaatgtaggccttcttctctgcgatcgaaggcagctcaatg

SEQ ID NO: 28096 - DNA, 260 bp, Unknown
  Description of Unknown: RightRegion for integrase B2097 sequence
atttttgttgttgcggcgtttactgttttgcgcgaacgtaaaaataaggagagggtttaacccctctccttatttttattccgccacaatcccgtgataatatgccgcaagttttgcttccggccctggcccatctttgtcaaataaaaacgcctttgcgaggtctgcgtaaaaatccaccttactgcatccgtgttttgttgccacgctgcaatagtcggagtacatcatattcattgcggcattccattcctccggcg

SEQ ID NO: 28097 - DNA, 260 bp, Unknown
  Description of Unknown: RightRegion for integrase B2098 sequence
gttaaaatggtcggtaatgtgttcgttttgttttgttctattccctcactgactcattgacaacaaaaagaggggcaatcgcaacaggtggaaaagctgcgattgcccctcttttttttgttgtataaattgtgaaatttttgcgttagaatataccgtttccacgccaaattctaccatattccttacaaacccgtgaggatttgatagaatacgacgtaaaggagataggttctatgattagaattttactgtccacc

SEQ ID NO: 28098 - DNA, 260 bp, Unknown
  Description of Unknown: RightRegion for integrase B2099 sequence
gaaccctacattgtatggggaaagatattcgttcaaacaaaaagacaccctttaccataacggtagagggtgtcttccttattctccggtaaacccgtttgccctggcgcatttcagcgcacccaaaatcattttgtcctgcgccaatgtccgctgtttgatctcgtaaataggtgttccacggtgcccatcccattcctcaatctgtttcctgtcatggactaccgcaccctcatagagatttatcagcttgtccagcg

SEQ ID NO: 28099 - DNA, 260 bp, Unknown
  Description of Unknown: RightRegion for integrase B2100 sequence
tttatttgtccagtcaaggtctgctgtcgtatatggctgctccggctgaatttcatataaatctgcaccaattgcctgtgacaaattcttcgctaactttgcggtaactccgctggcgctaaaatatgcaactaattttttactcatacttcatctcctccaatacttaataccttaactcaaactggctgtcagaacatttacaatatcttcatgtgtaagtacacgataaccaccttccataaccagcgtactgtctg

SEQ ID NO: 28100 - DNA, 260 bp, Unknown
  Description of Unknown: RightRegion for integrase B2101 sequence
gaaccatgtattgtatggggatcgattctcgttcaaaccaaaagacatcctctgttttaatagacagagggtgtctttttttgctaaggtgagttaggtgagtaatcgggttaaaatccctataacttttctatatacgcgcgtactaaggagaagttataggaaaaatacctcgattactcacctttctcaccttgatgaacgaatactaaatataaaaaacgttatcctatcgaaaaaaataactccctcacaccgtc

SEQ ID NO: 28101 - DNA, 260 bp, Unknown
  Description of Unknown: RightRegion for integrase B2102 sequence
attaaaatggtcggtaatgtgttcgttttgttttgttctattccctcattgactcattgacaacaaaaagaggggcaatcgcaacaggtggaaaagctgcgattgcccctctttttttgttgtataaattgtgaaatttttgcgttagaatataccgtttccacgccaaattctaccatattccttacaaacccgtgaggatttgatagaatacgacgtaaaggagataggttctatgattagaattttactgtccaccc

SEQ ID NO: 28102 - DNA, 260 bp, Unknown
  Description of Unknown: RightRegion for integrase B2103 sequence
gaaccctacattgtatggggaaagatattcgttcaaacaaaaaggcaccctttaccatgacggtagagggtgtctttcttcattctccggtaaaaccgttttcccgggcgcatttcagcgcacccaaaatcatcttatcctgagccaaagtccgctgcttgatctcgtaaaggggtgtcccccggtgcctgtcccattccatgagctgcttccggtcatggactaccacaccctcatagagatttatcagcttgtccagc

SEQ ID NO: 28103 - DNA, 260 bp, Unknown
  Description of Unknown: RightRegion for integrase B2104 sequence
gaaccctgcattgtgtggggaacgatttgtgttcaaacaaaaattcaccccctaccgtaatggtagagggtggattttttactcttcgccggtaaacccgttctctctggcacagcgcaaggcaccgagtatcatggtatcttgggccaaggttctctgtttcaattcataaagcggagtcttccgatgatcgtcccactcaatgagttgcttcttatcatgaaccacaatgccggtgtagaggtttatcagcttgtcca

SEQ ID NO: 28104 - DNA, 260 bp, Unknown
  Description of Unknown: RightRegion for integrase B2105 sequence
caagtagtaagaattacatttcgtaacggcgtatcacataactttatctacgaaaattagcttttgcttagctcgtatttgaatttatagacagtaaaaaagaggtagtagcttttttagctactacctcttttgcatgatggaacgccataaaatcggaaaatatcacatacacacttttataacatatggtcagccataggtcagggtgaagtacttcttttccatcataatatatttcctttatataacaactcaca

SEQ ID NO: 28105 - DNA, 260 bp, Unknown
  Description of Unknown: RightRegion for integrase B2106 sequence
gaaccctgctttgtgtgggggacgattttcgttcaaacaaaaagacactccttgccgtaaatggcagggagtgtcctctttttgtccattttggggttcgactctccatcgaaaaagttcgactcttcaatggggtcagccctcttctccggtaaatccgttggccttggcacatcgaagtgccccaagtatcatagtgtcctgagccaaagttctcttcttcaactcatagagcggggttctccggtggtcatcccatt

SEQ ID NO: 28106 - DNA, 260 bp, Unknown
  Description of Unknown: RightRegion for integrase B2107 sequence
tttattcatccagtcaagatcagcctttgtatatggaactttcggctcaatctcaaataaatccgcctttacttcctctgcaatcatttctgctacttttttcgttgttccgcttgcactgaaaaatgccactaattttttactcataataaaaagcccctttctttacgtatttttcaaaaaaaatagatgtataagatttacattcatcttacacatctattttaagctctatcgcttcattatgtctaatgcttata

SEQ ID NO: 28107 - DNA, 260 bp, Unknown
  Description of Unknown: RightRegion for integrase B2108 sequence
tttggagcagatttcttaggcagcgaaccaattgaggaaaatgagcttaaaaaaaaataagctctttattgcctcttttatccaaatcgtcgcaatttagtacaattagcacctgcatctaatatagcttcataacaagattgacaagccccagcgaatataattagatcatcataacttctttcataatctcttaagacccctacagtcttaacaaaatatttagagtttctatagttatttatatctgtataattttc

SEQ ID NO: 28108 - DNA, 260 bp, Unknown
  Description of Unknown: RightRegion for integrase B2109 sequence
caagtggtaaggattacatttaataatggtgtatcccataactttatctacgaaaattagcttttgcttggctcgtatttgaatttatagacagttaaaaagaggtagtagcttttttagctactacctcttttgcatgatggaatgcgataaaatcagcaaaaatcgtatacacacttttataacatatggtcaaccatatgttattgaatagtacatctttttcatagatttatcgctcctgtaaaataatgcttttt

SEQ ID NO: 28109 - DNA, 260 bp, Unknown
  Description of Unknown: RightRegion for integrase B2110 sequence
gaaccctacattgtttggggtacggtatttgtgcaaacgaaaaaacacaccttaccataatcggtagggtgtgtctctttttattattcgccggtgaacccgttggccttggcacatttcaaagcacagagaaccaatttgtgccgtttcagttccttttcgtaaacggctctcggaacaccttcggaaatcggggaagcggttaaaactctctttcgatctctcactaccttcccctcatagtaagagataatatcgtc

SEQ ID NO: 28110 - DNA, 260 bp, Unknown
  Description of Unknown: RightRegion for integrase B2111 sequence
gttaaaatggtcggtaatgtgttcgttttgttttgttctattccctcactgactcattgacaacaaaaagaggggcaatcgcaacaggtggaaaagctgcgattgcccctctttttttgttgtataaattgtgaaatttttgcgttagaatataccgtttccacgccaaattctaccatattccttacaaacccgtgaggatttgatagaatacgacgtaaaggagataggttctatgattagaattttactgtccaccc

SEQ ID NO: 28111 - DNA, 260 bp, Unknown
  Description of Unknown: RightRegion for integrase B2112 sequence
tttattcatccagtcaagatcagcctttgtatatggaacttttggctcaatctcaaataaatccgcttttgcttcctctgcaatcatttctgctactttttttgttgtcccgcttgcactgaaaaatgcgactaaatttttactcataataaaaatcccctttctttgcgaatttttcgtataaaaatagatgtataagatttgaatttctcttatacatctattttatacctgatatttttattatgtctaatgcttat

SEQ ID NO: 28112 - DNA, 260 bp, Unknown
  Description of Unknown: RightRegion for integrase B2113 sequence
gaaccctgctttgtgtggggaacgattttcgttcaaacaaaaagacactccttgccgtaaatggcagggagtgttctctttttgcctattttggggttcgactctccatcgaaaaagttcgactcttcaatagggtcaaccctcttcgccggtaaatccgttggccttggcacatcgaagtgccccaagtatcatagtgtcctgagccaaagttctcttcttcaactcatagagtggggttctccggtggtcatcccatt

SEQ ID NO: 28113 - DNA, 109 bp, Unknown
  Description of Unknown: RightRegion for integrase B2114 sequence
aaagttataagcattcaatttacgaatggtctaatatcaacattcatatacgaggtctaaaccctcatttttactagcctttcaattcttcttttcttctactaacgca

SEQ ID NO: 28114 - DNA, 260 bp, Unknown
  Description of Unknown: RightRegion for integrase B2115 sequence
tttattcatccagtcaagatcagcctttgtatatggaacttttggctcaatctcaaataaatccgcttttacttcctctgcgatcatctgtgctactttttttgttgttccgcttgcactgaaaaatgcgactaaatttttactcataataaaaatcccctttctttgcgaatttttcgtataaaaatagatgtataagatttgaatttctcttatacatctattttatacctgatatttttattatgtctaatgcttat

SEQ ID NO: 28115 - DNA, 109 bp, Unknown
  Description of Unknown: RightRegion for integrase B2116 sequence
tgtcaccatttatacctattaccataccgccctcaacactgttcggaacacagcatgtaacgtgttttttatatggatgtttgcctataagacacaggcaagcatatgc

SEQ ID NO: 28116 - DNA, 260 bp, Unknown
  Description of Unknown: RightRegion for integrase B2117 sequence
gaaccctacattgtgtggggaaagatattcgttcaaacaaaaagacaccctttaccataacggtagagggtgtcttcctttattctccggtgaaaccgttcgctttggcacatttcagcgcacccaaaatcattttgtcctgcgccaatgtccgttgcttgatctcgtagataggtgtcccacggtattcatcccattccacaatctgttttctgtcatggactaccacaccctcatagagatttatcagcttgtccagc

SEQ ID NO: 28117 - DNA, 260 bp, Unknown
  Description of Unknown: RightRegion for integrase B2118 sequence
caagttatgagaattacattttgcaatggcgtatctcataactttatctacgaaaactagcttttgcttggcccgtatttgaatttatagacagttaaaaagaggtagcagcttttttagctgctacctctttgcatgatagaatgcgataaaatcagaaaacattacatacacacttttataacatatggtcagccgtaggtcagggtgaagtacttctttcccatcataatatatttcctttatataacaactcacac

SEQ ID NO: 28118 - DNA, 260 bp, Unknown
  Description of Unknown: RightRegion for integrase B2119 sequence
ttttctgcgcggctcgcgacatcagcccgcacatgtattgcatctgtcccttacctgtgataccatacaggtaagcaaaacgatacagacggaggactttttccatgatctacgataccctgaacaacctgcccaactatctgggcgtaagcgacaatctggacaccgtgatcgagtacatcatggcgcgggatatcaccaccctgcctgccgggcgcacccgcattgatggggacaaggcggtggtcaccgtgagcccc

SEQ ID NO: 28119 - DNA, 248 bp, Unknown
  Description of Unknown: RightRegion for integrase B2120 sequence
caagtggtaaggattacatttaataatggtgtatcccataattttatctacgaaaagtagcttttgcttagctcgcatttgagtttatagacagttaaaaagaggtagcagctgaaaaagctactacctcttttgcatgatggaatgcgataaaatcggaaaacatcacatacacacttttataacatatggtcagccgtaggtcagggtgaagtacttcttttccatcataatatatttcctttata

SEQ ID NO: 28120 - DNA, 260 bp, Unknown
  Description of Unknown: RightRegion for integrase B2121 sequence
attaaaatggtcggtaatgtgttcgttttgttttgttctattccctcactgactcattgacaacaaaagaggggcaatcgcaacaggtggaaaagctgcgattgcccctctttttttgttgtataaattgtgaaatttttgcgttagaatataccgtttccacgccaaattctaccatattccttacaaacccgtgaggatttgatagaatacgacgtaaaggagataggttctatgattagaattttactgtccacccg

SEQ ID NO: 28121 - DNA, 260 bp, Unknown
  Description of Unknown: RightRegion for integrase B2122 sequence
gaaccctacattgtttggggtacggtatttgtgcaaacgaaaagacacaccttaccataatcggtagggtgtgtctctttttattcttcgccggtgaacccgttggccttggcacatttcaaagcaccgagaaccaatttgtgccgtttcagttccttttcgtaaacggctctcggaacaccttcggaaatcggggaagcggttaaaactctctttcgatctctgactaccttcccctcatagtaagagattacatcgtc

SEQ ID NO: 28122 - DNA, 260 bp, Unknown; identical to SEQ ID NO: 27974
  Description of Unknown: RightRegion for integrase B2123 sequence

SEQ ID NO: 28123 - DNA, 260 bp, Unknown; identical to SEQ ID NO: 28110
  Description of Unknown: RightRegion for integrase B2124 sequence

SEQ ID NO: 28124 - DNA, 260 bp, Unknown
  Description of Unknown: RightRegion for integrase B2125 sequence
cccctctcccatcaacctcttccctccggcacgtcgtccagtatctcgtcgtttcgataacaaccgctttttacacgttcttccacgtccactttaattaaaaatcgcattcaaacaaaatccctctttcagcgagtcaacgccgaaagagggagctatgtatcattatatttttttgccggtacgttttttgtcaatcaatttataaattgattccaatgaattttgaacttctttccaaaagtttttttgttctcctc

SEQ ID NO: 28125 - DNA, 260 bp, Unknown
  Description of Unknown: RightRegion for integrase B2126 sequence
gaacttttcatggtttgcaacgacttttttaatatttgttctttcttgaggagaaattgacatgagcacctttgctaaaatcaaattgggtttggaagaagctattgcatacgaaaagggcgagctttccacggacatcggacatcatgatcagatagttttaaaggacagaccgacaaatcatcagcctgtccttttcgttaaaaaatcaaaatatggtgccgacagaaagagcctgtgagcgaacataggcgacactt

SEQ ID NO: 28126 - DNA, 260 bp, Unknown
  Description of Unknown: RightRegion for integrase B2127 sequence
tttatccatccagtcaagatcagcctttgtatatggaatcttcggctcaatctcaaataagtctgcttttgcttcctctgcaatcatatctgctactttttttgttgttccacttgcactgaaaaatgcaactaattttttacacataatacaaaacctctttccttgcgtatttttcacagaaaaaatagatgtataagattcacattcatcttacacatctattttaagctccatcgcctcattatgtctaatgctta

SEQ ID NO: 28127 - DNA, 109 bp, Unknown; identical to SEQ ID NO: 28113
  Description of Unknown: RightRegion for integrase B2128 sequence

SEQ ID NO: 28128 - DNA, 260 bp, Unknown
  Description of Unknown: RightRegion for integrase B2129 sequence
gttaaaatggtcggtaatgtgttcgttttgttttgttctattccctcactgactcattgacaacaaaaagaggggcaatcgcaacaggtggaaaagctgcgattgcccctctttttttgttgtataaattgtaaaatttttgcgttagaatataccgtttccacgccaaattctaccatattccttacaaacccgtgaggatttgatagaatacgacgtaaaggagataggttctatgattagaattttactgtccaccc

SEQ ID NO: 28129 - DNA, 260 bp, Unknown
  Description of Unknown: RightRegion for integrase B2130 sequence
gaaccctgttttgtgtgggggacgattttcgttcaaacaaaaagacactccttgccgtaaatggcagggagtgtcctctttttatctcttttggggttcgactctccatcgaaaaagttcgactctccgatggggtcagcccttttcaccggtaaatccgttagccttggcacatcgaagtgccccgagtatcatagtgtcctgagccaaggttctctgtttcaactcataaagcggggttccccgatgtgcgtcccatt

SEQ ID NO: 28130 - DNA, 260 bp, Unknown
  Description of Unknown: RightRegion for integrase B2131 sequence
gaaccctgctttgtgtgggggacgattttcgttcaaacaaaaagacactccttgccgtaaatggcagggagtgttctctttttgcctattttggggttcgactctccatcgaaaaagttcgactcttcaatagggtcaaccctcttcgccggtaaatccgttggccttggcacatcgaagtgccccaagtatcatagtgtcctgagccaaagttctcttcttcaactcatagagcggggttctccggtggtcatcccatt

SEQ ID NO: 28131 - DNA, 260 bp, Unknown; identical to SEQ ID NO: 28110
  Description of Unknown: RightRegion for integrase B2132 sequence

SEQ ID NO: 28132 - DNA, 260 bp, Unknown
  Description of Unknown: RightRegion for integrase B2133 sequence
gaaccctgctttgtgtggggaacgattttcgttcaaacaaaaagacactccttgccgtaaatggcagggagtgtcctcttttttgcctattttggggttcgactctccatcgaaaaagttcgactcttcaatagggtcaaccctcttcgccggtaaatccgttgaccttggcacatcgaagtgccccgagtatcatggtgtcctgagccaaggttctcttcttcaactcataaagtggggttctccggtggtcatcccac

SEQ ID NO: 28133 - DNA, 260 bp, Unknown
  Description of Unknown: RightRegion for integrase B2134 sequence
gaaccatgtattgtatggggatcgattctcgttcaaaccaaaagacatcctctgttttaatagacagagggtgtcttttttgtcaaggtgagttaggtgagtaatcgggctaaaatccctataacttttctatatacgcgcgtactaaggagaagttataggaaaaatacctcgattactcacctttctcaccttgatgaacgaatactaaataaaaaacgtcatcctatcgaaaaaaaaataactctctcaccgtcaca

SEQ ID NO: 28134 - DNA, 260 bp, Unknown
  Description of Unknown: RightRegion for integrase B2135 sequence
aataatataaatataatagtatggacgaattgtataattatattgtcagcaaaagtataaaagcaaaaacctcccactccgagaaaatcagagtgggaggtttgctttttatttgtcacttccgttatcacctttatcacggagagcctgcaaagcctttttgagaaacgtagggtaaggcatacccataagaccgacattttcaaagagcgacaacccttcattgcctatgaagaacagtatcacagccgtgcgaacat

SEQ ID NO: 28135 - DNA, 260 bp, Unknown
  Description of Unknown: RightRegion for integrase B2136 sequence
cctaccggcggcaactggacatctccggagatatctctcgatatcaagttgcgggtttagttttgtgccgaccataactatcaatgatgttccaatgagctggcgcatttggagatgatcggcgccatcgtccaccagctcacccgcaacctctccatcgaggagatcaaaaagtccggctttgacgtctactttgtggatcacaccaccggcatctggccgcaggccgcaggcggaatgcccttctccgccgccacctt

SEQ ID NO: 28136 - DNA, 260 bp, Unknown
  Description of Unknown: RightRegion for integrase B2137 sequence
agcacgggcggcaactggacaagcccggagatcgtgcttgatgttaaactgaaggcgtgattcttcgcgccgtccatttccatcagttgtgcgcacattcaaccgcgcatgactgatggatataatcaaaacaaggagctgaaaccattgaaaacgcttggattgcttgaaaagctgttagtcgctggaatgataaccgaagaggaatacaaggagaggaaaacggtgtatgtagaatcgctcttggaactctattgtct

SEQ ID NO: 28137 - DNA, 260 bp, Unknown
  Description of Unknown: RightRegion for integrase B2138 sequence
aacaccggggggaactggacttcgccggagatcgtgcttgatgttaaattaagggtgtgatttttgtacctaccatttccatcatcaatgcgcggattcaaccgcgcatgactgatggatatagttaaaccaaaccgggaaaagccttatatatcaacggaaaggaagaacggaatgaatacattaggattgcttgaaacgctgttggttgccaatatgataactgcggaggaatacaaggaaagaaaagcggtgtatgt

SEQ ID NO: 28138 - DNA, 260 bp, Unknown
  Description of Unknown: RightRegion for integrase B2139 sequence
agcacgggcggcaactggacaagcccggagatcgtgcttgatgttaaactgaaggcgtgaatttttgcgccgtccatttccatcagttgtgcgcacattcttccgtgccgatgtcggtaaggatccccttgacttcatcgctcggcatggcaaagcgctggctcagatagcggagcgacgcccccagttcgccgttcgggccgccgtactgggagatgataaccttggcaagcgccgggttcggattggcaattcggaca

SEQ ID NO: 28139 - DNA, 260 bp, Unknown
  Description of Unknown: RightRegion for integrase B2140 sequence
agcacgggcggcaactggacaagcccggagatcgtgcttgatgttaaactgaaggcgtgattcttcgcgccgtccatttccatcagttgtgcgcacattcaaccgcgcatgactgatggatataatcaaaacaaggagctgaaaccattgaaaacgcttggattgcttgaaaagctgttagtcgctggaatgataaccgaagaggaatacaaggaaagaaaagcggtgtatgttgaatcgctgcttgaactgtactgttt

SEQ ID NO: 28140 - DNA, 260 bp, Unknown
  Description of Unknown: RightRegion for integrase B2141 sequence
agcacgggcggcaactggacaagcccggagatcgtgcttgatgttaaactgaaggcgtgatttttcgcgccgtccatttccatcagttgtgcgtacattcaaccgcgcatgactgatggatataatcaaaacaaggagctgaaaccattgaaaacgcttggattgcttgaaaagctgttagtcgctggaatgataaccgaagaggaatacaaggagaggaaaacggtgtatgtagaatcgctcttggaactatattgtct

SEQ ID NO: 28141 - DNA, 260 bp, Unknown; identical to SEQ ID NO: 28136
  Description of Unknown: RightRegion for integrase B2142 sequence

SEQ ID NO: 28142 - DNA, 109 bp, Unknown
  Description of Unknown: RightRegion for integrase B2143 sequence
aatacaggtggaaactggacttcgccggagatcgtgcttgatgttaaattaagggtgtgatttttgtatctaccatttccatcatcaatgcgcggattcctcggtgccc

SEQ ID NO: 28143 - DNA, 260 bp, Unknown
  Description of Unknown: RightRegion for integrase B2144 sequence
aacaccgggggaaactggacttcgcctgagatcgttcttgatgttaaactaagggtgtgattttttgcaccaaccatttccatcagttgtgcgcctatacagcagagcatgactgatggatatagctaaaccaaaccggaaaaagccttatatatcaacggaaaggaagatcgaaatgaatacattaggattgcttgaaacgctgttggttgccaatatgataactgcggaggaatacaaagaaagaaaagcggtgtatg

SEQ ID NO: 28144 - DNA, 150 bp, Unknown
  Description of Unknown: RightRegion for integrase B2145 sequence
aaaacaggtggtaattggactactccaaacatcgaattagatgtgaaattgaaggtgtaaatttttttgcgcctatcaattccatcattagtgtgcaggttctactgcacaccaatgatggatatcaaaaaacaaccgaaaggaagattg

SEQ ID NO: 28145 - DNA, 160 bp, Unknown
  Description of Unknown: RightRegion for integrase B2146 sequence
aaaagtcctcgaaatcgtctgatttcgaggacttttgtttttcataagttccgtatttagggtgttgccttttcctgacccaaacgctgaccccaacgggagcgggtagcggaaaggtctataccgcacgggagaggatgctccccatcgtttgcgccgc

SEQ ID NO: 28146 - DNA, 260 bp, Unknown
  Description of Unknown: RightRegion for integrase B2147 sequence
aacgttggtggtaactggacagcgcccaagatcattcttgatgtcaaactgaaggtgtaattttcacgcccattatatccatcagctatgcgccatttcttccgtgccgatatccgtcaaagtggcgatgacccgctgatccgtcatggaataccgctgggtcaggtatcgaaggcccgctcccagctcgctgtccggcccgccgtactgagccatgagcagtttagccattttcaggtctgcccgtgtgatatgtaccg

SEQ ID NO: 28147 - DNA, 260 bp, Unknown
  Description of Unknown: RightRegion for integrase B2148 sequence
agcacgggcggcaactggacaagcccggagatcgtgcttgatgttaaactgaaggcgtgattcttcgcgccgtccatttccatcagttgtgcgcacattcaaccgcgcatgactgatggatatagttaaaccaaaccgggaaaagccttatatatcaacggaaaggaagaacggaatgaatacattaggattgcttgaaacgctgttggttgccaatatgataactgcggaggaatacaaggaaagaaaagcggtgtatg

SEQ ID NO: 28148 - DNA, 260 bp, Unknown
  Description of Unknown: RightRegion for integrase B2149 sequence
aatgggacggaagtgaaagaattgcccttggaaaatgaaacaatggtcgagacggtctgattgatgtctagaaaagaaaaataaatagcgaaaagtagcgtatttacgggcttttttgagattaggcaatagctcatgaaagtccgtatttcttatattgaaacatatctactgtaaaaacggtcagagggtttaggctgtgaattagatgtcgtgggttgtggcactaggatagatgttatctagggtgcaaactcaat

SEQ ID NO: 28149 - DNA, 260 bp, Unknown
  Description of Unknown: RightRegion for integrase B2150 sequence
attcggacaggggttcgattcccctcaggtccaccattcgggccgtactcgaacacgtgagtgcgggcccttttctcggatattgtaaaatatcagcgcctcatcgttgcggagctcgactcgggcgatgaacgtgtcaaccaaccgagcgcggaagtcgtcatccgtgacgtctccgacgcggaaggagcgcagccaggcctcgaccacctcatgggtgagtcggggcctttttatttctgcccgctggatctccagca

SEQ ID NO: 28150 - DNA, 260 bp, Unknown
  Description of Unknown: RightRegion for integrase B2151 sequence
accacgctatctcctaacacttgcaacacacgcttgcaattgcggctttttccccagtgatcgctgtacctgctctgaacaagaggttcgacgatatcaacatagaatctcagggcccttgcttgatcgtattgatatttatttgtgggtagaacctgtttcttacgatgatttatccctaaaatcgcaaggtgaaccatcagaaatgatccgtaaacgagtcatcgcggtaagaaatctgacgcaagagagattggcac

SEQ ID NO: 28151 - DNA, 260 bp, Unknown
  Description of Unknown: RightRegion for integrase B2152 sequence
agtgagggcttagctcacccaggagagcgccgtgcatggactgcaagagggtcaccgtgatcagaatcggcccggtattctccaccaaaaagcactgtacttcgtaggaagtatggtgcttttctttttatacagacgcagaaaaaggcgggagcttcccacaaaagggaaagccaccgcctttgttgatcatcggatgagccagccgtaatcctgtctgcaatctaccacatgatctgcataaaccgtatgatctacga

SEQ ID NO: 28152 - DNA, 260 bp, Unknown
  Description of Unknown: RightRegion for integrase B2153 sequence
agcacgggcggcaactggacaagcccggagatcgtgcttgatgttaaactgaaggcgtgattcttcgcgctgtccatttccatcagttgtgcgcacattcaaccgcgcatgactgatggatataatcaaaacaaggagctgaaaccattgaaaacgcttggattgcttgaaaagctgttagtcgctgaaatgataaccgaagaggaatacaaagagaggaaaacggtgtatgtagaatcgctcttggaactctattgtct

SEQ ID NO: 28153 - DNA, 260 bp, Unknown
  Description of Unknown: RightRegion for integrase B2154 sequence
agcacaggcggcaactggacaagcccggagatcgtgcttgatgttaaactgaaggcgtgattcttcgcgccgtccatttccatcagttgtgcgcacattcttccgtgccgatgtcggtaaggatccccttgacttcatcgctcggcatggcaaagcgctgactcagatagcggagcgacgcccccagttcgccgttcggtccgccgtactgggagatgatgaccttggcaagcgccgggttcggattggcaattcggaca

SEQ ID NO: 28154 - DNA, 260 bp, Unknown
  Description of Unknown: RightRegion for integrase B2155 sequence
aacaccggggggaactggacttcgccggagatcgtgcttgatgttaaactaagggtgtgattttttgcacccaccatttccatcagttgtgtgcggattcaaccgcgcatgactgatggatatagttaaaccaagccggaaaaagccttatatatcaacggaaaggaagaacggaatgaatacattaggattgcttgaaacgctgttggttgccaatatgataactgcggaggaatacaaggaaagaaaagcggtgtatg

SEQ ID NO: 28155 - DNA, 260 bp, Unknown; identical to SEQ ID NO: 28136
  Description of Unknown: RightRegion for integrase B2156 sequence

SEQ ID NO: 28156 - DNA, 260 bp, Unknown; identical to SEQ ID NO: 28135
  Description of Unknown: RightRegion for integrase B2157 sequence

SEQ ID NO: 28157 - DNA, 260 bp, Unknown
  Description of Unknown: RightRegion for integrase B2158 sequence
ccacaggctatccactgtggcggctttttattatctgttggagggtgggatgtaccgtgagctggtgggtgtatgtgctggagtgccgggatggcaccctgtataccggctgtaccgatgacatcccccggcggctggaggcgcacaatgccggccgcggtgccaaatatacccgtggccgtgggccggtgacgctgcgctaccgggaggagaccctggataaaccggctgccctgcggcgggaggcggccatcaagcgg

SEQ ID NO: 28158 - DNA, 260 bp, Unknown
  Description of Unknown: RightRegion for integrase B2159 sequence
agcacgggcggcaactggacaagcccggagatcgtgcttgatgttaaactgaaggcgtgattcttcgcgccgtccatttccatcagttgtgcgcacattcaaccgcgcatgactgatggatataatcaaaacaaggagctgaaaccattgaaaacgcttggattgcttgaaaagctgttagtcgctggaatgataaccgaagaggaatacaaggagaggaaaacggtatatgtagaatcgctcttggaactctattgtct

SEQ ID NO: 28159 - DNA, 260 bp, Unknown
  Description of Unknown: RightRegion for integrase B2160 sequence
aacaccgggggaaactggacttcgcctgagatcgtgcttgatgttaaattaagggtgtgatttttgtacctaccatttccatcatcaatgcgcatattcaaccgcgcattgatgatggatatagttaaaccaaaccggaaaaagccttatatatcaacggaaaggaagaacggaatgaatacattaggattgcttgaaacgctgttggttgccaatatgataactgcggaggaatacaaggaaagaaaagcggtgtatgt

SEQ ID NO: 28160 - DNA, 260 bp, Unknown
  Description of Unknown: RightRegion for integrase B2161 sequence
agtgagggtttagctcacccaggagagtgccgtgcatggactgcaagagggtcaccgtgatcagaatcggcccggtaatctccaccagaatgaaagcactacacggaaacgtgtggtgcttttttgttttatctgccgttcaccttacgtcccctttcatgaaaaaagcgtttgtcgcagcccgcaggccgtgacaaacgctttttattttactgtgcgcccaagcgcattttgaagtcctgatagccgaagtgcaccag

SEQ ID NO: 28161 - DNA, 260 bp, Unknown
  Description of Unknown: RightRegion for integrase B2162 sequence
gcattcgggttcgtatttctttgtccgttgccatgcagcaaaaaagaggcagacgtttgatgcgtctgcctctttttataacgaagttcgttataatctaccatcttcctgcaaaatgagaaaatacttgttatattttctcgtaaaggagcatggctatgattaggattttactgtccacgcgcctcggcgaaaggcgctggacgcaggctgatctcgctcgcgcaactggcatacgtccgtctaccatcaacgactac

SEQ ID NO: 28162 - DNA, 260 bp, Unknown
  Description of Unknown: RightRegion for integrase B2163 sequence
ttttcaatgactgcggttcttgccggaaactggcgcgaatacgtcgtttcgcttgtatagaaaaaaaaaaggcggagttcgcctccgcctttttgccgttctggtgcttaaatgcccgaaaaactcgttaaaactttaatgtcgacttgcaatacgcccgctatgcgttccagcatatcgtctttcggcgtgcgctcgccgtattcgtatttttgccagctctgcaccttgattcccgccttttcggcggcttgctcttg

SEQ ID NO: 28163 - DNA, 260 bp, Unknown
  Description of Unknown: RightRegion for integrase B2164 sequence
aaaacaggtggtaattggactactccaaacatcgaattagatgtgaaattgaaggtgtaaatttttttgcgcctatcaattccatcattagtgtgcaggttctactgcacaccaatgatggatatcaaaaaacaaccgaaaggaagattgcaatgaacacacttggtaaattggaacagctgctgcttgccggcgaaattacggaagacgaatacaaggaaagaaaagaagtgtatgttgaaacgatcctggaaatatac

SEQ ID NO: 28164 - DNA, 260 bp, Unknown
  Description of Unknown: RightRegion for integrase B2165 sequence
gaaccctacattgtgtggggtacggtcttcgtccaaaccaaaagacactccttgtcttaatcgacagggagtgtcttttttgcatttaggtgataaaggtgagtaatcgggcgtttttcctataaactctttctaatacgcgcatactaagaagaagttatagggattttcacccgattactcacctaactcaccttaatccgagtcaactgtacctgatgtacccctcaaacccggcacctttcaaacgctggagcatc

SEQ ID NO: 28165 - DNA, 260 bp, Unknown
  Description of Unknown: RightRegion for integrase B2166 sequence
cctaccggcggcaactggacatctccggagatatctctcgatatcaagttgcgggtttagttttgtgccgaccataactatcaatgttgttccaatgagctggcgcatttggagatgatcggcgccatcgtccaccagctcacccgcaacctctccatcgaggagatcaaaaagtccggctttgacgtctactttgtggatcacaccaccggcatctggccgcaggccgcaggcggaatgcccttctccgccgccacctt

SEQ ID NO: 28166 - DNA, 260 bp, Unknown
  Description of Unknown: RightRegion for integrase B2167 sequence
agcacgggcggcaactggacaagcccggagatcgtgcttgatgttaaactgaaggcgtgattcttcgcgccgtccatttccatcagttgtgcgcacattcaaccgcgcatgactgatggatataatcaaaacaaggagctgaaaccattgaaaacgcttggattgcttgaaaagctgttagtcgctgaaatgataaccgaagaggaatacaaggaaaggaaaacggtgtatgtagaatcgctcttggaactctattgtct

SEQ ID NO: 28167 - DNA, 260 bp, Unknown
  Description of Unknown: RightRegion for integrase B2168 sequence
ccggaagaggcaaaaaggcccggaacagatacagttttggcaatagaaacaaaaaagtaaggcaagctttatgcttgccttactgctggtggagcataacactcaatatccgaactcgtgagagtagcggtattattgcccgaaagattgaatgttagcacaatccgcttcccaccatcttcatcgtcatacacatatacagagtttaccaatgtatcaatcacgcgccgtgggtaattctcatcatcaacattcccgct

SEQ ID NO: 28168 - DNA, 260 bp, Unknown
  Description of Unknown: RightRegion for integrase B2169 sequence
agcacgggcggcaactggacaagcccggagatcgtgcttgatgttaaactgaaggcgtgattcttcgcgccgtccatttccatcagttgtgcgcccattcaaccgcgcatgactgatggatatggttaaaccaaaccgagaaaagccttatatatcaacggaaaggaagaacggaatgaatacattaggattgcttgaaacgctgttggttgccaatatgataactgcggaggaatacaaggaaagaaaagcggtgtatg

SEQ ID NO: 28169 - DNA, 260 bp, Unknown
  Description of Unknown: RightRegion for integrase B2170 sequence
cacgaacacctactttttcaaaggcggctttgccgtaagggtgtggctgtgatgtcataaaacacaaaacgaggtttaaggcacgatgtgccctgaacctcgttttttatatgctcgtgccttatttggattcggtgtccaatcataataggcagatcaccgcaagcaatgcgagtgttcatatacactcacatcctctgcttgttgggtgctatacccccgctggacacagaatttattctgtggctgcgcgttctgca

SEQ ID NO: 28170 - DNA, 91 bp, Unknown
  Description of Unknown: RightRegion for integrase B2171 sequence
agcaaatcaccgacccgaccgccggtgattttctatacggcccgttggtcaagtggttaagacagaggcctctcacgcctttaacatcggt

SEQ ID NO: 28171 - DNA, 260 bp, Unknown
  Description of Unknown: RightRegion for integrase B2172 sequence
aatacaggtggaaactggacttcgccggagatcgtgctcgatgttatattaaaggcctgatttttcgtatctatcatttccatcatcaatgcgcggattcaaccgcgcatgtctgatggatatagttaagtcaaaccgggaaaagccttatatatcaacggaaaggaagaacggaatgaatacattaggattgcttgaaacgctgttggttgccaatatgataactgcggaggaatacaaagaaagaaaagcggtgtatg

SEQ ID NO: 28172 - DNA, 260 bp, Unknown
  Description of Unknown: RightRegion for integrase B2173 sequence
tacgaacccacgcggttcgtatggctctcgttcgtatcaggccttttttgcgctacctaaataaatgattttagatgccaaggactgcctgcttatgaggttcgccattttgtttttcctcttgacgtgcttaactgaccattgtgtgccttattcggtattatgatactgcggaggttctaatatgagcatatttgcatctaaaaaaagcagaagccccattcagagagcgaaacttttaggaatgaggactgcacagg

SEQ ID NO: 28173 - DNA, 109 bp, Unknown
  Description of Unknown: RightRegion for integrase B2174 sequence
aacgttggtggtaactggacagcgccggagatcatacttgatgttaaactgaaggtgtaattttcacgcccattatatccatcagttgtgcgcagattcttccgtgccg

SEQ ID NO: 28174 - DNA, 260 bp, Unknown
  Description of Unknown: RightRegion for integrase B2175 sequence
gtgcaggaagtcagaatcgtttataactttgtcggagaaatcccggagattacagcataatcatttcgcctcatctctcaatcagcgagggatgaggcttttctttttgtaaaattgcgatagatatattcacaatttttttaccattaaattcttagtcagacagtagaaaaatgatgacgactccccctacagatgctataatgttcgcatatagatatggcaatttgacaattactttttcttattggtatctgtct

SEQ ID NO: 28175 - DNA, 260 bp, Unknown
  Description of Unknown: RightRegion for integrase B2176 sequence
aaaagtcctcgaaatcgtctgatttcgaggacttttgcttttcataagttccgtttttagtgtggagtagtaccctgtaagtgcagtcgcaaaatccccaaaaatctgttaaactgaaagaacagagatggagggaatcgcaacgaaacattacagcaaagaattcaaggaagaagcgctgaagctgtcagacgagatcggcgtgaagaaggctgcacagcagctcggtgttgcgtactacacgctggcggattggcgca

SEQ ID NO: 28176 - DNA, 260 bp, Unknown
  Description of Unknown: RightRegion for integrase B2177 sequence
agtgagggcttagctcacccaggagagcgccgtgcatggactgcaagagggtcaccgtgatcagaatcggcccggtattctccaccagatcagaaaggcatcacacattgtgtggtgccttttttgttttgcattgcagcaggaaaacacaaaaaaatttctgcccactgccgcaacctgcgcgaaacgggctgttttgtgcgcgaatggcagaccacggaaggcggaacttgtgctataatataaaaaaacagggaagc

SEQ ID NO: 28177 - DNA, 260 bp, Unknown
  Description of Unknown: RightRegion for integrase B2178 sequence
gtgcaggaagtcaggatcgtgtataactttgtcggggaaatcccggagattgcagcgtaaatagtttgccccatctctcattttggagggatggggcttttgttgtggataaagtgatttgcctaaacgatagtattatcccatataatccgttcgcagtgcttctaccagatcacatttcagaattttcttgccacccaggtaatatgccagtgcgacaaagccaaaaagtgccgcgataaaaagcaggataggaacaa

SEQ ID NO: 28178 - DNA, 260 bp, Unknown
  Description of Unknown: RightRegion for integrase B2179 sequence
gatggttctatatattctataacctttaaaaacggtttagtacattattttatttactaaatataaataagaccgcctaaatctattgatattagcggtcttttatttcatgtgtaggttgttcatttgacatccaaatgtaacacaatgcacgcgtggttttcttcctctttctctttcgaaatgataagtatattctctcattttatctatatatctttcctgttctcttattttttccataggaacagttacttgtt

SEQ ID NO: 28179 - DNA, 260 bp, Unknown
  Description of Unknown: RightRegion for integrase B2180 sequence
cgcaacggtgtagaaatcgaacagaccgtagaccaacctaagaggaggaaattcatatgatttatgtaactggcgattgccacggaaacttccggcgtttccaatcggattgtttcccggagcaagctaacatgacgaaggatgacacggtcatcatcaccggagactgcggcggcgtgtggtttggcgacagccgcgacgatgaaacgctggactggctggaacgcctgcccttcacgctcgccttcgtctgcggcaac

SEQ ID NO: 28180 - DNA, 260 bp, Unknown
  Description of Unknown: RightRegion for integrase B2181 sequence
tgcacgggcggcaactggacaagcccggagatcgtgcttgatgttaaactgaaggcgtgattcttcgcgctgtccatttccatcagttgtgcgcacattcaaccgcgcatgactgatggatataatcaaaacaaggagctgaaaccattgaaaacgcttggattgcttgaaaagctgttagtcgctggaatgataaccgaagaggaatacaaggagaggaaaacggtgtatgtagaatcgctcttggaactctattgtct

SEQ ID NO: 28181 - DNA, 99 bp, Unknown
  Description of Unknown: RightRegion for integrase B2182 sequence
agcacgggcggcaactggacaagcccggagatcgtgcttgatgttaaactgaaggcgtgatttttcgcgccgtccatttccatcagttgtgcgcacatt

SEQ ID NO: 28182 - DNA, 260 bp, Unknown
  Description of Unknown: RightRegion for integrase B2183 sequence
aacactggcggcaactggacaagccctgaaatcacgcttgatgttaaactaagggtttaattatttgtaccttccatatccatcagttgtgcgcatattcaacagcgcgtcactgatggatataaacgctaaaaagacaatggcagaggaaaaagctagtgttttcagtgctttgcgtcgttatacaaaaacattccccattgcaaggaaactgcaatagggatgcaatcaactctaacgtccgctcaccaatatcccca

SEQ ID NO: 28183 - DNA, 260 bp, Unknown
  Description of Unknown: RightRegion for integrase B2184 sequence
gtagaaaaagatcagtatgtatctagggagaaatggagcaggaaaaactacagcaattaagatgatgctggggcttgtaaagccagaaggtggggaagtaaaagtattagggacagatgcaaggcatctgtcagcacagaagaaacaggagataggagtagtactttctgaatcaggctttagttcatatcttaatatttctgatattgaacatatacttatgaagatgtatccggagtttgacagggattattttaaac

SEQ ID NO: 28184 - DNA, 260 bp, Unknown
  Description of Unknown: RightRegion for integrase B2185 sequence
ttctttttgcaaaaatgcttgcggcacaaggcttttcggcaaagcgacactttggaatagtttcattgtgggctttatgcaggtgttttgctcctctccaactatccattctgtgccaaagacaaagccctctccgacacaaaagtgccgaaaaaggcttgaaatcaagggcttccgaggtcaactgctgactttggaagccctttttatgtttattcgattgtgggattccagcgttcagacgctcggcagcgatgtgg

SEQ ID NO: 28185 - DNA, 260 bp, Unknown
  Description of Unknown: RightRegion for integrase B2186 sequence
aaggttcaggaagtcaaaatcatctataactttgtcggggaaataccggcggcgcaataatgacagcagcccttcttccattccgggagaagggtctttttttcgggcatggaaaaagccggggcttttattctccggcttccgggataaattccagatgttccaacgcatagcgcagagccatgcacataagttcattgcgggagcggtcgcttttagctgacagtttatcaaattcctcctgcaattccctgtctatc

SEQ ID NO: 28186 - DNA, 260 bp, Unknown
  Description of Unknown: RightRegion for integrase B2187 sequence
aaagcacgcttcggcgtgctttttcgcttatttcaaaagaccaaaggccttttgaaataaagggtctgatactattttctgattaaaatatttattttaatcagaaaggcatcgcctgatggcgctgccggttttgtgatttataaggaaagaaatcacaaaacaagtctcatatgaacttcatgcccttcgggcaattaaaatcttttttaaagattttaattgaagttcagtatgacacgttgacatccggctgtcgt

SEQ ID NO: 28187 - DNA, 260 bp, Unknown
  Description of Unknown: RightRegion for integrase B2188 sequence
gacttttcgaccaacggcggcaggggactacccctgccaaaagccgcttatctcgtttgaggtaagcggcttttcgttttttgctgcgtcgtaggggccgggcatgcccggcccgcgggttggcgggagcgacccgagcacacgactgacatctggaatgctaaacaggcgtttacttacgatgcgccgaaaaaagaggatgtggactgatccacatcctctaaaacaaaaacaaatccgaaacaatgcttcacaaagaa

SEQ ID NO: 28188 - DNA, 260 bp, Unknown
  Description of Unknown: RightRegion for integrase B2189 sequence
gtagagaaaactcagtatgtatctagggagaaatggtgctggaaaaagcacaacatttaaggcgatattaggtttgatttcaactgacggcggaaatattaccatacttggaaaggacagaaaagacttcacagcaaaagataaagaggaattgggtgtagtattgtcggattctggttttagtgggtatctgaagataaaagatattatccctatattgcagaatatgtactcaaaattcgacaaatcactatttatag

SEQ ID NO: 28189 - DNA, 260 bp, Unknown
  Description of Unknown: RightRegion for integrase B2190 sequence
gcatttgggttcgtatttctttgtccattaccaagcagcaaaaaagaggcagacgtgtaaagcgtctgcctcttttactataacgaagttcgttataatctaccatcttcctgcaaaatgagaaaatacttgttatattttctcgtaaaggagcatggctatgattaggattttactgtccacgcgcctcggcgaaaggcgctggacgcaggctgatctcgctcgcgcaactggcatacgtccgtctaccatcaacgact

SEQ ID NO: 28190 - DNA, 260 bp, Unknown
  Description of Unknown: RightRegion for integrase B2191 sequence
gtagagaaaactcagtatgtatctagggagaaacggcgctggaaaaacaacgctgtttaactgcctgaacagggatttgaaggcggatagcggcaatttctatatagaagatgaaaacggcgtccgccgtgaggtgtccgcagaggacatcggatatgtactctctaccccgaccgtgccggagtttcttacaggcagggagtttttgaaattctttatggacatcaacgagaagtctatcaataatccgaaaagcattg

SEQ ID NO: 28191 - DNA, 260 bp, Unknown
  Description of Unknown: RightRegion for integrase B2192 sequence
gtagagaaagctcagtatgtatctagggagaaatggttcaggaaagactacattttataatgtacttacaggaatttcccctgcaaccagaggccagatcattttcaagggcaaaagcatagaaaaaatgcagccggaagctattacccgccttggcatggcccgtactttccagaatatccgtctttttggaaatatgacagtagcggaaaatatcattattgcccgccactgcagaagaaagactggtatctgggact

SEQ ID NO: 28192 - DNA, 260 bp, Unknown
  Description of Unknown: RightRegion for integrase B2193 sequence
gtagagaaaactcagtatgtatctagggagaaacggcgcaggaaaaagtacggcaattaaactgatacttggactggtaaagccggatgctggaaagatttgtgtgtttggtaacgaaggtggagagcttccggctgcggtaaagcagaaaatcggagtatctttgacggaggcaggctttagttcacaatttacggtggaagatgtctggcatatccttgctaaaatgtatcctgatttccagaaggatttttttgacc

SEQ ID NO: 28193 - DNA, 260 bp, Unknown
  Description of Unknown: RightRegion for integrase B2194 sequence
gtagagaaaactcagtatgtatctagggagaaatggggctgggaaaagcacaacatttaaggcaatactgggtttgatttcaaccgatggcgggaatattacaatacttgggaaagatatgaaagacttcaccgcaaaagataaagaaaatttgggtgttgtattgtctgactctggttttagcggttatctgaaaatcaaagatattatccctatattgcagaatatgtactcaaaattcgataagtcattatttatag

SEQ ID NO: 28194 - DNA, 260 bp, Unknown
  Description of Unknown: RightRegion for integrase B2195 sequence
gaaccctacattgtatggggaacggtatttgtgcaaacgaaaagacacgccttgccataaacggcagggcgtgtcctattttactcttccccggtgaatccgttagcctcggcacacttcaaagcaccgagtatcattttgtcctgggccaatgctcttcggtaaacatcagcagaaattacctcgcttccctcatgccgttcgatattcacccggtcacgaacaatgataccctcatagagatttatcagtttgtccaa

SEQ ID NO: 28195 - DNA, 260 bp, Unknown
  Description of Unknown: RightRegion for integrase B2196 sequence
tgtagtcacaatgaaaatcatgacagcaacaattgctttagaaaaaggaaatctaaatgatgtttttgttgcgggtgatgaagttttaaaaatgtatggtacaaatatctatttagaaaaaggagaggagatgaagcttcaagatttactttatggtttgttattaagaagtggaaatgatgcggctgttgtgattgctaataacatatgctctaatgaaaaagaatttgttaagttaatgaataagaaggccttagaaa

SEQ ID NO: 28196 - DNA, 260 bp, Unknown
  Description of Unknown: RightRegion for integrase B2197 sequence
gaaaggctgctaagaacactcgcttttttcatacagcgagttagtttgaggcgtagttgacgactacgccttttttgtattcaccgacaactgcggtgccggaagtgggaacacatcggggatgaagatggctcccacacagtagcttcccctgtctgcggcaaagccgccaatcgtagcgcggggaaagttccctgtgcggagattaagccctcggcagagtgcacacgccctttagggtgtataagtgcgcccttagt

SEQ ID NO: 28197 - DNA, 260 bp, Unknown
  Description of Unknown: RightRegion for integrase B2198 sequence
aaaggcttgcagtatcatgtcgctccgtatactatacgagtgaaacttaagtgcgaatagcattggggtcaatttggtccccattcatacggggttacttcatcccaatgcctatgcagcaagggttaggagaaaaagaaaaggggctgtaatcattatgattcggtcccttttcaattccattttgaattttaccgtttaatcaggtactcttctaattcggttctggctgttttcatcttctctactccgttcccggt

SEQ ID NO: 28198 - DNA, 260 bp, Unknown
  Description of Unknown: RightRegion for integrase B2199 sequence
gcattcgggttcgtatttctttgtccgttgccatgcagcaaaaaagaggcagccgtttgacgcgtctgcctctttttataacgaagttcgttataatctaccgtcttcctgcaaaatgagaaaatacttgttatattttctcgtaaaggagcatggctatgattaggattttactgtccacgcgcctcggcgaaaggcgctggacgcaggctgatctcgctcgcgcaactggcatacgtccgtctaccatcaacgactac

SEQ ID NO: 28199 - DNA, 260 bp, Unknown
  Description of Unknown: RightRegion for integrase B2200 sequence
gacattggttatgtggaactcacttcgcctgaaggtcagtccacccccaagggtgcgtaagacaaaaagaagtccccggcagatactgccgtagcaatatctgccgggggttcagacaccttcaaagttacccctgtcagggggcaccaaatggccggtggtatttttgtacccaaaatcagggaggttttaccgatgattatcgtaaattttgataaaaatgaactttgcaaaaaagcctatggtctctggcagtacga

SEQ ID NO: 28200 - DNA, 260 bp, Unknown
  Description of Unknown: RightRegion for integrase B2201 sequence
tgtagtcacaatgaaaatcatgacagcaacaattgctttagaaaaaggaaatctaaatgatgtttttgttgcgggtgatgaagttttaaaaatgtatggtacaaatatctatttagaaaaaggagaggagatgaagcttcaagatttactttatggtttgttattaagaagtggaaatgaactagcatgaacggaatagcagttggaacttatgaaagaagatttaataatataacatcttttaaaccttatactttaac

SEQ ID NO: 28201 - DNA, 260 bp, Unknown; identical to SEQ ID NO: 28189
  Description of Unknown: RightRegion for integrase B2202 sequence

SEQ ID NO: 28202 - DNA, 260 bp, Unknown
  Description of Unknown: RightRegion for integrase B2203 sequence
aagcaggaagttatcggaggtatcactgccgaggctcttttgctcaccgcaccagactaatcaaacgccccaaaaatcgcgccgcaaaattttttaaaaaactagaaaaatttcttgacttcttggtcgtggcatgatattatatacaagcagtcgacaaacggcactgcgaaatgcgccggtagctcagctggatagagtgtttggctacgaaccaaaaggtcgggggttcgaatcccttccggcgtaccacggacatc

SEQ ID NO: 28203 - DNA, 260 bp, Unknown
  Description of Unknown: RightRegion for integrase B2204 sequence
gtagagaaaactcagtatctatctagggagaaatggtgccggaaaaacaacgctgtttaactgcctgaacagggatttgaaggctgacagcggcaatttctatatagaagatgaaaacggcgtccgccgtgaggtagccgcagaggacatcggatatgtactttctaccccgaccgtgccggagtttcttacaggcagggagtttttgaagttctttatggacatcaatgagaagtctatcaaaaatccgaaaagcattg

SEQ ID NO: 28204 - DNA, 260 bp, Unknown
  Description of Unknown: RightRegion for integrase B2205 sequence
aaagcacgcttcggcgtgctttttcgcttatttcagaagaccaaagaccttttgaaataaaggatctgacagtctgctgcgcgcacgccctggccgcctgcgggctgctttcctctgcgaggtttttgacacgttgacatccggctgtcgtgtgacaaccggatgtttcgtatgtatctgtattctcaaacaccggagggctgcttttcccggatgacgcagggatttcccatgacgatgctgttggcgggaacgtcctt

SEQ ID NO: 28205 - DNA, 109 bp, Unknown
  Description of Unknown: RightRegion for integrase B2206 sequence
gcagcatatctgctgaggtggattttctattgccaacgcggtgaaaatatggtaagctgaatcaaaaataatgaaatgagatgtcaaaaatgacagaatcgctgtttta

SEQ ID NO: 28206 - DNA, 260 bp, Unknown
  Description of Unknown: RightRegion for integrase B2207 sequence
gtagagaaaactcagtatgtatctagggagaaatggtgcaggaaagacaacgcttattaaggcaataacagggagtgttaagtttgacagcggaagtattgaagtattaggacatgatattgatgctgcatcacagaataaaacagatgacagattcagacaggatatcggaaccgtgcttgcagaagattcatttccggagataatgacggcaggtatgattggcaatgtcatgaaatctatttacattaactgggata

SEQ ID NO: 28207 - DNA, 260 bp, Unknown
  Description of Unknown: RightRegion for integrase B2208 sequence
aaaaagtcttgtaatccttgggattgcaagacttttttgttttttctcttgtgtcgctgacagattggctgccgcaaaaaagcgcacaaaaagcgcacaaatccgaaaaaacacgcccaaaagcaagatacatccgcaggaaaggatgttatctatggccaccattcaggaaaacaggaaaaacggcaagctggtttcgtacaagtttacagcctgcgtcggcagagatgccgccggtaagcagattcgctattaccgca

SEQ ID NO: 28208 - DNA, 260 bp, Unknown
  Description of Unknown: RightRegion for integrase B2209 sequence
gtgcaggaagtcaagatcgtgtataactttgtcggggaaatcccggagattgcagcgtaaatagtttgccccatctctcacaaccattgagggatggggcttttattttgccgtcgtccggcagcattatattgattgggtttactccatccgcaaccgttccactacggtgcgttttgccatctcatggccggtgataacaggaataccagccccaagcaaggcaaagagagggatgatgaacaggaagggcgtgaggt

SEQ ID NO: 28209 - DNA, 260 bp, Unknown
  Description of Unknown: RightRegion for integrase B2210 sequence
gtatattcacagaaaaatctgtatatttcaaatgggaaagtgttgaatccgaacggctgattctgcctgacccttattttgaccctttatacggcggtttcaggcagtccaatctgaccacttgatacagaatgtcacacactggattttgctgcttctgtgctttcgcggatgcggcgaagatactgccccatgcggtttgcactttcgcgtttcatgccgggcgtggcgtgtgcataggtgctgagcgtgaatgatgc

SEQ ID NO: 28210 - DNA, 260 bp, Unknown
  Description of Unknown: RightRegion for integrase B2211 sequence
gaaaggctgttaagaacactcgcttttttcatacagcgagttagtttgaggcgtagttgacgactacgccttttcttgtattcaccgacaactgcggtgccggaagtgggaacacatcgggaatgaagatagctcccacacagtagcttcccctgtctgcggcaaagccgccaatcgtagcgcggggaaagttccctgtgcggagattaagccctcggcagagcgcacacgccctttagggtgtataagtgcgcccttag

SEQ ID NO: 28211 - DNA, 154 bp, Unknown
  Description of Unknown: RightRegion for integrase B2212 sequence
acaaaaacaaagataagaagtgaatcggacctaaaactcgatatatatcctaaattctaattattttatactcttttgtgtaagcattgaggtttatatccatctaatacgccagcaagaaaagctcctatagcgccaagaacaatacctatag

SEQ ID NO: 28212 - DNA, 260 bp, Unknown
  Description of Unknown: RightRegion for integrase B2213 sequence
gacttttcgaccaacggcggcaggggactacccctgccaaaagctgcttatctcgtttgaggtaagcggctttttattttttgctgcatcgtagggctcgggcatgcccggcccgcgggttggcgggagcgacccgaccacggctggcatctggaatgctaaacaggcgcttacttacgatgcgccgaaaaaagaggatgtggactgatccacatcctctaaaacaaaaacaaatccgaaacaatgcttcacaaagaaga

SEQ ID NO: 28213 - DNA, 260 bp, Unknown
  Description of Unknown: RightRegion for integrase B2214 sequence
gtagagaaaactcagtatgtatctagggagaaatggtgcaggaaaaagcacaacatttaaagctattttagggctaatttcctttgatagtggaactatcaatattcttggaaagtcattacaagattttactgcaaaagacaagcaagatttgggagtagttctttcggactctggctttagtggatatttaacaatcaatgatattattcctattattgataatttatatcaaaattttgataaatcattttttatag

SEQ ID NO: 28214 - DNA, 260 bp, Unknown
  Description of Unknown: RightRegion for integrase B2215 sequence
aaatccgaacctgtttccgattggagaagggttcggatttttcgttttcttcgggtttgagaatgaaggctcccgtggacggcgtaaaactccgataccttgtcatagaccgtaagccaataacaagatttggagggtatgattatgaagtacgatgaaagagcctgcaagtttaatatggacactggctgcgtggaactgctgctccgggatgagagaaaaatttccattgactgcaccggggtcgaggatgcgctgaa

SEQ ID NO: 28215 - DNA, 260 bp, Unknown
  Description of Unknown: RightRegion for integrase B2216 sequence
gtagagaaaactcagtatgtatctagggagaaatggtgcaggaaaaagtacagcgtttaaagcagcattaggtctgatcagaccagacgcaggtgttgtaaagatgctgggaaaaaatgtagaagattttacagtgcaggataaagagtggattggagttgttctggctgattccggtttcagtggatatttacgtgtgaaagatatacttccgatgcttgaaagtatgtaccataagtttcagaaagaagatttcctgg

SEQ ID NO: 28216 - DNA, 260 bp, Unknown
  Description of Unknown: RightRegion for integrase B2217 sequence
caaggcgaaccccgcaaggggttcgcctttggtgtatcatgctcagccaagataggttgacaggtttttgatgcaaaacctgtcgaccttctttcctttatgctatgatcgtactacatcagccgcagaaggaaaacagcaaaagaacatgggtgcaaatttgaatcttccattcccctggcaaaatagccacataaaaaaggtgtcctgtgtgctgcacaggacacctttttgaaaggcacagcagtatacaggaggaa

SEQ ID NO: 28217 - DNA, 260 bp, Unknown
  Description of Unknown: RightRegion for integrase B2218 sequence
ccacaccatacccacaaacgctttcttttccgtacccacgaaaaaccgctatgcgcgtgagtctgcgctttttacagcgagcaaatgaatttttccatcttggctgctgcgttttgcgacatatggttgctgacgtgtccgtaggtgtcgagcgtgaaggcgacggttgcatgtccgagtgacaaggaaagcgtcttgaagtcaatttcgctttgaatagcgagggtggcgtaggtgtgcccttacggtataattacgac

SEQ ID NO: 28218 - DNA, 260 bp, Unknown
  Description of Unknown: RightRegion for integrase B2219 sequence
cgcgacattgacgacgcagtggtcgcctaccgtgcgcaggtgcgcgacatattcgcctgagatgaataaaagccgcagacctgtcaaggtctgcggctttcctttttgacggagcaaaatgaaatcctgcaaaataaaggcgttatggaaacaagcggacgttatttgcaaaagggagaagaaatatcgtgcgttatgtcaaacgagtcatgtaccggagagggacgggacatttgacgctgcggctgtgcagaatgtct

SEQ ID NO: 28219 - DNA, 260 bp, Unknown
  Description of Unknown: RightRegion for integrase B2220 sequence
aaacgcaaaccatccatatatcgtttacaagaccaaaacaaacagccacccaaaaaatgaacgaatcaatattgtcatctatcctggccaatctggccgtcatggttatcgcagacaccgtactcatcgctctttacctgttcggaaaaatccggaaaaacacgctgtattgcatcatgagcggcgttacgttttcctatctgattacgttcctgacacttgccggcggcatgtctttcggtatctgtcgagttatcgta

SEQ ID NO: 28220 - DNA, 109 bp, Unknown
  Description of Unknown: RightRegion for integrase B2221 sequence
caggcgttgacaaacgccctccgaacgattacaatagacaaaaattacattatgaggtgatttctcatggattccaagctgcgccccgaaacactgtgcattcaggccg

SEQ ID NO: 28221 - DNA, 260 bp, Unknown; identical to SEQ ID NO: 26386
  Description of Unknown: RightRegion for integrase B2222 sequence

SEQ ID NO: 28222 - DNA, 76 bp, Unknown
  Description of Unknown: RightRegion for integrase B2223 sequence
tttggatacgaccggcaacggtctacccctgccaaaagtcgcttatctcgtttgaggtaagcggctttttgttttt

SEQ ID NO: 28223 - DNA, 260 bp, Unknown
  Description of Unknown: RightRegion for integrase B2224 sequence
caaaatttttcgcatacgggcggcagcggtctacccctgccaaaagcacagcagttgtgatacagatgtatcgaaaaactgctgtgctttttgtttgcggttcgattcgttaaaatccgaagagtttcaaggagaataagttggagaaaattatcgtaatggcacccggccatgaactgtgggatgggaccatcgcttttgcagcaggctgcccatggaaagcagcagcatttttggggcagagaagatggagccaaacg

SEQ ID NO: 28224 - DNA, 260 bp, Unknown
  Description of Unknown: RightRegion for integrase B2225 sequence
aatcagcttttttattttcctattttgattattttacgacctcatagggccagtccatgatgccgccgatgctgtagacgttggtatagccctgttctgtcagcgccgctgccgcgcggccggcgcgcttgccgctgcggcaatatacgaagatttccgcgtttttatccggcaggaccttggcgacggaatcagccttcgcttcaatctgctctaccggcagcagcacggcggaaggaatatggcctgccacatattct

SEQ ID NO: 28225 - DNA, 222 bp, Unknown
  Description of Unknown: RightRegion for integrase B2226 sequence
aaaagtcctcgaaatcgtctgatttcgaggacttttgcttttcataagttccgtttttagggtgttgcttttttctgacccaaacgctgaccccaacgggagcgggtagcggaaaccgtcagacggcacgggaaaggatattgcccatcgtctgggcggctttgagctgtgcgtcggtggtcacatgggcgtaggtgtccagcgtaaagcccgccgagtagt

SEQ ID NO: 28226 - DNA, 260 bp, Unknown
  Description of Unknown: RightRegion for integrase B2227 sequence
caaaatttttcgcatacggccggcagcggtctacccctgccaaaagcacagcagttgtgatacagatgtatcgaaaaactgctgtgctttttgtttgcggttcgattcgttaaaatccgaaggatttcaaggagaataagttggagaaaattatcgtaatggcacccggccatgaactgtgggatgggaccatcgcttttgcagcaggctgcccatggaaagcagcagcatttttggggcagagaagatggagccaaacg

SEQ ID NO: 28227 - DNA, 260 bp, Unknown
  Description of Unknown: RightRegion for integrase B2228 sequence
aaaggtatgcagtactacaatcccccttataaaataaccatcgagcttaagtgtgactaatttagggtacatttaagccctcattcatggggtactacttgataccgaaagtgatgtagcaaggtttatagagcaaaaagaagagggcttgttagtcctcttccagctttttgagcttcaaggttaactccacacatttcatggtatgtcttgctgtcttattaccccaatatatattatcgtctgcattccattcatca

SEQ ID NO: 28228 - DNA, 100 bp, Unknown
  Description of Unknown: RightRegion for integrase B2229 sequence
aaaagtcctcgaaatcgtctgatttcgatgacttttgcttttcataagttacgcttttagggtgttgcttttttctgaccaaaacgctgaccccaacggg

SEQ ID NO: 28229 - DNA, 260 bp, Unknown
  Description of Unknown: RightRegion for integrase B2230 sequence
aaacgcaaaccatccatatatcgtttacaaaaccaaaacaaacagcctctaaaaaaatgaacgaatcaatcttgtcatctatcctagccaatctggccgtcatggttatcgcagacgtcgtactcatcgctctttacctgctcggaaaaatccggaaaaacacgatgtattgcttcataagcggcattacgttttcctacctgattacgttcctgacacttgccggcggcatgtctttcggtatctgtcgagttatcgta

SEQ ID NO: 28230 - DNA, 260 bp, Unknown
  Description of Unknown: RightRegion for integrase B2231 sequence
aaaggtttacgctactatactcccccttataagataacgatcgagcttaagtgtgactaatttagggtacatttaagcccacactcatagggtagtaattgataccgatggctttatagcaatccattttgaagtaaaaagaagaggccctgtcgtaatgacggagcctctttttatttaattacgaggaattgctttttcaagatcggtaattcgatgattcgctacggcgatctcttcgtcaacaactgcatcgtgct

SEQ ID NO: 28231 - DNA, 260 bp, Unknown
  Description of Unknown: RightRegion for integrase B2232 sequence
caaaatttttcgcatacggccggcagcggtctacccctgccaaaagcacagcagttgtgatacagatgtatcgaaaaactgctgtgctttttgtttgcagttcgattcgttaaaatccgaagggtttcacggagaataagttggagaaaattatcgtaatggcacccggccatgaactgtgggatgggaccatcgcttttgcagcaggctgcccatggaaagcagcagcatttttggggcagagaagatggagccaaacg

SEQ ID NO: 28232 - DNA, 260 bp, Unknown
  Description of Unknown: RightRegion for integrase B2233 sequence
ttattcccaatcgggaacgggttcggatttcttattttcatcaaagatattatcgattgagcgtgggtccccggttttgccttgcgcaaaaccgggggctttgtacattcgacgaagcattcctccttctgtacaatagcagtatcaaccaaaagggggattgcatatggaagttcagtacattagcggggcggcgcccaggatgtctgtttctgcgaatttgacggccccgcttccggaaatgtccttgtcattgttga

SEQ ID NO: 28233 - DNA, 260 bp, Unknown
  Description of Unknown: RightRegion for integrase B2234 sequence
aaaagtcctcgaaatcgtctgatttcgaggacttttgcttttcataagttccgtttttagtgtgccgcttttttctgacccaaacgctgaccccaacgggagctaaactgtacccaagaaaatggacacgagattttgacccatggccccgttcggcggacacgcatttgacccatagggtcagaagcgccgcacctgtgttatgatagaactaccgaacggaggtgctgtatgggcacgaagaagaaattcacaccaga

SEQ ID NO: 28234 - DNA, 260 bp, Unknown
  Description of Unknown: RightRegion for integrase B2235 sequence
aagggtacaaaatactataaccctccctataagataacgattgagcttaagtgtgattaatttagggaacatttaagccctggttcatagggatatacatgataccgaaagtgatatatcaaggtttgttgagtaaaaagaagaggccctgtagaatatacggagcctcttttcttattatttattaatcaagaactcttgcaaatcatctctggcatgtttgagattctcgataccattaccagttatctcatggttaa

SEQ ID NO: 28235 - DNA, 260 bp, Unknown
  Description of Unknown: RightRegion for integrase B2236 sequence
attactgttttccctgaggaaacaaaaaattttattatgtcatttatccatttttcttaagaagtctatatgattttttcgtataggctttattgttataacggctatgtcatatattaatagccacaaaaataatatttctttaaccacatccatattctcatctcctcctaatctcattcataggtgctcctatttttattttgtttattatcctattaagatatttcttctgtaaaaaaaatttcttcaatcggcaa

SEQ ID NO: 28236 - DNA, 260 bp, Unknown
  Description of Unknown: RightRegion for integrase B2237 sequence
ggtccacagacagcacctcgatgctgttttcgagatagattcagctgcgaccagccgtgaggaaataggcaatccgccgcactacggcaccaaaaacaaactatacgaggagcatattcctcttattccacaccgcgcgagacagatgacacgtgatgattatttgtactatgaccttttgattggaatggacactgcaaatatcaggaatatgacaaggattgcaggtggcagtgacagtctgcagaagatatttaaga

SEQ ID NO: 28237 - DNA, 260 bp, Unknown
  Description of Unknown: RightRegion for integrase B2238 sequence
actaaggaggttgttattgatattatgggtagccaagagaattgctccccatctgggtaagtttgctattaggtcgcaatacagtaaatcatgcacatgccagcctttatgacgtcaacaggattgaaggtgctgtaagagattatatcaaatctttaggaatagtaattcacatggagaaaagagttagagatgttgaatttgatggacataagataaaaggtttatacttagctgatgatagctttgtagacggggat

SEQ ID NO: 28238 - DNA, 260 bp, Unknown
  Description of Unknown: RightRegion for integrase B2239 sequence
caaaatttttcgcatacgggcggcagcggtctacccctgccaaaagcacagcagttgtgatacagatgtatcgaaaaactgctgtgctttttgtttgcggttcgattcgttaaaatccgaagggtttcaaggagaataagttggagaaaattatcgtaatggcacccggccatgaactgtgggatgggatcatcgcttttgcagcaggctgcccatggaaagccgcagcatttttggggcagagaagatggagccaaacg

SEQ ID NO: 28239 - DNA, 260 bp, Unknown
  Description of Unknown: RightRegion for integrase B2240 sequence
caaaatttttcgcatacgggcggcagcggtctacccctgccaaaagcacagcagttgtgatacagatgtatcgaaaaactgctgtgctttttgtttgcggttcgattcgttaaaatccgaagggtttcaaggagaataagttggagaaaattatcgtaatggcacccgaccatgaactgtgggatgggaccatcgcttttgcagcaggctgcccatggaaagcagcagcatttttggggcagagaaaatggagccaaacg

SEQ ID NO: 28240 - DNA, 260 bp, Unknown
  Description of Unknown: RightRegion for integrase B2241 sequence
accacactgtttcacgcactttgcaatgacagagcctcccgcgctggcggagagggataagcggcttgcaaaatgagaacccttgtgctacaataggaaaggttcctagtagatatttccggttcgccggaacagcgatacaacagaaaagaggatgtctgttatgagcgtgaaaaagatcagcgaggccattctgggcgtaggtgtggatgataccaccatcgacctgttcgagagccagtacccggtgcccaccggtg

SEQ ID NO: 28241 - DNA, 260 bp, Unknown
  Description of Unknown: RightRegion for integrase B2242 sequence
caaaatttttcgcatacggccggcagcggtctacccctgccaaaagcacagcggttgtgatacagatgtatcgaaaaactgctgtgctttttgtttgcggttcgattcgttaaaatccgaagggtttcaaggagaataagttggagaaaattatcgtaatggcacccggccatgaactgtgggatgggaccatcgcttttgcagcaggctgcccatggaaagcagcagcatttttggggcagagaaaatggagccaaacg

SEQ ID NO: 28242 - DNA, 260 bp, Unknown
  Description of Unknown: RightRegion for integrase B2243 sequence
caaaatttttcgcatacgggcggcagcggtctacccctgccaaaagcacagcagttgtgatacagatgtatcgaaaaactgttgtgctttttgtttgcggttcgattcgttaaaatccgaagggtttcaaggagaataagttggagaaaattatcgtaatggcacccggccatgaactgtgggatgggaccatcgcttttgcagcaggctgcccatggaaagcagcagcatttttggggcagagaagatggagccaaacg

SEQ ID NO: 28243 - DNA, 260 bp, Unknown
  Description of Unknown: RightRegion for integrase B2244 sequence
caaaatttttcgcatacgggcggcagcggtctacccctgccaaaagcacagcagttgtgatacagatgtatcgaaaaactgctgtgctttttgtttgcggttcgattcgttaaaatccgaagggtttcaaggagaataagttggagaaaattatcgtaatggcacccggtcatgaactgtgggatgggaccatcgcttttgcagcaggctgcccatggaaagcagcagcatttttggggcagagaagatggagccaaacg

SEQ ID NO: 28244 - DNA, 260 bp, Unknown
  Description of Unknown: RightRegion for integrase B2245 sequence
aaaggtttacactaccacactcccccttataagataacaatcgagcttaagtgtgactaatttagggtacatttaagcccttactcatggggtagtaattcatcccgatggctctacagcaatccattttgaaataaaaagaagaggccctgtcgtagtgacggagcctctttttgtcggcgaatcatattggttccaatccaaaagcttttcgcataccattcggcgtcaacctaccttcgagatagcattcatacgat

SEQ ID NO: 28245 - DNA, 260 bp, Unknown
  Description of Unknown: RightRegion for integrase B2246 sequence
aaaggcttgcagtatcatgtcgctccgtatactatacgagtgaaacttaagtgcgaatagcattggggtcaatttggtccccattcatacggggttacttcatcccaatgcctatgcagcaagggttaggagaaaaagaaaaggggctgtaatcattacgattcggtcccttttcaattccattttgaattttaccgtttaatcaggtactcttctaattcggttctggctgttttcatcttctctattccgttcccggt

SEQ ID NO: 28246 - DNA, 260 bp, Unknown
  Description of Unknown: RightRegion for integrase B2247 sequence
aaaggcttgcagtatcatgtcgctccgtatactatacgagtgaaacttaagtgcgaatagtattggggtcaatttggtccccattcatagggcattacatcatcccaatggctatatatcaaaggttggagaaaaaagaaaaggggctgtaatcatcacgattcggtcccttttcaattccattttgaattttaccgtttaatcaggtactcttctaattcggctctggctgttttcatcttctctactccgttcccggt

SEQ ID NO: 28247 - DNA, 260 bp, Unknown
  Description of Unknown: RightRegion for integrase B2248 sequence
tatgcaaaacacgagattgttattgcgattcttgcggctcgtccgcagaaaataaggtgagggcatttgccctcaccttattttcatctctccacgatcccgtgatagtacgcactcagcttctcctccggccccggcccgtccttatcaaacagaaatgcctttgccatttccgcatagaattccgctttgttgcagttgtttttctgcgccacaccggaataatcagagtacatcatgttcatggtgacgttccacat

SEQ ID NO: 28248 - DNA, 260 bp, Unknown
  Description of Unknown: RightRegion for integrase B2249 sequence
gtagtagagaaaactcagtatgtatctagggagaaatattgcagcaaaaccagaaaataaagactctttaattaattatataaaggttttatataatattaagacatcagttgccacatcgaatgaaactgttcaggaactcaagaaaatatctttgggaaatcttggaatagaaagaagtatgaatcaagcaattcgctttttggatgttgatttggcttcctatatagaaatgacagagcaaatgatcaaatcaatag

SEQ ID NO: 28249 - DNA, 109 bp, Unknown
  Description of Unknown: RightRegion for integrase B2250 sequence
gatactggggatttaactattaattttataggttcaggtgagtctaaaaaaaaacaatagactccctgaactctattttaggggataataaaaaatcgcattttagtat

SEQ ID NO: 28250 - DNA, 260 bp, Unknown
  Description of Unknown: RightRegion for integrase B2251 sequence
cttgtaccgattggtcatgggttcggatttcttgtttttatcaaggatattgaagtttagtttcgggatagaataacatcaaattcaggaggatatacccatggaaaagctcgtagctgtacgttcaatatagataccgcctgcgtggaacttcacttcacggaggggagtatttactccataaattgcaccgccgtggagaacgaggcggcggacaacggtgcgtgctgtctgactgcatcacaagctatgctaaaaat

SEQ ID NO: 28251 - DNA, 260 bp, Unknown
  Description of Unknown: RightRegion for integrase B2252 sequence
caaaatttttcgcatacgggcggcagcggtctacccctgccaaaagcacagcagttgtgatacagatgtatcgaaaaactgctgtgctttttgtttgcggttcgattcgttaaaatccgaagggtttcaaggagaataagttggagaaaattatcgtaatggcacccggccatgaactgtgggatgggaccatcgcttttgcagcaggctgcccatggaaagcagcagcatttttggggcagagaagatggagccaaacg

SEQ ID NO: 28252 - DNA, 260 bp, Unknown
  Description of Unknown: RightRegion for integrase B2253 sequence
aagggtacaaaatactataaccctccctataagataacgattgagcttaagtgtgattaatttagggaacatttaagccctggttcatagggatatacatgataccgaaagtgatatatcaaggtttgttgagtaaaaagaagaggccctgtagaatatacggagcctcttttcttattatttattaatcaagaactcttccaaatcatctctggcatgtttgagattctcgataccattaccagttatctcatggttaa

SEQ ID NO: 28253 - DNA, 260 bp, Unknown
  Description of Unknown: RightRegion for integrase B2254 sequence
ggtccaccagctgcacctcgacaaccagttcgagatcgactccgctgcgaccagccgtgaggagatcggcaacccgccgcactacggcacaaaaaataaattatacgaagaaaacattccgcttgttccgcaccgggcgcgccagatgacaagggatgactatctgtattttgattatctgatcggcatggattccgcaaatatccggaacatgacaagaatcgcgggaggcacggacagccaggataaaatatacaaga

SEQ ID NO: 28254 - DNA, 260 bp, Unknown
  Description of Unknown: RightRegion for integrase B2255 sequence
aaaggactacgctattacactcccccatataaaataacgattgagcttaagtgtgactaatttcgggtacatttaagcccacaatcatggggtactacttgataccgatggctctacagcaatccattttgaaataaaaagaagaggccctgtcgtaatgacggagcctctttctcttttacagaccaatcgccgctagtgcaaaaccgataactccggcgatgaccgcccaaagaatttttgcacccaattcgtcccaa

SEQ ID NO: 28255 - DNA, 260 bp, Unknown
  Description of Unknown: RightRegion for integrase B2256 sequence
accacactgtttcacgcactttgcaatgacagagcctcccgcgctgacggagagagataagcggcttgcaaaatgagaacccttgtgctacaataggaaaggttcctagtagatatttccggttcgccggaacagcgatacaacagaaaagaggatgtctgttatgagcgtgaaaaagatcagcgaggccattctgggcgtaggtgtggatgatacaaccatcgacctgttcgagagccagtacccggtgcccaccggtg

SEQ ID NO: 28256 - DNA, 260 bp, Unknown
  Description of Unknown: RightRegion for integrase B2257 sequence
ttattcccaatcgggaacgggttcggatttcttattttcatcaaagatattatcgattgagcgtggatccccggttttgccttgcgcaaaaccgggggctttgtacattcgacgaagaattcctccttctgtataatagcagtatcaaccaaaagggggattgcatacggaaattcagtacattagcggggcggcgcccaggatgtctgtttctgcgaatttgacggccccgcttccggaaatgtccttgtcattgttga

SEQ ID NO: 28257 - DNA, 260 bp, Unknown
  Description of Unknown: RightRegion for integrase B2258 sequence
gtagtagagaaaactcagtatgtatctagggagaaatattgcagcaaaaccagaaaataaagactctttaattaattatataaaggctttatataatattaagacatcagttgccacatcgaatgaaactgttcaggaactcaagaaaatatctttgggaaatcttggaatagaaagaagtatgaatcaagcaattcgctttttggatgttgatttggcttcctatatagaaatgacagagcaaatgatcaaatcaatag

SEQ ID NO: 28258 - DNA, 260 bp, Unknown
  Description of Unknown: RightRegion for integrase B2259 sequence
gaaagcattttacagctgtttttttatgcccgaaatcttttaaaatatttcttaaaatagtgctttacattccaggaagttagtgggataatagctgagcggtccggtagggaccgataataaaacatacatatcgtataagtgtttctaataaacaaattaccaaaatggtggcaaaaaaatgccattgtctgaattctttctttttcacatgttccccttttcaagcggtgatttttgtagtattataatacatggca

SEQ ID NO: 28259 - DNA, 260 bp, Unknown
  Description of Unknown: RightRegion for integrase B2260 sequence
caaaatttttcgcatacggccggcagcggtctacccctgccaaaagcacagcagttgtgatacagatgtatcgaaaaactgctgtgctttttgtttgcggttcgattcgttaaaatccgaagggtttcaaggagaataagttggagaaaattatcgtaatggcacccggccatgaactgtgggatgggaccatcgcttttgcagcaggctgcccatggaaagcagcagcatttttggggcagagaagatggagccaaacg

SEQ ID NO: 28260 - DNA, 260 bp, Unknown
  Description of Unknown: RightRegion for integrase B2261 sequence
ggtccacagacagcacctcgatgctgttttcgagatagattcagctgcgaccagccgtgaggaaataggcaatccgccacactacggcaccaaaaacaaactatacgaggagcatattcctcttattccacaccgcgcgagacagatgacacgcgatgattatttgtactatgaccttctgattggaatggacactgcaaatatcaggaatatgacaaggattgcaggtggcagtgacagtcagcagaagatatttaaga

SEQ ID NO: 28261 - DNA, 260 bp, Unknown
  Description of Unknown: RightRegion for integrase B2262 sequence
gagatccagttccggtcggggatcgtgatggtgcagaggctggatgcatgggaagactagaaatggatattaaggaagaaatacggggaccgcctgactaaaaacataaaattcaaacataaaatgaactgtaatgaaccttgcaacaaaagtgtgcctgtgataaaatttaggtatgataggggaagtatatgcttctgataaaaacaggcagagaaaggaagagcagacatgagtaaggattgggaagaaaagttcag

SEQ ID NO: 28262 - DNA, 260 bp, Unknown
  Description of Unknown: RightRegion for integrase B2263 sequence
aaaggtttacgctactacactcccccttataagataacgatcgagcttaagtgtgactaatttagggtacatttaagcccacactcatagggtagtaattgataccgatggctatacagcaatccattttgaagtaaaaaaaaaagaagaggctctgtcgtagtgacagagtcgtttcttttcagattataactctggtttccaatactttgggttctttgcttcttctctaacttgtgcctttagtcttctaatctcgt

SEQ ID NO: 28263 - DNA, 260 bp, Unknown
  Description of Unknown: RightRegion for integrase B2264 sequence
aaaggcttgcagtaccacatcgctccgtatactatacgagtgaaactcaagtgcgaatagcattggggtcatgtaagcccccattcacacggtattacatgataccgatagcgctatataaaccattttgaagcaaaaaagaagagggcttgtctacgtgacgaaccctctttccttttaaaggaacttattttcctttatgcatttgttgtatgttcctctgatgttttctattgctagattagctacattattcttat

SEQ ID NO: 28264 - DNA, 260 bp, Unknown
  Description of Unknown: RightRegion for integrase B2265 sequence
aaaggcttgcagtatcacgtggctccgtatacgattcgagtgaagcttaagtgcgagtaattttggggtcatatcacacctcattcacgtgaccatgcttcatcccaatggctatatagcaaggctgggagaaaaagaaaaggggctgtaatcaacgcgattcggtcccttttctccattttgaattttatcgcttaatcagatactcttctaaactatctctcaccgtcttcatcttctccacaccattcccggttatc

SEQ ID NO: 28265 - DNA, 260 bp, Unknown
  Description of Unknown: RightRegion for integrase B2266 sequence
tatgcaaaacacgagattgttattgcgattcttgcggctcgtccgcagaaaataaggtgagggcatttgccctcaccttatttttatctctccacgatcccgtgatagtacgcactcagtttctcctccggtcccggcccgtccttgtcgaacagaaatgcctttgccatttccgcatagaattccgctttgttgcagttgtttttctgcgccacaccggaataatcagagtacatcatgttcatggtgacgttccacat

SEQ ID NO: 28266 - DNA, 260 bp, Unknown
  Description of Unknown: RightRegion for integrase B2267 sequence
gtagtagagaaaactcagtatgtatctagggagaaatgtgactgtgaaagctctttttgaaagaaaatcgagcagtggcagtggcggagattcttcttctgaccgtgatgcatcctcttccgcaatcagaaaagatccggtcaggggatggaccagcagtgatcgcggcatcataaccggcgcagccaacagcatggccaatgatggttacagtcactggatgcaggatgcgtatggctggtggctccgttttgcggata

SEQ ID NO: 28267 - DNA, 130 bp, Unknown
  Description of Unknown: RightRegion for integrase B2268 sequence
aacagcgtaccgcctttgcgacggtacgcccatttttatgcagttattacaggatgctgatgcggcctgcgccgtagggattctcgtaatccagcagatagcccgggtaatcggccagcgggctgtttgc

SEQ ID NO: 28268 - DNA, 260 bp, Unknown
  Description of Unknown: RightRegion for integrase B2269 sequence
ggtcaacagacagcacctcgatgctgttttcgagatagattcagctgcgaccagccgtgaggaaataggcaatccgccgcactacggcaccaaaaacaaactatacgaggagaatattcctcttattccacaccgcgcgagacagatgacacgcgatgattatttgtactatgaccttttgattggaatggacactgcaaatatcaggaatatgacaaggattgcaggtggcagtgacagtcagcagaagatatttaaga

SEQ ID NO: 28269 - DNA, 260 bp, Unknown
  Description of Unknown: RightRegion for integrase B2270 sequence
agatgtaaaatcgccgttttccctttgtggatagacttgaactctcacacaaccgaataatgatacgcaaggcagatagaaatcaaaaatctatctgccttttttattaccttcataaaggagaagacagatatgctacagaaagaattagccaaacgcctcaaagctcagtacgataccaaaatggacgggaacggatggctggaagtgtcctcgaaacgccgtccgtcagatgacgcaggatgccggtcccgtaaagg

SEQ ID NO: 28270 - DNA, 260 bp, Unknown
  Description of Unknown: RightRegion for integrase B2271 sequence
ttattcccaatcgggaacgggttcggatttcttattttcatcaaagatattatcgattgagtgtgggtccccggttttgccttgcgcaaaaccgggggctttgtacattcgacgaagaattcctccttctgtataatagcagtatcaaccaaaagggtgattgcatatggaagttcggtacattagcggggcggcgcccgggatgtctgtttctgcgaatttgacggccccgcttccggaaatgtccttgtcattgttga

SEQ ID NO: 28271 - DNA, 260 bp, Unknown
  Description of Unknown: RightRegion for integrase B2272 sequence
caaaatttttcgcatacggccggcagcggtctacccctgccaaaagcacagcagttgtgatacagatgtatcgaaaaactgctgtgctttttgtttgcggttcgattcgttaaaatccgaagggtttcaaggagaatgagttggagaaaattatcgtaatggcacccggccatgaactgtgggatggaaccatcgcttttgcagcaggctgcccatggaaagcagcagcatttttggggcagagaagatggagccaaacg

SEQ ID NO: 28272 - DNA, 260 bp, Unknown; identical to SEQ ID NO: 28246
  Description of Unknown: RightRegion for integrase B2273 sequence

SEQ ID NO: 28273 - DNA, 247 bp, Unknown
  Description of Unknown: RightRegion for integrase B2274 sequence
tttaaagtttcgcctcaaacatcgcccaaaagcaggctatatcatcagctatcccgttagacccttatgctgccgggcattcacataaggttttcctgcatgtttgacgcatggttccggacctgcaggtgaacccgggcatgcgcgcggtgctgaactaagcagctaatgcgaaattgttgttctttttagcgtttatatttaacgtgtcccttttaacgcagactggacaaactgcggctcgctt

SEQ ID NO: 28274 - DNA, 260 bp, Unknown
  Description of Unknown: RightRegion for integrase B2275 sequence
aaaggtaccagatactataatcctccttataaaataacgattgaacttaagtgtgagtaatttagggatgtattaatccctgactcatagggtactatttcatcccgatagtggtatatcaaggttttaaagcaaaaagaagaggctccgtcactatgacagggcctcttttattattttgaagataagaatcgaactatctcttaatcttcttagccttagctaacgtcttcttaccgaacttaccatcgatagtaatg

SEQ ID NO: 28275 - DNA, 257 bp, Unknown
  Description of Unknown: RightRegion for integrase B2276 sequence
aaaagtcctcgaaatcgtctgatttcgaggacttttgcttttcataagttccgtttttagtgtgccgcttttttctgacccaaacgctgacccaaacgggacggggagcggaaaccatcagaccgcacgggagaggatgctccccatggtttgcgccgccttgagctgggcgtcggtggtgacgtgggcgtaggtgtccagcgtgaaacccgccgagtagtggcccagcatcgaggacaccgttttcacgtccacgc

SEQ ID NO: 28276 - DNA, 109 bp, Unknown
  Description of Unknown: RightRegion for integrase B2277 sequence
ggtccacagacagcacctcgatgctgttttcgagatagattcagctgcgaccagccgtgaggaaataggcaatccgccgcactacggcaccaaaaacaaactatacgag

SEQ ID NO: 28277 - DNA, 260 bp, Unknown
  Description of Unknown: RightRegion for integrase B2278 sequence
tatgcaaaacacgagattgttattgcgattcttgcggctcgtccgcagaaaataaggtgagggcatttgccctcaccttgtttttatctctccacgatcccgtgatagtacgcactcagtttctcctccggtcccggcccgtccttgtcgaacagaaaggcctttgccatttccgcatagaattccgccttgttgcagttgtttttctgcgccacgccggaatagtcagagtacatcatgttcatggcgacgttccacat

SEQ ID NO: 28278 - DNA, 180 bp, Unknown
  Description of Unknown: RightRegion for integrase B2279 sequence
aaaagtcctcgaaatcgtctgatttcgaggacttttgctttttataagttccgtttttgaggtaccgcttttttctggcccaaacgctgaccccaacgggagcggatagcggaaaggactataccgcacgggataggatattgcccatcgtctgggcagctttgagttgagcgtcagtgg

SEQ ID NO: 28279 - DNA, 260 bp, Unknown
  Description of Unknown: RightRegion for integrase B2280 sequence
caaaatttttcgcatacgggcggcagcggtctacccctgccaaaagcacagcggttgtgatacagatgtatcgaaaactgctgtgctttttgtttgcggttcgattcgttaaaatccgaagggtttcaaggagaataagttggagaaaattatcgtaatggcacccggccatgaactgtgggatgggaccatcgcttttgcagcaggctgcccatggaaagcagcagcatttttggggcagagaagatggagccaaacga

SEQ ID NO: 28280 - DNA, 260 bp, Unknown
  Description of Unknown: RightRegion for integrase B2281 sequence
tatgcaaaacacgagattgttattgcgattcttgcggctcgtccgcagaaaataaggtgagggcatttgccctcaccttattttcatctctccacgatcccgtgatagtacgcactcagcttctcctccggccccggcccgtccttgtcgaacagaaaggcctttgccatttccgcataaaactctgccttgttgcagttgtttttttgcgccacgccggaatagtcagagtacatcatgttcatggcgacgttccacat

SEQ ID NO: 28281 - DNA, 260 bp, Unknown
  Description of Unknown: RightRegion for integrase B2282 sequence
ggtccacagacagcacctcgatgttgttttcgagatagattcagctgcgaccagccgtgaggaaataggcaatccgccgcactacggcaccaaaaacaaactatacgaggagcatattcctctaattccacaccgcgcgagacagatgacacgcgatgattatttgtactatgaccttctgattggaatggacactgcaaatatcaggaatatgacaagaattgcaggtggcagtgacagtcagcagaagatatttaaga

SEQ ID NO: 28282 - DNA, 260 bp, Unknown
  Description of Unknown: RightRegion for integrase B2283 sequence
aatgtacccaacatttttgttgttgcggcgttttccgttttgcgcgaacgtaaaaaataaggagagggttaaaccctctccttatttttattccgccacaatcccgtggtaatacgctgccagcttggcttccggccccggcccgtccttatcgaacagaaatgcctttgccatctccgcatagaactcaggcttgttgcacccgaacttcgttgctaccgcgcagtagtcggaatacatcatattcatggtaacattcc

SEQ ID NO: 28283 - DNA, 260 bp, Unknown
  Description of Unknown: RightRegion for integrase B2284 sequence
aaaagtcctcgaaatcgtctgatttcgaggatttttgctttttataagttccgtttttagggtgttgcttttttctgacccaaacgctgaccccaacgggagcgggtagcggaaaccgtcagacagcacgggagaggatgttccccatcgtttgcgccgctttgagctgcgcgtcagtggtgacgtgggcgtaggtgtccagcgtgaaccccgccgagtagtggcccagcatactgctgacggtcttgacgtccacgccg

SEQ ID NO: 28284 - DNA, 260 bp, Unknown
  Description of Unknown: RightRegion for integrase B2285 sequence
aaaggcttgcagtatcatgtcgctccgtatactatacgagtgaaacttaagtgcgaatagcattggggtcaatttggtccccattcatacggggtcacttcatcccaatggctatatatcaagggttggagaaaaagaaaaggggctgttttacttgcggctgccccttctcctaatacattttgatttttatcgatcaatcagatactcttgcaattcgtctcttctagcggtcagcttgtcgacattattgcccgtaa

SEQ ID NO: 28285 - DNA, 260 bp, Unknown
  Description of Unknown: RightRegion for integrase B2286 sequence
tggcaccggtctcccggcctatcgcatttcgagttaatctttgaaaaggcaatatggtgataaccaaggctgatacaggctggcttgtccgctgattttgggcgatgtttgtggagaaagcactgataaaccagcaaaaaacaatgtaggtacgaaaagaataaaaaacgcccgttttggggcaaaaatggcgacttttggggaaaaatgcaagataagatgcaagataagccctgccccaaaagccagataatagtgcg

SEQ ID NO: 28286 - DNA, 260 bp, Unknown
  Description of Unknown: RightRegion for integrase B2287 sequence
actaaggaggttgttattgatattatgggtagccaagagaattgctccccatctgggtaagtttgctattatgtcgcaatatagtaaaacatgcacatgccagcctttatgacgttaacaggattgagggagctgtaagagattatatcaaatctttaggaatagtaattcacatggagaaaagagttagagatgttgaatttgatggacataagataaaaggtttatacttagctgatgatagctttgtagacggggat

SEQ ID NO: 28287 - DNA, 260 bp, Unknown
  Description of Unknown: RightRegion for integrase B2288 sequence
gatactggggatttaactattaattttataggttcaggtgagtctaaaaaaaaacaatagactccctgaactctattttaggggataataaaaaatcgcattttagtatcattagcaccataatctaataaacattcatagcaactttgacaagctcctgcaaatataactaattcatcataacttccattataatttcttaatgcctttactgattcaatataatattttgaatttctataacaatttaaatctaaata

SEQ ID NO: 28288 - DNA, 260 bp, Unknown
  Description of Unknown: RightRegion for integrase B2289 sequence
aaaggtttacgctactacactccaccttataagataacgattgagcttaagtgtgactaatttagggaacatttaagcccacactcatagggtagtaattgataccgatggctttatagcaatccattttgaagtaaaaagaagaggccctgtcgtagtgacggagcctctttgagtttagtcgatgatctctacaatattagttcgtgtaatttcagttatctcgacagttacatttccgtttttatgctcaaccagat

SEQ ID NO: 28289 - DNA, 260 bp, Unknown
  Description of Unknown: RightRegion for integrase B2290 sequence
aaaagtcctcgaaatcgtctgatttcgaggacttttgcttttcataagttccgtttttaggaggtcgctttttcctgacccaaacgctgaccccaacgggagcggatagcggaaaccatcagacagcacgggagaggatgttccccatcgtttgcgccgccttgagctgtgcgtcggtggtaacgtgggcgtaggtgtccagcgtaaaacccgccgagtagtggcccagcatcgaggacaccgttttcacgtccacgccg

SEQ ID NO: 28290 - DNA, 260 bp, Unknown
  Description of Unknown: RightRegion for integrase B2291 sequence
aaaaaacctgctaaattcgcaagaatttggcaggttttttgtatttttcgaagcaattagaaaaatctcaatgctgcaaaattcaactttagttcaactcgctttcaaaagttcacgcctttttcaaaaagatatctcccaggatatcggcgttcctttggtctgcttccgcgattacatggctgtaaatatcgcaggtcgtcgaaacttgagcgtgccccagcctcttggagatcgacacagaatcgacgccgttgaaa

SEQ ID NO: 28291 - DNA, 260 bp, Unknown
  Description of Unknown: RightRegion for integrase B2292 sequence
ggtccacagacagcacctcgatgctgttttcgagatagattcagctgcgaccagccgtgaggaaataggcaatccgccgcactacggcaccaaaaacaaactatacgaggagcatattcctcttattccacaccgcgcgagacagatgacacgcgatgattatttgtactatgacattttgattggaatggacactgcaaatatcaggaatatgacaaggattgcaggtggcagtgacagtcagcagaagatatttaaga

SEQ ID NO: 28292 - DNA, 260 bp, Unknown
  Description of Unknown: RightRegion for integrase B2293 sequence
ggcattcagatcgacttcaatatctccgaggcgcagtatttgaatgggatggagctgtaagcgggctgcatggatgtgtgcaacatcttcggtttaggacatcatgaaagctgaaaccttacaaggtgcaatctgattgagagaagtaggcaaagtcaactactatattttacaaaattgtcattgatttctgccttaaaatgttatattatgtatattgaaaattggaaaggtcacgtttttgcttgaggaggactatt

SEQ ID NO: 28293 - DNA, 260 bp, Unknown
  Description of Unknown: RightRegion for integrase B2294 sequence
gcatttgggttcgtatttctttgtccattaccaagcagcaaaaaagaggcagacgtgtaaagcgtctgcctcttttactataacgaagttcgttataatctaccatcttcctgcgaaatgagaaaatacttgttatattttctcgtaaaggagcatggctatgattaggattttactgtccacgcgcctcggcgaaaggcgctggacgcaggctgatctcgctcgcgcaactggcatacgtccgtctaccatcaacgact

SEQ ID NO: 28294 - DNA, 260 bp, Unknown
  Description of Unknown: RightRegion for integrase B2295 sequence
gatggtcattctgtaacggagcattggccaataccaaggaggaaaaaatgccaaaaataacgaaaatacctgcatcaatcagccgatacacatcagcaccgattgatgcacctgtcaagcgtaaggttgctgcctatgctcgtgtgtcaactgacagcgaagaacagttaacttcatacgctgctcagataagctattacactgaatacataaaaggacgtgaggactgggagtttgttggggtgtacactgatgagggt

SEQ ID NO: 28295 - DNA, 190 bp, Unknown
  Description of Unknown: RightRegion for integrase B2296 sequence
gacacgatccgcatccaatttagagactccgatgtggtgctcgagcaaggattacaataagaaggaaaggcgaaaaaagatggcaatttttatgaccggtgacacccacggtgattttggtaggctacgccctgcggcattccgcgagcaagggggcctgaccaaagacgattacctcatcatctgtggc

SEQ ID NO: 28296 - DNA, 260 bp, Unknown
  Description of Unknown: RightRegion for integrase B2297 sequence
agaaaaaatgcacacggaaatgcacacgaaaaccggactacttgtccgggtgaaggatagcctccagcccttcctcaatgacatcgtcatataaacgttcgtcctcgcggaaaatgtgctggtatgtggtcttgagcatgttgggcgtggcatgccccatgcgcttggcgctgtacttgtccggtatcttcgcctccagcataacagaggcgttcacatggtgcaggtcatggaaccgataatgcggaatgcccgccttt

SEQ ID NO: 28297 - DNA, 109 bp, Unknown
  Description of Unknown: RightRegion for integrase B2298 sequence
aatcagcttttttattttcctattttgattattttacgacctcatagggccagtccatgatgccgccgatgctgtagacgttggtatagccctgttctgtcagcgccgc

SEQ ID NO: 28298 - DNA, 260 bp, Unknown
  Description of Unknown: RightRegion for integrase B2299 sequence
atcctcatcgcagattttggtatcgtgttgctctgtccgctgccacgcggacaaaaataagcagtcgttttgtacgactgcttattttttatacactcatgcgcaggtgccaaatcggcggctgctttttttgtttttctccaccgcatagcgtaataatcttccgatttcaagaaaaaccttagaattactggtagattgttacgaaaggagcgagggcaaatgattaagattctcctgtccaagaagttgggcgaact

SEQ ID NO: 28299 - DNA, 157 bp, Unknown
  Description of Unknown: RightRegion for integrase B2300 sequence
catctgcggacgctgacaatgcagtccgtctggccttatcgacgctcaaacccaagatagcgggtgccctgaaaactcagctttccaatgtcgccctccacaagcattccgtagtccgaaccacttacggtaagctccatgcggtcgccgctctcta

SEQ ID NO: 28300 - DNA, 260 bp, Unknown
  Description of Unknown: RightRegion for integrase B2301 sequence
accaaaagtcctcgaaatcgtcaggagtgtgttgataaagaagtatctagaaagcattgaaaatactaactttattgacagacgcccaaggaaacaggtcgagaaaggacactatctgaaaaggtagtgtccttttttcatgcccttttccaaaaataaggaggaacacaagatggcggagagcatgatatacgattattactacggagacgaaagcagtcaattttctttttaccgcatcccccgccagcttgtcaccg

SEQ ID NO: 28301 - DNA, 260 bp, Unknown
  Description of Unknown: RightRegion for integrase B2302 sequence
aatcggaccctgctgttccggttttattctagagaaaataaagaggtgcaattgccatgaaaaaagtgcaggttataccagctacactacagaattacacagaaaagcctattcatagccagaaaaagagaagggtcgccgggtatgcacgcgtttcaaccgaccgggatgaacagcttacaagttatgaagcacaggttgactattatacaaattatataaagggacgcagcgactgggaattcgctgggatgtatacg

SEQ ID NO: 28302 - DNA, 260 bp, Unknown
  Description of Unknown: RightRegion for integrase B2303 sequence
catctgcggacgctgacaatgcagtccgtctggccttatcgacgctcaaagccgagatagcgggtgccctgaaaacttagctttccaatgtcgccctccacaagcattccgtagtccgaaccatctacttcgagttccatgcggtcgccgctctctacctgaaaggttacataataggtcgtgaacgtatgcatcatcgtattgtccgtatggtggcgagaaacttccgtgcgctttgccaccaccgcagccggaacggt

SEQ ID NO: 28303 - DNA, 260 bp, Unknown
  Description of Unknown: RightRegion for integrase B2304 sequence
tttggtgaaccagtaacaaggatttatcctgctggtgatatggaagaggtggacgcttagtatctcttattagggttaatagaaaacttcttcaaagtactacctgtaccagcattattaagcactttcgaagcttgctcattagcggcatctgagaaggtgctttttccattcttaactctgacatttttaccacaattgatacgggcttgaagttgctcattagtgagttcactcgtagagcgattatatagctcctg

SEQ ID NO: 28304 - DNA, 260 bp, Unknown
  Description of Unknown: RightRegion for integrase B2305 sequence
ggtatccaaatcgacttcaatatttccgaggcgcagtatttgaatgggatggagctgtaagtgggttgcatggatgtgtgcaacatgtgaaaagataggcgaaaggagtgattgccacttgtcaacaaaaattagacatcaactttgtagaaaatttgcatatatttttgtggaaaatgatgatatacttttaatgggagtatattctcttaaaatgtttgtatggttttgagaatacacctgccaagcataagaaggga

SEQ ID NO: 28305 - DNA, 260 bp, Unknown
  Description of Unknown: RightRegion for integrase B2306 sequence
ggcttagtggcgtcgttgccgtactgtatctcgaaaaaaggaacagcgttgctgcgatagcgttcgatgagtttctgaacgccgccgcagatgacgatggctcttcagatgttgtagctcggtgccgagagcgcgaattcggcggagaccttttccttgcctctgcaaaggaaatgacggccgtcgtcgtagtgcttgatggtgccgaagggatgttcgctggtctgctggcggagcttctgctggcgaatgtctctccg

SEQ ID NO: 28306 - DNA, 260 bp, Unknown
  Description of Unknown: RightRegion for integrase B2307 sequence
agtgaagaagcagggacttgcagacaaattttatgtagattcagcagctacatcctatgaggaaattggaaatccggttcatccgggttcaagaaggaagctggcggaggctggaatttcctgtgcggggaagtatgcccgccatatggagaaatgcgattatgctgaatttgattatttaatagggatggatcgtgcgaatatccgtaacatgacaaggattgcagggggagatcccgataggaaaatatataaaatga

SEQ ID NO: 28307 - DNA, 260 bp, Unknown
  Description of Unknown: RightRegion for integrase B2308 sequence
agcaaaagagcgatacagcaaacgctgtatcgctctttttacgttaacggtaatcagtaattcagaccgaagccgctgcggtagtagttgccgtcggcatcgcagtaggcgtagctgccgcccttgacgttggcgaggatagcgggatcaatgtactgatccttatcgtagccgggcacgtcgttgggagaggcgcagatctcgcgcaccacaccgtcgatctcctgctcggtgatggcaatgacggcggggtcagagac

SEQ ID NO: 28308 - DNA, 260 bp, Unknown
  Description of Unknown: RightRegion for integrase B2309 sequence
catctgcggacgctgacaatgcagtccgtctggccttatcgacgctcaaagccgagatagcgggtgccctgaaaactcagctttccaatgtcgccctccacaagcattccgtagtccgaaccatctacttcgagctccatgcggtcgccgctttccacctgaaaggtcgcataataggtcgtgaacgtatgcatcatcgtattgtctgtatggtggcgagaaacttccgtgcgctttgccaccaccgttgccggaacggt

SEQ ID NO: 28309 - DNA, 260 bp, Unknown
  Description of Unknown: RightRegion for integrase B2310 sequence
aaaagtcctcgaaatcgtctgatttcgaggacttttgcttttcataagttccgtttttagtgtgccgcttttttctgacccaaacgctgaccccaacgggagcgggtagcggaaagcatcagacggcacgggagaggatatttcccatggtttgcgccgctttgagttgggcgtcggtggtgacgtgggcgtaggtgtccagcgtgaagcctgcggagtagtgacccagcatcgaggacaccgtttttacatccacgccg

SEQ ID NO: 28310 - DNA, 260 bp, Unknown
  Description of Unknown: RightRegion for integrase B2311 sequence
gatacgatccgtatccaatttagagactccgatatcgtgctcgagcagggattacaatgaaaagggaaggcgaaaaaagatggcaatttttatgaccggtgacacccacggtgatttcagcaggctccgccctgtggcattccgcgagcaagggggcctgaccaaagacgattacctcatcatctgtggcgactttggcggcgtctgggatggcagtgagattgaacaacaatggctcgactggctggaggacaggtcat

SEQ ID NO: 28311 - DNA, 260 bp, Unknown
  Description of Unknown: RightRegion for integrase B2312 sequence
tttggtgaaccagtaacaaggatttatcctgctggtgatatggaagaggtggacgcttagtattttttattagggttcactgagtactttttaagctttgaagctactcgaccagcgttactattagcattggtgacgttggttttttcagcttctgttaagtctgaatagtccagcttccaagccttattacacttaatctgagcatcgagaatatcatttctgatagctggagcgtaaccggatacatcgctaatact

SEQ ID NO: 28312 - DNA, 94 bp, Unknown
  Description of Unknown: RightRegion for integrase B2313 sequence
agtgaggggatagtagtagaaaaaactcagtatgtatctaggcagaaacggcagcggtaaaaccacctttatcaagcttatgtgccgtctttat

SEQ ID NO: 28313 - DNA, 260 bp, Unknown
  Description of Unknown: RightRegion for integrase B2314 sequence
atagtagtagagaaaactcagtatgatccactacttagaggattatatgtactgtactagaaagctggggctttatgtgcagttagtagcataaattatataggggttatctaaatatatttacctcctgtgattaggttatataaagactaaatcacaggaggtttatttttatgataacagtagaaaaactggaaaagggtacttattttgatgatgcttttaaaatctcatttagatacgatcccactactgtagct

SEQ ID NO: 28314 - DNA, 260 bp, Unknown
  Description of Unknown: RightRegion for integrase B2315 sequence
tttggtgaaccagtaacaaggatttatcctgctggtgatatggaagaggtggacgcttaggaattggtattgttaccaatcaataagtgcccttcttattcggattcacactaaacttccgtaaagcattacccgacttgagtacctttgcagcacctgaattagctgagtctgtgaaggtgctttcaccattcttaacactaacgttcttagaacatgctacacgggcttttagcgcttcatctgatagctcacttgcc

SEQ ID NO: 28315 - DNA, 260 bp, Unknown
  Description of Unknown: RightRegion for integrase B2316 sequence
gagcaatggaacatagaaaaactgaacaaatcagaatcggaacatagaaaaggagcatagaaaaagtgacttatttggtggacactgaccgtatgcatactcacaccgctaaaaaagtccgattggaatgggagtttttgggtaatatggtgggttattctgtgtacggttatatgatttatattgtgttgttttatacttcataaatgattcttgttttgccttaaaaactgcataaatattggaataattgtataata

SEQ ID NO: 28316 - DNA, 260 bp, Unknown
  Description of Unknown: RightRegion for integrase B2317 sequence
gagcaatggaacatagaaaaactgaacaaatcagaatcggaacatagaaaaggagcatagaaaaagtgacttatttggtggacactgaccgtatgcatactcacaccgctaaaaaatccgattggaatgggagtttttgggtaatatggtgggttattctgtgtacggttatatgatttatattgaagcattttttactacataaatgattatcgttttgtctaaaacaccgcatagatataggaattatcataaacaga

SEQ ID NO: 28317 - DNA, 260 bp, Unknown
  Description of Unknown: RightRegion for integrase B2318 sequence
agtaaaggttttgttagatgcactgggagtctggtgtgtgattgcaatctgtggaaataatcctgagaaggggattaagtatcgccacacatggaatatcgtaaaaataggaggtacatattatcatctggatgcgacctttgataataccctggggaaagatcgtgagacttctgaaatccgctatgattatttcaatctggatgattcacagattttcagggatcatgagcctcttattgcgccggcgcctcactgcg

SEQ ID NO: 28318 - DNA, 260 bp, Unknown
  Description of Unknown: RightRegion for integrase B2319 sequence
tttacaccaagaaacaaaaaatatctacaagatattaaacaaaacaatatcagtgtgtgaccaataatatcgagaagcggacccgaaatgcggttgaggtagcgttttatcttctgttccgaacaggtgcattttcttgtcggatcaccgtaatatccgcacggacatgggttcattgcggcaaccaccataatcgaacacggataggtgcatttctgacctgctcttgaaattgtgatagagccgtcctcaatcggctg

SEQ ID NO: 28319 - DNA, 260 bp, Unknown
  Description of Unknown: RightRegion for integrase B2320 sequence
gaacggttaagctataaaagaacaagagtaacgatagcagatgagcagcacaataattaaaatgatctgtatgtgttctcgtttaaatatgatagaccacttacagacaaaataaggctacaaaaatcccaaactgtgttgtcgaactgtgctgtcgaatcttgtcgaacgattctgcttgcaattatcgacagagtatgctattttataactgtacaaaagagaacaagccatgcccgctaaacaaggctaaaacgtac

SEQ ID NO: 28320 - DNA, 260 bp, Unknown
  Description of Unknown: RightRegion for integrase B2321 sequence
aaaggtacgaaatactacaatcctccttataagataacgatcgaacttaagtgcgattaatttagggtacatttaaaccctcattcatggggtactacttgataccgatagcgtcatatcaatggtttgtaaagcaaaaaagaaaaggccctgtcgtaatgacggagcctttttcttatttaattctttatatggagttcttccatttcctctttcatatgttctaccataccattaccacccaatcctttgtaggcgtg

SEQ ID NO: 28321 - DNA, 260 bp, Unknown
  Description of Unknown: RightRegion for integrase B2322 sequence
ggtgttttggggaaaatcgggtgtaaatatactaccaatttcagctgtattgtgctataatggaagcgaaaacggcggagggggaacggaaaatgaaaaagctgcttgctgtgtgcctgacggcgctcgtttgctgggtttgcgcggggtacgcggaagaaacgcgggtcggcgatacggtcattttcgggcaatatgaacaggatggcaatcttgataacggcagtgagcccattgcgtggcaggtgctggatgtgcag

SEQ ID NO: 28322 - DNA, 260 bp, Unknown
  Description of Unknown: RightRegion for integrase B2323 sequence
gcaattcccatttttcaggcgagaaagaccatttccgttgaatctgtaaccagtttgtaatatttgtgacaacaaaaaatcccccgccagctttcctttcggattgccagcgggggattttcatttcagtgcagaagcatcgtcagttcataggccacaaggccggaaaccaacgccgcaattacagcccaccaaagtttgttcccaaatgttccggggactttttccagcgcggtcaggcggtcgtcctgctttttgtt

SEQ ID NO: 28323 - DNA, 260 bp, Unknown
  Description of Unknown: RightRegion for integrase B2324 sequence
gatggttgttcaggcgggagatttgttcgtacagccccacttccgccgcataaaaaatgacctcaagctcaggcttggggtcatttttttatcttgcggagaagaggggtcgaacagcacggccgcccgacggttcgtaccatgatatggacaaataatccccttgatgcatcaggccgctgtctctgttttacggagacggcggcctgattcattatttttgactactttttgtcccggggagcccccggaaaaatcct

SEQ ID NO: 28324 - DNA, 260 bp, Unknown
  Description of Unknown: RightRegion for integrase B2325 sequence
gcctctaaaaacctgagctttgaagagcaggaaaatttaatttataatcgtttgatctaatattgctttaattcttggggatgtaagattaatacctctgattatgttttgaacatattttcctttgtatacattatttttaattattttttgtttacactccacattttcaatgaccatagaaactagattcccctgactgtctaagataggtgaaccagaacatcctcgcacatgttccttatcaggattatccgggg

SEQ ID NO: 28325 - DNA, 260 bp, Unknown
  Description of Unknown: RightRegion for integrase B2326 sequence
tttttctctgtaccgaaacacagatgcaaaatcgccgttttccctaatgaagtacgctaacagtactccgctgtggtatggctctgccagtccaggcggccccacagccaccccaacaagcacacagaggccgactctgtttgacaaacctacatttcgtgcaaattccccgctgggaccgtcccgtctcccggcgggttgcggcccggggcaaaaagagggttgacaaaccgccgcagcggtggtagagtacggataat

SEQ ID NO: 28326 - DNA, 260 bp, Unknown
  Description of Unknown: RightRegion for integrase B2327 sequence
gagcaatggaacatagaaaaactgaacaaatcagaatcggaacatagaaaaggagcatagaaaaagtgacttatttggtggacactgaccgtatgcatactcacaccgctaaaaaatccgattggaatgggagtttttgggtatgtggtgagttattctgtgtacggttgcataatttatattgtgttgttttatacttcataaatgattcttgttttgccttaaaaactgcataaatattggaataatcatataataaa

SEQ ID NO: 28327 - DNA, 260 bp, Unknown
  Description of Unknown: RightRegion for integrase B2328 sequence
aaaggtatgcagtactacaatcctccttataaaataaccatcgaacttaagtgcgactaatttagggtacatttaagtcctcattcatagggatataattgataccgaaagtgatatatcaaggtttatagagcaaaaagaagagggcttgttagtcctcttccagctttttgagcttcaaggtcaacttcacacatttcatggtatgtcttgttgtcttattaccccaatatatattatcgtctgcattccattcatca

SEQ ID NO: 28328 - DNA, 260 bp, Unknown
  Description of Unknown: RightRegion for integrase B2329 sequence
gtagaaaaatctcagtatgtatctagggagaaacggcgctggaaaaacaacgctgtttaactgtttgaacagggatttgaaggcggacagcggcaatttctatatagaagatgaaaacggcgttcgtcgtgaggtagccgcagaggatattggatatgtactctctacccctactgtaccggaatttcttacaggcagggagtttttgaaattctttatggacatcaacgagaagtctatcaaaaatccgaaaagcattg

SEQ ID NO: 28329 - DNA, 260 bp, Unknown
  Description of Unknown: RightRegion for integrase B2330 sequence
agtaaaggttttgttagatgcactgggagtctggtgtgtgattgcaatctgtggaaataatcctgagaagggaattaagtatcgccacacatggaatattgtaaaaataggaggtacatattatcatctggatgcgacctttgataataccctgggaaaagatcgtgaaacttctgaaatccgctatgattatttcaatctggatgattcacagattttcagggatcatgagcctcttattgcgccggcgcctcactgcg

SEQ ID NO: 28330 - DNA, 260 bp, Unknown
  Description of Unknown: RightRegion for integrase B2331 sequence
tttacaccaagaaacaaaaaatatctacaagatattaaacaaaacaatgtcagtgtgtgaccaataatatcgagaagcggtcccgaaatgcggttgaggtagcgttttatcttctgttccgaacaggtgcattttcttgtcggatcaccgtaatatccgcacggacatgggttcattgcggcaaccaccataatcgaacacggataggtgcatttctgacctgctcttgaaattgtgatagagccgtcctcaatcggctg

SEQ ID NO: 28331 - DNA, 260 bp, Unknown
  Description of Unknown: RightRegion for integrase B2332 sequence
agtgaaagttcttctcgatgcgctgggagtctggtgtgtgatcgcaatatgcgggaataatccggaaaaaggaattaaataccgtcatacctggaacattgtccggatcggcggtgcatattatcatctggatgcaacatttgataatacacttggaaagagtgataaagtcgaagatatccgttatgattactttaatctggatgatggacatatttttaaagatcacgaaccactgatcgcggcggcaccgcactgta

SEQ ID NO: 28332 - DNA, 109 bp, Unknown
  Description of Unknown: RightRegion for integrase B2333 sequence
ccaatgaaaaatcccacttgtttttcggaaaaagcgggattttattttttgatatcatgaaatagttttgataaaaaattgtcgtactactgactttatgtgcatttgt

SEQ ID NO: 28333 - DNA, 260 bp, Unknown
  Description of Unknown: RightRegion for integrase B2334 sequence
ttaaggcgttttaagcccgttggggtactcgtgtacccctcgggctttttcgtgccttaaatcgcctctgaagcggtctgaggacgttcgagcgcccatgtgcatctcgcatccgctcgatgcaagggtggccgccctgcgggcggcggttggatgtgggcggacgtacagaaggggtgcggcatgggcttgggaggttatgccgatttgcgcgttccgtcgttcgtgcacactaccctgcacaccatgcacactatcct

SEQ ID NO: 28334 - DNA, 260 bp, Unknown
  Description of Unknown: RightRegion for integrase B2335 sequence
gatgattgttcagacgggagatttgttcgtacagccccacttccgccgcataaaaaatgacctcaagctcaggcttgaggtcattttttatcttgcggagaagaggggtcgaacagcacggccgcccgacggttcgtaccatgatatggacaaataatccccttgatgaatcaggccgctgtctctgttttacggagacggcggcctgattcattatttttgactactttttgtcccggggaacccccggaaaaaccctg

SEQ ID NO: 28335 - DNA, 260 bp, Unknown
  Description of Unknown: RightRegion for integrase B2336 sequence
gagcaatggaacatagaaaaactaaacaaatcagaatcggaacatagaaaaggagcatagaaaaagtgacttatttggtggacactgaccgtatgcatactcacaccgctaaaaaatccgattggaatgggagtttttgggtatatggtgggttgttctgtgtacggttatatgatttatattgaagcattttttactacataaatgattatcgttttgtctaaaacaccgcatagatatgggaattatcataaacagaa

SEQ ID NO: 28336 - DNA, 260 bp, Unknown
  Description of Unknown: RightRegion for integrase B2337 sequence
atcgtcagattgaaaggcggtttggaaattaaaaaggcccttgatggagaaagagattaaattgaaagtgtatatcttaaagaggctcaccctaaaatgtagggcgagcctcctttgcggtttagctaactatgaggagaagtaagtgccttttgcagcctgcttatctccatgtctaccattcgttttctgttgtaaagcaacaggccttttgtcgctttcaccaaatcttttgttccggaatgaaataccgcaaccaa

SEQ ID NO: 28337 - DNA, 260 bp, Unknown; identical to SEQ ID NO: 28321
  Description of Unknown: RightRegion for integrase B2338 sequence

SEQ ID NO: 28338 - DNA, 260 bp, Unknown; identical to SEQ ID NO: 28335
  Description of Unknown: RightRegion for integrase B2339 sequence

SEQ ID NO: 28339 - DNA, 260 bp, Unknown
  Description of Unknown: RightRegion for integrase B2340 sequence
gagcaatgggacatagaaaaactgaacaaatcagaatcggaacatagaaaaggagcatagagaaagtgacttatttggtggacactgaccgtatgcatactcacaccgctaaaaaatccgattggaatgggagtttttgggtatatggtgggttattctgtgtacggttatatgatttatattgaagcattttttactacataaatgattatcgttttgtctaaaacaccgtatagatatgggaattatcataaacagaa

SEQ ID NO: 28340 - DNA, 260 bp, Unknown; identical to SEQ ID NO: 28335
  Description of Unknown: RightRegion for integrase B2341 sequence

SEQ ID NO: 28341 - DNA, 260 bp, Unknown
  Description of Unknown: RightRegion for integrase B2342 sequence
tgtgccaaaaagacccgaaaccttacggtttcgggtctttttgtttgcataagttgctaatttcggatgctactttttcctgacccaaacgctgacccaaacgggcgtaaactataccccataaagcggacacaggaatttgacccatgtccccataggatggatacgcgcatggcccaaggtgtcgaacgaacgtgctctctcgttcctgacggttttttgtccgttcggcaaaccacgtatctaaatctttcttacag

SEQ ID NO: 28342 - DNA, 260 bp, Unknown
  Description of Unknown: RightRegion for integrase B2343 sequence
aaaggtatgcagtactacaatcctccttataaaataaccatagaacttaagtgtaactaatttagggtacatttaagtcctcattcatggggtactacttgataccgatagcttgatatcaagggttgcaaagcaaaaagaagaggccctgtcgtagtgacggagcctttttcttatttaattctttatatggagttcttccatttcctctttcatatgctctaccataccattaccacctagccctttgtaggcgtgat

SEQ ID NO: 28343 - DNA, 260 bp, Unknown
  Description of Unknown: RightRegion for integrase B2344 sequence
aaaggtatgcagtactacaatcctccttataaaataaccatagaacttaagtgtgactaatttagggtacatttaagtcctcattcatggggtactacttgataccgatagcttgatatcaagggttgtaaagcaaaaagaagaggccttgtcgtagtgacgaagcctctttatcttaattttttatatgcagttcttccatttcctctttcatatgctctaccataccattaccacctagccctttgtaagcgtgatac

SEQ ID NO: 28344 - DNA, 109 bp, Unknown
  Description of Unknown: RightRegion for integrase B2345 sequence
tgtgccaaaaagacccgaaaccttacggtttcgggtctttttgtttgcataagttactaatttcggatgctgcttttttctgacccaaacgctgaccccaacgggagcg

SEQ ID NO: 28345 - DNA, 260 bp, Unknown
  Description of Unknown: RightRegion for integrase B2346 sequence
gatggttgttcaagcgggagatttgttcgtacagccccacttccgccgcataaaaaatgacctcaagctcaggcttgaggtcattttttatcttgcggagaagaggggtcgaacagcacggccgcccgcaggcggcaagcaatcagcccggtgcaacggcgacgaccgcagccagcggctgaaacagggaggagctgttggggccgcgttctgatttttcaaagccctgccaaggggctgcggaaaaatcagctaacgca

SEQ ID NO: 28346 - DNA, 260 bp, Unknown
  Description of Unknown: RightRegion for integrase B2347 sequence
cggttggtggaggcgatgggagtcgaaccatcatttatgatttcacgagcaatacgatagcgaaaaaaccttaaaactacggcaattttcttttgactaatatcattttataaatcaacactcattcgtaagatgtaaaagtgcgtgagtaagtgcgtgagtgccttgcaagcaaaacagccccgaggaaccgtcaggctccccggggctggtgctatactatgactttattggcgttaacattttcgtgatgccgcgaa

SEQ ID NO: 28347 - DNA, 260 bp, Unknown
  Description of Unknown: RightRegion for integrase B2348 sequence
gatggttgttcaagcgggagatttgttcgtacagtcccacttccgccgcataaaaaatgacctcaagctcaggcttgaggtcattttttatcttgcggagaagaggggtcgaacagcacggccgcccgacggttcgtaccatgatatggacaaataatccccttaatgaatcaggccgctgtctctgttttacggagacggcggcctgattcattatttttgactactttttgtcccggggagcccccggaaaaaccctg

SEQ ID NO: 28348 - DNA, 260 bp, Unknown
  Description of Unknown: RightRegion for integrase B2349 sequence
gagcggtcccgggtgtcatatccgggaccgctgctgttcaaagctgattttacacgttaaagcggaagtagatcatgtcgccgtcctggaccacatactccttgccctcgctgcggagctggcccttttccttggcggcgttgacgctgccgtacttgatcatatcgtcgtaggcaatgacctccgcccggatgaagccccgctcgatgtcggagtggatcttgccggcggcctggggggccttggtgccctttttgatg

SEQ ID NO: 28349 - DNA, 260 bp, Unknown
  Description of Unknown: RightRegion for integrase B2350 sequence
tgtgccaaaaagacccgaaaccgtaaggcttcgggtctttttgtttgcataagttgctaatttcggatgctactttttcctgacccaaacgggacgtaaactgtacccaagaaaatggacacggaaatttgacccatgtccccagagggatggacacgtgcgtgactcaaggcgtcaaacgaatgtgccctcttgtttctgaaggtttttgtccgtttgacaaacagtgtatctaaatcttttttatcggatgtctaata

SEQ ID NO: 28350 - DNA, 260 bp, Unknown
  Description of Unknown: RightRegion for integrase B2351 sequence
tgtgccaaaaagacccgaaaccgtaaggtttcgggtctttttgtttgcataagttgctaatttcggatactgctttttcctgacccaaacgctgacccaaacggaacgtaaactgtacccaagaaaatggacacggaaatttgacccatgtccccagagggatggacacgtgcgtgactcaaggcgtcaaacgaatgtgccctcttgtttctgaaggtttttgtccgtttgacaaacagtgtatctaaatcttttttatc

SEQ ID NO: 28351 - DNA, 260 bp, Unknown
  Description of Unknown: RightRegion for integrase B2352 sequence
gagcaatggaacatagaaaaactgaataagtccgaaacggaacatagaaaaggagcatagaaaaaagggacttatttggtggacactgaccgtatgcatactcacaccgctaaaaaatccgattggaatgggagttttggggtaatatggtgggttattctgtgtacgattatatgatttatattgaagcattttttactacataaatgattcttgttttgccttaaacactgcataaatattggaataatcatatacta

SEQ ID NO: 28352 - DNA, 260 bp, Unknown
  Description of Unknown: RightRegion for integrase B2353 sequence
aggccatctgcctttggcagatggccttatttttgggcttcgctcgcgcggctcgcgtgaccctgctttactcgatggcgtgcaggaagtcctcccaggcgttgtccacggcgttacccatgtgctgcatggtgcggcccacgcaggtcttcatggacctttgccggggtgagacggccatgcccaccgctgcgccgagcaccatgccggcgccgataccgcaccagaacgcggtattttccatttcactcacactcctt

SEQ ID NO: 28353 - DNA, 260 bp, Unknown; identical to SEQ ID NO: 28316
  Description of Unknown: RightRegion for integrase B2354 sequence

SEQ ID NO: 28354 - DNA, 260 bp, Unknown
  Description of Unknown: RightRegion for integrase B2355 sequence
cggttggtggaggcgatgggagtcgaaccatcatttatgatttcacgagcaatacgatagcgaaaaaaccttaaaactacggcaattttcttttgactaatatcattttataaatcaacactcattcgtaagatgtaaaagtgcgtgagtaagtgcgtgagtgccttgcaagcaaaacagccccgaggaaccgtcaggctccccggggctggtgctatactatgactttgttggcgttaacattttcgtgatgccgcgaa

SEQ ID NO: 28355 - DNA, 260 bp, Unknown; identical to SEQ ID NO: 28333
  Description of Unknown: RightRegion for integrase B2356 sequence

SEQ ID NO: 28356 - DNA, 260 bp, Unknown
  Description of Unknown: RightRegion for integrase B2357 sequence
gtttcgttgtctgatgggtcgcacttctgtagtgattgtagaagctatatctatgagtgataaaataatagtattatcaaaaagaccagcttctgtaaaaagtgttcatgaaataaaccttgtaacagaaggagaaaaaactcctctaaaaactcgtaaggtgccacaattccaatactactttgacattctatggaaggagttggattcttatgaaatcaaacaataactactcagaaggatatgccaactaccttaaa

SEQ ID NO: 28357 - DNA, 260 bp, Unknown
  Description of Unknown: RightRegion for integrase B2358 sequence
aaaggtacaaaatattgtaaccctccttataagataacgatcgagcttaagtgtgactaatttagggtacatttaagccctcattcatgaggacctatatgataccgatggctttatatcaaggtaaaaagaagaggccctgtcgtagtgacggagcctcttttaattaaattagcattcgatatcaacgatacgatacttatgctttttgctatttttcatcttctcatctccatgtcatcaatttcgaactcgactct

SEQ ID NO: 28358 - DNA, 260 bp, Unknown
  Description of Unknown: RightRegion for integrase B2359 sequence
ttacgttccaaaaatacattaattctttttgagaaacttgaaacttatttaattgcataattctctttttctcgtatcatgcatggcatagggatttgtttatgcttgaatgtgaaaaattaaaatttgaaaaagctgaattgttaaaacagcgtgttaaaaagatgtgcgctctttcgtttttgcatattggaataaatactttaaacgataatattaatattgagttaaaccaaaaagaagcgactctggaagtttta

SEQ ID NO: 28359 - DNA, 260 bp, Unknown
  Description of Unknown: RightRegion for integrase B2360 sequence
gagcaatggaacatagaaaaactaaacaaatcagaatcggaacatagaaaaggagcatagaaaaaagggacttatttggtggacactgaccgtatacatactcacaatactaaaaatgcgattggaatgggaattttttatatgtggtgggttattctgtgtacggttatatgatttatattgaagcattttttactacataaatgattatcgttttgtctaaaacaccgcatagatataggaattatcataaacagaaa

SEQ ID NO: 28360 - DNA, 260 bp, Unknown
  Description of Unknown: RightRegion for integrase B2361 sequence
atagtcttaataggatctgatgaaaagagacctacaataaacccgctctttcacctttaggtgataagagcagacgatctaaaaaaaggtaaagtaactctttctatgctttcattatatattatcccaacatcaattagacctatcattctaaagggttgtagtccgtaaatattggccctgaaactatcaggatatattttcattataccgattgaattggccacaatatatgcctccctattttatcttttgaaata

SEQ ID NO: 28361 - DNA, 109 bp, Unknown
  Description of Unknown: RightRegion for integrase B2362 sequence
gcgcacaaggtatactctgatggagcaaaaaagcgcacggacacggattcatcgcactgattaaaataaaatcggcaggatacgtcaggctggcattcacgcgtgatat

SEQ ID NO: 28362 - DNA, 260 bp, Unknown
  Description of Unknown: RightRegion for integrase B2363 sequence
aagctgattatccagtttcagtcgggaatcgttatggagcaggaaatcagatatgagtaagtgatgggcagggatgacaactgaatagggaaacggaattcctgcctgtaaaataaatccgtgggatttatggtaagaataaaatgcccgatgggttcgggtgttttattgttggtgtaaacgacaggaagtttaaaaatgaagattgtggaaacctgttgatatcaagtataattaaaataaaggtaactgttcagcag

SEQ ID NO: 28363 - DNA, 260 bp, Unknown; identical to SEQ ID NO: 28321
  Description of Unknown: RightRegion for integrase B2364 sequence

SEQ ID NO: 28364 - DNA, 260 bp, Unknown
  Description of Unknown: RightRegion for integrase B2365 sequence
aaaggtatgcagtactacaatcctccttataaaataaccatagaacttaagtgtaactaatttagggtacatttaagtcctcattcatggggatatacatgataccgatagcggaatagcaaggtttataggagaaaaagaagaggccttgtcgtaatgacggagcctcttttacacttatagtctttcttcgggatgatctaagaaatacaacaactcttctctttgatattcatagtcaccctgggtaatcatcgccc

SEQ ID NO: 28365 - DNA, 260 bp, Unknown
  Description of Unknown: RightRegion for integrase B2366 sequence
ggtcagaggacacaggaggttaagattatttacaattttgttggggaaatgtcaaggtagaatttagacgctaaatacttttaatttatatcaaaagtgatacaacaattttcttttaatgctatcaggcaataaagttattcctttggccagagtaaaagggataactttattttgctaaagcatactaaaaagggcgcgttgcagaaaattatccgcaacacgccctcttctataagtccttatgtcaaaatcaaatt

SEQ ID NO: 28366 - DNA, 260 bp, Unknown
  Description of Unknown: RightRegion for integrase B2367 sequence
aaaggtttacgctactacactcccccttataaaatagccatcgagcttaagtgtgactaatttagggtacatttaagcccttactcatagggtattaattgataccgaaagagatgcagcaaggatttaagtaatatgcgttttataaattaagaataacaaaaggaaatatatgtatttttgtcgaatgtagtaagtatgaaaggagggattgttatgaaaaaatttgaaattctctattgcttcgacaaagaccatta

SEQ ID NO: 28367 - DNA, 260 bp, Unknown
  Description of Unknown: RightRegion for integrase B2368 sequence
gggggccatgacgcttcctctgtgccgatatcggtcagcaggcccttgagctcggggtagggcatggagtagcgctgggagaggtagcgcagtgacgcgccgagctctccgtccgggcctccatatatcaattaaccataaaatgagcatggctaaaggacgaggcggtagtggatggtgagggtgttggcggctttgctccaggtgatattgtcggcaacgctgcggacggcggcgttcttctcggcgacggtggcgtc

SEQ ID NO: 28368 - DNA, 260 bp, Unknown
  Description of Unknown: RightRegion for integrase B2369 sequence
gttttgcattgcagcaggaaaacacaaaaaaatttctgcccactgccgcaacctgcgtgaaacgggctgttttgtgcgcgaatggcagaccacggaaggcagaacttgtgctataatataaaaaaacagggaagcagaaggaacagggggtgcagctatgaacctgcggacggcgatcgtagaagacagcaagccggatgccgaacggttgaaacagctgctgaaaaaggcatttgaaaatgagaacatatcctgcagct

SEQ ID NO: 28369 - DNA, 260 bp, Unknown
  Description of Unknown: RightRegion for integrase B2370 sequence
aaaggtttacgatactacactcctccttataagatagacatcgatcttaagtgcgagtaatttcgggatgatgtaacgcctcactcatggggtactatttgatgcctaaatagatttaccaatggtttgaacgcaaaaaagaaagagagcctgttaagactctcccgcggtaaagaatttttccacctcttcgagattatgtagtatcttttcttcaggaacacccattatacgtgcgtgttctacgctgaatatcaaag

SEQ ID NO: 28370 - DNA, 260 bp, Unknown
  Description of Unknown: RightRegion for integrase B2371 sequence
gggggccatgacgcttcctctgtaccgatgtcggtcagcaggcccttaagctcggggtagggcatggagtagcgctgggagaggtagcgcagcgacgcgccgagctcgccgtccgggcctccatatatcaattaaccataaaatgagcatggctaaaggacgaggcggtagtggatggtgagggtgttggcggctttgttccaggtgatattgtcggcgacgctgcggacggcggcgttcttttcggcaacggtggtgtc

SEQ ID NO: 28371 - DNA, 260 bp, Unknown
  Description of Unknown: RightRegion for integrase B2372 sequence
ggtaatactcaaaatgtaacagtatatttcattggaagtggagacgtaaaaaaaaagtagatcctctacttccagatttataccaattgttgcaaattcaaccacacagcatgacctgtatctaacagaacaatattttcagcaaactcttttaaggcgtattgctgacaaacttttgtgtcaagttttttataattaatatcctcttttggaatcttaagaacaactactcctttttcatttaattcttttctaatatc

SEQ ID NO: 28372 - DNA, 260 bp, Unknown
  Description of Unknown: RightRegion for integrase B2373 sequence
ggggttcatgacgcttcctcggtgccgatgtcggtcagcaggcccttgagctcggggtagggcatggagtagcgctgggagaggtagcgcagcgacgcgccgagctcgccgtccgggcctccatatatcaattaaccataaaatgagcatggctaaaggacgaggcggtagtggatggtgagggtgttggcggctttgttccaggtgatattgtcggtgacactgcggacggcggcgttcttttcggcaacggtggtgtc

SEQ ID NO: 28373 - DNA, 260 bp, Unknown
  Description of Unknown: RightRegion for integrase B2374 sequence
ccagctgggctgttgctgttttacatagcacgaccaaggcaaagagaccgtagatcgtaatctgcggtctcttcttttttggggggcgggggattaatgctgcactacatagcagtagtacgccgcggccttgtcctcgacggcgtccttgtcatcgagccaagcgtgcgccatgtccgcgtaaaactcggcgttgccgccgagaccgtactttttcgcgacctcgcaaaaatcggagtacatcgcgcacattatcgcgt

SEQ ID NO: 28374 - DNA, 260 bp, Unknown
  Description of Unknown: RightRegion for integrase B2375 sequence
ggggtccatgacgcttcctctgtaccgatgtcggtcagcaggcccttgagctcggggtagggcatggagtaacgctgggagaggtagcgcagcgacgcgccgagctcgccgtccgggcctccatatatcaattaaccataaaatgagcatgactaaaggacgaggcggtagtggatggtgagggtgttggcggctttgttccaggtgatattgtcggtgacgctgcggacggcggcgttcttttcggcaacggtggtgtc

SEQ ID NO: 28375 - DNA, 160 bp, Unknown
  Description of Unknown: RightRegion for integrase B2376 sequence
acctgggacggcaaaaacgtgtccatcgaagtattcggagaaaaaacgctcccaaaatagcgggggcgttgccgtcgtggaaaggtaggtttatccaccgtaatgacgcccttgccgatgtactctacgcagcgactatccacgaagaggatgtcgatgg

SEQ ID NO: 28376 - DNA, 260 bp, Unknown
  Description of Unknown: RightRegion for integrase B2377 sequence
aacccggtgtactttttcaagaaagtgttcgccgtggtggtaaacttcacgcggagatagtgaaaaataaaagcgtcagggcttaggctctggcgcttttgttatgcccggtcgtctctcgatagggctcgagaaatagagcctgctcagctcggcagctatcaccgttcctctctggcctcctcggccgcgtggctattgtttacgggttgcacgggactggctgcggcgcctgctgccttcttgtctcgttttaaggt

SEQ ID NO: 28377 - DNA, 260 bp, Unknown
  Description of Unknown: RightRegion for integrase B2378 sequence
agcggtgaaggttcttctggatgcgctgggagtatggtgtgtgatcgcaatttgcggtaacaatccggaaaaaggaatcaaataccggcacacctggaatattgtaaagataaatggcatatattatcatttagatgccacttttgataacagtctgggaaaagatcacgaaaacacggaaatccgctatgactatttcaacctggatgatcagcagatctttcgcgatcatgagcccttgatcgcacctgcgcctcatt

SEQ ID NO: 28378 - DNA, 260 bp, Unknown
  Description of Unknown: RightRegion for integrase B2379 sequence
aacccggtgtactttttcaagaaagtgttcgccgtggtggtaaacttcacgcggaaatagcgaaaaataaaagcgtcagggcttaggctctggcgcttttgttatgcccggtcgtctctcgatatggctcgagaaatagagcctgctcagctcggcagctatcaccgttcctctctggcctcctcggccacgtggctattgtttacgggttgcacgggactggctgcggcgcctgctgccttcttgtctcgttttaaggt

SEQ ID NO: 28379 - DNA, 260 bp, Unknown
  Description of Unknown: RightRegion for integrase B2380 sequence
gaaatccattacacggatattggcgtggttgggaatatgaacatcacgaaaagtgcataaaggaaaaggcaggtgatgccaaagcaacacctgcctatccttaaaatacacaaacgattttccaaaacaggcttgaagtgttgcaataatcgtagaaaacagtacgaaacaaggcaatttaggacaatgacagttcaaataccagacatggcattttgaatcttacaccagttttacaccaaatgaaaaaagactcgatg

SEQ ID NO: 28380 - DNA, 260 bp, Unknown
  Description of Unknown: RightRegion for integrase B2381 sequence
gttttgcattgcagcaggaaaacacacaaaaatttctgcccactgccgcaacctgcgtgaaacgggctgttttgtgcgcgaatggcagaccacggaaggcggaacttgtgctataatataaaaaacagggaagcagaaggaacaagggggtgcagcaatgaacctgcagacggcgatcgtggaagacagcaagccggatgccgaacggttgaaacagctgctgaaaaaggcatttgaaaatgagaacatatcctgcagct

SEQ ID NO: 28381 - DNA, 260 bp, Unknown
  Description of Unknown: RightRegion for integrase B2382 sequence
tttttttattccggcaaaaagatcaggggtgcaccgctcgccatgcaggcgggccagtgacacccccgatctcaatcgaaaccgttatctgatttaacacctgcagtgttttccgcgccgtgccgccagctccatgccaaggcccgccagcgtatctctacgctggcggtctttttatgggcgcgggtggattacgcaagccgcgcatctaaaaaagccccgcaggggcttttttccccgccggactgttcggcgggtcg

SEQ ID NO: 28382 - DNA, 260 bp, Unknown
  Description of Unknown: RightRegion for integrase B2383 sequence
aagagagtcatacgaaccaggaagccaccatctacatggttggtggcgtgttcgtattgacttgtccgctcaaagcggaaaaataaaaaaggctaccgtttaggggttcgcccctattcggtagccttttttcatgtttcgtaacctatttcgttatttcctaacaaaagcctgcgggattctaaaattgctgttagaatttaacgaaaaggagcatggctatgattaggattttactgtccacccggcttggcgagcgg

SEQ ID NO: 28383 - DNA, 260 bp, Unknown
  Description of Unknown: RightRegion for integrase B2384 sequence
ccagctgggctgttgctgttttacatagcacgaccaaggcaaagagaccgcagatcgtagtctgcggtctcttctttttttggggcgggggattaatgctgcactacatagcagtagtacgccgcggccttgttttcgacggcgtccttgtcgtcgagccaagcgtgcgccatgtccgcgtaaaactcggcatttccgccgagaccgtacttttttgcgacctcgcaaaaatcggagtacatcgcgcacatgatcgcgtg

SEQ ID NO: 28384 - DNA, 260 bp, Unknown
  Description of Unknown: RightRegion for integrase B2385 sequence
gacactgaagaagcagaacttaaactatatgagcctggagaaataaaaaaaattaactaatagcttgtacttaaatggtaacatgcaaggtgaaaacaatatgttgcattttagaacaccttgcatgcccagtatctaaaagaacaatattttctgcaaattcccttaaagcatattgctgacataccttttgctttaacttatctgtattaacatcctctggtggaacctttaaaacaacaactccagtttcctctaac

SEQ ID NO: 28385 - DNA, 260 bp, Unknown
  Description of Unknown: RightRegion for integrase B2386 sequence
tcaaaagagaaaatcaaggtggtcttcattggaggacttgaagtaactcaaaagctctgatcctattcatctaaaccacgagtttatagtttgcgcgggaatatcaaaaacctcttttgttcaacacggcataagcataagaggttatgaatttttgagtggacatcaatcaaatatataagcagggaatcatgtcgttgttattccggcaattccaaatactaaccggcatagtacgatctttgcacatgggtgattgt

SEQ ID NO: 28386 - DNA, 260 bp, Unknown
  Description of Unknown: RightRegion for integrase B2387 sequence
gagtctgagtgtaccaagtcggagcaagctttgtatcgcttgctccgacttattttataagtcagagcgcgctcacaccgctgcgcctccttttcaccccgcaaacgctttgccggtttgcggggcgaggagacggggactttggaatgtgggcatctttttattggtgccccttcgatttgcggtcaaggtattctgcggtgagtttggcgttttacacatagtcgaaagtatttccttagtcaaaacggaaaaacaaa

SEQ ID NO: 28387 - DNA, 260 bp, Unknown
  Description of Unknown: RightRegion for integrase B2388 sequence
aacccggtgtactttttcaagaaagtgttcgccgtggtggtaaacttcacgcggaaatagtgaaaaataaaagcgtcagggcttaggctctggcgcttttgttatgcccggtcgtctctcgataaggctcgagaaatagagcctgctcagctcggcagctatcaccgttcctctctggcctcctcggccgcgtggctattgtttacgggttgcacgggactggctgcggcgcctgctgccttcttgtctcgttttaaggt

SEQ ID NO: 28388 - DNA, 260 bp, Unknown
  Description of Unknown: RightRegion for integrase B2389 sequence
cagtgtcatcaaggctttccgggctttttcagctcggaaatttttttatttttccattgatgacagacgcggtttttacgcagcgttgcggacttgaaccgcgacaaagccattttatgtgcagcttgcagtgtggtaagcacacttgtcgtatgaaagcactgcgattctcaaaaaataaatatcacaagaatttaagcgccgggtcgttggttttgcagaatcaacgctccggcgcttttgtcatatctggaggtgag

SEQ ID NO: 28389 - DNA, 260 bp, Unknown
  Description of Unknown: RightRegion for integrase B2390 sequence
tccaaagagaagatcaaggtggtcttcgtcggcggtctcgaagtaacacaactcatgtgattgcttcataccctcctttcacacataccgccccgccttatgacagtagccataaggcggggcggtatgcactaaataagccttgataacttaaatctaaaaaccatattcttttgccctgctaccaatattgaaatatgccatatttctttttccctctctcattgaactattccccagcttatggtataattatattg

SEQ ID NO: 28390 - DNA, 260 bp, Unknown
  Description of Unknown: RightRegion for integrase B2391 sequence
aacccggtgtactttttcaagaaagtgttcgccgtggtggtaaacttcgcgcggagataacgaaaaataaaagcgtcagggcttaggctctggcgcttttgttatgcccggtcgtctctcgatatggctcgagaaatagagcctgctcagctcggcagctatcaccgttcctctctggcctcctcggccgcgtggctattgtttacgggttgcacgggactggctgcggcgcctgctgccttcttgtctcgttttaaggt

SEQ ID NO: 28391 - DNA, 260 bp, Unknown
  Description of Unknown: RightRegion for integrase B2392 sequence
aacacttttgtcgaacacggctcgatcttgttgcgaacgaagtactacccgttcccgtgagggaacgggtagtttcttttactttaagtttctcagtcttcgtcgccacaaacgaccgccctgtaatagtttgccaatttccccggtgctgcgtccggatcgtcgaggaaagcagcagccatagcggtgtagaaatcaactgtattcacgttgaactttttggcgacattgctgaaatcggaatacatcatgttgagcgc

SEQ ID NO: 28392 - DNA, 260 bp, Unknown
  Description of Unknown: RightRegion for integrase B2393 sequence
acctgggacggcaaaaacgtgtctatcgaagtattcggagaaaaaacgctcccaaaatagcgggggcgttgccgtcgcggaaaggtaggtttatccaccctcccacagcggcaacgcccctctacaccgccacgcaaaacctacttgcttccagtctccctgccgataccattgagcagcgcctcaaatatgcccgccttcatgccggcttgagcggcgaggctctcgcaagccttatgggtatcaataaggattcctac

SEQ ID NO: 28393 - DNA, 260 bp, Unknown
  Description of Unknown: RightRegion for integrase B2394 sequence
aacccggtgtactttttcaagaaagtgttcgccgtggtggtaaacttcacgcggaaatagcgaaaaataaaagcgtcagggcttaggctctggcgcttttgttatgcccggtcgtctctcgatagggctcgagaaatagagcctgctcagctcggcagctatcaccgttcctctctggtctcctcggccgcgtggctattgtttacgggttgcacgggactggctgcggcgcctgctgccttcttgtctcgttttaaggt

SEQ ID NO: 28394 - DNA, 260 bp, Unknown
  Description of Unknown: RightRegion for integrase B2395 sequence
tccaaggagaagatcaaggtggtcttcgttggcggcctcgaagtcactcaaaccatatgaatttctcataaacctctgttacacggaataaaaaagccggacgaaatcgcccagcggggtagtagcacacaaaatcctctctatgagtgatgatatattaaaacgcttccaataagtccgtttgaacagcgtttttctcataattcgcgttgataccagaatcaattttgcgcatagtacttgacactaccaggatataa

SEQ ID NO: 28395 - DNA, 260 bp, Unknown
  Description of Unknown: RightRegion for integrase B2396 sequence
acttgggacggcaaaaacgtgtccatcgaagtattcggagaaaaaacgctcccaaaatagcgggggcgttgccgtcgcggaaaggtaggtttatccaccgtaatgacgcccttgccgatgtactctacgcagcgactatccaccaacaggatgtcgatgggtacgtcgatcttgcagcgcacgcgggcgaagcagggacggtcgcacaggcgttccacggaaaggttacggatggtaccttccgtagtggtggagcggca

SEQ ID NO: 28396 - DNA, 260 bp, Unknown
  Description of Unknown: RightRegion for integrase B2397 sequence
cgggtacgttttttgtttatcggcggttttgcggaaagagtacacagagcggtaaaatgagatacattttcgttatagcttaaaatcgccgcacagagcaattatacaatttactctgtgcggcgattttaatatatttttgtgattacgccagaagcataatcaagtgagttccagcctgaagaagtaactggaagctgatttatattaaagtatagcatttttaaaaattgattgtgagaacaaatcagaacagtgtg

SEQ ID NO: 28397 - DNA, 260 bp, Unknown
  Description of Unknown: RightRegion for integrase B2398 sequence
gggggccatgacgcttcctctgtgccgatgtcggtcagcagtcccttgagttcggggtagggcatggagtagcgctgggaaagatagcgcagcgatgcacccaattctccgtctgggccaccggataccaattaaccataaaaatggcaggctaaaggacgaggcggtagtggacggtcagggtgttggcggctttgttccatgcgatagtatcgacgacgctgcggacggcggcgttcttttcggcggcggtggcgtcg

SEQ ID NO: 28398 - DNA, 260 bp, Unknown
  Description of Unknown: RightRegion for integrase B2399 sequence
ggggttcatgacgcttcctctgtaccgatgtcggtcagcagtcccttgagttcggggtagggcatggagtagcgctgggaaagatagcgcagcgatgcaccaagctccccgtctgggcctccatataccaattaaccataaacatgacaggctaaaggacgaggcggtagtggacggtcagggtgttggcggctttgttccatgtgatattttcggcaacgctgcggacggcggcgttcttttcggcgacggtggcgtcg

SEQ ID NO: 28399 - DNA, 260 bp, Unknown
  Description of Unknown: RightRegion for integrase B2400 sequence
aacccggtgtactttttcaagaaagtgttcgccgtggtggtaaacttcacgcggaaatagcgaaaaataaaagcgtcagggcttaggctctggcgcttttgttatgcccggtcgtctctcgatagggctcgagaaatagagcctgctcagctcggcagctatcaccgttcctctctgacctcctcggccgcgtgactattgtttacgggttgcacgggactggctgcggcgcctgctgccttcttgtctcgttttaaggt

SEQ ID NO: 28400 - DNA, 260 bp, Unknown
  Description of Unknown: RightRegion for integrase B2401 sequence
tttttttgttccagcaaaaagatcaggaatgcacagctcgccatgcaggcgggccagtgacacccccgatctcaatcgaaaccgttatctgatttaacgcttgcagtgttttccgcgccgcgccgacagctccatgccaagaaccgcctgcgtatctctacgctgacggtctttttatgggcgcgggtggattacgcaagccgcgctgctaaaaacagcccactgggctgtttttgcgctgtcttccacgacagcgccgc

SEQ ID NO: 28401 - DNA, 260 bp, Unknown
  Description of Unknown: RightRegion for integrase B2402 sequence
gtgaagattcaaatggtcggaagggtgttcgtattagttttttatttcgattttctgtgatactgagcctctatgcccttgtggtgtaggggcttttgtcgtacttatcgaaaaatgatataatatacctgtatttgatataatccaacaaaagcaagcgaagaaatcctttgtggtgctacaatctaacacaaaggagaaatgaccatgatcaggattcgattgtccactcttcttggcgagaagaagtggactcaggc

SEQ ID NO: 28402 - DNA, 260 bp, Unknown
  Description of Unknown: RightRegion for integrase B2403 sequence
aaaggtctacaatactacaaccctccctataaaatagacatcgaccttaagtgcgattaatttcgggatgatgtaacgtctcactcatggggcactacttgatgccgatactattatatcaaggaaaaagaagagcctttgtcgtaatgacgcgggctcttcttgatattacttatatctttcttcgagattctttatctcttcgtcgattacagcatcatgcttctcgagcttgtagactcgctcaataacgctgttgt

SEQ ID NO: 28403 - DNA, 260 bp, Unknown
  Description of Unknown: RightRegion for integrase B2404 sequence
agtaatactcaaaatgtaacagtatatttcattggaagtggagacgaaaaaaaaaagtaggttctctacttccagatttattacatttgttgcaaatccaaccacacagcatgaccagtatcaagtaaaactatattctctgcaaactccttaagtgcatattgttgacatacctttgtactaagcttaccatagtttacatcttcatcaggaacctttaaaacaactacccctgttttatccagttgctctctaatttc

SEQ ID NO: 28404 - DNA, 260 bp, Unknown
  Description of Unknown: RightRegion for integrase B2405 sequence
aacccggtgtactttttcaagaaagtgttcgccgtggtggtaaacttcacgtggagatagtgaaaaataaaagcgtcagggcttaggctctggcgcttttgttatgcccggtcgtctctcgatagggctcgagaaatagagcctgctcagctcggcagctatcaccgttcctctctggcctcctcggccgcgcggctattgtttacgggttgcacgggactggctgcggcgcctgctgccttcttgtctcgttttaaggt

SEQ ID NO: 28405 - DNA, 260 bp, Unknown
  Description of Unknown: RightRegion for integrase B2406 sequence
aaaagcatacaattcggccgctgctttggggaaatatatttttctttgcagcccacttgattttttcttttgttatagtataattaactccgcgcttaagcaaaacagggtgccaaccacccacttttttacttttgcgcgttgttttgtgtggaaaaatgatcttgttgagggaacgcatatgaccaaagatttaacgagcggaaatccgttcaaaatcatcctgttgttcaccctgccgctgatgctgggcaacctgt

SEQ ID NO: 28406 - DNA, 260 bp, Unknown
  Description of Unknown: RightRegion for integrase B2407 sequence
gatatagaaaattttgatgaagaagctaaaaaacttttggatatggagttgacattgtaaggtgaaaggagcaatgcagatggtcttacgcaccggcagaacgagctttagaaattgcgaaaacttttaggaaaaagaatataccatgtgacacaatttatttagatattgattatatggatggttttagagtgtttacatgggataataaaaagtttgaaaatcctaaagattttacaaatcaattaaaggaaatggga

SEQ ID NO: 28407 - DNA, 260 bp, Unknown
  Description of Unknown: RightRegion for integrase B2408 sequence
ggcaatactcaaaatgtaacaatatattttattggaagtggagacgaaaaaaaaaagtaggttctctacttccagatttattacatttgttgcaaatccaaccacacagcatgaccagtatcaagtaaaactatattctcagcaaactccttaagtgcatattgttgacatacctttgtactaagcttaccataatttacatcctcatcaggaacctttaaaacaactacccctgttttatctagttgctctctaatttc

SEQ ID NO: 28408 - DNA, 260 bp, Unknown
  Description of Unknown: RightRegion for integrase B2409 sequence
aaatacgaaccgcaggtgtttttcatcaaagaaacgttcgggttggtgtttgagagataaagttcacggctgttgcatcaagcaacagccgcttttctttggcttactccaagcccagttcttttttcagcaatcgaatgccttcggttacagcattcacgcgctgcgttcccatagcagccgcgcacttctcaatatcttcgatctcctgctttgacaggcgaaagccgattttctcggtgcgcgggttatctgtgggc

SEQ ID NO: 28409 - DNA, 260 bp, Unknown
  Description of Unknown: RightRegion for integrase B2410 sequence
ccagctgggctgttgctgttttacatagcacgaccaaggcaaagagaccgcagatcgtagtctgcggtctcttctttttttggtgcgggggattaatgctgtactacatagcagtagtacgccgcggccttgtcctcgacggcgtccttgtcatcgagccaagcgtgcgccatgtccgcgtaaaactcggcgttgccgccaagaccgtactttttcgcgacctcgcaaaaatcggagtacatcgcgcacattatcgcgtg

SEQ ID NO: 28410 - DNA, 260 bp, Unknown
  Description of Unknown: RightRegion for integrase B2411 sequence
gttcggcgactgcgaatcgtctggaattgtattggtgaattcacaccgccacagctttaaatggacagaaaaacggcatagccgcaaaatacgcctatgccgaatttttcaggaattacaaaatccctaagttgtaccgcctttcggagtggattttttatattcagttgtattttattcgactgttatatttggagaaactctcaaaacgctactacagttattacacttgaattcatgcgataacgaaatactttttg

SEQ ID NO: 28411 - DNA, 260 bp, Unknown
  Description of Unknown: RightRegion for integrase B2412 sequence
aaaagcatacaattcagccgctgctttgggggaatatatttttctttgcagcccacttgattttttgttttgttatagtataattaactccgcacttgagcaaaagagggtgccaaccaccctcttttttacttttgcgcgttgttttgtgtggaaaaatgatcttgttgagggaacgcatatgaccaaagatttaacgagcggaaatccgttcaaaatcatcctgttgttcaccctgccgctgatgctgggcaacctgt

SEQ ID NO: 28412 - DNA, 260 bp, Unknown
  Description of Unknown: RightRegion for integrase B2413 sequence
cccctctcccatcaacctctttccgccgacacgtcgtccagcatctcatcgtttcgataacagccgctttttacacgttcttccacgtccactttaattaaacaaacaaaatccccctctcagcaagtcaacgctgaaaaagggggatatgtatcattatatttttttgccggtacgctttttgtcaatcaatttataaattgattccaaagaattttgaacttctttccaaaaatttttttgctctcctcctaaagaca

SEQ ID NO: 28413 - DNA, 260 bp, Unknown
  Description of Unknown: RightRegion for integrase B2414 sequence
gggggccatgacgcttcctctgtgccgatgtcggtcagcagtcccttgagttcggggtagggcatggagtagcgctgggaaagatagcgcagcgatgcacccaattctccgtctgggcctccttataccaattaaccataaaaatggcaggctaaaggacgaggcggtagtggacggtcagggtgttggcggctttgttccatgtgatattttcggcaacgctgcggacggcggcgttcttttcggcggcggtggcgtcg

SEQ ID NO: 28414 - DNA, 260 bp, Unknown
  Description of Unknown: RightRegion for integrase B2415 sequence
ttttttattccagcaaaaaaatcagggggtgcaccgctcgccatgcaggcgggccagtgacacccccgatctcaaacgaaaccgttatttgatttaacgcttgcagtgttttccgcgccgcgccagcagtaaggcaagctgggcggcgaaacggcaagagcgactggatgccgttaacaacgatttgacggcgttgcgtcaatctggtaaaatcaaattgaccggaactgctgttacccctcctgcgttgccaaacaccc

SEQ ID NO: 28415 - DNA, 260 bp, Unknown
  Description of Unknown: RightRegion for integrase B2416 sequence
ttgttttggggtaaaatcgggtgcgaatcaactaccaatttcagctgtattgtgctataatggaagcgaaaacggcggagggggaacggaaaatgaaaaagctgcttgctgtgtgcctgatggcgctcgtttgctgggtttgcgcggggtacgcggaagaaacgcgggtcggcgatacggtcatttttgggcagtatgagcaggatggcaatcttgataacggcagtgagcctattgcgtggcaggtgctggatgtgcag

SEQ ID NO: 28416 - DNA, 163 bp, Unknown
  Description of Unknown: RightRegion for integrase B2417 sequence
agcgaggggatagtagtagagaaaactcagtatgtatctagggagaaatggcgcaggtaaatctaccacattgaaaatgctgaccggtatgatgaaaccaactgcaggcaagatttactttgatggaaaacttttggataggaaagatttatcaaaaatagga

SEQ ID NO: 28417 - DNA, 100 bp, Unknown
  Description of Unknown: RightRegion for integrase B2418 sequence
agcgaggggatagtagtagagaaaactcagtatgtatctagggagaaatggcgctggtaaatctaccacattgaaaatgctgaccggtatgatgaaacca

SEQ ID NO: 28418 - DNA, 260 bp, Unknown
  Description of Unknown: RightRegion for integrase B2419 sequence
ttgttttgggggaaaaacggctgcgaatcaactaccaatttcagctgttttgtgctataatggaagcgaaaacggcggagggggaacggaaaatgaaaaagctgcttgctgtgtgcctgatggcgctcgtttgctgggtttgcgcggggtacgcggaagaaacgcgggtcggcgatacggtcatgttcgggcaatatgaacaggatggcaatcttgataacggcagtgagcccattgcgtggcaggtgctggatgtgcag

SEQ ID NO: 28419 - DNA, 101 bp, Unknown
  Description of Unknown: RightRegion for integrase B2420 sequence
gaaaaccccgcagtcaaaatgctgcggggttcgagtgaagattgtttggtgacccggtagggattcgaaccctagacctactgattcgtagtcagtcactc

SEQ ID NO: 28420 - DNA, 260 bp, Unknown
  Description of Unknown: RightRegion for integrase B2421 sequence
ttttcggaactacaaaatttttcgcatacgggcggcagcggtctacccctgccaaggtaagccgtacactttcgggtgtgcggcttttcttgttggctgttcggcgtgagctccagtggcgctgtaaaagcatacaattcagccgctgctttggggaaatatatttttctttgcagcccacttgattttttgttttgttatagtataattaactccgcgcttgagcaaaacaggctgccaaccaccctgttttttacttt

SEQ ID NO: 28421 - DNA, 123 bp, Unknown
  Description of Unknown: RightRegion for integrase B2422 sequence
agcgaggggatagtagtagagaaaactcagtatgtatctagggagaaatggcgctggtaaatctaccacattgaaaatgctgaccggtatgatgaaaccaactgcaggaaagatttactttga

SEQ ID NO: 28422 - DNA, 100 bp, Unknown
  Description of Unknown: RightRegion for integrase B2423 sequence
gaaaaccccgcagtcaaaatgctacggggttcgagtgaagattgtttggtgacccggtagggattcgaaccctagacctactgattcgtagtcagtcact

SEQ ID NO: 28423 - DNA, 260 bp, Unknown
  Description of Unknown: RightRegion for integrase B2424 sequence
ttgttttgggggaaaaacggctgcgaatcaactaccaatttcagctgtattgtgctataatggaagcgaaaacggcggagggggaacggaaaatgaaaaagctgcttgctgtgtgcctgatggcgctcgtttgctgggtttgcgcggggtacgcggaagaaacgcgggtcggcgatacggtcattttcgggcaatatgaacaggatgccaatcttgataacggcagcgagcccattgcgtggcaggtgctggatgtgcag

SEQ ID NO: 28424 - DNA, 260 bp, Unknown
  Description of Unknown: RightRegion for integrase B2425 sequence
agcgaggggatagtagtagagaaaactcagtatgtatctagggagaaatggagctggtaaaagcacattgctccacaatatccgtgaaaaacttaagaaagaagacattccaactttcatttatgataacgagaaagacggtggacataattccattggagaaagtatgttttacggcgatgttgcattaggagcaaccgcattgtgttcttctgaaggtgagaacatcacaataaaccttggcaagattgcctcgaaac

SEQ ID NO: 28425 - DNA, 260 bp, Unknown
  Description of Unknown: RightRegion for integrase B2426 sequence
ttttccgtcaaaaatggggagccagtcattttgcaaccgctgcgttcgcataccgcataaaaaagttcgggataatccgaattttatcggattatcccgtatttggtggacctgaagagactcgaactctcgacctctcggatgcgaaccgaacgctctcccagctgagctacaggcccttattgacttttttggcggcatagatgcgaaccatctgccggacgcttgcgctacatccccaaatttgggggcatagaatt

SEQ ID NO: 28426 - DNA, 260 bp, Unknown
  Description of Unknown: RightRegion for integrase B2427 sequence
atcaacatccgtttcaaaatgggcatagaaattgctgaagaattgaagtatgaggaataaccgcatagcctgcgccaccatgagcggcgcgggctttttatatgctcgatgctccaaaccggcgatttgcctagctttttggatcgacattgagattttggacattttatttgggaagtcccaaaccgcagtgtctttctttttatccgtttaactgcgcagcatatacttcttcgacctgatatggggttttcatcgca

SEQ ID NO: 28427 - DNA, 260 bp, Unknown
  Description of Unknown: RightRegion for integrase B2428 sequence
gggccacgcttcccgcacagggaatgggagatgcaggagggggctatggcccctccttagaccgtggattgttgctccatccttgtgcaggcgcagaaggtttcgggcctgcgggcgcgaccaaaaggctttccaatcgccctttggaagccttcggccatcatacttggttggagcttttgtaagccaagatgccgggaggctcttctttggcgtctcagcttgaagaaataggcttttttcagcaggtgaaaggggaa

SEQ ID NO: 28428 - DNA, 260 bp, Unknown
  Description of Unknown: RightRegion for integrase B2429 sequence
agcgaggggatagtagtagagaaaactcagtatgtatctagggagaaacggagcaggtaagactacttttttaagattagtcacagggcttgcgtttccaacaagtggtacactttctttatggggaaattctggaacagaagaattgcagaaacagcgtaaacgaattggaagtatgattgaaacgcctgctctattcccgtcaatgactgcctatcaaaatatggaagtacagcgtattcaacgaggcatctgttgct

SEQ ID NO: 28429 - DNA, 100 bp, Unknown
  Description of Unknown: RightRegion for integrase B2430 sequence
agtgaggggatagtagtagagaaaactcagtatgtatctagggagaaatggcgcaggtaaatctaccacattgaaaatgctgaccggtatgatgaaacca

SEQ ID NO: 28430 - DNA, 260 bp, Unknown
  Description of Unknown: RightRegion for integrase B2431 sequence
ttgttttgggggaaaaacggctgcgaatcagctaccaatttcagctgtattgtgctataatggaagcgaaaacggcggagggggaacggaaaatgaaaaagctgcttgctgtgtgcctaacggcgctcgtttgctgggtttgtgcggggtacgcggaagaaacgcgggtcggtgatacggtcatgttcgggcaatatgaacaggatggcaatcttgataacggcagtgaacctattgcgtggcaggtgctggatgtgcag

SEQ ID NO: 28431 - DNA, 260 bp, Unknown
  Description of Unknown: RightRegion for integrase B2432 sequence
agtgaggggatagtagtagagaaaactcagtatgtatctagggagaaacggagccggtaaaacaacctgtcttaagatgattagcggactgtcaacaccgtcttatggcgaaatagaaatgtttgggtataagagaaaggacttacaaaaggtacgttcaagagtagggtgtcttatagaagctcccggactttatggcaatatgtcggcatatgacaatctgaacattaaatgtaagcttacggggattaagaaaaaag

SEQ ID NO: 28432 - DNA, 260 bp, Unknown
  Description of Unknown: RightRegion for integrase B2433 sequence
gacggtgagcttattcagaagctcgatgtttactataaattcgtcggcagactggattaattttttgttactatgagatgttccgttgggtgggatcaacagaagcaggcacgcttgatgaaccctgacgcacatacacaccgtccggtctgattcctctggatttgagataataaggctttcctgcgccagatgaaacctcaatcctgatcagctatattgactcagataaatcaagagtaaagtgtatttatttggca

SEQ ID NO: 28433 - DNA, 206 bp, Unknown
  Description of Unknown: RightRegion for integrase B2434 sequence
agcgaggggatagtagtagagaaaactcagtatgtatctagggagaaatggtgctggtaaatctactacattgaaaatgctgaccggtatgatgaaaccaactgcaggaaagatttaccttgatggaaaactatggaataggaaggatttgtcaaaaataggagcgttaattgaaaatccgcctatttatgaaaatctttccgcca

SEQ ID NO: 28434 - DNA, 260 bp, Unknown
  Description of Unknown: RightRegion for integrase B2435 sequence
ttgttttggggaaaaatcggctgcgaatcaactaccaatttcagctgttttgtgctataacggcagcgagcccttgcgtggctggtgttggatgtgcagggcggcgattgccccggtgacgctggcggatacggcggcggatgggaatccggaatggcagaatacggatgctgaaccggcggaaacgcgcgtttttttgctcagctacgcacaggtgatgcaatatcttccggagcaggagcagcggaaagtcagcggca

SEQ ID NO: 28435 - DNA, 109 bp, Unknown
  Description of Unknown: RightRegion for integrase B2436 sequence
tccaacaaggaaatcgaaatcgagttcgagtgcggaataacggtaagagaaactttataagcaaacgaccgactgtgttcataagagtgtggtcggtcattttttcgtt

SEQ ID NO: 28436 - DNA, 260 bp, Unknown
  Description of Unknown: RightRegion for integrase B2437 sequence
ttgttttgggggaaaaacggctgcgaattaactaccaatttcagctgttttgtgctataatggaagcgaaaacggcggagggggaacggaaaatgaaaaagctgcttgctgtgtgcctgacggcgctcgtttgctgggtttgcgcggggtacgcggaagaaacgcgggtcggcgatacggtcatgttcgggcaatatgaacaggatggcaatcttgataacggcagcgagcccattgcgtggcaggtgctggatgtgcag

SEQ ID NO: 28437 - DNA, 260 bp, Unknown
  Description of Unknown: RightRegion for integrase B2438 sequence
gtatgggatgggaataatatagatattatattattcggttcaaaacctatagataaatgaagagaaatgtttccacaatgtgagtatagaattttcaatacatctagcagcatatgttgctagctttgtccctttggatgtatcaaaagaggtaatccccttaataagtccaatagttcctgtagaaataaggtcgtccatatctttatttaaattactatactttttaacaatgtgtgccactaatcttaaattacgtt

SEQ ID NO: 28438 - DNA, 260 bp, Unknown
  Description of Unknown: RightRegion for integrase B2439 sequence
agcgaggggatagtagtagataaaactcagtatgtatctagggagaaatggtgccggtaagacaacaacaatcaattctatactagatattatacatcgagatagagggaacattaaatttttcggaaaatctttagctggaaatgaaaaagaaattaaaaatcgtataggaattgtttttgatgatggctatttttacgatgaattaagtatggaagagatgaaaagtattattgctccttcatatagcagatggtctg

SEQ ID NO: 28439 - DNA, 260 bp, Unknown
  Description of Unknown: RightRegion for integrase B2440 sequence
ttgttttgggggaaaaacggctgcgaatcaactaccaatttcagctgtattgtgctataatggaagcgaaaacggcggagggggaacggaaaatgaaaaagctgcttgctgtgtgcctgatggcgctcgtttgctgggtttgcgcggggtacgcggaagaaacgcgggtcggcgatacggtcattttcgggcaatatgaacaggatggcaatctggacaacggcagcgagcccattgcgtggcaggtgctggatgtgcag

SEQ ID NO: 28440 - DNA, 260 bp, Unknown
  Description of Unknown: RightRegion for integrase B2441 sequence
aaggacggaacaataaaggtgataacgaaattcggaacagaagcaaccgaaactgtataaatgaaagccggcagtctgactgtcggctttttacataggcaaatgaatttcttgcatttacggttgatttaatgtataataacaaacaagaaaaccaatgcgattaaacaatgggaattgtgctatttcgtcccgacaaatatgagagacgaatagatatatgcaatgagccgaaaagtgcttgttttaagggttgaaac

SEQ ID NO: 28441 - DNA, 260 bp, Unknown
  Description of Unknown: RightRegion for integrase B2442 sequence
aacattgtttggtttggtcatgtgtttaagatcagaataagactgccggaaagctattaatgccgtttcggcggtcttattctattaacaataaaaaacagcacgaatgcgatatatgttgcattcgtgctgttttttttcgcgaaacaaatgtctttacacttaaaatacttattatgtatttggcgcaatgatattttttgctctcactttatctactacggtttgataaacatcaatgttgtattccggagccatct

SEQ ID NO: 28442 - DNA, 260 bp, Unknown
  Description of Unknown: RightRegion for integrase B2443 sequence
agcgaggggatagtagtagagaaaactcagtatgtatctagggagaaatggagcaggtaaatcaacattaatcaagtgcatgtgcggagtaattgatgcagatgagggacaacttgaagtagatgatcaggtggtaaaaaaattagacgatgttttggttcttggatttatgaatcaggatcaaaatgtttacaatgaaatcaaaattcgagatttgacgaattttgtaaaagatgtgatgaagaaaaaatttgatcagg

SEQ ID NO: 28443 - DNA, 260 bp, Unknown
  Description of Unknown: RightRegion for integrase B2444 sequence
agcgaggggatagtagtagagaaaactcagtatgtatctagggagaaatggggccggtaagaccacactgtttaactccatcagcggtgcccacaccctgacagaaggaaatgtgatttttaagggtaaggacatcaccagcatgaagccttacgacatatgtaaactgggaatcggaaggacattccagattccccagtccttaaacgatatgatggtttacgaaaatgttctggtgggcgccctgtgcaagcgccata

SEQ ID NO: 28444 - DNA, 260 bp, Unknown
  Description of Unknown: RightRegion for integrase B2445 sequence
agtgaggggatagtagtagagaaagctcagtatgtatctagggagaaatggatcaggtaaatctactattatgaatataatgtcagatgttttggatatgagttcaggcaaaattttatataatggaactgatataaaagaattagatgacagatatagggaaaaaattggttttttgccacaaaatgtaggttattatccaaatttcacagcaaaaaaaaccatagagtattttgggtatcttagaggtgtaaataaaa

SEQ ID NO: 28445 - DNA, 260 bp, Unknown
  Description of Unknown: RightRegion for integrase B2446 sequence
ttttcggaacttcaaaatttttcgcatacgggcggcagcggtctacccctgccaaggtaagccgtacaccttcgggtgtgcggcttttcttgttggctgttcggcgtgagctccagtggcgctgtaaaagcatacaattcagccgctgctttgggggaatatatttttctttgcagcccacttgattttttgttttgttatagtataattaactccgcgcttgagcaaaacagggtgccagccaccctcttttttacttt

SEQ ID NO: 28446 - DNA, 260 bp, Unknown
  Description of Unknown: RightRegion for integrase B2447 sequence
agcgaggggatagtagtagagaaaactcagtatgtatctagggagaaatggatctggtaaatctactattatgaatataatgtcagatgttttggatatgagttcaggcaaaattttatataatggaactgatataaaagaattagatgacagatatagggaaaaaattggttttttgccacaaaatgtaggttattatccaaatttcacagcaaaaaaaaccatagagtattttgggtatcttagaggtgtaaataaaa

SEQ ID NO: 28447 - DNA, 260 bp, Unknown
  Description of Unknown: RightRegion for integrase B2448 sequence
agcgaggggatagtagtagagaaaactcagtatgtatctagggagaaacggagcaggtaagactacttttttaagattagtcacagggcttgcgtttccaacaagtggtacactttctttatggggaaattctggaacagaagaattgcagaaacagcgtaaacgaattggaagtatgattgaaacgcctgctctattcccgtcaatgactgcctatcaaaatatggaagtacagcgtattcaacgaggcataccagata

SEQ ID NO: 28448 - DNA, 260 bp, Unknown
  Description of Unknown: RightRegion for integrase B2449 sequence
tccaacaaggaaatcgaaatcgagttcgagtgcggaataacagtaagagaaactttataagcaaacgaccgactgcgttcataagagtgcggtcggtcattttttcgttgattaagacagaagaaatcatacgctccttatcgtgcaaaaatcctttttgtgcaatcgttaaaggtttgaggtttttcaaagcgagtgaagaacaaatccctacggcgatgagcgaagaaacaacaaaaagggtaaactaccacaaaaac

SEQ ID NO: 28449 - DNA, 101 bp, Unknown
  Description of Unknown: RightRegion for integrase B2450 sequence
agtgaggggatagtagtagagaaaactcagtatgtatctagggagaaatggcgctggtaaatctaccacattgaaaatgctgaccggtatgatgaaaccaa

SEQ ID NO: 28450 - DNA, 137 bp, Unknown
  Description of Unknown: RightRegion for integrase B2451 sequence
agcgaggggatagtagtagaaaaagctcagtatgtatctagggagaaacggggcaggtaagacaaccactataaaagcgtgtacagggatcctgaattttgaggagggagatatccttatagatggtgtgtccataa

SEQ ID NO: 28451 - DNA, 260 bp, Unknown
  Description of Unknown: RightRegion for integrase B2452 sequence
ttgttttgggggaaaaacggctgcgaatcaactaccaatttcagctgtattgtgcaataacggcagcaagcccttgcgtggctggtgttggatgtgcagggcggcgattgccccggtgacgctggcggatacggcggcggatgggaatccggaatggcagaatacggatgctgaaccggcggaaacgcgcgtttttttgctcagctacgcgcaggtgatgcagtatcttccggagcaggagcagcggaaagtcagcggca

SEQ ID NO: 28452 - DNA, 260 bp, Unknown
  Description of Unknown: RightRegion for integrase B2453 sequence
agcgaggggatagtagtagagaaaactcagtatgtatctagggagaaacggagccggtaaaacgacctgtcttaagatgattagcggactgtcaacaccgtcttatggcgaaatagaaatgtttgggtataagggaaaggacttacaaaaggtacgttcaagagtagggtgtcttatagaagctcccggactttatggcaatatgtcggcatatgacaatctgaacattaaatgtaagcttacggggattaagaaaaaag

SEQ ID NO: 28453 - DNA, 100 bp, Unknown
  Description of Unknown: RightRegion for integrase B2454 sequence
agcgaggggatagtagtagaaaaaactcagtatgtatctagggagaaatggcgctggtaaatctaccacattgaaaatgctgaccggtatgatgaaacca

SEQ ID NO: 28454 - DNA, 260 bp, Unknown
  Description of Unknown: RightRegion for integrase B2455 sequence
ttgttttgggggaaaaacggctgcgaatcagctaccaatttcagctgtattgtgctataatggaagcgaaaacggcggagggggaacggaaaatgaaaaagctgcttgctgtgtgcctaacggcgctcgtttgctgggtttgtgcggggtacgcggaagaaacgcaggtcggcgatacggtcatgttcgggcaatatgaacaggatggcaatctggacaacggcagcgagcccattgcgtggcaggtgctggatgtgcag

SEQ ID NO: 28455 - DNA, 260 bp, Unknown
  Description of Unknown: RightRegion for integrase B2456 sequence
tccaacaaggaaatcgaaatcgagttcgagtgcgggataacagtaagagaaactttataagcaaacgaccgactgcgttcataagagtgtggtcggtcattttttcgttgattaagacagaagaaatcatacgctccttatcgtgcaaaaatcctttttgtgcaatcgttaaaggcttgcgactttccaaagcgagtgaagaacaaatccccacggcgatgagcgaagaaacaacaaaaagggtaaactaccataaaaac

SEQ ID NO: 28456 - DNA, 100 bp, Unknown
  Description of Unknown: RightRegion for integrase B2457 sequence
agcgaggggatagtagtagaaaaagctcagtatgtatctagggagaaatggcgctggtaaatctaccacattgaaaatgctgaccggtatgatgaaacca

SEQ ID NO: 28457 - DNA, 260 bp, Unknown
  Description of Unknown: RightRegion for integrase B2458 sequence
tccaacaaggaaatcgaaatcgagttcgagtgcgggataacggtaagagaaaccttataagcaaacgaccgactgcgttcgcaagagtgcggtcggtcatttttttcgttgattaaggcagtgagaatcatacgctccttatcgtgcaaaaatcctttttgtgcaatcgttaaaggcttgcgacttttcaaagcgagtgaagaacaaatccctacggcgataagcgaagaaacgacaaaaagggtaaattaccacaaaaa

SEQ ID NO: 28458 - DNA, 260 bp, Unknown
  Description of Unknown: RightRegion for integrase B2459 sequence
tccaacaaggaaatcgaaatcgagttcgagtgcggaataacggtaagagaaactttataagcaaacgaccgactgcgttcataagagtgcggtcggtcattttttcgttgattaagacagaagaaatcatacgctccttatcgtgcaaaaatcctttttgtgcaatcgttaaaggcttgtgacttttcaaagcgagtgaagaacaaatccctacggcgatactcgaagaaacaacaaaaagggtaaactgccacgaaaac

SEQ ID NO: 28459 - DNA, 260 bp, Unknown
  Description of Unknown: RightRegion for integrase B2460 sequence
ttgtttttggggaaaaacggctgcgaatcaactaccaatttcagctgtattgtgcaataacggcagcaagcccttgcgtggctggtgttggatgtgcagggcggcgatttccccggtgacgctggcggatacggcggcggatgggaatccggaatggcagaatacggatgctgaaccggcggaaacgcacgttttcctgctcagctacgcgcaggtgatgcaatatcttccggagcaggagcagcggaaagtcagcggca

SEQ ID NO: 28460 - DNA, 260 bp, Unknown
  Description of Unknown: RightRegion for integrase B2461 sequence
ttgtttttggggaaaaacggctgcgaatcaactaccaatttcagctgttttgtgctataatggaagcgaaaacggcagagggggaacggaaaatgaaaaagctgcttgctgtgtgcctgacggcgctcgtttgctgggtttgcgcggggcacgcggaagaaacgcgggtcggcgatacggtcatttttgggcagtatgagcaggatggcaatttggataacggcagtgagcccattgcgtggcaggtgctggatgtgcag

SEQ ID NO: 28461 - DNA, 81 bp, Unknown
  Description of Unknown: RightRegion for integrase B2462 sequence
agtgaggggatagtagtagagaaaactcagtatgtatctagggagaaatggcgctggtaaatctaccacattgaaaatgat

SEQ ID NO: 28462 - DNA, 260 bp, Unknown
  Description of Unknown: RightRegion for integrase B2463 sequence
agcgaggggatagtagtagagaaaactcagtatgtatctagggagaaatggtgccggtaagactacaacgataagaattcttatggatgtattccgtgccaattcaggagaagttcttcttgatggagaaaagtttaaccagagaaagcatcttataggttatcttccggaagagagaggtctttatcctaagaagaaagtaattgaacagatggtttatcttggaagaatcagaggaatatcaaaatccgaggccgttg

SEQ ID NO: 28463 - DNA, 260 bp, Unknown
  Description of Unknown: RightRegion for integrase B2464 sequence
aaactgatgatacagtttaaatcaggtatcgtagtagaacaggagatccgatacgactgagattacggcgggaatggcagcaagtgaataagaaacgttattcctgccggttgcggtaagaataaaatgcccgatgcggatcgggcgttttattgttgctgcaaatgcacacaggaaggagaaaagaacaatggattggaaaaaatggaatttccggtgaacgcataaaggaagcaataggcgaaattgaaagataccgg

SEQ ID NO: 28464 - DNA, 86 bp, Unknown
  Description of Unknown: RightRegion for integrase B2465 sequence
agcgaggggatagtagtagagaaaactcagtatgtatctagggagaaatggagcaggtaaaacaacaacgctgcggacgcttttag

SEQ ID NO: 28465 - DNA, 260 bp, Unknown
  Description of Unknown: RightRegion for integrase B2466 sequence
agcgaggggatagtagtagagaaaactcagtatgtatctagggaaaaacggagccggtaaaacaacctgtcttaagatgattagcggactgtcaacaccgtcttatggcgaaatagaaatgtttgggtataagggaaaggacttacaaaaggtacgttcaagagtagggtgtcttatagaagctcccggactttatggcaatatgtcggcatatgacaatctgaacattaaatgtaagcttacggggattaagaaaaaag

SEQ ID NO: 28466 - DNA, 100 bp, Unknown
  Description of Unknown: RightRegion for integrase B2467 sequence
gaaaaccccgcagtcaaaatgctgcggggttcgagtgaaaatcatttggtgacccggtagggattcgaaccctagacctactgattcgtagtcagtcact

SEQ ID NO: 28467 - DNA, 260 bp, Unknown
  Description of Unknown: RightRegion for integrase B2468 sequence
agcgaggggatagtagtagagaaaactcagtatgtatctagggagaaatggtgcaggtaagagtactactatcaaatcggtagtgggagtgttagaatttactgagggagagatttatattgatggacattcggtaaaaaaggagcctatggaatgtaagagtataacggcatatattccagataatccagatatatatgaatttcttacaggtattcagtatcttaattttgttgcagatatattcgggattgaacaga

SEQ ID NO: 28468 - DNA, 260 bp, Unknown
  Description of Unknown: RightRegion for integrase B2469 sequence
ttgtatgacggaacggaaattgatcagacagtagggcatggcaacagtatcattgactaaaaccaaaagacgggaaagaaggagaaaatttgatggagaaaaacagtgctcccatcggcggcgtaagtctggctcgggtcgaacagagccgggaacagatgcatcagaagatcgatgatctgtatgacgagctggttcaaaagattcttatggaggaaaagaggctgacaatggacgacggtgaacaactgttgtcactg

SEQ ID NO: 28469 - DNA, 260 bp, Unknown
  Description of Unknown: RightRegion for integrase B2470 sequence
agcgaggggatagtagtagaaaaagctcagtatgtatctagggagaaacggagcaggtaagactacttttttaagattagtcacagggcttgcgtttccaacaagtggtacactttctttatggggaaattctggaacagaagaattgcagaaacagcgtaaacgaattggaagtatgattgaaacgcctgctctattcccgtcaatgactgcctatcaaaatatggaagtacagcgtattcaacgaggcataccagata

SEQ ID NO: 28470 - DNA, 260 bp, Unknown; identical to SEQ ID NO: 28446
  Description of Unknown: RightRegion for integrase B2471 sequence

SEQ ID NO: 28471 - DNA, 260 bp, Unknown
  Description of Unknown: RightRegion for integrase B2472 sequence
agcgaggggatagtagtagaaaaagctcagtatgtatctagggagaaacggagccggtaaaacgacctgtcttaagatgattagcggactgtcaacaccgtcttatggcgaaatagaaatgtttgggtataagggaaaggacttacaaaaggtacgttcaagagtagggtgtcttatagaagctcccggactttatggcaatatgtcggcatatgacaatctgaacattaaatgtaagcttacggggattaagaaaaaag

SEQ ID NO: 28472 - DNA, 260 bp, Unknown
  Description of Unknown: RightRegion for integrase B2473 sequence
aaactgctgatacagttccagtcaggcatagtcatggaacaggagattcgatatgagtaaggctgcggcaggaatggcagcaagtaaataggaaacgttgttcctgccagtttatggtaagaataaaatgcccgatgatccgggcgttttattgttggcataaaaataggaaaggacagcaggagcagaaagcatataacggaaaatgagtaaaagaaagtggatataaaaaagtacatgaagtaagtgtgcgacaggag

SEQ ID NO: 28473 - DNA, 260 bp, Unknown
  Description of Unknown: RightRegion for integrase B2474 sequence
agtgaggggatagtagtagaaaaagctcagtatgtatctagggagaaacggagcaggtaagactacttttttaagattagtcacagggcttgcgtttccaacaagtggtacactttctttatggggaaattctggaacagaagaattgcagaaacagcgtaaacgaattggaagtatgattgaaacgcctgctctattcccgtcaatgactgcctatcaaaatatggaagtacagcgtattcaacgaggcataccagata

SEQ ID NO: 28474 - DNA, 260 bp, Unknown
  Description of Unknown: RightRegion for integrase B2475 sequence
gcggcctgtaactgctggaattgctcaaaggaaacgttgaactcgacctctagcgtatagtcgcggtaaacgcggacggacttgataaactgcgacacgatcactttcttagctgcaaagctgcagttatcgtagaggtctgcccacgttttcagcttgtcatattcctgctgttctgtctccatgtctgcggtacggctctcaagttcctgccgtgccgcttccgctgtctgtgacagagcttctacgtcggtctgcgc

SEQ ID NO: 28475 - DNA, 260 bp, Unknown
  Description of Unknown: RightRegion for integrase B2476 sequence
ttgttttgggggaaaaacggctgcgaatcaactaccaatttcagctgtattgtgctataatggaagcgaaaacggcggagggggaacggaaaatgaaaaagctgcttgctgtgtgcctgatggcgctcgtttgctgggtttgcgcggggtacgcggaagaaacgcgggtcggcgatacggtcatgttcgggcagtatgagcaggatggcaatcttgataacggcagcgagcccattgcgtggcaggtgctggatgtgcag

SEQ ID NO: 28476 - DNA, 260 bp, Unknown; identical to SEQ ID NO: 28446
  Description of Unknown: RightRegion for integrase B2477 sequence

SEQ ID NO: 28477 - DNA, 260 bp, Unknown
  Description of Unknown: RightRegion for integrase B2478 sequence
tccaacaaggaaatcgaaatcgagttcgagtgcgggataacagtaagaaaaactttataagcaaacgaccgactgcgttcgtaagagtgcggtcggtcattttttcgttgattaagacagaagaaatcatacgctccttatcgtgcaaaaatcctttttgtgcaatcgttaaaggtttgagattttccaaagcgagtgaagaacaaatccctacggcgatactcgaagaaacaacaaaaagggtaaactgccacgaaaac

SEQ ID NO: 28478 - DNA, 260 bp, Unknown
  Description of Unknown: RightRegion for integrase B2479 sequence
ttttcggaactacaagatttttcgcatacgggcggcagcggtctacccctgccaaggtaagccgtacaccttcgggtgtgcggcttttcttgttggctgttcggcgtgagctacagtggcgctgtaaaagcatacaattcagccgctgctttgggggaatatatttttctttgcagcccacttgattttttcttttgttatagtataattaactccgcgcttgagcaaaacagggtgccaaccaccctcttttttacttt

SEQ ID NO: 28479 - DNA, 134 bp, Unknown
  Description of Unknown: RightRegion for integrase B2480 sequence
agcgaggggatagtagtagagaaaactcagtatgtatctagggagaaatggcgctggtaaatctaccacattgaaaatgatgaccggtatgatgaaaccaactgcaggaaagatttactttgatggaaaacttt

SEQ ID NO: 28480 - DNA, 100 bp, Unknown
  Description of Unknown: RightRegion for integrase B2481 sequence
gaaaaccccgcagtcaaaatgctgcggggttcgagtgaagattgtttggtgacccggtagggattcgaaccctagacctactgattcgtagtcagtcact

SEQ ID NO: 28481 - DNA, 260 bp, Unknown
  Description of Unknown: RightRegion for integrase B2482 sequence
aagctgctgatacagttccaatcaggtattgtcatggaacaggagattcgatatgagtaaggctgcggcaggaatggcagcaagtaaataggaaacgttgttcctgccagtttatggtaagaataaaatgcccgatgatccgggcgttttattgttggcataaaataggaaaggacagcagaaagcatataacggaaaatgagtaaaagaaagtggatatagaaaaagcacatgaagtaagtgtgcgacaggaggagaaa

SEQ ID NO: 28482 - DNA, 260 bp, Unknown
  Description of Unknown: RightRegion for integrase B2483 sequence
tcattctttttcgtgaagcactgtgtcggatttgttttcatagtagaggacgtaggttaaaccgcgtcctcttttttgggtgtctcgtaagtaagagcctgtttggaatctccaatgccagcagtggtcgggtcagtcacgataccgagaatcgtgaggactgcgaacagggcatttacgactgccaacagcttgtctcccagctcacccaaatcgagagtgtaaccgaagacagcggcaatcacctgtaccagcagaag

SEQ ID NO: 28483 - DNA, 109 bp, Unknown
  Description of Unknown: RightRegion for integrase B2484 sequence
cgtaaaagagtacatctatgttgcaagcatgctgtttggcttgttcttcggcgcaggtaacctcatcttccccactgcagtgggtcagcttgccggccgcaatatgtgg

SEQ ID NO: 28484 - DNA, 260 bp, Unknown
  Description of Unknown: RightRegion for integrase B2485 sequence
ttgttttgggggaaaaacggctgcgaatcagctaccaatttcagctgtattgtgctataatggaagcgaaaacggcggagggggaacggaaaatgaaaaagctgcttgctgtgtgcctaacggcgctcgtttgctgggtttgtgcggggtacgcggaagaaacacaggtcggcgatacggtcatgttcgggcaatatgaacaggatggaaatctggacaacggcagtgagcccattgcgtggcaggtgctggatgtgcag

SEQ ID NO: 28485 - DNA, 260 bp, Unknown
  Description of Unknown: RightRegion for integrase B2486 sequence
agcgaggggatagtagtagagaaagctcagtatgtatctagggagaaatggatctggtaaatctactattatgaatataatgtcagatgttttggatatgagttcaggcaaaattttatataatggaactgatataaaagaattagatgacagatatagggaaaaaattggttttttgccacaaaatgtaggttattatccaaatttcacagcaaaaaaaaccatagagtattttgggtatcttagaggtgtaaataaaa

SEQ ID NO: 28486 - DNA, 101 bp, Unknown
  Description of Unknown: RightRegion for integrase B2487 sequence
agcgaggggatagtagtagagaaaactcagtatgtatctagggagaaatggcgctggtaaatctaccacattgaaaatgctgaccggtatgatgaaaccaa

SEQ ID NO: 28487 - DNA, 260 bp, Unknown
  Description of Unknown: RightRegion for integrase B2488 sequence
tctgacactgaagaagcagaacttaaactatatgagcctggagaaataaaaaaaaattaactaatagcttgtacttaaatggtaacatgcaaggtgaaaacaatatgttgcattttagaacaccttgcatgcccagtatctaaaagaacaatattttctgcaaattcccttaaagcacataatggcttttaaaatatccttatatgaaaatttctgtttacatttagcacatgtcataatatttctccttcttaaactta

SEQ ID NO: 28488 - DNA, 260 bp, Unknown
  Description of Unknown: RightRegion for integrase B2489 sequence
ttgtttttggggaaaaacggctgcgaatcaactaccaatttcagctgtattgtgcaataacggcagcaagcccttgcgtggctggtgttggatgtgcagggcggcgattgccccggtgacgctggcggatacggcggcggatgggaatccggaatggcagaatacggatgctgaaccggcggaaacgcacgttttcctgctcagctacgcgcaggtgatgcaatatcttccggagcaggagcagcggaaagtcagcggca

SEQ ID NO: 28489 - DNA, 260 bp, Unknown
  Description of Unknown: RightRegion for integrase B2490 sequence
accatcgtcctcaccgtgaacggattcgtattactcagcccactttctgtttgtgggtaattaaaagcagcagctttttcggctgctgctttttgctgcataaaataatccccaccagcgtttttatgcgcgccggtggggatgctttttgcataacgtattccgttataatctaccatcttcctgcaaaatgagaaaatacttgttatattttctcgtaaaggagcatggctatgattaggattttactgtccacgcgc

SEQ ID NO: 28490 - DNA, 260 bp, Unknown
  Description of Unknown: RightRegion for integrase B2491 sequence
ttgtttttggggaaaaacggctgcgaatcaactaccaatttcagctgtattgtgcaataacggcagcaagcccttgcgtggctggtgttggatgtgcagggcggcgattgccccggtgacgctggcggatacggcggcggatgggaatccggaatggcagaatacggatgctgaaccggcggaaacgcgcgtttttttgctcagctacgcgcaggtgatgcagtatcttccggagcaggagcagcggaaagtcagcggca

SEQ ID NO: 28491 - DNA, 99 bp, Unknown
  Description of Unknown: RightRegion for integrase B2492 sequence
agtgaggggatagtagtagagaaaactcagtatgtatctagggagaaacggagcaggtaagactacttttttaagattagtcacagggcttgcgtttcc

SEQ ID NO: 28492 - DNA, 260 bp, Unknown
  Description of Unknown: RightRegion for integrase B2493 sequence
agtgaggggatagtagtagagaaaactcagtatgtatctagggagaaacggtgcgggtaaaactacatctatccgaattttaatggatgtgtttcctgcaaacagcggtgaagtgctgatcgacggtcagcccatcgattacaataagatcggcatcggatatcttcccgaagaaagaggtttgtatccgaaaaagattatcatcgatcagcttacctattttgcagagctgaaaggcatgagccgcaaagccgccgtgg

SEQ ID NO: 28493 - DNA, 89 bp, Unknown
  Description of Unknown: RightRegion for integrase B2494 sequence
ccaaatcatattgcctatgttgaggactgcacggtcacgggttctgcgctgtgcacataataaaattagcaggaaaagtaagcgatgcc

SEQ ID NO: 28494 - DNA, 260 bp, Unknown
  Description of Unknown: RightRegion for integrase B2495 sequence
tatatgacggaaatacttgaatattcgtatattaaaccggaaattaaaggtaccatatagttaccgatatcggcacggaagagtctgcaccgccatgttgtcatgggttgagaacccaagttattccggggtttttggatatacgtgaatgaatactttcgcatcttttttggtgaaagggacgttcttttcttctttcaggtaatcaatgtggtcaatcagttctttcagtatccggtttttctccggtgcatcgagtg

SEQ ID NO: 28495 - DNA, 260 bp, Unknown
  Description of Unknown: RightRegion for integrase B2496 sequence
aaggagatggaggataatgcagagaaaattgaaatcttcgaagcaagccaatgcatttgaaacgttgttacatagtgattttaaatgaagtgacatatttggtgtggactggcaggagaaggtgcttaagcaagtgaaacggttgaaaaagctcttctttatcttatgctattttgaaatttgaaatctgcttttatatttataaaaggtggtatgcggtaaccactttacggttttgcatgaaaatgctgtcttttcga

SEQ ID NO: 28496 - DNA, 260 bp, Unknown
  Description of Unknown: RightRegion for integrase B2497 sequence
gaaggaggaaagctcaccatcatcttcggaggcggctatgagatagaggaacagatctgatcagagatcgtcctcttcgacttcggagtcgtcattccagtcctcatccgatacggacgaatcctccaagccggagaagatagaagactcccgtgcatgcagcttattgatcgaaagccgctgtgcggggcttttcttcttgccgttatattcaatcagcatcgcctccgcatagcccatcgaaccggcatgtctctctt

SEQ ID NO: 28497 - DNA, 260 bp, Unknown
  Description of Unknown: RightRegion for integrase B2498 sequence
ccaaatcatattgcctatgttgaggactgcacggtcacgggttctgcgctgtgcacataataaaattagcaggaaaagtaagcgatgcctgtacgcggctgattgtcacacaaccatcttccagcggctgacgcagcacctccaaagcagtacgcgaaaattcaggaaactcatctaaaaataaaacaccatgatggctcaacgtcacttctccaggccgcggcacactgcctccacctataagcgcgcttgaagaaatc

SEQ ID NO: 28498 - DNA, 89 bp, Unknown
  Description of Unknown: RightRegion for integrase B2499 sequence
ccaaatcatattgcctatgttgaggactgcacggtcacgggttctgcgctgtgcacataataaagttagcaggaaaagtcagcgacgcc

SEQ ID NO: 28499 - DNA, 260 bp, Unknown
  Description of Unknown: RightRegion for integrase B2500 sequence
caaatggtcggtaatgtgttcgttttgttttgcgagattccaaatgtcaccctgacatgaaaaaagcgcccacgttaccatcatcggtagcgtgggcgcttttctatcttaatttaccgaaaatcggaaaaaactcccgaaatatgaagttttctgccaaaatgcagacaagccgggtacatatcggctaaaatttcggtaaaaggagacaaaaggctatgattagaattttgctgtctacccgcctcggcgaaaggcgg

SEQ ID NO: 28500 - DNA, 260 bp, Unknown
  Description of Unknown: RightRegion for integrase B2501 sequence
ggtgtgctggtgtttactattcctcgtagcatactcgcccttttgaatttttcagcctaatattctataactttgcgtaatgaatagatattacgatttttttgtagtacttttaaggatagtgttttagtgttacaatattatttaatgctctaataggttacaacttactgtaagtgcagtttattcctttctgcagtgagggataaattaaaaaaaactcacgttaaattaaacgttgcaaacgcaatgtatgaggt

SEQ ID NO: 28501 - DNA, 260 bp, Unknown
  Description of Unknown: RightRegion for integrase B2502 sequence
caaatggtcggtaatgtgttcgttttgttttgcgagattccaaatgtcaccctgacatgaaaaaagcgcccacgttaccatcatcggtagcgtgggcgcttttctgtcttaatttaccgaaaatcggaaaaaactcccgaaatatgaagttttctgccaaaatgcagacaagccgggtacatatcggctaaaatttcggtaaaaggagacaaaaggctatgattagaattttgctgtctacccgcctcggcgaaagacgg

SEQ ID NO: 28502 - DNA, 260 bp, Unknown
  Description of Unknown: RightRegion for integrase B2503 sequence
ccaaatcatattgcctatgttgaggactgcacggtcacgggttctgcgctgtgcacataataaaattagcaggaaaagtaagcgatgcctgtacgcggctgatcgtcacataaccatcttccagcggctgacgcagcacctccaaagcagtacgcgaaaattcaggaaactcatctaaaaataaaacaccatgatggctcaatgtcacttctccaggccgcggcacactgccgccacctataagcgcgcttgaagaaatc

SEQ ID NO: 28503 - DNA, 260 bp, Unknown; identical to SEQ ID NO: 28502
  Description of Unknown: RightRegion for integrase B2504 sequence

SEQ ID NO: 28504 - DNA, 260 bp, Unknown
  Description of Unknown: RightRegion for integrase B2505 sequence
ttcgatatcgcctctaaaaacctgagcttcgaagagcaggagaaaaaagtatttaattaaaagaaaaaaaatttaatgcttcaacaactctttcttttatctgttcatctggttcttcatgtcttgctagagttaaataatagttttggttatctttccgatataatacaatccaatcacctgtaagtcttttttcttcatgacgctttagatatccatcatctgtaaaaatttgccccatccttccaagggcatattga

SEQ ID NO: 28505 - DNA, 260 bp, Unknown
  Description of Unknown: RightRegion for integrase B2506 sequence
atcgagatggttggttcagtgttcgtcttgttttgttccctaccgaaaataagaaagtaagtaaaaaagacccaaacctcgcatgaaatgaggtttgggtcttttttgttttatttcctgttagatttttccgaaatacggaaaaacttgccggaatagagggtttcttgccaaaatgcagacaagccgaccatgaatcggctaaaatcagcaacaaaggagaccaaaggctatgattagaattttgctgtctacccgcc

SEQ ID NO: 28506 - DNA, 260 bp, Unknown
  Description of Unknown: RightRegion for integrase B2507 sequence
ccaaatcatattgcctatgttgaagactgcacggtcacgggttctgcgctgtgcacataataaaattagcaggaaaagtaagcgatgcctgtacgcggctgatcgtcacataaccatcttccagcggctgacgcagcacctccaaagcagtacgcgaaaattcaggaaactcatctaaaaataaaacaccatgatggctcaatgtcacttctccaggccgcggcacactgccgccacctataagcgcgcttgaagaaatc

SEQ ID NO: 28507 - DNA, 260 bp, Unknown
  Description of Unknown: RightRegion for integrase B2508 sequence
gagtctgagtgtaccaagtcggagcaagctttgtatcgcttgctccgacttattttataatcccaatttcatttcgtgtccctttgcagaagaactatcagtgttcccccaatgtcattaagctaagggctttgtcattgcgagccagtccgcagactggcgcggcaatccgctttttctaacgttttagatgcggattcccacggcagtgacatcggtcactgcctcggaatgacaggtttttcttaactaaatgacat

SEQ ID NO: 28508 - DNA, 260 bp, Unknown
  Description of Unknown: RightRegion for integrase B2509 sequence
cccggcggcaagctggaaatcatcttcggtggcggttaccttgtcgaagaatccgtctaagcgtaggagattgagggatcatccctctttctctttctttatttcatcgtggatgttcttctgaatcgcatcgagaagggcgaccttttgctctgttgaacattccaaccttgagatgtaattataaatcaactgtgcatggacagttgcaacgcgcttggcaagttcctcctgactttcctttgagcgcagcaaatgaa

SEQ ID NO: 28509 - DNA, 260 bp, Unknown
  Description of Unknown: RightRegion for integrase B2510 sequence
caaatggtcggtaatgtgttcgttttgttttgcgagattccaaatgtcaccctgacatgaaaaaagcgcccacgttaccatcatcggtagtgtgggcgcttttctgtcttaatttaccgaaaatcggaaaaaactcccgaaatatgaagttttctgccaaaatgcagacaagccgggtacatatcggctaaaatttcggtaaaaggagacaaaaggctatgattagaattttgctgtctacccgcctcggcgaaaggcgg

SEQ ID NO: 28510 - DNA, 260 bp, Unknown
  Description of Unknown: RightRegion for integrase B2511 sequence
ccccctaagtgttcggatagcttaactattggttcaccaacaataaaaggacggctttagccgtccttttattgttgaataaccgatattgcgactcgaactccctcaatccgctgtcaagcgggaaacggtcatgcccgggtcaaggtgcgcagcagcttgacgggcgaggaaacgggaagaaaaaactttcgggagcgtgattccgagcctctttgcggaaagataaacataaaaatctgcaatcattataccgcaaa

SEQ ID NO: 28511 - DNA, 260 bp, Unknown; identical to SEQ ID NO: 28509
  Description of Unknown: RightRegion for integrase B2512 sequence

SEQ ID NO: 28512 - DNA, 118 bp, Unknown
  Description of Unknown: RightRegion for integrase B2513 sequence
caaatggtcggtaatgtgttcgttttgttttgcgagattccaaatgtcaccctgacatgaaaaaagcgcccacgttaccatcatcggtagcgtgggcgcttttctatcttaatttacc

SEQ ID NO: 28513 - DNA, 109 bp, Unknown
  Description of Unknown: RightRegion for integrase B2514 sequence
ttcaacatcgactttaagcaattcagcttggggttggacattgctgaaattgccgcataaacgaaaaaacccgtttcacaaggaaacgagtttttcgctgcttcttata

SEQ ID NO: 28514 - DNA, 260 bp, Unknown; identical to SEQ ID NO: 28508
  Description of Unknown: RightRegion for integrase B2515 sequence

SEQ ID NO: 28515 - DNA, 260 bp, Unknown; identical to SEQ ID NO: 28509
  Description of Unknown: RightRegion for integrase B2516 sequence

SEQ ID NO: 28516 - DNA, 260 bp, Unknown
  Description of Unknown: RightRegion for integrase B2517 sequence
tttatcacgatgataggtaatgtgttcgttttgttttgtccgtttccgggcctgaaatagaaataaattaagtctaatttgtgaacaaatagaacatcattagagacacattacaacaaaataagcggcgggcaatccctgaaaagaggaaaagcccgccgctttaattatggattatttaacttgctggtaacttgctggtcagttgcctttgccgatctgcttaataacctgatccgtgccggtcgcagccaggccgg

SEQ ID NO: 28517 - DNA, 260 bp, Unknown
  Description of Unknown: RightRegion for integrase B2518 sequence
cctggcggcaagctggaaatcatcttcggtggcggataccttgtcgaagaatccgtctaagtgtaggagattgagggatcatccctctttctctttctttatttcatcgtggatgtttttctgaatcgcatcaagaagggcgactttttgctctgttgaacactccaatcttgagatgtaattataaatcagccgtgcatggacagttgcaacgcgcttggcaagttcctcctgaccttcctttgagcacggcaaatgaa

SEQ ID NO: 28518 - DNA, 260 bp, Unknown; identical to SEQ ID NO: 28509
  Description of Unknown: RightRegion for integrase B2519 sequence

SEQ ID NO: 28519 - DNA, 109 bp, Unknown
  Description of Unknown: RightRegion for integrase B2520 sequence
ccaaatcatattgcctatgttgaggactgcacggtcacgggttctgcgctgtgcacataataaaattagcaggaaaagtaagcgatgcctgtacgcggctgatcgtcac

SEQ ID NO: 28520 - DNA, 260 bp, Unknown
  Description of Unknown: RightRegion for integrase B2521 sequence
cctggcggcaagctggaaatcatcttcggtggcggataccttgtcgaagaatccgtctaagtgtaggagattgagggatcacccctctttctctttctttattttatcgtagatgttctcctgaatcgcatcgagaagggcgactttttgctctgttgagcactccaaccttgagatgtaattataaatcaactgtgcatggacagttgcaacgcgcttggcaagttcctcctgaccttcctttgagcgcggcaaatgaa

SEQ ID NO: 28521 - DNA, 260 bp, Unknown
  Description of Unknown: RightRegion for integrase B2522 sequence
atcgaaatggttggttcagtgttcgtcttgttttattccctgccgaaaatcagaaagtaagtaaaaaagacccaaacctcgcatgaaatgaggtttgggtcttttttcgtttcatttcctgttagaatttaccgaaatacggaaaaacttgccgaaatagagggtttcttgccaaaatgcagacaagccgaccatgaatcggctaaaattatcggcaaaggagaccaaaggctatgattaggattttgctgtcaacccgc

SEQ ID NO: 28522 - DNA, 260 bp, Unknown; identical to SEQ ID NO: 28509
  Description of Unknown: RightRegion for integrase B2523 sequence

SEQ ID NO: 28523 - DNA, 260 bp, Unknown
  Description of Unknown: RightRegion for integrase B2524 sequence
cctggcggcaagctggaaatcatcttcggtggcggttaccttgtcgaggaatccgtctaagcgtaggagattgagggatcatccctctttctctttctttatttcatcgtggatgtccttctgaatcgcatcgagaagggcgaccttttgctctgttgaacattccaaccttgagatgtaattataaatcaactgtgcatagacagttgcaacgcacttgccaagttcctcctgaccttcctttgaacccagcaaatgaa

SEQ ID NO: 28524 - DNA, 260 bp, Unknown; identical to SEQ ID NO: 28502
  Description of Unknown: RightRegion for integrase B2525 sequence

SEQ ID NO: 28525 - DNA, 109 bp, Unknown
  Description of Unknown: RightRegion for integrase B2526 sequence
aaaaatccattaaaacgcaattatcaaccaagtagtaaacaaaatattcacgggttttgagcggttattaaaatcagccgtgcggggaaagacaagcttgcctgtacgc

SEQ ID NO: 28526 - DNA, 260 bp, Unknown
  Description of Unknown: RightRegion for integrase B2527 sequence
cctggcggaaaactggagattatcttcggaggaggctaccttgtagaagaaacagtctaaatatcagaataggaagaaagaggaatctaccctctttctccctttcatatcatcttggatagattcctctttgaataaataggtaaaccaaaagcacattgacaatatgtgatataacacatataatggacatagagagaaagcggtgagtgtatggaaaacttctcggtggaatactatgaaacagaagatggtacacg

SEQ ID NO: 28527 - DNA, 260 bp, Unknown
  Description of Unknown: RightRegion for integrase B2528 sequence
aaggaagcagaattaaaagagatagtaaagtggttggcacttatagatttgcataaataatagttgacaatgcaactaaagttcacaatattaggaggacctatagtaccaacattagatagtgagtattgtaaaataagaacaagagacgggaaagtttatacaggtacttttttaagtactagtccagcggcacatgtttttgaagatagcaaaagtaaaactagagatgaaaaaaacatggaagttagaattgatga

SEQ ID NO: 28528 - DNA, 109 bp, Unknown
  Description of Unknown: RightRegion for integrase B2529 sequence
gaaaaccccgcagtcaaaatgctgcggggttcgagtaaagattgtttggtgacccggtagggattcgaaccctagacctactgattcgtagtcagtcactctatccagc

SEQ ID NO: 28529 - DNA, 260 bp, Unknown
  Description of Unknown: RightRegion for integrase B2530 sequence
aaatcgctgggttctgcgggatttttgtttgtggagaagggagcggaaggatactcttgacaatagaggatatatccgctatactggatatgagataaatccgctatttgaaggaagtacggccatgcaggaatatgaaattgaattttacgataagcccgatggctctgagcctgcaaaagagtttatcctgagtctggataagaaaatgcaggccaaggttttgcgtacagtcgccctgctccgtgaagaagggccat

SEQ ID NO: 28530 - DNA, 260 bp, Unknown
  Description of Unknown: RightRegion for integrase B2531 sequence
cttttctttttgctgaagctggtttttggggctgcatcgcttcgcctgcaccgtttttaggcttttgcaggcggttcctatacaacccccaacttttgactttacaccgttttcaaaaaggaatgtttgcaggccggtttttcagcaggctgctgcatcatccccttcaatgtacggcgtaaggtcgaacttgaaagtaatgttgagctgatacccacgataaacataaactaaaaaatccgccgaggactcctcccgaa

SEQ ID NO: 28531 - DNA, 109 bp, Unknown; identical to SEQ ID NO: 28519
  Description of Unknown: RightRegion for integrase B2532 sequence

SEQ ID NO: 28532 - DNA, 260 bp, Unknown
  Description of Unknown: RightRegion for integrase B2533 sequence
cctgcaaacggtcaattcggggaatcatacttaaaacaatatcaaatcacaacaaaataaaaaaatccccactttatttcatataaaacggggaaatattcggggaaaatgacttgaaatgacaaaatcacgaatattcagtgtgatttcatttgtaataagtgctatattctaaaacaaaaatccacagtctttcagcaaatttgcataaaactgtggattgggtggtcgaggtgacaggacttgaacctgcggcatct

SEQ ID NO: 28533 - DNA, 260 bp, Unknown
  Description of Unknown: RightRegion for integrase B2534 sequence
agacttgtcaatgtgaacggtataggtcaaatcgaagctgccgctggcagactgcggtgaagcagtccaatctgcggaatagtattgcatctccggtacatcgggaagaccgcttgtatcgtcaccgtcaagaacggggccgccaacaataacaatacgctgccagttatagctggctggagggaagaatgcatatgtgtagtaacctgtatcccccggagcgtaggggacagcggaaagcgagtcgtcacttataccca

SEQ ID NO: 28534 - DNA, 260 bp, Unknown
  Description of Unknown: RightRegion for integrase B2535 sequence
tttatcacgatgataggtaatgtgttcgttttgttttgtccgtttccgaacttgaaatagaaataaatgaagtctaatttgtgaacaaataaaacgtcactagcgatcaaatacaacaaaataagcggcgggcaatccctgaaaattgggaaagcctgccgcttttattatggactatttaacttgccggtcagttgtccttgccggcctgtttgataacctgatccgcaccggtagccgcaaggccggaaacaatacca

SEQ ID NO: 28535 - DNA, 260 bp, Unknown
  Description of Unknown: RightRegion for integrase B2536 sequence
atcgagatggttggttcagtgttcgtcttgttttgttccctaccgaaaataagaaagtaagtaaaaaagacccaaacctcgcatgaaatgaggtttgggtcttttttgttttatttcctgttagatttttccgaaatacggaaaaacttgccggaatagagggtttcttgccaaaatgcagacaagccgaccatgaatcggctaaaatcagcaacaaaggagaccaaaggctatgattaggattttgctgtcaacccgcc

SEQ ID NO: 28536 - DNA, 109 bp, Unknown
  Description of Unknown: RightRegion for integrase B2537 sequence
tgggttcggatttattgttttgtccgccgtcccggcataattttccccgccgccgcataatagacaggggaggggaacgctatgaagcctgctgtttatctgtacggtg

SEQ ID NO: 28537 - DNA, 260 bp, Unknown
  Description of Unknown: RightRegion for integrase B2538 sequence
ttttttgttgttaccgaccaaaggagaaactatgagctacgcgatcgtattcagcagtaaaacaggcaacacaaaattattggcagacacgctgcacgcctgtctgccacaggaaaactgctgctattttggcaccccggaccctgctgccatggaagcagacgacctctatgtgggcttctggacagacaagggaaacgctgacgaaagcactttggactttttgaagcagctgcacggcaaaaatatcttcctttttg

SEQ ID NO: 28538 - DNA, 260 bp, Unknown
  Description of Unknown: RightRegion for integrase B2539 sequence
tccgggtacttttcactcgttgagcaccaattttcggctcgttggtggcgcaccgcgtaatctgtaattattttgtaacctttgtgcaaacaaaaaatgccccgccagcaatccgtcaggatgccagcggggcattgctttacttagtggagataccttgccaattcagatgcaacaaagcctgcgatcactgccgcaatgactgcccaccagagtttgtttccaaatactccgggggctttttccagcgcagtcaagcg

SEQ ID NO: 28539 - DNA, 81 bp, Unknown
  Description of Unknown: RightRegion for integrase B2540 sequence
cggttccgtctttccagcggccataccgactacgtgccgcggggcattcccctcaaatgacaccttgcccggttcggggaa

SEQ ID NO: 28540 - DNA, 260 bp, Unknown; identical to SEQ ID NO: 28502
  Description of Unknown: RightRegion for integrase B2541 sequence

SEQ ID NO: 28541 - DNA, 260 bp, Unknown
  Description of Unknown: RightRegion for integrase B2542 sequence
tatctttcattcttttccaaaatagctttgaagcataggccacattattttcatatatgacacaaagctcagctctacttgtgcttcattaaaccatccaaccataaagctatttatctcttcaaataatacttttgaaagtttctgaataataattgtgttatccacttcttcagtataatctttcgcatacattttacatatagaacgcactccaaaataattatatagcacacctaccgttgtttttaatgcttcaa

SEQ ID NO: 28542 - DNA, 260 bp, Unknown
  Description of Unknown: RightRegion for integrase B2543 sequence
ttatatcattccgaactgcagccgcaaggccgtgactcttcaaaacttgaagagtcataactctattactactttggatttttgaagagtgacgaaaaagaagcgtatctatgtttgaaagctcactcttcaagatgaagagtcatggcctgaaaacgcagttttctttgctttttgttcatgactcttcaaaacccctgtgggtcataggagacttttgaagagtcacccttgccgggaaaactcccccagtctgctgc

SEQ ID NO: 28543 - DNA, 260 bp, Unknown; identical to SEQ ID NO: 28509
  Description of Unknown: RightRegion for integrase B2544 sequence

SEQ ID NO: 28544 - DNA, 260 bp, Unknown
  Description of Unknown: RightRegion for integrase B2545 sequence
atcgagatggttggttcagtgttcgtcttgttttgttcactaccgaaaataagaaagtaagtaaaaaagacccaaacctcgcatgaaatgaggtttgggtcttttttgttttatttcctgttagatttttccgaaatacggaaaaacttgccggaatagagggtttcttgccaaaatgcagacaagccgaccatgaatcggctaaaatcagcaacaaaggagaccaaaggctatgattaggattttgctgtcaacccgcc

SEQ ID NO: 28545 - DNA, 260 bp, Unknown
  Description of Unknown: RightRegion for integrase B2546 sequence
cctggcggaaagctggagatcatcttcggagggggctaccttgtagaagaagcagtctgaatataggggagaaagaggaatccttcctctttctctttcttcatatcatctcggatagatccctacttgaaaaatgggaaaccaacaacgcattgacaatatgtgatataacacatataatgagcatagagagaaagcggtgagtgtatggaaaacttctcggtggaatactatgaaacagaagatggtactcgaccggc

SEQ ID NO: 28546 - DNA, 260 bp, Unknown
  Description of Unknown: RightRegion for integrase B2547 sequence
tatatgacggaaatacttgaatattcgtatattaaatcggaaattaaaggtaccatatagttaccgatatcggtatatcggtaactatatggtacccattacaaagcacaccgcaaaaatataacttcattgatttggcgatatatgacaaaataaacagaggcgatatattttgaataaaaataagcaagataaatacaggtataatcataagacaaccaaaatcttttaacataaataaagaatacaattacgcctct

SEQ ID NO: 28547 - DNA, 260 bp, Unknown
  Description of Unknown: RightRegion for integrase B2548 sequence
aaggaggtggaggataatgcagagaaaattgaaatcctcgaagcaagccaatgcatttgaactaagtgcaatgcagaaagtcggatatcgctgggctttgttagcacttattatgtataatccgctaattcgctgtgaatttcaagaatgtcatctatgcttatcttcttgccggtagagcgttcatttgtcataaagaaaacaaattttcgttcaacgggatcaacctaccgcaccttccctatgaactttcggcatga

SEQ ID NO: 28548 - DNA, 260 bp, Unknown
  Description of Unknown: RightRegion for integrase B2549 sequence
ggatattttttacagcataaatccacaacaaagaaattcgaattcgtttccgattggtaatgggttcgaatttattctttttcaaaataattataggtaattgggcatttaaacttaatatgttatattaagtttaaatggaggtaaattatgatagattttgaaaaagaattactaaagctagcttctccacacattattcattattgtttaataaaacataaaattactaaatttgatgatgtagactttataagaca

SEQ ID NO: 28549 - DNA, 260 bp, Unknown
  Description of Unknown: RightRegion for integrase B2550 sequence
accataaaaataaccacaccgaagggtgtggttatttttatggatgccttaagaaattgaaacgctcgggcgaagtcaattcgccctgcgcaaggtttttgccttgaaacttcctcaccggatgaaccggggcactcccaaatctccatcccgggtacagcggtgcaggaccactacgaaccaggcaaacaccacaaggcccttggcaatgctggaaatgctgatgctccaccacacgccatccagtcccagcacggtgg

SEQ ID NO: 28550 - DNA, 260 bp, Unknown
  Description of Unknown: RightRegion for integrase B2551 sequence
tttgtttttgttttagaggatgtggatcagtccacatcctcttttttcggcgcatcgtaagtaagcacctgtttagcattccagatgtcagccgtggtcgggtcgctcccgccaacccgcgggccgcatatatgcggcccctacgacgcagcaaaaaacaaaaagccgcttacctcaaacgagataagcggcttttggcaggggtagaaggattcgaaccctcggcacgcggttttggagaccgctgctctaccaactga

SEQ ID NO: 28551 - DNA, 260 bp, Unknown; identical to SEQ ID NO: 28502
  Description of Unknown: RightRegion for integrase B2552 sequence

SEQ ID NO: 28552 - DNA, 109 bp, Unknown; identical to SEQ ID NO: 28519
  Description of Unknown: RightRegion for integrase B2553 sequence

SEQ ID NO: 28553 - DNA, 260 bp, Unknown
  Description of Unknown: RightRegion for integrase B2554 sequence
accatcgtcctcaccgtgaacggattcgtattactcagcccactttctgtttgtgggtaattaaaagcagcagccgaaaagctgctgctttttgctgcataaaaataatccccaccagcgtttccatgcgcgccggtggggatgctttttgcataacgaagttcgttataatctaccatcttcctgcaaaatgagaaaatacttgttatattttctcgtaaaggagcatggctatgattaggattttactgtccacgcgc

SEQ ID NO: 28554 - DNA, 260 bp, Unknown
  Description of Unknown: RightRegion for integrase B2555 sequence
gacggcgagcttattcagaaactcgatgtttactataaattcgtcggcagactggattaattttttgttactatgagatgttccgttgggtggggtcaacagatgatggctcatatgtaacattatgtggcagctcccagggaaaaattaacgaaatcaagaattgccttcgcaacacgcctgctataatcaagatttccaacaacatagctccttattattatacatatattgttgttgtctttcgtgataatatgctt

SEQ ID NO: 28555 - DNA, 260 bp, Unknown
  Description of Unknown: RightRegion for integrase B2556 sequence
ccaaatcatattgcctatgttgaggactgcacggtcacggattctgcgctgtgcacataataaaattagcaggaaaagtaagcgatgcctgtacgcggctgatcgtcacataaccatcttccagcggctgacgcagcacctccaaagcagtacgcgaaaattcaggaaactcatctaaaaataaaacaccatgatggctcaacgtcacttctccaggccgcggcacactgcctccacctataagcgcgcttgaagaaatc

SEQ ID NO: 28556 - DNA, 260 bp, Unknown; identical to SEQ ID NO: 28541
  Description of Unknown: RightRegion for integrase B2557 sequence

SEQ ID NO: 28557 - DNA, 260 bp, Unknown; identical to SEQ ID NO: 28541
  Description of Unknown: RightRegion for integrase B2558 sequence

SEQ ID NO: 28558 - DNA, 260 bp, Unknown
  Description of Unknown: RightRegion for integrase B2559 sequence
cacttatccgaacacatcatatttataaatggtgttattgggatgatcgtgcaaagatgaaaattccctctccggtttggagagggaatttttttatttcgcgatattctcgtaatactccatcagtttccgctccgggccggggccgtccttatcgagcagaaatgctttcgcgagggcggcgtagaattccgggcggtttaggccgaactctacggcgacggggtagtagtccgagtacatcatattcatggtcacgc

SEQ ID NO: 28559 - DNA, 260 bp, Unknown
  Description of Unknown: RightRegion for integrase B2560 sequence
ttttccatcgtaggcgggctactaagattcagcataccgcgaaagaaacgctggggttgatccccggcgttttctttttgaaaaattttctttttccaaaacttcttattgacatgtcaccaaattggtggtagtataataagcgtaaggaagaaaaacacagatgggcaaagccccggaaaggaacaaaaaatgaaatttgaaatcatcgacaaccgcgagttcgacctcaccggcaaaggttacaaatggtcgaacga

SEQ ID NO: 28560 - DNA, 260 bp, Unknown
  Description of Unknown: RightRegion for integrase B2561 sequence
cacttatccgaacacatcatatttgtaaatggtgttattgggatgatcgtgcagagatgaaaataccctctccggattggagagggtatttttttattttgcgatatgctcataatactccatcagctttcgctccgggccggggccgtccttgtcgagcaaaaacgcctttgccagggcggcgtagaattccgggcggttgagaccgaattctacggctacttggtagtaatccgagtacatcatgttcatggttacgc

SEQ ID NO: 28561 - DNA, 260 bp, Unknown
  Description of Unknown: RightRegion for integrase B2562 sequence
atagcaatagttgttagttgttcggtgtttgttttttcagtaaaaatgccggaggcgtaaagcctccggcttttcttatttctccacattctccactttgacatctatccatcctagatgtgcgtgtttgatggcgacggggaatacaccctctttcgggcggtagacctgtgcgccggatagcgaaatgtggatgagggtcaaatcctccgtcctgtatatcattgcctcaccgctttgccccacggcccgcgcagtag

SEQ ID NO: 28562 - DNA, 260 bp, Unknown
  Description of Unknown: RightRegion for integrase B2563 sequence
tttttcatcgcaggcgggctactaaaattcagcataccgcgaaagaaacgccggggttaatccccggcgttttctttttgaaaaattccctttttccaaaatttcttattgacatatcaccaacttggtggtaatataatagacgcaaacagaaaatacagaggggttgagccccggaaaggaacaaaaaaatgaaatttgaaatcatcgacaaccgcaagctctacctcaccggcaaaggttacaaatggacggacgat

SEQ ID NO: 28563 - DNA, 260 bp, Unknown
  Description of Unknown: RightRegion for integrase B2564 sequence
atttttcttgggaaaaatccgccaaaaagttgcaattttttcggttttatgttacaatgaaagaggaaaaagatttttgggaggaataccaatgaaagcaattgtttttgatatggatgggattttgttcgatacggagcgtgtcggcgatcaggcatggcggcagactgcggaggagatgcagtttgcggacatcgaagctgcaatcgagggctgccgtggactgaaccgtgcagacacccgtgcatttttcgagtcgc

SEQ ID NO: 28564 - DNA, 260 bp, Unknown
  Description of Unknown: RightRegion for integrase B2565 sequence
ggggagtctgagtgtaccaaaaagccacaccaatttggatattttaagcgcaacgcttagaataccaaagggttgccgcctttttttatttcaaattttgcactcaggaaaaaagatattttcgcgttattttggtaactggggagattcgaactcccccttttgcgatttcaagggcagaattcaaagaagcgccctttttgcgggcgcagaatagagcgttatttcctcaaaatttcatacgatctttcaggcgcctg

SEQ ID NO: 28565 - DNA, 260 bp, Unknown
  Description of Unknown: RightRegion for integrase B2566 sequence
aagataaaggtagtattcaaaaacgggacagagatttgggcgaggtgggactgtgagtaggcattttgcagttagcggctggtatctatccataaagatatcgagttttcatcatctttttcaaataggcatatgaagagatgatgtgatagcgttataacacatatcctgtgttacagtagtcatgagggatttgcacttccgttcggtctttgtcgttacatcaaacttacaataattgatttggccgggtccattca

SEQ ID NO: 28566 - DNA, 260 bp, Unknown
  Description of Unknown: RightRegion for integrase B2567 sequence
cacttatccgaacacatcatatttgtaaatggtgttattgggatgatcgtgcagagatgaaaataccctctccggattggagagggtatttctttattttgcgatatgctcgtaatactccatcagctttcgctccgggccaggtccgtctttatcgatcaaaaacgcctttgccagagcagcgtagaactccgggcggttgaggccgaattctacggcgacggggtagtagtccgagtacatcatgttcatggtcacgc

SEQ ID NO: 28567 - DNA, 260 bp, Unknown
  Description of Unknown: RightRegion for integrase B2568 sequence
tttttcatcgcaggcgggctactaagattcagcataccgcgaaagaaacgccggggttaatccccggcgttttctttttgaaaaatttcctttttccaaaatttcttattgacatatcaccagtttggtggtaatataatatacgtaaagaggaaatacagagggggctaaaccccggaaaggaacaaaaaaatgaaatttgaaatcatcgacaaccgcgagcttgacctcaccggcaagggctacaagtggacaaatga

SEQ ID NO: 28568 - DNA, 260 bp, Unknown
  Description of Unknown: RightRegion for integrase B2569 sequence
catttatccgaacacatcatatttgtaaatggtgttattgggatgatcgtgcaaagataaaaagattcctctccaagtcggagagggatctttttattattttaccacatgctcatagtatttcatgagcttgcgctccgggccggggccgtctttgtcgagcaggaatgcctttgccagggcggcgtagaattccgggcggttgaggccgaattctaccgcgacggggtagtagtccgagtacatcatgttcatggtcg

SEQ ID NO: 28569 - DNA, 260 bp, Unknown
  Description of Unknown: RightRegion for integrase B2570 sequence
gatcgcatggaaatacacttcaaatgtggagtgaatatcgaacagaaatatgtgaaatgaaagatgccctcggagccggacaacaccggtagccgagggcaatttttactttgcccgtttttgccagacaacaccccggaagaaccggagtgcatctggcccttgacgggcatcgattattattctgttattttatattgccgcaggatagactttaagttcctgaccattgcaatgagtatgtcgaattcttcaggaga

SEQ ID NO: 28570 - DNA, 260 bp, Unknown
  Description of Unknown: RightRegion for integrase B2571 sequence
ttttccatcgtaggcgggctactaagattcagcataccgcgaaagaaacgctggggttaatccccagcgttttcttgcttataaatcgtttagtttgttcatgaccgcggcgtaggtcttgggctgcatcacgctcaggctctccatcagctcatccatcacccgccatgcgtctcgcggctctttatccgagatggtgcggagaaattcgctgtttccgtaggccgcgccggaataggccgggatggactgccctcgcg

SEQ ID NO: 28571 - DNA, 260 bp, Unknown
  Description of Unknown: RightRegion for integrase B2572 sequence
gcaaggaataaaacccaaaaaatagaaatctactacaaattcgttggcgtgattaactgatttactgtcctatataacggatacgggtgtgagcatccatccgatgggctttctggtgtgcggcaggaacggcgtgcggctgttgagcgcgggcagcgcctcgccgatggagcgcgtggcggaactgatcccacaggcgcttgaaaactggaagcggctgggcgacgagcaggaaaacgcgaaaccgtctccagtgcggg

SEQ ID NO: 28572 - DNA, 260 bp, Unknown
  Description of Unknown: RightRegion for integrase B2573 sequence
ggggagtctgagtgtaccataaggtggcaacaatttggatattttaagcgcaacgcttagaatgccaaagggttgccgcctttttttatttcaaattccgcactcagaaaaaaagatattttcgcgttattttggtaactggggagattcgaactccctcttttgcgatttcaagggcagaattcaaagaaacgccctttttgcgggcgcaaattagagcgttctttcctcaaaattttatacgatctttcgggcgtctg

SEQ ID NO: 28573 - DNA, 260 bp, Unknown
  Description of Unknown: RightRegion for integrase B2574 sequence
ttttccatcgcgggcgggctgctgagattcagcataccgcgaaagaaacgctggggttaatccccagcgttttcttgcttataggtcgtttagtttgttcatgaccgcggcgtaggtcttaggctgcatcacgctcaggctctccatcagctcatccatcacccgccatgcgtctcgcggctctttgtccgagatggtgcggagaaagtcgctgttaccgtaggctgcgccggaataagccgggatggactgcacaaccg

SEQ ID NO: 28574 - DNA, 260 bp, Unknown
  Description of Unknown: RightRegion for integrase B2575 sequence
cacttatccgaacacatcatatttgtaaatggtgttattgggatgatcgtgcaaagataaaaagatccctctccaagtcggagagggatctttttattgtataaagaaaaccaccggcaatgccggtggttccaaaaagctttagctatgcatagaaaaaatgtcctcctttgataaaatgaagatggtctgccaaccaggaacaaaaatcaaaggaggaatcaagtccaaatgaaacttgatgtcagtagtttagcaca

SEQ ID NO: 28575 - DNA, 260 bp, Unknown
  Description of Unknown: RightRegion for integrase B2576 sequence
tatagcatacaaacagataaaagaaatagcgtagatgtggggattaaaatagccgcataaaacaatttatacaggttttgtctaaaatctcaatgcctctttggttattactaaatattcaaagtaatagctaaggaggtttttttttatgattaaacttgaaaaactggaaaaaggtgaattttttaaggatgcttttcttgtatcctacaggtacaacaaagattatttaaacaagatgagatcactcaaatataaaa

SEQ ID NO: 28576 - DNA, 260 bp, Unknown
  Description of Unknown: RightRegion for integrase B2577 sequence
tatagcatacaaacagataaaagaaatagcgtagatgtggggattaaaatagccgcataaaacaatttatacaggttttgtctaaaatctcaatgcctctttggttattactaaatattcaaaataatagctaaggaggtttttttttatgattaaacttgagaaactggaaaaaggtgaattttttgaggatgcttttcttgtatcctacaggtacaacaaagattatttaaacaagatgagatcactcaaatacaaaa

SEQ ID NO: 28577 - DNA, 260 bp, Unknown; identical to SEQ ID NO: 28560
  Description of Unknown: RightRegion for integrase B2578 sequence

SEQ ID NO: 28578 - DNA, 260 bp, Unknown
  Description of Unknown: RightRegion for integrase B2579 sequence
cacttatccgaacacatcatatttataaatggtgttattgggatgatcgtgcaaagataaaaagattcctctccaagtcggagaggaatctttttattattttaccacatgctcatagtatttcatgagcttgcgctccgggccggggccgtctttatcgagcaggaatgcctttgccagggcggcgtagaattccgggcggttgagtccgaattctaccgcgacggggtagtagtccgagtacatcatgttcatggtta

SEQ ID NO: 28579 - DNA, 260 bp, Unknown
  Description of Unknown: RightRegion for integrase B2580 sequence
cacttatccgaacacatcatatttgtaaatggtgttattgggatgatcgtgcaaagataaaaagatccctctccaagtcggagagggatctttttattttaccacatgctcatagtatttcatgagcttgcgctccgggccggggccgtctttgtcgagcaggaatgcctttgccagggcggcgtagaattccgggcggttgagtccgaattctaccgcgacggggtagtagtccgagtacatcatgttcatggttacac

SEQ ID NO: 28580 - DNA, 260 bp, Unknown
  Description of Unknown: RightRegion for integrase B2581 sequence
tttttcatcgcaggcgggctactaagattcagcataccgcgaaagaaacgctggggttaatccccagcgttttctttttgaaaaatttcctttttcccaaatttcttattgacatatcaccaacttggtggtaatataatagacgtaaacagaaaatacagaggggttgagccccggaaaggaacaaaaaaatgaaatttgaaatcatcgacaaccgcgagcttgatctgaaaggcaaggggtacaaatggagcgacgca

SEQ ID NO: 28581 - DNA, 260 bp, Unknown
  Description of Unknown: RightRegion for integrase B2582 sequence
cacttatccgaacacatcatatttgtaaatggtgttattgggatgatcgtgcagagatgaaaataccctctccggattggagagggtatttttttattttgcgatatgctcataatactccatcagctttcgctccgggccggggccgtccttgtcgagcagaaacgcctttgccagagcagcgtagaactccgggcggttgaggccgaattctaccgcgacggggtagtagtccgagtacatcatgttcatggttacgc

SEQ ID NO: 28582 - DNA, 260 bp, Unknown
  Description of Unknown: RightRegion for integrase B2583 sequence
ttttccatcgcaggcgggctactaagattcagcataccgcgaaagaaacgctggggttaatccccagcgttttcttgcttatagatcgtttagtttgttcatgaccgcggcgtaggtcttgggctgcatcacgctcaggctctccatcagctcatccatcacccgccatgcgtctcgcggctctttgtccgagacggtgcggagaaattcgctgttttcgtaggctgcgccggaataggccgggatggactgcactcgcg

SEQ ID NO: 28583 - DNA, 260 bp, Unknown
  Description of Unknown: RightRegion for integrase B2584 sequence
cacttatccgaacacatcatatttgtaaatggtgttattgggatgatcgtgcagagatgaaaataccctctccggattggagagggtatttttttattttgcgatatgctcataatactccatcagctttcgctccgggccggggccgtccttgtcgagcaaaaacgcctttgccagggcggcgtagaattccgggcggttgaggccgaactctacggcgacggggtagtagtccgagtacatcatgttcatggtcacgc

SEQ ID NO: 28584 - DNA, 260 bp, Unknown
  Description of Unknown: RightRegion for integrase B2585 sequence
cacttatccgaacacatcatatttgtaaatggtgttattgggatgatcgtgcaaagataaaaaatccctctccggtttggagagggatttttttattttaccacatgctcatagtatttcatgagcttgcgctccgggccggggccgtctttgtcgagcaaaaacgctttggcgagggctgcgtagaattccgggcggttgaggccgaattctaccgcgacggggtagtagtccgagtacatcatgttcatggtcacgct

SEQ ID NO: 28585 - DNA, 260 bp, Unknown
  Description of Unknown: RightRegion for integrase B2586 sequence
ttttccatcgcaggcgggctactaagattcagcataccgcgaaagaaacgctggggttaatccccagcgttttcttgttataggtcgtttagtttgttcatgaccgcggcgtaggtcttaggctgcatcacgctcaggctctccatcagctcatccattaccctccatgcgtcccgcggctctttgtccgagacggtgcggagaaattcgctgtttccgtaggccgcgccggaatagaccgggatggactgcactcgcgg

SEQ ID NO: 28586 - DNA, 260 bp, Unknown
  Description of Unknown: RightRegion for integrase B2587 sequence
ttttccatcgcaggcgggctactaagattcagcataccgcgaaagaaacgctggggttaatccccagcgttttcttgcttataggtcgttaagtttgttcatgaccgcggcgtaggtcttaggctgcatcacgctcaggctttccatcagctcatccatcacccgccatgcgtcacgcggctctttgtccgagacggtgcggagaaattcgctgctgccgtaggctgcgcctgaataggccgggatggactgcactcgtg

SEQ ID NO: 28587 - DNA, 260 bp, Unknown
  Description of Unknown: RightRegion for integrase B2588 sequence
cacttatccgaacacatcatatttgtaaatggtgttattgggatgatcgtgcaaagataaaaaatccctctccggtttggagagggatttttttattgtataaagaaaaccaccggcaatgccggtggttccaaaaagctttagctatgcatagaaaaaatgtcctcctttgataaaatgaagatggtctgccaaccaggaacaaaaatcaaaggaggaatcaagtccaaatgaaacttgatgtcagtagtttagcacac

SEQ ID NO: 28588 - DNA, 260 bp, Unknown
  Description of Unknown: RightRegion for integrase B2589 sequence
gcaattcccatttttcaggcgagaaagagcatttccgttgaatctgtaaccaacttgtaatatttgcaacaacaaaaaatcccccgccagctttcctttcggattgccagcgggggattttgtctgttattcttctgtgtagctgttcttgatgggcagtgctttggctcggttatacaattccgtacccgttccgttctctcccagcgcatggtagctgttgtaaagatagccaatgttcgtcaggcccaccgtgtcaa

SEQ ID NO: 28589 - DNA, 260 bp, Unknown
  Description of Unknown: RightRegion for integrase B2590 sequence
ttttccatcgcaggcgggctgctaaaattcagcataccgcgaaagaaacgctggggttgatccccggcgttttctttttgaaaaattttctttttcccaaatttcttattgatatatcaccaacttggtggtaatataatagacgtaaacagaaaatacagaggggttgagccccggaaaggaacaaaaaaatgaaatttgaaatcatcgacaaccgcgagctcgacctcaccggcaaaggttacaaatgggcgcacgat

SEQ ID NO: 28590 - DNA, 260 bp, Unknown
  Description of Unknown: RightRegion for integrase B2591 sequence
cacttatccgaacacatcatatttataaatggtgttattgggatgatcgtgcaaagataaaaaatccctctccggtttggagagggatttttttattttaccacatgctcatagtatttcatgagcttgcgctccgggccggggccgtccttgtcgagcagaaacgcctttgccagggcggcgtagaattccgggcggttgaggccgaattctaccgcgacggggtagtagtccgagtacatcatgttcatggttacgcc

SEQ ID NO: 28591 - DNA, 260 bp, Unknown
  Description of Unknown: RightRegion for integrase B2592 sequence
cacttatccgaacacatcatatttgtaaatggtgttattgggatgatcgtgcagagatgaaaataccctctccggattggagagggtatttttttattttgcgatatgctcataatactccatcagctttcgctccgggccggggccgtccttgtcgagcagaaacgcctttgccagagcagcgtagaattccgggcggttgaggccgaactctaccgcgacggggtagtagtccgagtacatcatgttcatggttacgc

SEQ ID NO: 28592 - DNA, 105 bp, Unknown
  Description of Unknown: RightRegion for integrase B2593 sequence
atattgagcgaggggatagtagtagagaaaactcagtatgtatctagggagaaatggtgaaggtaaaagtacctttatgaatattgtgacaggaacacttgcgcc

SEQ ID NO: 28593 - DNA, 260 bp, Unknown
  Description of Unknown: RightRegion for integrase B2594 sequence
ttcaacattgactttgagcagttcagcgctggactggacatttcggcaatcgccgcataaaaaaagcccgcttcaaaagggaagcggacataaaacaaaaaacttgcttttttcaaagcaagcatttattaagaatactcagcgcacccgattggtggagataagcgggatcgaaccgctgacctcttgactgccagtcaagcgctctcccggttagtgcggttacatacccctctaaaccgggtcaaataagcgcttca

SEQ ID NO: 28594 - DNA, 260 bp, Unknown
  Description of Unknown: RightRegion for integrase B2595 sequence
aaaaatccattaaaacgcaattatcaaccaagtagtaaacaaaatattcacgggttttgagcggttattaaaatcagccgtgcggggaaagacaagcttgcctgcacgcggctgattgttacaacgccgtcttccaacggctggcgcagaacctccagcgcctggcgtgaaaactccggcagttcatccaaaaacaatacgccgttatggctgagcgtaacttcgcccggcttcggcacgctgccgccgccaattaacgc

SEQ ID NO: 28595 - DNA, 260 bp, Unknown
  Description of Unknown: RightRegion for integrase B2596 sequence
gcaattcccatttttcaggcgagaaagagcatttccgttgaatctgtaaccaacttgtaatatttgcaacaacaaaaaatcccccgccagctttcctttcggattgccagcgggggattttgtctgttattcttctgtgtagctgttcttgatgggcagtgctttggctcggttatacaattccgtacccgttccgttccctcccagcgcatggtagctgttgtaaagatagctaatgttcgtcaggcccaccgtgtcaa

SEQ ID NO: 28596 - DNA, 260 bp, Unknown
  Description of Unknown: RightRegion for integrase B2597 sequence
ggggagtctgagtgtaccaaaaagccacaccaatttggatattttaagcgcaacgcttagaataccaaagggttgccgcctttttttatttcaaattctgcgctcagaaaaaaagatattttcgcgttattttggtaactggggagattcgaactcccccttttgcgatttcaagggcagaattcaaagaagcgccctttttgcgggcgcagaatagagcgttatttcctcaaaatttcatacgatctttcaggcgcctg

SEQ ID NO: 28597 - DNA, 109 bp, Unknown
  Description of Unknown: RightRegion for integrase B2598 sequence
cgtaaaagagtacgtctatgttgccagcatgctgtttggcttgttcttcggcgcaggtaacctcatcttccccactgcagtgggtcagcttgccggccgcaatatgtgg

SEQ ID NO: 28598 - DNA, 260 bp, Unknown
  Description of Unknown: RightRegion for integrase B2599 sequence
tgcccacgttgccgtcgatgccgccatataccaccatcgagatgggcgccgcaacaatagagttccacagcgacacaagaaccgtggcgattatgacgtgcaaaatgttcttatacttgccatagcgcgccatatagcccacaatgaggccagagccaatattgcacaggccgaacagcgaggccatgatattgccctgcaccagcgacgaaatgatgttgtacagcacgccggacgtggcaccgatccacgggcccatg

SEQ ID NO: 28599 - DNA, 260 bp, Unknown
  Description of Unknown: RightRegion for integrase B2600 sequence
ggggagtctgagtgtaccaaaaagccacaccaatctggatattttaagcgaaacgcttagagtaccaaggggtgtggctttttatatttctaaaatttcaccattttttcaatggatattttcggagttccccacggtttgaagggattcgaactcccccttttgcgatttcaagggcagaattcaaagaagcgccctttttgcgggcgcagaatagagcgttctttcctcaaaatttcatacgatctttcaggcgtctg

SEQ ID NO: 28600 - DNA, 260 bp, Unknown
  Description of Unknown: RightRegion for integrase B2601 sequence
cacttatccgaacacatcatatttgtaaatggtgttattgggatgatcgtgcaaagataaaaagattcctctccaagtcggagagggatctttttattattttaccacatgctcatagtatttcatgagcttgcgctccgggccggggccgtctttatcgatcaaaaacgcctttgccagcgcggcgtagaattccgggcggttgaggccgaactctacggcgacggggtagtagtccgagtacatcatgttcatggtca

SEQ ID NO: 28601 - DNA, 260 bp, Unknown
  Description of Unknown: RightRegion for integrase B2602 sequence
ttcaacattgactttgagcagttcagcgctgggctggacatttcggcaatcgccgcataagaaaagcccgcttcaaaagagaagtgggcataaaacaaaaaacttgcttttttcaaagcaagcatttattaagaatactcagcgcacccgattggtggagataagcgggatcgaaccgctgacctcttgactgccagtcaagcgctctcccagctgagctaaacccccatcggttcaaggctttcgcgctcggaacaatg

SEQ ID NO: 28602 - DNA, 260 bp, Unknown
  Description of Unknown: RightRegion for integrase B2603 sequence
ggggagtctgagtgtaccatcaagccacaccaatctggatattttaagctgaacgcttagagtaccaatgggtgtggctttttgtttttctaaaatttcacattttttccaatagatattttcggtgtcccccactgtttgaagggattcgaactccccttttcacagattcaaaggcaaaatcctgagaagcgccctttttgcgggcgcaaaatagagcgatctttcctcaaaattttatacgatctttcgggcgtctg

SEQ ID NO: 28603 - DNA, 260 bp, Unknown
  Description of Unknown: RightRegion for integrase B2604 sequence
tatagcatacaaacagataaaagaaatagcgtagatgtggggattaaaatagccgcataaaacaatttatacaggttttgtctaaaatctcaatgcctctttggttattactaaatattcaaagtaatagctaaggaggttttttttatgattaaacttgagaaactggaaaaaggtgaatattttgaggatgcttttcttgtatcctacaggtacaacaaagattatttaaacaagatgagatcactcaaatataaaag

SEQ ID NO: 28604 - DNA, 260 bp, Unknown
  Description of Unknown: RightRegion for integrase B2605 sequence
cacttatccgaacacatcatatttataaatggtgttattgggatgatcgtgcaaagatgaaaattccctctccaatccggagagggaattttttattttactacatgctcatagtatttcatgagcttgcgctccgggccggggccgtctttatcgatcaaaaacgcctttgtcagcgcggcgtagaattccgggcggttgaggccgaactctacggcgacggggtagtagtccgagtacatcatgttcatggtcacgcc

SEQ ID NO: 28605 - DNA, 260 bp, Unknown
  Description of Unknown: RightRegion for integrase B2606 sequence
tatagcatacaaacagataaaagaaatagcgtagatgtggggattaaaatagccgcataaaacaatttatacaggttttgtctaaaatctcaatgcctctttggttattactaaatattcaaagtaatagctaaggaggttttttttttatgattaaacttgagaaactggaaaaaggtgagttttttgaggatgcttttcttgtatcctacaggtacaacaaagattatttaaacaagatgagatcactcaaatacaaa

SEQ ID NO: 28606 - DNA, 260 bp, Unknown
  Description of Unknown: RightRegion for integrase B2607 sequence
tccgcgtgcgtgtcggcgcacggcagtgcgccgagcgatcctcttcgtctccaccaatgacacgaatactgcttttgcggtgttcgtgttatttttatacccacgcccgatttcctaatcttcgtttaatctttacacgctatgataaaatctgtataattatactggagggtgatccaatgcgtattctgcttgccgaggacgagaagagtctcaacaggataatcacaaagcagctcaaggctgccggctacagcgtg

SEQ ID NO: 28607 - DNA, 72 bp, Unknown
  Description of Unknown: RightRegion for integrase B2608 sequence
gaaagttcgaccgagaagcgtttggtccgagtggcgagaatcgaactcacggcctcttgaaccccattcaag

SEQ ID NO: 28608 - DNA, 260 bp, Unknown
  Description of Unknown: RightRegion for integrase B2609 sequence
tttttcatcgcaggcgggctactaagattcagcataccgcgaaagaaacgctggggttaatccccagcgttttctttttgaaaaatttcctttttcccaaatttcttattgacatatcaccaatttggtggtaatataatagacgtaaacagaaaatacagaggggttgagccccggaaaggaacaaaaaaatgaaatttgaaatcatcgacaaccgcgagcttgatctcaccggcaagggctacaaatggacgaacgag

SEQ ID NO: 28609 - DNA, 241 bp, Unknown
  Description of Unknown: RightRegion for integrase B2610 sequence
ggggagtctgagtgtaccaaaaagccacaccaatctggatattttaagcgaaacgcttagagtaccaaggggtgtggctttttgtatttctaaaatttcgccatttttccaatggatattttcggagttccccacggtttgaagggattcgaactccccctttcacagattcaaaggcaatatcctgagaagcgccctttttgcgggcgcagaatagagcgttttttcctcaaaatttcat

SEQ ID NO: 28610 - DNA, 260 bp, Unknown
  Description of Unknown: RightRegion for integrase B2611 sequence
aagagcaacaccagatacgtatgtcctttccggtggggagatgcagctgagcttttataatgattcttcggtcgtgtaccggatcaaagtaaagcagcacgctactctgaaaggtctggaagtggatgggctgatggaccaggcgtttgaccggaatcagaagacttaccatgcctatgtggagaagggtgcagagagtgtcaggatcactccttctgcttatctgaacagctatacgatccggataaacggaacagaag

SEQ ID NO: 28611 - DNA, 260 bp, Unknown
  Description of Unknown: RightRegion for integrase B2612 sequence
ttttccatcgcaggcgggctgctaaaattcagcataccgcgaaagaaacgctggggttaatccccagcgttttcttgcttatagatcgtttagtttgttcatgaccgcggcgtaggtcttgggctgcatcacgctcaggctctccatcagctcatccatcacccgccatgcgtctcgcggttctttgtccgagacggtgcggagaaagtcgctgttaccgtaggctgcgccggaataggccggaatggactgcacaaccg

SEQ ID NO: 28612 - DNA, 260 bp, Unknown
  Description of Unknown: RightRegion for integrase B2613 sequence
ttttccatcgtaggcgggttgctaaaattcagcataccgcgaaagaaacgctggggttgatccccggcgttttctttttgaaaaatttcctttttccaaaatttcttattggcatatcaccaatttggtggtagtataataagcgcaaggaaaaaaacacagaggggcaaagccccggaaaggaacaaaaaaatgaaatttgaaatcatcgacaaccgcgagcttgatctcaccggcaaaggttacaagtgggcgaacga

SEQ ID NO: 28613 - DNA, 260 bp, Unknown
  Description of Unknown: RightRegion for integrase B2614 sequence
cttaacggtatcgatggagtttccgaatgtgatacaagtgagctgtccatagcacaataagccctcgcccatgtcacaccagtggcatggggtacatatcctaagagatatggccagttgacaacataaatcctccatgttaatataagtgagcaaattgaattgttgcgcgggtgtggagatgagcgctgtcccaaactatcagggggtgtgcctaccagatggttcgggagagcgcttgaatggcattcaagaggtca

SEQ ID NO: 28614 - DNA, 260 bp, Unknown
  Description of Unknown: RightRegion for integrase B2615 sequence
gcgagtgttcttgcagcatttgaaaggctgttaagaacactcgcttttttcatacagtgagttggtttgaggcgtagttgacgactacgccttttttgtattcaccgacaactgcggtgccggaagtgggaacacatcgggaatgaagatggctcccacacagtagcttcccctgtctgcggcaaagccgccaatcgtagcgcagggaaagttccctgtgcggagattaagccctcggcagagcgcacacgccctttagg

SEQ ID NO: 28615 - DNA, 260 bp, Unknown
  Description of Unknown: RightRegion for integrase B2616 sequence
tcgaaaaacaaacttcaaattcagctaaggacaggcatggtattggatgtgaatctgtgattaaaagtaaagaggatgttcgtattaataatagagaaattaaaataaaagaacaaagggaggccatgtatagatgccgaaaattgagttgagctttgatatagataggctggggcaggatgtcttgaaaagattatatgccatgacggacgaaatatttgagtctgagggtttgaaatgtgtagacaggggagtggtcc

SEQ ID NO: 28616 - DNA, 260 bp, Unknown
  Description of Unknown: RightRegion for integrase B2617 sequence
ctgaatggtatcgacagcatcaacgaatgcgctacctatgaactgcccatggcgcaataagctctcaccctcgccacgaccacggcgaggggtacatatcaaagtttgatatggccagttgacaacatataccttccatgctatactgcaatttgtctctcatcaattgccggggcgggatattcaagtcctttcccaagccatcagggggtgcatacccgatggttcgggagagcgcttgaatggcattcaagaggtag

SEQ ID NO: 28617 - DNA, 260 bp, Unknown
  Description of Unknown: RightRegion for integrase B2618 sequence
tatagcatacaaacagataaaagaaatggcgtagatgtggggattaaaatagccgcataaaacaatttatacaggttttgtctaaaatctcaatgcctctttggttattactaaatattcaaagtaatagctaaggaggttttttttttatgattaaacttgaaaaactggaaaaaggtgaattttttgaggatgcttttcttgtatcctacaggtacaacaaagattatttaaacaagatgagatcactcaaatacaaa

SEQ ID NO: 28618 - DNA, 64 bp, Unknown
  Description of Unknown: RightRegion for integrase B2619 sequence
cacttatccgaacacatcatatttgtaaatggtgttattgggatgatcgtgcaaagataaaaag

SEQ ID NO: 28619 - DNA, 260 bp, Unknown
  Description of Unknown: RightRegion for integrase B2620 sequence
ggggagtctgagtgtaccaaaaagccacaccaatttggatattttaagcgcaacgcttagaataccaaagggttgccgcctttttttatttcaaattttgcactcaggaaaaaagatattttcgcgttattttggtaactggggagattcgaactcccccttttgcgatttcaagggcagaattcaaagaagcgccctttttgcgggcgcaaattagagcgttctttcctcaaaatttcatacgatctttcaggcgtctg

SEQ ID NO: 28620 - DNA, 260 bp, Unknown
  Description of Unknown: RightRegion for integrase B2621 sequence
ggggagtctgagtgtaccaaaaagccacaccaatctggatattttaagcgaaacgcttagagtaccaaggggtgtggctttttgtatttctaaaatttcgccatttttccaatggatattttcggagttccccacggtttgaagggattcgaactccccctttcacagattcaaaggcaatatcctgagaagcgccctttttgcgggcgcagaatagagcgttttttcctcaaaatttcatacgatttttcaggcgtctg

SEQ ID NO: 28621 - DNA, 260 bp, Unknown; identical to SEQ ID NO: 28583
  Description of Unknown: RightRegion for integrase B2622 sequence

SEQ ID NO: 28622 - DNA, 260 bp, Unknown; identical to SEQ ID NO: 28578
  Description of Unknown: RightRegion for integrase B2623 sequence

SEQ ID NO: 28623 - DNA, 260 bp, Unknown
  Description of Unknown: RightRegion for integrase B2624 sequence
gtttgggatggcaataatatcaatatttttattaaaggtatttcagaattatcagaataagccaattgaaatacctaagaaaatcatttccgtcatgtgtcaacagcagttgcagttgaagaggctatgaagtaaggttttaagccacttcacaaatcttgtaatgtgaacaacgataagacttcgtgttcaaaagaatatcaataaggcgttagattttgttctaacgccttatttttatgcacaaaaagacctcccca

SEQ ID NO: 28624 - DNA, 260 bp, Unknown
  Description of Unknown: RightRegion for integrase B2625 sequence
gtttgggacggcaataatatcaatatttttattaaaggtatttcagaattatcagaataagccaattgaaatacctaagaaaatcatttccgtcatgtgtcaacagcagttgcagttgaagaatcgtggaaacgataatcacaggcttgttacccgcatcgcaaaagcaaggataaataatggtttatctataactgaaatatgtaaactaacaggattgagttatgataattacatcaagtatgaacgtgacgaagtaa

SEQ ID NO: 28625 - DNA, 260 bp, Unknown
  Description of Unknown: RightRegion for integrase B2626 sequence
agttttatatttgtattctatgtatggaagcagggcttccgtatgcttacgtttatgtaagtgtacggaagcctttttttattgtctaaacgaaaggaaagaacgaaatggaaaaagatatgaaaagctaccccaacaaccttctcagacagatattccccggagaacaatttgacgatcttgccgatgacagcggaattgcacttgactatataatttccgaaactatgagcgagagtgatgctcttttgctcaaaatg

SEQ ID NO: 28626 - DNA, 157 bp, Unknown
  Description of Unknown: RightRegion for integrase B2627 sequence
gtttgggacggcaataatatcaacatttttattaaaggtatttcagaattatcagaataagccaattgaaatacctaagaaaatcatttccgtcatgtgtcaacagcagttgcagttgaagaggctatgaagtaaggttttaagccacttcacaaat

SEQ ID NO: 28627 - DNA, 260 bp, Unknown
  Description of Unknown: RightRegion for integrase B2628 sequence
aagaacaagcggttgaccttcaacttcaaggtgggaataagcaaaacgataacaatataaaacgagagtcggtggagcaaaatccatcggctcttttttgctttacaagggtgcaaaccgacaaaaagaaggatgcaagaattgagggaaacgggatcttcctttaaggcaaaacctcttgattttcctatgatttttggcattttgaatgggaaggatgcaagatcccgcggtgtaccatttgcaagtttttcaaagaa

SEQ ID NO: 28628 - DNA, 260 bp, Unknown
  Description of Unknown: RightRegion for integrase B2629 sequence
ttagaagaggctccggagtgggtaaaagagatggaagagcaacctagtcagccgctgtgaaaagtttgcttaacctcttgcgagtagatgaactagaatgcttgaaaatctggatgttgagggcaattgatggtgaagtctccggtaattcagcttagaaatatgattcattctggcactgtaggaatgcagcctattttgatgcaggcgataattattgcaaaaaaactcggtcaaaaggattttggagattggcttga

SEQ ID NO: 28629 - DNA, 260 bp, Unknown
  Description of Unknown: RightRegion for integrase B2630 sequence
ggacattacacgaacacctattattttaaaggcggtttcgccgtattggtgtggctgtagtgtcaaaacagaaaccgagggtcaaggcattgtaccttgaccctcggtttttatcgttcttgccaatcccgtttttcgagcatgtcctcaaattgttttttttgcctccgcaacgggaagcaacaattcaacaaatattttgcaaaaatgcaaatacgcttgagcgagagagataagcgtatcattatatcgggctggaa

SEQ ID NO: 28630 - DNA, 260 bp, Unknown
  Description of Unknown: RightRegion for integrase B2631 sequence
tccgtggctgcaaaacgggtaaagcagtttcgctgtgaaatattcgctccgcaaatatgaaatatgcatacggcatatgagaatcgaattttattttactttccgctttcctaagacaaatgtgcccggatatgtttctatgtcagcccggtgaaatcagggcagcggcaagccgggattcatttcattttcctccgcttcggactcttgttttcgcagtacctttatcaatggaaaagccgtccgtgcggtgaaaaaaa

SEQ ID NO: 28631 - DNA, 260 bp, Unknown
  Description of Unknown: RightRegion for integrase B2632 sequence
gcaccagaaagatgggaaccggcatacccaacgcgatatacaccagcaacaggccgatgaggttgccggtcaggccgatttgacggacgatcacaataagcgcaaccatgtagacctgaaagggcacgaacagggtggacatgatgaccagcgtcaacccgtttgaaaagcggcatttccagcgtgcaagcgcgtaaccggccatcgctgcgatcaggcaggtcaacgaagtagtagccgccaccatcaggacgctggtg

SEQ ID NO: 28632 - DNA, 260 bp, Unknown
  Description of Unknown: RightRegion for integrase B2633 sequence
cgtgaagacattcctccaatttggcaagatcaacgtataaaatatggatttgttaaataatttccacaatattgtgcacaaaagaatttattaataaaagcatataaaagctagatttttatttaatctcaacttttagttgtttattatgtattgtacatcaaaaattttagaaagacaatagacctctaatccattagtttaagaggtttatttttaatgaaacacatttttgacggactacctgagtatgtccgcat

SEQ ID NO: 28633 - DNA, 260 bp, Unknown
  Description of Unknown: RightRegion for integrase B2634 sequence
tacgtccagaaaatccagattttctaccgctttatcggcccattggatgccatcgagtaacaatgtcagaaaagtcacctccgagaactatccaacagatgcgggccacataggggatgaccagcatggagagggcggtcataacgacggcgatgacgccgatgaggcgaaggctcttggagtagaggttgttcagctcggcgtggttgcgtgcgccgtagtggtagctgacgatgggggcgctgccgacggcatagccc

SEQ ID NO: 28634 - DNA, 260 bp, Unknown
  Description of Unknown: RightRegion for integrase B2635 sequence
ctttatttccgcggtgttgtgagttttgtctttaactggaaagtgttcgccgagcactaaaaaacacccagcaggtgatggtcctgctgggcttttttgttttatcgtttgtgtttattcacgaggcgtcgcgtcggacgcttcggctgcgagttgctggactgcagtggatgcgacagttgccgccacactggcagcagtggtcgctgcttcaactgtgtgatctgcctccggcttttctgttttattcgctcggactt

SEQ ID NO: 28635 - DNA, 260 bp, Unknown
  Description of Unknown: RightRegion for integrase B2636 sequence
catattttattcgtttactcaaacaacaccttcggcgcggtgatccgtatcgaaagatagcccccattactcatccagtcccggctcctccatcgtcagccgtttgtcatacgcaagcctttgcggcgatctcatttcgtaattatccgatacctgcaaatcgtgtcgtttcatttcaactaacgtgtttttgcccgcttcttctttttctttttctgcgcattcgaccgcggcaccgaaatcgaagaaaaacttttgta

SEQ ID NO: 28636 - DNA, 260 bp, Unknown
  Description of Unknown: RightRegion for integrase B2637 sequence
tgtgaggggtttgtggtagataaagctcagtatgtatctagggagaaacggcgccggtaaaagcactactatccgtaccctgctcggacttatcgcgcccacaagcggctcggctgaagtattcgggaaggatattcggaagcaaaggaccgacattcttgcggatataggataccttccctcggaaaccatgttttacagcggtatgcgggtaaaggacgttctgcgtctgtccgcgcggctgcgcaaaaccgactgct

SEQ ID NO: 28637 - DNA, 109 bp, Unknown
  Description of Unknown: RightRegion for integrase B2638 sequence
ccgatattgagcgaggggatagtagtagagaaaactcagtatgtatctagggagaaatgaaacgagaaatgtattatggcaaaaagtataaaacaaaagaagaattaat

SEQ ID NO: 28638 - DNA, 260 bp, Unknown
  Description of Unknown: RightRegion for integrase B2639 sequence
gtttgggacggcaagaatatcaatatttttattaaaggtatttcagaattatcagaataagccaattgaaatacctaagaaaatcatttccgtcatgtgtcaacagcagttgcagttgaagaggctatgaagtaaggttttaaaccacttcacaagtcttgtaatgtggacaacgataagacttcgtgttcaaaagaatatcagtaaggcgttagattttgttctaacgccttatttttatgcacaaaaagacctcccca

SEQ ID NO: 28639 - DNA, 260 bp, Unknown
  Description of Unknown: RightRegion for integrase B2640 sequence
tttttcatcgcgggcgggctgctgagattcagcattccgcgaaagaagcgccggggttgatctccggcgctttctttttgaaaaaaatttttttgtttttcttgactttgtacgtacaatggtgtacgatttgatcgtaagggcaagggatgaacgcccgaagaaaggaagaacaaccatgaaaaacgaatttacgaaagaaaacgcccacgagtggacagagcttgaccacgtttacattgtccaggacgagccgatca

SEQ ID NO: 28640 - DNA, 71 bp, Unknown
  Description of Unknown: RightRegion for integrase B2641 sequence
tttggggagtctgagtgtaccatgcgaaagaggcagtctataagactgcctctttcgtgattttattcatc

SEQ ID NO: 28641 - DNA, 260 bp, Unknown
  Description of Unknown: RightRegion for integrase B2642 sequence
cagcatatctgctgcggtggatttttttgttgccaacgcagcgaaaatatggtaagctaaatcaaaaataatgaaataagatgaaatgagatatcaaaaatgacagaatcgctgttttacattcaaagaatccgcgcgcaatacgacaccggcattttttccaagtccgataagcgcatagccgactatctgctcgagcaccctggcgcagttgacggtgaaactgcaagctcgatcgccgagaaggtgggaacaagccc

SEQ ID NO: 28642 - DNA, 260 bp, Unknown
  Description of Unknown: RightRegion for integrase B2643 sequence
gtttgggacggcaataatatcaatatttttattaaaggtatttcagaattatcagaataagccaattgaaatacctaaaaaaatcatttccgtcatgtgtcaacagcagttgcagttgaagaggctatgaagtaaggttttaagccacttcacaagtcttgtaatgtgaacaacgataggacttcgtgttcaaaagaatatcagtaaggcgttagattttgttctaacgccttatttttatgcacaaaaagacctcccca

SEQ ID NO: 28643 - DNA, 260 bp, Unknown
  Description of Unknown: RightRegion for integrase B2644 sequence
catattttgtttatctactcaaacaacgccttcggcgctgtgatccgcatcgataaatgatcctctgcagctactcctaccaccctccatttttataaatatctgttctcactttgtaaattttcgttttcatttccctttctccttcttttttttgcagtatttatcccattcctccgggtacgtttcggcgtaccattttaggtaatcgccatatatgtgcgcttcggccgccttccgcgcggcgatcgctgaatcaa

SEQ ID NO: 28644 - DNA, 260 bp, Unknown
  Description of Unknown: RightRegion for integrase B2645 sequence
tttttcatcgcgggcgggctgctgagattcagcattccgcgaaagaagcgccggggttaatcttctgcgcatttgaaaattttctattttttcgctttctggttgacattgtacgcgcaatggtttacaatgcaatcacaggggcgagagatgaacgccagaagaaaggaagaacaaccatgaaaaacgaatttacgaaagaaaacgcccacgagtggacagagcttgaccacgtttacattgtccaggatgaaccgatc

SEQ ID NO: 28645 - DNA, 122 bp, Unknown
  Description of Unknown: RightRegion for integrase B2646 sequence
gtttgggacggcaataatatcaatatttttattaaaggtatttcagaattatcagaataagccaattgaaatacctaaaaaaatcatttccgtcatgtgtcaacagcagttgcagttgaaga

SEQ ID NO: 28646 - DNA, 260 bp, Unknown
  Description of Unknown: RightRegion for integrase B2647 sequence
atggtgcttttcttttttattccggcaaaaagatcagggggtgcaccgctcgccatgtaggcgggccagtgacacccccgatctcaaacgaaaccgttatttgatttaacgcttgcagtgttttccgcgccgccagcgtatctctacgtcggcggtctttttatgggcgcggatgggttacgcaagccgcgctgctaaaaacagcccaccgggctgtttttgccccttcttctgcgacggggccgcagctgttcgaatcc

SEQ ID NO: 28647 - DNA, 260 bp, Unknown; identical to SEQ ID NO: 28624
  Description of Unknown: RightRegion for integrase B2648 sequence

SEQ ID NO: 28648 - DNA, 260 bp, Unknown; identical to SEQ ID NO: 28638
  Description of Unknown: RightRegion for integrase B2649 sequence

SEQ ID NO: 28649 - DNA, 109 bp, Unknown
  Description of Unknown: RightRegion for integrase B2650 sequence
gtttgggacggcaataatatcaatatttttattaaaggtatttcagaattatcagaataagccaattgaaatacctaaaaaaatcatttccgtcatgtgtcaacagcag

SEQ ID NO: 28650 - DNA, 260 bp, Unknown
  Description of Unknown: RightRegion for integrase B2651 sequence
atcctgttgacgaatgtcaatgggatttttaattttgtactattcattcttcatcattaattattaatcattcatttcaggatttttgtaatgaatagtgaataatgaagtcgctttgctgatgaataatgaataattgcaattattcggcgtttctgatataatctaacatggtgatgcctgtgaaagacaacattcttatagataagtcgatcgcctttgctgcgaggataataaagcttaatcaatacctcgttcaa

SEQ ID NO: 28651 - DNA, 260 bp, Unknown
  Description of Unknown: RightRegion for integrase B2652 sequence
agacaggaaatcgaaatctattattcttttgtcggcaaggtagaactgcccgacacctaaccgcccgacctatccgacatacctcatgtgccggataggaacggcaaaattttttacacttctattacttctttatcacacataagcaaaggccgccggtatcactctttcgatgtaaatatccgggtttttccagccctccacctcaaacgtctgcattttcgtcgcctcggtcatgtcatacggcctgcggctcctcc

SEQ ID NO: 28652 - DNA, 260 bp, Unknown
  Description of Unknown: RightRegion for integrase B2653 sequence
gtttgggatggcaagaatgttaatatttttattaaaggtatttcagaattatcagaataagccaattgaaatacctaaaaaaatcatttccgtcatgtgtcaacagcagttgctgttgaagaatcgtggaaacgataaccacaggcttgttacccaaatcacaaaagcaaggataaataatggtttatctataactgaaatatgtaaactaacaggattgagttatgataattacatcaagtatgaacgagacgaagtaa

SEQ ID NO: 28653 - DNA, 109 bp, Unknown
  Description of Unknown: RightRegion for integrase B2654 sequence
gtttgggacggcaataatatcaatatttttattaaaggtatttcagaattatcagaataagccaattgaaatacctaagaaaatcatttccgtcatgtgtcaacagcag

SEQ ID NO: 28654 - DNA, 260 bp, Unknown
  Description of Unknown: RightRegion for integrase B2655 sequence
ggtgagggggtaatggtagaaaaatctcagtatgtatctagggagaaacggagcgggtaaaactacacttatccgtgttatatgcggtctgcaaaaccctgcaaatggctcgtattcgctgtacgggatcgacaatagcagcggctcaataataaaatcccgcagaagaatgggcgcagttgtggaaacgcccgctatttatactggattgtccgcaagggataatcttaaacagcaatatcgcgttttaggcttgccgt

SEQ ID NO: 28655 - DNA, 260 bp, Unknown
  Description of Unknown: RightRegion for integrase B2656 sequence
gtttgggacggcaataatatcaatatttttattaaaggtatttcagaattatcagaataagccaattgaaatacctaagaaaatcatttccgtcatgtgtcaacagcagttgcagttgaagaggctatgaagtaaggttttaagccacttcacaaatcttgtaatgtgaacaacgataagacttcgtgttcaaaagaatatcagtaaggcgttagattttgttctaacgccttatttttatgcaaaaaaagacctcccca

SEQ ID NO: 28656 - DNA, 109 bp, Unknown
  Description of Unknown: RightRegion for integrase B2657 sequence
acatggaatggtgaaactcaagaagcaaatttaagtattcttgatagtaaaaaaaaataattgaaagattggaagctaaaagtaaaaaaacgcttttagcttgtccaag

SEQ ID NO: 28657 - DNA, 260 bp, Unknown
  Description of Unknown: RightRegion for integrase B2658 sequence
gtttgggacggcaagaatatcaatatttttattaaaggtatttcagaattatcagaataagccaattgaaatacctaagaaaatcatttccgccatgtgtcaacagcagttgcagttgaagaggctatgaagtaaggttttaaaccacttcacaagtcttgtaatgtgaacaacgataagacttcgtgttcaaaagaatatcagtaaggcgttagattttgttctaacgccttatttttatgcaaaaaaaacctccccat

SEQ ID NO: 28658 - DNA, 260 bp, Unknown
  Description of Unknown: RightRegion for integrase B2659 sequence
aatggtttggagctggaagagtcactggaggaaggagacatggcggatggcaggaactaaacagcaaaggcatttgccaatcggatatcgaattcaaaatggcagggcagagataattccagaagaggcagaattgatacaacgcatttttcaggattatcaggagggagccaccatctatggaattgcaaagtggatgacagagatgggagtgctgaatgcaaacggacatccttcatggaatcatggttctatcggaa

SEQ ID NO: 28659 - DNA, 260 bp, Unknown
  Description of Unknown: RightRegion for integrase B2660 sequence
gtttgggatggcaagaatgttaatatttttattaaaggtatttcagaattatcagaataagccaattgaaatacctaaaaaaatcatttccgtcatgtatcaacagcagttgctgttgaagaggctatgaagggttgatctgacagcctaaaataacataaccgaataatatcattcaccccgcgaagccccgctttccgcggggtgaattttttctcccgcactacttgtaattcatcaaaaaatgtgttataataaat

SEQ ID NO: 28660 - DNA, 260 bp, Unknown
  Description of Unknown: RightRegion for integrase B2661 sequence
ctggacaggcgcttcgttgattacaggcgtctcttaaaggaaaccgaccccgaatcctgaaggaatttataaactcggtaagctccaacttttgtataaaaaacgggcgaatcgagtccataaccttcaaaaacggcataattcacgaatttgtgtacgccgacgaagaacctgttgccgaggcttcagagggctaaaaacaccgaaaaatccccgaaatacgctgatttcgaggatttttcttttggctcaaggacctt

SEQ ID NO: 28661 - DNA, 260 bp, Unknown
  Description of Unknown: RightRegion for integrase B2662 sequence
gtttgggacggcaataatatcaatatttttattaaaggtatttcagaattatcagaataagccaattgaaatacctaagaaaatcatttccgtcatgtgtcaacagcagttgcagttgaagaggctatgaagtaaggttttaagccacttcacaaatcttgtaatgtgaacaacgataagacttcgtgttcaaaagaatatcaataaggcgttagattttgttctaacgccttatttttatgcacaaaaagacctcccca

SEQ ID NO: 28662 - DNA, 260 bp, Unknown
  Description of Unknown: RightRegion for integrase B2663 sequence
gtttgggacggcaataatatcaatatttttattaaaggtatttcagaattatcagaataagccaattgaaatacctaagaaaatcatttccgtcatgtgtcaacagcagttgcagttgaagaggctatgaagtaaggttttaaaccacttcacaagtcttgtaatgtggacaacgataagacttcgtgttcaaaagaatatcagtaaggcgttagattttgttctaacgccttatttttatgcacaaaaagaccttccca

SEQ ID NO: 28663 - DNA, 260 bp, Unknown
  Description of Unknown: RightRegion for integrase B2664 sequence
gtttgggacggcaataatatcaatatttttattaaaggtatttcagaattatcagaataagccaattgaaatacctaagaaaatcatttccgtcatgtgtcaacagcagttgcagttgaagaggctatgaagtaaggttttaaaccacttcacaagtcttgtaatgtgaacaacgataagacttcgtgttcaaaagaatatcagtaaggcgttagattttgttctaacgccttatttttatgcaaaaaaaacctccccat

SEQ ID NO: 28664 - DNA, 260 bp, Unknown
  Description of Unknown: RightRegion for integrase B2665 sequence
gtaaaaaaaaagtcaataaccgagcgggataaaccgggctgttctgaatattttttttaaataagttctcagaacgacacgccgtattttacaggaaaatcaactatgtggatggatgcgaaaaggaatttaactacacttacgcatttgcaatctaaataatatacaaaagatgaacggaagagcagagatgtaattttttgacatttaagagaatatctgatagtatgaaaacatactaatgacgacatcggttccaa

SEQ ID NO: 28665 - DNA, 260 bp, Unknown
  Description of Unknown: RightRegion for integrase B2666 sequence
gtttgggacggcaataatatcaatatttttattaaaggtatttcagaattatcagaataagccaattgaaatacctaagaaaatcatttccgtcatgtgtcaacagcagttgcagttgaagaggctatgaagtaaggctttaagccacttcacaagtcttgtaatgcgaacaacgataagacttcgtgttcaaaagaatatcagtaaggcgttagattttgttctaacgccttatttttatgcacaaaaagacctcccca

SEQ ID NO: 28666 - DNA, 260 bp, Unknown
  Description of Unknown: RightRegion for integrase B2667 sequence
aaatcctattccaaagcaggcagcgatatgtgcctaaccctttaccccctcactgattgatttgccgccttcccttttcaggtctacaattatgtgggccgcatgaatgtggcccacgtaattgtagataccaacaagcgccgaagcgagttgttcgcttcggcgcttattttaagattcccagaataatttgcaggatcacgcagagctgttccagtgttgcttcgtttagtaataagtcgattcttttccgtgtcttt

SEQ ID NO: 28667 - DNA, 260 bp, Unknown
  Description of Unknown: RightRegion for integrase B2668 sequence
ctttatttccgcggtgttgtgagttttgtctttaactggaaagtgttcgccgagcactaaaaaacacccagcaggtgatggtcctgctgggcttttttgttttatcgtttgtgattattcacgaggcgtcgcgtcggacacttcggctgcgagttgctggactgcagtggatgcgacagttgccgccacactggcagcagtggtcgctgcttcaactgtgtgatccgtctccggcttttctgttttattcgctcggactt

SEQ ID NO: 28668 - DNA, 163 bp, Unknown
  Description of Unknown: RightRegion for integrase B2669 sequence
acttgggatggtgaaaatcttgaagctaaactaacaatgtttggagataaaaaaaaataatagaaagattggaagctaaaagcaaaaaatcgcttttagcttgtccaaggacatgcttgagttacctaaacgcacctttttggtacaagctagaaatagactt

SEQ ID NO: 28669 - DNA, 260 bp, Unknown
  Description of Unknown: RightRegion for integrase B2670 sequence
catgaacgaaaacaaaaatgccgtgctgtatgcaagattcagctcagatatgcagcatgaaacctcaattgaagcgcaggaagaagctatccgcaagtatgccagggagaacggatataccatcattgcggagtacatcgaccgtgcaaaatcagctactacaacggcaaagcgtgacagattcaatcagatgatagaggacagcaaggacggcggattcagtgtcgtaatagtccataagtacgacagattcgcaagaa

SEQ ID NO: 28670 - DNA, 260 bp, Unknown
  Description of Unknown: RightRegion for integrase B2671 sequence
gtttgggacggcaataatatcaatatttttattaaaggtatttcagaattatcagaataagccaattgaaatacctaagaaaatcatttccatcatgtgtcaacagcagttgcagttgaagaggctatgaagtaaggttttaagccactttacaagtcttgtaatgtgaataacgataagacttcgtgttcaaaagaatatcagtaaggcgttagattttgttctaacgccttatttttatgcataaaaagacctcccca

SEQ ID NO: 28671 - DNA, 260 bp, Unknown
  Description of Unknown: RightRegion for integrase B2672 sequence
gtttgggacggcaataatatcaatatttttattaaaggtatttcagaattatcagaataagccaattgaaatacctaagaaaatcatttccgtcatgtgtcaacagcagttgcagttgaagaggctatgaagtaaggttttaagccactttacaagtcttgtaatgtgaacaacgataagacttcgtgttcaaaagaatatcagtaaggcgttagattttgttctaacgccttatttttacgcacaaaaagacctcccca

SEQ ID NO: 28672 - DNA, 260 bp, Unknown
  Description of Unknown: RightRegion for integrase B2673 sequence
ttcaacattgactttgagcagttcagcgctggactggacatttcggcaatcgccgcataaaaaaagcccgcttcaaaagggaagcggacataaaacaaaaaacttgcttttttcaaagcaagcatttattaagaatactcagcgcacccgattggtggagataagcgggatcgaaccgctgacctcttgactgccagtcaagcgctctcccagctgagctatacccccatgtaaggggtgcgctgagtaatttcttattc

SEQ ID NO: 28673 - DNA, 109 bp, Unknown
  Description of Unknown: RightRegion for integrase B2674 sequence
cggttcggtctttcccgcggccataccgactacgtgccgcggggcattcccctcaaatgacaccttgcccggttcggggaagcaccggggtcggtgatcaccaaaaact

SEQ ID NO: 28674 - DNA, 260 bp, Unknown
  Description of Unknown: RightRegion for integrase B2675 sequence
ttagaagaggctccagagtgggtgaaagagattgaagcgcaacctaatcagccgctatgaaaagtttgcttacatcattctgaatgtttagtaaaattactttaaaaatgtcaacaaggttaatcaatgaaaacttcgccagttcatgagttgcagggtttggcttctgacgtcagtaatgacattgttggggttttaataaaagccaaaatgattgcagtgaagttaaacttgcccgaattggccgaatggtttgatta

SEQ ID NO: 28675 - DNA, 260 bp, Unknown
  Description of Unknown: RightRegion for integrase B2676 sequence
gcaattcccatttttcaggcgagaaagagcatttccgttgaatctgtaaccgacttgtaatatttgcaacaacaaaaaatcccccgccagctttcctttcggattgccagcgggggattttgtctgttattcttctgtgtagctgttcttgatgggcagtgctttggctcggttatacaattccgtacccgttccgttccctcccagcgcatggtagctgttgtaaagatagccaatgttcgtcaggcccaccgtgtcaa

SEQ ID NO: 28676 - DNA, 260 bp, Unknown
  Description of Unknown: RightRegion for integrase B2677 sequence
gtttgggacggcaagaatatcaatatttttattaaaggtatttcagaattatcagaataagccaattgaaatacctaagaaaatcatttccgtcatgtgtcaacagcagttgcagttgaagaggctatgaagtaaggttttaagccacttcacaaatcttgtaatgtgaacaacgataagacttcgtgttcaaaagaatatcagtaaggcgttagattttgttctaacgccttatttttatgcacaaaaagacctcccca

SEQ ID NO: 28677 - DNA, 260 bp, Unknown
  Description of Unknown: RightRegion for integrase B2678 sequence
tacgtccagaaaatccagattttctaccgctttatcggcccattggatgccatcgagtaacaaagtcagaaaagtcacctccgagaactatcctacagacgcagggcgcgagggagaactgatcttccgcttggtgtaccagcaagcgggatgcaaaaagccctttacccgcctgtggctgtccagcatggaggaaaacgccatccgggaaggattcgcccatctcaaaccgtcaactgaatacgatgcgctgtacaacg

SEQ ID NO: 28678 - DNA, 260 bp, Unknown
  Description of Unknown: RightRegion for integrase B2679 sequence
gtttgggacggcaataatatcaatatttttattaaaggtatttcagaattatcagaataagccaattgaaatacctaagaaaatcatttccatcatgtgtcaacagcagttgcagttgaagaggctatgaagtaaggttttaagccacttcacaaatcttgtaatgtgaacaacgataagacttcgtgttcaaaagaatatcagtaaggcgttagattttgttctaacgccttatttttatgcacaaaaagacctcccca

SEQ ID NO: 28679 - DNA, 260 bp, Unknown
  Description of Unknown: RightRegion for integrase B2680 sequence
gatgagattctggtgcggatcaagagcggcgcggaaatcaaacagcgattggagcgatgaaaatgatttacgcaaccggcgaccttcacggaaacattctccgattccagccgcaatactttctggagcaagcggagatgaccaaagacgactacatgatcgtctgtggcgactttggctgcgtctggaacggagacaagagcgacgatccgcagctcgattggctggaatccctgccatttacggttctgttcgtggac

SEQ ID NO: 28680 - DNA, 109 bp, Unknown; identical to SEQ ID NO: 28653
  Description of Unknown: RightRegion for integrase B2681 sequence

SEQ ID NO: 28681 - DNA, 260 bp, Unknown
  Description of Unknown: RightRegion for integrase B2682 sequence
catattttgtttatctactcaaacaacgccttcggcgcggtgatccgcatcgagaaatgatcctctgcagctactcctaccactccggctcttgcattgtcagcttctgatcatatgcaagcctttccggcgttgtgattttataatcgtccggcacatccaacgtgcgtggcaacagttttatcattgcgatctcttccttcccttctttttcatatttttctttttgttcatattccgcagcttttgcggcatcaaaa

SEQ ID NO: 28682 - DNA, 109 bp, Unknown
  Description of Unknown: RightRegion for integrase B2683 sequence
gcccaaacggcgatttttctctgtaccaaaacacagatgcaaaatcgacgttttccctaatgaagtacgcagtaacagtgctccgctgcggtatggccctgacagtcca

SEQ ID NO: 28683 - DNA, 260 bp, Unknown
  Description of Unknown: RightRegion for integrase B2684 sequence
gtttgggacggcaataatatcaatatttttattaaaggtatttcagaattatcagaataagccaattgaaatacctaagaaaatcatttccgtcatgtgtcaacagcagttgcagttgaagaggctatgaagtaaggttttaaaccacttcacaagtcttgtaatgtggacaacgataagacttcgtgttcaaaagaatatcagtaaggcgttagattttgttctaacgccttatttttatgcacaaaaagacctcccca

SEQ ID NO: 28684 - DNA, 260 bp, Unknown
  Description of Unknown: RightRegion for integrase B2685 sequence
ggggagtctgagtgtaccacaaaggaagcatccgaaccggatgcttcctttttactataaacaatccgctgaattgattttcctttttgtgaagcatgaccgtgaacttcgttgctatgctgagcacagaaattggcgcaggggcgcagaaacggggcagcggatgtatttgtgggtgatcgcggcagtgaccgcatattttatcaaggggttgtgcggctttgccaacacgctggtactgacctcgatcctgagcttcg

SEQ ID NO: 28685 - DNA, 260 bp, Unknown
  Description of Unknown: RightRegion for integrase B2686 sequence
aaatcctattccaaagcaggcagcgatatgtgcctaaccctttaccccctcactgattgatttgccgccttccctttcaggtctacaattacgtgggccgcatgaatgtagcccacgtaattgtagataccaacaagcgccgaagcgaacaactcgcttcggcgcttattttaagattcccagaataatttgcaggatcacgcagagctgttccagtgttgcttcgtttagtaataagtcgattcttttccgtgtctttt

SEQ ID NO: 28686 - DNA, 260 bp, Unknown
  Description of Unknown: RightRegion for integrase B2687 sequence
gtttgggacggcaataatatcaatatttttattaaaggtatttcagaattatcagaataagccaattgaaatacctaagaaaatcatttccgtcatgtgtcaacagcagttgcagttgaagaggctatgaagtaaggttttaagccacttcacaagtcttgtaatgcgaacaacgataagacttcgtgttcaaaagaatatcagtaaggcgttagattttgttctaacgccttatttttatgcaaaaaaagacctcccca

SEQ ID NO: 28687 - DNA, 260 bp, Unknown
  Description of Unknown: RightRegion for integrase B2688 sequence
aaccggcaagaaatagagatagaattcgaatgcggaataaaagtgaaggaaaccctgtaaagaaaaagccaactgcacaaaagtgtggttggcaattttttttgcactttgaaaaaaatcctttttgtagccttacccccgaaaaaccctttttgttgcgccgtgctaattttttagagaaaagcctcgtcaaaggaacaataccagacgcaaaggaagcacaaacaacaataagggtaaaaaatggcagaaaaacgcga

SEQ ID NO: 28688 - DNA, 109 bp, Unknown
  Description of Unknown: RightRegion for integrase B2689 sequence
atacccgacatcgctacgcgagtagttcaccgcacggacagggattcatcgctgcaataagcatgatctttgatgggtacgtaatagatgcattggctcttgcaattgt

SEQ ID NO: 28689 - DNA, 74 bp, Unknown
  Description of Unknown: RightRegion for integrase B2690 sequence
aaaaagctgcaggataccaatgatatgtacccagttttctggacaccgctaaaaatttgaataattatatttac

SEQ ID NO: 28690 - DNA, 260 bp, Unknown
  Description of Unknown: RightRegion for integrase B2691 sequence
aaatcctattccaaagcaggcagcgatatgcgcgtgacgctatatccccttaccgattgattccgtgcgttccactatacttcgctatctactattacacggtacacatgaatgtggcccacgtaattgtagatatcaacaagcgccgaagcgagttgttcgcttcggcgcttattttatgattcccagaatgatttgcaggatcacgcagagctgttccaatgttgcttcgtttagtaataagtcgattctttcccgtg

SEQ ID NO: 28691 - DNA, 260 bp, Unknown
  Description of Unknown: RightRegion for integrase B2692 sequence
gtttgggacggcaataatatcaatatttttattaaaggtatttcagaattatcagaataagccaattgaaatacctaagaaaatcatttccgtcatgtgtcaacagcagttgcagttgaagagtctatgaagtaaggttttaaaccacttcacaagtcttgtaatgtggacaacgataagacttcgtgttcaaaagaatatcagtaaggcgttagattttgttctaacgccttattttcatgcacaaaaagacctcccca

SEQ ID NO: 28692 - DNA, 260 bp, Unknown
  Description of Unknown: RightRegion for integrase B2693 sequence
gtttgggacggcaataatatcaatatttttattaaaggtatttcagaattatcagaataagccaattgaaatacctaagaaaatcatttccgtcatgtgtcaacagcagttgcagttgaagaggctatgaagtaaggttttaagccacttcacaaatcttgtaatgtgaacaacgataagacttcgtgttcaaaagaatatcagtaaggcgttagattttgttctaacgccttatttttatgcacaaaaaaagacctccc

SEQ ID NO: 28693 - DNA, 260 bp, Unknown
  Description of Unknown: RightRegion for integrase B2694 sequence
aaggacaagcggttgaccttcaacttcaaggtgggaataagcaaaacgataacaatataaaacgagagtcggtggagtaaaatccatcggctctttttttactttataagggtgcaaaccgacaaaaagaagggtgcaagaattggataaaacgagatcttcctataaggtaaaactccttgattttcctatgatttccgacatttttaacgggaaggatgcaagatcccatggtgtaccatttgcaagtttttcaacgg

SEQ ID NO: 28694 - DNA, 260 bp, Unknown
  Description of Unknown: RightRegion for integrase B2695 sequence
ttttccattgcgggcgggctgctgagattcagcattccgcgaaaaaagcgccggggttaatctcctcggcgcttctttcgcgttagtttataacgccgacaatttagccatgacggcggcgtaggttctgggctgcatcacgctaaggctctccataagctcatccatcacccgccatgcgtcccgcggctctttgtcggagacggtgcggaggaagtcgctgttgccgtatgccgcgccggaataagccgggatagact

SEQ ID NO: 28695 - DNA, 260 bp, Unknown
  Description of Unknown: RightRegion for integrase B2696 sequence
catgagcgaaaacaagaatgccgtactgtatgcaagattcagctcagatatgcagcatgaaacctcaatcgaagcacaggaagaagctatccgcatgtatgccagagagaacggatatgccatcattgcggagtacatcgaccgtgccaaatcagctactacaacggcaaagcgtgacagattcaatcagatgatagaggacagcaaggacggcggattcagtgtcgtaatagtccataagtacgacagattcgcaagga

SEQ ID NO: 28696 - DNA, 260 bp, Unknown
  Description of Unknown: RightRegion for integrase B2697 sequence
gttcacagagaaagccaaaaagagcgatacagcaaacgctgtatcgctctttttggttaacggcaatcagtaattcagaccgaagccgctgcggtagtaattgccgtcggcatcgcagtaggcgtagctgccgcccttgacgttggcgaggatagcgggatcgatgtactgatccttatcgtagccgggaacgtcgttgggagaggcgcagatctcgcgcaccacaccgtcgatctcctgctcggtgatggcaatgacgg

SEQ ID NO: 28697 - DNA, 260 bp, Unknown
  Description of Unknown: RightRegion for integrase B2698 sequence
gggtcaaagtccaccacgtcggagcaagctttgtatcgcttgctccgacttattttataagtcagagcgcgctcacgccgctgctcctcctttccaactgcgacccgctattgctgggctcgcagttggtgtgccgccctgcgggcggtatgtttcgtttctgacagaaatatcgattttcaccttctcttccaaaaagaaagacatgaccgcaggtcatgtctttctttttgatttccgctcctgttggtcgttccact

SEQ ID NO: 28698 - DNA, 260 bp, Unknown
  Description of Unknown: RightRegion for integrase B2699 sequence
ttcaacattgactttgagcagttcagcgctgggctggacatttcggcaatcgccgcataagaaaagcccgcttcaaaagagaagtgggcataaaacaaaaaacttgcttttttcaaagcaagcatttattaagaatactcagcgcacccgattggtggagataagcgggatcgaaccgctgacctcttgactgccagtcaagcgctctcccagctgagctatacccccgtataaggggtgcgctgagtaatttcttattc

SEQ ID NO: 28699 - DNA, 260 bp, Unknown
  Description of Unknown: RightRegion for integrase B2700 sequence
ccgatgcgctttttcattgatgggccatttgttttgtccaaaaagctgtttaccgcataattgtaatcgaattgcaatcgtttgtaaacagaaaaatcccccgccagcattccactttggactgccagcgggggattttctatgccttattcagttgttcggcaagttagtgtacctgctttttcaggttttccatcactccgtctgcctggattgcagcctgagtaaagctgttgttgttccaccatgcgatcagggcg

SEQ ID NO: 28700 - DNA, 260 bp, Unknown
  Description of Unknown: RightRegion for integrase B2701 sequence
gacggcacccgcgaacaagaagtcgaaatcttctaccgcttcatcggtaaaatcgattgaacaaccggtatctttatttacgtgataccaaggcttcatgcaattaaagataccacacccaacacccacgcttccgtcacttgcttcacatccaaaaacaaaaaaatggggagagcccgccaagctctccccacatattttttattctatattcgtcttctcaagtccttttacggcagcttcgatcatcccgtcaacaa

SEQ ID NO: 28701 - DNA, 260 bp, Unknown
  Description of Unknown: RightRegion for integrase B2702 sequence
gacggcgttgtggtcgaattcaaatgcggcgtggcaatcgagcaggaatacgtgaaatgagaaaacgaaccgccggtgggaaaagcacaacccgctggcggttatcattttggcgtttttccataggttttcgtatcattacggcgctctttcacatcgtaaaacgaatctttttcccgttctcctttgtgtgtactgccctaagcaaaactgtttttaatgcctttccatccccggtaaaaatcagatcttttttcttt

SEQ ID NO: 28702 - DNA, 260 bp, Unknown
  Description of Unknown: RightRegion for integrase B2703 sequence
acgggcaaaagcaagacgcaaactcatgcatttgagtttgcgtcttgcttttttacataaggatagagcttgacaggagcaatgtcgacggtcggagttttcaggtgcatcccgataaaatgctgtgctttcaaggttttgcgggttttcgccggatttgcagcaaattgccgaactttcgcaaaagtattgaaagcactgggcaaaacagctttttcggaatcgcaggcagtagtagtcaaatagtagtcatgcgcagg

SEQ ID NO: 28703 - DNA, 260 bp, Unknown
  Description of Unknown: RightRegion for integrase B2704 sequence
gtcaccattcaaatggtcggcaacgtgttcgttttgttttgtgagattccaagcgtttaagcaagttttaatcaagttctaagcaagatcgcacaaacaaaaaatgcccgcactttccattttggattgtgcgggcattttccttttgtgttagaattttccgtatttcggaaaaacttgccgaaatagagagtttcctgccaaaatgcagacaagccgaccacaaatcggctaaaatcagcaacaaaggagaccaaagg

SEQ ID NO: 28704 - DNA, 260 bp, Unknown
  Description of Unknown: RightRegion for integrase B2705 sequence
cgattccgtgacggcgtggaaattgagactttcgcacattcccaggaacatatggcataatcagcagagcataacaaaagaccagtcactgacggctggcctttttgcgtgtgcagctgttctctggtcagatttcgcttatcacagctttgaattcatccgacgcaataaagaaagaacgggaatatccagtctttcctgcttatactggatcatggaatccctcgctttgcatatccgcatacatgatttccacatgc

SEQ ID NO: 28705 - DNA, 260 bp, Unknown
  Description of Unknown: RightRegion for integrase B2706 sequence
gaggaagttcaggtggcttttctgtttatatcattccgaaccacagccgcaaggccgtgactcttcaaaacttgaagagtcataactctattaccactttggatttttgaagagtgacgaaaaagaagcgcatcagcgtttaaaagttcactcttcaagatgaagagtcatggcctgaaaacgcagttttctttgctttttgttcatgactcttcaaaacccctgtgggtcatagggaacttttgaagagtcacccctgc

SEQ ID NO: 28706 - DNA, 260 bp, Unknown
  Description of Unknown: RightRegion for integrase B2707 sequence
aatatccgttatttcccgcttggtatcgtttgtttggattccaaaaggccgtttcattgaaagaaccggccttctttttgtttttatttaattgaaccacttgacgggcatcggcacgaaatgagcgccgttctttaacgcaggtattcggcatatatattgcatatgctttgcgcgtcgctgattgtgtggatgttttcaaagaatttccgatccaggatagctttttgagcgacggttaccatgcagcactgtgcggc

SEQ ID NO: 28707 - DNA, 260 bp, Unknown
  Description of Unknown: RightRegion for integrase B2708 sequence
gacggaagccgggaacaggaggtagaaatcttctaccgctttatcggcaaaattgattaaatgacatcaatatctttaactatgtgataccgggaaaagctatccagatattcctatcttaagaaaaatagaagaggtttatgggataccatatgataggcttatttttttgcctcttgacttcggtttaaccgaaaacaaggaataagagaaaggagaggcatgataaagaagataaaagcaaagctcaaggagccgta

SEQ ID NO: 28708 - DNA, 260 bp, Unknown
  Description of Unknown: RightRegion for integrase B2709 sequence
gatggcaccagagaacaggaagttgaaattttttaccgttttatcggcaaagtcgagtgacgcattataaaagggtgtgcaatcgaacggttgcacacctagtacataaccaatatctttaagtgagggattctccagtcgctttccccgaaattcgtataggccagctggcagaaataccgccttgctatcatgtcgttatacttctgctgcgcaatggatgccgtcagttctcttttgcggcgggtgctcgcggtgtg

SEQ ID NO: 28709 - DNA, 260 bp, Unknown
  Description of Unknown: RightRegion for integrase B2710 sequence
ttcgacaacttcgagctgctgctgtaccccaaactgccgccctccggcctcagggaataacggaaataatttaaagccgtccatttcgggcggcttttctttgtgacaaccttgcaggcgtgatttatcattgctgcaaggttatcacaaataagcctaaaaaaatcgcgcccggctgtcctgcgaaaagtgtccggcgcaaaagccaagaatctgatatgcgcgtgagattttaccaacggccatgtctatcaggttcc

SEQ ID NO: 28710 - DNA, 72 bp, Unknown
  Description of Unknown: RightRegion for integrase B2711 sequence
accaaaatcctcgaacatttgttcggggatttttttgttttagtgatttgtttgggatgacaagcatcgtcc

SEQ ID NO: 28711 - DNA, 260 bp, Unknown; identical to SEQ ID NO: 28699
  Description of Unknown: RightRegion for integrase B2712 sequence

SEQ ID NO: 28712 - DNA, 260 bp, Unknown
  Description of Unknown: RightRegion for integrase B2713 sequence
gacggaagccgggaacaggaagtggaaatcttctaccgctttatcggcaaaatcgaatgacacatcttgagatacccaacaatatctttaactaagggaaacgggtactgccaatccagatatggagaatctgaaaatactctccagaagcttgcaggtcagcattgatgagctgctgggaaataaaatccccctggaaaaagaggttgttaaggagaaggaagttatttatgtgcataaccgctatacatatgaaaagc

SEQ ID NO: 28713 - DNA, 260 bp, Unknown
  Description of Unknown: RightRegion for integrase B2714 sequence
gattttagggagtctgagtgtaccatgacgagtgttcttatagcatttgaaaagctgtaagaacactcgtcttttttgtttttatccggcgatctctgctggggcgtagttgacgaacacacccttccgggtattgacggtcacatcaggaattggcagcggcagcattttagggattgtgatttctcccacgcagttataatggatgcgaagccgctgctcccacgccccatcaattttctcggcattgtaaacttcga

SEQ ID NO: 28714 - DNA, 260 bp, Unknown
  Description of Unknown: RightRegion for integrase B2715 sequence
caccaaaatcctcgaacgtttgttcggggattttttgttttagtgatttgtctgggataacaagcatcgtcccccgcaccgtaggggcggattccatatccgcccgcggagccttgccattactgcaaacgtcccgggtcgctggcgagcattgacccctgcggcgctgtaggcgtgatgccctatgcaactgcgaaatgtacgcggtacaaatacacctatcccgcgcacaaaaacattttttgcaatttttttcccac

SEQ ID NO: 28715 - DNA, 260 bp, Unknown
  Description of Unknown: RightRegion for integrase B2716 sequence
gcaaatgaggtgctggttcagctcaaaggcgggaaagagattcacaaaagattggagtgatacgatgatctacgcaaccggcgatcttcacggcaacgcgcttcgctttcagccggaatacttcccggagcaagccgaaatgacgaaggacgattatatgatcgtctgcggagattttggcttcgtctggaacggcgacaaaagtgatgacgcgcagctaggcaaactggaaacgctgccgtttaccatcctgtttgtag

SEQ ID NO: 28716 - DNA, 109 bp, Unknown
  Description of Unknown: RightRegion for integrase B2717 sequence
gattttggggagtctgagtgtaccatgacgagtgttcttatagcatttgaaaagctgtaagaacgctcgtctttttttgtttttatccggcgatctctgctggggcgta

SEQ ID NO: 28717 - DNA, 260 bp, Unknown
  Description of Unknown: RightRegion for integrase B2718 sequence
gtcaccattcaaatggtcggcaacgtgttcgttttgttttgtgagattccaagcgtttaatcaagttttaatcaagatttaatcaagttctaagcaagattgcacaaacaaaaaatgcccgccctttccattttggattgtgcgggcatttttcttttttgtgttagaattttccgtatttcggaaaaacttgccgaaatagagggtttcttgccaaaatgcagacaagccgaccacaaatcggctaaaatcagcaacaa

SEQ ID NO: 28718 - DNA, 260 bp, Unknown
  Description of Unknown: RightRegion for integrase B2719 sequence
ggggacaaagaaatagaaatagagttcgaatgtgggattaaggtaaccgaaaaactgtaaattatattataataaaataagaccgactgtggcaatcatgccgtggtcggtctatttttttatgaattacgctacttatcgttcaatgagtacaaaaatcctttttgttgcgtttaagtctgatttttaggacggtgcaggaaaattgaaatcaagtcctaccaagaaaggcgaatgaatgaacaaaaagggtaatcaat

SEQ ID NO: 28719 - DNA, 260 bp, Unknown
  Description of Unknown: RightRegion for integrase B2720 sequence
gaggtgttcttcatctgcggtgtgtttggtatttgtgtccccagattttcccgctggtaggtttgcagttgactgcaaaatgggaaaagaaaagatttgccccacggcacccaaaagggtagccgtggggttctttttgcggttttattccatttctacccgccgcacggcgtcggcggtggattctgcggtcaacggcttcttaaatgcttcgttaaattcagccacagccgcctcaatcagaatctgcatttcttcgg

SEQ ID NO: 28720 - DNA, 260 bp, Unknown
  Description of Unknown: RightRegion for integrase B2721 sequence
tcccaaaaggaaatccaaatagacttcaagtgcggtataacggtaaaagaaactctataaacaacggataagaccgacggcgtaaaaaaccgtcggtcttgattgttgaatttaatataataatggctcccacagattagaataataaatattttgaaaatattttgaaaatattaacaatatacctagtgatttatatttgttaaaatcgaaatataataaaaatattttgaaaatatgcttgacatttgtcgaataat

SEQ ID NO: 28721 - DNA, 260 bp, Unknown
  Description of Unknown: RightRegion for integrase B2722 sequence
ataacgatagttgttggctgttcggtgtttgtttttacagtaaaaatgccggaggcgtaatgcctccggcttttcttatttttccacctttagtcatactggcagggacaatagactgtgccgctaaagcagtacagaaatacagggcaaagtttgtgcagcttgcctattgaaagcgtaccgctaaagcggtacaatatagccatcgaaaggcaaacaagtcacacaaaaaggagaacaaaatcatggacgaaatcaga

SEQ ID NO: 28722 - DNA, 260 bp, Unknown
  Description of Unknown: RightRegion for integrase B2723 sequence
accaaaatcctcgaacgtttgttcggggatttttttgttttagtgatttgtttgggatgacaagcatcgccctgcggcgctggcggttcgcgcttttctgctatagatacagcaacagccccggtcctgcactggaaccggggctgtacgattttatatcaactttacgccatgaaatccggcaggggcttgccctccttcagccattggtgatactcggcggtagcggcaaactcaacgtcgccagcggagttcagcgc

SEQ ID NO: 28723 - DNA, 260 bp, Unknown
  Description of Unknown: RightRegion for integrase B2724 sequence
gacggcagccgggagcaggaagtagagattttctatcgctttataggcaaaatcgactgacacatcttttttacccaacaatatctttaactaagggaaaatggcggcggtgctcccgatatttcgctcctcccgttgttatcacaggctctcggcgtggacaccgaagccctgctgagaggcgatctggaggaaaacgatatgactaacggcaatatgaagaaaatgcggttttaccgctgtccgacctgcggcaatct

SEQ ID NO: 28724 - DNA, 260 bp, Unknown
  Description of Unknown: RightRegion for integrase B2725 sequence
gacggaagccgtgagcaggaagtagaaatctactaccgcttcatcggcaaaatcgactgacctttcttttttacccaacaatatctttaattaagggagacgggatcttcattaccagatattttgctattgccacaactagcatcttactttgatataagcattgacgagttgataggatatcaaccgcaaatggaacaagaggatattaaaaaactgtatatccgtctttctaaagatttttctatgttgtcctttga

SEQ ID NO: 28725 - DNA, 260 bp, Unknown; identical to SEQ ID NO: 28722
  Description of Unknown: RightRegion for integrase B2726 sequence

SEQ ID NO: 28726 - DNA, 260 bp, Unknown
  Description of Unknown: RightRegion for integrase B2727 sequence
aatatccaatatttcccgcttggtatcgtttgtttggattccaaaaggccgtttcattaaacgaaccggccttcttttttgtttttatttgaattggccacttgacgggcatcggcgcgaaatgagcgccgttctttaacgcaagtattcagcatataggtggcaaacgcactgtgctgtgcttattgtgtaaatgtttttaaagaattttcgatccaggatagctttttgagcgacggttaccatgcagcactgtgcgg

SEQ ID NO: 28727 - DNA, 260 bp, Unknown
  Description of Unknown: RightRegion for integrase B2728 sequence
attcgcgaagatattcctccaatttgggctgaacaacgcaaactttatggggtaatctagttttgcacagtattttgcacagtattattttcttatttttgctttataatacctacacaatagtcgttttctatttgttgttgtgttttaagtagcttgtttatcagcagtttaaatttgaaaataaacctctaatcaatagttttagaggtttatttatgaagccccccatttttaacggactacccgagtacgtccga

SEQ ID NO: 28728 - DNA, 109 bp, Unknown
  Description of Unknown: RightRegion for integrase B2729 sequence
gattttggggagtctaagtgtaccatgacgagtgttcttatagcgtttgaaaagctgtaagaacgctcgtctttttttgtttttatccggcgatctctgctggggcgta

SEQ ID NO: 28729 - DNA, 260 bp, Unknown
  Description of Unknown: RightRegion for integrase B2730 sequence
ttcgataacttcgagctgctgctgtaccccaagctgccgccctccggcctcggagaataacggaaataattaaagccgtccatttcgggcggcttttctttgtgacaaccttgcaggtgtgatttatcattgctgcaaggttatcacaaataagcctaaaaaaatcgcgcccggctgtcctgcgaaaagtgtccggcgcaaaagccaagaatctgatatgcgcgtgagattttaccaacggccatgtctatcaggttccg

SEQ ID NO: 28730 - DNA, 260 bp, Unknown
  Description of Unknown: RightRegion for integrase B2731 sequence
gattttggggagtctgagtgtaccatgacgagtgttcttatagcatttgaaaagctgtaagaacactcgtcttttttgtttttatccggcgatctctgctggggcgtagttgacgaacacacccttccgggtattgacggtcacatcaggaattggcagcggcagcattttagggattgtgatttctcccacgcagttataatggatgcgaagccgctgctcccacgccccatcaattttctcggcattgtaaacttcga

SEQ ID NO: 28731 - DNA, 98 bp, Unknown
  Description of Unknown: RightRegion for integrase B2732 sequence
cggttcggtctttcccgcggccataccgactacgtgccgcggggcattcccctgaaatgacaccttgcccggttcggggaagcaccggggtcggtgat

SEQ ID NO: 28732 - DNA, 260 bp, Unknown
  Description of Unknown: RightRegion for integrase B2733 sequence
agccttgaaaaatgggggtttcccttgcgctgttctgacgatatgattttaaccatataaccacctacactaccattctgtttggaagtaaggtttccgttgtatccgtctgtaagcggcacacccagctcatttgcaacctcaaatttgaaacgatttaatgcgccctttgcttctggtacagctgctttgttagaagaagtattgtttgacataatcattttcctccttggttaattgttgttttgtttgatgttaca

SEQ ID NO: 28733 - DNA, 260 bp, Unknown
  Description of Unknown: RightRegion for integrase B2734 sequence
acgggcaaaagcaagacgcaagctcatgcatttgagtttgcgtcttgcttttttacataaggatagagcttgacaggagcaatgtcgacggtcggagttttcaggtgcatcccgataaaatgctgtgctttcaaggttttgcgggttttcgccggatttgcagcaaattgccgaactttcgcaaaagtattgaaagcactgggcaaaacagctttttcggaatcgcaggcagtagtagtcaaatagtagtcatgcgcagg

SEQ ID NO: 28734 - DNA, 260 bp, Unknown
  Description of Unknown: RightRegion for integrase B2735 sequence
gtcaccattcaaatggtcggcaacgtgtttgttttgttttgtgagattccaagcgtttaatcaagttttaatcaagttctaagcaagatcgcacaaacaaaaaatgcccgcactttccattttggattgtgcgggcattttcctttttgcgttagaattttccgaaatacggaaaaacttgccgaaatagagggtttcttgccaaaatgcagacaagccgaccacaaatcggctaaaatcagcaacaaaggagaccaaag

SEQ ID NO: 28735 - DNA, 260 bp, Unknown
  Description of Unknown: RightRegion for integrase B2736 sequence
ataacgatagttgttagctgttcggtgtttgttttttcagtaaaaatgccggaggcgtaatgcctccggcttttcttatttttccacaatctctactttgacatctatccagcccagatgcgcgtgtttgatagcgacagggaatactccgtcctttgggcggtagacttgtgcgccggacggggaaacatgaacgacactcaaatcctccgtcttatatatcatcgcctcgccgctttgtcccacggctctcgcagtag

SEQ ID NO: 28736 - DNA, 109 bp, Unknown
  Description of Unknown: RightRegion for integrase B2737 sequence
gtgctgtttacggctgcaatattgtgcaaattccgacagattaccgtatatatctattgaaatgtgtcttacttttgtgataaaatgatatgtctaaacatcaaaatac

SEQ ID NO: 28737 - DNA, 260 bp, Unknown
  Description of Unknown: RightRegion for integrase B2738 sequence
gtcaagaaccctatcgttttatcttgcctttgtttttccttgtgtttattggctttttgaaaacagagggtgcatttttgttttccggttgaagcctcaaatcggtttgcaaatggctcgttttgccgttttggagcgaaatcccgaaaagctatcgtgtagaatggggctatcgtgtggacgcaggggctatcgtgtaacgggcattttttacgcgcgaacggcagctcttcgtgaataaagatgcaagaaaagacccg

SEQ ID NO: 28738 - DNA, 260 bp, Unknown
  Description of Unknown: RightRegion for integrase B2739 sequence
gtcaccattcaaatggtcggcaacgtgttcgttttgttttgtgagattccaagcgtttaagcaagttttaatcaagttctaagcaagatcgcacaaacaaaaaatgcccgcactttccattttggattgtgcgggcattttttgtttgtgttagaattttccgtatttcggaaaaacttgccgaaatagagagtttcctgccaaaatgcagacaagccgaccacaaatcggctaaaatcagcaacaaaggagaccaaagg

SEQ ID NO: 28739 - DNA, 260 bp, Unknown
  Description of Unknown: RightRegion for integrase B2740 sequence
gacggcactcgtgagcagttggtagagattcactaccgctttattggaaaaatcgactgatggttcatcagtaaaacaatatctttaactaagggaaacgggtgcatcccttccggatatgtacaagttggttgatatcgccaatctctttgacgtgagcatcgacgaccttgtttgcggtaatcatttgggcggtttggattcgctgcctgcggttgatagcaaactgggtgaaattatttccgtgttggacaatattg

SEQ ID NO: 28740 - DNA, 64 bp, Unknown
  Description of Unknown: RightRegion for integrase B2741 sequence
cggttcgatctttatcgaagtcataccgtccacgtgcttcgatgcagtcccctaaaatgacgtc

SEQ ID NO: 28741 - DNA, 260 bp, Unknown
  Description of Unknown: RightRegion for integrase B2742 sequence
ggaaaacacgatatcgagttccaattcaaatgcggagtcgatatccatgaaaccatataagcgaagaccactatccaataaaacgggtagtggccttttttatttgcacagaggcggagaactattgaaaaaagtggaggaatacggtataataaaaataacaatcggcacagtcggctgaacacggagtacaatatgtcaaacaacaactcgataatagatttaatgtcattagagtacgaacaaaagtattttgaaga

SEQ ID NO: 28742 - DNA, 260 bp, Unknown
  Description of Unknown: RightRegion for integrase B2743 sequence
aggggttcggatttcttgtttttatcaaggatattgaagcttagtttcggaatagaataacatcaaattcaggaggatatacccatgaaaaagctcataagctgtgcgttcaatatagataccgcctgcgtggaacttcatttcacggatgggagtatttactccataaattgcaccgccgtggagaacgaggcggcggacaaccgcttccagcgctctgagctggactacctcatctacaacgacccgctggcctatgc

SEQ ID NO: 28743 - DNA, 260 bp, Unknown
  Description of Unknown: RightRegion for integrase B2744 sequence
gaacctgtttccgattggagaagggttcggatttttcgttttcttcgggtacgacaatgaaggctcccctatttgaagaatttttatgtggatttcatgagttgttctaaaaaatgtattgaaatccacatgatttggtgtatactgtttaataagggaatcatatgaattgaatatgtgcggtaatactatgaaggatggtgttttcaatatgatgacactatatagaaacatatacaaaaattcagctccgcttcata

SEQ ID NO: 28744 - DNA, 260 bp, Unknown
  Description of Unknown: RightRegion for integrase B2745 sequence
ctggaagcacttactggtatggtaagtgctttttgtgtatctgcgtattatatcagataatgatgagtgtccatatagtgaagattatatgggcaggaatttggagcaaagcttaagtagttatattattgatagctggattataaataggtgtattaaaaatgcgcaaagcaggaaagtatataatcgtacccacttatatcattacaggaaaatataataatccccatcctcatccgagaatttcttataagtagtgt

SEQ ID NO: 28745 - DNA, 260 bp, Unknown
  Description of Unknown: RightRegion for integrase B2746 sequence
ccggaaaagacaagcctttgttcaggttggctggggaacctggactcgaaccaagactaacggagtcagaggacataatctcttggttgcgcggtgattgacctgaatggtttgttattcgttttcttatttgaaatcaataacttacttcaaagccccgttcatttttcttaatcttcttttatgtcgatttgttttgtcggttgaccgcgggttgaccggaaggagaagaaaaatgaaagttctgtttactgaaaaat

SEQ ID NO: 28746 - DNA, 260 bp, Unknown
  Description of Unknown: RightRegion for integrase B2747 sequence
attgaattcagtcgcgaaaatgatgtagaattcatattagacatagacctacaccaataaagtgtgggttaacttttacccttcgtgtatatcattatggtgttatttttatagcgccccgatgatatacacgttgacaaaacaacgtttggaggaactataaatgagaatagtatggaaagatacagcagtagaaagagcagacttcaaataccgcggatattggattgagggttataagaatggttggaccataacga

SEQ ID NO: 28747 - DNA, 260 bp, Unknown
  Description of Unknown: RightRegion for integrase B2748 sequence
caattccgctttactttatgtaaggcggtttttttattgccgctcatcaattttatctaaaacccaaccattgtttcgccgtggcggacatttcccgtcaagtttttttgtaaacacacaaagtcaccgctgtgataatttgtgtgtcacttttacaaattcaggggcgtacccctgcacccgatccgctttactttatgtaaggcggttttttattgccgctcatggatcattatttataaacccaactttgttatttc

SEQ ID NO: 28748 - DNA, 260 bp, Unknown
  Description of Unknown: RightRegion for integrase B2749 sequence
ggaaaacacgatatcgagttccaattcaaatgcggagtcgatatccacgaaactatataagcgaagaccactatccaataaaacgggtagtggtctttttttatttacacaggggagcaaaaagtacttatcgtcatacacacttccgaaaagtgccttaaaaacgagattttgtcatacatacacaagataaaagtcgacatttttgtagaaaaagcaagtgtcggcttttttgtcgtcccaaaatgtgttataatgtc

SEQ ID NO: 28749 - DNA, 260 bp, Unknown; identical to SEQ ID NO: 28746
  Description of Unknown: RightRegion for integrase B2750 sequence

SEQ ID NO: 28750 - DNA, 62 bp, Unknown
  Description of Unknown: RightRegion for integrase B2751 sequence
cgcgtttcacttggtggagctgacgggagtcgaacccgtgtccgaaaagaaatcggttagag

SEQ ID NO: 28751 - DNA, 260 bp, Unknown
  Description of Unknown: RightRegion for integrase B2752 sequence
attacttggaacggcgaaaatgaaaatattgatatatatatagattttgacaacgaataattatatcttaacgtttccacgtaatggcttgcgctgttgctgttgaggaatcgtggaaacgctctaatgactaattcgcatcagtaaaacttgtaaaagagcaggctcgtatatagagtctgctcttttttgttataccacattataaaaatcgtaaaaaatagggaataacaaactaattaaagtctgttattccctat

SEQ ID NO: 28752 - DNA, 260 bp, Unknown
  Description of Unknown: RightRegion for integrase B2753 sequence
tttttcccatttcataagcattttgcattgtcctgctttgctttatacatctatcgttaattgccacaacacatcaattcttcacacaaataactttttcataacaaatcaccctttttattctatcgtagctgtcctaatctctgtttagtaaaccacttaaacgttgattttttacaaaaagcacgtccgaaacgtgcttgacataatttttatactatgttatactttagatacaagataagggcaacagcagttgt

SEQ ID NO: 28753 - DNA, 260 bp, Unknown
  Description of Unknown: RightRegion for integrase B2754 sequence
attgaattcagtcgcgaaaatgatgtagaattcatattagacatagacctacaccaataaagtgggggttaacttttacccttcgtgtatatcgttatggtgttatttttatagcgccccgatgatatacacgttgacaaaacaacgcttggaggaactataaatgagaatagtatggaaagatacagcagtagaaagagcagacttcaaataccgcggatattggattgagggttataagaatggttggaccataacga

SEQ ID NO: 28754 - DNA, 260 bp, Unknown
  Description of Unknown: RightRegion for integrase B2755 sequence
tttttcccatttcataaacattttgcattgtcctgctttgctttatacatctatcgttaattgccacaacacatcaattcttcacacaaataactttttcataacaaatcaccctttttattctatcgtagctgtcctaatctctgtttagtaaaccacttaaacgttgattttttacaaaaagcacatctaaaacgtgcttgacataatttttatactatgttatactttagatatagagaagagcggtaaacagcttt

SEQ ID NO: 28755 - DNA, 260 bp, Unknown
  Description of Unknown: RightRegion for integrase B2756 sequence
ccgttcgacaattttgaccttttgctttatcccaagctgccgccctccatcgtggagtgagggtataatttaagccgtccatttcgggcggcttttctttgtgataaccttgcaaacgtgatatatttttccgctttcacggtcaccgtaacggtgaagggtttggcatccgttccctcgccctgtacatcgccgacggtgaagctgccttcgagcacatcgtattcttgtttgtgatccgcattcgtattgcagacgac

SEQ ID NO: 28756 - DNA, 260 bp, Unknown
  Description of Unknown: RightRegion for integrase B2757 sequence
cccacgatctatttcgtgggtgcgttcttcgtcctgaccatgccgctccctgagcggtaaagaaataggcactcggccttgatagccgggtgcctatttctttttgccctgctgacaatataaacaacatagtgcggtcaataattgtgcagtatacaccttgataaccatgcgcgcgtatggtaatatatagccacagtaaaggaaaggtggacaacaaaatgaaaatgattaaggtcgaggaactgcacaaggaaacc

SEQ ID NO: 28757 - DNA, 260 bp, Unknown
  Description of Unknown: RightRegion for integrase B2758 sequence
caattccgctttactttatgtaaggcggtttttttattgccgctcatcaattttatctaaaacccaaccattgtttcgccgtggcggacatttcccgtcaagtttttttgtaaacacacaaagtcaccgctgtgataatttgtgtgtcacttttacaaattcaggggcttgcccctgcacccgatccgctttactttatgtaaggcggttttttatttccgctcatggatcattatttataaacccaactttgttatttc

SEQ ID NO: 28758 - DNA, 260 bp, Unknown
  Description of Unknown: RightRegion for integrase B2759 sequence
accattgaaatttatttcaatggaataggtgcattcgactacgatagctgcaattcataagcagtagcttcgtagagtgacttcaacgccagtggacttccctctgcgaagttagggtaccgagccgcaaacttacggttcggacaaaagctaaaacgacatacctgcgggggttccccgcctctggacacccaccaccctttaaaaagcgtggacgtaaattttgattctttgtgtaattgcagctttttgtgttattg

SEQ ID NO: 28759 - DNA, 260 bp, Unknown
  Description of Unknown: RightRegion for integrase B2760 sequence
ttacaggccgcgtgcagcggcggcgcaaacgagagaacaaatgtctgcatcaaggcataagaaaagcagacctgcctaaacaagtctgctttcatggtggacgatagctccccaaatccgaacccttccccggaaggagagtcagcgttgttgctgacccggaaagtcttggttttgcaggaagtgaggttgtatgcggtggtgattttatatccgtcaggttcgtcccatactgtcacggagtttaccagaaggtcgat

SEQ ID NO: 28760 - DNA, 260 bp, Unknown
  Description of Unknown: RightRegion for integrase B2761 sequence
gaaccggtttccgattggagaagggttcggatttttcgttttcttcgggtacgacaatgaaggctcccctatttgaagaatttttatgtggatttcatgagttgttctaaaaaatgtattgaaatccacatgatttggtgtatactgtttaataagggaatcatatgaattgaatatgtgcggtaatactatgaaggatggtgttttcaagatcggaagagcgtcgtgtagggaaagagtgtagatctcggtggtcgccg

SEQ ID NO: 28761 - DNA, 260 bp, Unknown
  Description of Unknown: RightRegion for integrase B2762 sequence
atcaaaatggttggttcagtgttcgtcttattttgtcccctgccgaaaatcaggaagtaagcaaaaaagacccaaacctcgcatgaaatgaggtttgggtcttttttcgtttcgtttcttggtagaatctaccgaaattcggaataatttgccggaatatagggttttccgccaaaatgcagacaagccgagtacatatcggctaaaattatcggcaaaggagaccaaaggctatgattaggattttgctgtctacccgc

SEQ ID NO: 28762 - DNA, 260 bp, Unknown
  Description of Unknown: RightRegion for integrase B2763 sequence
caattccgctttactttatgtaaggcggtttttttattgccgctcatcaattttatctaaaacccaaccattgtttcgccgtggcgggcatttcccgtcaaggttttttgtaaacacacaaaatcaccgctgtgataatttgtgtgtcacttttacaaattcaggggcgtgcccctgcacccaatccgctttactttatgtaaggcggttttttattgccgctcatggatcattatttataaacccaactttgttatttc

SEQ ID NO: 28763 - DNA, 260 bp, Unknown
  Description of Unknown: RightRegion for integrase B2764 sequence
actatagacggagaaacaaagaaaataggcattgatttatggggatctaaaaaaaaatagacccctgtatggaatatgataccaaaacatcgcaattatataaagcatgtacatgcatgattgatataattgcgataatccctccaaatattaactttaccttagataaattatacactatatctgaaaatgatactataggagaacgtataagaaaattaaggaaactgaaaaatataactgctaaagagttaggaaaa

SEQ ID NO: 28764 - DNA, 260 bp, Unknown
  Description of Unknown: RightRegion for integrase B2765 sequence
aaaggcaatcaactaacgttcaatttcaaggtgggaattgtaaaaactgcgacgatataaaaacagggtcggtggatgataagtccatcggcctttttttgttgtgaaaaaacactcgaattgacaaagtgcaacattcgtggtataatcctatatatgaataagtataaaaaagagttgcttcacctttggggtaaagtcggtttaatagtcaatctatcgcaaatgatagaatacacgctggcaaatgtgttggcttt

SEQ ID NO: 28765 - DNA, 109 bp, Unknown
  Description of Unknown: RightRegion for integrase B2766 sequence
tttgatgctccgccctttaaaattgattacattgaaaactacacggtgaaactcttgtaataggtggtttaatcaatgaagaagaacaaaaacgtctgcaaaaagtacc

SEQ ID NO: 28766 - DNA, 260 bp, Unknown
  Description of Unknown: RightRegion for integrase B2767 sequence
ggaaaacacgatatcgagttccaattcaaatgcggagtcgatatccacgaaaccatataaacgaagaccactatccaataaaacgggtagtggtctttttttatttacacaggggcggattggttcttaaaacttttgcaaaaaagtacttatcgtcctacacactcccgaaaagtgccttaaaaacgagattttgtcatacatacacaaaaaaactaaaaaatgaccgtgtttttccgaaacacggtcattttcttaaa

SEQ ID NO: 28767 - DNA, 260 bp, Unknown
  Description of Unknown: RightRegion for integrase B2768 sequence
tttgccagaatcgggggcttttctgcgcaaggtttgcatagcctgctttcctttgcataaaaagaagaaattttaggcgaacaaggctctcgtcaattctctgcgttcgtctgcgtccatcagccggatggcttcaaggatctccctgccggagatttttgttgccgccggcttttcattttgccggggctggggtgctgccggggtcaggtcttgggaatagaagttcgcttcgatcttctctgccagttccagccggg

SEQ ID NO: 28768 - DNA, 260 bp, Unknown
  Description of Unknown: RightRegion for integrase B2769 sequence
ttacaggccgcgtgcagcggcggcgcaaatgagagaacgaacgtctgcatcgaggcataagaaaagcagacctgcctaaacaagtctgctttcatggtggagctgacgagtccctcgtcgaactcaccgccctcgatgtttgagaggtccgctgacttgagttttccgtcttcgctactgatattaaagtagataagaagccggtcgtcgtataagtagacttctgaaacaaagtcagagatgattctccgacggtagtc

SEQ ID NO: 28769 - DNA, 260 bp, Unknown
  Description of Unknown: RightRegion for integrase B2770 sequence
tttttcccatttcataagcattttgcattgtccttctttgctttatacatctatcgttaattgccacaacacatcaattcttcacacaaataactttttcataacaaatcaccctttttattctatcgtagctgtcctaatctctgtttagtaaaccacttaaacgttgattttttacaaaaagcacatctaaaacgtgcttgacataatttttatactatgttatactttagatatagagaagagcggtaaacagcttt

SEQ ID NO: 28770 - DNA, 260 bp, Unknown
  Description of Unknown: RightRegion for integrase B2771 sequence
aaaggaaatcaactaacgttcaacttcaaggtgggaattgtaaaaactgcgacgatataaaaacagggtcggtggatgataagtccatcggccttttttgttgtgaaaaaacactcgaattgacaaagtgcaacatttgtggtataatcctatatatgaataagtataaaaaagagttacttcacctttggggtaaagtcggtttaatagtcaatctatcgcaaatgatagaatacacgctggcaaatgtgttggctttt

SEQ ID NO: 28771 - DNA, 260 bp, Unknown; identical to SEQ ID NO: 28747
  Description of Unknown: RightRegion for integrase B2772 sequence

SEQ ID NO: 28772 - DNA, 260 bp, Unknown
  Description of Unknown: RightRegion for integrase B2773 sequence
ttgatagaagaaaaagaagtcttagctttaaggcttctttttttctgtatacaggtttgacattacagggaaactggaatataatgtaggatacttgtgagaacttaacggaaaacacagatattgtttaggaggtagtcggcgatggctgaaaagaaacaggtagttacctatacaggacttaaaaaaattgaagaagaacttcaggatctgaaagtaaataaacgtagagagattgctgccaagatcaaggaagcaag

SEQ ID NO: 28773 - DNA, 260 bp, Unknown
  Description of Unknown: RightRegion for integrase B2774 sequence
tctgcccaggtccaccaagaacgagttgatgaaagtcagctcgttctttttgttttgtagtggtttggaaaatgtaagcgatacgccggtggtgtatcagagccgctctgcggcctgcgtcgagatcacactttcgtcgttttaccacaaaagcaaaaatatcgagctgcccttaggctggctcgatattttctttctctctattttttcgcgtccgtccttttcagggcggcgcgttttctttttctgctgcggggatc

SEQ ID NO: 28774 - DNA, 77 bp, Unknown
  Description of Unknown: RightRegion for integrase B2775 sequence
ttcgattttggggagtctgagtgtccctggcgggattcgaacccacggcctttcgcttaggaggcgaacgctctatc

SEQ ID NO: 28775 - DNA, 260 bp, Unknown
  Description of Unknown: RightRegion for integrase B2776 sequence
ttgtacttctgtgacggagtctttgcagcgcttctaatcgcaaaaagagacaaggtatagtttcggctataccttgtctcttttttgcatccttcgggctagcgccatgacagaacgctattttcataacgtaatcggttatttcctaacaattccatgcgaaattctaaaattactgttagaatttatcacaaaggagcatggctatgattaggattttactttccacacgcctaggcgaaaggcgctggacacaagcg

SEQ ID NO: 28776 - DNA, 260 bp, Unknown
  Description of Unknown: RightRegion for integrase B2777 sequence
gaggaaactcaggtggcttttctgtttatatcattccgaaccacagccgcaaggccgtgactcttcaaaacttgaagagtcataactctattaccactttggatttttgaagagtgacgaaaaagaagcgcatcagcgtttaaaagttcactcttcaagatgaagagtcatggcctgaaaacgcagttttctttgctttttgttcatgactcttcaaaacccctgtgggtcatagggaacttttgaagagtcacccctgc

SEQ ID NO: 28777 - DNA, 260 bp, Unknown
  Description of Unknown: RightRegion for integrase B2778 sequence
aggggttcggatttcttgtttttatcaaggacattgaagtttagtttcgggatagaataacatcaaattcaggaggatatacccatggaaaagctcataagctgcgcgttcaatatggataccgcctgtgtggagcttcgcttcacggacgggagcatttgctccatcgactgcaccgccgtggagaacgaggtggcaaacagtatgtaccagcggtcggagctggactggctaatctgcaacgatccgctggcctatgc

SEQ ID NO: 28778 - DNA, 109 bp, Unknown
  Description of Unknown: RightRegion for integrase B2779 sequence
aattttaccctcataccgtcaaaaacgggcatgcttgacccatacaggcaaggattttgagcagcgcataaaataaacttgctcgggaaggtcattgccgccctgacgc

SEQ ID NO: 28779 - DNA, 260 bp, Unknown
  Description of Unknown: RightRegion for integrase B2780 sequence
agggctttttatttttgcaagctattaataactataaaaccacttagaacaaaaagctgatgcctgcatgtaagcatgacgcatcagcttttttattcttaaggtggctcaaatcattatgtctaaagtataataatacttgcgcacttcaaatcattgcccagattgtatactctgccggaatcgacaccgacaacagttggtcggagaatgtagtactcactgttttttacaactcttgccttttcaccattgctaag

SEQ ID NO: 28780 - DNA, 260 bp, Unknown
  Description of Unknown: RightRegion for integrase B2781 sequence
ggaaaacacgatatcgagttccaattcaaatgcggagtcgatatccacgaaaccatataaacgaagaccactatccaataaaacgggtagtggtctttttttatttacacaggggcggattggttcttaaaacttttgcaaaaaagtacttatcgtcctacacactcccgaaaagtgccttaaaaacgagattttgtcatacatacacacaaaaggaacttaagtttgtctcaacgataaatttaagttctttttcattt

SEQ ID NO: 28781 - DNA, 260 bp, Unknown; identical to SEQ ID NO: 28747
  Description of Unknown: RightRegion for integrase B2782 sequence

SEQ ID NO: 28782 - DNA, 260 bp, Unknown
  Description of Unknown: RightRegion for integrase B2783 sequence
cctatgcggatcgtcgcatctgcttacggcttttcagtttactttaagctcgccggatgacgccaaattgaaaagcacctgctggttttcagcaggtgcttttgtttcacctatttacttctttttctccccttctaccaccgcaacaacatcaaccttagtctcctccgtcatctccgccagccagtgtgccagcttgtccttcaagcccgccggaaccggcagatcgcacagcagcatattcttgatgatactcgtcg

SEQ ID NO: 28783 - DNA, 260 bp, Unknown; identical to SEQ ID NO: 28769
  Description of Unknown: RightRegion for integrase B2784 sequence

SEQ ID NO: 28784 - DNA, 260 bp, Unknown
  Description of Unknown: RightRegion for integrase B2785 sequence
attacttggaacggagaaaatgaaaatattgatatatatttagacttcgacaacgaataattataccttaacgtttccacgaaatggcttgcgctgttgctgttgaggaagctatgaaagcgtaaacaataacgtacctacgttgtttaacgaataaataaaatctctccctaaatttaattagggggagatttttgcttatatagacattttgtcacccaaatttttttagggtgacaaatggatgacaatatatttat

SEQ ID NO: 28785 - DNA, 260 bp, Unknown
  Description of Unknown: RightRegion for integrase B2786 sequence
gttgagtactttacttataatagtgatacaaaacaaattaaatttaagataagactataaagatattgcaaaaggagacagattaaacaataactctgcctccttttttaaaattattcctctattaattttatatcatctataactggtggaagaattaatggaatattattattcatacttttagtaattgtccccaataaataactaacttctgaagctactggatccattagctcttcaatattagaaataatatc

SEQ ID NO: 28786 - DNA, 260 bp, Unknown
  Description of Unknown: RightRegion for integrase B2787 sequence
aaagtcttcttttttgaaggacttcttgtggcactcacttatgcgcaaagaaaatcctgagctttgagctcaggattttttctatgctcctatacgaaaaataacgtaaatcgttataatctaacatttcaaagacaagtacatctcttgatgttagaatataacgaaaggagcatgcatggctatgattagaattctattgtccagaaagcttggcgagctgaaatggacgcaggctgaccttgcacgagctaccggta

SEQ ID NO: 28787 - DNA, 260 bp, Unknown
  Description of Unknown: RightRegion for integrase B2788 sequence
aacaccgaacagcaaattgatatttatttccgttatatcggcaatacagccggattataacgaaaaaagccaacggacaggcaacgcataagcatcacctgtccgctggctccccgattaacaaaggtgtctttatgggaaccttgttaaatcaaggttttcaccattccagagcacaaatgtaccccaccacagagcgattctgcggcggggttttctgcgttttacagtttttacggcattttgagacgaagtaatcg

SEQ ID NO: 28788 - DNA, 260 bp, Unknown
  Description of Unknown: RightRegion for integrase B2789 sequence
aacgcaaactttatccttgacgtttatcctaaaatcccccgcaaatcaccattatcttgaatgggggtaaacctacgggccgcctatggccgtagctcctattccatctgtgagacgtgtccttgaatacgcggtgacagagatccctccggagaagatatctatgggcataccaaattacggatatgactggcctctgccctttgtccggggcgagacagccgccgtgagcattggcaaccaggaagccgtggctattg

SEQ ID NO: 28789 - DNA, 260 bp, Unknown
  Description of Unknown: RightRegion for integrase B2790 sequence
tcccatcagccgtcaaagcgtcctcaaatcggacggcttgggtgccatccttgtagttgaacgtaatcagcatccggtcatcgtgcaggaaaatggcatttacaaaaatttcaatcagtgctttccgctgttttttctgcgaaatatcgaactttctaaatttcatcagccagaatcggatgaaatcctcattgaagctgggcttcttcaatttttcatctgcgatttttacagtcagctcatctttctggctttccagc

SEQ ID NO: 28790 - DNA, 260 bp, Unknown
  Description of Unknown: RightRegion for integrase B2791 sequence
cccacgatctacttcgtgggtgcgttcttcgtcctgaccatgccgctccctgagcggtaaaaaataggcactcggccttgatagccgggtgcctatttctttttgtcctgctgacaatataaacaacatagtgcggtcaataattgtgcagtatacatcttgatagtcatgcgtatgtatggtaatatatagccacagtaaaggaaaggtggacaacaaaatgaaaatgattaaggtcgaggaactgcacaaggaagtca

SEQ ID NO: 28791 - DNA, 260 bp, Unknown
  Description of Unknown: RightRegion for integrase B2792 sequence
acgggaaaaggggaatatttcaaaacagaaattttagaaacatcttttattgaaaagtaacgtgtgcaatatcggtacagatgtaccgatatccgtaagtgttgcggtcacctctttatatggcatggtataccgctgagataaataccgcattgatgcagcgagctccccgtccggtccaccaaataacaataacctataatatttctacatattataaatatacacgaaaatgatacaatattcaccccctcagagag

SEQ ID NO: 28792 - DNA, 260 bp, Unknown
  Description of Unknown: RightRegion for integrase B2793 sequence
gagcaacaaatttgggagaaacagtccggtggactgtttcgtagaattcctgtttcttaaaagagtcctgtcacctcgaccaaataataaaagacatccattagggtgtctttttattttttatataattttaacaggactcgaacctgtggcggaattatccaaatttggcgactgcaaagagcaacaaatttgggagaaacagtccggtggactgtttcgtagaattcctgtttcttaaaagagtcctgtcacctcga

SEQ ID NO: 28793 - DNA, 260 bp, Unknown
  Description of Unknown: RightRegion for integrase B2794 sequence
acgggaaaaggggaatatttcaaaacagaaattttagaaacatcttttattgaaaagtaacgtgtgcaatatcggtacagatgtaccgatatccgtaagtgttgcggtcacctctttatatggcatggtataccgctgagataaataccgcattgatgcagcgagctccccgtccggtccaccaaataacaataacctataatatttctacatattataaatatacacgaaaatgatacaatattcacccctcagagagc

SEQ ID NO: 28794 - DNA, 260 bp, Unknown
  Description of Unknown: RightRegion for integrase B2795 sequence
cgaattgcaaacacttcgttggtttgcaattcggttcttgtctcacggccgcttcactgagccccgattcaaggtttataaaataacttttcccggaggtctccccgtgtcccattccagatttcaaaccgcccggaagcttctgatcttctggacgttcttcatcggcctcggcgccgtggccggcgcagccgccatgctgatcgaccccagcggccgcgcgctgggcatggacgccatgctgccgtattttcaggtcc

SEQ ID NO: 28795 - DNA, 260 bp, Unknown
  Description of Unknown: RightRegion for integrase B2796 sequence
tgtgtgttcgcacaaggtcgtttatgctccaccagtaaaaaaagccacctgaaaacgtaagttttcgggtggcttttgctatacggagcgatgttgtattgttacgccagatccggtaggatatccgaccacagagcctgctcctgccgcaaggcatcgaagcagcagtccagatacatcttattgaccgccgcaaaaatggtgctgcgcagcagcagacgctcgtcgttgagcacagtctccggctgggctgccttgcc

SEQ ID NO: 28796 - DNA, 260 bp, Unknown
  Description of Unknown: RightRegion for integrase B2797 sequence
cccacgatctacttcgtgggtgcgttcttcgtcctgaccatgccgctccctgagcggtaaagaaataggcactcggccttgatagccgggtgcctatttctttttgccctgctgacaatataaacaacatagtgcggtcaataattgtgcattgtacaccttgataacaatgcgcatgtatggtaatatatagccacagtaaaggaaaggtggacaacaaaatgaaaatgattaaggtcgaggaactgcacaaggaagcc

SEQ ID NO: 28797 - DNA, 260 bp, Unknown
  Description of Unknown: RightRegion for integrase B2798 sequence
cgcaggcaggacattgagatttattacagctttgtcggcaagattgacttgcccgaataaccgcccgacctatccgacacaatggccaagtgtcggataggaacggcaaaattttttgcacttctattgcttctttatcacacataagcaaaggccgaggcgatccagcagcttgagacacagcgggatgtgcagatcatgcgggccattgatgccgccgcggatgagattggggcggacatccagagcgccacggtacg

SEQ ID NO: 28798 - DNA, 109 bp, Unknown
  Description of Unknown: RightRegion for integrase B2799 sequence
agaataccaagaattattttatgtaaaacactacatttgaatgatgttgtaatattataagtaaagtgcctacacttttaattagtataggcacttttttatttgcatt

SEQ ID NO: 28799 - DNA, 260 bp, Unknown
  Description of Unknown: RightRegion for integrase B2800 sequence
cccacgatctacttcgtgggtgcgttcttcgtcctgaccatgccgctccctgagcggtaaagaaataggcactcggccttgatagccgggtgcctatttctttttgccctgctgacaatacaaacaacatagtgcggtcaataattgtgcagtatacaccttgataaccacgcgcgcgtatggtaatatatagccacagtaaaggaaaggtggacaacaaaatgaaaatgattaaggtcgaggaactgcacaaggaagcc

SEQ ID NO: 28800 - DNA, 124 bp, Unknown
  Description of Unknown: RightRegion for integrase B2801 sequence
gggttcgattttggggagtctgagtgtaccataagaaatcaccgacccgatcgccggtgattttctatacggcccgttggtcaagtggttaagacagaggcctctcacgcctttaacatcggtt

SEQ ID NO: 28801 - DNA, 260 bp, Unknown
  Description of Unknown: RightRegion for integrase B2802 sequence
acaggaaaaggggaatatttcaaaacagaaattttagaaacatcttttattgaaaagtaacttgtgcaatatcggtacagatgtaccgatatccgtaagtgttgcggtcacctctttatatggcatggtgtaccgctgagataaataccgcatcgatgcagcgagctccccgtccgggccaccaaatagcaataacctataatatttttacatattataaatatacacgaaaatgatacaatattcgcccctcagagagc

SEQ ID NO: 28802 - DNA, 260 bp, Unknown
  Description of Unknown: RightRegion for integrase B2803 sequence
ccatccgatgaacaatcgggtggcttttctgttttgttttctgccgatttcacgcagtgaacacaccgcactgtaccaaaggtctttgggcaaatcaaacacccgcaccgcattcccttttcttgggagatgcagtgcgggtgcttttttcgtttgtcagccagcgggctgaatcatcttacaggatgctgatgcggcctgcaccgtagggattctcgtagtccagcaggtagccggggtactctgccagcacactgttg

SEQ ID NO: 28803 - DNA, 260 bp, Unknown
  Description of Unknown: RightRegion for integrase B2804 sequence
gatcacgaagaacgcgacattcacatctactacaattttgtcggatatatcgaagcataagccgtcattctttattcgaggttgactaacgagtattatgcgaaagacatttccaagaagcgacggattgtgaacaagatgaaaggaaatgcaggcgttccgctttctccgccgccctacggttacatcaaaaacccagacgatccccgcttttgggtggtagagccggaggctgccgaggtggtgcgccggatctaccg

SEQ ID NO: 28804 - DNA, 260 bp, Unknown
  Description of Unknown: RightRegion for integrase B2805 sequence
gggttcgattttgaggagtctgagtgtgccgcctgctgcaaaaggcggcagaggaactgaaggcttcggcgctggagcgctgctgcggtgagacacgggagagtaaccttgctatgcggcgggtgtttgagcgctgcggctaccggctgaacaaaacggaagaaagctactacgaaaacccgaccgaaagcgcctgcaagtatgtgctgcggcgggaggagttggagtaaaatcaaataacgccccccggcaccgccaat

SEQ ID NO: 28805 - DNA, 260 bp, Unknown
  Description of Unknown: RightRegion for integrase B2806 sequence
acaggaaagggggaatatttcaaaacagaaattttagaaacatcttttattgaaaagtaacgtgtgcaatatcggtacagatgtacctatatcggttagcgttcctgttacttccttatacggcatagtatatctttgagagagatagcgcatagatgcggccagttctccgtcgggacctccgaattgactgatgatgatctttgcaattttaggattggtttgtgtgatttttaccggatattgaagacgtttttcat

SEQ ID NO: 28806 - DNA, 106 bp, Unknown
  Description of Unknown: RightRegion for integrase B2807 sequence
ctattccacaaagagttgtacaatttgcacagaaataaaataaggcgcaaaaaaaagtaaaaaatccggcatttcgaggaaaatttctctgctgtgtagatcggaa

SEQ ID NO: 28807 - DNA, 260 bp, Unknown
  Description of Unknown: RightRegion for integrase B2808 sequence
aagaccgaaatattggtgattttcaagggcggatatgaggtgagaactgaaattgaataacgatcaaaatttacggcttgcgatatattcgcaggctgtttttgttgggaggtgtaacattgtcatcaaattttaacggcataaaaacgagaaaatacggcattgagatcgaaatgactggacttacacgaagtcaggcggcaaaggctatggcaaatgtccttgacgggcgtgttgaacacgagggtggaagctatgac

SEQ ID NO: 28808 - DNA, 260 bp, Unknown
  Description of Unknown: RightRegion for integrase B2809 sequence
aagaccgaaatattggtgattttcaagggcggatatgaagttaaagcagaaattgaataacgattaaaatttacagcttgcggagaaatctgcaggctgtttttgttgggaggcggttatttggcaggcaattttgatgggataaaaacaagaaattttggcattgagatagaaatgacaggcttaactcgctgtcaggcggcaaaagcactttcaggtgttctgggaggagaggttgtccatgagggtggcgcttatga

SEQ ID NO: 28809 - DNA, 260 bp, Unknown
  Description of Unknown: RightRegion for integrase B2810 sequence
cccacgatctacttcgtgggtgcgttcttcgtcctgaccatgccgctccctgagcggtaaagaaataggcactcggccttgatagccgggtgcctatttctttttgccctgctgacaatataaacaacatagtgcggtcaataattgtgcattgtacaccttgataacaatgcgtatgtatggtaatatatagccacagtaaaggaaaggtggacaacaaaatgaaaatgattaaggtcgaggaactgcacaaggaagcc

SEQ ID NO: 28810 - DNA, 260 bp, Unknown
  Description of Unknown: RightRegion for integrase B2811 sequence
acaaagtcaggaagaatgaaactttttaacagtaaaaaaaaaaggcgctctttaatgtagcgcccaaatgctcctgcagtagctgcaaaatctatatttgtaaccatatttgcatctgtctttggaatgattccattttgcttcatagcatattctagtgccatagctggaactcctgcaagactcttcaaatacatattaattttccaattgcttggagatttaaatctaatataaaaaatgacagtataattaacacc

SEQ ID NO: 28811 - DNA, 260 bp, Unknown
  Description of Unknown: RightRegion for integrase B2812 sequence
acaacaaatatattctttgtgagtggtcttttcggaataataacaacgcctcatgattgatttcatgaggcgtttattcttacttaataattttgattacctgtcctgcatagataagattagcattttttatgttgttgtccttaacgatttttgcgactgtcgttttatatcttgcggctatcgccgaaagagtatcaccctttttgactgtatatctagttactttctttttaggtgtgtcttttttcggctccgac

SEQ ID NO: 28812 - DNA, 260 bp, Unknown
  Description of Unknown: RightRegion for integrase B2813 sequence
cccacgatctacttcgtgggtgcgttcttcgtcctgaccatgccgctccctgagcggtaaaaaataggcactcggccttgatggccgggtgcctatttctttttgtcctgctgacaatataaacaacatagtgcggtcaataattgtgcagtatacaccttgataacaatgcgtatgtgtggtaatatacagacacaataaaggacggaggtaaatccaaaatgaccgctaaatactttgcaaactctgcaaaatatcag

SEQ ID NO: 28813 - DNA, 260 bp, Unknown
  Description of Unknown: RightRegion for integrase B2814 sequence
gatcacgaggaacgcgacattcacatctactacaattttgtcggatatatcgaagcataaagcgtcattctttattcgaggttgactaacgagatgtacgcccgggacatcagccgcaaggtgcggtctgcccatcgtatccggggcaattccggcgaaccgctgggccagccgccctacggctacaggaaagacccgctgaacaaaaagcactggatcattgacccggaggccgctcaggtggtgcgggacattttccg

SEQ ID NO: 28814 - DNA, 260 bp, Unknown
  Description of Unknown: RightRegion for integrase B2815 sequence
ctgaaactgacggagaggggaggcggacaggatgcagtggcacatgccaatcggctataaggttgtggatggaaaaatcaccatctgtgaagaacagagaaaaattgtggaacagatatttacagactatgacagcggagtggcggcaggcaggatcgcccagaacctgaaagggagaaaaatatgcaatgcaaaagggaaagtgtcctggacccatgcatccattggcaggatactggaaaacccaagctaccttggca

SEQ ID NO: 28815 - DNA, 260 bp, Unknown
  Description of Unknown: RightRegion for integrase B2816 sequence
gataaagtaatatgggatggaaatgaagcccatatttttatcaagggtatttcagattgagtcctatgagatacccgaaaatagtaatattagttcaattgctgtatctataaaagacattgctatgaatagtcaacagcagttgcagtcgaagaatcgtggaaacgataatcattgcaatattactaacttgcacgaacttcgcgtaagtaaaggacttactatagctgacatctgtaaaaaaaccggtttaagttatg

SEQ ID NO: 28816 - DNA, 260 bp, Unknown
  Description of Unknown: RightRegion for integrase B2817 sequence
ctgtctgcttttgccgggtactttgtagtcagaatcgtagtcagaaaaagtaggccatagcaggatttttccggggtttcccggggacaaaaagtagtcaaaaataatgaatcaggccgccgtctccgtaaaacagagacagcggcctgattcatcaaggggattatttgtccatatcatggtacgaaccatcgggcggccgtgctgttcgacccctcttctctgcaagataaaaaatgaccccaagcctgagcttgagg

SEQ ID NO: 28817 - DNA, 260 bp, Unknown
  Description of Unknown: RightRegion for integrase B2818 sequence
acagaaatgtgtggtgcttttttgttttatctgccgttcaccttacgttccctttcatgaaaaaagcgtttgtcgcagcccgcaggccgtgacaaacgctttttattttactgtgcgcccaagcgcattttgaagtcctgatagccaaagtgcaccagctcccggcaattgccgtctgcgcccagcagccagataggcggcaggggcatcccattgaaggtgttgttcttgcaggtggtgtagatggccatatcgccgaa

SEQ ID NO: 28818 - DNA, 260 bp, Unknown
  Description of Unknown: RightRegion for integrase B2819 sequence
gaagaaaacaacaatttgacattgtattataatgagcttgttgatgctttaaaaatataatgtaccttttgcaacgtggtggtcccgcaggggaacttgctgccgcatggcaatatttagatcaaagatatattatgcctgatgaaagaggaaaagcgcttttaactgatattggtacagaagaacttgctcatgttgaaattatttcagccatgatttatcaattaatgaaaggtgcttcattagaagaattaaaagag

SEQ ID NO: 28819 - DNA, 260 bp, Unknown
  Description of Unknown: RightRegion for integrase B2820 sequence
gattcggtcacattcaaatttaccgattttctggaacgtgaagtgcctttaattgaataaaaagagccataaaatttgagccgattgggtagccagtcggctcttgttttgtttctaaattagtggagattttttgcgtattaccgaaagaggactttgtctattgacactgatttgtctaatggtagtcgggtagtctttgaggcctttttgtcagacttttttgactatcgaaacaactcgacaccgccatcaacccg

SEQ ID NO: 28820 - DNA, 233 bp, Unknown
  Description of Unknown: RightRegion for integrase B2821 sequence
acgggaaaaggggaatatttcaaaacagaaattttagaaacatcttttattgaaaagtaacatgtgcaatatcggtacagatgtaccgatatccgtaagtgttgcggtcacctctttatatggcatggtgtaccgctgagataaataccgcatcgatgcagcgagctccccgtccgggccgccaaattgtgaaatgatcactttggcaatctgtgggttcgtttgtgtaatct

SEQ ID NO: 28821 - DNA, 260 bp, Unknown
  Description of Unknown: RightRegion for integrase B2822 sequence
aagaccgaaatactggttatttttaaagggggatacgaggtcaaagcggagattgaataacgattaaaatttacggcttgcggtatattcgcaggctgttttttgttgggaggtgtaacattggcaggaaactttgaaggcataaaaacaagaaagttcggcattgagatagaaatgaccggcttgactcgttgtcaagcggcgaaggcaatttcaagagttttaggcggtgatgttgtccatgagggcggaagttatga

SEQ ID NO: 28822 - DNA, 260 bp, Unknown
  Description of Unknown: RightRegion for integrase B2823 sequence
acagaaatgtgtggtgcttttttgttttatctgccgttcaccttacgttccctttcatgaaaaaagcgtttgtcgcagcccgcaggccgtgacaaacgctttttattttactgtgcgcccaagcgcattttgaagtcctgatagccaaagtgcaccagctcccggcaattgccgtctgcgcccagcagccagataggcggcaggggcatcccattgaaggtgttgttcttgcaggtagtgtagatggccatatcgccgaa

SEQ ID NO: 28823 - DNA, 260 bp, Unknown
  Description of Unknown: RightRegion for integrase B2824 sequence
cccacgatctacttcgtgggtgcgttcttcgtcctgaccatgccgctccctgagcggtaaataaaagcactcggatttccgggtgctttttgttataaaaaaatattgtgcattgtcaaaaaacttttcaaaaactctttacatatgcaatcatatgtggtataataatggtgtcagaagaacacccacaaaacaaacggaggtaaatagtatgtggagttttgaaaacggtatcgaggtttacgagcatagcgagtatt

SEQ ID NO: 28824 - DNA, 260 bp, Unknown
  Description of Unknown: RightRegion for integrase B2825 sequence
tatgtctgcgggaaaaaacagcactgttttgttgagaacggcccgacactgccgatatgaacaggccgccgatcaaaacgaacaaaccgcttgcatcttgtgcctgcagcggcggtcagtgaccgccttgcacaggctaattgaactgtgtcagagcactggtgcaccgccgcaccacctgacgtgtcattgcgaggaggccgcaggccgacgcggcaatctcctgcaatagcctgcgtattcgccgagaccgccctgtt

SEQ ID NO: 28825 - DNA, 260 bp, Unknown
  Description of Unknown: RightRegion for integrase B2826 sequence
aagaccgaaatactggttattttcaaaggcggttacgaggttagaacggaaattgaataacgattaaaatttacggcttgcggagaaaatctgcaagctgtttttgttgggagctggttatttggcaggcaattttgaggggataaaaactcagcgtttcggtgtggaagtagaatgcacaggcttaacaaggtcggcagcggcaaaggcggtcgcaaaggttttaggcggcttgaccgagcattacggcggcagttatg

SEQ ID NO: 28826 - DNA, 260 bp, Unknown
  Description of Unknown: RightRegion for integrase B2827 sequence
acaggaaaaggggaatatttcaaaacagaaattttagaaacatcttttattgaaaagtaacgtgtgcaatatcggtacagatgtaccgatatctgttaaagtcgcagttacttctttatacggcatggtatatctctgagacaggtatctcatagatgctgccaattctccgtcaggtccaccatatagcaataacctataatatgcccgcaaacccccataaacagagggctcacgagatgtagaggtggaagatcagt

SEQ ID NO: 28827 - DNA, 260 bp, Unknown; identical to SEQ ID NO: 28799
  Description of Unknown: RightRegion for integrase B2828 sequence

SEQ ID NO: 28828 - DNA, 260 bp, Unknown
  Description of Unknown: RightRegion for integrase B2829 sequence
cgccagcgcattgatatttattacagctttgtaggcaagattgacttgcccgaagaataaagcccgacctatccgacaccctgcgcaagtgccggataggaacggcaaaattttttacacttctattacttctttatcacacataagcaaaggcaccgggcttcctgcggctccctggtttgaaatgctgtaccggcactttacgctggatgccaccagactctcgccagacgcgtcgaaaccggcgtcatcctttttgt

SEQ ID NO: 28829 - DNA, 260 bp, Unknown; identical to SEQ ID NO: 28802
  Description of Unknown: RightRegion for integrase B2830 sequence

SEQ ID NO: 28830 - DNA, 260 bp, Unknown
  Description of Unknown: RightRegion for integrase B2831 sequence
tccggctacttttcactggttgaacaccaattttcggcccgtttgtggcgcaccgcataatctgtaatcattttgtaatctttgcgcaaacaaaaaatgccccgccagcaatccgtcaggatgccagcggggcattgctttacttagtggagataccttgccaattcagatgcaacaaagcctgcgatcaatgccgcaatgaccgcccaccagagtttgtttccaaatactccgggggctttttccagcgcggtcaagcg

SEQ ID NO: 28831 - DNA, 109 bp, Unknown
  Description of Unknown: RightRegion for integrase B2832 sequence
gatttgaaagataacggacaagagaaaaattatgcggaaaccggtttttgtcatcggtaatgtatcatccgattgcagcttttccgagcaatagcaccgacgccgattg

SEQ ID NO: 28832 - DNA, 260 bp, Unknown; identical to SEQ ID NO: 26345
  Description of Unknown: RightRegion for integrase B2833 sequence

SEQ ID NO: 28833 - DNA, 260 bp, Unknown
  Description of Unknown: RightRegion for integrase B2834 sequence
ccatccgatgaacaatcgggtggcttttctgttttgttttctgccgatttcacgcagtgaacacaccgcactgcaccaaaggtctttgggcaaatcaaacacccgcaccgcattcccttttcttgggagatgcagtgcgggtgcttttttcgtttgtcagccagcgggctgaatcatcttacaggatgctgatgcggcctacaccgtagggattctcgtagtccagcaggtagccagggtactctgccagcacactgttg

SEQ ID NO: 28834 - DNA, 260 bp, Unknown
  Description of Unknown: RightRegion for integrase B2835 sequence
ggaactaaaatcagagttggagaattaaataacagagccgcagggctgctcattttttaatgagaaagtcttgcgggtttttgtcattttatttttatagaatgaaagataaccgaccaacttgacaaatttactttaatgcattagaataatattagcgttacatcttggtgaaatctgactttgctatgaattgaaagggaaaatatatgtgctttatttgtgataggataaagatgataggtcaaggaactaacccg

SEQ ID NO: 28835 - DNA, 109 bp, Unknown
  Description of Unknown: RightRegion for integrase B2836 sequence
acggatcttcttatcgctcatctccatgctgcttctggatttcttattcatccagtttaaatcgtcatttgtatataattcctttggtgtgatctcatacagagcacaa

SEQ ID NO: 28836 - DNA, 260 bp, Unknown
  Description of Unknown: RightRegion for integrase B2837 sequence
gtggacttcaactttgatcttgcacagtatttggagaatagcgatgaacttgcttgctgacaaacacaaaaacaccgttgacttcgatttgaaatcaacggtgtttgtaactcttatttgagccaatggtggagaataccgggatcgaaccggtgacctcttgcatgccatgcaagcgctctcccagctgagctaatcccccataattttccagaagtggaaacctctggaaaagagatgctcaaacaagaaacgtttta

SEQ ID NO: 28837 - DNA, 260 bp, Unknown
  Description of Unknown: RightRegion for integrase B2838 sequence
aacggcagcgtcacacaggaaattgatatttactttactcatattggaattgtaaagtagacaaaaagaaaacggagggcgttggtctgaatgactcagacggctctccgtgatacataactttagggacgttccctatttgtgccgcgataacacgggctttttaaggtgagtatccatttggtatcaccaatatggttgcgggagaccgcaacatatttttcccacgatacttttcaaatttttatacttttttcaaa

SEQ ID NO: 28838 - DNA, 260 bp, Unknown
  Description of Unknown: RightRegion for integrase B2839 sequence
ttaccacatctgcgacttcaagctcctcggctccaatctcctcttttctatcttcaatgagaatcagcgctttcggcgttgcccggaccgccatgacagtcgttgtgatcataccagcaataccaattccggtaagaatttcagggctgtgcttcgccatggatgttcgaactgacgacaaaacttttgatatgttcgatttcttcattatctcattcctccaaatatcacactgaatatcgttttaaccatgtcaagag

SEQ ID NO: 28839 - DNA, 260 bp, Unknown
  Description of Unknown: RightRegion for integrase B2840 sequence
tccggctacttttcactggttgaacaccaattttcggcccgtttgtggcgcaccgcataatctgtaattattttgtaatctttgtgcaaacaaaaaatgccccgccagcaatccgtcaggatgccagcggggcattgctttacttagtggagataccttgccaattcagatgcaacaaagcctgcgatcaatgccgcaatgaccgcccaccagagtttgtttccaaatactccgggggctttttccagcgcggtcaagcg

SEQ ID NO: 28840 - DNA, 260 bp, Unknown
  Description of Unknown: RightRegion for integrase B2841 sequence
acggaggtcgtatgtatcgccggtctataccggttcacggtcagcaggccctcccgataaaaacgggagggcctgcccttattacttgcggtacaatccctgcataatgccgacatcggcagcagcgtccagattgcggcagtgcaggtgctcgacaacggcctggatcttgccatcgtcgtcacggccggcgttgcgctcctggtccaggagccggaaggccatggcctgcagtctggccatgtgatccatttcctcgc

SEQ ID NO: 28841 - DNA, 260 bp, Unknown
  Description of Unknown: RightRegion for integrase B2842 sequence
tccggctacttttcactggttgaacaccaattttcggcccgtttgtggcgcaccgcataatctgtaattattttgtaatctttgcgcaaacaaaaaatgccccgccagcaatccgtcaggatgccagcggggcattgctttacttagtggagataccttgccaattcagatgcaacaaagcctgcgatcaatgccgcaatgaccgcccaccagagtttgtttccaaatactccgggggctttttccagcgcggtcaagcg

SEQ ID NO: 28842 - DNA, 260 bp, Unknown
  Description of Unknown: RightRegion for integrase B2843 sequence
tacgccaccaccaattctttctatatgcttctttcaaaccttactttttctcgtacatagtatccgctgcattatacagcatctccaaaaactgtcccgccgttggccgatgatccagcgggtatcccgccaacacctgcactttttccgggtcagttttccataccagctttgccgtcctgcgaacagcgctctccacagccctccaagcatgaccagaagcttccgccacaggcagataaacttccttctgcaaggct

SEQ ID NO: 28843 - DNA, 260 bp, Unknown
  Description of Unknown: RightRegion for integrase B2844 sequence
aacggcagtatcacgcaggaaatcgatatttactttactcatatcggaattgtaaagtagacaaaaagaaaacggagagcattagtctgaataaatcagatgactctccgtgatacataagtttagggtcgttccctatttgtgccgcgataatacgagcttttcgaggtgtgcatctattttattgcacaagtatggtgcgggtgacaggacttgaacctgctataatcagctttcaatgcacgattttacgctatttt

SEQ ID NO: 28844 - DNA, 260 bp, Unknown
  Description of Unknown: RightRegion for integrase B2845 sequence
gataaaaaaataacatctatcacattcaagaatggcttaaatatagggttttcttattaaagaaaatcctctttttttatactaacggacatccgaacgtatgaataaagaagagtttattttctccttctatttttaactcttcaagagatttattatcaaaattcttaatcatttatatacctccatttaaacaagtaatttaatttaacacataagagtatatcaaaaatattaaaatttttatatatgttttttac

SEQ ID NO: 28845 - DNA, 260 bp, Unknown
  Description of Unknown: RightRegion for integrase B2846 sequence
aacccttctgacgcaagaacttgtgggggttcggatatggccctcataagtccaccataaaaataaccacaccgaagggtgtggttatttttatggatgccttaagaaattgaaacgctcgggcgaagtcaattcgccctgcgcaaggtttttgccttgaaacttcctcaccggatgaaccggggcactcccaaatctccatcccgggtacagcggtgcaggaccactacgaaccaggcaaacaccacaaggcccttggc

SEQ ID NO: 28846 - DNA, 260 bp, Unknown
  Description of Unknown: RightRegion for integrase B2847 sequence
cgccagcgcattgatatttattacagctttgtaggcaagattgacttgcccgaagaataaagcccgacctatccgacaccctgcgcaagtgccggataggaacggcaaaattttttacacttctattacttctttatcacacataagcaaatattcaggagtttaaatgccttataaataaggcaaaaaaacaagctgacgaactgcaagatacaattaatcagcttgagtttttcaattttcattttaagtttgcgact

SEQ ID NO: 28847 - DNA, 260 bp, Unknown
  Description of Unknown: RightRegion for integrase B2848 sequence
attaccttcaacttcgaccttacgccgtacattgaaggggatgatacaacagcctgctgaaaaaacgggcggaaaacattcctttttgaaaatggtgtaaagtcaaacgttgggggttgtataggaaccgcctgcaaaagcctgaaaacggtgcaggcgaagcaatacagcccccaaaaatcggcttcagcaaaaagaaaagcaccatacttcctacgaagtacagtgcttttttggtggagcatgacgcacggtgtacg

SEQ ID NO: 28848 - DNA, 260 bp, Unknown
  Description of Unknown: RightRegion for integrase B2849 sequence
aacggcagtatcacgcaggaaatcgatatttactttactcatatcggaattgtaaagtagacaaaaagaaaacggagagcattagtctgaataaatcagatgactctccgtgatacataagtttagggtcgttccctatttgtgccgcgataatacgagcttttaagggtgagcatccatttagtctcaccaatatggttgcggaggaacacaacatatattacccgaaatactattctcatacaaaatagttatgcagt

SEQ ID NO: 28849 - DNA, 260 bp, Unknown
  Description of Unknown: RightRegion for integrase B2850 sequence
ttaacgttaacgaagtcaatgcttcgcaagaatagaatgcgttttcgcctatgcttataacggacgacggaatctctatatctgtcaacgcccagcaagaataaaacgcatttacgcctattgtttttacggacaacggcaaagttatggaagtcaatgccgagcaatagtaaaatgcatagtcgcctatttccgttacgttgccttccagttttaccgtcgtaagctttttgcagttattaaaagtataatacggtact

SEQ ID NO: 28850 - DNA, 260 bp, Unknown
  Description of Unknown: RightRegion for integrase B2851 sequence
tccgggtacttttcactcgttgagcaccaattttcggctcgttggtggcgcaccgcataatctataattgttttgtaaccattccgcaaataaaaaatcccccgccagctttcctctcggattgccagcgggggattttcatttcagtgcagaagcatcgtcagttcataggccacaaggccggaaaccagcgccgcaatcacagcccaccaaagtttgtttccaaatgttccgggggctttttccagcgcggtcaggcg

SEQ ID NO: 28851 - DNA, 260 bp, Unknown
  Description of Unknown: RightRegion for integrase B2852 sequence
tacgccacccccaattctttctacatacttctttcaaatcttactttttctcgtacatagtatccgctgcattatacagcatctccaaaaactgtcccgccgttggccgatgatccagcgggtatcccgccaacacctgcactttttccaggtcagttttccatgccagctttgccgtcctgcgaacagcgctctccacagccctccaagcatgaccagaagcttccgccacaggcagataaacttccttctgcaaggct

SEQ ID NO: 28852 - DNA, 260 bp, Unknown
  Description of Unknown: RightRegion for integrase B2853 sequence
tccgggtacttttcactcgttgagcaccaattttcggctcgttggtggcgcaccgcataatctgtaattgttttgtaaccattccgcaaataaaaaatcccccgccagctttcctctcggattgccagcgggggattttcatttcagtgcagaagcatcgtcagttcataggccacaaggccggaaaccagtgccgcaatcacagcccaccaaagtttgttcccaaatgttccgggggctttttccagcgcggtcaggcg

SEQ ID NO: 28853 - DNA, 260 bp, Unknown
  Description of Unknown: RightRegion for integrase B2854 sequence
ggcccattcgacaacttcgatttgctgctgtaccccaagctgccaccctccctcggttaagtgggcagaaagaaagccgtcctttgttggggcggcttatttttgtgataaccttgtaggtatgatttgtaacacctgtaaggttatcacaaataaacctaaaaaaatcgcgcccggctgtcctgcaaaaatcgcccggcgcagaagcccaaaatctgatatgcgcgtgaaatcttccccgctgccatatccagtttgtt

SEQ ID NO: 28854 - DNA, 260 bp, Unknown
  Description of Unknown: RightRegion for integrase B2855 sequence
gtggacttcaactttgatcttgcacagtatttggagaatagcgatgaacttgcttgctgacaaacacaaaaacaccgttgacttcgatttgaaatcaacggtgtttgtaactcttatttgagccaatggtggagctatcaggagtcaaaacgaacattttagcacccggtgacagcccgccatcgggcgggtcttctccggtctccaaaggaatttcgacactgttctggtctcccatgcaggaaaaaaccagcttcatg

SEQ ID NO: 28855 - DNA, 260 bp, Unknown; identical to SEQ ID NO: 28840
  Description of Unknown: RightRegion for integrase B2856 sequence

SEQ ID NO: 28856 - DNA, 260 bp, Unknown
  Description of Unknown: RightRegion for integrase B2857 sequence
gtggacttcaactttgatcttgcgcagtatttggagaacagcgatgaacttgcttgctgacaaatataaaaacaccgttgacttcgatttgaaatcaacggtgtttttaactctcatttgagccaatggtggagcaatcaggagtcaaaacgaacattttggcatctggcgaatcccctccgtctggcggatcttccccggtctccagaggaatctcaacgctgttgtccttgcccataaaggaaaagaccagcttcaga

SEQ ID NO: 28857 - DNA, 260 bp, Unknown
  Description of Unknown: RightRegion for integrase B2858 sequence
tccggctacttttcactggttgaacaccaattttcggcccgtttgtggcgcaccgcataatctgtaattgttttgtaatctttgcgcaaacaaaaaatgccccgccagcaatccgtcaggatgccagcggggcattgctttacttagtggagataccttgccaattcagatgcaacaaagcctgcgatcaatgccgcaatgaccgcccaccagagtttgtttccaaatactccgggggctttttccagcgcggtcaagcg

SEQ ID NO: 28858 - DNA, 260 bp, Unknown
  Description of Unknown: RightRegion for integrase B2859 sequence
gatggcttttttgttttgtctctcggtgcgtttttgggccggtgcgacacaaagctctgattttttctcgcctgccggggctatactgtttcttgatgcaacagggcaatacggaagataggagccaggcaaatgagcatttgggacgcattcggcaaaggacggtataagggcttctcccgggaggcggggcagctgctggataaggcggtggagctggccggagggctgggctgcaaaaaggcagacaccggccacct

SEQ ID NO: 28859 - DNA, 260 bp, Unknown
  Description of Unknown: RightRegion for integrase B2860 sequence
ctgagtcggcggtcaaagtatcctcaaaacggacggtttgggcgccatctttgtagttgaacgtgatcagcattcggtcatcatacaggaaaatggcattgacaaaaatttcaatcaatgcttttcgttgctttttctgcgaaatatcgaactttctgaatttcatcagccagaaccggatgaaatcctcattgaagctgggcttcttcaatttttcatccgcgatttttgcagtcagttcatctttctggatttccagc

SEQ ID NO: 28860 - DNA, 211 bp, Unknown
  Description of Unknown: RightRegion for integrase B2861 sequence
agaggggtcgcggcacttttttgtttttggggaaaatcgggtgtaaataatgtctactgaccaacccaaaaagcattgcgacacaaggcaatcccggcaatctgtgctataataggtgcaagggaaacgacaaaaagcgggcaaaacccttgcacttggagggaacgtgtatgtatcggtacagcaacggacagatcagtctgtcagattt

SEQ ID NO: 28861 - DNA, 260 bp, Unknown
  Description of Unknown: RightRegion for integrase B2862 sequence
gataacgaacgaatacaggaaatagagatatactaccgatttattggaaaaatagactgataaagaggttcatatctttaactaagggaaaccggtcagggaatgccggatatcggaatccttcctgaacttggaaaggcgcttggagtgacagttgatgaaattttaatgggagaacagattgaacaagagaaaagagcggaaactgccgtatcggatgaggataagaagcttttggaaattgtgttggagcgagccga

SEQ ID NO: 28862 - DNA, 260 bp, Unknown
  Description of Unknown: RightRegion for integrase B2863 sequence
attaccttcaacttcgaccttacgccgtacattgaaggggatgatgcagcagcctgctgaaaaaccgggcggcaaacattcctttttgaaaacggtgtaaagtcaaaaattggaggttatataggaaccgcctgcaaaagcctgaaaacggtgcaggcgaagcaatgcagcccccaaaaatcggcttcagcaaaaagaaaagcaccatacttcctacgaagtacagtgctttttggtggagcatgacgcacggtgtacga

SEQ ID NO: 28863 - DNA, 260 bp, Unknown
  Description of Unknown: RightRegion for integrase B2864 sequence
cctgaaatgttgattttcggagacgtatttgtgctcacatataaaacggcggaagtgtaaaacctccgctgttttgatttttgggagtgtgaacgagagcgctttgggttcacacgctgaatcagatgataccacggttcagggcatcatcgacaggatggggtgatggtgttttgccaccccatcctcaacacgcacctcaatcgtaagtcagcggcgtaatctataacgcgcaagatcattaacgttcctgcgctttt

SEQ ID NO: 28864 - DNA, 260 bp, Unknown
  Description of Unknown: RightRegion for integrase B2865 sequence
gcgatctacttcgtcggcccggtgttcatcctggcattgccgctgccccggcggcgctaaaaacaaaaggcatccggcttcgtgccgggtgcctttttctgttgctgcgcttcggaggtcaatcctccggggcgctttctttttccgccagctccggctcgatcagatcctcgatgtggcactccagcacctgggccaccttgtagagctggtagacgttcgggctggttctgatcctggccgaccatccctccagcgtc

SEQ ID NO: 28865 - DNA, 260 bp, Unknown
  Description of Unknown: RightRegion for integrase B2866 sequence
cccgccaaaatgaaacgccgttttagcagaaagcgtaatatccgcaacaaaaacagttgaattgtatctaataagtttatgaaaaaatagcgtcgctgtaaaggggaaaagtaaaggcgggggcgaaagcccctgcctttttgttttaacaatatgtaaaagggattgccgtgttactgtcttttgctatcgttccgttacatagttcgcatttaatatcgcacaaatggttttttgtcgggacggcaacaaacaatgat

SEQ ID NO: 28866 - DNA, 260 bp, Unknown
  Description of Unknown: RightRegion for integrase B2867 sequence
cgccagcgcattgatatttattacagctttgtcggcaagattgacttgcccgaagaataagcccgacctatccgacaccctgcgcaagtgccggataggaacggcaaaattttttacacttccattacttctttatcacacataagcaaatgctttcggcttcttgcgtaggagctaccacctccgtactcatcgtgtggataccgacgcggctgatacccagctctggaatagccgccatcttccattgcctcaatttt

SEQ ID NO: 28867 - DNA, 260 bp, Unknown
  Description of Unknown: RightRegion for integrase B2868 sequence
attaccttcaacttcgaccttacgccgtacattgaaggggatgatgcagcagcctgctgaaaaaacgggcggcaaacattcctttttgaaaatggtgtaaagtcaaaagttgggggttgtataggaaccgcctgcaaaagcctaaaaacggtgcaggcgaagcaatgcagcccccaaaaaccaacttcagcaaaaagaaaagcaccgtacttccaacgaagtacagtgcttttttggtggagctatcaggagtcaaaacg

SEQ ID NO: 28868 - DNA, 260 bp, Unknown
  Description of Unknown: RightRegion for integrase B2869 sequence
acagggttcgattttggggagtctgagtgtaccaaaggaaaagtgcttaattctttatgaattaggcactttcttttgtttttatagcaaaaaagttcagattttcaaaaattgcaaaagggtcttttcaccccaatttatcaactatttatcaacaagttcaacccgaaagggtcaagtgggggcaaaatgggggattgggggcttttttttcgaagtcctatatatatttatattattatacattcgtatatacttat

SEQ ID NO: 28869 - DNA, 260 bp, Unknown
  Description of Unknown: RightRegion for integrase B2870 sequence
cgcagacaggaaatcgagatatactattctttcgtcggcaaggtagacttgcccgaataacgcccgacctgtccggcacaatagctaagtgccggataggaacggcaaaaattttacacttctattgcttctttatctaacacaaactaagctccgcggcagctatcaaagcgatctgaaaagagcggaaaaccgggagtatcctgtgttcaaaaccgagagcgggacagaggtgcagaccgtgccgttctggacatggg

SEQ ID NO: 28870 - DNA, 260 bp, Unknown
  Description of Unknown: RightRegion for integrase B2871 sequence
acggaggtcgtatgtatcgccggtctataccggttcacagtcagcaggccctcccgctaaaaacgggagggcctgccctcattatttgcggtacaacccctgcataatgccgacatcggcagcagcgtccagattgcggcaatgcaggtgctcgacaacggcctggatcttgccgtcggcgtcgcggccggcgttgcgctcctgatccaggagccggaaggccatggcctgcagtctggccatgtgatccatctcctccc

SEQ ID NO: 28871 - DNA, 260 bp, Unknown
  Description of Unknown: RightRegion for integrase B2872 sequence
tacgccacccccaattctttctacatacttctttcaaatcttactttttctcgtacatagtatctgctgcattatacagcatctccaaaaactgtcccgccgttggccgatgatccagcgggtatcccgccaacacctgcactttctccgggtcagttttccacgccagctttgccgtcctgcgaacagcgctctccacagccctccaagcatgaccagaagcttccgccacaggcagataaacttccttctgcaaggct

SEQ ID NO: 28872 - DNA, 260 bp, Unknown; identical to SEQ ID NO: 28841
  Description of Unknown: RightRegion for integrase B2873 sequence

SEQ ID NO: 28873 - DNA, 260 bp, Unknown
  Description of Unknown: RightRegion for integrase B2874 sequence
tctccgttcgatattatcgtatataggaatatattttgtttagtatatcgctggaagtaaaaataacggcactgtatattgcgaaagcaatatacagtgccgttatttttatggaataggaaatctgcatatttgataggatcggttaggatagtgcttcttaaaaataggtcttgcaactgactatatgaattgataaaataatgagtgctgtgtgtggtatcaaaagatgccaacaatgaaaatgaggaatcggtagt

SEQ ID NO: 28874 - DNA, 260 bp, Unknown
  Description of Unknown: RightRegion for integrase B2875 sequence
attaccttcaacttcgaccttacgccgtacattgaaggggatgatgcagcagcctgctgaaaaaacgggcggcaaacattcttttttgaaaacggtgtaaagtcaaaagttgggggttgtataggtaccgcctgcaaaaagcctgaaaccggtgcaggagaagcaatgcagcccccaaaaaccggcttccgcaaaaagaaaagcaccatactttctacgaagtacagtgcttttttggtggagcaatcaggagtcaaaac

SEQ ID NO: 28875 - DNA, 260 bp, Unknown
  Description of Unknown: RightRegion for integrase B2876 sequence
gatggcttttttgttttatctctcggtgcgtttttgggccggtgcgacacaaagctctgattttttctcgcctgccggggctatactgtttcttgatgcaacagggtatgcaacagggcaatacggaagataggagccacgcaaatgagcatttgggatgcattcggcaaaggacggtacaagggcttttcccgggaggcggggcagctgctggacaaggcagtggagctggccggagggctgggctgcaaaaaggcaga

SEQ ID NO: 28876 - DNA, 260 bp, Unknown
  Description of Unknown: RightRegion for integrase B2877 sequence
tgttctagttgttttaaatggtggaggttaggagattcggtcttgctcgttcgcatttaacggcaattccgtgttttgcttcaatgactattcgtcattttgcaaaaacactccagcctcagctcactcgcgcaactcctagaaaatgctaaacgcatttttggaggttctcatcaatccataacactgcaaaataaaatacacgataactaaagtcatcgtgtattttatggtggactcaaagaggagacgttagaact

SEQ ID NO: 28877 - DNA, 260 bp, Unknown; identical to SEQ ID NO: 28841
  Description of Unknown: RightRegion for integrase B2878 sequence

SEQ ID NO: 28878 - DNA, 260 bp, Unknown; identical to SEQ ID NO: 28871
  Description of Unknown: RightRegion for integrase B2879 sequence

SEQ ID NO: 28879 - DNA, 260 bp, Unknown
  Description of Unknown: RightRegion for integrase B2880 sequence
gtggacttcaactttgatcttgcacagtatttggagaatagcgatgaacttgcttgctgacaaacacaaaaacaccgttgacttcgatttgaaatcaacggtgtttgtaactcttatttgagccaatggtggagaataccgggatcgaaccggtgacctcttgcatgccatgcaagcgctctcccagctgagctaatcccccataattttccagaagtagaaacctctggaaaagagatactcaaacaagaaacgtttta

SEQ ID NO: 28880 - DNA, 260 bp, Unknown
  Description of Unknown: RightRegion for integrase B2881 sequence
gataacgaaagaatacaggaaattgagatatattaccgatttatcggaaaagttgagtaatcaacaagagtaatatttttaactaagggaaaccggtcttagtatgcctaatgtcgtattactcataccaatagctgatatattagatgttaccgttacagaattgttacgtggagaaaaaatagatacacagaaaaatattgatacaaaagaagtcgaggaattggtagtaggctctctcgatatggctgttaggaatt

SEQ ID NO: 28881 - DNA, 260 bp, Unknown
  Description of Unknown: RightRegion for integrase B2882 sequence
attaccttcaacttcgaccttacgccgtacattgaaggggatgatacaacagcctgctgaaaaaacgggcggaaaacattcctttttgaaaatggtgtaaagtcaaaagttgggggttgtataggaaccgcctgcaaaagcctgaaaacggtgcaggcgaagcaatgcagcccccaaaaatcggcttcagcaaaaagaaaagcaccatacttcctacgaagtacagtgcttttttggtggagcaatcaggagtcaaaacg

SEQ ID NO: 28882 - DNA, 260 bp, Unknown
  Description of Unknown: RightRegion for integrase B2883 sequence
ttcaccttccgcgacgggcggcaggtcgaaatcacggcagaattatggagggcagcataatgaaggaggaagcaaggaaaacaatgcgggtggcggtctattgccgcctcgcccgcgcggatcaagaggataccttgttagagatgcagaaggaacggctgcgcgtatatgctaaagagcgcggctatgatattgtggcggaaatcgccgagatcggcagcggcctttccctgaaccgccccggcatccgggaaatggcc

SEQ ID NO: 28883 - DNA, 82 bp, Unknown
  Description of Unknown: RightRegion for integrase B2884 sequence
acagggttcgattttggggagtctgagtgtaccaaaaaccgtctcaaacatatcgcttgagacggtttttatatgcggtagg

SEQ ID NO: 28884 - DNA, 260 bp, Unknown
  Description of Unknown: RightRegion for integrase B2885 sequence
gatggaagtcgagagcaagaggtcgagattttctataagtttataggaaagatcgactgagagaccaatatctttaagtatgtgaatggggcgcttccgatccgagcacgacaaacctgatggcgctggcaaagctcttcggtgtaagcgcggaggacttactcaaggaagcacaataaacatcgtaaaaaatactaaggcgcgcatatggcaaaaaccatatgcgcgttttttgcttattattaaattatgcttcctgc

SEQ ID NO: 28885 - DNA, 260 bp, Unknown
  Description of Unknown: RightRegion for integrase B2886 sequence
tgctcagaatgggatggtttagcaacaatctttgaacagcaagacttgatagcacagtaaacgggagcttttctttgtgttcagtgtcattcctctcttttcagcataaaggcgatacgtcatcgttcagattatgcgctcacagatatttacacccggtgcgggcatttcggtatgtgagcgcaacatcggtagagcatgcggctgttaaccgcagtgtcgttggttcgagtccaacagggggagccaaatgaagaagc

SEQ ID NO: 28886 - DNA, 260 bp, Unknown
  Description of Unknown: RightRegion for integrase B2887 sequence
atggtttttgtcactgcggacttgctccggattgtggcgacaaaacaaagcacctcctgatatcgggaggtgctttgtttcgcttaatcggggttcagtcgtcattctccgtccacagaatcccgtcaatatcgctgtcaaaattaccggcgtccagccaggtgggaagctcgtccggccgcaacggggggcggcttttctaacaatcttcgtcgctttcgtaggaaagtatgccatcaatgttttccgcaaaatttccg

SEQ ID NO: 28887 - DNA, 260 bp, Unknown
  Description of Unknown: RightRegion for integrase B2888 sequence
atcaatggtgggctgctttgcttcagcctgccgaggcaaaaaaagaaccgagcggaataacccgctcggttctttttctatcctctgtgctatgcgccgggggcacgcccacatcattaccccgcgtaggtacgcaggccttcgactgcacgcggcatctgtcgcttattcgttctgggtttcgtccgactcgattattttaacgggcggctcgtgatctgaatctattttgtctttgtaatttctgagccacttcttga

SEQ ID NO: 28888 - DNA, 260 bp, Unknown
  Description of Unknown: RightRegion for integrase B2889 sequence
atcaatggtgggctactttgctttagtctgccgaggcaaaaaaagagccgagcggaataacccgctcggttcttttttgctctattcttttgtgtctgcgggtgcagcctatataactgcttccattttggaagcagttgctacccccgcgtaggtacgcaagccttcgactgcacgcggcgcgtgttgcttattcgttctgagtttcttccgactcgattatttcaacgggtggctcgtgatctgaatctatcttgtct

SEQ ID NO: 28889 - DNA, 109 bp, Unknown
  Description of Unknown: RightRegion for integrase B2890 sequence
gcgttgcggttggtggaggcgatgggagtcgaacccatgtccgaaaagagctcagtgtaggtgtctccgggtgcaggcgatctacaacattcccgccgcgccacgccga

SEQ ID NO: 28890 - DNA, 65 bp, Unknown
  Description of Unknown: RightRegion for integrase B2891 sequence
gcgttgcggttggtggaggcgatgggagtcgaacccatgtccgaaaagagttcagcgtaggtgtc

SEQ ID NO: 28891 - DNA, 109 bp, Unknown
  Description of Unknown: RightRegion for integrase B2892 sequence
aattttaccctactaccctctaaagcgggcatgttagacccatacaggcacgggttttgagcagcacataatatgaacttgctcggaaaggtcattgccgctctcacac

SEQ ID NO: 28892 - DNA, 65 bp, Unknown; identical to SEQ ID NO: 28890
  Description of Unknown: RightRegion for integrase B2893 sequence

SEQ ID NO: 28893 - DNA, 65 bp, Unknown; identical to SEQ ID NO: 28890
  Description of Unknown: RightRegion for integrase B2894 sequence

SEQ ID NO: 28894 - DNA, 63 bp, Unknown
  Description of Unknown: RightRegion for integrase B2895 sequence
gcgttgcggttggtggaggcgatgggagtcgaacccatgtccgaaaagagttcagcgtaggtg

SEQ ID NO: 28895 - DNA, 260 bp, Unknown
  Description of Unknown: RightRegion for integrase B2896 sequence
caacacatcatcttgatctgcggaatgttccgtataaccttcaacaggccctcccactaagggagggcctgttgacttacttatacagcttttgcagagtgaggaccttttctgcccgatcaatccacttgtcgtgttttgctttgtaccgggccagcgcttccggcgtggctgccttcccggcgttccgggcccgatccatctcccggacggccatctcgtgcagccgatcactgtgccttacctcctccttggagagc

SEQ ID NO: 28896 - DNA, 109 bp, Unknown
  Description of Unknown: RightRegion for integrase B2897 sequence
aattttaccctactatctgctaaaacggccatgttagacccatacaggcaaggattttgagcagcgcataaaataaacttgctcgggaaggtcattgccgccctgacgc

SEQ ID NO: 28897 - DNA, 260 bp, Unknown
  Description of Unknown: RightRegion for integrase B2898 sequence
atcaatggtgggctgctttgcttcagtctgccgagacaaaaaaagaaccgagcggaataacccgctcggttcttttttctctattcttttgtgtctgcgggtgcagcatatataactgcttccattttggaagcagttgctaccccgcgtaggcacgcaggccttcgactgcacgcggcgcgtgttgcttattcgttctgggtttcgtcgacctttattatttcaacaggcggctcatgatctgaatctatcttatcctt

SEQ ID NO: 28898 - DNA, 121 bp, Unknown
  Description of Unknown: RightRegion for integrase B2899 sequence
gatggaagtcgagagcaagaggtcgagattttctataagtttatagggaagatcgactgagagaccaatatctttaagtatgtgaatggggggattcacttagttaaagataccatttgaa

SEQ ID NO: 28899 - DNA, 260 bp, Unknown
  Description of Unknown: RightRegion for integrase B2900 sequence
atggtttttgtcactgcggacttgctccggattgtggcgacgaaacaaagcacctcctgatatcgggaggtgctttgtttcgcttaatcggggttcagtcgtcgccggtcgaaagaaccccatcaaagaattgcaggacatcgcggttagacgcccagtgggaatagtcgtccgccgtaaaggtgaaataggccgtccacgcaatatccccggtatcctgaccagccaatgacaacgggcaacactgggcttcgccgctc

SEQ ID NO: 28900 - DNA, 260 bp, Unknown
  Description of Unknown: RightRegion for integrase B2901 sequence
tcaggtaaaggcgaatattttaaaacagagattatagaaacatcgttcattgaaaaatgagatgcgcaataacggcaacgatatacctatgtcgttgagcaaagcagaagtcgttcggttcggcatggtaaaacgctgggaaagataacgcagggaagcgccgatctcaccgtccgggccaccggagtgcagtaccctataatagccccgcaaccccagtgtttatgcgggtttgcgggattttcaattctgaaaaaata

SEQ ID NO: 28901 - DNA, 260 bp, Unknown
  Description of Unknown: RightRegion for integrase B2902 sequence
gatggaagtcgagagcaagaggtcgagattttctataagtttgtaggaaagatcgactgaaagaccaatatctttaagtatgtgaatggggcttatcggtgccggatgccgagctgcttacaaggctggcggaggtgcttgaggtcccggtcagcacattgctcggctcggcgatccccgacgataaagagccggacgatatcgcccgtcagcttgcgcgtataaatgagcagcttgcagttaaaaaccgccgcagccgc

SEQ ID NO: 28902 - DNA, 260 bp, Unknown
  Description of Unknown: RightRegion for integrase B2903 sequence
ctcttcacctttactcggtttcatactttctttgtcatccatgagagaatatcgcgataaaccgtatcgcgacaggtttcgttgagtatttcgtggcgtgcgccttcatagagcttaattgtgaggtcacgcacaccggctttccggagcgtttcataaatttttgtaacacctgcaccgtagtcgccgacgggatccatagagccggagacaaggaatatcggtatgccggatatcgccatatggcggaaccactcacg

SEQ ID NO: 28903 - DNA, 109 bp, Unknown
  Description of Unknown: RightRegion for integrase B2904 sequence
aattttaccctactatctgctaaaacggccatgttagacccatacaggcacgggttttgagcagcacataatatgaacttgctcggaaaggtcattgccgccctcacac

SEQ ID NO: 28904 - DNA, 109 bp, Unknown; identical to SEQ ID NO: 28889
  Description of Unknown: RightRegion for integrase B2905 sequence

SEQ ID NO: 28905 - DNA, 260 bp, Unknown
  Description of Unknown: RightRegion for integrase B2906 sequence
gatggaagtcgagagcaagaggtcgagattttctataagtttgtaggaaagatcgactgagaggccaatatctttaagtatgtgaatgggatgagaaccacttccgcattgtattccagagcgacaagaaaacggcgttcatcacctttgaagggaaaagaaccaaaacaggatgccatttctctcacaccgaggctttcggtatgacaacgccggtaattggggcgttcatgaactttctgatcttcaaggtgtttttc

SEQ ID NO: 28906 - DNA, 105 bp, Unknown
  Description of Unknown: RightRegion for integrase B2907 sequence
gcgttgcggttggtggaggcgatgggagtcgaacccatgtccgaaaagagctcagtgtaggtgtctccgggtgcaggcgatctacaacattcccgccgcgccacg

SEQ ID NO: 28907 - DNA, 260 bp, Unknown
  Description of Unknown: RightRegion for integrase B2908 sequence
gcgttgcggttggtggaggcgatgggagtcgaacccatgtccgaaaagagttcagcgtaggtgtctccgggtgcaggcgatcaacaacattccctccgcgtcacgccggtcgccaggctaacgcattggtagcttcatgagttcctgccggtccgcaaagcttaggtccgttcaggtgctgtgtctaaaggacgccccggccccacacgacacaagagtgggcggaacgcgcagcactcaggctgcgagcaactgataat

SEQ ID NO: 28908 - DNA, 180 bp, Unknown
  Description of Unknown: RightRegion for integrase B2909 sequence
gcgttgcggttggtggaggcgatgggagtcgaacccatgtccgaaaagagctcagtgtaggtatctccgggtgcaggcgatctacaacattcccgccacgccacgccgatcgtcaggctagcgctttggtagcttcatgagttcctgccggtccgcaaagcttaggtccgttcaggtgct

SEQ ID NO: 28909 - DNA, 260 bp, Unknown
  Description of Unknown: RightRegion for integrase B2910 sequence
actcttctcttttcactaaaaattgtcatttccagtgaaaagataaaagagaagagataagagaagcggtggctttgcttcgcaaatcattgattataaaaacgatttatgatataatttgcaaaaaggcgacgccaatgaacagtccgttacttgataaatctcttgattttttgagtgaaattgcatattcaacagccaaaagagctgaccgatttttttaatcggtcagctctttccttttacaataattcaaacag

SEQ ID NO: 28910 - DNA, 260 bp, Unknown; identical to SEQ ID NO: 28841
  Description of Unknown: RightRegion for integrase B2911 sequence

SEQ ID NO: 28911 - DNA, 260 bp, Unknown
  Description of Unknown: RightRegion for integrase B2912 sequence
cccacaatctacttcgtgggcgcgttcttcgtcctgatcatgccgctccctgagcggtaacaaaagaaccactgcataaggtcaatgccttttgtagtggttctttttctgcgtcttcatcttctgcgtgcgcaaggagtgcgcaaattttcaaaaaactttgaagatcctctttacatctgcttgcagatgtgctataataaaatcacggaaagcaatacaacacacaacatcattgaggtacaaaattatgagaaacg

SEQ ID NO: 28912 - DNA, 175 bp, Unknown
  Description of Unknown: RightRegion for integrase B2913 sequence
gcgttgcggttggtggaggcgatgggagtcgaacccatgtccgaaaagagttcagcgtaggtgtctccgggtgcaggcgatcaacaacattccctccgcgtcacgccggtcgccaggctaacgcattggtagcttcatgagttcctgccggtccgcaaagcttaggtccgttcag

SEQ ID NO: 28913 - DNA, 260 bp, Unknown
  Description of Unknown: RightRegion for integrase B2914 sequence
ttacgagataatcagatttctgttttcttttggggtgtcggcatcatcgattttatatgagaaacggttccctaagttgggtacgactgcgtatgcagttcatcaaacacaactccgtggatgttgaagccgtgtttgctgtatgcttcagcggaaagtacctgataaaagctgtttgtaggaaggtatacgatgcgtttttgtgatgccaaaattttcactcgcttggagagtgccggacacattcgcaccatatctgc

SEQ ID NO: 28914 - DNA, 86 bp, Unknown
  Description of Unknown: RightRegion for integrase B2915 sequence
gcgttgcggttggtggaggcgatgggagtcgaacccatgtccgaaaagagttcagcgtaggtgtctccgggtgcaggcgatctaca

SEQ ID NO: 28915 - DNA, 64 bp, Unknown
  Description of Unknown: RightRegion for integrase B2916 sequence
gcgttgcggttggtggaggcgatgggagtcgaacccatgtccgaaaagagctcagtgtaggtgt

SEQ ID NO: 28916 - DNA, 260 bp, Unknown
  Description of Unknown: RightRegion for integrase B2917 sequence
gatggaagtcgagagcaagaggtcgagattttctataagtttgtaggaaagatcgactgagaggccaatatctttaagtatgtgaatggggcaattcctacccggaccttgacatgctggtgcacatcagcgacgcgctcgcgaccgatccgaacgagctgctttacccgaatcaaaaatgcaggagcggcggcgtgagccgccttgtggacgacgacttttttggcaagctcacggtcgtcatttggatcgtggggttc

SEQ ID NO: 28917 - DNA, 182 bp, Unknown
  Description of Unknown: RightRegion for integrase B2918 sequence
gcgttgcggttggtggaggcgatgggagtcgaacccatgtccgaaaagagctcagtgtaggtgtctccgggtgcaggcgatctacaacattcccgccgcgccacgccgatcgtcaggctagcgcattggtagcttcatgagttcctgccggtccgcaaagcttaggtccgttcaggtgctgt

SEQ ID NO: 28918 - DNA, 260 bp, Unknown
  Description of Unknown: RightRegion for integrase B2919 sequence
acacaaggacgagagataacagctaaacagttatttgaacaggccaatcaacataaatagatacagtatcagctctaggtaaaaggctactgccaacatgcggtagcctttaagtttcggaactgcgaaaacgaaattttgagcatgggcggaagaaattcttgaaataaacggggaaacggaaaacgagcatttaagatttaagtaaaataaaaaatccacgacgagaaaaaagttcatcgtggattgtatctaattaa

SEQ ID NO: 28919 - DNA, 91 bp, Unknown
  Description of Unknown: RightRegion for integrase B2920 sequence
gatggaagtcgagagcaagaggtcgagattttctataagtttgtaggaaagatcgactaagagaccaatatctttaagtatgtgaatgggg

SEQ ID NO: 28920 - DNA, 260 bp, Unknown
  Description of Unknown: RightRegion for integrase B2921 sequence
gatggaaatcgagagcaagaggtcgagattttctataagtttgtaggaaagattgactgagagaccaatatctttaagtatgtgaatggggggattcacttagttaaagataccatttgaagcaactcgcactttagcttacaaattattatattgagcttattataccagcgcgaaatggtgtcataacctgagtacaataacaaatgcgtaaaaaatagggtacagaaataaatctgtacccttaatttttgtttcct

SEQ ID NO: 28921 - DNA, 62 bp, Unknown
  Description of Unknown: RightRegion for integrase B2922 sequence
gcgttgcggttggtggaggcgatgggagtcgaacccatgtccgaaaagagttcagcgtaggt

SEQ ID NO: 28922 - DNA, 260 bp, Unknown
  Description of Unknown: RightRegion for integrase B2923 sequence
atcaatggtgggctgctttgcttcagtctgccgaggcaaaaaaagaaccgagcggaataacctgctcggttcttttttgctctattcttttgtgtctgcgagtgcactcggcgcgtgttgcttattcgttctgggtttcgtcgaccttgattatttcaacaggcggctcatgatctgaatctattttgtctttgtaattcctgagccacttcttaagccattccgggataggcgcgccgagctttcctgcattctcaatg

SEQ ID NO: 28923 - DNA, 109 bp, Unknown; identical to SEQ ID NO: 28889
  Description of Unknown: RightRegion for integrase B2924 sequence

SEQ ID NO: 28924 - DNA, 237 bp, Unknown
  Description of Unknown: RightRegion for integrase B2925 sequence
tttttcccatttcataagcattttgcattgtccttctttgctttatacatctatcgttaattgccacaacacatcaattcttcacacaaataactttttcataacaaatcaccctttttattctatcgtagctgtcctaatctctgtttagtaaaccacttaaacgttgattttttacaaaaagcacatctaaaacgtgcttgacataatttttatactatgttatactttagatat

SEQ ID NO: 28925 - DNA, 260 bp, Unknown
  Description of Unknown: RightRegion for integrase B2926 sequence
tcaggtaaaggcgaatattttaaaacagagattatagaaacatcgttcattgaaaaatgagatgcgcaataacggcaacgatatacctatgtcgttgagcaaagcagaagtcgtccggttcggcatggtaaaacgctgggaaagataacgcagggaagcgccgatctcaccgtccgggccaccggagtgcagtaccctataatagccccgcaaacccagtgtttatgcgggtttgtgggatttttaactcagaaaaaata

SEQ ID NO: 28926 - DNA, 260 bp, Unknown
  Description of Unknown: RightRegion for integrase B2927 sequence
gatggaagtcgagagcaagaggtcgagattttctataagtttgtaggaaagatcgactgagaggccaatatctttaagtatgtgaatggggcgactcgacgcccgacctcgacaagctgcgcgccatctgcacgtacttcggtgtgacgacggattatctgatctgggaaagatcggaggacgcgccgcaggcagccgagcagaagcagggtggcgatacgcgcgggcggagcggtatattcagcgatgcgctgctgttg

SEQ ID NO: 28927 - DNA, 260 bp, Unknown
  Description of Unknown: RightRegion for integrase B2928 sequence
tttttcccatttcataagcattttgcattgtcctgctttgctttatacatctatcgttaattgccacaacacatcaattcttcacacaaataactttttcataacaaatcaccctttttattctatcgtagctgtcctaatctctgtttagtaaaccacttaaacgttgattttttacaaaaagcacgtctaaaacgtgcttgacataatttttatactatgttatactttagatacaagataagggcaacagcagttgt

SEQ ID NO: 28928 - DNA, 260 bp, Unknown
  Description of Unknown: RightRegion for integrase B2929 sequence
gatggaagtcgagagaaagaggtcgagattttctataagtttataggaaagatcgactgagaaaccaatatctttaagtatgtgaatggggcgactcgacgcccgacctcgataagctgcgcgccatctgcacctatttcggcgtgacgacggattacctcatctgggaaaacgaagagggcgcgccgaaggcgaccgtgacggcgaaggagcgcgcctcgcgcggcaagaatgaggttttcagcaatgcgctgctgtcg

SEQ ID NO: 28929 - DNA, 62 bp, Unknown
  Description of Unknown: RightRegion for integrase B2930 sequence
gcgttgcggttggtggaggcgatgggagtcgaacccatgtccgaaaagagctcagtgtaggt

SEQ ID NO: 28930 - DNA, 109 bp, Unknown
  Description of Unknown: RightRegion for integrase B2931 sequence
gcgttgcggttggtggaggcgatgggagtcgaacccatgtccgaaaagagttcagtgtaggtgtctccgggtgcaggcgatctacaacattcccgccgcgccacgccga

SEQ ID NO: 28931 - DNA, 260 bp, Unknown
  Description of Unknown: RightRegion for integrase B2932 sequence
tcagatacaaagtcaggaagaatgaaactttttaacagtaaaaaaaaaggcgctctttaatgtagcgcccaaatgctcctgcagtagctgcaaaatctatatttgtaaccatatttgcatctgtctttggaatgattccattttgcttcatagcatattctagtgccatagctggaactcctgcaagactcttcaaatacatattaattttccaattgcttggagatttaaatctaatataaaaaatgacagtataatta

SEQ ID NO: 28932 - DNA, 64 bp, Unknown
  Description of Unknown: RightRegion for integrase B2933 sequence
gcgttgcggttggtggaggcgatgggagtcgaacccatgtccgaaaagagttcagcgtaggtgt

SEQ ID NO: 28933 - DNA, 260 bp, Unknown
  Description of Unknown: RightRegion for integrase B2934 sequence
atggtttttgtcactgcggacttgctccggattgtggcgacaaaacaaagcacctcctgatatcgggaggtgctttgtttcgcttaatcggggttcagtcgtcattctccgtctgcccttaaccctgggcggcgggattttttgggggcggctgccagttgcttacaaaaaagcagcagctgccttttcttttctatccgtctttggctatgttatcattccccgtgggaaaatgcaactgttttatgattccgtgtgtt

SEQ ID NO: 28934 - DNA, 260 bp, Unknown
  Description of Unknown: RightRegion for integrase B2935 sequence
gatggaagtcgagagcaagaggtcgagattttctataagtttgtaggaaagatcgactgagaggccaatatctttaagtatgtgaatggggggattcacttagttaaagataccatttgaaacaactcgcactttagcttacaaattattatattgagcttattataccagcgcgaaatggtgtcataacctgagtacaataacaaatgcgtaaaaaatagggtacagaaataaatctgtacccttaatttttgtttcct

SEQ ID NO: 28935 - DNA, 64 bp, Unknown; identical to SEQ ID NO: 28932
  Description of Unknown: RightRegion for integrase B2936 sequence

SEQ ID NO: 28936 - DNA, 65 bp, Unknown; identical to SEQ ID NO: 28890
  Description of Unknown: RightRegion for integrase B2937 sequence

SEQ ID NO: 28937 - DNA, 109 bp, Unknown; identical to SEQ ID NO: 28896
  Description of Unknown: RightRegion for integrase B2938 sequence

SEQ ID NO: 28938 - DNA, 260 bp, Unknown
  Description of Unknown: RightRegion for integrase B2939 sequence
gatggaagtcgagagcaagaggtcgagattttctataagtttataggaaagatcgactgagagaccaatatctttaagtatgtgaatggggggaatcacttagttaaagataccatttgaaacaactcgcactttagcttacaaattattatattgagcttattataccagcgcgaaatggtgtcataatctgagtacaataacaaatgcgtaaaaaatagggtacagaaataaatctgtacccttattgaaaagaaacc

SEQ ID NO: 28939 - DNA, 260 bp, Unknown
  Description of Unknown: RightRegion for integrase B2940 sequence
cgtcctctcactgttcgacagcaacaggcgcagaagaaacttaatccagcaaatatctgattatatcctggcactctaccggcaatagctgccgttgggttgtcaggattttttctaacctgcatcgagcagcactaagtaaattatatgcactttcttttgtcacacgcagatcagctgctatttcatatatcgaagcttccttgatataccataatttcaggatcctctcatccctgatttttaatcctgcagctggc

SEQ ID NO: 28940 - DNA, 260 bp, Unknown
  Description of Unknown: RightRegion for integrase B2941 sequence
gcgttgcggttggtggaggcgatgggagtcgaacccatgtccgaaaagagttcagcgtaggtgtctccgggtgcaggcgatcaacaacattccctccgcgtcacgccggtcgccaggctaacgcattggcgttatcgtgcaaccaatgcagcgagagccaatggccttaccggatgggtggataatctgtgggacggcagagtagagatggaggtacagggagagctttcccagattgaagaaatgatccaggaaatcca

SEQ ID NO: 28941 - DNA, 260 bp, Unknown
  Description of Unknown: RightRegion for integrase B2942 sequence
caacacatcatctcgatctgcggaatgtttcgtataaccttcaacaggccctcccactaagggagggcctgttgccttatttatacagcttttgcagggtgaggatcttttccgccttatcgatccacttgttgtgtttcgcgttgtaccgggccagcgcttccggcgtggctgcctttccggcgttccgggcccgatccatctcccggacggccatctcatgcagccgatcgctgtgccttacctcctccttggagagc

SEQ ID NO: 28942 - DNA, 260 bp, Unknown
  Description of Unknown: RightRegion for integrase B2943 sequence
cgcagacaggacattgatatttattactctttcgttggcaaggtagacctgcccgaatgaccgcccgacctatccggcgcaatgcgcaaacgccggataggaacggcaaaattttttacacttctactacttctttatcacacatcagcaaacaccgagggcatgttgcgtcgcatacttttcacgcaaaacctgcaattcgagctgttcagtaaatttaacatacaaaccgctaaaatcaccaaaagcaatagccattt

SEQ ID NO: 28943 - DNA, 64 bp, Unknown; identical to SEQ ID NO: 28932
  Description of Unknown: RightRegion for integrase B2944 sequence

SEQ ID NO: 28944 - DNA, 109 bp, Unknown; identical to SEQ ID NO: 28930
  Description of Unknown: RightRegion for integrase B2945 sequence

SEQ ID NO: 28945 - DNA, 109 bp, Unknown
  Description of Unknown: RightRegion for integrase B2946 sequence
gatggaagtcgagagcaagaggtcgagattttctataagtttgtaggaaagatcgactgagaggccaatatctttaagtatgtgaatggggcgactcgacgcccgacct

SEQ ID NO: 28946 - DNA, 260 bp, Unknown
  Description of Unknown: RightRegion for integrase B2947 sequence
gtaccgtgttcggattttaggacgcaacctgctccaaaattgcagcacgccctgccttgattggcagggcgtgctgctttatttattgtacatagcttgcagaactccgactcgcttagggcaacgccgcaatggggacacggttcccttacttgcggaaaggaatcgagcttccggattgtgacatatcctctcgcgaagaagatactgtcaaattacagagaaattgagtgccttgtgtgaaagggtggggaatattg

SEQ ID NO: 28947 - DNA, 260 bp, Unknown
  Description of Unknown: RightRegion for integrase B2948 sequence
atcaatggtgggctgctttgtttcagtctgccgaggccaaaaaagaaccgagcggaataacccgctcggttcttttttctctattctctatgtgacgcgcaacggtgcagcctacatcaataccccgcgtaggcacgcaggccttcgactgcacgcggcgcgtgttaataattattcgttctgagtttcgtcaactatggcctcgattatttcaacaggcggttctttgtctatcttgtctttataatttctaagccact

SEQ ID NO: 28948 - DNA, 260 bp, Unknown
  Description of Unknown: RightRegion for integrase B2949 sequence
gacggaagtcgagagcaagaggtcgagattttctataagtttataggaaagatcgactgaaagaccaatatctttaagtatgtgaacggggggaatcacttagttaaagataccatttgaaacaactcgcactttagcttacaaattattatattgagcttattataccagcgcgaaatggtgtcataatctgagtacaataacaaatgcgtaaaaaatagggtacagaaataaatctgtacccttattgaaaagaaacc

SEQ ID NO: 28949 - DNA, 260 bp, Unknown
  Description of Unknown: RightRegion for integrase B2950 sequence
gatggaagtcgagagcaagaggtcgagattttctataagtttgtaggaaagatcgactgaaagaccaatatctttaagtatgtgaatggggggattcacttagttaaagataccatttgaaacaactcgcactttagcttacaaattattatattgagcttattataccagcgcgaaatggtgtcataatctgagtacaataacaaatgcgtaaaaaatagggtacagaaataaatctgtacccttattgaaaagaaatc

SEQ ID NO: 28950 - DNA, 260 bp, Unknown
  Description of Unknown: RightRegion for integrase B2951 sequence
gatggaagtcgagaacaagaggtcgagattttctataagtttataggaaagatcgactgagagaccaatatctttaagtatgtgaatggggggtttcacttagttaaagataccatttgaaacaactcgcactttagcttacaaattattatattgagcttattataccagcgcgaaatggtgtcataatctgagtacaataacaaatgcgtaaaaaatagggtacagaaataaatctgtacccttattgaaaagaaacc

SEQ ID NO: 28951 - DNA, 260 bp, Unknown
  Description of Unknown: RightRegion for integrase B2952 sequence
ggtaaaattaatgatgaaacaaatacaagggatattgaaattaaatggaattttgaataatctctactatataaccaaatcttgaatgaaagaatgtgataagtaatgaatcaagaaaaactagaaacaatcgtagaattatttgaaggtaaagaaattagaagtatttgggatagtgaaaaggaagattattactttagtgttgttgatgttataaatgctttagcaaacccaaaagatgctagaaaatactggtcagt

SEQ ID NO: 28952 - DNA, 260 bp, Unknown
  Description of Unknown: RightRegion for integrase B2953 sequence
ttaactcccacaacagggaattgcacaaattgttatgcagtaataaccctaagtttatgactacctaaggctttttccttattttaaactcattttacttccgtcttctgcttatttctaatgcctgtttcaatttctttgctatgccccctaaggcatgttccaagtttatacctattacataatatcccttgaaaagacaagaggataaacgtatctacattcatcctcccataaaatactatatcattattttaatt

SEQ ID NO: 28953 - DNA, 217 bp, Unknown
  Description of Unknown: RightRegion for integrase B2954 sequence
gcgttgcggttggtggaggcgatgggagtcgaacccatgtccgaaaagagttcagcgtaggtgtctccgggtgcaggcgatcaacaacattccctccgcgtcacgccggtcgccaggctaacgcattggtagcttcatgagttcctgccggtccgcaaagcttaggtccgttcaggtgctgtgtctaaaggacgccccggccccacacgacacaaga

SEQ ID NO: 28954 - DNA, 64 bp, Unknown; identical to SEQ ID NO: 28932
  Description of Unknown: RightRegion for integrase B2955 sequence

SEQ ID NO: 28955 - DNA, 260 bp, Unknown
  Description of Unknown: RightRegion for integrase B2956 sequence
gctccaccaaactccgcatcgaaagatgcggagttttgctttatactcagcactttctgaactattttatgtgtttttataaaagcagcaccgactcacgcacgacaattttcgggcgcaagccggttctgttttttgtttttcccgcttcttctgaccgcgtgtcgtggtcagagccgtctggcctgctgtctttctctgagagacattgacgccaaccctgacgccaacgtcgatgggacgaaacgtgcctggttgga

SEQ ID NO: 28956 - DNA, 106 bp, Unknown
  Description of Unknown: RightRegion for integrase B2957 sequence
gcgttgcggttggtggaggcgatgggagtcgaacccatgtccgaaaagagctcagtgtaggtatctccgggtgcaggcgatctacaacattcccgccgcgccacgc

SEQ ID NO: 28957 - DNA, 64 bp, Unknown; identical to SEQ ID NO: 28932
  Description of Unknown: RightRegion for integrase B2958 sequence

SEQ ID NO: 28958 - DNA, 260 bp, Unknown
  Description of Unknown: RightRegion for integrase B2959 sequence
tctggaaaaggcgaatattttaaaacagagattatagaaacatcgttcattgaaaaatgagatgcgcaataacggcaacgatatacctatatcgttgagcaaagcagaagtcgtccggttcggcatggtaaaacgctgggaaagataacgcagggaagcgctgatttcaccatccgggccaccggagtgcagtaccctataatagtcccgcaaacccagtgtttatgcgggtttgcgggatttttaactcaggaaaaata

SEQ ID NO: 28959 - DNA, 260 bp, Unknown
  Description of Unknown: RightRegion for integrase B2960 sequence
gatggaagtcgagagcaagaggtcgagattttctataagtttgtaggaaagatcgactgaaagaccaatatctttaagtatgtgaatggggggattcacttaattaaagataccatttgaaacgactcgcactttagcttacaaattattatattgagcttattataccagcgcgaaatggtgtcataatctgagtacaataacaaatgcgtaaaaaatagggtacagaaataaatctgtacccttattgaaaagaaacc

SEQ ID NO: 28960 - DNA, 109 bp, Unknown
  Description of Unknown: RightRegion for integrase B2961 sequence
aactttaccctactaccatcaaaatcgggcatgttagacccatacaggcaaggattttgagcagcgcataaaataaacttgctcgggaaggtcattgccgccctgacgc

SEQ ID NO: 28961 - DNA, 260 bp, Unknown
  Description of Unknown: RightRegion for integrase B2962 sequence
atggtttttgtcactgcggatttgctccggattgtggcgacgaagcaaagcacctcctgatatcgggaggtgctttgctttgtttagtcgggtgtcagtcgtcgccctccgtccacaggatcccgtcaatgtcgctgtcaaacttgccagcggccagccaggcggaaagctcgtccggccacaacggattccaggcgatttccccgatctccccggggtgggagggggtggaacgtctgggctacaggcgtaaccataga

SEQ ID NO: 28962 - DNA, 260 bp, Unknown
  Description of Unknown: RightRegion for integrase B2963 sequence
atggtttttgtcactgcggatttgctccggattgtggcgacgaagcaaagcacctcctgatatcgggaggtgctttgctttgtttagtcgggtgtcagtcgtcgccctccgtccacaggatcccgtcaatgtcgctgtcaaacttgccagcggccagccaggcggaaagctcgtccggccacaacggattccaggcgatttccccgatctccccggggtgggaggggtggaacgtctgggctacaggcgtaaccatagac

SEQ ID NO: 28963 - DNA, 64 bp, Unknown; identical to SEQ ID NO: 28932
  Description of Unknown: RightRegion for integrase B2964 sequence

SEQ ID NO: 28964 - DNA, 109 bp, Unknown
  Description of Unknown: RightRegion for integrase B2965 sequence
agaataccaagaactattttatgtaaaacactacatttgaatgatgttgtaatattataagtaaagtgcctacacttttaattagtataggcacttttttatttgcatt

SEQ ID NO: 28965 - DNA, 86 bp, Unknown; identical to SEQ ID NO: 28914
  Description of Unknown: RightRegion for integrase B2966 sequence

SEQ ID NO: 28966 - DNA, 260 bp, Unknown
  Description of Unknown: RightRegion for integrase B2967 sequence
gaaccctacattgcgtggggaacggtatttgtccaaacaaaaagacactccttaccgtaatggtagggagtgttttctttgtatctaaggcacttaggtgagttaggtgagtaatcgggctaaaatccctataacttcttcttagtacgcgcgtatatagaaatagttatagggaaatgtacccgattactcaccttcctcacctaaactttttaaatttaggggcaattatagtcttacttcttccccttcaccacgaa

SEQ ID NO: 28967 - DNA, 260 bp, Unknown
  Description of Unknown: RightRegion for integrase B2968 sequence
ggtcgatgcggcccagcacccgagcatgatagttataagcggccattccccgcaggctgaacagcacaaagcatttcaggcttcgcacatccgggtcaggctcctgccagagctgctgcatatcatagtcctcggcaatgcccggacaggcggcgtggatcttctcgatcagctgcccgacggtgtgctcgtcaaaatttacattggtgatggtggtgaacagcccctgcatcagcagcaaagcctgctccggagccgga

SEQ ID NO: 28968 - DNA, 260 bp, Unknown
  Description of Unknown: RightRegion for integrase B2969 sequence
atcaatggtgggctgctttgtttcagcctgccgaggcaaaaaaagaaccgagcggaataacccgctcggttcttttttctctattcttttgtgtctgcgggtgcagcctatataactgcttccattttggaagcagttgctaccccgcgtaggtacgcaagccttcgactgtacccggcacctgtcgcttattcgttctgagtttcgtcagcctcgattatttcaacgggcggctcgtgatctgaatctattttgtcttt

SEQ ID NO: 28969 - DNA, 183 bp, Unknown
  Description of Unknown: RightRegion for integrase B2970 sequence
gcgttgcggttggtggaggcgatgggagtcgaacccatgtccgaaaagagctcagtgtaggtgtctccgggtgcaggcgatctacaacattcccgccgcgccacgccgatcgtcaggctagcgctttggtagcttcatgagttcctgccggtccgcaaagcttaggtccgttcaggtgctgtg

SEQ ID NO: 28970 - DNA, 260 bp, Unknown
  Description of Unknown: RightRegion for integrase B2971 sequence
gatggaagtcgagagcaagaggtcgagattttctataagtttataggaaagatcgactgagaaaccaatatctttaagtatgtgaatggggtgtgtcaatattggaaacaccaacaaatacgcaggcacacagacggaaaagaacctttgaaagcctcttgcctgagagccttagacccggaacaagtacacctgcttcgcagccaaggccaggaaggatggctatgagcagatggctgctctcttcctaaaagaccgcc

SEQ ID NO: 28971 - DNA, 260 bp, Unknown
  Description of Unknown: RightRegion for integrase B2972 sequence
tatgaagctaagactgctaaaatcaaacttttctgcagtaaaaaaaaaggcgctatttaatgtagcgcccaaatgctcactacatgaaaagacgatttttgataactatgttattactgtggatttgaataaggaatttaaaaatatgaaatgtaattcttttggtgagaagttaagaagatttagaacgttacatggtatgactcaggaggatgttgccaaagctattgggagcagtaaagctaatatttctaaatatg

SEQ ID NO: 28972 - DNA, 260 bp, Unknown
  Description of Unknown: RightRegion for integrase B2973 sequence
gatggaagtcgagagcaagaggtcgagattttctataagtttgtaggaaagatcgactgaaagaccaatatctttaagtatgtgaatggggggattcacttagttaaagataccatttgaaacagctcgcactttagcttacaaattattatattgagcttattataccagcgcgaaatggtgtcataatctgagtacaataacaaatgcgtaaaaaatagggtacagaaataaatctgtacccttattgaaaagaaacc

SEQ ID NO: 28973 - DNA, 260 bp, Unknown
  Description of Unknown: RightRegion for integrase B2974 sequence
aacctttccgtcaccgtctttccttcttattttcttcttacccgtcccctcttccattaaccccttctcaccagcgcattgtacagcatcaccaaaaactgcaccgcggacggtgtgccggtcagtgggtagcctgccagctgttgcacatgttccgggcttgtgttccatgcgatctgtgcggctcgacgaatcgtgctctgaatgactgtccagtagcagtgatattgttctgacagtggctcatatacttccttctg

SEQ ID NO: 28974 - DNA, 109 bp, Unknown
  Description of Unknown: RightRegion for integrase B2975 sequence
gctgagtctaaaactgcatcaattaagcttttctgcattaaaaaaaaaggcgctctttaatgtagcgcccaaatgctcctgcagtagctgcaaaatctatatttgtaac

SEQ ID NO: 28975 - DNA, 260 bp, Unknown
  Description of Unknown: RightRegion for integrase B2976 sequence
ataaaaacacccgccgtaccccggcgggtgtttttgttttggtgctccgtgagctgctgagaagtcgaacagggcggcagtaccgcagtaccagcccgatggccgatgcggaacgcggatgccgtgcgttcgtcatcctcggtggaatcactctcattataccagtggtttgcccagtgtttgaatgccctgcgaacagcccgcctgcccctcatacagggcaggcataaaaaaccacggtgcggttctgcatcgtggtt

SEQ ID NO: 28976 - DNA, 260 bp, Unknown
  Description of Unknown: RightRegion for integrase B2977 sequence
accgcgttgcggttggtggaggcgatgggagtcgaaccaattcccgccgttctatcgtgaaaaaatcgcaatttacaggctgaaaatgtggcgttgctatgggctgaaattctgcacatagaaccgcacccagttccctaaaatcgggaagtgtggtaaaaagtgtggtatttttcagccgtgcagcagcttcataaataccgcgttgacggcctgcgctgtggttacatcctcaccagtcagggcgtgggagtaaatgc

SEQ ID NO: 28977 - DNA, 260 bp, Unknown
  Description of Unknown: RightRegion for integrase B2978 sequence
tacgaactcttttggtttaggaatgtgttcggcctgacaagaaaactgccgcagaggtaattgtcctctgcggcagttttctatttgccggtgtagctctcacaccgcgcgttgctcataagtagccgtgatttctctttttcgcttcaatgtttgacagcacatcccggatttcaaaggcacctatcgcacagttccagtgatcgcacccaaacgagcggaagatgcagttttggcacccgtcctgctgcttgcagtag

SEQ ID NO: 28978 - DNA, 260 bp, Unknown
  Description of Unknown: RightRegion for integrase B2979 sequence
gctaaaagaggtggatggtattctcctccgttcaggcttgagattaagttcagattctgaaatcaggtaaaaaaagggctccaatcccagcagcagagccacagttatcattgtggcgccggttcttccgtgcctatatcagtcaatattcccgccacttccctgtatggcattgtgtatctctgtgacagatatcgcattgatgctccaagttcaccgtcagggccgccgtactggcttattaccatagctgccatcgc

SEQ ID NO: 28979 - DNA, 260 bp, Unknown
  Description of Unknown: RightRegion for integrase B2980 sequence
ctcgtcaacaatattgtttttaatgcagatggcgaagtcactatttcatttgccatttaactcttttctttttactttctgcacttctttactgttcaagtgatgatatacttgtatagtaaagaagtgcaatttttatctaactgtataatccagactaatccatcctgcgccagatttgagcttgccccactttgaggctccagtgccagacgcttcgtcaacgatggttaatgacatcgtttcggtgatcttgccgg

SEQ ID NO: 28980 - DNA, 260 bp, Unknown
  Description of Unknown: RightRegion for integrase B2981 sequence
ctcgtcaacaatattgtttttaatgcagatggcgaagtcactatttcatttgccatttaattcttttctttttactttctgcacttctttattattcaagtgatgacagcttagattggaaagactacggtgttcaatctatcattgatagaactgcattaaatcctgagctttcaaacggatctatcattttgatgcataatggtgccaaatatacaaaagatgcacttgaaactgttatttcaacacttcagtcaaag

SEQ ID NO: 28981 - DNA, 260 bp, Unknown
  Description of Unknown: RightRegion for integrase B2982 sequence
ataaaagcacccgccgtaccccggcgggtgtttttgttttggtgctccgtgagctgctgaggagtcgaacagggcggcagtaccgcagtaccagcccgatggccgatgcggaacgcggatgccgtgcgttcgtcatcctcggtggaagcactctcattataccagtggtttgcccggtgtttgaatgccctgcgaacagcccgcctgcccctcatacagggcaggcataaaaaaacacggtgcgtgtgcatcgtggtttc

SEQ ID NO: 28982 - DNA, 260 bp, Unknown
  Description of Unknown: RightRegion for integrase B2983 sequence
cgaacaccgaggcaatttcggggttcgtattattcttttctaacgattatttcggcataagaatagaattatgaatacttacgacaacagccgggcgaaaacaatcgctcggctgtttctatgctctaaaacaggtacatgctatgaaagatcgtataagtctataaaattttcagattaacatccgaaaaaagcttgtttatactcttgcgaggcgacttctatttttgccataagatcggcgcttttactctctatcg

SEQ ID NO: 28983 - DNA, 109 bp, Unknown
  Description of Unknown: RightRegion for integrase B2984 sequence
gctaaaagaggtggatggtattctcctccgttcaggcttgagattaagttcagattctgaaatcaggtaaaaaaaggccttcaatcccagcagcagagccacagttatc

SEQ ID NO: 28984 - DNA, 260 bp, Unknown
  Description of Unknown: RightRegion for integrase B2985 sequence
agaatcatggaggcaggcttaagtttgtttccttatcgcccgatgggtgattggttttgactgttttgctttcactaaggtctcccgcacaaaagtgcgggggattttttgtgttattttgcaggcgtgccgcgcacgtcccgtacttcaccttatgtgtgtctctccgtccggcagctcgtccgccgccgcgcatgagcgggatttctccgccggtcttgacaagggaaagaatatctgatacagtataaatgaaaagg

SEQ ID NO: 28985 - DNA, 260 bp, Unknown; identical to SEQ ID NO: 28984
  Description of Unknown: RightRegion for integrase B2986 sequence

SEQ ID NO: 28986 - DNA, 260 bp, Unknown
  Description of Unknown: RightRegion for integrase B2987 sequence
tacgaacttttttggtttaggaatgtgttcggcctgacaagaaaactgccgcagaggtaattgtcctctgcggcagttttctatttgccggtgtagctctctgtcggcaagagcttataggttttcagcgtcttcccgcacctgcggcatttataccgatagatcgtatcaatgtcgcctgcgctggaaccgatagtgaaatcggaatcaagcatcacccaactgtgcgattcacaggggcataggcgctcctcaagctc

SEQ ID NO: 28987 - DNA, 118 bp, Unknown
  Description of Unknown: RightRegion for integrase B2988 sequence
gcgttgcggttggtggaggcgatgggagtcgaacccatgtccgaaaagagctcagtataggtgtctccgggtgcaggcgatctacaacattcccgccgcgccacgccgatcgtcaggc

SEQ ID NO: 28988 - DNA, 158 bp, Unknown
  Description of Unknown: RightRegion for integrase B2989 sequence
ctcgtcaacaatattgtttttaatgcggatggagaagtcactatttcatttgccatttaactcttttctttttactttctgcacttctttactgttcacgtgatgacagcttagattggaaagactacggtgttcaatctatcattgatagaactgca

SEQ ID NO: 28989 - DNA, 260 bp, Unknown
  Description of Unknown: RightRegion for integrase B2990 sequence
tacgaactcttttggtttaggaatgtgttcggcctgacaagaaaactgccgcagaggtaattgtcctctgcggcagttttctatttgccggtgtagctcttacaccgcgcgttgctcataagtagccgtgatttctctttttcgcttcaatgtttgacagcacatcccggatttcaaaggcacctatcgcacagttccagtgatcgcacccaaacgagcggaagatgcagttttggcacccgtcctgctgcttgcagtag

SEQ ID NO: 28990 - DNA, 260 bp, Unknown
  Description of Unknown: RightRegion for integrase B2991 sequence
gatatagtaaactttcatgttatgtgtcgccccacaagggagcgacgtaagttgttataatttttcgtgtgttagtttatctttattaaaaatcaaacttgtattcaaaatagcgtaatcatcgccatcaaaaaacatttgctgacctaatgtttcgcggttaaagctcagcagataataaccgccacaatacatgttttcaactgaatagctgccgctgtttggagtcgcatgccaaaattcctgcgttatcgtcgcat

SEQ ID NO: 28991 - DNA, 260 bp, Unknown
  Description of Unknown: RightRegion for integrase B2992 sequence
ataaaagcacccgccgtaccccggcgggtgtttttgttttggtactccgtgagctgctgaggagtcgaacagggcggcagtaccgcagtaccagcccgatggccgatgcggaacgcggatgccgtgcgttcgtcatcctcggtggaatcactctcattataccagtggtttgcccggtgtttgaatgccctgcgaacagcccgcccgcccctcatacagggcaggcataaaaaacacggtgcgtgtgcatcgtggtttgg

SEQ ID NO: 28992 - DNA, 260 bp, Unknown
  Description of Unknown: RightRegion for integrase B2993 sequence
ccgtcaagcgcactaagatgtgagaaagccttgagagatcaaggcttttttgttatataaaatatggtataatgaagcatgctgatgcatgcgcaggtcatcaggctccgcctggtgacaatgtataatgaagcatgctgatgcacacaacaaaaaggataactatataaatatgaatattcaaaaacagtttataaaatatgtttcccagaatatctgtggaatgttggggatttcctgctatattatcgtggatacat

SEQ ID NO: 28993 - DNA, 260 bp, Unknown
  Description of Unknown: RightRegion for integrase B2994 sequence
cttgctccaccaaaatccgcactgaaaagtgcggatttttgctttatccgaactttttgaagaagaaccgaggatgccgacgcggcgtgtttttgcgcaggcaggcttgatttttcttcgtttcacgcggccgtcgtccgcaccgtaaggtcaaggcaacttgggctgatgtcctccactcagcgacattgacgccaaccctgacgccaacggcgatgggacgaaacgtgcctggttggacaaaatgagatgaaaacgag

SEQ ID NO: 28994 - DNA, 260 bp, Unknown
  Description of Unknown: RightRegion for integrase B2995 sequence
gtgacagggttcggttttggggagtctgagtgtgccaatcaccggatcaccgcatggtgatccggtgatttttttgctccgcgccagaaatgctccgccggcctgggccggcggagcattttcctgtcttatccctgcctcagcggcggtgctttttccccttgcgagccttttccggctcgatgccctcggcctcggccatagcgtccacggtcacctgcaggtcgtcgagctggtcgtgcacaggcttgagcgccttt

SEQ ID NO: 28995 - DNA, 260 bp, Unknown
  Description of Unknown: RightRegion for integrase B2996 sequence
caaatggaggttgaagtaaaaaaaataaattacagaagaacagaatatatctgtttgtaacaacaagtgaaaacctggcttccgtagataatgaggaagcccagacctgcctgtgccaccagaaattccccgacgattacaccgacaaaggaaagcccgacgttgattttcaaagcgttgaccatacaggggatattggcaggaaatacgacttttttcagaatctgccattttccgccgccaaaaatgcggatgagttt

SEQ ID NO: 28996 - DNA, 260 bp, Unknown
  Description of Unknown: RightRegion for integrase B2997 sequence
ttttatcgggcttttttgttgcccaaaggccgtttttcgaagtttcaaaatcgtagatgaaaaaacggcgttttccctttgaagatagatacgaacccaagtaacaaccgaatatagaacaaggacggcagatagtcacagacgctacctgccgatttttgttgccctcggagccaatcgttttgaaaagaaacggttggctctttttttatttcacagacaaggagcaagacaatgatcttttcagattcaccccagca

SEQ ID NO: 28997 - DNA, 260 bp, Unknown
  Description of Unknown: RightRegion for integrase B2998 sequence
atgatcgagtgcatcaaggtacataacgatggaaagctgacgatcattttccgggtatgagatcgaggaaacactatagaaagccagatcgcaagacacagaaaaaactggaggtatgcgcacacttttgcaaacgtttcctatggaagcttagtgttaaaatgtgataccaacctcctggagaggattgtatgtcaattgaaattgatgggttgcatcaaagtttacctcggtggtaacccgaaaaatcacctttagcg

SEQ ID NO: 28998 - DNA, 260 bp, Unknown
  Description of Unknown: RightRegion for integrase B2999 sequence
atatacatggcgtttggcctttttatcctgctctgtccctaccccagcaggcagggataggtcgttttgctcatctgttcacaaaaagtttacaatcaagttgcaacaaagggcgagggcgtcagcaatcagctggcgccctcaataaacaaaccggaggcagcaaaacgcctccgataggtattatagcacacgcggagatgtggcgcaagtgccacgtgtcaaaataccaatcgtcaatttttctgcgacgtttccgg

SEQ ID NO: 28999 - DNA, 260 bp, Unknown
  Description of Unknown: RightRegion for integrase B3000 sequence
cgcagacaggatattgagatttactattctttcgtcggcaaagtggacttgcccgaatgaccgcccgccctatccgatatcaaaggcaagtatcggataggaaaggcaaaattttttacacttctattacttctttatcacacataagcaaacctgtacggcatggctgtagctgcggccgtcaaggcgatgaactaccacgccggtcaggaaacgtgggcgctgatgccgcttgcgaccgtttctcctgcaaagctgac

SEQ ID NO: 29000 - DNA, 260 bp, Unknown
  Description of Unknown: RightRegion for integrase B3001 sequence
agcaccgcacagaaacgtgtggtgtttttttgttgttaccgaccaaaggagaaactatgagctacgcgatcgtattcagcagtaaaacaggcaacacaaaattattggcagacacgctgcacgcctgtctgccacaggaaaactgctgctattttggcaccccggaccctgctgccatggaagcggacgacctctatgtgggcttctggacagacaagggaaacgccgacgaaagcactttggactttttgaagcagctg

SEQ ID NO: 29001 - DNA, 260 bp, Unknown
  Description of Unknown: RightRegion for integrase B3002 sequence
ggtttccgtctaatcgcggtattgagcttgagaggggccacaaaaagaggctcgccctgatggacgagcttcttttttcagtcggtcaaaagttcttcaacggttgtccccagcgcccttgccagcttgagcgccgtggcggcctcaatgccgtccatttcccgcttgccggtttccagcttagcgatgttcggctggcgggttccaatcctccgcgccagctcggcctgtgtgaggccggctgcaatgcggaactgctt

SEQ ID NO: 29002 - DNA, 260 bp, Unknown
  Description of Unknown: RightRegion for integrase B3003 sequence
cgcagacaggatattgagatttactattctttcgtcggcaaggtggacttgcccgaatgaccgcccgccctatccgataccaaagacaagtatcggataggaaaggcaaaattttttacacttctattacttctttatcacacataagcaaaatcacagggtatcaaacacttagtgtcttctatgtgaaaagattttaaaggaaaaatgcacatcctacgtagataacatgacaatttcatgcaaagcgaaaggagaca

SEQ ID NO: 29003 - DNA, 61 bp, Unknown
  Description of Unknown: RightRegion for integrase B3004 sequence
ccgtcaagcgcattaagccttgtaggtatgagtatctacaaggcttttttgatgttataag

SEQ ID NO: 29004 - DNA, 260 bp, Unknown
  Description of Unknown: RightRegion for integrase B3005 sequence
tgcccctgcacccaattccgctttactttatgtaaggcggttttttattgccgctcatgaatcattatttataaacccaactttgttatttcaccatggcagacgctgatataataaaaaagagtgcattaccacctcatcagataatgcactcttatattttaccctatttctcctccagcccgctgagcgaaagcctgctctccattttctgaacagtcttgctctcctgctttgcgatctttgcttcaaaccagaag

SEQ ID NO: 29005 - DNA, 260 bp, Unknown
  Description of Unknown: RightRegion for integrase B3006 sequence
tcagatcctacaaattttatcataaatctatatccaaagataaataaagctaatgtttgatctttacataaaaacacataatttatataaatggtattgaagaataaaagaagaaaaatattttttttacccatcaagcgacctctttaggggcgaacgaattagcgcatttagaaatggttggtagtttagtgcatcaattgacagaaggcgtaaccatagaagaattagaaaaagcaggacttagtgcatattataca

SEQ ID NO: 29006 - DNA, 260 bp, Unknown
  Description of Unknown: RightRegion for integrase B3007 sequence
aggaaactcaggtggcttttctgtttgtatgattccgcgcggaaaaactattatagatagagcgaacccggaaagtccacaggactttccgggttcgccttttcacgggaaatataaatttacagaatggtaatgcggcctgcgccgtagggctgctcgtagttgagcaggtagccggggtatgcggccagcgggctgttggcgctggacaggtgcggcagacccgcagcatctgcgccgtcaaaggtcatggcgtaggt

SEQ ID NO: 29007 - DNA, 109 bp, Unknown
  Description of Unknown: RightRegion for integrase B3008 sequence
ccgtcaagcgcattgcggatcagagaagtcttagagataaggcttctttcttttttataaagaaaaaatataaggtgtagtgtaaagtgtgacaagtcatcaggagaga

SEQ ID NO: 29008 - DNA, 260 bp, Unknown; identical to SEQ ID NO: 28989
  Description of Unknown: RightRegion for integrase B3009 sequence

SEQ ID NO: 29009 - DNA, 260 bp, Unknown
  Description of Unknown: RightRegion for integrase B3010 sequence
accctggatttccacctcaaagtaggcatagtcgagagcataacaatcaccaggaaataagagttgccgaccatagggaaaaaccttgcggtcggcgatttttcttgctataatatagaggtaaagggcaacgagacctttcatggttacaccctttgaaaaggggctattttgagacctttcgtagtcatctgccaagtcaaaataatccgaaccttttggtaacaaccgattggttcggatttgtcgtttatctgaaa

SEQ ID NO: 29010 - DNA, 260 bp, Unknown
  Description of Unknown: RightRegion for integrase B3011 sequence
tacgaactcttttggtttaggaatgtgttcggcctgacaagaaaactgccgcagaggtaattgtcctctgcggcagttttctatttgccggtgtagctctctgtcggcaggagcttgtaggttttcagcgtctttccgcacctgcggcatttataccggtagatcgtgtcaatgtcgcctgcgctggaaccgacagtgaaatcggaatcaaccaccacccaactatgcgattcacaggggcacaggcgctcctccaactc

SEQ ID NO: 29011 - DNA, 260 bp, Unknown
  Description of Unknown: RightRegion for integrase B3012 sequence
tccgaacctgattccggttggaaacgggttcggatttctttatttcgtcaagaaggctgaaaatatgcaggggtaacttgaaccattgctacaactgagttgaagatgcaatcatgcccgctttatttcttacaataaagcgggcatgactatttggttacagagcaacatcacatgtgaggaaccagcttcccattggataaatttggaattccaccatactctccatccagatatgctttgcgaattcgcttgtcgaa

SEQ ID NO: 29012 - DNA, 260 bp, Unknown
  Description of Unknown: RightRegion for integrase B3013 sequence
gaggaggtgaccttcgtgttctccgattacctcgaacgcaccgtgccgataatcaaataaacctcaaaagcgaaagccgtctggtcgagtgccgggcggctatttttgttagatgtttttgtattgtgggcaatggacgctggactaaaaaccgcaaatatgatacctttatggaaaaaggagattttccaaatgaaaagtatcaccgatgaaatttttgatggagtcatcaatgaactcgaccgccgtaattttctcgc

SEQ ID NO: 29013 - DNA, 260 bp, Unknown
  Description of Unknown: RightRegion for integrase B3014 sequence
ctcgtcaacaatattgtttttaattcggatggagaagtcactatttcatttgccatttaactcttttctttttactttctgcacttctttactgttcaagtgatgacagcttagattggaaagactacggtgttcaatctatcattgatagaactgcattaaatcctgagctttcaaacggatctatcattttgatgcataatggtgctaaatatacaaaagatgcacttgaaactgttatttcaacacttcagtcaaag

SEQ ID NO: 29014 - DNA, 260 bp, Unknown
  Description of Unknown: RightRegion for integrase B3015 sequence
atatcgggcttttttgctgcccaaacggcgatttttctctgtaccaaaacgcagatgtaaaatcgccgttttccctttgcggatagacttgaactcccgaaaagtaaatatcagatacacaggcagatagaaagcaaaaatctatctgccttttttattaccctaaaagggagaaatcagatatgctgcagaaggaatgagccaaccggctcaaggctcggtacgacaccaagatggacggcaacgaatggatggaagtg

SEQ ID NO: 29015 - DNA, 109 bp, Unknown
  Description of Unknown: RightRegion for integrase B3016 sequence
ggctccttggatgacttcgagattaaaatttttcctaagcttccgcgtacccatcattgacaacatggtggtacgcaatcctcagtgccgatgtcattgagtacaccga

SEQ ID NO: 29016 - DNA, 260 bp, Unknown
  Description of Unknown: RightRegion for integrase B3017 sequence
ctcgtcaacaatattgtttttaattcggatggagaagttactatttcatttgccatttaactcttttctttttactttctgcacttctttactgttcaagtgatgacagcttagattggaaagactacggtgttcaatctatcattgatagaactgcattaaatcctgagctttcaaacggatctatcattttgatgcataatggtgccaaatatacaaaagatgcacttgaaactgttatttcaacacttcagtcaaag

SEQ ID NO: 29017 - DNA, 260 bp, Unknown
  Description of Unknown: RightRegion for integrase B3018 sequence
ataaaagcacccgccgtaccccggcgggtgtttttgttttggtgctccgtgagctgctgaggagtcgaacagggcggcagtaccgcagtaccagcccgatggccgatgcggaacgcggatgccgtgcgttcgtcatcctcggtggaatcactctcattataccagtggtttgcccggtgtttgaatgccctgcgaacagcccgcctgcccctcatacaggacaggcataaaaaaccacggtgcgtgtgcatcgtggtttc

SEQ ID NO: 29018 - DNA, 260 bp, Unknown
  Description of Unknown: RightRegion for integrase B3019 sequence
ggcgttgtcaggcagcatattactgtaaactataaatttgtagggcagttaaacgcataaaggactttggattatttatgggtggccttattgctggcacacaataaaaatccgaaagactttgaatctttcggatttttatgatatggcggagaaggagggatttgaaccctcgcgccagtcaccccagcctactcccttagcagtggaacaaaaaatggctaaatacctgcaaaacaatgatatctgtacgttatttg

SEQ ID NO: 29019 - DNA, 260 bp, Unknown
  Description of Unknown: RightRegion for integrase B3020 sequence
aaagcaccacacggaaacgtgtggtgcttttttgttgctgccaaacgagtgagggtttagctcacccaggagagtgccgtgcatggactgcaagagggtcaccgtgatcagaatcggcccggtaatctccaccagaatgaaagcactacacggaaacgtgtggtgcttttttgttttatctgccgttcaccttacgtcccctttcatgaaaaaagcgtttgtcgcagcccgcaggccgtgacaaacgctttttattttac

SEQ ID NO: 29020 - DNA, 260 bp, Unknown
  Description of Unknown: RightRegion for integrase B3021 sequence
aaagcaccacacggaaacgtgtggtgcttttttgttgctgccaaacgagtgagggtttagctcacccaggagagtgccgtgcatggactgcaagagagtcaccgtgattacagcagcccggcaatctccaccagaacaaaaaagcgtttgtcgcagcccgcaggccgtgacaaacgctttttattttactgtgcgcccaagcgcattttgaagtcctgatagccgaagtgcaccagttccctgcaattgccgtctgcgcc

SEQ ID NO: 29021 - DNA, 260 bp, Unknown
  Description of Unknown: RightRegion for integrase B3022 sequence
ttggctctccacaactgcaccaaaatcctcgaacgtttgttcggggattttttgttttagtgatttgtttgggatgacaagcatcgcccccccgcaccgtaggggcggattccatatccgcccgcggatccttgccattactgcaaacgtcctggggcgctggcgagcattgacccctgcggcgctgtagacttgttgccctatgcaactgcgaaatgtacgtggtgcaaatacacctatcccgcgcacaaaaacatttt

SEQ ID NO: 29022 - DNA, 260 bp, Unknown
  Description of Unknown: RightRegion for integrase B3023 sequence
gaaaggcatcacacattgtgtggtgccttttttgttgttgccaaacgagtgagggcttagctcacccaggagagcgccgtgcatggactgcaagagggtcaccgtgatcagaatcggcccggtattctccaccagaaagcactgtacttcgtaggaagtatggtgcttttctttttatgcagacgcagaaaaaggcgggagcttcccacaaaagggaaagccaccgcctttgttgatcatcggatgagccagccgtaatc

SEQ ID NO: 29023 - DNA, 260 bp, Unknown
  Description of Unknown: RightRegion for integrase B3024 sequence
gcactgtacttcgtaggaagtatggtgcttttctttttgctttcttggaggtcacactgaaaatcagccaaatgcctgattttgcaggcgtatggacggcaacccccaattcttgctgtttcgttgtttttgaaaatgcttgttcgatgcccgactgttttgcaggcggacgtatcactccccctcaatgtaaggagtgagatcgaagttgaacgagatgttgatctggtatccgcgatatacgtctaccctgcggatga

SEQ ID NO: 29024 - DNA, 260 bp, Unknown
  Description of Unknown: RightRegion for integrase B3025 sequence
ctaaacaaaaaatctcccgccctcaaccgagagcgggagaaaatttttacatcaccttaataaatgcgcctggataatattttttgacctttgccaaatatgcctcggcattttccctggaactaaaagcccctacctgcacataaaacatctcctcagattttgacgttttcgatgaaaacattttctgaaactttctccagtcctcaagctctgcctccgaatgtgtccacatagcagggcacagcttgccggtcacc

SEQ ID NO: 29025 - DNA, 260 bp, Unknown
  Description of Unknown: RightRegion for integrase B3026 sequence
ttagctctccacaaccgcaccaaaatcctcgaacgtttgttcggggattttttgttttagtgatttgtttgggatgacaagcatcgtcccccgcggcgctggcggttcgcgcttttccgctatagatacagcaacagccccagtcctgcactggaaccggggctgtacgattttatggcaattttacgccatgaaatccggcaggggcttgccctccttcagccattggtgatactcggcggtagcggcaaactcaacgt

SEQ ID NO: 29026 - DNA, 260 bp, Unknown
  Description of Unknown: RightRegion for integrase B3027 sequence
ttagctctccacaaccgcaccaaaatcctcgaacgtttgttcggggattttttgttttagtgatttgtttgggatgacaagcatcgtcccccgcaccgtaggggcggattccacatccgcccgcggagccttgccattactgcaaacgtcccgggtcgctggcgagcattgacctccacagcgctggcggttcgcgcttttccgctatagatacagcaacagccccggtcctgcattggaaccggggctgtacgatttta

SEQ ID NO: 29027 - DNA, 260 bp, Unknown
  Description of Unknown: RightRegion for integrase B3028 sequence
ttggctctccacaactgcaccaaaatcctcgaacatttgttcggggattttttgttttagtgatttgtttgggatgacaagcatcgtcccctgcaccgtaggggcggattccgtatccgcccgcggagccttgccattactgcaaacgtcccgggtcgatgacaagcgttgacccctgcggcgctgtagacttgttgccctatgcagccgcaaaatgtacgtggtacaaatacacctatcccgcgcacaaaaacattttt

SEQ ID NO: 29028 - DNA, 260 bp, Unknown
  Description of Unknown: RightRegion for integrase B3029 sequence
gaaaggcatcacacattgtgtggtgccttttttgttgttgccaaacgagtgagggcttagctcacccaggggagcgccgtgcatggactgcaagagggtcaccgtgatcagagtcggcccggtattctccaccagaaggaaaagcaccgcacggaaacgtgtggtgcttttctttttatacagacgcagaaaaaggcgggagcttcccacaaaagggaaagccaccgcctttgttgatcatcggatgagccagccgtaat

SEQ ID NO: 29029 - DNA, 260 bp, Unknown
  Description of Unknown: RightRegion for integrase B3030 sequence
ttagctctccacaaccgcaccaaaatcctcgaacgtttgttcggggattttttgttttagtgatttgtttgggatgacaaacatcgtcccctgcaccgtaggggcggattccgtatccgcccgcggagccttgccattactgcaaacgtcccgggtcgctggcgagcattgacccctgcggtgctgtaggcgtgatggcctatgcagctgcaaaatgtgcgcgacacaaatacacctatcccgcacgtgaaaacattttt

SEQ ID NO: 29030 - DNA, 99 bp, Unknown
  Description of Unknown: RightRegion for integrase B3031 sequence
tcagagggcctaagcggtgaaaagtaccatacaacacccgaaaacgggtcaggagcatgacggctccccatatctttttcggcccgttcccagccgatg

SEQ ID NO: 29031 - DNA, 260 bp, Unknown
  Description of Unknown: RightRegion for integrase B3032 sequence
aaagcactacacggaaacgtgtggtgcttttttgttgctgccaaacgagtgagggtttagctcacccaggagagtgccgtgcatggactgcaagagggtcaccgtgatcagaatcggcccggtaatctccaccagaacaaaaaagcgtttgtcgcagcccgcaggccgtgacaaacgctttttattttactgtgcgcccaagcgcattttgaagtcctgatagccaaagtgcaccagctcccggcaattgccgtctgcgc

SEQ ID NO: 29032 - DNA, 260 bp, Unknown
  Description of Unknown: RightRegion for integrase B3033 sequence
aaagcactacacagaaatgtgtggtgcttttttgttgacgccaaacgagtgagggtttagctcagctgggagagcgccgtgcatggactgcaagagggtcaccgtgatttgaatcggcccggtattctccaccagaacgaaagcactacacggaaacgtgtggtgtttttttgttgctgccaaacgagtgagggtttagctcacccaggagagtgctgtgcatggactgcaagagggtcaccgtgatcagaatcggcccg

SEQ ID NO: 29033 - DNA, 260 bp, Unknown
  Description of Unknown: RightRegion for integrase B3034 sequence
ggaacagaggagttgctcgacattccaaatgataggaaacctcgtgttaaatctgaataaaaatagttgtcacgctttagcgcttgccctattgggggggcgctttttgcgttttaataacataatagacatagaaaaagactcggccagcttcttcacaacatgctaccgagtctttttaatttttagtctagttttttcaatagggtttgggtcttatcaccagtgcgatatcgcagcacctcttgcccttggtcagt

SEQ ID NO: 29034 - DNA, 260 bp, Unknown
  Description of Unknown: RightRegion for integrase B3035 sequence
aaagcactacacggaaacgtgtggtgcttttttgttgctgccaaacgagtgagggtttagctcacccaggagagtgccgtgcatggactgcaagagggtcaccgtgatcagaatcggcccggtaatctccaccagaatgaaagcactacacggaaacgtgtggtgcttttttgttttatctgccgttcaccttacatcccctttcatgaaaaaagcgtttgtcgcagcccgcaggccgtgacaaacgctttttattttac

SEQ ID NO: 29035 - DNA, 260 bp, Unknown
  Description of Unknown: RightRegion for integrase B3036 sequence
ttggctctccacaactgcaccaaaatcctcgaacgtttgttcggggattttttgttttagtgatttgtttgggatgacaagcatcgtcccctgccacgtaggggcggattccatatccgcccgcggagccttgccattactgcaaacgtcccgggtcgctggcgagcattgacctccacagcgctggcggttcgcgtttttccgctatagatacagcaacagccccggtcctgcactggaaccggggctgtacgatttta

SEQ ID NO: 29036 - DNA, 260 bp, Unknown
  Description of Unknown: RightRegion for integrase B3037 sequence
gaaaggcatcacacattgtgtggtgccttttttgttgttgccaaacgagtgagggcttagctcacccaggagagtgccgtgcatggactgcaagagggtcaccgtgatcagaatcggcccggtaatctccaccaaaaaagcactgtacttcgtaggaagtatggtgcttttctttttatacagacgcagaaaaaaggcgggagcttcccacaaaagggaaagccaccgcctttgttgatcatcggatgagccagccgtaa

SEQ ID NO: 29037 - DNA, 260 bp, Unknown
  Description of Unknown: RightRegion for integrase B3038 sequence
tttttgcaactatatatgtacaaaaatattgcatatcaaatatttactatacaacaataatatttgaatattgttgtatgaatatatatgctataataaaagacgtgtcgataaatctcaccatttcatgatgttttgattaagtctgctaaacaagcagacttttcttttttcccgtttctattaactgtttaactttttcttttgcctcgtctaaatttttacaaccgtctaatatcacagaaaacattttaagattt

SEQ ID NO: 29038 - DNA, 260 bp, Unknown
  Description of Unknown: RightRegion for integrase B3039 sequence
atgccgcagcacaatgtcccagagtgtcttcacctacctggtccgtcaggcagggcttgaagactgctttgagattgattctgcggcgaccagccgtgaggagatcggcaatccgccgcattatggaacgagaaacaagctgcgacaggtgcagattccgctgattgcacatcatgcgaggcagatgacgcggcaggattatgaaaattttgactttcttattggaatggattctgctaatataagaaacatgacacgga

SEQ ID NO: 29039 - DNA, 260 bp, Unknown
  Description of Unknown: RightRegion for integrase B3040 sequence
ttagctctccacaaccgcaccaaaatcctcgaacgtttgttcggggattttttgttttagtgatttgtttgggatgacaagcatcgccccccgcaccgtaggggcggattccgtatctgcccgcggagccttgccattactgcaaacgtcccgggtagctggcgagtattgacccctgcggcgctgtagacttgttgccctatgcaactgcgaaatgtacgcggtacaaatacacctatcccacgcacaaaaacattttt

SEQ ID NO: 29040 - DNA, 109 bp, Unknown
  Description of Unknown: RightRegion for integrase B3041 sequence
acaatacaggaaatttatctaaacgaagacaatacgattaaaggtgttgattttatttagcgcgtcttgtactaaacatctagccccatttggagccgacaaaacgatg

SEQ ID NO: 29041 - DNA, 260 bp, Unknown
  Description of Unknown: RightRegion for integrase B3042 sequence
aaagcactacacagaaatgtgtggtgcttttttgttgctgccaaacgagtgagggcctagctcagccgggagagcgccgtgcatggactgcaagagggtcaccgtgatcagaatcggcccggtaatctccaccagaaaaaagcactacacagaaatgtgtggtgcttttctttttgctgaagctggttttttgggggctgcattgcttcgcctgcaccgttttcaggcttttgcaggcggttcctatacaacccccaact

SEQ ID NO: 29042 - DNA, 260 bp, Unknown
  Description of Unknown: RightRegion for integrase B3043 sequence
ttggctctccacaactgcaccagaatcctcgaacgtttgttcggggattttttgttttagtgatttgtttgggatgacaagcatcgtcccccgcaccgtaggggcggattccgtatctgcccgcggagccttgccattactgcaaacgtcccgggtcgctggcgagcattgccctccacagcgctggcggttcgcgcttttctgctatagatacagcaacagccccggtcctgcactggaaccggggctgtacgatttta

SEQ ID NO: 29043 - DNA, 97 bp, Unknown
  Description of Unknown: RightRegion for integrase B3044 sequence
gacccctcctgtggtgaggggttcggatttggaacgcctgagtccaccattgaaggataatccgaacaccctattctttatagggacactgttcgga

SEQ ID NO: 29044 - DNA, 260 bp, Unknown
  Description of Unknown: RightRegion for integrase B3045 sequence
tatcagcagttttgtgaagaatggagcaatacggaaatcagcaaaaaaatggctatttaagttaagccagcttttgataatgggctttctccctccttattccggtttgtaacccttacactggtagagcatgcggctgttaaccgcagtgtcgttggttcgagtccaacagggggagccaaagaaaagccctaaatctctaaagatttggggcttttgtcattttcaaaaaacttggcaaaacgccctcatgcacccca

SEQ ID NO: 29045 - DNA, 260 bp, Unknown
  Description of Unknown: RightRegion for integrase B3046 sequence
gttatattctttgtttgcgggctttttggattagtacataaaatatcgggcaagaattaactcttgcccgatattttattacactttccaacgatacccgcagtcctgacaaaccgcatagctttttacctttgatcctttacgtatcagcaacggaatcagaattatcaatccacaagttaagagagtaagtattatccacagtatagacgcgaggcatcctcttttcttctgctccgctaccgcttgcactgtaacat

SEQ ID NO: 29046 - DNA, 260 bp, Unknown
  Description of Unknown: RightRegion for integrase B3047 sequence
ttagctctccacaaccgcaccaaaatcctcgaacgtttgttcggggattttttgttttagtgatttgtttgggatgacaagcatcaccccccgcaccgtaggggcggattccgtatccgcccgcggagccttgccattattgcaaacgtcccgggtcgctggcgagcattgacccctgcggcgctgtagacttgttgcactatgcagccgcaaaatgtacgcagtacaaatacacctatcccgcacacaaaaacattttt

SEQ ID NO: 29047 - DNA, 75 bp, Unknown
  Description of Unknown: RightRegion for integrase B3048 sequence
ttggctctccacaactgcaccaaaatcctcgaacgtttgttcggggattttttgttttagtgatttgtttgggat

SEQ ID NO: 29048 - DNA, 260 bp, Unknown
  Description of Unknown: RightRegion for integrase B3049 sequence
cgccgtggcgggcatttcccgtcaaggcttttttgtaagcacacaaagtcaccgctgtaataatttgtgtgtcacttttacaaattcaggggcgtgcccctgcacccgatccgctttactttatgtaaggcggtttttttatttccgctcatggatcattatttataaacccaactttgttatttcaccatggcagacgctgacataataaaaaagagtgcattaccacctcagataatgcactcttatattttacccta

SEQ ID NO: 29049 - DNA, 109 bp, Unknown
  Description of Unknown: RightRegion for integrase B3050 sequence
gattttgaaattaccatatttcccaaaattcctagtcaggactcaagacctcctgcatagtcgctgaactccttacaaaaaaccctcccattttgatgggaggtttttt

SEQ ID NO: 29050 - DNA, 260 bp, Unknown
  Description of Unknown: RightRegion for integrase B3051 sequence
tgtagattgaagtcccattcccggaagcgattctgggattatgacaccttcgtggtgtagtccagggaaatccaccctgcgccagatttcagcttaccccactttgttgcaccctgcccagtgctttcctgcacgatggtataaactccaccgttacggatagtgcctgccagagcgtagttcgtacctgcacccttacgaatattcagaaccgaagctgtgaccttcactctatacggagagaacgtaggcttgctctc

SEQ ID NO: 29051 - DNA, 260 bp, Unknown
  Description of Unknown: RightRegion for integrase B3052 sequence
aaaagtgctgtatgggacagtgataacaataatgtggaaataatatttaatacccattaaattaagtattttgataactttagcaaatccatggacagcaacttatattcaagcaaaaggtgatccagtagcagatttgcatgaagatatggctgctgaacaaaaagcgagagctacttatgagaatttaataaaattaactgatgatcaagatataaaagatgtattaaaattcttaagagaaagagaaatagtccatt

SEQ ID NO: 29052 - DNA, 260 bp, Unknown
  Description of Unknown: RightRegion for integrase B3053 sequence
tgtagattgaagtcccattcctggaagcgattctgggattatgataccttcgtggtatagtccagagaaatccaccctgcgccagatttcagtttgccccacttcgttgcgccctgtccagtgctttcctgcacgatggtataaacaccaccgttgcggatagagcctgccagggcgtaattcgtacctgcacccttacgaatgttcagtacatcagccgtaaccttcaccttatacggagagaatgcaggcttgctctc

SEQ ID NO: 29053 - DNA, 260 bp, Unknown
  Description of Unknown: RightRegion for integrase B3054 sequence
cggtttcgccgtgaaatgttcgctctgatccacaacagaaaagcgccgtcttgggagtgatcccgagacggcgcttttttgctatctgcacattcgatttccgctaatcctcctgctacaatggttgcagaaaggaacaggaggttatacaaatggagagatttgtcacagatgaacgcacagggctgaaatatgaattggttggtgactattatctgatcgccggagatgatgagccggaagaagatcagccaatcggg

SEQ ID NO: 29054 - DNA, 215 bp, Unknown
  Description of Unknown: RightRegion for integrase B3055 sequence
ggaaaaatccctagaaccgcaatggttctagggatttttcctatcattttttatctgtgaatttcgtacgattttagatgcttttttattatttttaacagtccggtgtggtacaagtgtggtacaactatttcgacggaaataaaagcagagggctgatatgatatgtaccccctttactggacacccagtagggggggtattattatgcggta

SEQ ID NO: 29055 - DNA, 260 bp, Unknown
  Description of Unknown: RightRegion for integrase B3056 sequence
aagacactgcacagtttgtgcggtgtctttcttttttgcacttttgttagtccagcctgatgcagtagatgcagtaaaataaacgaagaaaccgcctttcccgttcgggaagggcggttttgtgcttattgagtatcagaaagagggcggcgagacggcgaagatgacctgcacggtttcgtccgtggggttataccatcggtgcatggcccctccggggatgcggatgctgtcctcgtggtgcagcgtatagctgtcgc

SEQ ID NO: 29056 - DNA, 260 bp, Unknown
  Description of Unknown: RightRegion for integrase B3057 sequence
accaaaaagccatctgatttgctcagatggcttttttgttttgttttggggccggtgtgacacaaacttctgatttttttccggcgggcggggctatactgttctttgatgcaacagggcaatacagaagacaggagccatgcagaagataggagccacgcaaatgagcatttgggatgcattcggcaaaggacggtacaagggcttttcccgggaggcggggcagctgctggacaaggcggtggagctggccggagggc

SEQ ID NO: 29057 - DNA, 260 bp, Unknown
  Description of Unknown: RightRegion for integrase B3058 sequence
aaagagagcaacggaaaaaccgttgctctctttctttatattacgagatataaagagtaaattctaattcaaataatctaaactttaatccattcagagtttcctttttatcatctaagaagatttctatcattgcaacaaagtcatcattagcataaggaattatttctttgctttgagtaatttgatattcataaatctttcctattttgccatatctaacatattgcattaattcctgcatcttatcatcgtagatt

SEQ ID NO: 29058 - DNA, 260 bp, Unknown
  Description of Unknown: RightRegion for integrase B3059 sequence
cacgcatacatgatatacgcacaaggcgcgataggttgtttaataaaaatagagcggtaaatccgctctatttttatttgctcaccatccttgattcgggtcgacctcgctcggcggaacatcatcatactccatttcttcggtggttatttttatcgggtatttaagtgcgaaattgtcttcttcgtagcacgccatcatgatcccaatccatctttcatcatgccactcgtcacgcacaaccagctcgccgtgataat

SEQ ID NO: 29059 - DNA, 260 bp, Unknown
  Description of Unknown: RightRegion for integrase B3060 sequence
tgtagattgaagtcccattcccggaagcgattctgggattatgacaccttcgtggtgtagtccagggaaatccaccctgcgccagatttcagcttaccccactttgttgcaccctgcccagtgctttcctgcacgatggtataaactccaccgttacggatagtgcctgccagagcgtagttcgtacctgcacccttacgaatattcagaaccgaagctgtgaccttcactctatacggagagaacgtagacttgctctc

SEQ ID NO: 29060 - DNA, 260 bp, Unknown
  Description of Unknown: RightRegion for integrase B3061 sequence
tgtagattgaaatcccattcctggaagcgattctgggattatgataccttcgtggtgtagtccagagaaatccaccctgcgccagatttcagcttaccccactttgttgcgccctgcccagtgctttcctgcacgatggtataaactccaccgttacggatagcgcctgccagagcgtagttcgtacctgcacccttacgaatattcagaaccgaagctgtgaccttcactctatacggagagaacgtaggcttgctctc

SEQ ID NO: 29061 - DNA, 260 bp, Unknown
  Description of Unknown: RightRegion for integrase B3062 sequence
aaaactgttaagcgcaagtcccaccaacaaagtgctaaacaaaggggattgaaaagatgaattgtgttttatatatgcctaatgatacaaaaatatccatttttgagcaacataatatttgcaatgaaaaagcaaaacggtacggctattccattgcgcatagaatttttgatattcggtgcgaccgtttccatgaagcaataaacaaagtcattgcaagcagaaacattgaagccctgataatttatgataaatggacg

SEQ ID NO: 29062 - DNA, 260 bp, Unknown
  Description of Unknown: RightRegion for integrase B3063 sequence
gccgaagaagcgacagggttcgattttggggagtctgagtgtggtttaaggcttccctgaaaagctgcttggagcatacggcgctgccggtgtagcggtcaaggtacgcctgtatcatcccggccttggtgtcctccggcatgaaatcccgctggtgttctttgaggtactgtatcatttcgggggtaaaagacagcttgaaatcgccgcttttgtaggttgtcatggcttccgcccatacctgttcgatataggccctg

SEQ ID NO: 29063 - DNA, 124 bp, Unknown
  Description of Unknown: RightRegion for integrase B3064 sequence
aacttctctcttgtgatctatcctcgtcttttttcttcgcctttttacttcaataactgacgcttatatgaacttgcccatatcgaaatcgtctgcgcgattatctatcagctgacaaaaaatc

SEQ ID NO: 29064 - DNA, 260 bp, Unknown
  Description of Unknown: RightRegion for integrase B3065 sequence
atttcagacgtggttgaaatcgacactgatagtgacgaccgtgcacaaagatgtacatgaacgactttataaaataaaccctgcactgtacaaagaagcacagtcggttttggagcagaacaaggcagaacgtcacattcgtgggggtatggcaacaaaggaaaaatatttgctcgaaaaattaaaataagaaaaacggtgttcaagacgaacaccgttttaaattatacaaacatcgaaacaagaaatacggctgatat

SEQ ID NO: 29065 - DNA, 260 bp, Unknown
  Description of Unknown: RightRegion for integrase B3066 sequence
cacgcatacatgatatacgcacgaggcgcgataggttgcataataaaaatagagcggtaagtccgctctatttttatttactcaccatccttggttagggtcgacttcgctcggaggaacatcgtcatactccatctcttcagtggctattttaatcgggtatttaagcgcgaaattgtcttcttcgtagcacgccatcatgattccgatccatctttcatcatgccactcgtcacgcacaaccagctcgccgtgataat

SEQ ID NO: 29066 - DNA, 260 bp, Unknown
  Description of Unknown: RightRegion for integrase B3067 sequence
cggcttcgccgtgaagtgttcgctctgatccacaacagaaaagcgccgtcttgggagtgatcccgagacggtgctttttttgctgtccgcacattcgctttccactattcctcctgctacaatgattgcagaaaggaacaggaggatgaagccattcccccaggaggaagaaccgaaaaccaaatcggcacggctaaatgaactgaatgcgatgctcaatctcgacaaaacagagaacgagatcgttgacggtgagcgag

SEQ ID NO: 29067 - DNA, 260 bp, Unknown
  Description of Unknown: RightRegion for integrase B3068 sequence
aaaagtgcagtatgggacagtgataacaataatgtggaaataatatttaatacccattaaattaagtattttgataactttagcaaatccatggacagcaacttatattcaagcaaaaggtgatccagtagcagatttgcatgaagatatggctgctgaacaaaaagcgagagctacttatgagaatttaataaaattaactgatgatcaagatataaaagatgtattaaaattcttaagagaaagagaaatagtccatt

SEQ ID NO: 29068 - DNA, 260 bp, Unknown
  Description of Unknown: RightRegion for integrase B3069 sequence
tatctgtttgttgacaatccgagagggaactgcaaaagtattttggatttctggagctgatgaagtagtcactttgcttgaaacaaccggaacttatagtgacacaattacacttcctgatggtggaaattatgtcggcattgagtgtgaggaatttactggaaacattgaattgaatattgaataatctttagctgtgtgatggtaaaagaaaaatgtcacagtacggcagatttgttttagttaaaagtttatgcata

SEQ ID NO: 29069 - DNA, 260 bp, Unknown
  Description of Unknown: RightRegion for integrase B3070 sequence
accaagaagccatctgattcgctcagatggcttttttgctttgcttttgggccggtgtgacacaaacttctgatttttttccggcgggcggggctatactgttctttgatgcaacagggcaatacggaagacaggagccacgcagaagataggagccacgcaaatgagcatttgggatgcattcggcaaaggacggtacaagggcttttcccgggaggcggggcagctgctggacaaggcggtggagctggccggagggc

SEQ ID NO: 29070 - DNA, 260 bp, Unknown
  Description of Unknown: RightRegion for integrase B3071 sequence
tctgataaggggttcggatttgaggggttagagtccaccaagttaaaagctacattttagtctagcgattaagactgaaatgtagctttttctattgtaaaacctccgtgatatactactggtcagtggtatcatggaggttttgctatgtctggctatgtgattgagattccacaggagaaagagaacggttctatctggagtcggcaattaagagtcgctgcttattgtcgggtcagcaccccttacgaagaacaaca

SEQ ID NO: 29071 - DNA, 109 bp, Unknown
  Description of Unknown: RightRegion for integrase B3072 sequence
cgcaggcacggcggctggtctacgccgccatttgaactgcaggtgcatatgcggttttgatttttaccctttatgtataacatcatggtttgtatgagctggggcactt

SEQ ID NO: 29072 - DNA, 260 bp, Unknown
  Description of Unknown: RightRegion for integrase B3073 sequence
gttgccaatttcacgcttgatatctaccctaaaatcccgcgtaaattgcctatgtcttgaatggggctacacctatgggccgcccatggccgttgcccccattccatctgtgagacgtgttcttgaatatgcagttacagaaatccccccggaaaagatatccatgggcataccaaactacggatatgactggcctcttccttttgtccggggcgaaacagccgccagaagtataggtaaccaggaggctgtggccatcg

SEQ ID NO: 29073 - DNA, 260 bp, Unknown
  Description of Unknown: RightRegion for integrase B3074 sequence
gactctccttctggcgaggggttcggatttggggagctatcgtccaccaaagcggcataaaatgaaccccttttatttcaaaggcggctttgcgataacgtcatggttctgatatgccaaaacagaaaagacggcttcccattttgggaagtcgcctttttattttctcgcagtgcttcgcgaggggcagtttcatccgcagttcatccgcagttcatccgcagttgctttagcggatatcggggaagctcggtcagtgc

SEQ ID NO: 29074 - DNA, 260 bp, Unknown
  Description of Unknown: RightRegion for integrase B3075 sequence
agtcaacgtaaaattatgcctgtaaatggctctgctatgcggtttcggtgtctgaattgacaccccctttgacacccctagctaaataatcgttgagcttttccatgcttctattttggtgttccgaatcgagatgagtgtaaatatccatagtcacctttatgtcagaatgccccgcctgctgctttgctgtgagcacgtcaacaccggctaagtacatatttgtaatgaacgtatgccgcagccagtgagccgtaatt

SEQ ID NO: 29075 - DNA, 260 bp, Unknown
  Description of Unknown: RightRegion for integrase B3076 sequence
tgtagattgaagtcacattcctggaagcgattctgggattatgataccttcctggtgtagtccagagaaatccaccctgcgccagatttcagcttaccccactttgttgcgccctgtccagtactttcctgcacgatggtataaataccgccgttgcggatagtgcctgccagggcgtaatttgtgcctgcacccttacgaatattcagcacatccgctgtgaccttcactttgtacagagaaaatgcaggcttgctctc

SEQ ID NO: 29076 - DNA, 260 bp, Unknown
  Description of Unknown: RightRegion for integrase B3077 sequence
tgtagattgaagtcccattcctggaagcgattctgggattatgataccttcgtggtgtagtccagagaaatccaccctgcgccagatttcagcttaccccactttgttgcgccctgcccagtgctttcctgcacgatggtataaacaccaccgttgcggatggagcctgccagggcgtaattcgtacctgcacccttacgaatgttcagtacattagccgtaaccttcaccttatacggagagaatgcaggcttgctctc

SEQ ID NO: 29077 - DNA, 77 bp, Unknown
  Description of Unknown: RightRegion for integrase B3078 sequence
tatctgtttgttgacaatccgagaaggtactgcaaaagtattttggatttctggatctgatgaagcagtcacgttga

SEQ ID NO: 29078 - DNA, 260 bp, Unknown
  Description of Unknown: RightRegion for integrase B3079 sequence
gtattacacgaacctttttactttgtcggcggctttgccgtcacaatatggttcaggtagtaccgacagaaaagaacggatattctcacttgttgagagtgtccgttctttctttatgtcctgcggattgtccacggacagtccgtggacagtctgcggacagtctgcggacagtctgcggacagtcacagaatgcagctattttcacttaccgttcagtaagattttcgcaatttttaattgcggatactgactgtcct

SEQ ID NO: 29079 - DNA, 260 bp, Unknown
  Description of Unknown: RightRegion for integrase B3080 sequence
cccgccgccgaagaagcgacagggttcgattttggggagtctgagtgtaccaggatataatccacctcccggatcttcccggcagctgcctggcagaagctgcgcatgggggccgccagggcaaagactcaaataggcgaaacgatggtgacatgacggcaggccgaaaggtcaatttccacgggccggatgggcatggcccaacgatgcataccgtagcggccgcaccaccagaaacccagcgtgccctcggtccgttc

SEQ ID NO: 29080 - DNA, 260 bp, Unknown
  Description of Unknown: RightRegion for integrase B3081 sequence
atccgtgagttattttccgaatgcgtatgggacggaaagaaacttcatattaaaatttaattcatctccctttttcattatgtatccagttggattcatccgaagggacgcccgtatcagctggctcatggttatctcgccttccccttccgtattggcgtttcttgtctccaggcgcaccaggttgggcacctgggtaatctgcagttctgcggaatcctcaatggtgatgacgcgttcctggggcggtataaaggaag

SEQ ID NO: 29081 - DNA, 260 bp, Unknown
  Description of Unknown: RightRegion for integrase B3082 sequence
tacgaactcttttggttcaaaaacgtgttcggcctgacaagaaaactgccgcagaggtgattgtcctctgcggcagttttcttattcgccggtgtagctctctgtcggcaggagcttataggttttcagcgtctttccgcacctgcggcatttataccgatagatcgtatcaatgtcgcctgcgctggaaccgacagcgaaatcggaatcaagcatcacccaactgtgcgattcacaggggcataggcgctcctcaagct

SEQ ID NO: 29082 - DNA, 239 bp, Unknown
  Description of Unknown: RightRegion for integrase B3083 sequence
atttcagacgtggttgaaatcgacactaatagtaacaaccgtgcacaaagatgtacatgaacgactttataaaataaaccctgcactgtacaaagaagcacaggcggttttggagcagaacaaggcagaacgtcacattcgtgggggtatggcaacaaaggaaaaatatttgcttgaaaaattaaaataagaaaaacggtgttcaagacgaacaccgttttaaattatacaaaaatcga

SEQ ID NO: 29083 - DNA, 260 bp, Unknown; identical to SEQ ID NO: 29075
  Description of Unknown: RightRegion for integrase B3084 sequence

SEQ ID NO: 29084 - DNA, 260 bp, Unknown; identical to SEQ ID NO: 29052
  Description of Unknown: RightRegion for integrase B3085 sequence

SEQ ID NO: 29085 - DNA, 260 bp, Unknown
  Description of Unknown: RightRegion for integrase B3086 sequence
aaaactgttaagcgcaagtcccaccaacaaagtgctaaacaaaggggattgaaaagatgaattgtattttatatatgtctaataatacaaaaatatccatttttgagcaacataatatttgcaatgaaaaagcaaaacggtacggctattccattgcgcatagaatttttgatattcggtgcgaccgtttccatgaagcaataaacaaagtcattgcaagcagcaacattgaagccctgataatttatgataaatggacg

SEQ ID NO: 29086 - DNA, 260 bp, Unknown
  Description of Unknown: RightRegion for integrase B3087 sequence
tgtagattgaagtcccattcctggaagcgattctgggattatgacaccttcgtggtgtagtccagggaaatccaccctgcgccagatttcagtttaccccacttcgttgctccctgcccagtactttcctgcacgatggtataaactccaccgccacgaatagtgcctgccagagcgtagttcgtacctgcacccttacggatattcagaaccgaagctgtaaccttcactctatatggagagaacgtaggcttattctc

SEQ ID NO: 29087 - DNA, 260 bp, Unknown; identical to SEQ ID NO: 29052
  Description of Unknown: RightRegion for integrase B3088 sequence

SEQ ID NO: 29088 - DNA, 260 bp, Unknown
  Description of Unknown: RightRegion for integrase B3089 sequence
gattttgaaattaccatatttcccaaaattcctagtcaggactcaagacctcctgcatagtcgctgaactccttacaaaaaaacctcccattttgatgggaggttttttgtatccattgataccatctatgtgctaattcctcggtgcctatgtccgtaagaagccccttgcccatgttatccggcattgtgaaccgctgggaaaggtacctcagcgacgcgcttaattcgccatcggctccgccgtactgttccagtat

SEQ ID NO: 29089 - DNA, 260 bp, Unknown
  Description of Unknown: RightRegion for integrase B3090 sequence
cggcttcgccgtgaagtgttcgctctgatccacaacagaaaagcgccgtcttggaagtgattccgagacggcgcttttttgctatccgcacattcgctttctgctatttctcctgctataatgattgcagaaaggaacaggaggttatacgaatggaaagatttatcacggatgaacgcacaggactgaggtatgagctggttggcgactattatctgatcgccggagatgatgagccggagggagatccgctaatcggg

SEQ ID NO: 29090 - DNA, 260 bp, Unknown
  Description of Unknown: RightRegion for integrase B3091 sequence
atattggggcgtgcatcgatatgcctggcttcattccacgacggtgtgattcggagttaagtccgaatatttcaccaaattgaacaagacgaacacgtttttatgtgtttgtcttatttttttgtcttttgcaaggacattccaaactattgataactacttttagttatgatataatactatcggaagttctaagtgtttatattgataatgagtatttatgaaaacaaaaaagattgctttatcgacagaaaaaatga

SEQ ID NO: 29091 - DNA, 260 bp, Unknown
  Description of Unknown: RightRegion for integrase B3092 sequence
cgttttgactcttcacagctgcaccaaacgagagcaaaacgaacacaagacaaccgttaaaatggtcggtaatgtgttcgttttgttttgttctattccctcactgactcattgacaacaaaaagaggggcaatcgcaacaggtggaaaagctgcgattgcccctctttttttgttgtataaattgtgaaatttttgcgttagaatataccgtttccacgccaaattctaccatattccttacaaacccgtgaggatttg

SEQ ID NO: 29092 - DNA, 260 bp, Unknown
  Description of Unknown: RightRegion for integrase B3093 sequence
cggcttcgccgtgaagtgttcgctctgatccacagcagaaaagcgccgtcttggaagtgattccgagatggcgcttttttgctatccgcacattcgctttctgctatttctcctgctacaatggttgcaaaaaggaacaggaggttatacgaatgtccgccagcttggcaatattccacctatgccttgcggggcgtggcccatcacaaattgcccgtgacctcgaaaatgaaaagattctcacgcctacggcatattat

SEQ ID NO: 29093 - DNA, 260 bp, Unknown
  Description of Unknown: RightRegion for integrase B3094 sequence
tccactttgagccaccaagaacgagttgatgaaagtcagctcgttctttttgttttgtagtggtttggaaaatgtaagcgatacgccggtggcgtatcagagccgctctgcagcctgcgtcgagattacactttcgtcgttttaccacaaaagcaaaaatatcgagctgcccttaggctggctcgatattttctttctctctattttttcccgtccgtccttttcagggcggcgcgttttctttttctgctgcggggatc

SEQ ID NO: 29094 - DNA, 260 bp, Unknown
  Description of Unknown: RightRegion for integrase B3095 sequence
agtcaacgtaaaattatgcctgtaaatggctctgctatgcggtttcggtgtctgaattgacaccccttttgacacccctagctaaataatcgttgagcttttccatgcttctattttggtgttccgaatcgagatgagtgtaaatatccatagtcacctttatgtcagaatgccccgcctgctgctttgctgtgagcacgtcaacaccggctaagtacatatttgtaatgaacgtatgccgcagccagtgagccgtaatt

SEQ ID NO: 29095 - DNA, 260 bp, Unknown
  Description of Unknown: RightRegion for integrase B3096 sequence
aacttctctcttgtgatctatcctcgtcttttttcttcgcctttttacttcaataactgacgcttatatgaacttgcccatatcgaaatcgtctgcgcgattatctatcagctgacaaaaaatctttctgtagaagaaattaaggcttctggttttgataaatattatgttgatcatacgctcggcatctggcctcaggctgctggcggtatcccatttaatgcctgcgtttttcaggtcaagggtgaccccatcactga

SEQ ID NO: 29096 - DNA, 260 bp, Unknown
  Description of Unknown: RightRegion for integrase B3097 sequence
caggagaaatccgaacctgattccggttggaaacgggttcggatttctttatttctttgagaaggctagaactgaatagattgaccaatagcatagaaagtcaaaaggctctaaagttaaaatggaaggggtcagctacagtaatctaccgccactttccatttctttttctcactaatagtgtttgagagaggagtctttcacaatcgccctttgatccttttgttgaaagcgaattataaaataaaattcagcactac

SEQ ID NO: 29097 - DNA, 260 bp, Unknown
  Description of Unknown: RightRegion for integrase B3098 sequence
gcaccaagagttattatcacagcggccggggccttgtgcatcaagttcgcgcggacctaatggcaaaaaaagcaagccccgcaggcgttccctgcgaggctgcttttgttttttatgcgtgagcaaccagcgtccaggcaccggatacgctgccatcgttgtcgatccactcgcggttttcatcgccgcggcggcagcggaagatttcgccggtgaatacgttggccttgtaagtgtatgcgccgtggttggtggcggct

SEQ ID NO: 29098 - DNA, 260 bp, Unknown
  Description of Unknown: RightRegion for integrase B3099 sequence
gctgactctccttctggcggagggttcggatttggggagctatcgtccaccagaacatagaaaaccagcaatccattgagattgctggtttttctttatttatcaatgctgtgtggcgctctcagagggatttcgctccctgcaaacattgaaaccgcaagctatttgtgttataaaaacttccaaaactcagagtcgggcgaaccgtgtaagtttgtccgactcttaccttttcacgataacagcaaaaaatcctgcag

SEQ ID NO: 29099 - DNA, 260 bp, Unknown
  Description of Unknown: RightRegion for integrase B3100 sequence
ggataccagatcaacatctcgttcaacttcgatctcactccttacattgagggggagtgatacgtccgcctgcaaaacagtcgggcatcgaacaagcattttcaaaaacaacgaaacagcaagaattgggggttgccgtccatacgcctgcaaaatcaggcatttggctgattttcagtgtgacctccaagaaagcaaaaagaaaagcaccatacttcctacgaagtacagtgcttttttggtggagcaatcaggagtca

SEQ ID NO: 29100 - DNA, 260 bp, Unknown
  Description of Unknown: RightRegion for integrase B3101 sequence
ccgaacgcaccgcgatatatctttgtaaacggtctgttcggtatcatctgcaaaaggtgatgaataaacccgctcgcccgaaagggtgtagcgggtttattctttcttcttgcgttctgttccagcctgtatagctgcgtcgatcccgaaaaggcaaatagccatatcgtttacaatttcgttgcgccagcgcattacggtttttaatgccttgtcaactcggaagcttacttcttcccacgtcatttcctgcgcgtcct

SEQ ID NO: 29101 - DNA, 260 bp, Unknown
  Description of Unknown: RightRegion for integrase B3102 sequence
cccctgccgcgccgccctctatgcaacggcgcaccaaaccacgctcaaccgcgttgttgaaagcgcgctcgagcattatgttcccgcttattgataactgccccgcatattttccccgcctccggccaaactaccgccggaggtgttttttatgagcccgaaagaattgctttatatcgacgatgcgctcggccacgagcagtttctcatcgcccaatgtcaggaagccgaggccgcgctcagcgacccgaagctcaaac

SEQ ID NO: 29102 - DNA, 260 bp, Unknown
  Description of Unknown: RightRegion for integrase B3103 sequence
ccgaacgcaccgcgatatatctttgtaaacggtctgttcggtatcatctgcaaaaggtgatgaagaaaacccgctcgcccgaaagggtggagcgggtttattctttcttcttgcgttctgttccagcctgtatagctgcgtcgatcccgaaaaggcaaatagccatatcgtttacaatttcattgcgccagcgcattacggtttttaacaccttgtcaacttggaagcttacttcttcccacgtcatttcctgcgcgtcc

SEQ ID NO: 29103 - DNA, 260 bp, Unknown
  Description of Unknown: RightRegion for integrase B3104 sequence
ccgaaaatattcgtggtaaaaaatattttcggaattgtaaagcgctttatcgaaagataaggcgcttttcttttattcttcttgctttctttaccataatttacagctagaattcagcgctttgaatctgtacaatgtctttaaaatattgtagaaaggagttcctctgtatggatttaaagcgtgagttaaaacgcttcacaaaacctatcaagaaggatatgaaattttctaagaaacataaaagacttttttatggt

SEQ ID NO: 29104 - DNA, 260 bp, Unknown
  Description of Unknown: RightRegion for integrase B3105 sequence
cggcaaagccgccgcccaatccgttggagcggtcgtgcatgggcttcatgctttcgatgatggtctcgccggtcataagacgcccctctctggagagcaccgcggcgatggcgcagccggacggaatccggatctgcccctcgattttactcatatcaccaacccctaaataagaaaaaagaacgaggtgtgttcgcagaaaaagcgcactttttccacagaacatcctcgttcttcttttaaggtacgagaaaagccgc

SEQ ID NO: 29105 - DNA, 260 bp, Unknown
  Description of Unknown: RightRegion for integrase B3106 sequence
cgctggcatggaaatccggacgattttgaccttgtgattttcccgaaactcccgaggtaatttttttgtatctatcatatatatcatgtgtgttcgaacccattttattatgattatatgaagattcgcgatgtgggacagttttatgcggactttttcgaagatttcgacgaatctcggttcgcttccctgctgcaattcatgcagctgacaccggatctgaaagtcaaggcgttgtcctctggcatggctgcaaagct

SEQ ID NO: 29106 - DNA, 260 bp, Unknown
  Description of Unknown: RightRegion for integrase B3107 sequence
aaactagaaatacatatagatattaatggagtattatttaaagataccctatatatttaagggtatttttttaatgtagatgtattgactttgtgtgtattttcagttcaattaccatacaaagtaaggtaatgttacacgtagaacagtattggataaaaatacagtttcacgtagaacaatatataaaattaggtagtaaaaattcacatagtaggactataataatatatgaaaaaatagtattaaaaccgtaccta

SEQ ID NO: 29107 - DNA, 260 bp, Unknown
  Description of Unknown: RightRegion for integrase B3108 sequence
ggatatcagatcaacatctcgttcaacttcgatctcactccttacattgagggggagtgatacgtctgcctgcaaaacagtcgggcatcgaacaagcattttcaaaaataacgaaacagcaagaattgggggttgccgtccatgcgcctgcaaaatcaggcatttggatgattttcagtgcgacctccaagaaagcaaaaagaaaagcaccgaacttcaaacgaagtacagtgcttttttggtggagctatcaggagtca

SEQ ID NO: 29108 - DNA, 260 bp, Unknown
  Description of Unknown: RightRegion for integrase B3109 sequence
ttggcattacccaattatacattatgcaagaaaattgaccgaaagaaaatcattaaataataaaaaagcaagggcgttaaacccttgctttccttgtttgttacattgcgcccgctttgctttttgcaattgtgccgcgtatgttgcttatgcccgccgttaccgttacgggcaaggcgcttacaaggtcggtacaattaagcataccgccgccgacaaattgcattattgcgtcagtctgataaaagttcgttcttgct

SEQ ID NO: 29109 - DNA, 260 bp, Unknown; identical to SEQ ID NO: 29103
  Description of Unknown: RightRegion for integrase B3110 sequence

SEQ ID NO: 29110 - DNA, 260 bp, Unknown
  Description of Unknown: RightRegion for integrase B3111 sequence
cgcatcaccctaaaaaacgggttggaactcagggagaaaatcgaaaggacgataaggtgatggcaaagaatcgaaaacgaccatttggatatgacatgcatggcggacaaaacgtcatcaatgagggcgaggcaaatctggtaaaagagatatttgctgcatataaaaacggcagctcgtatgccaaaatcgttgagatgctgaataaccagcccatcccgtatttcaaccaggatgcgccgtgggtcaagactatggtc

SEQ ID NO: 29111 - DNA, 260 bp, Unknown
  Description of Unknown: RightRegion for integrase B3112 sequence
gggattcgttttattttagtgatgttcgttgagcgaattgtctcatacaggaataattgaggccggatatgatttcttcatgtcttcttggtataatgcatggagactggacaggaaaagtcaggtatgtgcctgagaggacaaccggcgttttttcatgtcaagggtctgcggacaaagatgtgtccattttaggaaaaacgtccgcgatcactacaagagtgggcggacgttttcttacgcaaaaagcgtcgtaaagc

SEQ ID NO: 29112 - DNA, 260 bp, Unknown
  Description of Unknown: RightRegion for integrase B3113 sequence
ggataccagatcaacatctcgttcaacttcgaccttactccgtacatcgagggggagtgatacgtccgcctgcaaaacagtcgggcatcgaacaagtattttcaaaaacaacgaaacagcaagaattgggggttgccgtccatgcgcctgcaaaatcagacttttgactgattttttccgtagcctccaagaaatcaaaaagaaaagcaccatacttcaaacgaagtacagtgcttttttggtggagctatcaggagtca

SEQ ID NO: 29113 - DNA, 260 bp, Unknown
  Description of Unknown: RightRegion for integrase B3114 sequence
ggctatcagatcaacatctcgtttaacttcgatctcactccttacattgagggggagtgatacgtccgcctgcaaaacagtcgggcatcgaacaagcattttcagaaacaacgaaacagcaagaattgggggttgccgtccatgtgcctgcaaaatcaggcatttggatgattttcagtgcgacctccaagaaagcaaaaagaaaagcaccgtacttcaaacgaagtacagtgcttttttggtggagaatagcgggatcg

SEQ ID NO: 29114 - DNA, 260 bp, Unknown; identical to SEQ ID NO: 29113
  Description of Unknown: RightRegion for integrase B3115 sequence

SEQ ID NO: 29115 - DNA, 260 bp, Unknown
  Description of Unknown: RightRegion for integrase B3116 sequence
ggcaagggatactcagtacaaatccttatggactcttcgtatgagcagtttttgatataatttaattataaaacagattacaataagactataaaaggtttagctactgcctttgacaggtatatgaatatacacagtcgagagcgcatgactgttaatcatgatgtcactggttcgagcccagttgggggagccaagagaaaagtcagtaattaagccaaaaacggcttgtttactggctttttgctttgtttataata

SEQ ID NO: 29116 - DNA, 260 bp, Unknown
  Description of Unknown: RightRegion for integrase B3117 sequence
gctgactctccttctggcgaggggttcggatttggggagctatcgtccaccagaacatagaaaaccagcaatccattgagattgctggtttttctttgtttatcaatgctttacggcgctctcaaggtgctttgcagtgcgaaaaatgtcgcggatttacgattgttttccacataatgcaagcgcattttgctaacaaaatgctaacagcgcgcaacgattatgcgtaagtcagtactcgataatgtatcttctttcgg

SEQ ID NO: 29117 - DNA, 260 bp, Unknown
  Description of Unknown: RightRegion for integrase B3118 sequence
ccgaacgcgccgcgtttcatctttgtaaacgggttgttcggtatcatctgcaaaaggtgatgaataaaacccgctcgccctttaatgggtaagcgggtttattctttctttttgcgttctgttccttgctgtatcgctgcttctatcccgaaaaggcatatagccatatcgtttacaatgttatttctccagcgggaaagcgtttttatctcttttccgatcgcttcgctcaattcctcccacgtcgcttgcggcgcgtc

SEQ ID NO: 29118 - DNA, 109 bp, Unknown
  Description of Unknown: RightRegion for integrase B3119 sequence
catccagaaccgggcctatgtttccactttccgtggaatcaaaggtggaacaatatttaaaatacagcatacgtgccccatgggccttcagccaggaaaatgcagccat

SEQ ID NO: 29119 - DNA, 260 bp, Unknown
  Description of Unknown: RightRegion for integrase B3120 sequence
tcaccgcgattcccaagaggggtcgcggcgtttttttgttttggggaaaatcgggtgtaaatatactaccaatttcagctgtattgtgctataatggaagcgaaaacggcggagggggaacggaaaatgaaaaagctgcttgctgtgtgcctgatggcgctcgtttgctgggtttgcgcggggtacgcggaagaaatgcgggtcggcgatacggtcatgttcgggcaatatgaacaggatggcaatcttgataacggcag

SEQ ID NO: 29120 - DNA, 260 bp, Unknown
  Description of Unknown: RightRegion for integrase B3121 sequence
tccaccaaaataaaacacccgccgtaccccggcgggtgtttttgttttggcgctctgtgagctgctgaggagtcgaacagggcggcagtaccgcagtaccagcccgatggccgatgcggaacgcggatgccgtgcgttcgtcatcctcggtgggatcactctcattataccagtggtttgcccggtgtttgaatgccctgcgaacagcccgcctgcccctcatacagggcaggcataaaaaaacacggtgcgtgtgcatc

SEQ ID NO: 29121 - DNA, 260 bp, Unknown
  Description of Unknown: RightRegion for integrase B3122 sequence
gcaccaagagttattatcacagcggccggggccttgtgcatcaagtttgcgcggacctaatggcaaaaaagcaagccccgcaggcgttccctgcggggctgcttttgtttttttatgcgtgagcaaccagcgtccaggcaccggaggcgctgccatcgttgtcgatccactcgcgatcctcgtcgccgcggcggcagcggaagatttcgccggtgaatacgtttgccttgtaagtgtatgcgccgtggttggtggcggct

SEQ ID NO: 29122 - DNA, 260 bp, Unknown
  Description of Unknown: RightRegion for integrase B3123 sequence
agaaagaaaagcactacacggaaacgtgtggtgcttttttcgttaaggccaaccgagtgagggttttgctcaaccgggagagcgccgtgcatggactgcaagagggtcaccgtgattacaacagcccggtaatctccaccagaaccaaagcactacacggaaacgtgtggtgcttttttgttttatctgccgttcaccttaacctcccctttcatgaaaaaagcgtttgtcgcagcccgcaggccgtgacaaacgctttt

SEQ ID NO: 29123 - DNA, 260 bp, Unknown
  Description of Unknown: RightRegion for integrase B3124 sequence
aagccggtacattcatggaagcatgatgtaccggctttttcgttgtatatatttatatgaggcagagctatttatgagcagctacagctgctgtatgctttttgaagccgtcaggcgcttttgtgatgcgaagggcaacgacaattattgcggcagcaaacagaagctgtattcccatgcatattgaaataaagccaagctccctgaccggatgaaagtcaatactttttacagcctggttgtaccagtaggcaggcaaa

SEQ ID NO: 29124 - DNA, 260 bp, Unknown
  Description of Unknown: RightRegion for integrase B3125 sequence
tccattacattcagattcagaaacggagttgaaaagacaataaaagtgaagaaatgttaaatttttttagaaaaaatcagaaaaattacctaataatatatatgaagagtcatgaatcttccgtaattgcataagttatcgttgctcgtggacagcgtagtgcctaggaccacgttaaaatgctagtgcacactcgaactgcggagacagcagtaggtcttagatctcaggccttaaaccacaggtagtggagagatctt

SEQ ID NO: 29125 - DNA, 260 bp, Unknown
  Description of Unknown: RightRegion for integrase B3126 sequence
agaaggaaaaagcactacacagaaacgtgtggtgtttttttgttgttgccaaacgagtgagggcttagctcacccaggagagcgccgtgcatggactgcaagagggtcaccgtggtcagaatcggcccggtaatctccaccaaaaaagcactgtacttcgtaggaagtatggtgcttttctttttatacagacgcagaaaaaaggcgggagcttcccacaaaagggaaagccaccgcctttgttgatcatcggatgagcc

SEQ ID NO: 29126 - DNA, 260 bp, Unknown
  Description of Unknown: RightRegion for integrase B3127 sequence
accgcctttatttgtttcggctgtttcggattattcattccccttcatcaggacggctaggccgtccttttgtttttacaggagttttttaaaaaaattagttttcccccttgacaaaacggcaaaaatcgtgtattgttgatatgcaacaaaaaacacacagaacgcagaaagggccccctatggacgacgtattatcatttcccagcgataaggcttacagcaactacccccgcatcaacatcgacggcgactgcaac

SEQ ID NO: 29127 - DNA, 260 bp, Unknown
  Description of Unknown: RightRegion for integrase B3128 sequence
gttgaatactttacttataatagtgatacaaagcaaattaaatttaagataagattataactatctttattgattctaagtaataaatggaaaataggcctatacttaaaagacctattttcttaatattatcttcaaagagtaaaatacatgttatattataagtatcaatttttcttttttatttcatttacaaatccatcaataacaattactgtaaaaatagattccataacaacagattttatatcaatccaaaa

SEQ ID NO: 29128 - DNA, 260 bp, Unknown
  Description of Unknown: RightRegion for integrase B3129 sequence
ggatatcagatcaacatctcgtttaacttcgatctcactccttacattgagggggagtgatacgtccgcctgcaaaacagtcgggcatcgaacaagcattttcagaaacaacgaaacagcaagaattgggggttgccgtccatgtgcctgcaaaatcaggcatttggatgattttcagtgcgacctccaagaaagcaaaaagaaaagcaccgtacttcaaacgaagtacagtgcttttttggtggagaatagcgggatcg

SEQ ID NO: 29129 - DNA, 260 bp, Unknown
  Description of Unknown: RightRegion for integrase B3130 sequence
aatgaattgttgtgttcgtattgcgctatattttttccaccatcaaggtatcacaattgatacaatgtaggaaatgcactcacaaaagtgggtgcatttttctatgctcaaaaccagctgatagcaaacggttactgagggtggatgcaaattttactgatttaacatcttaaaaatcaaacgattatagggtcggatgcacccatcgtttgctatcaaggaaattcccatgttttacacagaaaaataccctcgacagt

SEQ ID NO: 29130 - DNA, 260 bp, Unknown
  Description of Unknown: RightRegion for integrase B3131 sequence
ggcaggggatactcagtgcaaattcttatggactcttcatatgagcagtttttgatataattgacattgacaatttcaactgatataatttaattataaaacagattacaataagaatataaaaggtttagctactgccttaacaggtatatgaatatacacagtcgagagcgcatgactgttaatcatgatgtcactggttcgagcccagttgggggagccaaagtaaaagtcagtaaataagctaaaatcggcttgtt

SEQ ID NO: 29131 - DNA, 260 bp, Unknown
  Description of Unknown: RightRegion for integrase B3132 sequence
gttaatcactttacttataatagtgatacaaagcaaattaaatttaagatatcactataagttttgtaaattataataaaaagaaatagattgtatcaaacattctatttctttttctacctatatattgattttctattaatataactaaattattattttaataattcatatttttcctctaaaatacaaattaacatttttaagttttcctttttaattatatcaaattcatgttcttctaatacttttttaataag

SEQ ID NO: 29132 - DNA, 260 bp, Unknown
  Description of Unknown: RightRegion for integrase B3133 sequence
gtggatggcaatcaatttgagctggaagtatatccgcggctggcttcgcaggatgaatgaatttctttttgcgtgcgtgggcgatttatggcggcatatgtatatgccgccataaatcgcccatgcaaaagccccgcctttcagcggggccattttcattttctggcaatatatttgtagtagcgctccaccttatccggctccgcatccgcatcgtggatgaagtccctggccagttccgcgtaaaactccggcgtgct

SEQ ID NO: 29133 - DNA, 176 bp, Unknown
  Description of Unknown: RightRegion for integrase B3134 sequence
gccgccgaagaagcgacagggttcgattttggggagtctgagtgtaccaaaagtccttgaaatcgtctgatttcgaggacttttgcttttcataagttccgtttttggggagttactttttcctgacccaaacgctgaccccaacgggagcgggtagcggaaagcatcagacggca

SEQ ID NO: 29134 - DNA, 260 bp, Unknown
  Description of Unknown: RightRegion for integrase B3135 sequence
  modified_base (102)..(260): a, c, t, g, unknown or other
aatggtaaaggttatactgttgaaataaacttaattggtagtaaaaaaaaactaatttagaaggtatggaaacttcttctaaaaaggagaagttttacaatnnnnnnnnnnnnnnnnnnnnnnnnnnnnnnnnnnnnnnnnnnnnnnnnnnnnnnnnnnnnnnnnnnnnnnnnnnnnnnnnnnnnnnnnnnnnnnnnnnnnnnnnnnnnnnnnnnnnnnnnnnnnnnnnnnnnnnnnnnnnnnnnnnnnnnnnnnnnnnn

SEQ ID NO: 29135 - DNA, 260 bp, Unknown
  Description of Unknown: RightRegion for integrase B3136 sequence
tgggacggactcgcacttcgcgcaagcgctcgtgttcgtctcgcggggactggtcgctaaaaatggttgcgggtttgtgagcaggggtcacgattgagcgtgagcgaaagcggggagcgaacaatgtacgccgcgcgcggcgtacaaccgcacgagcggttttgcgaagcaaaatggaggccttacaggccgacaagcgaaccagactgaattcttaacgcacccactgatggtgcaccaaagaatgccttacacgaaag

SEQ ID NO: 29136 - DNA, 260 bp, Unknown
  Description of Unknown: RightRegion for integrase B3137 sequence
agaaggaaaaagcactacacagaaacgtgtggtgtttttttgttgttgccaaacgagtgagagcttagctcacccaagagagcgccgtgcatggactgcaagagggtcaccgtgatcagaatcggcccggtattctccaccagatcagaaaggcatcacacattgtgtggtgccttttttgttttgcattgcagcaggaaaacacaaaaaaatttctgcccactgccgcaacctgcgcgaaacgggctgttttgtgcgcg

SEQ ID NO: 29137 - DNA, 260 bp, Unknown
  Description of Unknown: RightRegion for integrase B3138 sequence
gtttttgacgtattttttgtatttagatgtccggccatgcgcattaaaaagcacctctgatatcagaggtgctttctttttttattttgggtcgtctcccatcgccttaaaatatgcaatctgccaaacgccctgctgctccagagtaaggcatttgtcaaaatttgccctaagcgtgtcaacgtcgatcttggcatactgctctgcaatctgtcgctcaatctcgtctgtagccttgcccattgcgtggagcttgttaa

SEQ ID NO: 29138 - DNA, 260 bp, Unknown
  Description of Unknown: RightRegion for integrase B3139 sequence
gtggatggcaatcaatttgagctggaagtatacccgcgcctggcttcgcaggatgaatgaatttctttttgcgtgcatgggcgatttatggcggcatatgtatatgccgccataaatcacccatgcaaaagccccgcttttcagcggggccattttcattttctggcaatatatttgtagtagcgctccaccttatccggctccgcatccgcatcgtggatgaagtcccgggccagctccgcgtaaaactccgggctgct

SEQ ID NO: 29139 - DNA, 109 bp, Unknown
  Description of Unknown: RightRegion for integrase B3140 sequence
agaaacaaaaagcactacacagaaatgtgtggtgcttttttgttgacgccaaacgagtgagggtttagctcagctgggagagcgccgtgcatggactgcaagagggtca

SEQ ID NO: 29140 - DNA, 260 bp, Unknown
  Description of Unknown: RightRegion for integrase B3141 sequence
gagggttctaccgcgttgcggttggtggaggcgatgggagtcgaacaatggaaaagctgaacgacacgatttgaatgctaaaaaaatctgatgatttatcgattgtaaattgcgctttatgttgctgagaattcagtgagaaactggcccgagaacagaaagtgggttacaaaaacgggtttgtttaccacttccctcacgatggcattatacagaatatccagaaacaccaagcgcccccacctcggagatcatccgga

SEQ ID NO: 29141 - DNA, 260 bp, Unknown
  Description of Unknown: RightRegion for integrase B3142 sequence
aacagttggttcgtgattgtcggattgctggaaaacaataaccaacatttctcaaaatagaacttgcgtatatataaggtctaccctataataataaatgtcagaagggaggtgattcagttggaagacagagtttgggacgtgtttcttgtggtcctcggcgtggtgctcgcaaaggttaccgatgaaacagttgagcgtctaaagaaaaagacccctcgcaagcccggaaagcacgcaaagaggtcttagcacaaggg

SEQ ID NO: 29142 - DNA, 260 bp, Unknown
  Description of Unknown: RightRegion for integrase B3143 sequence
gtttttgacgtattttttgcatttagatgttcggccatgcgcatcaaaaagcacctctgatatcagaggtgcttttctttttttattttgggtcgtttcctattgttttaaaatatgctatttgccaaacgccctgctgctctaacgtaaggcatttgtcaaaattggccctaaacgtgccaatatcaacctttgcatactgctctgcaatttggcgctcaatctcgtctgtagccttgcccaccgcgtggagcttgtta

SEQ ID NO: 29143 - DNA, 260 bp, Unknown
  Description of Unknown: RightRegion for integrase B3144 sequence
gccgccgaagaagcgacagggttcgattttggggagtctgagtgtaccaaaagtccttgaaatcgtctgatttcgaggacttttgcttttcataagttccgtttttggggagttactttttcctgacccaaacgctgaccccaacgggagctaaactgtacccaagaaaatggacacgagattttgacccatggccccgttcggcggacacgcatttgacccatagggtcagaagcgccgcacctgtgttatgatagaac

SEQ ID NO: 29144 - DNA, 260 bp, Unknown
  Description of Unknown: RightRegion for integrase B3145 sequence
aaacgcctaaagcccgacgactttgaaatcgagatatacccccgcatcccccggaaatagcaagaggagccgcttttgtggctcctcttctttgttgtatcgtgttgcgtattatttatgatacagaacacgatacaacaactttgaggcggtctgtccgggtgctcttccgggctgccgcctttgctttttacccggcgggacaccattcgcgtcacttatcaaaaatattttgggattttacttgacattgtcccttt

SEQ ID NO: 29145 - DNA, 260 bp, Unknown
  Description of Unknown: RightRegion for integrase B3146 sequence
tggagcggatcgccggatgattttgagataactatatatccgaagctaccgaaatcataaaaatgtgcgaattttctaccatatattaggcagtcgtttacatcatggcggtacagaagaactatcccacctcgaaatgataggctctatagtatcccaactcacaacaggcgagggtgcaaagagctttgaccgatacggagtaggcgcatattatatgatccacgaaattccggtttccccacccaatgccggcgttg

SEQ ID NO: 29146 - DNA, 260 bp, Unknown
  Description of Unknown: RightRegion for integrase B3147 sequence
tggagcggatcgccggatgattttgagataactatatatccgaagctgccgaaatcataaaaatgtgcgaattttctaccatatattaggcagtcgtttacatcatagcggtaccgaagaactatcccacctcgaaatgataggctctatagtatcccagctcacaacaggcgagggtgcaaagagctttgaccgatacggagtaggcgcatattatatggatcacgcaaatgcggtttacccatccaatgccggcggtg

SEQ ID NO: 29147 - DNA, 260 bp, Unknown
  Description of Unknown: RightRegion for integrase B3148 sequence
tggagcggttcgccggatgattttgagataactatatatccgaagctaccgaaatcataaaaatatgcgaattttctaccatatattaggcagtcattgacatcatagcggtacagaagaactatcccatctcgaaatgataggctctatagtatcccagctcacaacaggcgagggcgcaaagagctttgaccgatacggagtaggcgcatattatatggatcacgcaaatgcggtttacccatccaatgccggcggtg

SEQ ID NO: 29148 - DNA, 260 bp, Unknown
  Description of Unknown: RightRegion for integrase B3149 sequence
tggagcggatcgcccgatgattttgagataactatatatccgaagctgccgaaatcataaaaatgtgcgaattttctaccatatattaggcagtcgtttacatcatggtggtaccgaagaactatcccatcttgaaatgataggctctatagtatcccagctcacaacaggcgagggcgcaaagagctttgaccgatacggagtaggcgcatattatatggatcacgcaaatgcggtttacccatccaatgccggcggtg

SEQ ID NO: 29149 - DNA, 260 bp, Unknown
  Description of Unknown: RightRegion for integrase B3150 sequence
aaacgcctaaagcccgacgactttgaaattgagatatacccccgcatcccccggaaatagcaagaggagccgcttttgtggctcctcttctttgttgtatcgtgttgcgtattatttaatttcttcacatgcattcttccctgcattgtagctgcaaaaattgtatacaatgcactcttgtttcccgccacactcgcggacgttttattttttctattgagtgctcttctcggaaatatgatctttttacttctcaacac

SEQ ID NO: 29150 - DNA, 260 bp, Unknown
  Description of Unknown: RightRegion for integrase B3151 sequence
tggagcggatcgccggatgattttgagataactatatatccgaagctaccgaaatcataaaaatgtgcgaattttctaccatatattaggcactcattgacatcatagcggtaccgaagaactatcccacctcgaaatgataggctctatagtatcccaactcacaacaggcgagggtgcaaagagctttgaccgatacggagtaggcgcatattatatggatcacgcaaatgcggtttacccatccaatgccggcggtg

SEQ ID NO: 29151 - DNA, 260 bp, Unknown
  Description of Unknown: RightRegion for integrase B3152 sequence
actatccaccatcagttaaaaccccatgagtggaaaaagtttagggcaacagagcgttgaccttgctttgcacttcgctgtaattgtatccagcggcttgcagacggttcttacggtcagccccgttaccccatttgcctgcaatgacttcctttgcaacctctgtaacagattttgtgggggtgggagttgacacaaccgtgcgtccctgtaccgtacaataagacgggttaagtaaataaatccatcctgcgccagac

SEQ ID NO: 29152 - DNA, 260 bp, Unknown
  Description of Unknown: RightRegion for integrase B3153 sequence
aaaaacgttggtgaaaattcgcatttggaaacctcgcctccaccacataaaaacacgtaatcggaaaggttacgaaacccacgtaatcacgttatatagcgtggttacgtggtttttcttttgcaaattttgcctgatttttcgggagttcaaagcgaatttgaccgtgacctgattaaaatgcgtcgtattttcaggatacccctctcttgcggaaaaaatgggaaaatgggaaaaacaagcgtgtttttctaagagcc

SEQ ID NO: 29153 - DNA, 260 bp, Unknown
  Description of Unknown: RightRegion for integrase B3154 sequence
accaaaaagacactgcacagtttgtgcagtgtctttcttttttgcacttttgctgcgtgagtgaaaaacaggaagatgaacggtgccgatcggagttttgacgatttgcggcgctatcctgctgcagtaaaccgtaagataaaagcagaagacgctcttccccgatggaaagggcgtcttctgctttttcagccgttcttcacgcccgccggagccggctgggcagaggccgtgtcaaggccgacgagatattccggatc

SEQ ID NO: 29154 - DNA, 109 bp, Unknown
  Description of Unknown: RightRegion for integrase B3155 sequence
gtaggcataggtcggcatgtagagaacaaattcaacattgaagtaacattgcgtctttaatctccaacgttaatgagcaagttcttctgtaccgatatcggtcaacagt

SEQ ID NO: 29155 - DNA, 260 bp, Unknown
  Description of Unknown: RightRegion for integrase B3156 sequence
cacggcaatccggacgatttcgaggtcgtcatatacccaaaactcccgaaaatgcgttgacttttttatatacaccataggtacgcgaacgagctgagccatgtcgagatgatttctgcgatcctgtaccagctgactgacgggctgacaccggaacagatcaaggaagccggattcgacgcgtacttcgtagaccacaccctcggactgtacccccagagtgccgccggcgtaccgttcacggctgcctatttccagtc

SEQ ID NO: 29156 - DNA, 260 bp, Unknown; identical to SEQ ID NO: 29150
  Description of Unknown: RightRegion for integrase B3157 sequence

SEQ ID NO: 29157 - DNA, 260 bp, Unknown
  Description of Unknown: RightRegion for integrase B3158 sequence
tggagcggatcgcctgatgattttgagataactatatatccgaagctgccgaaatcataaaaatatgcgaattttctgccatatattaggcagtcgttgacatcatagcggtaccgaagaactatcccacctcgaaatgataggctctatagtatcccaactcacaacaggcgagggtgcaaaaagctttgaccgatacggagtaggcgcatattatatggatcacgcaaatgcggtatacccatccaatgccggcggtg

SEQ ID NO: 29158 - DNA, 260 bp, Unknown
  Description of Unknown: RightRegion for integrase B3159 sequence
ctcaatgtgcggctcatcaagatgtgtttcgtgatgacagtagaaaggcccgtaggttaaacgcctacgggccttttgctatgctcaatttgaatcgtctttgaaagtgtggcactgtatatacccgatttcacacaacgcatccgttagtgtgcaaattcgagcgtcatacccgttccagcccggtgatccagtcttaaaactgtctcgaagttcccgaatattatctatcagcttatcgaagcatgaaacaacatctg

SEQ ID NO: 29159 - DNA, 260 bp, Unknown
  Description of Unknown: RightRegion for integrase B3160 sequence
tggagcggatcgccggatgattttgagataactatatatccgaagctgccgaaatcataaaaatatgcgaattttctaccatatattaggcagtcgttgacatcatggcggtacagaagaactatcccacctcgaaatgataggctctatagtatcccaactcacaacaggcgagggtgcaaagagctttgaccgatacggagtaggcgcatattatatggatcacgcaaatgcggtttacccatccaatgccggcggtg

SEQ ID NO: 29160 - DNA, 260 bp, Unknown
  Description of Unknown: RightRegion for integrase B3161 sequence
cacggcaatccggacgatttcgaggtcgtcatatacccaaaactcccgaaaatgcattgatttttttatagacaccataggtacgcgaacgaatccgcccacacatgatatacataacaagcccacttgaagcacgtctttgagtgggcttttgtgctgtatgttcaacttgcacaagtcctatatgcttgttttgtgcatgtatacaaatgtgctctgattcagagtttttttatcaaagcctattgacaaacgctccg

SEQ ID NO: 29161 - DNA, 260 bp, Unknown
  Description of Unknown: RightRegion for integrase B3162 sequence
tggagcggttcgccggatgattttgagataactatatatccgaaactgccgaaatcataaaaatatgcgaattttctgccacatattaggcagtcattgacatcatagcggtaccgaagaactatcccacctcgaaatgataggctctatagtatcccagctcacaacaggcgagggtgcaaagagctttgaccgatacggagtaggcgcatattatatggatcacgcaaatgcggtttacccatccaatgccggcggtg

SEQ ID NO: 29162 - DNA, 260 bp, Unknown
  Description of Unknown: RightRegion for integrase B3163 sequence
tggagcggatcgccggatgattttgagataactatatatccgaagctgccgaaatcataaaaatatgcgaattttctaccatatattagacagtcgtttacatcatggcggtaccgaagaactatcccacctcgaaatgataggctctatagtatcccaactcacaacaggcgagggtgcaaagagctttgaccgatacggagtaggcgcatattatatggatcacgcaaatgcggtttacccatccaatgccggcggtg

SEQ ID NO: 29163 - DNA, 260 bp, Unknown
  Description of Unknown: RightRegion for integrase B3164 sequence
cacggcaatccggacgatttcgaggtcgtcatatatccaaaactcccgaaaatgcgttgatttttttatagacaccatgtgtacgcgaacgaactagcccatgtcgagatgatttccgcgatcctgtaccagctgaccgacgggctgacaccggaacagatcaaggaagccggattcgacgcgtacttcgtagaccacaccctcggactgtacccccagagtgccgccggcgtaccgttcacggctgcctatttccagtc

SEQ ID NO: 29164 - DNA, 260 bp, Unknown
  Description of Unknown: RightRegion for integrase B3165 sequence
aagcagtcaaccagactaaagccatctgaggaagctcaggtggcttttctgtttgtatgattccgcgcggaaaaactattatagatagagcgaacccggaaagtccgcaggactttccgggttcgccttttcacgggaaatataaatttacagaatggtgatgcggcctgcgccgtagggctgctcgtagttgagcaggtagccagggtatgcggccagcgggctgttggcgctggacaggtgcggcagacccgcagcat

SEQ ID NO: 29165 - DNA, 260 bp, Unknown
  Description of Unknown: RightRegion for integrase B3166 sequence
aaggacgagaataggacggcagtgaataccgtgccctttggcacggtagagccgtcctgaccgacgagcgtcgagcgaggagaaagagtccttctgcccctgccaaaaaggtcggttgcaaaagcagccgattttttttgctctttgcagaaggacatttttccaattccagttttttcaaaatgcgcaactaaattcagttgcatttttatctttttgtgctatactatatgagaaagggaggcatgcggcttgggaca

SEQ ID NO: 29166 - DNA, 109 bp, Unknown
  Description of Unknown: RightRegion for integrase B3167 sequence
ccgggacttggacggtatgttgataatccgtttcatctggaagttattttacgattatgatttacaacaacatggtgctattgaaattgcccattttgagatgattgca

SEQ ID NO: 29167 - DNA, 260 bp, Unknown
  Description of Unknown: RightRegion for integrase B3168 sequence
accaaaaagacactgcacagtttgtgcggtgtctttcttttttgcacttttgttgcgtgagtgaaaaacaggaagatgaacggtgccgatcggagttttgacgatttgcggcgctgtcctgatgcagtaaaccgtaagataaaagcagaagacgctcttccccgatggaaagggcgtcttctgctttttcagtcgttcttcacgcccgccggagccggctgggcagaggccgtgtcaaggccgacgagatattccggatc

SEQ ID NO: 29168 - DNA, 260 bp, Unknown
  Description of Unknown: RightRegion for integrase B3169 sequence
atggtcacatcagaatggctgtcctgtgtattatacaggacagtcattttgtcgtcatagaggtaaatcctgttgacaaaagtatccaccagtgcctgccgatatttcaggtcattcacatcgcctttgcggaactggttcaggaagaaccgcacttcattgaccgtgggcgtagggtgggaggaagtctccaaaagaatctgctgttccagctcgttgcgttcccgtttcttctgggagatacgctccgcaatacacgc

SEQ ID NO: 29169 - DNA, 260 bp, Unknown
  Description of Unknown: RightRegion for integrase B3170 sequence
cacggcaatccggacgatttcgaggtcgtcatatacccaaaactcccgaagatgcgttgatttttttatagacaccataggtacgcgaacgaatccgcctacacatgatatacataataagcccacttgaagcacgtctttgagtgggcttttgtgctgtatgttcaacttgcacaagtcctatatgcttgttttgtgtatgtatacaaatgtgctctgattcagagtttttttatcaaaacctattgacaaatgctccg

SEQ ID NO: 29170 - DNA, 260 bp, Unknown
  Description of Unknown: RightRegion for integrase B3171 sequence
tggagcggatcgccggatgattttgagataactatatatccgaagctgccgaaatcataaaaatatgcgaattttctgccatatattaggcagtcgttgacatcatggcggtaccgaagaactatcccatcttgaaatgataggctctatagtatcccagctcacaacaggcgagggcgcaaagagctttgaccgatacggaataggcgcatattatatggatcacgcaaatgcggtttccccatccaatgccggcggtg

SEQ ID NO: 29171 - DNA, 260 bp, Unknown
  Description of Unknown: RightRegion for integrase B3172 sequence
tggagcggttcgccggatgattttgagataactatatatccgaagctaccgaaatcataaaaatatgcgaattttctaccatatattaggcagtcattgacatcatagcggtaccgaagaactatcccacctcgaaatgataggctctatagtatcccaactcacaacaggcgagggtgcaaagagctttgaccgatacggagtaggcgcatattatatggatcacgcaaatgcggtttacccatccaatgccggcggtg

SEQ ID NO: 29172 - DNA, 260 bp, Unknown
  Description of Unknown: RightRegion for integrase B3173 sequence
tggagcggttcgccggatgattttgagataactatatatccgaagctaccgaaatcataaaaatatgcgaattttctaccatatattaggcagtcattgacatcatagcggtaccgaagaactatcccacctcgaaatgataggctctatagtatcccagctcacaacaggcgagggtgcaaagagctttgaccgatacggagtaggcgcatattatatggatcacgcaaatgcggtttacccatccaatgccggcggtg

SEQ ID NO: 29173 - DNA, 260 bp, Unknown
  Description of Unknown: RightRegion for integrase B3174 sequence
aagcagtcaaccagaacaaagccatctgaggaaactcaggtggcttttctgtttgtatgattccgcgcggaaaaactattatagatagagcgaacccggaaagtccgcagaactttccgggttcgccttttcatgggaaatataaatttacagaatggtgatgcggcctgcgccgtagggctgctcgtagttgagcaggtagccgggatacgcagccagcgggctgttggcgctggacagatgcggcagacccgcagcat

SEQ ID NO: 29174 - DNA, 260 bp, Unknown
  Description of Unknown: RightRegion for integrase B3175 sequence
ctcaatgtgcggctcatcaagatgtgtttcgtgatgacagtagaaaggcccgtaggttaaacgcctacgggccttttgctatgctttaacttagaactgcgagaatctgttcacgctgttctgcgggcggtttacggatgccgcgccgatagacagaaatcagaccgggattcagccctgtcagttctgccgcttcacgaacgccgtaatgcgaaagaaccgcaatcacttcatcattattcgggttagctaccgggagc

SEQ ID NO: 29175 - DNA, 260 bp, Unknown
  Description of Unknown: RightRegion for integrase B3176 sequence
aagcagtcaaccagactaaagccatctgaggaagctcaggtggcttttctgtttgtatgattccgcgcggaaaaactattatagatagagcgaacccggaaagtccgcaggactttccgggttcgccttttcacgggaaatataaatttacagaatggtgatgcggcctgcgccgtagggctgctcgtagttgagcaggtagccggggtatgcggccagcgggctgttggcgctggacaggtgcggcagacccgcagcat

SEQ ID NO: 29176 - DNA, 260 bp, Unknown
  Description of Unknown: RightRegion for integrase B3177 sequence
tggagcggttcgccggatgattttgagataactatatatccgaagctaccgaaatcataaaaatatgcgaattttctaccatatattaggcagtcattgacatcatagcggtaccgaagaactctctcacttagagatgatcggatcaatagtttctcagctgacaacgggtgagggtgcgaaaagctttgacaggtacggagtgggcgcgtattatatggatcacgctaatgcggtatatcctgcaaatgcgggcggag

SEQ ID NO: 29177 - DNA, 260 bp, Unknown
  Description of Unknown: RightRegion for integrase B3178 sequence
ctcaatgtgcggctcgtcaagatgtgtttcgtgatgacagtagaaaggcccgtaggttaaacgcctacgggccttttgctatgtctttatacatctctgccgattgaatggtatgcgaaccagtgaccgcgccgccgggtcagcttgaaccagtttgtgaacagctgacccgtgcaatcgtactggctgggcgtggcggtcatgtaccgattccacatgaaccactcctgcacttcgtcctcggtgtagctgtccagttc

SEQ ID NO: 29178 - DNA, 260 bp, Unknown
  Description of Unknown: RightRegion for integrase B3179 sequence
tggagcggttcgccggatgattttgagataactatatatccgaaactgccgaaatcataaaaatatgcgaattttctgccacatattaggtagtcattgacatcatggtggtaccgaagaactatcccatctcgaaatgataggctctatagtatcccagctcacaacaggcgagggtgcaaagagctttgaccgatacggagtaggcgcatattatatggatcacgcaaatgcggtttacccatccaatgccggcggtg

SEQ ID NO: 29179 - DNA, 260 bp, Unknown
  Description of Unknown: RightRegion for integrase B3180 sequence
actatctacatcatagatggccagctccggatgtggacaacaatagaggcgccgatctgatcggcgcccccttttttattttcgcgcgatgcactcatagtacatccgcgtcttgtcctccacagcgtccgggtcctcgacgaagcacttggccatcatcgcgtaaaactccggcctgtcgactccaaacttcttcgccgccggccagtagtcgctctgcatggcattcatcgctgcgtaaaactcgatgagcctctcct

SEQ ID NO: 29180 - DNA, 260 bp, Unknown
  Description of Unknown: RightRegion for integrase B3181 sequence
tggagcggatcgccggatgattttgagataactatatatccgaagctgccgaaatcataaaaatatgcgaattttctgccatatattaggcagtcgttgacatcatggcggtacagaagaactatcccatctcgaaatgataggctctatagtatcccagctcacaacaggcgagggtgcaaagagctttgaccgatacggagtaggcgcatattatatggatcacgcaaatgcggtatacccatccaatgccggcggtg

SEQ ID NO: 29181 - DNA, 260 bp, Unknown
  Description of Unknown: RightRegion for integrase B3182 sequence
tggagcggatcgccggatgattttgagataactatatatccgaagctgccgaaatcataaaaatgtgcgaattttctaccatatattaggcagtcgtttacatcatagcggtaccgaagaactatcccacctcgaaatgataggctctatagtatcccaactcacaacaggcgagggtgcaaagagctttgaccgatacggagtaggcgcatattatatggatcacgcaaatgcggtttacccatccaatgccggcggtg

SEQ ID NO: 29182 - DNA, 108 bp, Unknown
  Description of Unknown: RightRegion for integrase B3183 sequence
aaggacgagaataggacggcagtgaataccgtgccctttggcacggtagagccgtcctgaccgacgagcgtcgagcgaggagaaagagtccttctgcccctgccaaaa

SEQ ID NO: 29183 - DNA, 260 bp, Unknown
  Description of Unknown: RightRegion for integrase B3184 sequence
tggagcggatcgccggatgattttgagataactatatatccgaagctgccgaaatcataaaaatgtgcgaattttctaccatatattaggcagtcgtttacatcatggcggtacagaagaactatcccatctcgaaatgataggctctatagtatcccagctcacaacaggcgagggcgcaaagagctttgaccgatacggagtaggcgcatattatatggatcacgcaaatgcggtttacccatccaatgccggcggtg

SEQ ID NO: 29184 - DNA, 260 bp, Unknown
  Description of Unknown: RightRegion for integrase B3185 sequence
ccgggacttgggcggtatgttgataatccgtttcatctggaagttattttacgattatgatttacaacaacatggtgctattgaaattgcccattttgagatgattgcaaccatcgtgcaccagcttaccagagacctgactccggaggaaatcaaagcctctaactttggtccttactatattgaccacacccttgccgtatggccacaggctgccggtggtgttccacagaatgcctgtgaattccagtccaaaggcg

SEQ ID NO: 29185 - DNA, 99 bp, Unknown
  Description of Unknown: RightRegion for integrase B3186 sequence
aagcagtcaaccagaacaaagccatctgaggaagctcaggtggcttttctgtttgtatgattccgcgcggaaaaactattctagatagagcgaacccgg

SEQ ID NO: 29186 - DNA, 260 bp, Unknown
  Description of Unknown: RightRegion for integrase B3187 sequence
tggagcggttcgccggatgattttgagataactatatatccgaagctaccgaaatcataaaaatatgcgaattttctaccatatattaggcagtcattgacatcatagcggtaccgaagaactatcccatcttgaaatgataggctctatagtatcccagctcacaacaggcgagggcgcaaagagctttgaccgatacggagtaggcgcatattatatggatcacgcaaatgcggtttacccatccaatgccggcggtg

SEQ ID NO: 29187 - DNA, 109 bp, Unknown
  Description of Unknown: RightRegion for integrase B3188 sequence
atggtcacatcagaatggctgtcctgtgtattatacaggacagtcattttgtcgtcatagaggtaaatcctgttgacaaaagtatccaccagtgcctgccgatatttca

SEQ ID NO: 29188 - DNA, 109 bp, Unknown
  Description of Unknown: RightRegion for integrase B3189 sequence
ccgggacttgggcggtatgttgataatccgtttcatctggaagttattttacgattatgatttacaacaacatggtgctattgaaattgcccattttgagatgattgca

SEQ ID NO: 29189 - DNA, 260 bp, Unknown
  Description of Unknown: RightRegion for integrase B3190 sequence
aagcagtcaaccagactaaagccatctgaggaaactcaggtggcttttctgtttgtatgattccgcgcggcgcaacgattcagaatgccctccgctttgctctgggcattttcagcggaaggattattttaatatttcgcgtttgtcgcactctgcggagtgctccaaacgctattttcacaggaggggccgcaatggttaaagagcagtctaaatcacaaaatgcagttgacctctacgaccccactggtgaaaagggg

SEQ ID NO: 29190 - DNA, 73 bp, Unknown
  Description of Unknown: RightRegion for integrase B3191 sequence
aagcagtcaaccagactaaagccatctgaggaagctcaggtggcttttctgtttgtatgattccgcgcggaaa

SEQ ID NO: 29191 - DNA, 109 bp, Unknown
  Description of Unknown: RightRegion for integrase B3192 sequence
gtaggcataggtcggcatgtagagaacaaattcaacattgaagtaacattgcgtctttaatctccaacgttaatgtgcaagttcttctgtaccgatatcggtcaacagt

SEQ ID NO: 29192 - DNA, 260 bp, Unknown
  Description of Unknown: RightRegion for integrase B3193 sequence
aaggacgagaataggacggcagtgaataccgtgccctttggcacggtagagccgtcctgaccgacgagcgtcgagcgaggagaaagagtccttctgcccctgccaaaaaggtcggttgcgaaagcagccgattttttttgctctttgcagaaggacatttttccaattccagttttttcaaaatgcgcaactaaattcagttgcatttctatctttttgtgctatactatatgagaaagggaggcatgcggcttgggaca

SEQ ID NO: 29193 - DNA, 94 bp, Unknown
  Description of Unknown: RightRegion for integrase B3194 sequence
tcttcctctgataaggggttcggatttgaggggttagagtccaccaaaaagggaggctaaaaaagatattgaggacaaaacctcagtattttca

SEQ ID NO: 29194 - DNA, 260 bp, Unknown
  Description of Unknown: RightRegion for integrase B3195 sequence
ctcaatgtgcagctcatcaagatgtgtttcgtgatgacagtagaaaggcccgtaggttaaacgcctacgggccttttgctatgctcaatttgaatcgtctttgaaagtgtggcactgtatatacccgatttcacacaacgcatccgttagcgtgcaaattcgagcgtcatacccgttccagcccggtgatccagtcttaaaactgtctcgaagttcccgaatattatctatcagcttatcgaagcatgaaacaacatctg

SEQ ID NO: 29195 - DNA, 260 bp, Unknown
  Description of Unknown: RightRegion for integrase B3196 sequence
tggagcggttcgccggatgattttgagataactatatatccgaagctaccgaaatcataaaaatatgcgaattttctaccatatattaggcagtcattgacatcatagcggtacagaagaactatcccacctcgaaatgataggctctatagtatcccagctcacaacaggcgagggcgcaaagagctttgaccgatacggagtaggcgcatattatatggatcacgcaaatgcggtttacccatccaatgccggcggtg

SEQ ID NO: 29196 - DNA, 260 bp, Unknown
  Description of Unknown: RightRegion for integrase B3197 sequence
agtggttgtgtttggtataccatatggcatcatacaattccatatagtgtcaaacggtgattcacgtctataaatgggaatcgacaaatagtccgcgccgtgtggagagtcgttaagaaataatagtgttagacaattgttagacggtttgcttgctgttgttttatatagcggagtggagcagttggtagctcattaggttcatgccctaaaggtcgtgggttcaagtcccgcctccgcaaccaatatcccgtgtgcat

SEQ ID NO: 29197 - DNA, 260 bp, Unknown
  Description of Unknown: RightRegion for integrase B3198 sequence
aaaggaacattcagcacctttgcaatgatatatagctccatatcccgtacgcaccgatgaccatgctcaagcaactgaatcgcgtttttatcaacgtcaatgccgaagccctggagtttaatagccaaggtgttttgcgatatgccgcgttccctgcgaagctcggcaacgcgttttccgacccaattcttattgccatccggctttttacattttttcatatacaattctcccattttagtcatttatatttttattat

SEQ ID NO: 29198 - DNA, 260 bp, Unknown
  Description of Unknown: RightRegion for integrase B3199 sequence
tggagcggatcgccggatgattttgagataactatatatccgaagctgccgaaatcataaaaatatgcgaattttctaccatatattaggcagtcgtttacatcatggcggtaccgaagaactatcccatctcgaaatgataggctctatagtatcccagctcacaacaggcgagggtgcaaagagctttgaccgatacggagtaggcgcatattatatggatcacgcaaatgcggtttacccatccaatgccggcggtg

SEQ ID NO: 29199 - DNA, 260 bp, Unknown
  Description of Unknown: RightRegion for integrase B3200 sequence
ctcaatgtgcggctcatcaagatgtgtttcgtgatgacagtagaaaggcccgtaggttaaacgcctacgggccttttgctatgcctttatacatctctgccgattgaatggtatgcgaaccagtgaccgcgccgccgggtcagcttgaaccaatttgtgaacagctgcccggtgcaatcgtactggctgggcacggcggtcatgtaccgattccacatgaaccactcctgcacttcgtcctcggtgtagctgtccagctc

SEQ ID NO: 29200 - DNA, 260 bp, Unknown
  Description of Unknown: RightRegion for integrase B3201 sequence
ctcaatgtgcggctcatcaagatgtgtttcgtgatgacagtagaaaggcccgtaggttaaacgcctacgggccttttgctatgttttttatttcaggtattcgcgcagggctgcaagtacgatgtcagttcgattccggccacttgcggccttttctgtgtccagctttgccatgatgtccggcggaaccagaacagatacgggagtgtattcgccctcggcaatctctccgaaaatggattcatagtcatccgcatcca

SEQ ID NO: 29201 - DNA, 260 bp, Unknown
  Description of Unknown: RightRegion for integrase B3202 sequence
gtttatcggatactgccagatactgcgcgatactgtctgcttttgccgggtactttgtagtcaggatcgtagtcagaaaaagtaggtcatagcaggatttttccggggggttccccgggacaaaaagtagtcaaaaataatgaatcaggccgccgtctccgtaaaacagagacagcggcctgattcatcaaggggattatttgtccatgtcatggtacgaaccgtcgagcggccgtgctgttcgccccccccttctcccg

SEQ ID NO: 29202 - DNA, 260 bp, Unknown
  Description of Unknown: RightRegion for integrase B3203 sequence
tcttcctctgataaggggttcggatttgaggggttagagtccaccatgaagaaagcctagagccgcaacggctccaggcttttttcttgtccttttccgggctgttttccctttggttttccctttacaggttggaaaccccttttataaactgttccatgcggtccgcactggcctgtttcatctcctctgtaacatggccgtacacgtccagcgtgaaggaggcggtatagtggcccaggttgccctgcacggtctta

SEQ ID NO: 29203 - DNA, 260 bp, Unknown
  Description of Unknown: RightRegion for integrase B3204 sequence
agaagtggtactctgcacatcccgcacaaaaatccttgcggttctcgtaaagcgttttgacttcatagtctggcggggcatcagggctgactctcttggagtacataagcatactgtcccagtagaacctgacctcgtcggcctcttcctgccggctgatctgcccggaaacattgattgcgacaagcgcgatggacagcagcaccgcgatgccgatgccgaccggaatcacaattgcccagttcattctgtgtacctcc

SEQ ID NO: 29204 - DNA, 260 bp, Unknown; identical to SEQ ID NO: 29175
  Description of Unknown: RightRegion for integrase B3205 sequence

SEQ ID NO: 29205 - DNA, 260 bp, Unknown
  Description of Unknown: RightRegion for integrase B3206 sequence
tggagcggatcgccggatgattttgagataactatatatccgaagctgccgaaatcataaaaatgtgcgaattttctaccatatattaggcagtcgtttacatcatagcggtacagaagaactatcccatctcgaaatgataggctctatagtatcccagctcacaacaggcgagggcgcaaagagctttgaccgatacggagtaggcgcatattatatggatcatgcaaatgcggtttacccatccaatgccggcggtg

SEQ ID NO: 29206 - DNA, 260 bp, Unknown
  Description of Unknown: RightRegion for integrase B3207 sequence
ctcaatgtgcagttcatcaagatgtgtttcgtgatgacagtagaaaggcccgtaggttaaacgcctacgggccttttgctatgcctttatacatctctgccgattgaatggtatgcgaaccagtgaccgcgccgccgggtcagcttgaaccagtttgtgaaaagctgcccagtgcaatcgtactggctgggcacggtggtcatgtaccgattccacatgaaccactcctgcacttcatcctcggtgtaactgtccagctc

SEQ ID NO: 29207 - DNA, 260 bp, Unknown
  Description of Unknown: RightRegion for integrase B3208 sequence
aagagccctgatggcttcatcattgaaatatacccgcgcatcccaaaatccgaaaaatgaaaagagagggccgtttcggtcctctctttcttatagttatcctgtttagccatactcatagggactgcccacgatgtcacccaagattgctcctaacatggctgtttcctcccttacctatgatgccgcttctggaaatcagcttcgatttgttctttccactctgcgccgatggacgcgcagcagggtgcttcccgcat

SEQ ID NO: 29208 - DNA, 260 bp, Unknown
  Description of Unknown: RightRegion for integrase B3209 sequence
gtgccaattcccgcaaaagtaccgtgttcggattttaggacgcaacctgctccaaaataacagcacgccctgccttgattggcagggcgtgctgctcagtctgtcaaataaccctcactttcaataagcgaaagtgggggcattcttgtagatggggcaacaacggacgaatagtagcgagaacatggagtccttccaactccattgggccagttttttcagattcatggcagcaaacttgagcctgacccatctggtaa

SEQ ID NO: 29209 - DNA, 260 bp, Unknown
  Description of Unknown: RightRegion for integrase B3210 sequence
aaaagtcctgatggtttcaccattgagatatacccgcgcatcccaaaatccgaaaaatgaaaagagagggccatttcggtcctctctttcttatagttatcctgtttagccatactcatagggactgcccacgatgtcacccaagattgctcctaacatggctgtttcctcccttacctatgatgccgcttctggaaatcggcttcgatttgttctttccactctgcgccgatggacgcgcagcagggtgcttcccgcat

SEQ ID NO: 29210 - DNA, 256 bp, Unknown
  Description of Unknown: RightRegion for integrase B3211 sequence
aagagccctgacggctttaccattgagatatacccgcgcatcccaaaatccgaaaaatgaaaagagagggccgtttcggtcctctctttcttatagttatcgtgtttagccatactcatagggactgcccacgatgtcacccaaaattgctcctaacatggctgtttcctcctttacccctgatgccgcttctggaaatcaacttcgatttgttctttccactctgcgccgatggacgcgcagcagggtgcttccc

SEQ ID NO: 29211 - DNA, 260 bp, Unknown
  Description of Unknown: RightRegion for integrase B3212 sequence
aaaagtcctgatggtttcaccattgagatatacccgcgcatcccaaaatccgaaaaatgaaaagagagggccgtttcggtcctctctttcttatagttatcctgtttagccatactcatagagactgcccacgatgtcacccaagattgctcctaacatggctgtttcctcccttacctatgatgccgcttctggaaatcagcttcgatttgttctttccactctgcgccgatggacgcgcagcagggtgcttcccgcat

SEQ ID NO: 29212 - DNA, 260 bp, Unknown
  Description of Unknown: RightRegion for integrase B3213 sequence
aaaagtcctgatggtttcaccattgagatatacccgcgcatcccaaaatccgaaaaatgaaaagagagggccgtttcggtcctctctttcttatagttatcctgtttagccatactcataattccaaccagcaaaaacacggcagacaaacctgtggccaaaactcttgaagtcagtaaatatcctgccatttcttgctgtttctcatatcgcgactgaatatcaatgccagatgacagggcagtaattgattgaagttg

SEQ ID NO: 29213 - DNA, 260 bp, Unknown
  Description of Unknown: RightRegion for integrase B3214 sequence
aaaagtcctgatggtttcaccatagagatatacccgcgcatcccaaaatccgaaaaatgaaaagagagggccgtttcggtcctctctttcttatagttatcctgtttagccatactcatagggactgcccacgatatcacccaagattgctcctaacatggctgtttcctcccttacctatgatgccgcttctggaaatcagcttcgatttgttctttccactctgcgccgatggacgcgcagcagggtgcttcccgcat

SEQ ID NO: 29214 - DNA, 260 bp, Unknown
  Description of Unknown: RightRegion for integrase B3215 sequence
aaaagtcctgatggtttcaccattgagatatacccgcgcatcccaaaatccgaaaaatgaaaagagagggccgtttcggtcctctctttcttatagttatcctgtttagccatactcatagggactgcccacgatgtcacccaagattgctcctaacatggctgtttcctcccttacctatgatgccgcttctggaaatcagcttcgatttgttctttccactctgcgccgatggacgcgcagcagggtgcttcccgcat

SEQ ID NO: 29215 - DNA, 260 bp, Unknown
  Description of Unknown: RightRegion for integrase B3216 sequence
aagagccctgatggtttcaccattgagatatacccgcgcatcccaaaatccgaaaaatgaaaagagagggccgtttcggtcctctctttcttatagttatcctgtttagccatactcgatgttgttgccaacgatttgaataatcgaattgtaataaaaactcggactacaccgccatcgaagcgtacctcgtttaccagcacgacgcgttcaccggaaagcaacttctggatgagcacggcaagccgaagctgcgggat

SEQ ID NO: 29216 - DNA, 260 bp, Unknown
  Description of Unknown: RightRegion for integrase B3217 sequence
aaaagtcctgatggtttcaccatagagatatacccgcgcatcccaaaatccgaaaaatgaaaagagagggccgtttcggtcctctctttcttatagttatcctgtttagccatactcattaggacaaacatgataactatatcagcaggggcctccgggctcctgctttctttctgttctgccgtcgtttcgtgcataatgccgcaaaaagcgtcatcctcaaaaactttttgccacaaattgccagattttacttgaca

SEQ ID NO: 29217 - DNA, 260 bp, Unknown
  Description of Unknown: RightRegion for integrase B3218 sequence
aaaagtcctgatggtttcaccattgagatatacccgcgcattccaaaatccgaaaaatgaaaagagagggccgtttcggtcctctctttcttatagttatcctgtttagccatactcatagggactgcccacgatgtcacccaaaattgctcctaacatggctgtttcctcccttacccgtgatgccgcttctggaaatcggcttcaatctgctctttccactccgcaccgatggacgcacagcagggtgcctcccgcat

SEQ ID NO: 29218 - DNA, 260 bp, Unknown
  Description of Unknown: RightRegion for integrase B3219 sequence
aaaagtcctgatggtttcaccattgagatatacccgcgcatcccaaaatccgaaaaatgaaaagagaggaccgtttcggtcctctctttcttatagttatcctgtttagccatactcattaggacaaacaggataactatatcaacaggggcctccgggctcctgctttctttctgctctgctgcggtttctggcataatgccgcaaaaagcgtcattctcgaaaactttttccacaaattgccagattttgcttgacat

SEQ ID NO: 29219 - DNA, 260 bp, Unknown
  Description of Unknown: RightRegion for integrase B3220 sequence
aaaagtcctgatggtttcaccatagagatatacccgcgcatcccaaaatccgaaaaatgaaaagagagggccgtttcggtcctctctttcttatagttatcctgtttatccatactcatagggactgcccacgatgtcacccaagattgctcctaacatggctgtttcctcccttacctatgatgccgcttctggaaatcagcttcgatttcctctttccactctgcgccgatggacgcgcagcagggtgcttcccgcat

SEQ ID NO: 29220 - DNA, 260 bp, Unknown
  Description of Unknown: RightRegion for integrase B3221 sequence
aagagccctgacggctttaccattgagatatacccgcgcatcccaaaatccgaaaaatgaaaagagagggccgtttcggtcctctctttcttatagttatcctgtttagccatactcatagggactgcccacgatgtcacccaagattgctcctaacatggctgtttcctcccttacctatgatgccgcttctggaaatcagcttcgatctgctctttccactccgcaccgatagacgcgcagcagggtgcctcccgcat

SEQ ID NO: 29221 - DNA, 260 bp, Unknown
  Description of Unknown: RightRegion for integrase B3222 sequence
tccaccaaaaaagcactgtacttcgtaggaagtacagtgcttttctttttgctttcttagaggttgcatcgagaatcagccaaatgcctgattttgcaggcgcatggacggcaacccccaattcttgctatttcgttgcttttgaaaatgcttgttcgatgtccgactgttttgcaggtggacgcatcactccccctcaatgtaaggagtgaggtcgaagttgaacgagatgttgatctgatatccacgataaacatcta

SEQ ID NO: 29222 - DNA, 260 bp, Unknown
  Description of Unknown: RightRegion for integrase B3223 sequence
aagagccctgatggcttcaccattgaaatatacccgcgcatcccaaaatccgaaaaatgaaaagagagggccgtttcggtcctctctttcttatagttatcctgtttagccatactcaaaggggctgcccacgatgtcgcccaagattgctcccaacatggctgattcctcctttacccctgatgccgcttctggaaatcggcttcgatttcctctttccactctgcgccgacggatgccgggcagtctgcctgccgcat

SEQ ID NO: 29223 - DNA, 260 bp, Unknown
  Description of Unknown: RightRegion for integrase B3224 sequence
gtgcccatttccgaaaaagtaccgtgttcggattttaggacgcaacctgctccaaaatagcagcacgccccgccttgattggcagggcgtgctgctttatttattgtacatagcttgcagaactccgacacgcttagggcaacaccgcaatggggacacggttcccttacttgcggaaaggaatcgagcttccggattgtgacatatcctctcgcgaagaagatactgtcaaattacagagaaattaaggtgccttgtgt

SEQ ID NO: 29224 - DNA, 260 bp, Unknown
  Description of Unknown: RightRegion for integrase B3225 sequence
ggttcagcttttgcgccgtcaagcgcattgcaacatcgcttttgtaaaaaatggtgttgacaatttgaattaaatactgtattatacatcttgttcgcagaaatggcggaattggcagacgcgcacggttcaggtccgtgtggtagtgataccatgagggttcaagtccctctttctgcatcacatggcggtgaccgaaaggttaccgcctttgttgtattcggaatccgataagaatatcataagaaatcagggaagag

SEQ ID NO: 29225 - DNA, 260 bp, Unknown
  Description of Unknown: RightRegion for integrase B3226 sequence
aaaagtcctgatggtttcaccatagagatatacccgcgcatcccaaaatccgaaaaatgaaaagagagggccgtttcggtcctctctttcttatagttatcctgtttagccatactcattaggacaaacaggataactatatcagcaggggcctccgggctcctgctttctttctgttctgccgtcgtttcgtgcataatgccgcaaaaagcgtcattctcgaaaacttttttgccataaattgccagattttacttgac

SEQ ID NO: 29226 - DNA, 260 bp, Unknown
  Description of Unknown: RightRegion for integrase B3227 sequence
aaaagtcctgatggtttcaccattgagatatacccacgcatcccaaaatccgaaaaatgaaaagagagggccgtttcggtcctctctttcttatagttatcctgtttagccatactcaagggggcttacatcggtgatgacacgttcgtcctggggggcgggcgtggcggcgggagcctcggccagcgcggcggtgctgccggacacgcacagggccagcgtcaggcagagggaaagggcgcggaacagctttttcatgg

SEQ ID NO: 29227 - DNA, 109 bp, Unknown
  Description of Unknown: RightRegion for integrase B3228 sequence
aataacgctcccgacgattttgagattacgctatatccgaaaataccgaaatctgattaacggtcccggcggaggctttacggcttccgccgttttctcattgataacc

SEQ ID NO: 29228 - DNA, 260 bp, Unknown
  Description of Unknown: RightRegion for integrase B3229 sequence
ggccgctggcatgctgcgccggatgattttgagattacgatattcccacggctgtcttaaaaaattctctatgataacctcggtgtaccgaagaaatggcacactgggaaatgattggctccatgatccttcaatgcatgaaaaacgccagtattgaagaaataaaggccgcggggctagccgggtattataccatgcatgatcacggcgtatacccagcggatcccaatggggtccccttcacggcgtcctatatccaa

SEQ ID NO: 29229 - DNA, 260 bp, Unknown
  Description of Unknown: RightRegion for integrase B3230 sequence
aaaagtcctgatggtttcaccattgagatatacccgcgcatcccaaaatccgaaaaatgaaaagagagggccgtttcggtcctctctttcttatagttatcctgtttagccatactcatagggactgcccacgatgtcacccaagattgctcctaacatggctgtttcctcccttacctatgtgatgccgcttctgaaaatcagcttcgatttgttctttccactctgcgccgatggacgcgcataaatttaaaagcggt

SEQ ID NO: 29230 - DNA, 260 bp, Unknown
  Description of Unknown: RightRegion for integrase B3231 sequence
aaaagccctgatggtttcatcatagagatatacccgcgcatcccaaaatccgaaaaatgaaaagagaggaccgaaacggccctctctttcttatagttatcctgtttagccatactcatagggactgcccacgatgtcacccaagattgctcctaacatggctgtttcctcccttacctatgatgccgcttctgaaaatcagcttcgatttgttctttccactctgcgccgatggacgcgcagcagggtgcttcccgcat

SEQ ID NO: 29231 - DNA, 260 bp, Unknown
  Description of Unknown: RightRegion for integrase B3232 sequence
aagagccctgatggcttcaccattgaaatatacccgcgcatcccaaaatccgaaaaatgaaaagagagggccgtttcggtcctctctttcttatagttatcctgtttagccatactcataatcttttaccgatctccgctgctgtcaaaaccagaaccatcataaataccgagtttaccagtcgttccgcaccattcacaggtgaaaagaccgcccagaccagaagtattatcgcaattcagtcttccgcagctgcatat

SEQ ID NO: 29232 - DNA, 260 bp, Unknown
  Description of Unknown: RightRegion for integrase B3233 sequence
aagagccctgatggtttcaccattgagatatacccgcgcatcccaaaatccgaaaaatgaaaagagagggccgtttcggtcctctctttcttatagttatcctgtttagccatactcattgttcaaatagatatggctgccactgtcctcgttataatgaattgtgcagttaataaacttgacagtgcctttgcagttcataatggcagaggaaaagtgaatatccttattcttgtagaccgtttcaccatcattctgaa

SEQ ID NO: 29233 - DNA, 260 bp, Unknown
  Description of Unknown: RightRegion for integrase B3234 sequence
aaaagtcctgatggtttcaccattgagatatacccgcgcatcccaaaatccgaaaaatgaaaagagagggccgtttcggtcctctctttcttatagttatcctgtttagccatactcatattacttcctcctccggttgtacttagcgattttgcggccagacaactcttttcacaaaatgttaggcagttagaacagtgacagcaaagattctgtcgaatcaaaatttgcccattggactgaatggtaaatgcacccgt

SEQ ID NO: 29234 - DNA, 260 bp, Unknown
  Description of Unknown: RightRegion for integrase B3235 sequence
aagagccctgatggtttcaccattgagatatacccgcgcatcccaaaatccgaaaaatgaaaagagagggccgtttcggtcctctctttcttatagttatcctgtttagccatactcgttcagcggctttattatacggccaattgcacggttttgcaacatattttttgctttagtgcacacttttgaagcattgcacaactttgctcgttcgtttttggtacatatgcccggcatattggatacaagcaccgcctttt

SEQ ID NO: 29235 - DNA, 260 bp, Unknown
  Description of Unknown: RightRegion for integrase B3236 sequence
aaaagtcctgatggtttcaccatagagatatacccgcgcatcccaaaatccgaaaaatgaaaagagagggccgtttcggtcctctctttcttatagttatcctgtttagccatactcataaagcacctccaaaacaaaataagagccacaagaaagtttatccttgcagctcgtcatagcataaaataacaccactaagcaaaagtggcaacagcactatattgagtaagatagacatataactttcttgcaatagacac

SEQ ID NO: 29236 - DNA, 260 bp, Unknown
  Description of Unknown: RightRegion for integrase B3237 sequence
aagagccctgatggcttcaccattgaaatatacccgcgcatcccaaaatccgaaaaatgaaaagagagggccgtttcggtcctctctttcttatagttatcctgtttagccatactcgttccatctcactatttattgtagcttcaattcctccatattgctctttctggactctttccaggtttttactcgccgttttatttctttcatctaacagtactctttttcgatatgcttcattttcttgctgcatcttttca

SEQ ID NO: 29237 - DNA, 260 bp, Unknown
  Description of Unknown: RightRegion for integrase B3238 sequence
tttatcacgatgataggtaatgtgttcgttttgttttgtccgtttccgggcctgaaatagaaataaattaagtctaatttgtgaacaaatagaacatcattagagacccatttcaacaaaataagcggcgggctacccctgaaaaaggagacggcctgccgcttttattatggattatttaatttgccggtaatttgcaagtaacttgccggtcagttgcctttgccgatctgcttgataacctgatccgcaccggtagc

SEQ ID NO: 29238 - DNA, 260 bp, Unknown
  Description of Unknown: RightRegion for integrase B3239 sequence
aaaagtcccgatggtttcaccattgagatatacccgcgcatcccaaaatccgaaaaatgaaaagagagggccgtttcggtcctctctttcttatagttatcctgtttatccatactcatagggactgcccacgatgtcacccaagattgctcctaacatggctgtttcctcctttacctatgatgccgcttctgaaaatcagcttcgatttgttctttccactctgcgccgatggtgtcctgctccagcccgcccatgga

SEQ ID NO: 29239 - DNA, 260 bp, Unknown
  Description of Unknown: RightRegion for integrase B3240 sequence
aaaagtcctgatggtttcaccatcgagatatacccgcgcatcccaaaatccgaaaaatgaaaagagagggccgtttcggtcctctctttcttatagttatcctgtttagctatactcatagggactgcccacgatgtcacccaaaattgctcctaacatggctgtttcctcctttacctatgatgccgcttctggaaatcagcttcgatctgctctttccactccgcaccgatggacgcgcagcagggtgcctcccgcat

SEQ ID NO: 29240 - DNA, 260 bp, Unknown
  Description of Unknown: RightRegion for integrase B3241 sequence
gtgccaattcccgcaaaagtaccgtgttcggattttaggacgcaacctgctccaaaataacagcacgccctgccttgattggcagggcgtgctgctttatttattgtacatagcttgcagaactccgacacgcttagggcaacgccacaatggggacgcggattcctttccttattgaaaggaaccgagcttccggattgtgacatatcctctcgcgaagaagatactgtcaaattacagagaaattgaggcgccttgtg

SEQ ID NO: 29241 - DNA, 108 bp, Unknown
  Description of Unknown: RightRegion for integrase B3242 sequence
aaaagtcctgatggtttcaccattgagatatacccgcgcatcccaaaatccgaaaaatgaaaagagagggccgtttcggtcctctctttcttatagttatcctgttta

SEQ ID NO: 29242 - DNA, 260 bp, Unknown
  Description of Unknown: RightRegion for integrase B3243 sequence
aaaagtcccgatggcttcaccattgagatatacccgcgcatcccaaaatccgaaaaatgaaaagagagggccgtttcggccctctctttcttatagttatcctgtttatccatactcatagggactgcccacgatgtcacccaagattgctcctaacatggctgtttcctcccttacctatgatgccgcttctggaaatcagcttcgatttgttctttccactctgcgccgatggacgcgcagcagggtgcttcccgcat

SEQ ID NO: 29243 - DNA, 260 bp, Unknown
  Description of Unknown: RightRegion for integrase B3244 sequence
aaaagtcctgatggtttcaccatcgagatatacccgcgcatcccaaaatccgaaaaatgaaaagagagggccgtttcggtcctctctttcttatagttatcctgtttagccatactcatagggactgcccacgatgtcacccaagattgctcctaacatggctgtttcctcccttacctatgatgccgcttctgaaaatcagcttcgatttgttctttccactctgcgccgatggacgcgcagcagggtgcttcccgcat

SEQ ID NO: 29244 - DNA, 260 bp, Unknown
  Description of Unknown: RightRegion for integrase B3245 sequence
aaaagccctgatggtttcatcatagagatatacccgcgcatcccaaaatccgaaaaatgaaaagagaggaccgaaacggccctctctttcttatagttatcctgtttagccatactcttcttgcttatgtataccacgtcacagccggtcggccgtgaaacaacaaatttggaatgcagcggtcaggactcgctgcggtggaaccgatctttcaccatctggatcagatctttcaggttgaggccccacaggctcttggg

SEQ ID NO: 29245 - DNA, 119 bp, Unknown
  Description of Unknown: RightRegion for integrase B3246 sequence
aaaaatcctgatggtttcaccattgagatatacccgcgcatcccaaaatccgaaaaatgaaaagagagggccatttcggtcctctctttcttatagttatcctgtttagccatactcat

SEQ ID NO: 29246 - DNA, 260 bp, Unknown
  Description of Unknown: RightRegion for integrase B3247 sequence
aagagccctgatggcttcaccattgaaatatacccgcgcatcccaaaatccgaaaaatgaaaagagagggccgtttcggtcctctctttcttatagttatcctgtttagtcatactcgtcaacaagatcaatggttttcgcaacatcgtcgagatattctttcaaatcatccgggataacaatattcacaccgtctaaaaaatcaattatcgtttcaaatgcatcttgctgttcgtctgttgcaaccctctcattcaggt

SEQ ID NO: 29247 - DNA, 260 bp, Unknown
  Description of Unknown: RightRegion for integrase B3248 sequence
gtgccaattcccgcaaaagtaccgtgttcggattttaggacgcaacctgctccaaaatagcagcacgccccgccttgattggcagggcgtgctgctttatttattgtacatagcttgcagaactccgacacgcttagggcaacgccacaatggggacgcggattcctttccttattgaaaggaaccgagcttccggattgtgacatatcctctcgcgaagaagatactgtcaaattacagagaaattgagtgccttgtgt

SEQ ID NO: 29248 - DNA, 260 bp, Unknown
  Description of Unknown: RightRegion for integrase B3249 sequence
aaaagtcctgatggtttcaccatagagatatacccgcgcatcccaaaatccgaaaaatgaaaagagagggccgtttcggtcctctctttcttatagttatcctgtttagccatactcgtctccctattcttataataatgttaataatgtcttttatcgtccctgtctgccgggcttatgggctttatcctcgtacatccgctggtcggccaggatgcggatttcttttacctccgtgctgtccgccgggtaaagggcgc

SEQ ID NO: 29249 - DNA, 260 bp, Unknown
  Description of Unknown: RightRegion for integrase B3250 sequence
aagagccctgatggcttcaccattgagatatacccgcgcatcccaaaatccgaaaaatgaaaagagagggccgtttcggtcctctctttcttatagttatcctgtttagccatactcgtaggggctgcctaccatatcgcccaaaattgctcctaacataaaataccctccgtatctgtggtgtttcgtctttctgacaaaaggataccacaaaccggagggcaaaaggtcaacgggcagacgacaaatcacgcacccag

SEQ ID NO: 29250 - DNA, 260 bp, Unknown
  Description of Unknown: RightRegion for integrase B3251 sequence
aataacgctcccgacgattttgagattacgctatatccgaaaataccgaaatctgattgacggtcccggcggaggctttacggcttccgccgttttctcattgataacctgttgggttagacgaatacgctccaataggttatcaatgatattccgtgccgctttttgcgtcctttgccttttgtgccgactcccggcgttgtaattcggctctgcaggtccgctcgtcgtagtcgagcaaaatgttctcgtagtcattc

SEQ ID NO: 29251 - DNA, 170 bp, Unknown
  Description of Unknown: RightRegion for integrase B3252 sequence
aaaagtcctgatggtttcaccattgagatatacccgcgcatcccaaaatccgaaaaatgaaaagagagggccgtttcggtcctctctttcttatagttatcctgtttagccatactcattctatcacaccgttatgaataaatcatctcatgcaaaataatttcttccgc

SEQ ID NO: 29252 - DNA, 260 bp, Unknown
  Description of Unknown: RightRegion for integrase B3253 sequence
aaaagtcctgatggtttcaccattgagatatacccgcgcatcccaaaatccgaaaaatgaaaaaagagggccgtttcggtcctctctttcttgtagttatcctgtttagccatactcatagggactgcccacgatgtcacccaagattgctcctaacatggctgtttcctcccttacctatgatcgctttcgttggcaaaaggataccacaaaccggagggcaaaaggtcaacgggcaggcgacaaattacgcacccagc

SEQ ID NO: 29253 - DNA, 103 bp, Unknown
  Description of Unknown: RightRegion for integrase B3254 sequence
aaccccgccgccgaagaagcgacagggttcgattttggggagtctgagtgtaccaaatgaataccacccgtgtttcgaacttttttatcgaaatacgggtggt

SEQ ID NO: 29254 - DNA, 260 bp, Unknown
  Description of Unknown: RightRegion for integrase B3255 sequence
aaaagtcctgatggtttcaccattgagatatacccgcgcatcccaaaatccgaaaaatgaaaagagagggccgtttcggtcctctctttcttatagttatcctgtttagccatactcatagggactgcccacgatgtcacccaagattgctcctaacatggctgtttcctcccttacctatgatgccgcttctggaaatcagcttcgatttgttctttccactctgcgccgatgaacgcgcagcagggtgcctcccgcat

SEQ ID NO: 29255 - DNA, 260 bp, Unknown
  Description of Unknown: RightRegion for integrase B3256 sequence
aagagccctgatggcttcaccattgaaatatacccgcgcatcccaaaatccgaaaaatgaaaagagagggccttttcggtcctctctttcttatagttatcctgtttagccatactcgtacaacatcgtactcatatcctggaaaatctttgcggagcgtaatggtattcaggcaattataacccagttttcgatacagtcgaatcgcagcttcattgcgggctgctgcttcaatataaagtgaaacggaatatttcttc

SEQ ID NO: 29256 - DNA, 260 bp, Unknown
  Description of Unknown: RightRegion for integrase B3257 sequence
tcttttgaggccgggatcttgttacttcaggatctcggccttttttattctgctgtataaaccaattccccaaacagaaaaccagaaaacaaaagaatgtgaggttgttatatggcgcaacaattttttgaagaattatcccggtgcctcagaaaagagcaaattgaatcctataacaaggaggacaggcgactggagatttttctccatgggcagcctgtcctttctgtttctcctgggaacgaagtattcctgcttcc

SEQ ID NO: 29257 - DNA, 260 bp, Unknown
  Description of Unknown: RightRegion for integrase B3258 sequence
cgatggagcggaaatccagataattttgaagttgttctgttcccaaagttaccgaaatagcgttacttttttattactgatattgtgcgtgtgcctaagaattagcatgcgcatgatgtcagctatataatcgaataaaagcagcggcagggaagtgctcccgctatgccgctgctttttcttattgtttaactaaattttctttgcataatccaaacagatccacccagctttcgattttaaaaatccccatttattac

SEQ ID NO: 29258 - DNA, 260 bp, Unknown
  Description of Unknown: RightRegion for integrase B3259 sequence
aaaagtcctgatggtttcacaatcgagatatacccgcgcatcccaaaatccgaaaaatgaaaagagagggccgtttcggtcctctctttcttatagttatcctgtttagccatactcatagggactgcccacgatgtcacccaagattgctcctaacatggctgtttcctcccttacctatgatcgctttcgttggcaaaaggataccacaaaccggagggcaaaaggtcaacgggcaggcgacaaatcacgcacccagc

SEQ ID NO: 29259 - DNA, 260 bp, Unknown
  Description of Unknown: RightRegion for integrase B3260 sequence
aaaagtcctgatggtttcaccattgagatatacccgcgcatcccaaaatccgaaaaatgaaaagagagggccgtttcggtcctctctttcttatagttatcctgtttagccatactcaccagatgcacctacaacaacaatgtccatcacatcattaggatgcaccgtacgcgtaattcgtgtgatacctccatcacgaattgtaagctgttcaacaacatcttttccattcatcgagtacgaaacagaataatttgatc

SEQ ID NO: 29260 - DNA, 260 bp, Unknown
  Description of Unknown: RightRegion for integrase B3261 sequence
aaaagtcctgatggtttcacaatcgagatatacccgcgcatcccaaaatccgaaaaatgaaaagagagggccgtttcggtcctctctttcttatagttatcctgtttagccatactcatagggactgcccacgatgtcacccaagattgctcctaacatggctgtttcctcccttacctatgatgccgcttctggaaatcagcttcgatttgttctttccactctgcgccgatggacgcgcagcagggtgcttcccgcat

SEQ ID NO: 29261 - DNA, 260 bp, Unknown; identical to SEQ ID NO: 29214
  Description of Unknown: RightRegion for integrase B3262 sequence

SEQ ID NO: 29262 - DNA, 260 bp, Unknown; identical to SEQ ID NO: 29214
  Description of Unknown: RightRegion for integrase B3263 sequence

SEQ ID NO: 29263 - DNA, 260 bp, Unknown
  Description of Unknown: RightRegion for integrase B3264 sequence
aaaagtcctgatggtttcaccattgagatatacccgcgcatcccaaaatccgaaaaatgaaaagagagggccgtttcggtcctctctttcttatagttatcctgtttagccatactcatagggactgcccacgatgtcacccaaaattgctcctaacatggctgttttctcccttacctatgatgccgcttctggaaatcagcttcgatttgcgccgatggacgcgcagcagggtgcctcccgcatccgggagactgtct

SEQ ID NO: 29264 - DNA, 260 bp, Unknown
  Description of Unknown: RightRegion for integrase B3265 sequence
aagagccctgacggctttaccattgagatatacccgcgcattccaaaatccgaaaaatgaaaagagagggccgtttcggtcctctctttcttatagttatcctgtttagccatactcatagggactgcccacgatgtcacccaagattgctcctaacataaaatgccctccgttttgtggtgtatcgctttcgttggcaaaaggataccacaaaacggaggtcaaaaggtcaacgggcaggcgacaaatcacgcgcccag

SEQ ID NO: 29265 - DNA, 260 bp, Unknown
  Description of Unknown: RightRegion for integrase B3266 sequence
catacaacgcattgccacttaaaacctcaccaatggagaaaatttaatcaggaagtttaagtgtctggccgggatagatggtgttgctggtcaggttgttcagggtcttaatctccgtccagcggctaccgttacccagattggcctttgcaatgctccacagagagtcacccttcttgaccttgtaggtcacataggacggctcctgcacggtgtcagtggcaaccacagtaccaccgctctccgtggtaatatatgcg

SEQ ID NO: 29266 - DNA, 260 bp, Unknown
  Description of Unknown: RightRegion for integrase B3267 sequence
aaaagtcctgatggtttcaccattgagatatacccgcgcatcccaaaatccgaaaaatgaaaagagagggccatttcggtcctctctttcttatagttatcctgtttagccatactcatagggactgcccacgatgtcacccaagattgctcctaacatggctgtttcctcccttacctatgatgccgcttctggaaatcagcttcgatttcctctttccactctgcgccgatggtgtcctgctccagcccgcccatgga

SEQ ID NO: 29267 - DNA, 109 bp, Unknown
  Description of Unknown: RightRegion for integrase B3268 sequence
ggggataagcctaatttcaaactgcatttatatcccaaatttttttcagataattactgacaacatcatggtacagacgaactggcgcatttcgagatgatcggtgcta

SEQ ID NO: 29268 - DNA, 260 bp, Unknown
  Description of Unknown: RightRegion for integrase B3269 sequence
aagagccctgatggcttcaccattgaaatatacccgcgcatcccaaaatccgaaaaatgaaaagagagggccgtttcggtcctctctttcttatagttatcctgtttagccatactcatcacgactgtataaagatgccgttgccaaatgctttgaacaactctacgaccagcaggggatattcctcaactagttagcgacccacgccagtgcatattccaaaatcgatttattgcttcactcatagatatatttttatt

SEQ ID NO: 29269 - DNA, 260 bp, Unknown
  Description of Unknown: RightRegion for integrase B3270 sequence
aaaagtcctgatggtttcaccattgagatatacccgcgcatcccaaaatccgaaaaatgaaaagagagggccgtttcggtcctctctttcttatagttatcctgtttagccatactcatttaacttcattggtgtatcacaccttccaaccattaagtttttcttaatagttcccactgccaaacttgaaccattcgaaaatcccgaatcgttgcccctatacgcacaaaacccccgccagctcatactgacgggggttg

SEQ ID NO: 29270 - DNA, 109 bp, Unknown
  Description of Unknown: RightRegion for integrase B3271 sequence
tccaccaaaaaagcactgtacttcgtaggaagtatggtgcttttctttttgctttcttagaggttgcatcgagaatcagccaaatgcctgattttgcaggcgcatggac

SEQ ID NO: 29271 - DNA, 260 bp, Unknown
  Description of Unknown: RightRegion for integrase B3272 sequence
aagagccctgacggctttaccattgagatatacccgcgcatcccaaaatccgaaaaatgaaaagagagggccgtttcggtcctctctttcatatagttatcctgtttagccatactcatagggactgcccacgatgtcacccaaaattgctcctaacatggctgtttcctcctttacctatgatgccgcttctggaaatcagcttcgatctgctctttccactctgcgccgacggatgccgggcagtctgcctgccgcat

SEQ ID NO: 29272 - DNA, 260 bp, Unknown
  Description of Unknown: RightRegion for integrase B3273 sequence
aagagccctgatggcttcaccattgaaatatacccgcgcatcccaaaatccgaaaaatgaaaagagagggccgtttcggtcctctctttcttatagttatcctgtttagccatactcatagggactgcccacgatgtcacccaagattgctcctaacataaaatgccctccgtttttgtggtgcaggtcgcaaggtaagcaccagcacatactgacattgcatctttgcggcacgcgattcaacgctgttgccagcgatt

SEQ ID NO: 29273 - DNA, 260 bp, Unknown
  Description of Unknown: RightRegion for integrase B3274 sequence
gaggttcggacgaacacctattttttcagcggcggtttcgccgtgacgtgttcgctctgatccgcaacagaaacgcgccgtcttgaaagtgattccgagacggcgcgtttttgctatctgcatatccaattcctgtcctttgctcttctaaaatgattgcagaaagcgaaaggcgaaactattgtactttcaaaaatccggattcaaaggcatttgggaaaagaaagcgcttatcgccttgctcaaagctgacggtcaca

SEQ ID NO: 29274 - DNA, 260 bp, Unknown
  Description of Unknown: RightRegion for integrase B3275 sequence
aaaagccctgatggtttcatcatagagatatacccgcgcatcccaaaatccgaaaaatgaaaagagaggaccgaaacggccctctctttcttatagttatcctgtttagccatactcattagaataaacaggataactatatcagcaggggtctccgggctcctgctttctttctgttctgccgccgtttcgtgcataatgccgcaaaaagcgtcattctcgaaaactttttgccacaaattgccagattttacttgaca

SEQ ID NO: 29275 - DNA, 260 bp, Unknown
  Description of Unknown: RightRegion for integrase B3276 sequence
ggaagaccagatgatcacgattctgaaaaatgttcagccgggctgccagatcattattgattcggcgaacgggctgaagaactactaaattttttgctctgaaagacaaaaccggcagcggaaagatccatgtcagaaaggatccctctgctgccggtttttctcatttggagatgctatgatgataggaaaagttgatacgtagattttcggtattccgcccgtaaaacaagaaaaacaccgtccccgcagctctcagg

SEQ ID NO: 29276 - DNA, 260 bp, Unknown
  Description of Unknown: RightRegion for integrase B3277 sequence
aagagccctgatggtttcaccattgagatatacccgcgcatcccaaaatccgaaaaatgaaaagagagggccgtttcggtcctctctttcttatagttatcctgtttagccatactcgtaggggctgcctaccatatcgcccaaaattgctcctaacataaaataccctccgtatctgtggtgtttcgtctttctgacaaaaggataccacaaaccggagggcaaaaggtcaacgggcagacgacaaatcacgcacccag

SEQ ID NO: 29277 - DNA, 260 bp, Unknown
  Description of Unknown: RightRegion for integrase B3278 sequence
aagagccctgatggcttcaccattgaaatatacccgcgcatcccaaaatccgaaaaatgaaaagagagggccgtttcggtcctctctttcttatagttatcctgtttagccatactcgttgtacgaaatcattataccgattctctgcccaatttgcaaaggtacttttgcacaagaaatctgcgggtcattctgcgcatattgcacgatgcaaactttgtggaaaatcacctttgaagccgtggagttgtttgtgttat

SEQ ID NO: 29278 - DNA, 260 bp, Unknown
  Description of Unknown: RightRegion for integrase B3279 sequence
tttatcacgatgataggtaatgtgttcgttttgttttgtccgtttccgggcctgaaatagaaataaattaagtctaatttgtgaacaaatagaacatcattagagacccattacaacaaaataagcggcgggctacccctattttcaggggaaagcccgccgctttaattatggattatttaacttgccggtaatttgccggtaaattgccagtcagttgtcttttccgatctgcttaataacctgatccgcgccggtcg

SEQ ID NO: 29279 - DNA, 109 bp, Unknown
  Description of Unknown: RightRegion for integrase B3280 sequence
aaaagtcctgatggtttcaccatcgagatatacccgcgcatcccaaaatccgaaaaatgaaaagagagggccgtttcggtcctctctttcttatagttatcctgtttag

SEQ ID NO: 29280 - DNA, 260 bp, Unknown
  Description of Unknown: RightRegion for integrase B3281 sequence
aaaagtcctgatggtttcaccatcgagatatacccgcgcatcccaaaatccgaaaaatgaaaagagagggccgtttcggtcctctctttcttatagttatcctgtttagctatactcatagggactgcccacgatgtcacccaagattgctcctaacatggctgtttcctcccttacttatgatgccgcttctggaaatcagcttcgatttgttctttccactctgcgccgatggacgcgcagcagggtgcttcccgcat

SEQ ID NO: 29281 - DNA, 260 bp, Unknown
  Description of Unknown: RightRegion for integrase B3282 sequence
aagagccctgatggcttcaccattgaaatatacccgcgcatcccaaaatccgaaaaatgaaaagagagggccgtttcggtcctctctttcttatagttatcctgtttagccatactcattaggacaaacaggataactatatcagcaggggcctccgggctcctgctttctttctgctctgctgcggtttctggcataatgccgcaaaaagcgtcattctcgaaaactttttgccacaaattgccagattttacttgaca

SEQ ID NO: 29282 - DNA, 260 bp, Unknown
  Description of Unknown: RightRegion for integrase B3283 sequence
aaaagtcctgatagtttcaccattgagatatacccgcgcatcccaaaatccgaaaaatgaaaagagagggccgcttcggtcctctctttcttatagttatcctgtttatccatactcatataatcacacccctctacaaattccgattcataaaatccccgtcagaagagccaccggtgctcaaagttccgtctggcctaaccgtcagtatcttggagagcgttcccgccgctcccagaaacaccacggaaaagcccgtg

SEQ ID NO: 29283 - DNA, 97 bp, Unknown
  Description of Unknown: RightRegion for integrase B3284 sequence
aagattttaatttccatggacaaaatgcacaaagtcaaacgacaccccggaaaaaggtaaaaaatccggcatttcagcaaaaatttatctgctgtgt

SEQ ID NO: 29284 - DNA, 260 bp, Unknown
  Description of Unknown: RightRegion for integrase B3285 sequence
aagagccctgatggtttcaccattgagatatacccgcgcatcccaaaatccgaaaaatgaaaagagagggccgtttcggtcctctctttcttatagttatcctgtttagccatactcatagggactgcccacgatgtcacccaagattgctcctaacatggctgtttcctcccttacctatgatgccgcttctgaaaatcagcttcgatttgttctttccactctgcgccgacggacgcgcagcagggtgcttcccgcat

SEQ ID NO: 29285 - DNA, 196 bp, Unknown
  Description of Unknown: RightRegion for integrase B3286 sequence
aaaagccctgatggtttcatcatagagatatacccgcgcatcccaaaatccgaaaaatgaaaagagaggaccgaaacggccctctctttcttatagttatcctgtttagccatactcatagggactgcccacgatgtcacccaagattgctcctaacatggctgtttcctcccttacctatgatgccgcttctgga

SEQ ID NO: 29286 - DNA, 260 bp, Unknown
  Description of Unknown: RightRegion for integrase B3287 sequence
aagagccctgatggcttcaccattgaaatatacccgcgcatcccaaaatccgaaaaatgaaaagagagggccgtttcggtcctctctttcttatagttatcctgttcagccatactcatagggactgcccacgatgtcacccaagattgctcctaacatggctgtttcctcccttacctatgatgccgcttctggaaatcagcttcgatttgttctttccactctgcgccgatggacgcgcagcagggtgcttcccgcat

SEQ ID NO: 29287 - DNA, 260 bp, Unknown
  Description of Unknown: RightRegion for integrase B3288 sequence
cggcggatttgccgtcagatgtgttctctgatacaaaaacagaacgccgtttcagtgtaaaagctgaagcggcgtttttctgtctttaaaagattttttatccacatattcgatttttgggtaagctccgtttataatgaaatcatcaaaatgaaacggaggtagcagaatgagaaatccgagatatcacttatatttatcacccgatgaacggcgtacagtcatcaacagccttattgatttgagaaatgatctcatct

SEQ ID NO: 29288 - DNA, 260 bp, Unknown
  Description of Unknown: RightRegion for integrase B3289 sequence
aagagtcctgacggctttaccattgagatatacccgcgcatcccaaaatccgaaaaatgaaaagagagggccgtttcggtcctctctttcttatagttatcctgtttagccatactcatagggactgcccacgatgtcacccaagattgctcctaacatggctgtttcctcccttacctatgatgccgcttctggaaatcagcttcgatttgttctttccactctgcgccgatggacgcgcagcagggtgcttcccgcat

SEQ ID NO: 29289 - DNA, 260 bp, Unknown; identical to SEQ ID NO: 29287
  Description of Unknown: RightRegion for integrase B3290 sequence

SEQ ID NO: 29290 - DNA, 260 bp, Unknown
  Description of Unknown: RightRegion for integrase B3291 sequence
aaaagtcctgatggtttcaccattgagatatacccgcgcatcccaaaatccgaaaaatgaaaagagagggccgtttcggtcctctctttcttatagttatcgtgtttagccatactcatagggactgcccacgatgtcacccaagattgctcctaacatggctgtttcctcccttacctatgatgccgcttctgaaaatcagcttcgatttgttctttccactctgcgccgatggacgcgcagcagggtgcttcccgcat

SEQ ID NO: 29291 - DNA, 260 bp, Unknown
  Description of Unknown: RightRegion for integrase B3292 sequence
aaaagtcctgatggtttcaccattgagatatacccgcgcatcccaaaatccgaaaaatgaaaagagagggccgtttcggtcctctctttcttatagttatcctgtttagccatactcatagggactgcccacgatgtcacccaagattgctcctaacatggctgtttcctcccttacctatgatgccgcttctggaaatcagcttcgatttgttctttccactctgcgccgatggacgcgcagcagggtgcctcccgcat

SEQ ID NO: 29292 - DNA, 260 bp, Unknown
  Description of Unknown: RightRegion for integrase B3293 sequence
aagagccctgatggcttcaccattgaaatatacccgcgcatcccaaaatccgagaaatgaaaagagagggccgtttcggtcctctctttcttatagttatcctgtttagccatactctatttgaacaacgacaatgaaaccgttctgcgcaaggtcatccgggaacacgatttgactttcacgccgctcttcaccgcaaagccccatgtgttcgtcagtgcatctagcccgttggcgcagaaaaaggctttgacactgga

SEQ ID NO: 29293 - DNA, 260 bp, Unknown
  Description of Unknown: RightRegion for integrase B3294 sequence
aaaagtcctgatggtttcaccattgagatatacccacgcatcccaaaatccgaaaaatgaaaagagagggccgtttcggtcctctctttcttatagttatcctgtttagccatactcatagggactgcccaagatgtcacccaaaattgctcctaacatggctgtttcctcctttacctatgatgccgcttctggaaatcagcttcgatctgctctttccactccgcaccgatagacgcgcagcagtgtgcctcccgcat

SEQ ID NO: 29294 - DNA, 260 bp, Unknown
  Description of Unknown: RightRegion for integrase B3295 sequence
ggttcagcttttgcgccgtcaagcgcactggatgatgatccgaaacttaaggaaacttgagtttcggatttttttgttggaaaaatcttgacattataccaggtataagccttatgcttactgtgtaaataaagaatatttccctaagccataggggtaaggaggagtgtatatgtcacgaaccatcaaagaagcagaggaactgacaaaggtgaccagtcagaatatccggtattatgaaaagcaggggctgctggctc

SEQ ID NO: 29295 - DNA, 260 bp, Unknown
  Description of Unknown: RightRegion for integrase B3296 sequence
aagagccctgatggcttcaccattgaaatatacccgcgcatcccaaaatccgaaaaatgaaaagagagggccgtttcggtcctctctttcttatagttatcctgtttagccatactcgtataattttcggatttcacagtttcggtcatgtcaggccgattcatattcataggcagacctccgtttccttgtaaccgggtgccggggcagaaagtgccagctttctgccccaaacgttcccgatgagttcagatttccga

SEQ ID NO: 29296 - DNA, 260 bp, Unknown
  Description of Unknown: RightRegion for integrase B3297 sequence
ccggcaccaagaattcttataacacagagtttgctttgcttttgtgttccaagaaaataaaacgtgcaaagagccgggggattccccggctctccgtttcaatgctccactatacagtcatagtaggtagccagcttattctcaacggcgtcgtcgtcattgaggaaagcctcggcgaggcacgcgaagaagtccgcgttgtctacgccgaatttttttgcgacgctgccgtaatcggaatacagcatgttcatcgtcgc

SEQ ID NO: 29297 - DNA, 260 bp, Unknown
  Description of Unknown: RightRegion for integrase B3298 sequence
aagagccctgatggtttcaccattgagatatacccgcgcatcccaaaatccgaaaaatgaaaagagagggccgtttcggtcctctctttcttatagttatcctgtttagccatactcatagggactgcccacgatgtcacccaagattgctcctaacatggctgtttcctcccttacctatgatgccgcttctggaaatcagcttcgatctgctctttccactctgcgccgatggacgcgcagcagggtgcttcccgcat

SEQ ID NO: 29298 - DNA, 260 bp, Unknown
  Description of Unknown: RightRegion for integrase B3299 sequence
aagagccctgatggcttcatcattgaaatatacccgcgcatcccaaaatccgaaaaatgaaaagagagggccgtttcggtcctctctttcttatagttatcctgtttagccatactcatagggactgcccacgatgtcacccaagattgctcctaacatggctgtttccgcccttacctatgatgccgcttctggaaatcagctttgatctgctctttccactctgcaccgatggacgcgcagcagggtgcttcccgcat

SEQ ID NO: 29299 - DNA, 260 bp, Unknown
  Description of Unknown: RightRegion for integrase B3300 sequence
aagagccctgatggcttcacaattgaaatatacccgcgcatcccaaaatccgaaaaatgaaaagagagggccgtttcggtcctctctttcttatagttatcctgtttagctatactcatagggactgcccacgatgtcacccaagattgctcctaacatggctgtttcctcccttacctatgatgccgcttctggaaatcagcttcgatttcctctttccactctgcgccgatggtgtcctgctccagcccgcccatgga

SEQ ID NO: 29300 - DNA, 260 bp, Unknown
  Description of Unknown: RightRegion for integrase B3301 sequence
aataacgctcccgacgattttgagattacgctatatccgaaaataccgaaatctgattaacggtcccggcggaggctttacggcttccgccgttttctcattgataacctgttgggttagacgaatacgctccaataggttatcaatgatattccgtgccgctgtttgcgtcctttgtcttttgcgccgactctcggcgttgtaattcggctctgcaggtccgctcgtcgtagtcgagcaaaacgctctcgtagtcgtcc

SEQ ID NO: 29301 - DNA, 260 bp, Unknown
  Description of Unknown: RightRegion for integrase B3302 sequence
aaaagtcctgatggtttcaccattgagatatacccgcgcatcccaaaatccgaaaaatgaaaagagagggccgtttcggtcccctctttcttatagttatcctgtttagccatactcatagggactgcccacgatgtcacccaaaattgctcctaacatggctgtttcctcccttacctatgatgccgcttctggaaatcagcttcgatctgttctttccactctgcgccgatggacgcgcagcagggtgcttcccgcat

SEQ ID NO: 29302 - DNA, 239 bp, Unknown
  Description of Unknown: RightRegion for integrase B3303 sequence
aataatgctcccgacgattttgagattacgctatatccgaaaataccgaaatcttattaacggtcccggcggaggctttacggcttccgccgttttctcattgataacctgttgggttagaagaactatctcacttggaaatggtcggaaccatcgtatatcagttgacacgtgaccttgactctgagcttgtaaaggacagcggattcccgggcatgaaggtactggaatttgccttt

SEQ ID NO: 29303 - DNA, 109 bp, Unknown
  Description of Unknown: RightRegion for integrase B3304 sequence
catcggtcaaccagactaaagccatctgaggaagctcaggtggcttttctgtttgtatgattccgcgcggaaaaactattataatagagcgaacccggaaagtccgcag

SEQ ID NO: 29304 - DNA, 109 bp, Unknown; identical to SEQ ID NO: 29303
  Description of Unknown: RightRegion for integrase B3305 sequence

SEQ ID NO: 29305 - DNA, 260 bp, Unknown
  Description of Unknown: RightRegion for integrase B3306 sequence
aaaagtcctgatggtttcaccatcgagatatacccgcgcatcccaaaatccgaaaaatgaaaagagagggccgtttcggtcctctctttcttatagttatcctgtttagccatactcgtcaaagctggcgataaagtcggccctgtcatcggagaacatccccgtcaggcggttcaggatggtgggaaagttcgtcatcagcaccggcacatcccggtcaagcagggcgttggcgatacaaccggcgaaaaaggacttgc

SEQ ID NO: 29306 - DNA, 260 bp, Unknown
  Description of Unknown: RightRegion for integrase B3307 sequence
ggcgtaccattagtttttatcaccgcattcgggatgctcaagattcaggtgcggcgatgacaataggcccttcccattttggggagggcctattgctttactttttgtacatcccttgcaggaccccgacttcttctgcgtcgccgattgcccgcttgtggaggtattcgtagagggccttcatcccttcgggcggctcccctttttgtcgtttgtacgcctcgatgtgccgcacgacatccttgtgcaggaggttcata

SEQ ID NO: 29307 - DNA, 260 bp, Unknown
  Description of Unknown: RightRegion for integrase B3308 sequence
aagagcccggatggcttcaccattgaaatatacccgcgcatcccaaaatccgaaaaatgaaaagagagggccgtttcggtcctctctttcttatagttatcctgtttagccatactcgtaggggctgcctaccatatcgcccaaaattgctcctaacataaaataccctccgtatctgtggtgtttcgtctttctgacaaaaggataccacaaaccggagggcaaaaggtcaacgggcagacgacaaatcacgcacccag

SEQ ID NO: 29308 - DNA, 260 bp, Unknown
  Description of Unknown: RightRegion for integrase B3309 sequence
aaaagtcctgatggtttcaccattgagatatatccgcgcatcccaaaatccgaaaaatgaaaagagagggccgtttcggtcctctctttcttatagttatcctgtttagccatactcatagggactgcccacgatgtcacccaagattgctcctaacatggctgtttcctcccttacctatgatgccgcttctgaaaatcagcttcgatttgttctttccactctgcgccgatggacgcgcagcagggcgcttcccgcat

SEQ ID NO: 29309 - DNA, 260 bp, Unknown
  Description of Unknown: RightRegion for integrase B3310 sequence
aaaagtcctgatggtttcaccattgagatatacccgcgcattccaaaatccgaaaaatgaaaagagagggccgtttcggtcctctctttcttatagttatcctgtttagccatactcaatcactctgcctactgatagaaactatctttgggcacagaagaatccggacattgttaagcttgttggaaatagtggttgctctcttgttgccgtgttgaataccgctaatatctatgggcctcgtgaattcacccctaacg

SEQ ID NO: 29310 - DNA, 260 bp, Unknown
  Description of Unknown: RightRegion for integrase B3311 sequence
aagagccctgacggctttaccattgagatatacccgcgcatcccaaaatccgaaaaatgaaaagagagggccgtttcggtcctctctttcttatagttatcctgtttagccatactcgatgatcttgctaatgataggatcaatgtcctcacaagtcggattcacaatccaaatatcatcgttctggtagatgcggttctcgatttgaatatcgcgaggcttgacaccatactctaagcagaaaagcgcatcatagatga

SEQ ID NO: 29311 - DNA, 260 bp, Unknown
  Description of Unknown: RightRegion for integrase B3312 sequence
acaataaaagtaaacctaataggtatcaatccaagcaatactatagcttcagataaataggaactttaatacatttatctgaagctatttctatgtcagataaggtcgcagttttatccaaacgtcctgcatctataaaaagtatctataatatagatttaaaaatatcagaaactagaactcctataatatcaagaagtgctgaaaattttaaagactattttaatatcttgtggaaggagattgattctagtgaaaca

SEQ ID NO: 29312 - DNA, 260 bp, Unknown
  Description of Unknown: RightRegion for integrase B3313 sequence
aaaagtcctgatggtttcaccattgagatatacccgcgcatcccaaaatccgaaaaatgaaaagagagggccgtttcggtcctctctttcttatagttatcatgtttagccatactcgttcagataccgggcaatctgattgaggttgccgccgatcctgccgtactcggctgtcagcttcccgacagcggaaagcaactcgtcattgaccgacgacacatggacaaccgggcgtatggtcgcccgccgtatcgcctgcc

SEQ ID NO: 29313 - DNA, 161 bp, Unknown
  Description of Unknown: RightRegion for integrase B3314 sequence
aagagccctgatggcttcaccattgaaatatacccgcgcatcccaaaatccgaaaaatgaaaagagagggccgtttcggtcctctctttcttatagttatcctgtttagccatactcatagggactgcccacgatgtcacccaagattgctcctaacatgg

SEQ ID NO: 29314 - DNA, 260 bp, Unknown
  Description of Unknown: RightRegion for integrase B3315 sequence
aaaagtcctgatggtttcaccattgagatatacccgcgcatcccaaaatccgaaaaatgaaaagagagggccgtttcggtcctctctttcttatagttatcctgtttagccatactcatagggactgcccacgatgtcacccaagattgctcctaacatggctgtttcctcccttacctatgatgccgcttctgaaaatcagcttcgatttgttctttccactctgcgccgatggacgcgcagcagggtgcttcccgcat

SEQ ID NO: 29315 - DNA, 109 bp, Unknown
  Description of Unknown: RightRegion for integrase B3316 sequence
cgctggggtcacccggataacttctcactgaagatctatccgcgtgtcacccctgcgtgaccaacctctaaaattcattgattttccatggaatttcatcatctctacc

SEQ ID NO: 29316 - DNA, 260 bp, Unknown
  Description of Unknown: RightRegion for integrase B3317 sequence
aagagccctgatggcttcaccattgaaatatacccgcgcatcccaaaatccgaaaaatgaaaagagagggccgtttcggtcctctctttcttatagttatcctgtttagccatactcatagggactgcccacgatgtcacccaagattgctcctaacatggctgtttcctcccttacctatgatgccgcttctggaaatcagcttcgatttgttctttccactctgcgccgatggacgcgtagcagggtgcctcccgcat

SEQ ID NO: 29317 - DNA, 170 bp, Unknown
  Description of Unknown: RightRegion for integrase B3318 sequence
aaaagtcctgatggtttcaccattgagatatacccgcgcatcccaaaatccgaaaaatgaaaagagagggccgtttcggtcctctctttcttatagttatcctgtttagccatactcatagggactgcccacgatgtcacccaagattgctcctaacatggctgtttcct

SEQ ID NO: 29318 - DNA, 169 bp, Unknown
  Description of Unknown: RightRegion for integrase B3319 sequence
aagagccctgatggcttcaccattgaaatatacccgcgcatcccaaaatccgaaaaatgaaaagagagggccgtttcggccctctctttcttatagttatcctgtttagccatactaacacgtcaaccttactgcaagcctacactcagcctacaattttgtaggaatc

SEQ ID NO: 29319 - DNA, 260 bp, Unknown
  Description of Unknown: RightRegion for integrase B3320 sequence
aaaagtcctgatggtttcacaatcgagatatacccgcgcatcccaaaatccgaaaaatgaaaagagagggccgtttcggtcctctctttcttatagttatcctgtttagccatactcaatagatgttactaattatagagttgcggaagagagtgaaatcggattggagagtaagacgccgactgttgaaatagtatcgaagtaaataaccgcattatttaatacgaaatcacagtggtaggttccagtttgacagataa

SEQ ID NO: 29320 - DNA, 186 bp, Unknown
  Description of Unknown: RightRegion for integrase B3321 sequence
aaaagtcctgatggtttcaccattgagatatacccgcgcatcccaaaatccgaaaaatgaaaagagagggccgtttcggtcctctctttcttatagttatcctgtttagccatactcattaggataaacaggataactatatcagcaggggcctccgggctcctgctttctttctgttctgccgcc

SEQ ID NO: 29321 - DNA, 260 bp, Unknown
  Description of Unknown: RightRegion for integrase B3322 sequence
aagagccctgatggcttcaccattgagatatacccgcgcatcccaaaatccgaaaaatgaaaagagagggccgtttcggccctctctttcttatagttatcctgtttagccatactcatagggactgcccacgatgtcacccaagattgctcctaacatggctgtttcctcccttacctatgatgccgcttctggaaatcagcttcgatttgttctttccactctgcgccgatggacgcgcagcagggtgcttcccgcat

SEQ ID NO: 29322 - DNA, 260 bp, Unknown
  Description of Unknown: RightRegion for integrase B3323 sequence
aaaagccctgatggtttcatcatagagatatacccgcgcatcccaaaatccgaaaaatgaaaagagagggccgtttcggtcctctctttcttatagttatcctgtttagccatactcatagggactgcccacgatgtcacccaagattgctcctaacatggctgtttcctcccttacccgtgatgccgcttctggaaatcagcttcgatttgttctttccactctgcgccgatggacgcgcagcagggtgcctctcgcat

SEQ ID NO: 29323 - DNA, 260 bp, Unknown
  Description of Unknown: RightRegion for integrase B3324 sequence
cgatggagcggaaatccagataattttgaagttgttctcttcccaaagttaccgaaatagcgttactttttattactgatattgtgcgtgtgcctaagaattagcatgcgcatgatatcagttatataatcgaataaaagcagcggtagggaagtgctcccactatgccgctgctttttcttattgtttaactaaattttcttcgtgtagtctaaacagatccaacccgctttcgattttagaaacccccatttattaca

SEQ ID NO: 29324 - DNA, 260 bp, Unknown
  Description of Unknown: RightRegion for integrase B3325 sequence
aaaagtcccgatggtttcacaattgagatatatccgcgcatcccaaaatccgaaaaatgaaaagagagggccgtttcggtcctctctttcttatagttatcctgtttagccatactcatagggactgcccacgatgtcacccaaaattgctcctaacatggctgtttcctcctttacctatgatgccgcttctggaaatcagcttcgatctgctctttccactccgcaccgatagacgcgcagcagggtgcctcccgcat

SEQ ID NO: 29325 - DNA, 260 bp, Unknown
  Description of Unknown: RightRegion for integrase B3326 sequence
aagagccctgacggctttaccattgagatatacccgcgcatcccaaaatccgaaaaatgaaaagagagggccgtttcggtcctctctttcttatagttatcctgtttagccatactctataagaatttgcaatacattttagatgaaaaagtgagacactatatccagagaggcttttaggtcgatacatatgaatagtggtggttatcacggtgataaccaccaccatcaccccgtaacgatcagtgccatcagataaa

SEQ ID NO: 29326 - DNA, 260 bp, Unknown
  Description of Unknown: RightRegion for integrase B3327 sequence
aaaagtcctgatggtttcaccattgagatatacccgcgcatcccaaaatccgaaaaatgaaaagagagggccgtttcggtcctctctttcttatagttatcctgtttagccatactcgtaggggctgcctaccatatcacccaaaattgctcccaacatggtcgtttcctcctttactgctgatgccgcttctggaagtcggcttcgatctcctctttccactctgcgccgatggacgccggacagtctgcctgccgcat

SEQ ID NO: 29327 - DNA, 260 bp, Unknown
  Description of Unknown: RightRegion for integrase B3328 sequence
aagagccctgatggcttcaccattgaaatatacccgcgcatcccaaaatccgaaaaatgaaaagagagggccgtttcggccctctctttcttatagttatcctgtttagccatactccttcgtgtttccgaagatgaaaaaataaaagaactccccgccatgcagctgcacagcggggagaaagagggaggaaaatttcagattcagagggccgaatagccgaagctgttcaccagcgcgtcgatgggctggccagcctt

SEQ ID NO: 29328 - DNA, 260 bp, Unknown
  Description of Unknown: RightRegion for integrase B3329 sequence
catcggtcaaccagactaaagccatctgaggaagctcaggtggcttttctgtttgtatgattccgcgcggaaaaactattataatagagcgaacccggaaagtccgcaggactttccgggttcgccttttcacgggaaatataaatttacagaatagtaatgcggcctgcgccgtaaggctgctcatagttgagcaggtagccggggtaagctgtcagcgggctgttggcgctggacaggtgcggcagacccgcagcatc

SEQ ID NO: 29329 - DNA, 260 bp, Unknown
  Description of Unknown: RightRegion for integrase B3330 sequence
aagagccctgacggctttaccattgagatatacccgcgcatcccaaaatccgaaaaatgaaaagagagggccgtttcggtcctctctttcttatagttatcctgtttagccatactcgtaagtagcgcccacttcattgaaataccgtacatcatcatggaatgagtatttgttgaacagaaccataccatgcgccaacaatccccaaaaagtagcactgcacagtactgtttttaacaggctctcatttacctttagct

SEQ ID NO: 29330 - DNA, 260 bp, Unknown
  Description of Unknown: RightRegion for integrase B3331 sequence
cacacaacgcattgccacttaaaacctcaccaatggagaaaatttaatcaggaagtttaagtgtctggccgggatagatggtgttgctggtcaggttgttcagggtcttaatctccgtccagcggctaccgttacccagattggcctttgcaatgctccacagagagtcacccttcttgaccttgtaggtcacataggacggctcctgcacggtgtcagtggcaaccacagtaccaccgctctccgtggtaatgtatgcg

SEQ ID NO: 29331 - DNA, 260 bp, Unknown
  Description of Unknown: RightRegion for integrase B3332 sequence
tttatgtatgaatataagataaagagacagtatataaacttccctctaacaaatagttaatgattagttacctctacaaaaagtaaaatgattgttatttatttcattaattgaacagttaaaattattaatgtataattagctcaaagggagggatttataaatgaaaaaatttctaaagtggttttgtttgtttatgtgtataagtggtgcaataacgataccaattcaaatttcacagggaaatggatcaactgata

SEQ ID NO: 29332 - DNA, 237 bp, Unknown
  Description of Unknown: RightRegion for integrase B3333 sequence
aagagccctgatggcttcaccattgaaatatacccgcgcatcccaaaatccgaaaaatgaaaagagagggccgtttcggtcctctctttcttatagttatcctgtttagctatactcatagggactgcccacgatgtcacccaagattgctcctaacatggctgtttcctcccttacctatgatcgctttcgttggcaaaaggataccacaaaccggagggcaaaaggtcaacgggc

SEQ ID NO: 29333 - DNA, 109 bp, Unknown
  Description of Unknown: RightRegion for integrase B3334 sequence
catcggtcaaccagactaaagccatctgaggaagctcaggtggcttttctgtttgtatgattccgcgcggaaaaactattatagatagagtgaacccggaaagtccgca

SEQ ID NO: 29334 - DNA, 260 bp, Unknown
  Description of Unknown: RightRegion for integrase B3335 sequence
aaaagtcctgatggtttcaccattgagatatacccgcgcatcccaaaatccgaaaaatgaaaagagagggccgtttcggtcctctctttcttatagttatcctgtttagccatactcatagggactgcccacgatgtcacccaggattgctcctaacatggctgtttcctcccttacctatgatgccgcttctggaaatcagcttcgatttgttctttccactctgcgccgatggacgcgcagcagggtgcttcccgcat

SEQ ID NO: 29335 - DNA, 260 bp, Unknown
  Description of Unknown: RightRegion for integrase B3336 sequence
gcccctttgaatgcccctatccgatctgaacaaatgcatgtcattgtttggattgggtagggtcaatttatgcctgaactttttgcactgcaaggaggtcagaatttcctatagttcttgccttgagtcatctgcaaaataaagacaggacaaaatcaaaatacaaaacatgtaatcggccggattcgaacccctgatatgtcagcaaaccgctccccctcacttgctgttcatgaatgcctcttccacccgacagggta

SEQ ID NO: 29336 - DNA, 109 bp, Unknown
  Description of Unknown: RightRegion for integrase B3337 sequence
catcggtcaaccagactaaagccatctgaggaagttcaggtggcttttctgtttgtatgattccgcgcggaaaaaatattatagatagagcgaacccggaaagtccgca

SEQ ID NO: 29337 - DNA, 170 bp, Unknown; identical to SEQ ID NO: 29317
  Description of Unknown: RightRegion for integrase B3338 sequence

SEQ ID NO: 29338 - DNA, 260 bp, Unknown
  Description of Unknown: RightRegion for integrase B3339 sequence
aaaagccctgatggtttcaccattgagatatacccgcgcatcccaaaatccgaaaaatgaaaagagagggccatttcggtcctctctttcttatagttatcgtgtttagccatactcatagggactgcccacgatgtcacccaagattgctcctaacatggctgtttcctcccttacctatgatgccgcttctggaaatcagcttcgatttgttctttccactctgcgccgatggacgcgcagcagggtgcttcccgcat

SEQ ID NO: 29339 - DNA, 260 bp, Unknown
  Description of Unknown: RightRegion for integrase B3340 sequence
tgcttccgtcttctcaatggactggaggtcacagaaaaaatagaaaggacacggagataatgggaaaacgaaagcagcccttcggctataaaatgaagctcggcgagatcgtgccgcagccgcaggaggcggaaacggtgcggagcatctacctgcaataccttgctggtgtctccttcaagcagcttgccgaacagcttcagacagaggatgttccctacgatgaggacaagtcctggaacaaaaatatggtggcgcga

SEQ ID NO: 29340 - DNA, 260 bp, Unknown
  Description of Unknown: RightRegion for integrase B3341 sequence
catcggtcaaccagactaaagccatctgaggaagctcaggtggcttttctgtttgtatgattccgcgcggaaaaactattatagatagagcgaacccggaaagtccgcaggactttccgggttcgccttttcacgggaaatataaatttacagaatggtgatgcggcctgcgccgtagggctgctcgtagttgagcaggtagccggggtatgcggccagcgggctgttggcgctggacaggtgcggcagacccgcagcat

SEQ ID NO: 29341 - DNA, 260 bp, Unknown
  Description of Unknown: RightRegion for integrase B3342 sequence
aaaagtcctgacggtttcaccattgagatatacccacgcatcccaaaatccgaaaaatgaaaagagagggccatttcggtcctctctttcttatagttatcctgtttagccatactcatagggactgcccacgatgtcacccaaaattgctcctaacatggctgttttctcctttacctatgatgccgcttctggaaatcagcttcgatttgttctttccactctgcgccgatagacgcgcagcagggtgcttcccgcat

SEQ ID NO: 29342 - DNA, 260 bp, Unknown
  Description of Unknown: RightRegion for integrase B3343 sequence
aagagccctgatggcttcaccattgagatatacccgcgcatcccaaaatccgaaaaatgaaaagagagggccgtttcggccctctctttcttatagttatcctgtttagccatactcgtcaaacttgcatcactatatgtggaacccaaagttgtaatcgaatagtcccatgcatttgtgactttgttattcgtcactgtcatataaaaatatgcatgaatcaccactcccttatacgaaaccttccaagaattcgacga

SEQ ID NO: 29343 - DNA, 237 bp, Unknown
  Description of Unknown: RightRegion for integrase B3344 sequence
aagagccctgatggcttcatcattgaaatatacccgcgcatcccaaaatccgaaaaatgaaaagagagggccgtttcggtcctctctttcttatagttatcctgttcagccatactcatagggactgcccacaatgtcacccaagattgctcctaacatggctgtttcctcccttacctatgatcgctttcgttggcaaaaggataccacaaaccggagggcaaaaggtcaacgggc

SEQ ID NO: 29344 - DNA, 260 bp, Unknown
  Description of Unknown: RightRegion for integrase B3345 sequence
acaataaaggtaaacctaataggtatcaattcaagtaatactatagcttcaggtaaataggaactttaatacatttatctgaatctatttctatgtcagataaggttgcagttttatccaaacgccctgcatctataaaaaacatctataacataaatttaaaaatatcagaaactagaactcctataatatcaagaagtgctgaaaattttaaagactattttaatatcttgtggaaggagattgattctagtgaaaca

SEQ ID NO: 29345 - DNA, 260 bp, Unknown
  Description of Unknown: RightRegion for integrase B3346 sequence
aaaagtcctgatggtttcaccattgagatatatccgcgcatcccaaaatccgaaaaatgaaaagagagggccgtttcggtcctctctttcttatagttatcctgtttagccatactcataagtgcgtcccagaatatccttttcgctgccatgttcaatcattttgatgttcgtaaacaggtcaacgacttcgcccaaccgacgtttatccagttccggacgcgcaaaattctttggcagaatatcttttaggcgcgcgt

SEQ ID NO: 29346 - DNA, 144 bp, Unknown
  Description of Unknown: RightRegion for integrase B3347 sequence
aagagccctgatggcttcaccattgaaatatacccgcgcatcccaaaatccaaaaaatgaaaagagagggccgtttcggtcctctctttcttatagttatcctgtttagccatactcattaaagctggcgataacgtcgggcct

SEQ ID NO: 29347 - DNA, 260 bp, Unknown
  Description of Unknown: RightRegion for integrase B3348 sequence
aataacgctcccgacgattttgagattacactatatccgaaaataccgaaatctgattaacggtcccggcggaggctttacggcttccgccgttttctcattgataacctgttgggttagacgagctcgggcattttgagatgattggagctatggtttatcagcttacgcgtaatctttcgattgaagagataaaaaagtccggattcgataaatattttgtcgaccatacaaccggaatctatcctatagcggcaagc

SEQ ID NO: 29348 - DNA, 260 bp, Unknown; identical to SEQ ID NO: 29314
  Description of Unknown: RightRegion for integrase B3349 sequence

SEQ ID NO: 29349 - DNA, 260 bp, Unknown
  Description of Unknown: RightRegion for integrase B3350 sequence
aagagccctgatggcttcaccattgaaatatacccgcgcatcccaaaatccgaaaaatgaaaagagagggccgtttcggtcctctctttcttatagttatcctgtttagccatactcatttcacaaaatccacaacaagtttagtgttgagaaaacccaatgtatactttactatttctgctttttgagcaaataatccatttgcgccagaatcaaagattgctccctgtggcgaataccgaaatcctgtttggctagat

SEQ ID NO: 29350 - DNA, 80 bp, Unknown
  Description of Unknown: RightRegion for integrase B3351 sequence
gtttctacattatttgtagaagccgggagttcggatacggggccgaatggtccaccataggaaaaccctcgcccaaaggc

SEQ ID NO: 29351 - DNA, 105 bp, Unknown
  Description of Unknown: RightRegion for integrase B3352 sequence
atcatagatcatggtgaaagaaaaggcggaaccccgatccttgaagtgtttctaaaataagggcattttattttgccattagttagtagcatggaagttcgactt

SEQ ID NO: 29352 - DNA, 260 bp, Unknown
  Description of Unknown: RightRegion for integrase B3353 sequence
aaaagtcctgatggtttcaccattgagatatacccgcgcatcccaaaatccgaaaaatgaaaagagagggccatttcggtcctctctttcttatagttatcctgtttagccatactcatagggactgcccacgatgtcacccaagattgctcctaacatggctgtttcctcccttacctatgatgccgcttctggaaatcagcttcgatctgctctttccactccgcaccgatggacgcgcagcagggtgcctcccgcat

SEQ ID NO: 29353 - DNA, 260 bp, Unknown
  Description of Unknown: RightRegion for integrase B3354 sequence
aagagccctgatggcttcaccattgaaatatacccgcgcatcccaaaatccgaaaaatgaaaagagagggccgtttcggtcctctctttcttatagttatcctgtttagccatactcaaacggactgccgaccatatcgcccaaaatggctcctaacataaaataccctccgtttttgtggtgcaggtcgcaaggtaagcaccagcacatactgacattgcatctttgcgacacgcgattcaacgctgttgccagcgatt

SEQ ID NO: 29354 - DNA, 260 bp, Unknown
  Description of Unknown: RightRegion for integrase B3355 sequence
aagagcccggatggcttcaccattgaaatatacccgcgcatcccaaaatccgaaaaatgaaaagagagggccgtttcggtcctctctttcttatagttatcctgtttagccatactcataagacaggccatcctcaaacgctttgttgtagatcgtgtgtatcttgccggtacacgcttccacgcgagatttgcagagttttttccctgccagcgcattgataaaggaagacttgcctgcgctcatggtagctgtcacca

SEQ ID NO: 29355 - DNA, 260 bp, Unknown
  Description of Unknown: RightRegion for integrase B3356 sequence
ggccgctggcatgccgcgccggatgatttcgagattacgatattcccccggctgtcctaaaaaattctctatgataacctcggtgtaccgaagaaatggcgcactgggaaatgattggctccatgatccttcaatgcatgaaaaacgccagtattgaagaaataaaggccgcggggctagccgggtattataccatgcatgatcacggcgtatacccagcggatcccaatggggtccccttcacggcgtcctatatccaa

SEQ ID NO: 29356 - DNA, 260 bp, Unknown
  Description of Unknown: RightRegion for integrase B3357 sequence
aagagccctgatggcttcaccattgaaatatacccgcgcatcccaaaatccgaaaaatgaaaagagagggccgtttcggtcctctctttcttatagttatcctgtttagccatactcatagggactgcccacgatgtcacccaagattgctcctaacatggctgtttcctcccttacctatgatgccgcttctggaaatcagcttcgatttgttctttccactctgcgccgatggacgcgcagcagggtgcttcccgcat

SEQ ID NO: 29357 - DNA, 260 bp, Unknown
  Description of Unknown: RightRegion for integrase B3358 sequence
gaggtccaccaaacaggcattggacgaacacatatttcttcagcggcggcttcgccgtgaagtgttcgctctgatccacaacaggaaagcgccgtcttggaagtgattccgagacggcgctttttatgatgtgaaggctcaaatggcgtgactattccttttttagagtagcacttcgtactttacagattaaatggttcgccaaaactaaaagctgaaacgctcgatcttccgtatcttcccaatcactatcatgtgct

SEQ ID NO: 29358 - DNA, 260 bp, Unknown
  Description of Unknown: RightRegion for integrase B3359 sequence
aaaagtcctgatggtttcaccattgagatatacccgcgcatcccaaaatccgaaaaatgaaaagagagggccgtttcggtcctctctttcttatagttatcctgtttagccatactcatagggactgcccacgatgtcacccaagattgctcctaacatggctgtttcctcccttacctatgatgccgcttctggaaatcggcttcgatttgttctttccactctgcgccgatggacgcgcagcagggtgcttcccgcat

SEQ ID NO: 29359 - DNA, 260 bp, Unknown
  Description of Unknown: RightRegion for integrase B3360 sequence
aaaagtcctgatggtttcaccattgagatatacccgcgcatcccaaaatccgaaaaatgaaaagagagggccgtttcggtcctctctttcttatagttatcctgtttagccatactcattaaagctggcgataaagtcggccctatcctcggagaacatccctgtcaggcggttcaggatggtgggaaagttcgtcatcagcacaggcacatcccggtcaagcagggcgttggcgatgcaaccggcgaaaaaggacttgc

SEQ ID NO: 29360 - DNA, 260 bp, Unknown
  Description of Unknown: RightRegion for integrase B3361 sequence
gagattatcgtcttgcgttatggtttctggctggccctcgatttgaccgttcaggtttgacctgggcggtcttttcgtttagggcggccgaggctcctcagcaaggctcttccagtcgattctcttcccgcaatcggggcagaacgaaaagcgagtcaaatctgtgctgcgccgccgatcggcgtactgcttaagcgtaaacaccttcgcatagaggctctcgcagctacaaagcgtggggtcgtcccgcaaactgcggt

SEQ ID NO: 29361 - DNA, 260 bp, Unknown
  Description of Unknown: RightRegion for integrase B3362 sequence
aaatcctacaccaaatccggcagcgacatgcacgtcaccctctaccccctcgcggattgatggttatacatttatttggtacgcatgaatgaatcccatctaaatgtaggttctatagcaagcggaaatccctcctggtgacaggagggatttctttattttgcgatatgctcataatacgccatgagcttctgttccggccccggtccgtccttatcgagcagaaacgcctttgccagcgcggcgtagaactccgggcg

SEQ ID NO: 29362 - DNA, 260 bp, Unknown
  Description of Unknown: RightRegion for integrase B3363 sequence
gcagaaaagttcgttttagctctccacaaccgcaccaaagagcttcaagctttggcttgaggctctttttctttgtcttggcttttaagttgtttattgccctgccaaaagcagagagatgattaccgctccggtatcagtgaggaaaaaaggccatatgaaggtttaccacaagctgtcaggcgaatttccatatgcctgcgtttccctgtggccctgaatctggctctaaaccgtgttcccaataaagcaagataaaa

SEQ ID NO: 29363 - DNA, 260 bp, Unknown
  Description of Unknown: RightRegion for integrase B3364 sequence
cgctggggacgtccggataatttctcactgaagatctatccgcgcgtaccgccagcgtaaccgcggcatctgaaaagccttgatttctcaagggaaaatctcatttccaacgtgctgggactgattcctccgttccaatatccgtcagtgttgccatacactcccggtacggcatggtataacgttgtgccagataccgcatgctggcgctcagttcaccatcgggaccgcccaatggtatgtcagccaggtaatccggc

SEQ ID NO: 29364 - DNA, 109 bp, Unknown
  Description of Unknown: RightRegion for integrase B3365 sequence
gtagatccaggagacttcacaattggcatattaccgcgcttgcctaagagaggcagttaattttatgcccatgtatgatatcctttcgggtcacattcatatgtcatta

SEQ ID NO: 29365 - DNA, 260 bp, Unknown
  Description of Unknown: RightRegion for integrase B3366 sequence
aaatcctacagcaaagccggcagcgacatgcgcgtcaccctgtaccccctcacagattgattccccgccttccaagcaaaaatcaaagaacccgtgtaattgagatcctcaattacacgggtttcattcatgcgtaccggctaattgcctattttgcaatatgctcataatacgccatgagcttgcgctccggccccgggccgtccttgtcgagcaggaacgccttggccagcgacgcgtaaaactccgggcggttgagt

SEQ ID NO: 29366 - DNA, 260 bp, Unknown
  Description of Unknown: RightRegion for integrase B3367 sequence
tccggcgataactttgaattgaccttatacccaaaactcccgtattcctccgataaataaaaacgccgtcccgttcttccggggcggctttctaattcccaacgtccgcagtattatttgtcacactctccggaattgtaatgctcgtcaagccgttgcaatcgtagaatgcaccccagtcgatactcgtcacgctttttggaatcataatgctttgtaacccggtacagccggagaaagcattatcgccgatcatcgtc

SEQ ID NO: 29367 - DNA, 260 bp, Unknown
  Description of Unknown: RightRegion for integrase B3368 sequence
cggcaagaaatcgaaatctactttatcggcggttatacccaaaagattgaccttatatagagccattcactcatacacaaacgcccgcactggcaagtcgaaaacgcttgctgatgcgggtattactttttgggaaagtgagctattacacgatggatacaggatcacggatcaaactggtacgcgagcatcgcggccttacacaacaaaaattgggtgagatgctcggatacggaaagagcagcgcgaaccgcattgca

SEQ ID NO: 29368 - DNA, 260 bp, Unknown
  Description of Unknown: RightRegion for integrase B3369 sequence
actttggatgtagcttttattttttgctttgtacagtgctttcccccatgttatagttaacatgggggaatttttttgcagaaaaagatacacataattttaccaaggattgaaggcagcaagaaaaccaagcacaaaattctaaaagtggctatatattgcagagtgagtaaaaacacaccggagcagttgcgaagccttgaaatacaggaaatatattttgaaaaattggtaagcgaaaatgctgattggaaacttta

SEQ ID NO: 29369 - DNA, 105 bp, Unknown
  Description of Unknown: RightRegion for integrase B3370 sequence
aagaaccccgccgccgaagaagcgacagggttcgattttggggagtctgagtgtgagtgagttgcttgcatcgacgacgttttctctgcccaaaagcctgtcacc

SEQ ID NO: 29370 - DNA, 260 bp, Unknown
  Description of Unknown: RightRegion for integrase B3371 sequence
aaatcctacaccaaatccggcagcgacatgcacgtcaccctctaccccctcgcggattgatggttatgcatttattcggtacgcatgaatgaatcccatttaaatgtagattttatagcaagtgaaaatccctcctggtgacaggagggatttctttattttgcgatatgctcataatacgccatgagcttctgttccggccccgggccgtctttatcgagcaggaacgcctttgccagcgcggcgtagaattccgggcg

SEQ ID NO: 29371 - DNA, 260 bp, Unknown
  Description of Unknown: RightRegion for integrase B3372 sequence
gtagatccaggagacttcacaattggcatattaccgcgcttgcctaagagaggcagttaattttatgcccatgtatgatatcctttcgggtcacattcatatgtcattataataacgtaatcgactatcctgccatgctcggcataatcgtgagcctcgtacagtacgcccggctggtctgcggatatcttcggggcaagcgctgacatcacgacgaagccttcgttgtgcagacgctccgtgagccgctcaaggaacgc

SEQ ID NO: 29372 - DNA, 260 bp, Unknown
  Description of Unknown: RightRegion for integrase B3373 sequence
tccttatccgccataagaaaaccctcacgtcaaggcacgcgacctgctccgctgcgttgattagttttgtgccctgtccgcagggctttctgtttcatataacgttcgcattatttttattaagtcatcaattatatgcctatcgtcatactcttcatccagaaatgatgtgatttttaagtctcctttacgagcgagaacacgattaaaatacatcataagaaagcttgaaattcctattttatcgtcagcctctacta

SEQ ID NO: 29373 - DNA, 260 bp, Unknown
  Description of Unknown: RightRegion for integrase B3374 sequence
gcagaaaagttcgttttagctctccacaaccgcaccaaagagcttcaagctttggcttgaggctctttttctttgtcttggcttttaagttgtttattgccctgccaaaagcagagagatgattaccgctccggtatcagtgaggaaaaaaggccatatgaaggtttaccacaagctgtcaggcgaatttccatatgcctgcgtttccctgtggccctgaatctggctctaaaccgtgttcccaataaagggcagtgtat

SEQ ID NO: 29374 - DNA, 260 bp, Unknown
  Description of Unknown: RightRegion for integrase B3375 sequence
gtagatccaggagacttcacaattggcatattaccgcgcttgcctaagagaggcagttaattttatgcccatgtatgatatcatttcgggtcacattcatatgtcattataataacgtaatcgactatcctgccctgctcggcataatcgtgagcctcgtacagtacgcccggctgttctgcggatatcttcggggcaagcgctgacatcacgatgaagccttcgttgtgcagacgttccgtgagccgctcaaggaacgc

SEQ ID NO: 29375 - DNA, 260 bp, Unknown
  Description of Unknown: RightRegion for integrase B3376 sequence
gaagatttctcgttggagctattccctaaactccccaagaataaaggcatatctgattaatgacatagtcaaaccaccaacgaattggtggtttgactttatcatttataaatattctatttctctccaatagcaatttaaaattttttccaaactttttcattaaccattggctccgggcaagatttgccggttacatcaaaatctttttatcctctcacacggtttttacagatatttcttataattcgtattcttca

SEQ ID NO: 29376 - DNA, 260 bp, Unknown
  Description of Unknown: RightRegion for integrase B3377 sequence
aaatcctacaccaaatccggcagcgacatgcacgtcaccctctaccccctcgcggattgaacattatacatttattcggtacgcatgaatgaatcccatctaaatataggttctatagcaagcggaaatccctccttgtgacaggagggatttctttattttgcgatatgctcataatacgccatgagcttctgctccggccccgggccgtctttatcgagcaggaacgcctttgccagcgcagcgtagaactccgggcg

SEQ ID NO: 29377 - DNA, 260 bp, Unknown
  Description of Unknown: RightRegion for integrase B3378 sequence
aaatcctacaccaaatccggcagcgacatgcacgtcaccctctaccccctcgcggattgacggttatacatttattcggtacgcatgaatgaatcccatctaaatatagattctatagcaagcggaaatccctcctggtggcaggagggatttctttatttcgcgatatgctcatagtattccatgagcttccgctccgggccggggccgtccttgtcgagcaggaacgctttggccagggcggcgtagaattccgggcg

SEQ ID NO: 29378 - DNA, 260 bp, Unknown
  Description of Unknown: RightRegion for integrase B3379 sequence
aaatcctattccaaagcaggcagcgatatgcgcgtgacgctatatccccttaccgattgattccgtgcgttccactatacttcgctatctactattacacggtacgcatgaatgcgacccgacagtcgatcagtgcaccgattgtctgtccttcgtcaagaagtaaatccaagaaaagaccacgccgcagcaaatcgctgcggcgtggctcaaatcggcagagaaccaccattttcggcagacgaaaacggtggttctct

SEQ ID NO: 29379 - DNA, 260 bp, Unknown
  Description of Unknown: RightRegion for integrase B3380 sequence
aaatcctattccaaagcaggcagcgatatgcgcgtgacactatatccccttaccgattgattccgtgcgttccactatacttcgctatctacaattgcaaggtacgcatgaatgaatcccatctaaatatagattctatagcaagcggaaatccctcctggtgacaggagggatttctttattttgcgatatgctcataatacgccatgagcttctgttccggccccgggccgtccttgtcgagcaggaacgcctttgcc

SEQ ID NO: 29380 - DNA, 260 bp, Unknown
  Description of Unknown: RightRegion for integrase B3381 sequence
aaaaccaaaaaattagatgattttgatttggtcctttatcccaaattgccaagaacgtaaaaagagcagcggaattatccgttgctctttttggcgtcattatctactataaatattcgtcgcccaaatatccaaccctgtacatgcagtcgtgtctctcctttttggtcgcacgcatgggtaatcctatgtatagggttagatacgtgtgcgacgaatatccaccatacaaacgccatgtagttcactttatcacaaga

SEQ ID NO: 29381 - DNA, 260 bp, Unknown
  Description of Unknown: RightRegion for integrase B3382 sequence
aaatcctacaccaaatccggcagcgacatgcacgtcaccctctaccccctcgcggattgatggttatacatttattcggtacgcatgaatgaatcccatctaaatatagattctatagcaagcggaaatccctcctggttacaggagggatttctttattttgcgatatgctcataatacgccatgagcttctgttccggccccgggccgtctttatcgagcagaaacgcctttgccagggcggcgtagaattccgggcg

SEQ ID NO: 29382 - DNA, 109 bp, Unknown
  Description of Unknown: RightRegion for integrase B3383 sequence
gtagaccccggagacttcacacttggcatattaccgcgcttgcctaagaaaggcagttaattttatacccatgtgtgttatcctttcgggtcacactcatatgtcatta

SEQ ID NO: 29383 - DNA, 260 bp, Unknown
  Description of Unknown: RightRegion for integrase B3384 sequence
aaatcctacagcaaagccggcagcgacatgcgcgtcaccctgtaccccctcacagattgatcccccgccttccaaacaaaaatcaaagaacccgtgtaattgaggtcctcaattacacgggtttcattcatgcgtaccggctaattgcctattttgcaatatgctcataatacgccataagcttccgctctggccccgggccgtccttgtcgagcaggaacgccttggccagcgacgcgtaaaactccgggcggttgagc

SEQ ID NO: 29384 - DNA, 260 bp, Unknown
  Description of Unknown: RightRegion for integrase B3385 sequence
tggagcggttcacccgatgattttgagataactatatatccgaaactgccgaaatcataaaaatatgcgaaatttctgccacatattagttagtcattgacatcatggtggtactaattcttccgtaccaccctcctccccgaaatgatccctaccgtctgaaaatttctccgaaagccgccttatagccctcccctctgccgctcaccgtaaacctcgccgcaaaacctttttccacgcccttgaaataaacagccagc

SEQ ID NO: 29385 - DNA, 260 bp, Unknown
  Description of Unknown: RightRegion for integrase B3386 sequence
aaatcctacaccaaatccggcagcgacatgcacgtcaccctctaccccctcgcggattgatggttgtacatttatttggtacgcatgaatgaatcccatctaaatatagattctatagcaagctgaaatccctcctggtgacaggagggatttctttattttgcgatatgctcataatacgccatgagcttctgttccggccccgggccgtctttatcgagcagaaacgcttttgccagcgcggcgtagaactccgggcg

SEQ ID NO: 29386 - DNA, 260 bp, Unknown
  Description of Unknown: RightRegion for integrase B3387 sequence
aaatcccactccaaatccggcagcgacatgcgcgtgaccctttaccccctcaccgattgatcccctgcccctccttttcgtatctacaattaaacgggccgcattcatgaatcccatttaaatgtagattttatagcaagtgaaaatccctcctggtcgcaggagggatttttttatttcgcaatatgttcatagtattccatgagctttttctccggccctgggccgtccttatccagcagaaaagctttcgccagatc

SEQ ID NO: 29387 - DNA, 260 bp, Unknown
  Description of Unknown: RightRegion for integrase B3388 sequence
ataacgatagttgttagctgttcggtgtttgttttttcagtaaaaatgccggaggcgtaatgcctccggcatttctcatttttccacaatctctactttgacatctatccagcccagatgcgcgtgtttgatagcgacagggaatactccgtcctttgggcggtagacttgtgcgccggacggggaaacataaacgacactcaaatcctccgtcttatatatcatcgcctcgccgctttgccccacagcccgcgttgtag

SEQ ID NO: 29388 - DNA, 260 bp, Unknown
  Description of Unknown: RightRegion for integrase B3389 sequence
aaatcctacaccaaatccggcagcgacatgcacgtcaccctctaccccctcgcggattgatggttatacatttattcggtacgcatgaatgaatcccatctaaatatagattctatagcaagcggaaatccctcctggtgacaggagggatttctttattttgcgatatgatcataatacgccatgagcttctgttccggccccgggccgtctttatcgagcagaaacgcctttgccagcgcggcgtagaactccgggcg

SEQ ID NO: 29389 - DNA, 260 bp, Unknown
  Description of Unknown: RightRegion for integrase B3390 sequence
aaaaaaagtcctgatggtttcaccatagagatatacccgcgcatcccaaaatccgaataatgaaaagagagggccgtttcggtcctctctttcttatagttatcctgtttagtcatactcatagggactgcccacgatgtcacccaagattgctcctaacataaaacgccctccgttttgtggtgtatcgctttcgttggcaaaaggataccacaaaccggagggcaaaaggtcaacgggcaggcgacaaatcacgcacc

SEQ ID NO: 29390 - DNA, 245 bp, Unknown
  Description of Unknown: RightRegion for integrase B3391 sequence
aaatcctacagcaaagccggcagcgacatgcgcgtcaccctgtaccccctcacagattgattccccgccttccaaacaaaaatcaaaaaacccgtgtaattgagatcctcaattacacgggtttcattcatgcgtaccggctaattgcctattttgcgatattctcataatactccatgagctttcgctctggccccgggccgtccttgtcgagcaggaacgccttggccagagcagcgtagaac

SEQ ID NO: 29391 - DNA, 252 bp, Unknown
  Description of Unknown: RightRegion for integrase B3392 sequence
aaatcctacaccaaatctggcagcgacatgcacgtcaccctctaccccctcgcggattgatggttatacatttattcggtacgcatgaatgaatcccatctaaatatagattctatagcaagcggaaatccctcctggtggcaggagggatttctttattttgcgatatgctcataatacgccatgagcttctgttccggccccgggccgtccttgtcgagcaggaacgccttggccagagcagcgtagaac

SEQ ID NO: 29392 - DNA, 260 bp, Unknown
  Description of Unknown: RightRegion for integrase B3393 sequence
aaatcctacaccaaatccggcagcgacatgcacgtcactctataccccctcgcggattgatggttatacatttattcggtacgcatgaatgaatcccatctaaatatagattctatagcaagcggaaatccctcctggtgacaggagggatttctttattttgcgatgtgctcataatacgccatgagcttctgttccggccccgggccgtctttgtcgagcaggaacgcctttgccagcgcggcgtagaactccgggcg

SEQ ID NO: 29393 - DNA, 109 bp, Unknown; identical to SEQ ID NO: 29364
  Description of Unknown: RightRegion for integrase B3394 sequence

SEQ ID NO: 29394 - DNA, 109 bp, Unknown
  Description of Unknown: RightRegion for integrase B3395 sequence
gtagaccccggagacttcacacttggcatattaccgcgtttgcctaagaaaggcagttaattttatacccatgtgtgttatcctttcgggtcacactcatatgtcatta

SEQ ID NO: 29395 - DNA, 260 bp, Unknown
  Description of Unknown: RightRegion for integrase B3396 sequence
ataacagttgttgttagctgttcggtgtttgttttttcagtaaaaatgccggaggcgtaaagcctccggcttttcttatttctccacattctccactttgacatctatccatcctagatgtgcgtgtttgatggcgacggggaatacaccctctttcgggcggtagacctgtgcgccggatagcgaaatgtggatgagggtcaaatcctccgtcctgtatatcattgcctcaccgctttgccccacggcccgcgcagtag

SEQ ID NO: 29396 - DNA, 260 bp, Unknown
  Description of Unknown: RightRegion for integrase B3397 sequence
aaatcctacaccaaatccggcagcgacatgcacgtcaccctctaccccctcgcggattgaacattatacatttattcggtacgcatgaatgaatcccatctaaatgtagattctatagcaagcggaaatccctcctggtgacaggagggatttctttattttgcgatatactcataatacgccatgagcttctgttccggccccggtccgtctttatcgagcaggaacgcctttgccagcgcagcgtagaactccgggcg

SEQ ID NO: 29397 - DNA, 260 bp, Unknown
  Description of Unknown: RightRegion for integrase B3398 sequence
gagatcattgtcttgcgttatggtttctggctggcactcgatttgaccgttcaggcttgacctgggcggtcttttcgtttagggcggccgaggctcctcagcaatgctcttccagtcgattctcttcccgcaatcggggcaaaataaaaagcgagtcaaatctgtgctgcgccgccgatcggcgtactgcttaagcgtaaacaccttcgcgtagaggctctcgcagctacaaagcgcggggtcgtcccgcaaactgcggt

SEQ ID NO: 29398 - DNA, 260 bp, Unknown
  Description of Unknown: RightRegion for integrase B3399 sequence
aagtctgtaaaatataatgaagttgataagactttttttatagaattttatcatccctaactgtatccctatgcagttaggaaacaatagcattacctgtagcatctgtataaaatgttgcttttttatggtctacatagtgtccaccaagacctgcttcttcaagttcttttattgaagcgttttccataagctgatgtgccattgtggctattatttctacatgtgccatttcctctgttcactttacttaaaggcaa

SEQ ID NO: 29399 - DNA, 260 bp, Unknown
  Description of Unknown: RightRegion for integrase B3400 sequence
cggcaagaaatcgaaatctactttatcggcggttatacccaaaggattgaccttacatagagccattcactcatacacaaacgcccgcactggcaagccgaaaacgcttgccgatgagggcattactttttgggaaagcgagcgattacacgatggatataggatcacggatcaaactggtacgcgagcatcgcggccttacacaacaaaaattgggtgagatgctcggatacggaaagagcagcgcgaaccgcattgca

SEQ ID NO: 29400 - DNA, 260 bp, Unknown
  Description of Unknown: RightRegion for integrase B3401 sequence
gtagatccaggagacttcacaattggcatattaccgcgcttgcctaagagaggcagttaattttatgcccatgtatgatatcctttcgggtcacattcatatgtcattataataacgtaatcgactatcctgccctgctcggcataatcgtgagcctcgtacagtacgcccggctggtctgcggatatcttcggggcaagcgctgacatcacgatgaagccttcgttgtgcagacgctccgtgagccgctcgaggaacgc

SEQ ID NO: 29401 - DNA, 260 bp, Unknown
  Description of Unknown: RightRegion for integrase B3402 sequence
gtagaccccggagacttcacacttggcatattaccgcgcttgcctaagaaaggcagttaattttatacccatgtgtgttatcctttcgggtcacactcatatgtcattataataatataatcggctatcctgccctgctcggcataatcgtgagcctcgtacagtacgcccggctggtctgcggatatcttcggggcaagtgctgacatcacgatgaagccttcgttgtgcagacgctccgcgagccgctcaaggaacgc

SEQ ID NO: 29402 - DNA, 260 bp, Unknown
  Description of Unknown: RightRegion for integrase B3403 sequence
gagattatcatcttgcgttacggtttctggctggccctcgatttgaccgttcaggtttgacctggacggtcttttcgtttagggcggccgaggctcctcagcaatgctcttccagtcgattctcttcccgcaatcagggcagaatgagaaacgggtcaaatccgtgctgcgccgtcgatcggcgtactgcttaagcgtgaacacctttacataaaggctcaggcagttacggaacactgggtcagcgcgtaaactacgat

SEQ ID NO: 29403 - DNA, 260 bp, Unknown; identical to SEQ ID NO: 29367
  Description of Unknown: RightRegion for integrase B3404 sequence

SEQ ID NO: 29404 - DNA, 260 bp, Unknown
  Description of Unknown: RightRegion for integrase B3405 sequence
aaatcctattccaaagcaggcagcgatatgcgcgtgacgctatatccccttaccgattgattccgtgcgttccactatacttcgctatctactattacacggtacccatgaatgcgacccgacagtcgatcagtgcaccgattgtctgtccttcgtcaagaagtaaatccaagaaaagaccacgccgcagcaaatcgctgcggcgtggctcaaatcggcagagaaccaccattttcggcagacgaaaacggtggttctct

SEQ ID NO: 29405 - DNA, 260 bp, Unknown
  Description of Unknown: RightRegion for integrase B3406 sequence
aaatcctattccaaagcaggcagcgatatgcgcgtgacgctatatccccttaccgattgattccgtgcgttccactatacttcgctatctactattacacggtacccatgaatgcgacccgaccgttgatcagtgcacggactgcctgtccttcgtcaagaagtaaattccagcccctatgaaaatgccccgtgccgcagcactgcggcacggggattttctgtctgcgctgcatttcgcctgcagacgcttttcacgcc

SEQ ID NO: 29406 - DNA, 260 bp, Unknown
  Description of Unknown: RightRegion for integrase B3407 sequence
tatttggtactgttattttcggacagtatcggatactctcgcctttatttttgttgctgatatgattcttcaaattgatttggggtttgctgtttaagacattcatgcggtcggtaatcgttataaaaatcaatatattctgatagactttcctctaattcggagacagtttcataaaaatgaaatttgaactgttcttttttaagcgaagcaaagaaagattccgccacagcattatcaagtggattgcctatatcgga

SEQ ID NO: 29407 - DNA, 260 bp, Unknown
  Description of Unknown: RightRegion for integrase B3408 sequence
aaatcctattccaaagcaggcagcgatatgcgcgtgacgctatatccccttaccgattgattccgtgcgttccactatacttcgctatctactattacacggtacacatgaagccgatccgacggttgatcagtgcacggactgcctgtccttcgtcaagaagtaaatcccagcccctatgaaaatgccccgtgccgcagcactgcggcacggggattttctgtctgcgctgcatttcgcctgcagacgcttttcacgcc

SEQ ID NO: 29408 - DNA, 109 bp, Unknown
  Description of Unknown: RightRegion for integrase B3409 sequence
gtagaccccggagacttcacgcttggcatattaccgcgcttgcctaagaaaggcagttaattttatacccatgtgtgttatcctttcgggtcacactcataagtcatga

SEQ ID NO: 29409 - DNA, 260 bp, Unknown
  Description of Unknown: RightRegion for integrase B3410 sequence
tggagcggttcacccgatgattttgagataactatatatccgaaactgccgaaatcataaaaatatgcgaaatttctgccacatattagttagtcattgacatcatggtggtactaattcttccgtaccaccctcctccccgaaatgatccctaccgtctgaaaatttctccgaaagccgccttatagctctcccctctgccgctcaccgtaaacctcgccgcaaaacctttttccacgcccttgaaataaacagccagc

SEQ ID NO: 29410 - DNA, 260 bp, Unknown
  Description of Unknown: RightRegion for integrase B3411 sequence
aaatcctattccaaagcaggcagcgatatgtgcctaaccctttaccccctcactgattgatttgccgccttcccttttcaggtctacaattacgtgggccacatgaatgaatcccatttaaatgtagattttatagcaagtgaaaatccctcctggtcgcaggagggatttctttattttgcgatatgctcgtaatactccatcagctttcgctccgggccggggccgtctttatcgagcaggaatgcctttgccagcgc

SEQ ID NO: 29411 - DNA, 260 bp, Unknown
  Description of Unknown: RightRegion for integrase B3412 sequence
aaatcctacaccaaatccggcagcgacatgcacgtcaccctctaccccctcgcggattgatggttatacatttatttggtacgcatgaatgaatcccatctaaatatagattctatagcaagcggaaatccctcctggtgacaggagggatttctttattttgcgatatgctcataatacgccatgagcttttgttccggccccgggccgtccttgtcgagcaaaaacgcctttgccagcgcggcgtagaactccgggcg

SEQ ID NO: 29412 - DNA, 260 bp, Unknown
  Description of Unknown: RightRegion for integrase B3413 sequence
ttttttgaaatatttgtactactttcttgtagttgcggttatatctgtgctatagtgtaagctgtaatgaaagatgaaaaacaggaacggcttgggccagtatacttctaaccgtgtattgcatctttttgactttaagcaacagtcgttaaacaggcttattttttataccttctaaacggaggcattctttagcttttctataaggaaagcagacaaattctaaacggatttaaaactacaaaggaaagcagaaagac

SEQ ID NO: 29413 - DNA, 260 bp, Unknown
  Description of Unknown: RightRegion for integrase B3414 sequence
gcagaaaagttcgttttagctctccacaaccgcaccaaagagcttcaagctttggcttgaggctctttttctttgtcttggcttttaagttgtttattgccctgccaaaagcagagagaggattaccgctccggtatcagtgaggaaaaaaggccatatgaaggtttaccacaagctgtcaggcgaatttccatatgcctgcgtttccctgtggctctgaatctggctctaaaccgtgttcccaataaagcaagataaaa

SEQ ID NO: 29414 - DNA, 260 bp, Unknown
  Description of Unknown: RightRegion for integrase B3415 sequence
gagatcatcgtcttgcgttatggtttctggctggcactcgatttgaccgttcaggcttgacctgggcggtcttttcgtttagggcggccgaggctcctcagcaatgctcttccagtcgattctctttccgcaatcagggcagaatgagaaacgggtcaaatccgtgctgcgccgtcgatcggcgtactgcttgagcgtgaacacctttacataaaggctcaggcagttacggaacgctgggtcagcgcgtaaactacgat

SEQ ID NO: 29415 - DNA, 260 bp, Unknown
  Description of Unknown: RightRegion for integrase B3416 sequence
aaatcctacaccaaatccggcagcgacatgcacgtcaccctctaccccctcgcagattgacggttatacatttattcggtacgcatgaatgaatcccatctaaatatagattctatagcaagctgaaatccctcctggtgacaggagggatttctttattttgcgatatgctcataatacgccatgagcttctgttccggccccgggccgtctttatcgagcagaaacgcttttgccagcgcggcgtagaactccgggcg

SEQ ID NO: 29416 - DNA, 260 bp, Unknown
  Description of Unknown: RightRegion for integrase B3417 sequence
aaatcctacaccaaatccggcagcgacatgcacgtcaccctataccccctcgcggattgatggttatacatttatttggtacgcatgaatgaatcccatttaaatgtagattttatagcaagtgaaaatccctcctggtgacaggagggatttctttattttgcgatatgctcataatacgccatgagcttctgttccggccccgggccgtctttatcgagcagaaacgcctttgccagcgcggcgtagaactccgggcg

SEQ ID NO: 29417 - DNA, 260 bp, Unknown
  Description of Unknown: RightRegion for integrase B3418 sequence
aaatcccactccaaatccggcagcgacatgcgcgtgacgctatatccccttaccgattgattccgtgcgttccactatacttcgctatctactattacacggtacgcatgaatgcataccatttaaatgttgattgcaggcaagcgaagatccctctcctgaccggagagggatctttttattttaccacatgctcatagtattccatgagcttgcgctccgggccggggccgtctttgtcggtcaaaaacgcctttgcc

SEQ ID NO: 29418 - DNA, 260 bp, Unknown
  Description of Unknown: RightRegion for integrase B3419 sequence
aaatcctacaccaaatccggcagcgacatgcacgtcaccctctaccccctcgcagattgacggttatacatttattcggtacgcatgaatgaatcccatctaaatatagattctatagcaagcggaaatccctcctggtgacaggagggatttctttattttgcgatatgctcataatacgccatgagcttctgttccggccccgggccgtctttatcgagcagaaacgcttttgccagcgcggcgtagaactccgggcg

SEQ ID NO: 29419 - DNA, 260 bp, Unknown
  Description of Unknown: RightRegion for integrase B3420 sequence
aagtcctacagcaaagccggcagcgacatgcgcgtcaccctgtaccccctcacagattagcccccttgccttccaaccgaaaagaaggaacccgtgtaactgaggtcctcaattacacgggttccattcatgcgtaccagctaattgtctatttcgcgatatgctcataatacgccatgagctttcgctccggccccgggccgtctttatcgagcaaaaacgccttggccagcgcggcgtagaactctgggcggttaagc

SEQ ID NO: 29420 - DNA, 260 bp, Unknown; identical to SEQ ID NO: 29397
  Description of Unknown: RightRegion for integrase B3421 sequence

SEQ ID NO: 29421 - DNA, 260 bp, Unknown
  Description of Unknown: RightRegion for integrase B3422 sequence
gccggacggctctggtgctgccccaaaagttgcggaactttcggtcatattctaagctgaccgatgaccagatgatgtgattatgaacgtgcgatttgtctatgtgagtgcagaccacaaaggcatgattgcccttggtaaaccgcttggcaaattcgacacccagacggttggcttcttccggtgtgatctctccgggtttgaatgactggcgcacatggtaagcgatcacatcgtccgccccgcgcacccgcccggtg

SEQ ID NO: 29422 - DNA, 260 bp, Unknown
  Description of Unknown: RightRegion for integrase B3423 sequence
gccaaaagaccgcaaagaacattgattctttgcggtcttttggcatttgtaacccactaaataacccacttatttttcaatcctcaaaaccttttcaaaaagttcatttacactgcttgccaattcttcatcttcaccctcaagcgcatgaccataaataccgaacgtatccatatccgcagagtgccccaccaagggcttgacctctccagctggcaatcgcttgaccacactcacaaacgtgtgccgcatctcataag

SEQ ID NO: 29423 - DNA, 260 bp, Unknown
  Description of Unknown: RightRegion for integrase B3424 sequence
ataacgatagttgttagctgttcggtgtttgtttttacagtaaaaatgccggaggcgtaatgcctccggcttttcttatttctccactttgacatctatccagcccagatgcgcgtgtttgatggcgacggggaatacaccctctttcgggcggtagacctgtgcgccggatagcgaaatgtggatgagggtcaaatcctccgtcctgtatatcatcgcctcaccgctttgccccacggcccgcgcagtagaccgcttga

SEQ ID NO: 29424 - DNA, 260 bp, Unknown
  Description of Unknown: RightRegion for integrase B3425 sequence
aaatcctacaccaaatccggcagcgacatgcacgtcaccctctaccccctcgcggattgatggttatacatttattcggtacgcatgaatgaatcccatttaaatgtagattttatagcaagtgaaaatccctcctggtgacaggagggatttctttattttgcgatatgctcataatacgccatgagcttctgttccggccccgggccgtctttatcgagcagaaacgcttttgccagcgcggcgtagaactccgggcg

SEQ ID NO: 29425 - DNA, 260 bp, Unknown
  Description of Unknown: RightRegion for integrase B3426 sequence
ataacgatagttgttagttgttcggtgtttgttttttcagtaaaaatgccggaggtgtaatgtctccggcatttcttattgccagtctataatgtgatacggctcataaaccattgcaggaatcgcggtaatcgtccccgttcgtccgtgctgcttcatccagcgcttgccatgccaaattgccttgctttccgtcttgtaagcctcgccgcctcttaatccaaggtcatagccattgtttgcggcaatgtccgctgtgt

SEQ ID NO: 29426 - DNA, 260 bp, Unknown
  Description of Unknown: RightRegion for integrase B3427 sequence
cgctggggacgtccggataatttctcactgaagatctatccgcgcgtaccgccagcgtaaccgcggcatctgaaaagccttgatttctcaagggaaaatctcatttccaacgtgctgggactgattcctccgttccaatatccgtcagtgtcgccatacactcccggtacggcatggtataacgttgtgccagataccgcatgctggcgctcagttcaccatcgggaccgcccaatggtatgtcagccaggcaatccggc

SEQ ID NO: 29427 - DNA, 109 bp, Unknown
  Description of Unknown: RightRegion for integrase B3428 sequence
gtagaccccggagacttcacgcttggcatattaccgcgcttgcctaagaaaggcagttaattttatacccatgtgtgttatcatttcgggtcacactcataagtcatga

SEQ ID NO: 29428 - DNA, 260 bp, Unknown
  Description of Unknown: RightRegion for integrase B3429 sequence
gagatcattgtcttgcgttatggtttctggctggcactcgatttgaccgttcaggcttgacctgggcggtcttttcgtttagggcggccgaggctcctcagcaatgctcttccagtcgattctcttcccgcaatcggggcagaacgaaaagcgagtcaaatctgtgctgcgccgccgatcggcgtactgcttaagcgtaaaaaccttcgcatagaggctctcgcagctacaaagcgtggggtcgtcccgcaaactgcggt

SEQ ID NO: 29429 - DNA, 260 bp, Unknown
  Description of Unknown: RightRegion for integrase B3430 sequence
gcagaaaagttcgttttggctctccacaactgcaccaaagagcttcaagctttggcttgaggctctttttctttgtcttggcttttaagttgtttattgccctgccaaaagcagagagatgattaccgctccggtatcagtgaggaaaaaaggccatatgaaggtttaccacaagctgtcaggcgaatttccatatgcctgcgtttccctgtggccctgaatctggctctaaaccgtgttcccaataaagcaagataaaa

SEQ ID NO: 29430 - DNA, 260 bp, Unknown; identical to SEQ ID NO: 28685
  Description of Unknown: RightRegion for integrase B3431 sequence

SEQ ID NO: 29431 - DNA, 260 bp, Unknown
  Description of Unknown: RightRegion for integrase B3432 sequence
aaaaccaaaaaattagatgattttgatttggtcctgtatcccaaattgccaagaacataaaaagagcagcggaattatccgttgctctttttggcatcattatctactataaatattcgtcgtccacatatccaaccctgtacatgcaatcgtgtctcttccttttggtcgcacgcatgggtaatcctatgtgtaaggcgcatgagccaccagctttccaaaatgattctcctctgccagctgcccaaatgcctgcacat

SEQ ID NO: 29432 - DNA, 260 bp, Unknown
  Description of Unknown: RightRegion for integrase B3433 sequence
gagattatcatcttgcgttacggtttctggctggccctcgatttgaccgttcaggtttgacctgggcggtcttttcgtttagggcggtcgaggctcctcagcaatgctcttccagtcgattctcttcccgcaatcagggcagaatgagaaacgggtcaaatccgtgctgcgccgtcgatcggcgtactgcttaagcgtgaacacctttacataaaggctcaggcagttacggaacgctgggtcagcgcgtaaactacgat

SEQ ID NO: 29433 - DNA, 260 bp, Unknown
  Description of Unknown: RightRegion for integrase B3434 sequence
aaatcctacaccaaatccggcagcgacatgcacgtcaccctctaccccctcgcggattgatggttatacatttattcggtacgcatgaatgaatcccatctaaatatagattctatagcaagcggaaatccctcctggtgacaggagggatttctttattttgcgatgtgctcataatacgccatgagcttctgttccggccccgggccgtctttgtcgaggaggaaggcctttgccagcgcggcgtagaactccgggcg

SEQ ID NO: 29434 - DNA, 260 bp, Unknown
  Description of Unknown: RightRegion for integrase B3435 sequence
aaaaccaaaaaattagatgattttgatttggtcctgtatcccaaattgccaagaacgtaaaaagagcagcggaattatccgttgctctttttggcatcattatctactataaatattcgtcgcccacatatccaaccctgtacatgcagtcgtgtctcttccttttggtcgcacgcatgggtaatcctatgtgtaaggcgcatgagccaccagctttccaaaatgattctcctctgccagctgcccaaatgcctgcacat

SEQ ID NO: 29435 - DNA, 260 bp, Unknown
  Description of Unknown: RightRegion for integrase B3436 sequence
gagattattgtcttgcgtcatggtttctggctggccctcgatctgaccgctcaggtttaacctggacggtcttttcgtttagggcggccaaggttccgcggcaatgctcttccagtcaattcttttcccgcaatcggggcagaacgaaaagcgagtcaaatctgtgctacgccgccgatcggcatactgtttgagcgtgaacacctttacatagaggctcttgcagccgcaaaacgcagggtcggcacgcaaactacggt

SEQ ID NO: 29436 - DNA, 260 bp, Unknown
  Description of Unknown: RightRegion for integrase B3437 sequence
aaatcctattccaaagcaggcagcgatatgtgcctaaccctttaccccctcactgattgatttgccgcctttccttttcagatctacaattacgtgggccgcatgaatgtggcccacgtaattgtagataccaataagcgccgaagcgagttgttcgcttcggcgcttattttaagattcccagaatgatttgcaggatcacgcagagctgttccagtgttgcttcgtttagtaataagtcgattctttcccgtgtcttt

SEQ ID NO: 29437 - DNA, 260 bp, Unknown
  Description of Unknown: RightRegion for integrase B3438 sequence
gtagatccaggagacttcacaattggcatattaccgcgcttgcctaagaaaggcaattaattttatatccatgtatgatatcctttcgggtcacactcatatgtcattataataacgtaatcgactatcctgccctgctcggcataatcgtgagcctcgtacagtacgcccggctggtctgcggatatcttcggggcaagcgctgacatcacgatgaagccttcgttgtgcagacgctccgtgagccgctcaaggaacgc

SEQ ID NO: 29438 - DNA, 260 bp, Unknown
  Description of Unknown: RightRegion for integrase B3439 sequence
aaatcctacaccaaatccggcagcgacatgcacgtcaccctctaccccctcgcggattgatggttatacatttattcggtacgcatgaatgcgacccgaccgtcgaccagtgcaccgactgcctgtccttcgtcaagaagtaaatttcccgcaccccgcgccgcggcaaccgccgcggcgcggggatctttgttctgtgatccgctgtttacgatcgcgcaatagcctccctgttcccctatcgcaaattccgcgcagat

SEQ ID NO: 29439 - DNA, 260 bp, Unknown
  Description of Unknown: RightRegion for integrase B3440 sequence
aaatcctacaccaaatccggcagcgacatgcacgtcaccctctaccccctcgcggattgatggttatacatttattcggtacgcatgaatgaatcccatttaaatatagattctatagcaagcggaaatccctcctggttacaggagggatttctttattttgcgatatgctcataatacgccatgagcttctgttccggccccgggccgtctttatcgagcaggaacgcctttgccagggcggcgtagaattccgggcg

SEQ ID NO: 29440 - DNA, 260 bp, Unknown
  Description of Unknown: RightRegion for integrase B3441 sequence
cgcaatgaaattgaaatacggttcatcggcggctataaaaagacaatgcaactgatataaaaataaagagggcatacccaatcggagataaggcatcttcgattgggtatgccctttttcacttttatcggaaagaggtagttatgaagctgggagagaaaatcaagctggttcgtaagcagagagggatgacacagcgggaactaggagaacgactgcacttggatggcaatgcggcaaaccgtattgctcaatatgag

SEQ ID NO: 29441 - DNA, 260 bp, Unknown
  Description of Unknown: RightRegion for integrase B3442 sequence
ataacgatagttgttagttgttcggtgtttgttttttcagtaaaaatgccggaggtgtaatgcctccggcatttcttattgccagtctataatgtgatacggctcataaaccattgcaggaattgcggtaatcgtccccgttcgtccgtgctgcttcatccagcgcttgccatgccaaattgccttgctttccgtcttgtaagcctcgccgcctcttaatccaaggtcatagccattgtttgcggcaatgtccgctgtgt

SEQ ID NO: 29442 - DNA, 260 bp, Unknown
  Description of Unknown: RightRegion for integrase B3443 sequence
aaatcctacaccaaatccggcagcgacatgcacgtcaccctctatcccctcgcggattgatggttatacatttattcggtacgcatgaatgaatcccatctaaatatagattctatagcaagctgaaatccctcctggtgacaggagggatttctttattttgcgatatgctcataatacgccatgagcttctgttccggccccgggccgtctttatcgagcagaaacgcttttgccagcgcggcgtagaactccgggcg

SEQ ID NO: 29443 - DNA, 260 bp, Unknown
  Description of Unknown: RightRegion for integrase B3444 sequence
aaatcccactccaaatccggtagcgatatgcgcgtgaccctttaccccctcaccgattgatcccctgccccgccttttcgtatctacaattaaacgggccgcatgaatgcgacccggttaattgtagatttcaaacaagcgccgaagcgaattgctcgcttcggcgctcattccaaaaggcctaagatgatttgcaggatgacgcaaagctgttccagcgtcgctttgtttagtaataagttgattcttttccgtgtctg

SEQ ID NO: 29444 - DNA, 260 bp, Unknown
  Description of Unknown: RightRegion for integrase B3445 sequence
gtagaccccggagacttcacacttggcatattaccgcgcttgcctaagaaaggcagttaattttatacccatgtgtgttatcctttcgggtcacactcatatgtcattataataacgtaatcgactatcctgccctgctcggcataatcgtgagcctcgtacagtacgcccggctggtctgcggatatcttcggggcaagcgctgacatcacgatgaagccttcgttgtgcagacgctccgtgagccgctcaaggaacgc

SEQ ID NO: 29445 - DNA, 260 bp, Unknown
  Description of Unknown: RightRegion for integrase B3446 sequence
gacaagagcattacatttgtgttcaaaaatatgaaggaaataacaatagcagccaaataaaaggctgttatttttttgcctaaaataggggtgtcggaagtaatcgttctgacacttaggggtgtcgctttttaaggtaagggtgtcgtttgtattaaaatagttgttcaaatacataaaagaactagaattgtgatacgagaaatctgtcacaattttttttgggctaaaacggccaaaatagcagggctagataccgt

SEQ ID NO: 29446 - DNA, 260 bp, Unknown
  Description of Unknown: RightRegion for integrase B3447 sequence
gcagaaaagttcgttttagctctccacaaccgcaccaaagaaaagcacctagaaacgtaagtttttgggtgcttttctttttgctgtaccgcagcgtttaccgcacccccgtacaggtacgcgcctttcgcgtccagatactcaattaggcattcttctacgctgccgccgtgcttccaggcggcaaagccgctgccgggtcttcctgctgttcgcccatggttgtactgccgctgtcctccacatcaaggggcagatca

SEQ ID NO: 29447 - DNA, 260 bp, Unknown
  Description of Unknown: RightRegion for integrase B3448 sequence
aaaggttcagcttttgcgccgtcaagcgcattgtataaacctgtcagggaatttctctgacaggtttatttttttgattaataatgatatactattcttattgcagaccattgaggattggagaccggctatgattgattgtaagaagattcagaaaatgattgtgcctttttcaaaaggcgagctgacactcaaagcagaagaaatgtttgttaaacatctggaacaatgccaggactgccgggaagaatttgaaattt

SEQ ID NO: 29448 - DNA, 260 bp, Unknown
  Description of Unknown: RightRegion for integrase B3449 sequence
gagatcattgtcttgcgttatggtttctggctggcactcgatttgaccgttcaggcttgacctgggcggtcttttcgtttagggcggccgaggctcctcagcaatgctcttccagtcgattctcttcccgcaatcggggcagaacgaaaagcgagtcaaatctgtgctgcgccgccgatcggcgtactgcttaagcgtaaacaccttcgcgtagaggctctcgcagttacaaagcacggggtcgtcccgcaaactgcggt

SEQ ID NO: 29449 - DNA, 260 bp, Unknown
  Description of Unknown: RightRegion for integrase B3450 sequence
aaatcctacaccaaatccggcagcgacatgcacgtcaccctctaccccctcgcggattgatggttatacatttattcggtacgcatgaatgaatcccatctaaatatagattctatagcaagcggaaatccctcctggtgacaggagggatttctttattttgcgatatgctcataatacgccatgagcttctgttccggccccgggccgtccttgtcgagcaggaaagccttggccagagcggcgtagaactccgggcg

SEQ ID NO: 29450 - DNA, 260 bp, Unknown
  Description of Unknown: RightRegion for integrase B3451 sequence
gccgatgagcgggtggtgtttcggttcaaggatgggaaggaaatcgtaacgaggctatgaaacattacagaaacaggcccaggtcggcaggtggacttctgctggcctgggtctgttttggggatatctcgcttcagtacagtttgatgatctacttgtaaaaaagaagaaaatccaatataatattcctgcaccaagaaaggcggtgaattccatggctttagaatccaatacatattccggaatatgtaaatacaagg

SEQ ID NO: 29451 - DNA, 260 bp, Unknown
  Description of Unknown: RightRegion for integrase B3452 sequence
gacaaatcaataacattcaaattttataacgggaaagaaataactttaacatctgcttaactagtggctgttttttttgttttgcatttcgatttttgcgcctatcatgttataattgctttggaagattaaatagtataaacgaactctcttatatagatttcctaaaggagtgattattttgccaggtttagatgaaagaaaaaaagtctttaaagcaagcaataagaagcatcaaaaattatatgaccattatattg

SEQ ID NO: 29452 - DNA, 260 bp, Unknown
  Description of Unknown: RightRegion for integrase B3453 sequence
ataacgatagttgttagctgttcggtgtttgttttttcagtaaaaatgccggaggcgtaatgcctccggcttttcttatttttccacaatctctactttgacgtctatccagcccagatgcgcgtgtttgatggcgacagggaatactccgtcctttgggcggtagacctgtgcgccggacggggaaacatgaacgacactcaaatcctccgtcttatatatcatcgcctcgccgctttgccccacagcccgcgttgtag

SEQ ID NO: 29453 - DNA, 260 bp, Unknown
  Description of Unknown: RightRegion for integrase B3454 sequence
aaatcctacaccaaatccgggagcgacatgcacgtcaccctctaccccctcgcggattgaacattatacatttattcggtacgcatgaatgaatcccatctaaatatagattctatagcaagcggaaatcccccctggtgacaggagggatttctttattttgcgatatgctcataatacgccatgagcttttgttccggccccggtccgtccttgtcgagcaggaacgcctttgccagagcagcgtagaactccgggcg

SEQ ID NO: 29454 - DNA, 260 bp, Unknown
  Description of Unknown: RightRegion for integrase B3455 sequence
aagtcctacagcaaagccggcagcgacatgcgcgtcaccctgtaccccctcacagattgatccccccccaccttccaagcaaaaatcaaggaacccgtgtaattgagatcctcaattacacgggtttcattcatgcgtaccagctaattgtctatttcgcgatatgctcataatactccatgagcttgcgctccgggcccgggccgtccttgtcgagcaggaaggctttggccagcgccgcgtaaaactccgggcggttg

SEQ ID NO: 29455 - DNA, 260 bp, Unknown; identical to SEQ ID NO: 29373
  Description of Unknown: RightRegion for integrase B3456 sequence

SEQ ID NO: 29456 - DNA, 109 bp, Unknown; identical to SEQ ID NO: 29382
  Description of Unknown: RightRegion for integrase B3457 sequence

SEQ ID NO: 29457 - DNA, 260 bp, Unknown
  Description of Unknown: RightRegion for integrase B3458 sequence
cgcaatgaaattgaaatacggtttatcggcggctacaaaaagacaatgcagctgacataaaaataaagagggcatacccaatcggagataaggcatcttcgattgggtatgccctttttcacttttatcggaaagaggtagctatgaagctgggagagaaaatcaagctggttcgtaagcacagaggactaacgcagcgggaactgggagaacgactgcacttggatggaaatgcagcaaatcgcattgcccaatatgag

SEQ ID NO: 29458 - DNA, 105 bp, Unknown
  Description of Unknown: RightRegion for integrase B3459 sequence
aaatcctattccaaagcaggcagcgatatgtgcctaaccctttaccccctcactgattgatttgccgccttccctttcaggtctacaattacgtgggccgcatga

SEQ ID NO: 29459 - DNA, 260 bp, Unknown
  Description of Unknown: RightRegion for integrase B3460 sequence
acacgaaaacaatggagcggaatactgcaagagccgacctatcaaagaagaagcccttgagaaagcgtttgtaagggcattaaacgaacttataggagacaaggaacgaatactcgaaaaactgcaaagtgcgaccgtgagcgaaataacggactcctgtgcgacagcgataaatgaagtgaatgccgagatagaaaaattacaagagcagatgatggaactgctgatgaaaaggaacaacggagagattaccgataaag

SEQ ID NO: 29460 - DNA, 109 bp, Unknown; identical to SEQ ID NO: 29364
  Description of Unknown: RightRegion for integrase B3461 sequence

SEQ ID NO: 29461 - DNA, 260 bp, Unknown
  Description of Unknown: RightRegion for integrase B3462 sequence
gtagaccccggagacttcacgcttggcatattaccgcgcttgcctaagaaaggcagttaattttatacccatgtgtgttatcctttcgggtcacactcataagtcatgatgatcacataatccgcgatcctgccctgggcagcgtaatcgtgcgcttcgtagagcactccgcgctggtcggcggatatcttgggagccagagccgtaacgacgatataaccctgctcgtgaagtaggtccgcaagccgctgaaggaatgc

SEQ ID NO: 29462 - DNA, 260 bp, Unknown
  Description of Unknown: RightRegion for integrase B3463 sequence
atagcaatagttgttagttgttcggtgtttgttttttcagtaaaaatgccggaggcgtaatgcctccggcatttcttatttttccacaatctccactttgacatctatccagcccagatacgcgtgtttgatagcgacagggaatactccgtcctttgggcggtagacatatgcgccggacggtgaaacatgaataacattcagatcctccatcttatatatcatcgcctcgccgctttgccccacagcccgcgttgtag

SEQ ID NO: 29463 - DNA, 260 bp, Unknown
  Description of Unknown: RightRegion for integrase B3464 sequence
cgctggggacgtccggataatttctcactgaagatctatccgcgcgtaccgccagcgtaaccgcggcatctgaaaagccttgatttctcaaggaaaaatctcatttccaacgtgctgggactgattcctccgttccaatatccgtcagtgtcgccatacactcccggtacggcatggtataacgttgtgccagataccgcatgctggcgctcagttcaccatcgggaccgcccaatggtatgttagccaggcaatccggc

SEQ ID NO: 29464 - DNA, 260 bp, Unknown
  Description of Unknown: RightRegion for integrase B3465 sequence
gtagatccaggagacttcacaattggcatattaccgcgcttgcctaagagaggcagttaattttatgcccatgtatgatatcctttcgggtcacattcatacgacccgaaaggataacatacacatttaccttaaacaaaaaagcactcggcattttaatcaagcaccgagccttatacaatattgacaaattcctcacttcaaattaaattaaagctacaaaaataacaaaaaagcattgacatgaacaaagagatatg

SEQ ID NO: 29465 - DNA, 260 bp, Unknown
  Description of Unknown: RightRegion for integrase B3466 sequence
aaatcctacaccaaatccggcagcgacatgcacgtcaccctctaccccctcgcggattgatggttatacatttattcggtacgcatgaatgaatcccatctaaatatagattctatagcaagcggaaatccctcctggtgacaggagggatttctttattttgcgatatgctcataatacgccatgagcttctgttccggccccggtccgtccttatcgagcagaaacgcctttgccagcgcggcgtagaactccgggcg

SEQ ID NO: 29466 - DNA, 260 bp, Unknown
  Description of Unknown: RightRegion for integrase B3467 sequence
aaatcctattccaaagcaggcagcgatatgtgcctaaccctttaccccctcactgattgattttccgcctttccttttcagatctacaattacgtgggccgcatgaatgtggcccatgtaattttagataccaacaagcgccgaagcgagttgttcgcttcggcgcttattttaagattcccagaatgatttgcaggatcacgcagagctgttccagtgttgcttcgtttagtaataagtcgattctttcccgtgtcttt

SEQ ID NO: 29467 - DNA, 260 bp, Unknown
  Description of Unknown: RightRegion for integrase B3468 sequence
aaaaccaaaaaattagatgattttgatttagtcctttatcccaaattgccaagaacgtaaaaagagcagcggaattatccgttgctctttttggcgtcattatctactataaatattcgtcgcccacatatccaaccctgtacatgcagtcgtgtctctcccttttggtcgcacgcatgggtaatcctatgtgtaaggcgcatgagccaccagctttccaaaatgcttctcctctgccagctgcaaaaatgcctgcacat

SEQ ID NO: 29468 - DNA, 129 bp, Unknown
  Description of Unknown: RightRegion for integrase B3469 sequence
aaatcctacaccaaatccggcagcgacatgcacgtcaccctctaccccctcgcggattgatggttatacatttattcggtacgcatgaatgaatcccatctaaatatagattctatagcaagctgaaat

SEQ ID NO: 29469 - DNA, 260 bp, Unknown
  Description of Unknown: RightRegion for integrase B3470 sequence
gcagaaaagttcgttttagctctccacaaccgcaccaaagagcttcaagctttggcttgaggctctttttctttgtcttggcttttaagttgtttattgctctgccaaaagcagagagatgattaccgctccggtatcagtgaggaaaaaaggtcatatgaaggtttaccacaagctgtcaggcgaatttccatatgcctgcgtttccctgtggccctgaatctggctctaaaccgtgttcccaataaagcaagataaaa

SEQ ID NO: 29470 - DNA, 260 bp, Unknown
  Description of Unknown: RightRegion for integrase B3471 sequence
gctgaggttatgttcgaattaaagtgcggactgaatttgaaagaaaggctggtgaaataaatgacgcatataccctatggatatagcattgttgatggcaaggcagtaattgatgaagaacaggctgcgaaggtgcggatgattttttcggattacttaagtggaatgtcactggcggctgttgctgccaagaacggtctgaagatgctccacagcagggttggacaactacttcgcaaccgtcactaccatggggatgc

SEQ ID NO: 29471 - DNA, 260 bp, Unknown
  Description of Unknown: RightRegion for integrase B3472 sequence
aaatcctattccaaagcaggcagcgatatgtgcctaaccctttaccccctcactgattgatttgccgccttcccttttcaggtctacaattacgtgggccgcatgaatgaatcccatttaaatgtagattttatagcaagtgaaaatccctcctgcgagcaggagggatttctttattttgcgatatgctcataatactccatcagcttccgctccggccccgggccgtctttatcgatcaaaaacgccttcgccagcgc

SEQ ID NO: 29472 - DNA, 260 bp, Unknown
  Description of Unknown: RightRegion for integrase B3473 sequence
gtttttcacgacgggcgtatcgtttttacttttgtcaatggaatggaggcagaaggataaattagaagacaagccctttcaacaaaacgggaatgtcttgtcgaaagggtgattcagtcaaatatccaaagtttcctgattgtagtctatgtctgtaagcggctcaacatcaaaggtttcttcgggctcggcatattcttctaccggagttctattcttgggctttgttttatataagctgctcatacggagtggattcc

SEQ ID NO: 29473 - DNA, 260 bp, Unknown
  Description of Unknown: RightRegion for integrase B3474 sequence
gccgatggcaggatggtttacagttttctgaatggaagcgacatcaccgtgatgctgtaaagtccggcctttattttaccatcggctgtttaacgattggcggtcgtttaacgattactgaccactacagatggtagccgagagcataaaacacctccgaaaacacctcccaaacggcacatatgggaacagccgggcaggaaatgcacaacgctgtttcaaaaagccttgatatacgggcatttcggggcataaaaaaa

SEQ ID NO: 29474 - DNA, 260 bp, Unknown
  Description of Unknown: RightRegion for integrase B3475 sequence
aaatcctacaccaaatccggcagcgacatgcacgtcaccctctaccccctcgcggattgatggttatacatttattcggtacgcatgaatgaatcccatctaaatatagattctatagcaagcggaaatccctcctggtgacaggagggatttctttattttgcgatatgctcataatacgccatgagcttctgttccggccccgggccgtctttgtcgagcaggaacgcctttgccagagcagcgtagaactccgggcg

SEQ ID NO: 29475 - DNA, 86 bp, Unknown
  Description of Unknown: RightRegion for integrase B3476 sequence
gcagaaaagttcgttttagctctccacagccgcaccaaagagcttcaagctttggcttgaggctctttttctttgtcttggctttt

SEQ ID NO: 29476 - DNA, 260 bp, Unknown
  Description of Unknown: RightRegion for integrase B3477 sequence
gcagaaaagttcgttttagctctccacaaccgcaccaaagagcttcaagctttggcttgaggctctttttctttgtcttggcttttaagttgtttattgccctgccaaaagcagagagataattaccgctccggtatcagtgaggaaaaaaggccatatgaaggtttaccacaagctgtcaggcgaatttccatatgcctgcgtttccctgtggcactgaatctggctctaaaccgtgttcccaataaagcaagataaaa

SEQ ID NO: 29477 - DNA, 260 bp, Unknown
  Description of Unknown: RightRegion for integrase B3478 sequence
gagattatcgtcttgcgttatggtttctggctggccctcgatttgaccgttcaggtttgacctgggcggtcttttcgtttagggcggccggggctcctcagcaatgctcttccagtcgattctcttcccgcaatcagggcagaatgagaaacgggtcaaatccgtgctgcgccgtcgatcggcgtactgcttaagcgtgaacacctttacataaaggctcaggcagttacggaacgctgggtcagtgcgtaaactacgat

SEQ ID NO: 29478 - DNA, 260 bp, Unknown
  Description of Unknown: RightRegion for integrase B3479 sequence
aaatcccactccaaatccggcagcgacatgcgcgtgaccctttaccccctcaccgattgatcccctgccccgccttttcgtatccacaattaaacgggccacatgaatgcgacccgcgtaattatagatatcaacaagcgccgaagcgagttgttcgcttcggcgcttattttaagattcccagaatgatttgcaggatcacgcagagctgttccagtgttgcttcgtttagtaataagtcgattctttcccgtgccttt

SEQ ID NO: 29479 - DNA, 260 bp, Unknown
  Description of Unknown: RightRegion for integrase B3480 sequence
gagattatcgtcttgcgttatggtttctggctggccctcgatttgaccgttcaggcttaacctgggcggtcttttcgtttagggtggtcgagactcctcggcaatgctcttccagtcgattctctttccgcaatcggggcagaacgaaaagcgagtcaaatctgtgctgcgccgccgatcggcgtactgcttaagcgtaaaaaccttcgcatagaggctctcgcagctacaaagcgtggggtcgtcccgcaaactgcggt

SEQ ID NO: 29480 - DNA, 91 bp, Unknown
  Description of Unknown: RightRegion for integrase B3481 sequence
aaatcctacaccaaatccggcagcgacatgcacgtcaccctctaccccctcgcggattgatggttatacatttattcggtacacatgaatg

SEQ ID NO: 29481 - DNA, 260 bp, Unknown
  Description of Unknown: RightRegion for integrase B3482 sequence
gtagatccaggagacttcacaattggcatattaccgcgcttgcctaagaaaggcaattaattttatatccatgtatgatatcctttcgggtcacactcatatgtcattataataacgtaatcgactatcctgccctgctcggcataatcgtgagcctcgtacagtaagcccggctggtctgcggatatcttcggggcaatcgctgacatcacgatgaagccttcgttgtgcagacgctccgtgagccgctcaaggaacgc

SEQ ID NO: 29482 - DNA, 260 bp, Unknown
  Description of Unknown: RightRegion for integrase B3483 sequence
aaatcctacaccaaatccggcagcgacatgcacgtcaccctctaccccctcgcagattgacggttatacatttattcggtacgcatgaatgcgacccgaccgtcgaccagtgcaccgactgcctgtccttcgtcaagaagtaaatttcccgcaccccgcgccgcggccaccgccgcggcgcggggatctttgttccgtgatccgctgtttacgatcgcgcgatcgcgtcccactgttcccctatcgcaaattccgcgcag

SEQ ID NO: 29483 - DNA, 260 bp, Unknown
  Description of Unknown: RightRegion for integrase B3484 sequence
caaaatattggacacaactcacactacctagcatcaaatccacaacgaaatcacacttgaaaaaaactttacaattttaaaataggtattgacaaacttttccaaatatgccaatataagttcaggagattttcaatgaataaaaaatttaaagaaataagagtattggattactcatatccatcaacttccacatcagataattgccaaaacgaacactacagatttgaatttgtttacagtggaacaataagcaaaat

SEQ ID NO: 29484 - DNA, 260 bp, Unknown
  Description of Unknown: RightRegion for integrase B3485 sequence
gcagaaaagttcgttttagctctccacaaccgcaccaaagaaaagcacctagaaacgtaagtttttaggtgctttctttttgttgtaccgcagcgtttaccgcacccccgtacaggtacgcgcctttcgcgtccagatactcaattaggcattcttctacgctgccgccgtgcttccaggcggcaaagccgctgccgggtcttcctgctgttcgcccatggttgtactgccgctgtcctccacatcaaggggcagatcaa

SEQ ID NO: 29485 - DNA, 260 bp, Unknown
  Description of Unknown: RightRegion for integrase B3486 sequence
aagttccgcctgctgaatgggatggaactggcagaaaacatagagaggacggtgcgataaatggcgtggcaaagaaaaattcctttcggctatcaggtccggaacggcaggatcaactgccatccggaggaagcagagcttgtaagggctatcttctcccgctatctgctgggcggctcctacagtcagatcgctgacgagatgacccagcaaggtgtgcgctatcatcaacataatgcccagtggaacaaacacatggt

SEQ ID NO: 29486 - DNA, 260 bp, Unknown; identical to SEQ ID NO: 29423
  Description of Unknown: RightRegion for integrase B3487 sequence

SEQ ID NO: 29487 - DNA, 260 bp, Unknown
  Description of Unknown: RightRegion for integrase B3488 sequence
aaatcctacaccaaatccggcagcgacatgcacgtcaccctttaccccctcgcggattgatggttatacatttatttggtacgcatgaatgaatcccatctaaatatagattctatagcaagcggaaatccctcctggtgacaggagggatttctttattttgcgatatgctcataatacgccatgagcttctgttccggccccgggccgtccttgtcgagcaggaacgcctttgccagagcagcgtagaattccgggcg

SEQ ID NO: 29488 - DNA, 90 bp, Unknown
  Description of Unknown: RightRegion for integrase B3489 sequence
aaatcctacaccaaatccggcagcgacatgcacgtcaccctctaccccctcgcggattgatggttatacatttattcggtacgcatgaat

SEQ ID NO: 29489 - DNA, 260 bp, Unknown
  Description of Unknown: RightRegion for integrase B3490 sequence
aaatcctacaccaaatccggcagcgacatgcacgtcaccctctaccccctcgcggattgatggttatacatttatttggtacgcatgaatgaatcccatctaaatgtaggttctatagcaagcggaaatccctcctggtgacaggagggatttctttatttcgcgatatgctcataatacgccatgagcttctgttccggccccggtccgtccttatcgagcagaaacgcctttgccagcgcggcgtagaactccgggcg

SEQ ID NO: 29490 - DNA, 260 bp, Unknown
  Description of Unknown: RightRegion for integrase B3491 sequence
aaatcctattccaaagcaggcagcgatatgtgcctaaccctttaccccctcactgattgatttgccgccttcccttttcaggtctgcaattacgtgggccgcatgaatgaatcccatctaaatatagattctatagcaagcggaaatccctcctggtgacaggagggatttctttattttgcgatatgctcataatacgccatgagcttctgttccggccccgggccgtctttatcgagcaggaatgcctttgccagcgc

SEQ ID NO: 29491 - DNA, 260 bp, Unknown
  Description of Unknown: RightRegion for integrase B3492 sequence
gcagaaaagttcgttttagctctccacaaccgcaccaaagaaaagcacttaagaacgtaagtttttaagtgctttctttttgctgtaccgcagcgtttaccgcacccccgtaccggtacgcgcctttcgcgtccagataatggacttctgtacagcttcgactgcttcggtcaggtcgttgacagcttccacgatgtcgtacgggtcggggtcatcgtgaattcggcatttattcccacaccctgaccggggatgccgcc

SEQ ID NO: 29492 - DNA, 260 bp, Unknown
  Description of Unknown: RightRegion for integrase B3493 sequence
aaatcctacaccaaatccggcagcgacatgcacgtcaccctctaccccctcgcggattgatggttatacatttatttggtacgcatgaatgaatcccatttaaatgtagattctatagcaagcggaaatcccccctggtgacaggagggatttctttattttgcaatatgctcataatacgccatgagcttctgttccggccccgggccgtccttgtcgagcaggaacgcctttgccagcgcggcgtagaactccgggcg

SEQ ID NO: 29493 - DNA, 260 bp, Unknown
  Description of Unknown: RightRegion for integrase B3494 sequence
ataacgatagttgttagctgttcggtgtttgttttttcagtaaaaatgccggaggcgtaatgcctccggcttttcttatttttccacctttagtcataccagcaaggacaataggctgtaccgctaaagcggtacaaaaatgcatggcaaagtttgtgcagcttgcctattgaaagtgtaccgctaaagcggtacaatataatcgccgaaaggcaaacaagccacacgaaaaaggagaacaggatcatggatgaaatcag

SEQ ID NO: 29494 - DNA, 260 bp, Unknown
  Description of Unknown: RightRegion for integrase B3495 sequence
aaatcctattccaaagcaggcagcgatatgtgcctaaccctttaccccctcactgattgatttgccgccttccctttcaggtctacaattacgtgggccgcatgaatgtggcccacataattgtagatatcaataagcgccgaagcgagttgttcgcttcggcgcttattttaagattcccagaatgatttgcaggatcacgcagagctgttccagtgttgcttcgtttagtaataagtcgattctttcccgtgtctttt

SEQ ID NO: 29495 - DNA, 260 bp, Unknown
  Description of Unknown: RightRegion for integrase B3496 sequence
gcagaaaagttcgttttggctctccacaactgcaccaaagaaaagcacctagaaacgtaagtttttaggtgctttctttttgctgtaccgcagcgtttaccgccccccgtacaggtacgcgcctttcgcgtccagatactcaattcggcattcttctacgctgccgccgtgcctccaggcggcaaagccgctgccgggtcttcctgctgttcgcccatggttgtactgccgctgtcctccacatcaaggggcagatcaag

SEQ ID NO: 29496 - DNA, 260 bp, Unknown
  Description of Unknown: RightRegion for integrase B3497 sequence
atagcaatagttgttagttgttcggtgtttgttttttcagtaaaaatgccggaggcgtaatgcctccggcatttcttatttttccacaatctccactttgacatctatccagcccagatgcgcgtgtttgatagcgacagggaatactccgtcctttgggcggtagacatatgcgccggacggtgaaacatgaatgacattcagatcctccatcttatatatcatcgcctcgccgctttgccccacagcccgcgttgtag

SEQ ID NO: 29497 - DNA, 260 bp, Unknown
  Description of Unknown: RightRegion for integrase B3498 sequence
cggcaagaaatcgaaatctactttatcggcggttatacccaaaagattgaccttatatagagccattcactcatacacaaacgcccgcactggcaagtcgaaaacgcttgctgatgcgggtattactttttgggaaagtgagctattacacgatggatacaggattacggatcaaactggtacgcgagcatcgcggccttacacaacaaaaattgggtgagatgctcggatacggaaagagcagcgcgaaccgcattgca

SEQ ID NO: 29498 - DNA, 260 bp, Unknown
  Description of Unknown: RightRegion for integrase B3499 sequence
gcagaaaagttcgttttggctctccacaactgcaccaaagagcttcaagctttggcttgaggctctttttctttgtcttggcttttaagttgtttattgccctgccaaaagcagagagatgattaccgctccggtatcagtgaggaaaaaaggccatatgaaggtttaccacaagctgtcaggcgaatttccatatgcctgcgtttccctgtggccctgaatctggctctaaaccgtgttcccaataaagcaagggcaat

SEQ ID NO: 29499 - DNA, 260 bp, Unknown
  Description of Unknown: RightRegion for integrase B3500 sequence
ataccttcttcctctgataaggggttcggatttgaggggttagagtccaccaaaaaataagagacacgcgaaagcgtgtctcttattttttgggttcactcatttcattcgttcaccccaagggtaattaaaatgctcggtggaagtgaatcccacctccgccaagattttgctgcgcaaaatgcttgcacggcgcaaatgcgccggttttggtatccgtaggacatttaacagcgcacaaacaaatgaattgcttgtgc

SEQ ID NO: 29500 - DNA, 260 bp, Unknown; identical to SEQ ID NO: 29378
  Description of Unknown: RightRegion for integrase B3501 sequence

SEQ ID NO: 29501 - DNA, 260 bp, Unknown
  Description of Unknown: RightRegion for integrase B3502 sequence
aaatcctacaccaaatccggcagcgacatgcacgtcaccctctaccccctcgcggattgaacattatacatttattcggtacgcatgaatgaatcccatctaaatataggttctatagcaagcggaaatccctccttgtgacaggagggatttctttattttgcaatatgctcataatacgccatgagcttctgctccggccccgggccgtctttatcgagcaggaacgcctttgccagcgcagcgtagaactccgggcg

SEQ ID NO: 29502 - DNA, 260 bp, Unknown
  Description of Unknown: RightRegion for integrase B3503 sequence
atcttattttttgtcggttcacttttcggaatatcgtgtaaaatagcggataggcgttgacctgtccgctattttatcttgcaattataaagaatcgtgctataatgcaattaaagagcctctggctctatatcctatttcacgcggcagtctcgctccggcggggctgctgttttatattttgccgacgtcggcaaaatgttatgtgtccacttttttggcttgactatatagttatatgttgctaaaatcaaaaagaa

SEQ ID NO: 29503 - DNA, 260 bp, Unknown
  Description of Unknown: RightRegion for integrase B3504 sequence
gtagatccaggagacttcacaattggcatattaccgcgcttgcctaagagaggcagttaattttatgcccatgtatgatatcatttcgggtcacattcatatgtcattataataacgtaatcgactatcctgccctgctcggcataatcgtgagcctcgtacagtacgcccggctggtctgcggatatcttcggggcaagcgctgacatcacgatgaagccttcgttgtgcagacgctccgtgagccgctcgaggaacgc

SEQ ID NO: 29504 - DNA, 109 bp, Unknown
  Description of Unknown: RightRegion for integrase B3505 sequence
gtagatccaggagacttcacaattggcatattaccgcgcttgcctaagaaaggcagttaattttatacccgtgtatgatatcctttcgggtcacactcatatgtcatta

SEQ ID NO: 29505 - DNA, 257 bp, Unknown
  Description of Unknown: RightRegion for integrase B3506 sequence
ccaaaaagaaccagtcgaacatgttcggctggttcttttttctctttgtttcccctttgaacccctttgaacagaagtgctccgctttcaagatttacagcatctgtacagaagccgcaaatcgagacagcggagcactttattttatggttttgtgaaacgttattcaaacagcagaatcaagaccgtcctgccaatgcctctccctttgggagaggtggcattgcgaagcaatgacggagaggggcagtcgttca

SEQ ID NO: 29506 - DNA, 260 bp, Unknown
  Description of Unknown: RightRegion for integrase B3507 sequence
aagtctgtaaagtataatgaagttgataagactttttttatagaattttatcatccctaactgtatccctatgcagttaggaaacaatagcatttgcacaagtaccttaaatgcctacactattgataaatataaaataggaaatactcttggagaaaagctaagatattatagactaaatgctaacttaactcaagaagaactagcctctattgttggatattcttcaggagtatgtataaaagatatagaagcaaata

SEQ ID NO: 29507 - DNA, 260 bp, Unknown
  Description of Unknown: RightRegion for integrase B3508 sequence
aaatcctacaccaaatccggcagcgacatgcacgtcaccctctaccccctcgcggattgacggttatacatttatttggtacgcatgaatgcgacccgaccgtcgaccagtgcaccgactgcctgtccttcgtcaagaagtaaatttcccgcaccccgcgctgcggcaaccgccgcggcgcggggatctttgttccgtgatccgctgtttacgatcgcgcaatagcctccctgttcccctatcgcaaattccgcgcagat

SEQ ID NO: 29508 - DNA, 260 bp, Unknown
  Description of Unknown: RightRegion for integrase B3509 sequence
cgtaatgaaattgaaatatggttcattggtggatatgagaaagcaatgccgctagaataaggaaccttgagtgaaacacattatgaactaccgttcgcagaaaattaagaatctggagtgaaacaaaacttgataaaaagaacgctttatggtaagatggagacaaagaacaagaagtgaaaaaggggaggtgtacaccaatgggattagctgatacggtcacaaaagcctatatgaaagaaaatactgtatttgcagat

SEQ ID NO: 29509 - DNA, 260 bp, Unknown
  Description of Unknown: RightRegion for integrase B3510 sequence
gtttaccacgacgggcggatcgtattcacctttgttaacggcatggaggctgaaggctaaataagcagacaagccctttcgacaaaacgggaatgtcttgtcgaaagggtgatgcaatcaaatatccatactttcctgatcgtagtccatgtctggaagcggctcatcatcaaaggtttcttctggctcgacatattcttcgacctgagctctgttcttgggctttgttttatataagctgctcatacggagcgggttcc

SEQ ID NO: 29510 - DNA, 260 bp, Unknown
  Description of Unknown: RightRegion for integrase B3511 sequence
cctggtatcggacgattcgttgccaatccctttgaactggatatctacctgcgcctgtgatcttcgggcgcaggcattattttcactgtattaaggctttttctgcctgtaatctcctacttttatgcaaaaataatcacttccatcatgtatgagcgaatgaactggctcatatggaaatgatctgcgctatggtgcgacagctgacacaggatctgacaccggaagaaattcagaaaagtgggtttgatacctactat

SEQ ID NO: 29511 - DNA, 109 bp, Unknown; identical to SEQ ID NO: 29382
  Description of Unknown: RightRegion for integrase B3512 sequence

SEQ ID NO: 29512 - DNA, 260 bp, Unknown
  Description of Unknown: RightRegion for integrase B3513 sequence
cctggtatcggacgattcgttgccaatccctttgaactggatatctacctgcgcctgtgatctttgggcgcaggcattattttactgtatcaaggctttttctgccagtaatctcctgttttcacgcaaaaataatcacttccatcatgtatgagcgaatgaatttgctcaaagaagatggaagtgactactacatataataagaaggtttgaaaaacttgtatatgactatattacacgattactctgcctttttcaac

SEQ ID NO: 29513 - DNA, 260 bp, Unknown
  Description of Unknown: RightRegion for integrase B3514 sequence
gattttaagctagagctattcccgaaactgcccaagaacaaagggaattctagcaaatgatatagtcgaaccaccaacgaacttgggcatcttgaaatggtcggctccattgtttcccagcttgtaaaagaccttccttgtgatgatattgaccttgcaggctttgagaaatactatgtcgaccacactttgggcgtatggccacagtctgccggaggtgttcctttctcagctactaccttccaatcttgtggtgatcc

SEQ ID NO: 29514 - DNA, 109 bp, Unknown
  Description of Unknown: RightRegion for integrase B3515 sequence
gattttaagctagagctattcccgaaactgcccaagaacaaagggaattctagcgaatgatatagtcgaaccaccaacgaacttgggcatctcgaaatggtcggttcca

SEQ ID NO: 29515 - DNA, 260 bp, Unknown
  Description of Unknown: RightRegion for integrase B3516 sequence
ataattgatggaaaaagaatacaaaaaattgaaatagaatataattttattaatgattaatttggatctattttatatttaataatccaattatgtatgtcgatcctaatggacatgctcctaagtggtggcaaagcattcttattggattgggagtaatcgctattgcagctttagcaactgctgcgattgtatgctctggaggaagtgctacaccgtttttggcagttgcgggacaagcagctctaggtggattaaaa

SEQ ID NO: 29516 - DNA, 109 bp, Unknown
  Description of Unknown: RightRegion for integrase B3517 sequence
cctggtatcggacgattcgttgccaatccctttgaactggatatctacctgcgcctgtaatctttgggtgcaggcattattttcactgtattaaggctttttctgcctg

SEQ ID NO: 29517 - DNA, 109 bp, Unknown
  Description of Unknown: RightRegion for integrase B3518 sequence
gattttaagctagagctattcccgaaactgcccaagaacaaagggaattctagcgaatgatatagtcgaaccaccaacgaacttgggcatcttgaaatggtcggctcca

SEQ ID NO: 29518 - DNA, 260 bp, Unknown
  Description of Unknown: RightRegion for integrase B3519 sequence
aaggacgagaataggacggcagtgaataccgtgccctttggcacggtagagccgtcctgaccgacgagcgtcgagcgaggagaaagagtccttctgcccctgccaaaaagatcagttgcaaaagcagccgatttttttcgcttcttgcatctgccccgcatattttccacgcctccggccaaactaccgccggaggtgtttttttatgagcccgaaagaattgctttatatcgacgatgcgctcggccacgagcagtttc

SEQ ID NO: 29519 - DNA, 260 bp, Unknown
  Description of Unknown: RightRegion for integrase B3520 sequence
gattttaagctagagctattcccgaaactgcccaagaacaaagggaattctagcgaatgatatagtcgaaccaccaacgaacttgggcatctcgaaatggtcggctccattgtttcccagcttgtaaaagaccttccttgtgatgatattgaccttgcaggctttgagaaatactatgtcgaccacactttgggcgtatggccacagtctgccggaggtgttcctttctcagctactaccttccaatcttgtggtgatcc

SEQ ID NO: 29520 - DNA, 109 bp, Unknown; identical to SEQ ID NO: 29364
  Description of Unknown: RightRegion for integrase B3521 sequence

SEQ ID NO: 29521 - DNA, 260 bp, Unknown
  Description of Unknown: RightRegion for integrase B3522 sequence
gattttaagctagagctattcccgaaactgcccaagaacaaagggaattctagcgaatgatatagtcgaaccaccaacgaacttgggcatcttgaaatggtcggctccattgtttcccagcttgtaaaagaccttccttgtgatgatattgaccttgcaggctttgagaaatactatgtcgaccacactttgggcgtatggccacagtctgccggaggtgttcctttctcagctactaccttccaatcttgtggtgatcc

SEQ ID NO: 29522 - DNA, 260 bp, Unknown
  Description of Unknown: RightRegion for integrase B3523 sequence
acctccaccaacaaaaagcacctggattcgttgaaatctaggcgcttttctttttgctgaaactggtttataaagcactctatatcacagaacgatttgctattagggcggcttttgtcacaatttgtacgtatttccagcaaaacagaatgattgtataaaatttatacacctgctaaagtttgtttgttgtctgctgcggcgacgcggggtatactgttgccataaggacggcgcaaggatgccgaaaaaagcaataa

SEQ ID NO: 29523 - DNA, 260 bp, Unknown
  Description of Unknown: RightRegion for integrase B3524 sequence
cctggtatcggacgattcgttgccaatccctttgaactggatatctacctgcgcctgtgatctttgggcgcaggcattattttcactgtattaaggctttttctgcctgtaatctcctacttttgtgcaaaaataatcacttccatcatgtatgagcgaatgaattagctcatatggaaatgatctgcgccatcgtccgtcagttaacccaggatctgacaccggaagaaatccagaaaagtggctttgacacctactac

SEQ ID NO: 29524 - DNA, 260 bp, Unknown
  Description of Unknown: RightRegion for integrase B3525 sequence
cctggtatcggacgattcgttgccaatccctttgaactggatatctacctgcgcctgtgatctttgggcgcaggcattattttactgtatcaaggctttttctgccagtaatctcctgttttcacgcaaaaataatcacttccatcatgtatgagcgaatgaatttgctcaaagaagatggaagtgactactatatgtaataagaaggttttggaaacttttatatgattatattacacgattacccgccctttttcaac

SEQ ID NO: 29525 - DNA, 260 bp, Unknown
  Description of Unknown: RightRegion for integrase B3526 sequence
aaaggatttgaaagtttagataaattatttgaaggtagtatacttattaagaacttttaggagttcttatttttttaaaaataataccattcttttgtacaaatattcagttgaggtaacaatgaaggggataaatcaagtgaatttaaattataaaattggacttacctttgttgaaggtttgcgtagtctattaagacaggatcctaatgtgataatggttggagaaattagagacgaagaaactgcgaaaatggctg

SEQ ID NO: 29526 - DNA, 260 bp, Unknown
  Description of Unknown: RightRegion for integrase B3527 sequence
cctggtatcggacgattcgtttccaatccctttgaactggatatctacctgcgcctgtgatctttgggcgcaggcattattttcactgtattaaggctttttctgcctgtaatctcctacttttgtgcaaaaataatcacttccatcatgtatgagcgaatgaatttgctttgacatgatggtagtgatttttctttttaataggaagcgtttatgctctaacaacctgtccttttacaatcttgcaggtcacttctccg

SEQ ID NO: 29527 - DNA, 260 bp, Unknown
  Description of Unknown: RightRegion for integrase B3528 sequence
cgaataccctcttcctctgacaaggggttcggatttgaggggttagagtccaccaaatagtgcaaatccgaactctgtgttcttcataaaacacacttttgggtttgtttacagaatagagaacgcacgataatcgtgcgttctttttctatgccacgggagggggtttaagtagtcaaagtagttgtttttaaggttttgcgtgtaacttcctctaagtacgcgcgtattaagcgaaagtttacgcaaaaaccgatttt

SEQ ID NO: 29528 - DNA, 109 bp, Unknown
  Description of Unknown: RightRegion for integrase B3529 sequence
gattttaagctagagctattcccgaaactgcccaagaacaaagggaattctagcgaatgatatagtcgaaccaccaacgaacttgggcatctcgaaatggtcggctcca

SEQ ID NO: 29529 - DNA, 260 bp, Unknown
  Description of Unknown: RightRegion for integrase B3530 sequence
cctggtatcggacgattcgttgccaatccctttgaactggatatctacctgcgcctgtgatcttcgggcgcaggcattattttcactgtattaaggctttttctgcctgtaatctcctacttttatgcaaaaataatcacttccatcatgtatgagcgaatgaatttgctcaaagaagatggaagtgactactacatataataagaaggttttggaatcttttatagattatattacacgattacccgccctttttcaac

SEQ ID NO: 29530 - DNA, 109 bp, Unknown
  Description of Unknown: RightRegion for integrase B3531 sequence
gtccacgctgatggacggatgacattcaaattccagggtggaacagagattgatgtataaaacccataaagtgaaaagtccgccacatttgttggcgggcttttcgcta

SEQ ID NO: 29531 - DNA, 260 bp, Unknown
  Description of Unknown: RightRegion for integrase B3532 sequence
aatcaaaatccccacagttggcttaataaagctgattgtggggatttttctttttgctgaaatctgtaaaatatcttccaaaaatcacactaatcttaactttattacacctctattacaccccggacattgccttgctgagattatcgaggacgctctctgtgtcgatgtgagtgtacttcaatgtggtgtcgtagctagtgtggcgggttatatccatgatgaccgcttcgggtactccggcctttgaaagcagggta

SEQ ID NO: 29532 - DNA, 109 bp, Unknown
  Description of Unknown: RightRegion for integrase B3533 sequence
cctggtatcggacgattcgttgccaacccctttgaactggatatctacctgcgcctgtgatctttgggcgcaggcattatttttactgtattaaggctttttctgcctg

SEQ ID NO: 29533 - DNA, 109 bp, Unknown
  Description of Unknown: RightRegion for integrase B3534 sequence
gccaaggatgtgctgaaggaatgtgtgtgggatggggacacgctttttcttacgctttaattttcccttttttattttgataccctccggccgcatacgaagtgatgca

SEQ ID NO: 29534 - DNA, 260 bp, Unknown
  Description of Unknown: RightRegion for integrase B3535 sequence
cctggtatcgggcgattcgttgccaatccctttgaactggatatctacctgcgcctgtgatctttggcgcaggcattattttactgtattaaggctttttctgcctgtaatctcctagttttatgcaaaaataatcacttccatcatgtatgagcgaatgaactggctcatatggaaatgatctgcgctatggtgcgacagctgacacaggatctgacaccggaagaaatgcagaaaagtgggtttgatacctactatat

SEQ ID NO: 29535 - DNA, 260 bp, Unknown
  Description of Unknown: RightRegion for integrase B3536 sequence
gattttaagctagagctattcccgaaactgcccaagaacaaaggggattctagcgaatgatatagtcgaaccaccaacgaacttgggcatctcgaaatggtcggctccattgtttcccagcttgtaaaagaccttccttgtgatgatattgaccttgcaggctttgagaaatactatgtcgaccacactttgggcgtatggccacagtctgccggaggtgttcctttctcagctactaccttccaatcttgtggtgatcc

SEQ ID NO: 29536 - DNA, 260 bp, Unknown
  Description of Unknown: RightRegion for integrase B3537 sequence
ttcaaaagcaaaattgactttactttcaaggatggtgaagtgattacagtcaaaatgtaagttaaccattaccgcactcagctaatttggctgggtttttttgtcttcatttatcagtttttgggatgaagtagttgatttaaccgatgataccaatagcccatggaaatggtagtcgctgcaaaaagagcaacgaaaatatagtgcagccaaattaattgatgggctagtgagtagtcggttggcgcaattgtggcaat

SEQ ID NO: 29537 - DNA, 260 bp, Unknown
  Description of Unknown: RightRegion for integrase B3538 sequence
cctggtatcggacgattcgttgccaacccctttgaactggatatctacctgcgcctgtgatctttgggcgcaggcattattttactgtattaaggctttttctgcctgcaatctcctacttttatgcaaaaataatcacttccatcatgtatgagcgaatgaactggctcatatggaaatgatctgcgctatagtgcgacagctgacacaagatctgacaccggaagaaatccagaaaagcgggtttgatacctactatg

SEQ ID NO: 29538 - DNA, 260 bp, Unknown
  Description of Unknown: RightRegion for integrase B3539 sequence
cctggtatcggacgattcgttgccaacccctttgaactggatatctacctgcgcctgtgatctttgggcgcaggcattattttactgtattaaggctttttctgcctgcaatctcctacttttatgcaaaaataatcacttccatcatgtatgagcgaatgaactggctcaaagaagatagaagtgattattacatataataagaaggttttggaaacttttatatgattatattacaccattactctgcctttttcaac

SEQ ID NO: 29539 - DNA, 260 bp, Unknown
  Description of Unknown: RightRegion for integrase B3540 sequence
gattttaagctagagctattcccgaaactgcccaagaacaaagggaattctagcgaatgatatagtcgaaccaccaacgaacttggacatctcgaaatggtcggctccattgtttcccagcttgtaaaagaccttccttgtgatgatattgaccttgcaggctttgagaaatactatgtcgaccacactttgggcgtatggccacagtctgccggaggtgttcctttctcagctactaccttccaatcttgtggtgatcc

SEQ ID NO: 29540 - DNA, 260 bp, Unknown
  Description of Unknown: RightRegion for integrase B3541 sequence
tccacttttgatttcgtgcgcagtggcaagaatgccctgacgcagttattcgccaaatagcgaggtcattgtttgaatgcgtgataaattgaatttatagccttctcataatcgaaggtgtccacacccacgatgatattaagctcggaagagccttggtctatcatgcggacgttgacgtttgcgtcggcaagtgcgccgaaaagggttgcggcagtgccctgtcttgacgccatattgtgtccgacggttgcgatgag

SEQ ID NO: 29541 - DNA, 260 bp, Unknown
  Description of Unknown: RightRegion for integrase B3542 sequence
attgtgaaacgtatagaatgggatggaaaagaccttcatattgatatttttgatatataactatgtagcactttgtcagcatagcattatctatacacctagctgcataagttgccaatctggtgcctttttttttgtcataggtggatatggcttttataagtccaacggttccaatagatatgagatcatctaaatcctttccagtatttgtatacttctttacgatatgagctacaagtcttaaatttctctctatt

SEQ ID NO: 29542 - DNA, 109 bp, Unknown
  Description of Unknown: RightRegion for integrase B3543 sequence
gattttaagctagagctattcccgaaactgcccaagaacaaaggggattctagcgaatgatatagtcgaaccaccaacgaacttgggcacctcgaaatggttggctcca

SEQ ID NO: 29543 - DNA, 109 bp, Unknown
  Description of Unknown: RightRegion for integrase B3544 sequence
gattttaaactagagctattcccgaaactgcccaagaacaaagggaattctagcgaatgatatagtcgaaccaccaacgaacttgggcatcttgaaatggtcggctcca

SEQ ID NO: 29544 - DNA, 260 bp, Unknown
  Description of Unknown: RightRegion for integrase B3545 sequence
aaggacgagaataggacggcagtgaataccgtgccctttggcacggtagagccgtcctgaccgacgagcgtcgagcgaggagaaagagtccttctgcccctgccaaaaggtcggttgcaaaagcagccgattttttttgctctttgcagaagtacatttttccaattccagttttttcaaaatgcgcaactaaattcagttgcatttttatctttttgtgctatactatatgagaaagggaggcatgcggctttggacaa

SEQ ID NO: 29545 - DNA, 260 bp, Unknown
  Description of Unknown: RightRegion for integrase B3546 sequence
gtccacacgaatgggcgaatgaccttccacttccgcagcggaacagagatcgacgcataagattcataaagagaaaaagcccacaggcttacacagcctgtgggcttttctaaattgctggtgaagggagtgcaaatgagccgtagagtgtgcatttctttctagtgggtgcatcctctattaagaaccgggtcatttttcattttaatcgccggtcgaacacctgaatgcgagatcattgtcttgcgttatggtttctg

SEQ ID NO: 29546 - DNA, 260 bp, Unknown
  Description of Unknown: RightRegion for integrase B3547 sequence
aaaaagttccgaagccgttttggcttcggaactttttttgttacctgctttgtgctataatggaaagcaagcatcttgaccacaacgatcaagggggacaaagcagccgattggaaaaccagaaaggagaaggaccaatgacctgttttttctgcaagggaaacttagagaacagcaccacgacccacatgatcgagctgccgcactgcatcctcatcgtgaagaacgtcccctgccaccgctgcgaccagtgcggggag

SEQ ID NO: 29547 - DNA, 260 bp, Unknown
  Description of Unknown: RightRegion for integrase B3548 sequence
cggcttcgccgtgaagtgttcgctctgatccacaacagaaaagcgccgtcttggaagtgattccgagatggcgcttttttgccatatgaggcacacatctgctactgaatgccacaagtattaccgacctaatttcaaagcagatgacctatttatgaaccatagacggctactctctgatatcgaaaagctatcattgacgcagtcagcaaagcaaaagcaaagatgccatgttttattttgattgctttctaagtgcc

SEQ ID NO: 29548 - DNA, 260 bp, Unknown; identical to SEQ ID NO: 29519
  Description of Unknown: RightRegion for integrase B3549 sequence

SEQ ID NO: 29549 - DNA, 260 bp, Unknown
  Description of Unknown: RightRegion for integrase B3550 sequence
aaaaatggtgataatatctcattttctttggatatttatccgaaaattcaacgaaaatagtgtatggtaggatttatgtgccagcacattggcacgtatcgtgtcctccggccaggttgcgtagatctcactgctggccacgtttttgatataatccttatatcttacataataatcctgtgcagaggtatcccctattggcccgtcgtggactacgatatactccgggatcaccactttgtttaatacgatctctccgg

SEQ ID NO: 29550 - DNA, 109 bp, Unknown
  Description of Unknown: RightRegion for integrase B3551 sequence
cggaaagtacattatactttcgctctcgacctttatcccaggttgccaaaaagcccgtaaatacgggctttttgcataatgtccaacatccatgtactgacgaactggc

SEQ ID NO: 29551 - DNA, 260 bp, Unknown
  Description of Unknown: RightRegion for integrase B3552 sequence
cctggtatcggacgattcgttgccaatccctttgaactggatatctacctgcgcctgtgatctttgggtgcaggcattattttactgtatcaaggctttttctgccagtaatctcctgttttcacgcaaaaataatcacttccatcatgtatgagcgaatgaactggctcatatggaaatgatctgcgctatggtgcgacagctgacacaggatctgacaccggaagaaatccagaaaagcgggtttgatacctactatg

SEQ ID NO: 29552 - DNA, 109 bp, Unknown
  Description of Unknown: RightRegion for integrase B3553 sequence
gattttaagctagagctattcccgaaactgcccaagaacaaagggaattctagtgaatgatatagtcgaaccaccaacgaacttggtcatttggaaatggtcggctcca

SEQ ID NO: 29553 - DNA, 260 bp, Unknown
  Description of Unknown: RightRegion for integrase B3554 sequence
gagtattggcaaagcgtggtatcgaaagccacacaaaaagctatcgaaagtttgacatagggtatgtaatgacttaatctaaattctctaacaggtcttaccaaagtattgatacctcatttcgttatgtcgcaaatggggtatttttttatttgacacgcggtatcaatactggtactatgatccacttgggggcaatccccttatagtaagttcaagtttagtaccccctatcgcaaataatttggtacacacccttc

SEQ ID NO: 29554 - DNA, 109 bp, Unknown
  Description of Unknown: RightRegion for integrase B3555 sequence
gattttaagctagagctattcccgaaactgcccaagaacaaaggggattctagcgaatgatatagtcgaaccaccaacgaacttgggcatctcgaaatggtcggctcca

SEQ ID NO: 29555 - DNA, 260 bp, Unknown
  Description of Unknown: RightRegion for integrase B3556 sequence
tggaacggtgacacaacagaaattgagattgatttctggggaagtaaaaaaaaagtgtagggtccaatgactctacacctattttgaatgatatatcgcaatactataaaccttgcatgaccagtgtcaagaagtatgatgttttccgcaaattcatgaagagcatattgctgacaaacttttatatcaagtttcttttcatttctaagttctactggtaaaggtataactgcaaaaccattgtcttttaactctttttg

SEQ ID NO: 29556 - DNA, 109 bp, Unknown
  Description of Unknown: RightRegion for integrase B3557 sequence
cctggtatcggacgattcgttgccaatccctttgaactggatatctacctgcgcctgtaatctttgggtgcaggcattattttactgtatcaaggctttttctgccagt

SEQ ID NO: 29557 - DNA, 260 bp, Unknown
  Description of Unknown: RightRegion for integrase B3558 sequence
cctggtatcggacgattcgttgccaatccctttgaactggatatctacctgcgcctgtgatctttgggcgcaggcattattttcactgtattaaggcttttttctgcctgtaatctcctacttttgtgcaaaaataatcacttccatcatgtatgagcgaatgaattagctcatatggaaatgatctgcgccatcgtccgtcagttaacccaggatctgacaccggaagaaatccagaaaagtggctttgacacctacta

SEQ ID NO: 29558 - DNA, 260 bp, Unknown
  Description of Unknown: RightRegion for integrase B3559 sequence
gacttacataatataaacttcgaattgacggtatacccgaagattcctttgcgtccttaaccataagcctatatgcgcaaatgtatacccccactcgtaagtcatcagcatcacctggtccgccgcctcgcccagcagccggtaatcgacgccctcgtagagcagcccctgctggtcgctggaggtttttggggccagcgccacggagacccggtagccgaaggggctcagaatatgccgcaccagggccacaaactccg

SEQ ID NO: 29559 - DNA, 163 bp, Unknown
  Description of Unknown: RightRegion for integrase B3560 sequence
aacaatataatccgaaccttgtaccgattggtcatgggttcggatttattgtttttatagaagaagttgaagactggtaataaagaaaccgggaggactgccgatcagggcaatcctcccggtttctttatgtagatgcactgtctgaaatctccttctttgc

SEQ ID NO: 29560 - DNA, 260 bp, Unknown
  Description of Unknown: RightRegion for integrase B3561 sequence
gattttaagctagagctattcccgaaactgcccaagaacaaagggaattctagcgaatgatatagtcgaaccaccaacgaactcgtagtctaactatatcattaatataaaggggactattttagcccccttttatacttagtttcttctttattataatagatacttggctttcatataaccaactacaccattatactcaacttttgcatatcctttaccgatatacattacattaacctttgttttatttggaagct

SEQ ID NO: 29561 - DNA, 109 bp, Unknown
  Description of Unknown: RightRegion for integrase B3562 sequence
gattttaagctagagctattcccgaaactgcccaagaacaaaggggattctagcgaatgatatagtcgaagcaccaacgaacttgggcatctcgaaatggtcggctcca

SEQ ID NO: 29562 - DNA, 260 bp, Unknown
  Description of Unknown: RightRegion for integrase B3563 sequence
cggttccggctgaaaaacggcttggagctgctagagcaaatcgaaaggacaagacgctgatgggaaatcggaagctgccgttcggctatcagatgcgcatgggcgaaatcatccggaatgagccggaagcaaaagctgtgcaggacatcttcctacaatatacgctcggcgcgtcgctcaaagagattgcagagcagatgggaaaaaacggccccacctatgacgagggcaagagctggaacaagaacatgatcgcacga

SEQ ID NO: 29563 - DNA, 260 bp, Unknown
  Description of Unknown: RightRegion for integrase B3564 sequence
gattttaagctagagctattcccgaaactgcccaagaacaaaggggattctagcgaatgatatagtcgaagcaccaacgaacttgggcatctcgaaatggtcggctccattgtttcccagcttgtaaaagaccttccttgtgatgatattgaccttgcaggctttgagaaatactatgtcgaccacactttgggcgtatggccacagtctgccggaggtgttcctttctcagctacttccttccaatcttgtggtgatcc

SEQ ID NO: 29564 - DNA, 260 bp, Unknown
  Description of Unknown: RightRegion for integrase B3565 sequence
cctggtatcggacgattcgttgccaacccctttgaactggatatctacctgcgcctgtgatctttgggcgcaggcattatttttactgtattaaggctttttctgcctgcaatctcctacttttatgcaaaaataatcacttccatcatgtatgagcgaatgaactggctcatatggaaatgatctgcgctatagtgcgacagctgacacaagatctgacaccggaagaaatccagaaaagcgggtttgatacctactat

SEQ ID NO: 29565 - DNA, 183 bp, Unknown
  Description of Unknown: RightRegion for integrase B3566 sequence
gccaaggatgtgctgaaggaatgtgtgtgggatggggatacgctttttcttacgctttaattttcccttttttattttgataccctccggacgcattcggagactcgcccggatcagatcgcgcatggaaatctcctgcgaaccatcccggttttctacccgtgtttccaggctgacaagatt

SEQ ID NO: 29566 - DNA, 260 bp, Unknown
  Description of Unknown: RightRegion for integrase B3567 sequence
aagaaggtacattatgctttcaccctcgacctttatcccaaactcccaaaaagcccgtaaatacgggctttttgcataatgtccaacgtccatgtactgacgaactggcccatctggagatggtttccaccattgtccaccagcttacctgcaatctttctatggatgaaattgaaaaatctggttttgggccatattatattgaccatacagtagccgtatggccacaggcggctggtggcgtcccatttaatgcctgt

SEQ ID NO: 29567 - DNA, 260 bp, Unknown
  Description of Unknown: RightRegion for integrase B3568 sequence
gttcacaccaatgggcggatgaccttccgcttccgcagcggaacagagatcgacgtataagatccataaagcgaaaaagtccgcaggtttgagcgcctgcgggcttttctgcattgaaatgcaagagaaatatggtataatgttataaaatgaaagtgagtggggtattaagatgttatttgacgaaaaggatttaagtgtttttgataacacagattctcgcgactactttatggagatacttcaatcatattacagta

SEQ ID NO: 29568 - DNA, 260 bp, Unknown
  Description of Unknown: RightRegion for integrase B3569 sequence
cacggttatatggaaaagtatacgactgttattgaaagttgtgagattgtttctttttgaggaggcagatgatgtttattgattataataatattaatgagttaatgagaggggggtgcggacatattcttggactattttatgctgataatccaagactatgtctgtactctaccgggctcatatagccgagagatttttttattcgttttgtgttataccaatcaatatagctgttaagctcatttatgaaatcatcc

SEQ ID NO: 29569 - DNA, 109 bp, Unknown; identical to SEQ ID NO: 29528
  Description of Unknown: RightRegion for integrase B3570 sequence

SEQ ID NO: 29570 - DNA, 260 bp, Unknown
  Description of Unknown: RightRegion for integrase B3571 sequence
cgatggcatggtagcgttgatgattttgacgttgtggtctatccaaagttgccgagatagcgttatttttatttatgtatagcatgtgtgctctaacgaatccgcccgcagatgatgtacattattattccaaaataaaatagacattcggcagtgctgtatacccctaaatttaaaacgccttaaaatcgattctacagcgtgtttcggcatatgtagcaatttgcacaaatcaggctcttgaattttagccattcata

SEQ ID NO: 29571 - DNA, 260 bp, Unknown
  Description of Unknown: RightRegion for integrase B3572 sequence
tccgggaaaggtaaggatgattttgaattgattttataccccaaattgcctaagtcataaaatgagcagtggaaattactccactgctcctgtcttattatcatattttgatctacacatcagaaatcctgtacctctaactaagctctggatcacatcattgctgtgcacgttagtatccctgtgtataggactacttatgtgtaacgctaaaggtctttgccaaactctttattataatagtccaaaaagcatttttt

SEQ ID NO: 29572 - DNA, 109 bp, Unknown
  Description of Unknown: RightRegion for integrase B3573 sequence
cctggtatcggacgattcgttgccaatccctttgaactggatatctacctgcgcctgtgatctttggcgcaggcattattttactgtattaaggctttttctgcctata

SEQ ID NO: 29573 - DNA, 109 bp, Unknown
  Description of Unknown: RightRegion for integrase B3574 sequence
cctggtatcggacgattcgttgccaatctctttgaactggatatctacctgcgcctgtgatctttgggcgcaggcattattttactgtatcaaggctttttctgccagt

SEQ ID NO: 29574 - DNA, 109 bp, Unknown
  Description of Unknown: RightRegion for integrase B3575 sequence
cctggtatcggacgattcgttgccaatccctttgaactggatatctacctgcgcctgtgatctttgggcgcaggcattattttactgtatcaaggccttttctgcctgt

SEQ ID NO: 29575 - DNA, 260 bp, Unknown
  Description of Unknown: RightRegion for integrase B3576 sequence
cctggtatcggacgattcgttgccaatccctttgaactggatatctacctgcgcctgtgatctttgggcgcaggcattattttactgtatcaaggccttttctgcctgtaatctcctacttttatgcaaaaataatcacttccatcatgtatgagcgaatgaactggctcatatggaaatgatctgcgctatggtgcgacagctgacacaggatctgacaccggaagaaatccagaaaagtgggtttgatacctactatg

SEQ ID NO: 29576 - DNA, 260 bp, Unknown; identical to SEQ ID NO: 29519
  Description of Unknown: RightRegion for integrase B3577 sequence

SEQ ID NO: 29577 - DNA, 260 bp, Unknown
  Description of Unknown: RightRegion for integrase B3578 sequence
cctggtatcggacgattcgttgccaatccctttgaacttgatatctacctgcgcctgtgatctttgggcgtaggcattattttcactgtattaaggcttttttctgcctgtaatctcctacttttgtgcaaaaataatcacttccatcatgtatgagcgaatgaacttgcccacatggaaatgatctgtgccattgtccgtcaattaacccaggacctgacaccggaagaaattcagaaaagcggatttgacacctacta

SEQ ID NO: 29578 - DNA, 102 bp, Unknown
  Description of Unknown: RightRegion for integrase B3579 sequence
aaaaaggggctgtctcaaaatgatttttcaaaatcatatgaggcagtcccttttttctagtattcaccaagaaaaaagacgaattctacgtcaaaaacagta

SEQ ID NO: 29579 - DNA, 260 bp, Unknown
  Description of Unknown: RightRegion for integrase B3580 sequence
cgatggcacggtagcgttgatgattttgacgttgtggtctatccaaagttaccgagatagcgttatttttatttatgtatagcatgtgtgctccaacgagctggcacacgtggagatcatttccgccattgtctatcaattaacacaaggactgacaccggagcaaatcaaggaagcgggcttcgacacctacttcgtcgaccacaccttgggggtatatccccagtctgccgccggtgctcctttcaccgccgcctatt

SEQ ID NO: 29580 - DNA, 109 bp, Unknown
  Description of Unknown: RightRegion for integrase B3581 sequence
gattttaagctagagctattcccgaaactgcccaagaacaaagggaattctagcgaatgatatagtcgaaccaccaacgaacttggtcatttggaaatggtcggctcca

SEQ ID NO: 29581 - DNA, 260 bp, Unknown
  Description of Unknown: RightRegion for integrase B3582 sequence
gcggcggctggcgaactgtccaaaaagttcgcacaaggtcacgttgcctccaccaactgaaagggcgagggtatttggtactgttattttcggacagtatcggatactctcgcctttatttttgttgctgatatgattcttcaaattgatttggggtttgctgtttaagacattcatgcggtcggtaatcgttataaaaatcaatatattctgatagactttcctctaattcggagacagtttcataaaaatgaaatttg

SEQ ID NO: 29582 - DNA, 260 bp, Unknown
  Description of Unknown: RightRegion for integrase B3583 sequence
gattttaagctagagctattcccgaaactgcccaacaacaaaggggattctagcgaatgatatagtcgaaccaccaacgaacttgggcatctcgaaatggtcggctccattgtttcccagcttgtaaaagaccttccttgtgatgatattgaccttgcaggctttgagaaatactatgtcgaccacactttgggcgtatggccacagtctgccggaggtgttcctttctcagctactaccttccaatcttgtggtgatcc

SEQ ID NO: 29583 - DNA, 260 bp, Unknown
  Description of Unknown: RightRegion for integrase B3584 sequence
aaggacgagaataggacggcagtgaataccgtgccctttggcacggtagagccgccctgaccgacgagcgtcgagcgaggagaaagagtccttctgcccctgccaaaaggtcggttgcaaaagcagccgattttttctttgcttcttgcagaaggacgagaataggacggcagtgaataccgtgccctttggcacggtagagccgtcctgaccgacgagcgtcgagcgaggagaaagagtccttctgcccctgccaaaaa

SEQ ID NO: 29584 - DNA, 260 bp, Unknown
  Description of Unknown: RightRegion for integrase B3585 sequence
gattttaagctagagctattcccgaaactgcccaagaacaaaggggattctagcgaatgatatagtcgaaccaccaacgaacttgggcacctcgaaatggttggctccattgtttcccagcttgtaaaggatcttccttgtgacgacattgaccttgcaggctttgagaaatactatgtcgaccacactttgggcgtatggccacagtctgccggaggtgttcctttctcagctactaccttccaatcttgtggtgatcc

SEQ ID NO: 29585 - DNA, 260 bp, Unknown
  Description of Unknown: RightRegion for integrase B3586 sequence
tccacttttgatttcgtgcgcagtggcaagaatgccctgccgaagttattcgctaaatagcgcgcttaacgctttacagtttcattgcgacatcccatgcgccccagatgaccgtacggagattgccgactttcgcactgtcgccgacaacgtgaacgtgtttgccctcttgcgcgacgggtgcgggcttgtatccgacggacataatgacggattcggcaggaatctcaaactctttgcctgttttcatgtcttgaact

SEQ ID NO: 29586 - DNA, 109 bp, Unknown
  Description of Unknown: RightRegion for integrase B3587 sequence
cctggtatcggacgattcgttgccaatccctttgaactggatatctacctgcgcctgtgatctttgggcgcaggcattattttactgtatcaaggctttttctgccagt

SEQ ID NO: 29587 - DNA, 109 bp, Unknown; identical to SEQ ID NO: 29532
  Description of Unknown: RightRegion for integrase B3588 sequence

SEQ ID NO: 29588 - DNA, 109 bp, Unknown
  Description of Unknown: RightRegion for integrase B3589 sequence
cctggtatcggacgattcgttgccaatccctttgaactggatatctacctgcgcctgtaatctttgggcgcaggcattattttactgtattaaggctttttctgcctgc

SEQ ID NO: 29589 - DNA, 260 bp, Unknown
  Description of Unknown: RightRegion for integrase B3590 sequence
aaccccaattcattccagttggatatttttccagcccttctgacagatctgcggccgtgagcgccgacgaaaaaagccctccaactgcaacaacacccggaaaagctgttgcagttggaggcttttgttgttgcaccgttagatgtcgaattaaaaatacacggcgaactgcgttccacattatgaaccgttgttgcagctgttgcagtttttggacttgtcgttgcagcaaattatccgttgattccagtcttttctaa

SEQ ID NO: 29590 - DNA, 260 bp, Unknown
  Description of Unknown: RightRegion for integrase B3591 sequence
aaagcaggtgtcggacgatacgtggagaatgttttttccttagaaatccaatacatataaccatttccaacatctatgtactgatgaattagcgcatctggaaatggtcgcatccatcgtccgacagctcaccaaaggcttaagtgcagaagagcttgaagctgccggatttgcaccatattatgtcgaccataccggtggtatctggccacaggcggcgggcggtattccttttaacgcctgcgaatttcagtccaaag

SEQ ID NO: 29591 - DNA, 260 bp, Unknown
  Description of Unknown: RightRegion for integrase B3592 sequence
cctgatagctccaccagaaacgaaagcactacacagaaatgtgtagtgcttttttgttgacgccaaacgagtgagggtttagctcagccgggagagcgccgtgcatggactgcaagagggtcaccgtgatttgaatcggcccggtaatctccaccagaacgaaagcactacacagaaatgtgtggtgcttttttgttttatctgccgttcaccttacgtcccctttcatgaaaaaagcgtttgtcgcagcccgcaggccg

SEQ ID NO: 29592 - DNA, 260 bp, Unknown
  Description of Unknown: RightRegion for integrase B3593 sequence
gagtgttcgtttaagctctgctctgctccaccagaacatagaaaaccagcaatccattgagattgctggtttttctttatttatcaatgctgagtggcgctctcagagggatttcgctccctgcaaacattgaaaccgcaagctatttgtgttataaaaacttccaaaactcagagtcgggcgaaccgtgtaagtttgtccgactcttaccttttcacgataacagcaaaaaatcctgcagcccaccgcaatttccattt

SEQ ID NO: 29593 - DNA, 260 bp, Unknown
  Description of Unknown: RightRegion for integrase B3594 sequence
aaagcaggtgtcggacgatacgttgagaatgttttttccttagaaatccaatacatataaccatttccaacatctatgtgctgatgaattagcgcatctggaaatggtcgcatccatcgtccggcagctcaccaaaggtttaagtgcagaagagcttgaagctgccggatttgcaccatattatgtcgaccataccggtggtatctggccacaggcggcgggcggtattccttttaacgcctgcgaatttcagtccaagg

SEQ ID NO: 29594 - DNA, 202 bp, Unknown
  Description of Unknown: RightRegion for integrase B3595 sequence
gttcttactaaaaatgcttcgcattatggattcggtgttctcttcgggaaagaagtctagaaatagacttctttttttgttgcaatcataaccacccttcaaaagggtggtttgctctggggctataagcccatgagaaaggcgctctccttcacttatgttcaggcgcattgcccttgcctctttaacttgccccacaaag

SEQ ID NO: 29595 - DNA, 260 bp, Unknown
  Description of Unknown: RightRegion for integrase B3596 sequence
ggtcaaccaaaagacatccgaacatttcggatgtctttttttgttcttttttatttatagagaaagaaaaagagcgatgcagcaaacgctgcatcgctcttttgggttaacagtaatcagtaattcagaccgaagccgctgcggtagtagtttccgtcggcatcgcagtaggcgtagctgccgcccttgacgttggcgaggatagcgggatcgatgtactgatccttatcgtagccgggcacatcgttgggagaggcgca

SEQ ID NO: 29596 - DNA, 260 bp, Unknown
  Description of Unknown: RightRegion for integrase B3597 sequence
atgattcatacctttacagtcaccgtacacccgcagaaacggggaaggaaaaccctgtgattacaaaagtctgttgacttctttctgcacagcagcataatcatatcctgcggcagtcaacttgttcttacggtctgcaccattgccccacttgcctgcgataacttccctcgcaatctgggtcacagatttcttactggaagtgctgccctttgccagttcattgacttttgcctgaacctgagagtaattgtacccgg

SEQ ID NO: 29597 - DNA, 260 bp, Unknown
  Description of Unknown: RightRegion for integrase B3598 sequence
aaagcaggtgtcggacgatacgtggagaatgttttttccttagaaatccaatacatataaccatttccaacatctatgtactgatgaactggcgcatctggaaatggtcgcatccatcgtccggcagctcaccaaaggcttaagtgcagaagaacttgaagctgccggatttgcaccatattatgtcgaccataccggtggtatctggccacaggcggcgggcggtattccttttaacgcctgcgaatttcagtccaagg

SEQ ID NO: 29598 - DNA, 260 bp, Unknown; identical to SEQ ID NO: 29577
  Description of Unknown: RightRegion for integrase B3599 sequence

SEQ ID NO: 29599 - DNA, 260 bp, Unknown
  Description of Unknown: RightRegion for integrase B3600 sequence
ggcccatttgataattttgagctggtactttatccgaagttgccgccaaaaatcgagtaacacaaaagccgtccctttgtggggcggcttattttgcttacaaccttagaaatattatttgtgatacttctaaggttatcactaataagcctaaaaaaatgcggcccggctcctactgtcctgcgcaaaatgtccagcacaaaatcctaagatttcataggcgtatgagatttttcccgtcgccatgtcaagcgtgtttc

SEQ ID NO: 29600 - DNA, 260 bp, Unknown
  Description of Unknown: RightRegion for integrase B3601 sequence
ccacaggagtgtgaaattttgttctttttaaagaccggagatgtaaaaaaaagtcaataatcgagcgggataaaccgggctgttctgaatacttttttttgcactgatctctaatgtgttaatttttttcattgtttttcacctttgttccggttataatggaactacctttcttttgattggtgccggttgtgtgtcttggtaggattgcaaccggcttttttgttttcctttgatggttatataatacattattttta

SEQ ID NO: 29601 - DNA, 260 bp, Unknown
  Description of Unknown: RightRegion for integrase B3602 sequence
gtccacgccgacggacgaatgaccttcaaattccagggcggcacagaaatcgaggcgtgagtcccaagaaaaatgaaaagaccgcaggtttcaacgcctgcggtttattgctgtccccatgggtagagtaatgcaccccctaaagccgtggttgcacccccctataatcaaaaatgcaccccccctctaaaccgtaattgcacccccttgcacggtttctatcaaaattacggttctttgccatagaaaaaaccgcatta

SEQ ID NO: 29602 - DNA, 260 bp, Unknown
  Description of Unknown: RightRegion for integrase B3603 sequence
aatgagaatttgaatgtggcttttactctttatatgcgtactaaatccctcatgctataattggcatgggggatttttctatgcaaacaaaaatgtatgtaattcagccgcaagttataaaggttgatcaggcaaaagtaaaaaagcagcgagtggcagtttattgccgtgtcagtaaaaatacagcggagcaaatccatagccttgaaatacaagaaagctattttgaaaggattgtagaggaaaatcggattggatgc

SEQ ID NO: 29603 - DNA, 260 bp, Unknown
  Description of Unknown: RightRegion for integrase B3604 sequence
cctgattgctccaccagaaacgaaagcactacacagaaatgtgtagtgcttttttgttgacgccaaacgagtgagggtttagctcagccgggagagcgccgtgcatggactgcaagagggtcaccgtgatttgaatcggcccggtaatctccaccagaacgaaagcactacacagaaatgtgtggtgcttttttgttttatctgccgttcaccttacgtcccctttcatgaaaaaagcgtttgtcgcagcccgcaggccg

SEQ ID NO: 29604 - DNA, 109 bp, Unknown
  Description of Unknown: RightRegion for integrase B3605 sequence
tctaaagaacaaaagattgtaattaaatacaaatatataggaaagtcaattatagcataaaaacacctatccatgtgtatgggacttggatgcaacgccgccggggtgg

SEQ ID NO: 29605 - DNA, 260 bp, Unknown
  Description of Unknown: RightRegion for integrase B3606 sequence
gtttacaatgaaactgacatccgcttcactttcaaggatggaacggaatacagagtataagcgtataaaacgaactcctcactaccattacggtggtgaggagtttttcaatctattcgataaattggaatttgacggtattacaacagctttatctcattggcaatcatagccacggttttggcgttggtatcaattttaatggtacccaatgcttgatacatcggtattcttgctatgcttcgctcaattatatcttc

SEQ ID NO: 29606 - DNA, 260 bp, Unknown
  Description of Unknown: RightRegion for integrase B3607 sequence
tcatctatcaaacaagttcgtacatccccccttctcccgcaccacaaaaagcgacgctgattcgttgaaaatcagcgtcgcttttattcttgtaacccactcgccttgcaaatgcaaacacccctgaaaatcatatatctttcgggagtatttgcatcccaactttttcccagactataagcagatattgctagagataacacttcttctgtccggatgcgtcaagcatccggacttttttcgttatcgcccggcacgaa

SEQ ID NO: 29607 - DNA, 260 bp, Unknown
  Description of Unknown: RightRegion for integrase B3608 sequence
ggaacagttgataatcgcaattttaagcttagcataacgcctaaaattccgcaggtgtaaaatttaacatctgcggaatggcgtaaaatggttgtttttattacctataacaactatggttatacttgtagccccactcatatgtcataagaagcacctgatttgccgcctcaccaagtcctccataatcttttccctcatataaaagtcccggctgctctgccgatgtttttggtgctaacgccacactcacgagatac

SEQ ID NO: 29608 - DNA, 109 bp, Unknown
  Description of Unknown: RightRegion for integrase B3609 sequence
aaagcaggtgtcggacgatacgtggagaatgttttttccttagaaatccaatacatataaccatttccaacatctatgtgctgatgaattagcacatctggaaatggtc

SEQ ID NO: 29609 - DNA, 109 bp, Unknown
  Description of Unknown: RightRegion for integrase B3610 sequence
cgctgggcagaccccaccgacttccgcatcaagatatacccgcgtctaccgagaaattgaccctttatcaccgatatcatcttggtacggattcctcggtccctatatc

SEQ ID NO: 29610 - DNA, 240 bp, Unknown
  Description of Unknown: RightRegion for integrase B3611 sequence
ggcccatttgataatttcgagctggtgctttatccgaagttgccgcccaaaatcgagtaatacaaaagccgtccctctgtggggcggcttattttgcttacaaccttagaaatattatttgtttgtctatgtttttcagaacatttgttcttctatatttgttttcattcatgtgcacagatatgcgcagttttaatatgccagatattgcatgattttcccaaaaggcaattcatctca

SEQ ID NO: 29611 - DNA, 260 bp, Unknown
  Description of Unknown: RightRegion for integrase B3612 sequence
agcgcgaacacaatactgttttttacggggcgtgtgttcgggatcgttttgcgggaataaagaagccccaccagggagaaatccttggtgggattttcttgttgcaagcgaatacagcacgatttattcctccagttcaaaccctttttccagcgcatcgtgtagcagctttggcgcggacacactcaacgcctccgcgagtaggcagagctcgacatccgtcactgatcgcgttccttgctcgatttgcgagatcgcat

SEQ ID NO: 29612 - DNA, 260 bp, Unknown
  Description of Unknown: RightRegion for integrase B3613 sequence
atgattcatacctttacagtcaccgtacacccgcagaaacggggaaggaaaaccctgtaattacagaagtctgttgacttctttctgcacagcagcataatcatatcctgcggcagtcaacttgttcttacggtctgtgccgttgccccacttgcctgcgataacttccttcgcaatctgagtcacagatttcttactggaagtgctgcccttcgccagttcattgactttcgcctgaacctgagagtaattgtacccgg

SEQ ID NO: 29613 - DNA, 260 bp, Unknown
  Description of Unknown: RightRegion for integrase B3614 sequence
cctgattgctccaccagaaagaaaagcatcgcacagaaatgtgcggtgcttttttattgacgccgaacgagcgagagcttagctcacccgggagagcgccatgcacggactgtaagaggtcaccgtgattacaacagcccggtaatctccaccagaaccaaagcactacacagaaatgtgtggtgttttttgttttatctgccgttcaccttaacgccccctttcatgaaaaaagcgtttgtcgcagcccgcaggccgtg

SEQ ID NO: 29614 - DNA, 260 bp, Unknown
  Description of Unknown: RightRegion for integrase B3615 sequence
ccgcaggagtgcgaaattttgttctttttaaagaccggagatgtaaaaaaaagtcaataaccgagcgggataaaccgggctgttctgaatacttttttttaaataagttctcagaacgacacgccgtattttacaggaaaatcaactatgtggatggatgcgaaaaggaatttaactacacttacgcatttgcaatctaaataatatacaaaagatgaacggaagagcagagatgtaattttttgacatttaactaaata

SEQ ID NO: 29615 - DNA, 109 bp, Unknown
  Description of Unknown: RightRegion for integrase B3616 sequence
aaagcaggtgtcggacgatacgtggaaaatgttttttccttagaaatccaatacatataaccatttccaacatctatgtactgatgaactggcgcatctggaaatggtc

SEQ ID NO: 29616 - DNA, 260 bp, Unknown
  Description of Unknown: RightRegion for integrase B3617 sequence
tgcgtaactaatacaatgcgggtagagatttattacagatttattgggaaagtcgattagtgtgcgctttgggtatcgctctagagttttcccccacaagcaacatataaaatctagtcgtgactatcctccgaaacagtccggcggactgtttcggaagaacattacacatctaaattatagtttgtcacaatcccaactggcatgcctatcattaaggatcccacaaactacgcctgtaattttatctcacacattaa

SEQ ID NO: 29617 - DNA, 260 bp, Unknown
  Description of Unknown: RightRegion for integrase B3618 sequence
atgattcatacctttacagtcaccgtacaccctcagaaacgtggaaagaaaaccgtgtgattacagaagtctgttgacctctctctgcacagcagtataatcatatcctgcggcagtcaacttgttcttacggtctgtaccgttaccccacttacctgcgataacttccttcgcaatctgagtcacagatttcttactggaagtgctgccctttgccagttcattgactttcgcctgaacctgagagtaattgtacccgg

SEQ ID NO: 29618 - DNA, 260 bp, Unknown
  Description of Unknown: RightRegion for integrase B3619 sequence
cctgattgctccaccagaaccaaagcaccacacggaaacgtgtggtgcttttttcgttaaggccaaacgagtgagggcttagttcacccgggagagcgccgtgcatggactgcaagagggtcaccgtgattacagcagcccggcaatctccaccagaacaaaaaagcgtttgtcgcagcccgcaggccgtgacaaacgctttttattttactgtgcgcccaagcgcattttgaagtcctgatagccgaagtgcaccagtt

SEQ ID NO: 29619 - DNA, 260 bp, Unknown
  Description of Unknown: RightRegion for integrase B3620 sequence
gagtgttcgtttaagctctgctctgctccaccaaaaataccaattacccttttggggtgattggtatttttctttgcatggaagatggagtcgaagtttatccccgtcaggggaaatccatcttcccccaccaaaaataccgattacccgtttgggggtcggtattttttatgccttctcccggcgggaacggtcgggccgtgcgctgccttctcctcgaggagaaggtgctgagcgcagcgaggcggatgaggtggaaa

SEQ ID NO: 29620 - DNA, 260 bp, Unknown
  Description of Unknown: RightRegion for integrase B3621 sequence
gtctacagcaccgatgatattcgcttcaccttcaagcacgggcaggaagtacaggcataaccccatagacgcagaaacgcctcaccactggatttgattccggcggcgaggcgcttttcgcttttagtaaaaatattcttccacgtcagggtctatatcatatcctgcagctttcgctctttcgatgaccctatagcattgatccctgccgtcaacaccattggtgtaaaactcacggttgcattcctcatcatcaaatt

SEQ ID NO: 29621 - DNA, 109 bp, Unknown
  Description of Unknown: RightRegion for integrase B3622 sequence
ggcccatttgataatttcgagctggtgctttatccgaagttgccgcccaaaatcgagtaatacaaaagccgtccctttgcggggcggcttattttgcttgcaaccttag

SEQ ID NO: 29622 - DNA, 260 bp, Unknown
  Description of Unknown: RightRegion for integrase B3623 sequence
tccgaacatggaaaaattatagtcctgaacggggcgattgggtttctgttgcgcagataagtcaaacctctcccttttggggagaggtttttcatttcttgaacatcgcctgcatgatttcgattttctcagcacggtcgatgtgccgtttatgcagatgatcgtacaccgcacgcatggcctccggggcctcgccgtgggtgcgcttgtatgcgtcgatgtggttcatcacgctgttgtgcagcgcgttcatgtgcgac

SEQ ID NO: 29623 - DNA, 260 bp, Unknown
  Description of Unknown: RightRegion for integrase B3624 sequence
gactctcttgagctccaccatcaagctgcaccaaaaaagatgccgctgcgaaaagcctagaagtttcaacgacttccgggcttttttgcgcccattttttcaagcgtgacaaaaagatgccaactgccgtgtcaggcaaattcgatggacctgtacctttacccacggcgttttgaaccgcttttccgagaatttttcgggaaagcggctctttttttgctctcggcaaaacgtagaatttgagcaggcttttttgttgg

SEQ ID NO: 29624 - DNA, 260 bp, Unknown
  Description of Unknown: RightRegion for integrase B3625 sequence
aaccccctattgataaacaaatctattaaacgaaaaacgcaccaacagccactaaaataaaaggggtttgaaaagatgaattgtattttatatatgtctaataatacgaaaatatccatttttgagcaacacaatgtttgtaacgaaaaagccaaacgatacggatattccatagaacgaagaatttttgatattcggggtgatagattcaccgaagcaataaacaaggttatcgcaagcaaagaaattgaagcattgat

SEQ ID NO: 29625 - DNA, 260 bp, Unknown; identical to SEQ ID NO: 29617
  Description of Unknown: RightRegion for integrase B3626 sequence

SEQ ID NO: 29626 - DNA, 260 bp, Unknown
  Description of Unknown: RightRegion for integrase B3627 sequence
cctgattgctccaccagaacaaaaagcaccgcacagaaatgtgtggtgcttttttattagtgccaaacgagtgaggatttaactcacccgggagagcgccgtgcatggactgcaagagggtcaccgtgatttgaatcggcccggtaatctccaccagaaagaaaagcactgcacagaaatgtgtggtgcttatttattgtctgcttgccatgcaaagcagcttatgataagataaacttgtattctccttctttagagat

SEQ ID NO: 29627 - DNA, 260 bp, Unknown
  Description of Unknown: RightRegion for integrase B3628 sequence
aaagcaggtgtcggacgatacgtggagaatgttttttccttagaaatccaatacatataaccatttccaacatctatgtgctgatgaactagcgcatctggaaatggtcgcatccatcgtccggcagctcaccaaaggcttaagtgcggaagaacttgaagctgccggatttgcaccatattatgtcgaccataccggtggtatctggccacaggcggcgggcggtattccttttaacgcctgcgaatttcagtccaagg

SEQ ID NO: 29628 - DNA, 109 bp, Unknown
  Description of Unknown: RightRegion for integrase B3629 sequence
aaagcaggtgtcggacgatacgtggagaatgttttttccttagaaatccaatacatataaccatttccaacatctatgtactgatgaactggcgcatctggaaatggtc

SEQ ID NO: 29629 - DNA, 260 bp, Unknown
  Description of Unknown: RightRegion for integrase B3630 sequence
aaagcaggtgtcggacgatacgtggagaatgttttttccttagaaatccaatacatataaccatttccaacatctatgtgctgatgaattagcgcatctggaaatggtcgcatccatcgtccgacagctcaccaaaggtttaagtgcagaagagcttgaagctgccggatttgcaccatattatgtcgaccataccggtggtatctggccacaggcggcgggcggtattccttttaacgcctgcgaatttcagtccaaag

SEQ ID NO: 29630 - DNA, 260 bp, Unknown
  Description of Unknown: RightRegion for integrase B3631 sequence
aaagcaggtgtcggacgatacgtggagaatgttttttccttagaaatccaatacatataaccatttccaacatctatgtactgatgaattagcgcatctggaaatggtcgcatccatcgtccgacagctcaccaaaggcttaagtgcggaagaacttgaagctgccggatttgcaccatattatgtcgaccataccggtggtatctggccacaggcggcgggcggtattccttttaacgcctgcgaatttcagtccaaag

SEQ ID NO: 29631 - DNA, 260 bp, Unknown
  Description of Unknown: RightRegion for integrase B3632 sequence
ggcccatttgataatttcgagctggtgctttatccgaagttgccgcccaaaatcgagtaatacaaaagccgtccctctgtggggcggcttattttgcttacaaccttagaaatattatttgtaaattttgcgaagtattaaaaaaaacagtacgagaaacacgacgccgatacttctctctggctcatggtcaatctttcgattgagttcatctttttaaatctagcctcgtccataactttcgttattatttttttccc

SEQ ID NO: 29632 - DNA, 260 bp, Unknown
  Description of Unknown: RightRegion for integrase B3633 sequence
cctggtatcggacgattcgttgccaatccctttgaactggatatctacctgcgcctgtgatctttgggcgcaggcattattttcactgtattaaggctttttctgcctgtaatctcctacttttgtgcaaaaataatcacttccatcatgtatgagcgaatgaacttgcccacatggaaatgatctgtgccattgtccgtcaattaacccaggacctgacaccggaagaaattcagaaaagcggatttgacacctactac

SEQ ID NO: 29633 - DNA, 260 bp, Unknown; identical to SEQ ID NO: 29590
  Description of Unknown: RightRegion for integrase B3634 sequence

SEQ ID NO: 29634 - DNA, 260 bp, Unknown
  Description of Unknown: RightRegion for integrase B3635 sequence
atgccttgcaacacgttcatattatatcatgcctgcgcaatatttcaactggcggcgtaaaatttccccctgccgatgggcagggggatcttgttatttgcggacgatatagcgcagatagcgctcgaccttgtccggctgtgcgtccgcgtcccggatgaagtcggcggccagatcggcgtaaaactccgggctgtggatgccgtagcgtttcgccgtggcagcatagtcgctgtacatggcattggcgaccgcgtaga

SEQ ID NO: 29635 - DNA, 192 bp, Unknown
  Description of Unknown: RightRegion for integrase B3636 sequence
ggcccatttgataatttcgagctggtgctttatccgaagctgccgcccaaaatcgagtaatacaaaagccgtccctttgtggggcgacttactttgcttacaaccttagaaatattatttgttcttcttcgtgtctttttgctttacatatctttctttttttctcttcctgatgccttgctttcacaaagc

SEQ ID NO: 29636 - DNA, 109 bp, Unknown
  Description of Unknown: RightRegion for integrase B3637 sequence
cgctgggcagaccccaccgacttccgcatcaagatatacccgcgtctgccgaaaaattgaccctttatcaccgatatcctcttggtacgaattcctcggtccctatatc

SEQ ID NO: 29637 - DNA, 260 bp, Unknown
  Description of Unknown: RightRegion for integrase B3638 sequence
atacaatataaacttttaaactttactagcctaaagattgcaaaaaataaatctgattaaattagtcaggttttattatatatgtaacagaaaatttctatatttgccgtatgatagggagaaatctatcataacgtaaaagacgtttaataagtggcaaaggaaaactgacaattgaactttaaataaccacgactgttaagcgtccacgcccgatgtatatacttacgtattacataattggggtgcggactgcttat

SEQ ID NO: 29638 - DNA, 260 bp, Unknown
  Description of Unknown: RightRegion for integrase B3639 sequence
ggcccatttgataatttcgagctggtgctttatccgaagttgccgcccaaaatcgagtaatacaaaagccgtccctttgtggggcggcttattttgcttacaaccttagaaatattatttgtgatacttctaaggttatcactaataagcctaaaaaaatgcggcccggctcctactgtcctgcgcaaaatgtccagcacaaaatcctaagatttcataggcgtatgagatttttcccgtcgccatgtcaagcgtgtttc

SEQ ID NO: 29639 - DNA, 260 bp, Unknown; identical to SEQ ID NO: 29023
  Description of Unknown: RightRegion for integrase B3640 sequence

SEQ ID NO: 29640 - DNA, 260 bp, Unknown
  Description of Unknown: RightRegion for integrase B3641 sequence
aaagcaggtgtcggacgatacgttgagaatgttttttccttagaaatccaatacatataaccatttccaacatctatgtgctgatgaattagcgcatctggaaatggtcgcatccatcgtccgacagctcaccaaaggcttaagtgcggaagaacttgaagctgccggatttgcaccatattatgtcgaccataccggtggtatctggccacaggcggcgggcggtattccttttaacgcctgcgaattccagtccaagg

SEQ ID NO: 29641 - DNA, 260 bp, Unknown
  Description of Unknown: RightRegion for integrase B3642 sequence
ctgctatatcacacaactacgtgctgcatgaagcgccggaacatcaatcaggaagtttaagggtctggcctgcgtagatggtgttactggtcaggttattcagggtcttaatctccggccagcggctaccgttaccaaggttagcctttgcgatactccacagagagtcaccacgcttcaccttgtaggtgacgtagttaggctcctgcacagtatcagtggcaaccacagtaccgccgctctccgtagtgatataagcg

SEQ ID NO: 29642 - DNA, 260 bp, Unknown
  Description of Unknown: RightRegion for integrase B3643 sequence
ccatgctccacttcttcaccgcgattcccaagaggggtcgcggcattttttgttttttagggaaaacaggaagcaaatatactaccaatttcagctgctttgtgctacaatggaagcgaaaacggcagagggggacggaaaaatgaaaaagctgcttgctgtgtgcctgacggcgctcgtttgctgggtttgtgcggggtacgcggaagaaacgcgggtcggtgatacggtcatgttcgggcaatatgaacaggatggca

SEQ ID NO: 29643 - DNA, 260 bp, Unknown
  Description of Unknown: RightRegion for integrase B3644 sequence
aaagcaggtgtcggacgatacgtggagaatgttttttccttagaaatccaatacatataaccatttccaacatctatgtactgatgaattagcgcatctggaaatggtcgcatccatcgtccgacagctcaccaaaggcttaagtgcagaagaacttgaagctgccggatttgcaccatattatgtcgaccataccggtggtatctggccacaggcggcgggcggtattccttttaacgcctgcgaatttcagtccaagg

SEQ ID NO: 29644 - DNA, 109 bp, Unknown
  Description of Unknown: RightRegion for integrase B3645 sequence
gtgggaattgagggtgagctgacattcacactgcgtaacggcatggagatcgaagtataatataattataatggggctgttgctgagatatgatgtgtctcggctgcag

SEQ ID NO: 29645 - DNA, 109 bp, Unknown
  Description of Unknown: RightRegion for integrase B3646 sequence
aaagcaggtgtcggacgatacgtggagaatgttttttccttagaaatccaatacatataaccatttccaacatctatgtactgatgaattagcgcatctggaaatggtc

SEQ ID NO: 29646 - DNA, 260 bp, Unknown
  Description of Unknown: RightRegion for integrase B3647 sequence
tcggtaatctgtgtacatctttgtcagagattcatttgtctcatatcctgcatcttttaaagactgtaaaatactgatcgctgtggaagaatctgaagatccggatcctgttccaccgtataacggatttgttgaatcccatccgaacacattcagtttcttcgtgtcagaagcgagtggtaagattcctttgtttttcagaagaaccattccttcttctccgactttctgaattgtttcacggctctgctctgttgttt

SEQ ID NO: 29647 - DNA, 260 bp, Unknown; identical to SEQ ID NO: 29617
  Description of Unknown: RightRegion for integrase B3648 sequence

SEQ ID NO: 29648 - DNA, 260 bp, Unknown
  Description of Unknown: RightRegion for integrase B3649 sequence
ggcaaccttgataatttcaatatcacaatttatccaaaaattccgaaatatattacataatgaaaagctgttcactgttgagcagcttttatattatagataacctcaatgtgccaattcctccgtacctatatccgtaagcaacccctttgaaacttcatcgggcatagtatatctttgcgacaaatatctaagtgatgcgccgagttcaccgtttggaccgccgtattgagttataaccacatttgcaagacgtggat

SEQ ID NO: 29649 - DNA, 260 bp, Unknown
  Description of Unknown: RightRegion for integrase B3650 sequence
gaaccctacattgcgtggggaacggtatttgtccaaacaaaaagacactccttaccgtaatggtagggagtgttttctttgtatctaaggcacttaggtgagttaggtgagtaatcgggctaaaatccctataacttcttcttagtacgcgcgtatatagaaatagttatagggaaatgtacccgattactcacctttatcacctaaactttttaaatttaggggcaattatagtcttacttcttccccttcaccacaaa

SEQ ID NO: 29650 - DNA, 109 bp, Unknown
  Description of Unknown: RightRegion for integrase B3651 sequence
ggcaaccttgataatttcaatatcacaatttatccaaaaattccgaaatatattacataatgaaaagctgttcactgttgagcagcttttatattatagataacctcaa

SEQ ID NO: 29651 - DNA, 260 bp, Unknown
  Description of Unknown: RightRegion for integrase B3652 sequence
ggcaaccttgataatttcaatatcacaatttatccgaaaattccgaaatatattacataatgaaaagctgttcactgttgagcagcttttatattatagataacctcaatgtgccaattcttccgtacctatatccgtaagcaacccctttgaaacttcatcgggcatagtatatctttgcgacaaatatctaagtgacgcgccgagttcaccgtttggaccgccgtattgagttataaccacatttgcaagacgtggat

SEQ ID NO: 29652 - DNA, 260 bp, Unknown
  Description of Unknown: RightRegion for integrase B3653 sequence
ccgggaataggtcgatacatagagaattcttttagattagagattttcttaaaaatgtgaagccgctattttagtgcatttacaatcatatacaactgcgtggagctaatgagctggggcattttgaaatgattagcacaatggttcaccagctcacaagaaaccttacaatagaacagattaaaggaactccttttgaagcctactatgtagaccatacatcagcagtgtggcctcaggcggcaggtggtattccattt

SEQ ID NO: 29653 - DNA, 260 bp, Unknown
  Description of Unknown: RightRegion for integrase B3654 sequence
aatgtgtctgccgacaattttgaaatcatcctcttccccaaaatatcacccgaaaactaaccccaaattaccgatagatataacaccctgacgaattcgcccatttggagatgatgggcaccatcgtgcatcagctgacacaggggctaacgaaggacgaaattcttgccgccggcttagatccctattatgtgaaccatggcttaggcgtatacccctcctccgccgcgggtgttcccttcactgctgcgtatctgcaa

SEQ ID NO: 29654 - DNA, 109 bp, Unknown
  Description of Unknown: RightRegion for integrase B3655 sequence
ggcaaccttgataatttcaatatcacaatttatccgaaaattccgaaatatattacataatgaaaagctgttcactgttgagcagcttttatattatagataacctcaa

SEQ ID NO: 29655 - DNA, 260 bp, Unknown
  Description of Unknown: RightRegion for integrase B3656 sequence
acaatagtcgtcttgccttacggtttcgtacttgcagcccagattaaggataggccttaagcctgtcctttttcttttcaaaagccaatgtcgtcaaaggcgtactcgatttcgtctaagagcatacgctccgagatttcatagtcctccagcatttcgtcgataggaaaatgcgctttgaggacaagcagcaaatactcagcaagtccttcagagtcatagccttcgacttcagccgtaccgaggggctgaatcatgcc

SEQ ID NO: 29656 - DNA, 109 bp, Unknown
  Description of Unknown: RightRegion for integrase B3657 sequence
aatgtgcccgccgacaattttgaaatcatcctcttccccaaaatatcacccgaaaactaatcactaatcaatgatagatataacaccctaacgaattcgcccatttgga

SEQ ID NO: 29657 - DNA, 260 bp, Unknown
  Description of Unknown: RightRegion for integrase B3658 sequence
gcaagcgacatgaatctctatgtatttccacgtgtcgaaacggacggcgagcaattatagtcattgcagggggcttatatggttttatacctatggtccgccgatggcagtggctcccctgcccaatgtgcgccaagtggtggagtatgccctgacggaaatcccggcctccaaaatctggctgggcgtccccctctacggctacgactggccgctcccctttgtgcagggacgtaccaaggctcagtccatttcccccc

SEQ ID NO: 29658 - DNA, 109 bp, Unknown; identical to SEQ ID NO: 29654
  Description of Unknown: RightRegion for integrase B3659 sequence

SEQ ID NO: 29659 - DNA, 108 bp, Unknown
  Description of Unknown: RightRegion for integrase B3660 sequence
gtgaacagggacaaaaccatcacatttaagttcgcaaacggcaaggaaatcgcagtttaaaaaggtggcttttttgaaccttctattatttaagcagtctagaatgct

SEQ ID NO: 29660 - DNA, 260 bp, Unknown
  Description of Unknown: RightRegion for integrase B3661 sequence
tatttggtactgttattttcggacagtatcggatactctcgcctttatttttgttgctgatatgattcttcaaattgatttggggtttgctgcttaagacattcatgcggtcggtaatcgttataaaaatcaatatattctgatagattttcctctaattcggagacagtttcataaaaatgaaatttgaactgttcttttttaagcgaagcaaagaaagattccgccacagcattatcaagtggattgcctatatcgga

SEQ ID NO: 29661 - DNA, 182 bp, Unknown
  Description of Unknown: RightRegion for integrase B3662 sequence
tccccttttgttaaaggggaagccgccgagttcgactgcttccccctcggctccacttgaagaaaatccaggtgtcgaagtcgtggaggttgtttttctcgatgatgagctggatcagctcgtagcatatgatatagtggtggcttttcacatcttcccgtttttggtttttctcatagcgg

SEQ ID NO: 29662 - DNA, 260 bp, Unknown
  Description of Unknown: RightRegion for integrase B3663 sequence
aatgtgcccgcagacaattttgaaatcatcctcttccccaaaatatcacccgaaaactaatcactaatcaatgatagctataacaccctaacgaattcgcccatttggagatgatgggcaccatcgtgcatcagctgacacaagggctaacaaaggacgaaattcttgccgccggcttagatccctattatgtgaaccatggcttaggcgtatacccctcctccgccgcgggtgttcccttcactgctgcgtatctgcaa

SEQ ID NO: 29663 - DNA, 260 bp, Unknown
  Description of Unknown: RightRegion for integrase B3664 sequence
acgatagttgtcttgccttacggtttcgtacttgcgacccagattaaggataggctttgagcctgtcctttttcttttggtagtcggtagtccgttttaacgaattttccttatatatacatgtaatgcgagggagcgacgagattgcgctttgagtccttttactttttggaaaaatcttttcagtttttacgaactaccagtactaccagataaccaaaagccttgcaaatcaaggtttttcttcggtagcaggctca

SEQ ID NO: 29664 - DNA, 109 bp, Unknown
  Description of Unknown: RightRegion for integrase B3665 sequence
ggcaaccttgataatttcaatatcgcaatttatccgaaaattccgaaatatattacataatgaaaagctgttcaatgttgagcagcttttatattatagataacctcaa

SEQ ID NO: 29665 - DNA, 260 bp, Unknown
  Description of Unknown: RightRegion for integrase B3666 sequence
accaaacagcagccagaaattaacgtagttttgttaatttctggctgtttttctttgtaaaaatgtaaccggttacattttaggttacatttcgtttttgaaattgcgagtgtatttgatcctgcttctggacagtatcggatgcgcttgctcttatttttgcggcagatatacacggcgctacaaatcgacagaaagtcatagtgttctccctttgtggtttaaaatgccattatcgtcctataaaggaacgaatatgt

SEQ ID NO: 29666 - DNA, 260 bp, Unknown
  Description of Unknown: RightRegion for integrase B3667 sequence
tgttcactggacatccacttcaggatttccgcggaacagttccttggaaaagccgcgtaacgcaaatgtcgacaactcccattggaaagaatgatataatcaatcaagccaatcatccgggtgaggtggttggctcttttaatgggaggattgaatatgaaacgagtctattgtctttaccgcgtttctacagttggacaggtggatcatgacgatatccctttgcagcgaatttcgtgccggcaatatgcgcagcagaa

SEQ ID NO: 29667 - DNA, 109 bp, Unknown
  Description of Unknown: RightRegion for integrase B3668 sequence
ggcaaccttgataattttgatattgccatctatccgaaaattccgaaatatattacataatgaaaagctgttcactgttgagcagcttttatattatagataacctcaa

SEQ ID NO: 29668 - DNA, 109 bp, Unknown; identical to SEQ ID NO: 29654
  Description of Unknown: RightRegion for integrase B3669 sequence

SEQ ID NO: 29669 - DNA, 109 bp, Unknown; identical to SEQ ID NO: 29654
  Description of Unknown: RightRegion for integrase B3670 sequence

SEQ ID NO: 29670 - DNA, 260 bp, Unknown
  Description of Unknown: RightRegion for integrase B3671 sequence
attaattctaaacctatttattttacagatgactatttttatattctttgttctgcttaatttcttaatttcctaaaataaaaggacaactcatttcgagctgtcctttttgatttcattggctttttgctaccaatttttgtcggcctctacggccttgcgaagtttgcgtttagccgtgctgtctgccagcccagctaccgaaaattgtaaagtcccgagtagctgttcccggtttccgtcgtggatgtggaaaagcc

SEQ ID NO: 29671 - DNA, 260 bp, Unknown
  Description of Unknown: RightRegion for integrase B3672 sequence
gttggcagggacaaggcaatcacggtcaccttccgggacggctcggagatacaggcataacagatacatgggtaggaacggcactcggctacggtcgggtgtcttttttcgttaaggggtagaaaaattcataaatctgtgatacaataaattgtagtataagtgcaatatatgttactacagcaaaggagagtcggaatgctgaagaataacgtagaagtcgatgtaaaagtgaaatgtatagagggcgatattaccca

SEQ ID NO: 29672 - DNA, 109 bp, Unknown
  Description of Unknown: RightRegion for integrase B3673 sequence
ccgggaataggtcgatacatagagaattcttttagattagagattttcttaaaaatgtgaagccgctatttttgtgcatttacaatcatatacaactgcgtggagctaa

SEQ ID NO: 29673 - DNA, 260 bp, Unknown
  Description of Unknown: RightRegion for integrase B3674 sequence
gtccatgttatcacgcttggcggcgatgacagggcgagaggcagggataatgtacaataagttgcgcaaattggaaaatgcataaaagaagacatagcttgcaggctctggtagaatgaagttaccacacaaacattcgaaaggagcaagcaaactatgtccgagaaaattgtacagctaaacgaggaagtaatcaagggccaaatcaaggaattggttcgcggcagcgtgggggaaaccctgaacgagctgctggagaa

SEQ ID NO: 29674 - DNA, 109 bp, Unknown; identical to SEQ ID NO: 29654
  Description of Unknown: RightRegion for integrase B3675 sequence

SEQ ID NO: 29675 - DNA, 109 bp, Unknown; identical to SEQ ID NO: 29654
  Description of Unknown: RightRegion for integrase B3676 sequence

SEQ ID NO: 29676 - DNA, 260 bp, Unknown
  Description of Unknown: RightRegion for integrase B3677 sequence
ggcaaccttgataattttgatattgccatctatccgaaaattccgaaatatattacataatgaaaagctgttcactgttgagcagcttttatattatagataacctcaatgtgccaattcctccgtacctatatccgtaagcaacccctttgaaacttcatcgggcatagtatatctttgcgacaaatatctaagtgacgcgccgagttcaccgtttggaccgccgtattgagttataaccacatttgcaagacgtggat

SEQ ID NO: 29677 - DNA, 260 bp, Unknown
  Description of Unknown: RightRegion for integrase B3678 sequence
ggcaacattgataatttcaatatcacaatttatccgaaaattccgaaatatattacataatgaaaagctgttcactgttgagcagcttttatattatagataacctcaatgtgccaattcctccgtacctatatccgtaagcaacccctttgaaacttcatcgggcatagtatatctttgcgacaaatatctaagtgacgcgccgagttcaccgtttggaccgccgtattgagttataaccacatttgcaagacgtggat

SEQ ID NO: 29678 - DNA, 260 bp, Unknown
  Description of Unknown: RightRegion for integrase B3679 sequence
ggcaaccttgataatttcaatatcacaatttatccgaaaattccgaaatatattacataatgaaaagctgttcactgttgagcagcttttatattatagataacctcaatgtgccaattcaccgtcaccgaatgattttgcattgtatcttgcctgtgatattacggaatatctgctgtccaaaactccttcttcctgctgcattgtttcgcatagctttgaatatgtataaggaatttctctcaaatctacgattgaaa

SEQ ID NO: 29679 - DNA, 260 bp, Unknown
  Description of Unknown: RightRegion for integrase B3680 sequence
acgatagtcgtcttgccttacggtttcgtacttgcggcccagattaaggataggctttaagcctgtcctttttcttttggtagtcggtagtccgttttaacgaattttccttatatatacatgtaatgcgagggagcgacgagattgcgctttgagtccctttactttttggaaaaatcttttcagtttttacgaactaccagtactaccagataaccaaaagccttgtaaatcaaggactttcttcggtagcaggctca

SEQ ID NO: 29680 - DNA, 109 bp, Unknown
  Description of Unknown: RightRegion for integrase B3681 sequence
ccgggaataggtcgatacatagagaattcttttagattagagattttcttaaaaatgtgaagccgctattttagtgcatttacaatcatatacaacagcgtggagctaa

SEQ ID NO: 29681 - DNA, 260 bp, Unknown
  Description of Unknown: RightRegion for integrase B3682 sequence
acgatagtcgtcttgccttacggtttcgtacttgcgacccagattaaggataggctttgagcctgtcctttttcttttggtagtcggtagtccgttttaacgaatttttcttatatatacgtgtaatacgagggagcgacgagattgcgctttgagtccctttactttttggaaaaatcttttcagtttttacgaactaccagcactaccagatggccaaaagccttgtaaatcaaggactttcttcggtagcaggctca

SEQ ID NO: 29682 - DNA, 260 bp, Unknown
  Description of Unknown: RightRegion for integrase B3683 sequence
tccgaactcctatttgtttttgtagacggtgtgttcggagtagtaatccctagagtgtgaaattctagggatttttatctgttcaaaaagtccccttatttgaggtgacccccaaaagttaaacctaaaaatctaactttttggggggcggggcattttagggggactttaattatatagagccaattatagctttatttagtttcatcttctaatttattttcagccacaatttttaacttgctgagaattttcgtgag

SEQ ID NO: 29683 - DNA, 260 bp, Unknown
  Description of Unknown: RightRegion for integrase B3684 sequence
gcaagcgacatgaatctctatgtatttccacgtgtcgaaacggacggcgagcaattatagtcattgcagggggcttatatggttttatacttatagccaaataagttatatgtgataatttttcaagaaaaagcgggtgccatagtcaggtacccgctttttcttcccccatatctttttcgatcaaccccacgatataggcgttcaggctcatgccctcctgctgggcgcgggcctttattttctccttcgtgcctccc

SEQ ID NO: 29684 - DNA, 109 bp, Unknown; identical to SEQ ID NO: 29654
  Description of Unknown: RightRegion for integrase B3685 sequence

SEQ ID NO: 29685 - DNA, 260 bp, Unknown
  Description of Unknown: RightRegion for integrase B3686 sequence
tccattagctacggtcagcgtaggggaggaaaagctatcctggaagtgttcttgaagtagggcaaattctttttgccctatgttagtatcctgctcgttcgactttaatcgaaccagcatgatactaacaagccgaaaaagccttgataccactagagattttagcttatttccggtatcgtgtaaatatcgaaaagggagagatttaaccatggaagaagaattattgaaaaatctgataggcgaatatgtaaggcaac

SEQ ID NO: 29686 - DNA, 260 bp, Unknown
  Description of Unknown: RightRegion for integrase B3687 sequence
tataataattccgggtgtccccgttggagcaccaagaaagaagcctcttttgtccggtagacaaaagaggcttctttcaacgaaataaatccctgcgggatttgtgaaacgcccttcgggcgtgaagagcgcaattcttcacagcggttttccgctgctttatttggcgaagccatacttcatacttgtaaaaaggagactcgatatgaaaagcttgaacgattttccgcgtatacctttggccgtgctgccgacgccca

SEQ ID NO: 29687 - DNA, 109 bp, Unknown
  Description of Unknown: RightRegion for integrase B3688 sequence
ccgggaataggtcgatacatagagaattcttttagattagagattttcttaaaaatgtgaagccgctattttagtgcatttacaatcatatacaactgcgtggagctaa

SEQ ID NO: 29688 - DNA, 260 bp, Unknown
  Description of Unknown: RightRegion for integrase B3689 sequence
gttggaaacgggttcggatttctttatttcgtcaagaaggctgaaaatatgcaggggtaacttgaaccattgctacaactgagttgaagatgcaatcatgcccgctttatttcttacaataaagcgggcatgactagttggttacagagcaacatcacatgtgaggaaccagcttcccattggataactttggaattccaccatactctccatccagatatgctttgcgaattcgcttgtcgaaacgagcgccgaattca

SEQ ID NO: 29689 - DNA, 199 bp, Unknown
  Description of Unknown: RightRegion for integrase B3690 sequence
tatctgcgtaaacagtctgccgcactgcctgaattccttttccattcagatgggcaatgatgtcagatactgtggcgggatggttttcatcggtccgctcatagagaaaccggagtaattccagtatccgcatatttgttgaattctgcatacttcacctcctcgattcttaaaatggcctattttgtatggtgtccag

SEQ ID NO: 29690 - DNA, 260 bp, Unknown
  Description of Unknown: RightRegion for integrase B3691 sequence
aggaacagcgagataacctttgcattctacaatggtactaaggttaaagtgaggcaataaaacgatcgctctactaaaaatcaatgccatctcaataaaatcaaacagtaaacaccgccgcatagagaagctactctctgtgcggcggtgttccttcatattttcttatcgtacacgatatgctgcttcaccggaagcctcaattacgctcagaccaattttttctttcttatgatactgattgcaacgctcacgacatt

SEQ ID NO: 29691 - DNA, 260 bp, Unknown
  Description of Unknown: RightRegion for integrase B3692 sequence
atgataatatgcagcggtgtatttgcccttgtaaaaacaaacgccgggagcacccaataggatgcccccggctctttttttattctgctttgccgagctgcttaacgagctggttgccgtacaccgccgcgccggttacaagaatgccctgaatcaccgcgtccacggtggggcccatgatggccaaggccccgcccacaccaaatactagcaggatcagcgggataaacttatccgggatcacctcgatatgtttgaca

SEQ ID NO: 29692 - DNA, 260 bp, Unknown
  Description of Unknown: RightRegion for integrase B3693 sequence
gcaagcgacatgaatctctatgtatttccacgtgtcgaaacggacggcgagcaattatagtcattgcagggggcttatatggttttatacctatggtccgccgatggcggtggctcccctgcccaatgtgcgccaagtggtggagtatgccctgacagaaattccatcttccaaaatctggcttggcgtcccactctacggctacgactggccgctcccctttgtgcagggacgtaccaaggctcagtccatttcccccc

SEQ ID NO: 29693 - DNA, 260 bp, Unknown
  Description of Unknown: RightRegion for integrase B3694 sequence
cgagatggaaaaatcgtgtttgttttgaaagatgggacggagttggtgcagaaaatttgaggggtgtggggtgcagaacgcactccctttgcttggtgggtgtgcattgtatcatttgtgacgtgcgtttccattcatatgtacgcctacttcaaggtcacaatcgccgttggagtgggcgtatacttttaccatcgccttgcacacctgcttggtgtcggtatccagacgctccatggcattccgaaatagctgtacca

SEQ ID NO: 29694 - DNA, 260 bp, Unknown
  Description of Unknown: RightRegion for integrase B3695 sequence
gactctcttgagctccaccatcaagctgcaccaaaaaagatgccgctgcgaaaagcctagaagtttcaacgacttccgggcttttttgcgcccatttttagaggcgtgacaaaaagatgccaaaatgggctttggcaaattcgatggacctgtacctttacccaaggcattttgagccgcttttccgaggatttttcgggaaagtggctcttttttgtcctcggcaaagtgtagaattctgactggcgtttttgttggtt

SEQ ID NO: 29695 - DNA, 260 bp, Unknown
  Description of Unknown: RightRegion for integrase B3696 sequence
ggcaaccttgataatttcaatatcacaatttatccgaaaattccgaaatatattacataatgaaaagctgttcactgttgagcagcttttatattatagataacctcaatgtgccaattcctccgtacctatatccgtaagcaacccctttgaaacttcatcgggcatagtatatctttgcgacaaatatctaagtgacgcgccgagttcaccgtttggaccgccgtattgagttataaccacatttgcaagacgtggat

SEQ ID NO: 29696 - DNA, 260 bp, Unknown
  Description of Unknown: RightRegion for integrase B3697 sequence
acaatagtcgtcttgccttacggtttcgtacttgcagcccagattaaggataggctttaagcctgtcctttttcttttcaaaagccaatgtcgtcaaaggcgtactcgatttcgtctaagagcatacgctccgagatttcatagtcctccagcatttcgtcgataggaaaatgcgctttgaggacaagcagcaagtactcagcaagtccttcagagtcatagccttcgacttcatctgtaccgaggggctgaatcatgcc

SEQ ID NO: 29697 - DNA, 109 bp, Unknown
  Description of Unknown: RightRegion for integrase B3698 sequence
tcaggaattggaagatatatccaaaatgagttccgtctggatatctttcttcgtctgtaatcactatctccatcttccgtgtgcgaatgaactttcacacctcgaaatc

SEQ ID NO: 29698 - DNA, 260 bp, Unknown
  Description of Unknown: RightRegion for integrase B3699 sequence
ggcaaccttgataatttcaatatcgcaatttatccgaaaattccgaaatatattacataatgaaaagctgttcaatgttgagcagcttttatattatagataacctcaatgtgccaattcctccgtacctatatccgtaagcaacccctttgaaacttcatcgggcatagtatatctttgcgacaaatatctaagtgacgcgccgagttcaccgtttggaccgccgtattgagttataaccacatttgcaagacgtggat

SEQ ID NO: 29699 - DNA, 109 bp, Unknown; identical to SEQ ID NO: 29664
  Description of Unknown: RightRegion for integrase B3700 sequence

SEQ ID NO: 29700 - DNA, 260 bp, Unknown
  Description of Unknown: RightRegion for integrase B3701 sequence
acgatagtcgttctgccttacggtttcgtacttgcgacccagattaaggataggctttaagcctgtcctttttcttttggtagtcggtagtccgttttaacgaattttccttatatatacatgtaatgcgagggagcgacgagattgcgccttgagtccctttactttttggaaaaatctttttagtttttacgaactaccagtactaccagatagccaaaggccttgcaaatcaaggactttcttcggtagcaggctca

SEQ ID NO: 29701 - DNA, 260 bp, Unknown
  Description of Unknown: RightRegion for integrase B3702 sequence
gaaccctacattgcgtggggaacggtatttgtccaaacaaaaagacactccttaccgtaatggtagggagtgttttctttgtatctaaggcacttaggtgagttaggtgagtaatcgggctaaaatccctataacttcttcttagtacgcgcgtatatagaaatagttatagggaaatgtacccgattactcaccttcctcacctaaactttttaaatttaggggcaattatagtcttacttcttccctttcaccacgaa

SEQ ID NO: 29702 - DNA, 260 bp, Unknown
  Description of Unknown: RightRegion for integrase B3703 sequence
acgatagtcgtcttgccttatggtttcgtacttgcgacccagattaaggataggctttgagcctgtcctttttcttttggtagtcggtagttcgttttaacgaattttccttatatatacgtgtaatgcgagggagcgacgagattgcgctttgagtccctttactttttggaaaaatctttttagtttttacgaactaccagtactaccagatagccaaagaccttgcaaatcaaggactttcttcggtagcaggctca

SEQ ID NO: 29703 - DNA, 260 bp, Unknown
  Description of Unknown: RightRegion for integrase B3704 sequence
acaattgagtttagcagagaaaataactctgaattcattctcgatataaacctacactagaacgtgtgggttagtctttgccccatatatctatcgttagtgtgttacttttatatcgccctcacgatagatatggacgggatagacattaaaccgttgataccattggaggaaatataaatgagaatcgtatggaaagatagttcgcctaaaacaaaaccttggataacactacaatatcgagagtatgttgtaagtca

SEQ ID NO: 29704 - DNA, 260 bp, Unknown
  Description of Unknown: RightRegion for integrase B3705 sequence
aatgtgcccgccgacaattttgaaatcatcctcttccccaaaatatcacccgaaaactaatcactaatcaatgatagatataacaccctaacgaattcgcccatttggagatgatgggcaccatcgtgcatcagctgacacaggggctaacaaaggacgaaattcttgccgccggcttagatccctattatgtgaaccatggcttaggcgtatacccctcctccgccgcaggtgttcccttcactgccgcgtatctgcaa

SEQ ID NO: 29705 - DNA, 260 bp, Unknown
  Description of Unknown: RightRegion for integrase B3706 sequence
aatgtgtccgccgacaattttgaaatcatcctcttccccaaaatatcacccgaaaactaaccccaaattaccgatagatataacaccctgacgaattcgcccatttggagatgatgggcaccatcgtgcatcagctaacacagggactaacgaaggacgaaattcttgccgccggcttagatccctattatgtgaaccatggcttaggcgtatacccctcctccgccgcgggtgttcccttcaccgctgcgtatctgcaa

SEQ ID NO: 29706 - DNA, 164 bp, Unknown
  Description of Unknown: RightRegion for integrase B3707 sequence
ccgggaataggtcgatacatagagaattcttttagattagagattttcttaaaaatgtgaagccgctattttagtgcatttacaatcatatacaactgcgtggagctaatgaattagtcccactctgttggtagtaacttagattgacagtaatagcgttttgt

SEQ ID NO: 29707 - DNA, 260 bp, Unknown
  Description of Unknown: RightRegion for integrase B3708 sequence
cacgttgcctccaccaatttgccgcatcgttttgtacgatgcggcgttttttatgcctaaaaaactttggcagactgtgccgggttccgaaccctgaagtcggatgcgaaccgggcggggtcataaatgtactttttgaaaatccatcggtttcacgcttctttctttgaattttacacagtgctgcgggcaagcgcatcgcttttatgccccctttgcggaaatttcttcaaaaatttccgcaccatcgtaggttgata

SEQ ID NO: 29708 - DNA, 260 bp, Unknown
  Description of Unknown: RightRegion for integrase B3709 sequence
acgatagtcgttctgccttacggtttcgtacttgcgacccagattaaggataggctttaagcctgtcctttttcttttggtagtcagtagtccgttttaacgaattttccttatatatacatgtaatgcgagggagcgacgagattgcgccttgagtccctttactttttggaaaaatctttttagtttttacgaactaccagtactaccagatagccaaaggccttgcaaatcaaggactttcttcggtagcaggctta

SEQ ID NO: 29709 - DNA, 109 bp, Unknown; identical to SEQ ID NO: 29654
  Description of Unknown: RightRegion for integrase B3710 sequence

SEQ ID NO: 29710 - DNA, 146 bp, Unknown
  Description of Unknown: RightRegion for integrase B3711 sequence
aatgtgtctgccgacaattttgaaatcatcctcttccccaaaatatcacccgaaaactaatcactaatcaatgatagatataacaccctaacgaatatgtgtgttatatctatcaattattccattcatacagcagaatcataaaa

SEQ ID NO: 29711 - DNA, 109 bp, Unknown; identical to SEQ ID NO: 29654
  Description of Unknown: RightRegion for integrase B3712 sequence

SEQ ID NO: 29712 - DNA, 109 bp, Unknown
  Description of Unknown: RightRegion for integrase B3713 sequence
aatgtgtctgccgacaattttgaaatcatcctcttccccaaaatatcacccgaaaactaaccccaaattaccgatagatataacaccctgacgaattcgcccatttgga

SEQ ID NO: 29713 - DNA, 260 bp, Unknown
  Description of Unknown: RightRegion for integrase B3714 sequence
gccttatccgaacgcactgtttttgtgaacggtgttattgggataatcgtgcatcgatgaagaaccccatctccaaaattggagagggggttctttatttacaatatacccatagtattccgcgaacttgcgcgtcagctgatgcgcaattgtgccggcaatatttacaatatcatttcccgcgcagcacaatcccatgataatacccggccattttttcttccggccctccggcgtccttatccatgaggaacgctttg

SEQ ID NO: 29714 - DNA, 109 bp, Unknown; identical to SEQ ID NO: 29667
  Description of Unknown: RightRegion for integrase B3715 sequence

SEQ ID NO: 29715 - DNA, 260 bp, Unknown
  Description of Unknown: RightRegion for integrase B3716 sequence
gcaagcgacatgaatctctatgtatttccacgtgtcgaaacggacggcgagcaattatagtcattgcagggggcttatatggttttatacctatggtccgccgatggcggtggctcccctgcccaatgtgcgccaagtggtggagtatgccctgacggaaattccggcctccaaaatctggctgggcgtccccctctacggctacgactggccgctcccctttgtgcagggacgtaccaaggctcagtccatttcccccc

SEQ ID NO: 29716 - DNA, 260 bp, Unknown
  Description of Unknown: RightRegion for integrase B3717 sequence
gggaatcgaaagtcaggcggaatggataaattcacgttgaaaatcttcccaaggctttagcgcgcccagtatgtatagagtttgtgtactgacgaactggcgcatctcgaaatcgtcgccaccatcgttcaccagctcacccgcaatctgacggccgagcagttggtggaacagggcttcggcccctattacattgaccacgggaccggcatctggccccaggccgccggaggaatccccttcaacgcctgcgaattcca

SEQ ID NO: 29717 - DNA, 260 bp, Unknown
  Description of Unknown: RightRegion for integrase B3718 sequence
ggtcaatccccggcggacgccatcacgctcgaaattttcccgctgcttccgtcggagtaattttatgtatccacatccctagttttatgtattaaactatggatgtggatacataatttgttcggacgcgatacctcccgatgggcgcggattttattgcggtttagtatttgaacatccgggcgatgttctgcacgttgcaaacggggtactggtttccggcggcgatgaattcccgggtcaggattttcttcgcggcg

SEQ ID NO: 29718 - DNA, 260 bp, Unknown
  Description of Unknown: RightRegion for integrase B3719 sequence
gccttatccgaacgcactgtttttgtgaacggtgttattgggataatcgtgcatcgatgaagaaccccatctccaaaattggagagggggttctttatttacgatatacccatagtattccgcgaacttgcgcgtcagctgatgcgcaattgtgccggcaatatttacaatatcatttcccgcgcagcacaaccccatgataatacccagccattttttcttccggccctccggcgtccttatccatcaagaacgctttg

SEQ ID NO: 29719 - DNA, 260 bp, Unknown; identical to SEQ ID NO: 29698
  Description of Unknown: RightRegion for integrase B3720 sequence

SEQ ID NO: 29720 - DNA, 260 bp, Unknown
  Description of Unknown: RightRegion for integrase B3721 sequence
ggctctcttgagctccaccataaaaggactcttattttgatagaatggctatcaagataagagccctttttgttgcattccccgcgaaaacaagtgaatatcagaacttttaagcatctttgcccataccggcttttctgccggggcgggcttttttgttttcggggaaaacgcttttggggtgcgtctcactttatggggattcgtgttactttatgggcgtttgtttcgctttatctccactggaatcacatgtgtga

SEQ ID NO: 29721 - DNA, 260 bp, Unknown
  Description of Unknown: RightRegion for integrase B3722 sequence
tataataattccgggtgtccccgttggagcaccaagaaagaagcctcttttgtccggtagacaaaagaggcttctttcaacgaaataaatccctgcgggatttgtgaaatgcccttcgggcgtgaagagcgcaattcttcacagcggttttccgctgctttatttggcgaagccataattcatacttgtaaaaaggagactcgatatgaaaagcttgaacgattttccgcggataccgttggccgtgctgccgacgccga

SEQ ID NO: 29722 - DNA, 260 bp, Unknown
  Description of Unknown: RightRegion for integrase B3723 sequence
gccagggatgtactgaaggaatgcaagtgggatggggaaactctttttattatgctctgattttcccttttttattttgatgccctcacccctcagaataattcagagaaaatatactagacaaattcaccggccaggtatgtaatacttgaccggttttttgtctagtccatcatttatgctctgatgtagagtgcaattcccttctgtgatgcctctgtgatgagcttatccgcctcttcctggctcttttctgtctg

SEQ ID NO: 29723 - DNA, 260 bp, Unknown
  Description of Unknown: RightRegion for integrase B3724 sequence
gccagggatgtattgaaggaatgcaagtgggatggagaaactctttttattatgctctgattttctcttttttattttgataccatcaggtctcattcttaggcttgaccttataagatctcttattgagacttcattatcacattccatattggactttcttacttcaagtcttacaagattgccaaccccctggatctgcaattcagccgaatcttcaattgtaataactcgctcatctttgggaataaaattagaca

SEQ ID NO: 29724 - DNA, 260 bp, Unknown
  Description of Unknown: RightRegion for integrase B3725 sequence
tccattagctacggtcagcgtaggggaggaaaagctatcctggaagtgttcttgaagtagggcaaatactttttgccctatgttagtatcctgctcgttcgactttgttggaacggaggcatctggtacaagcgtacacatggcacggagtcccgttgacaatggccttcacccgcttcacattgggcttccagacacggttggaacggcggtgggagtgggagacctggatgccaaaggtgacgcccttgtcgcagaat

SEQ ID NO: 29725 - DNA, 260 bp, Unknown
  Description of Unknown: RightRegion for integrase B3726 sequence
gtaaataaggacggaagtataacttttaaattcaagaatggaatggaatataaaaactaaatttaaaacaacccatccaggcttattgcttgggtgggctttttgtctttctttcaaaatgttctataggcttccatcttacaaaattctcggtaattagtcctttattaagaaaatgaaaagttaatgtattttgagtaatttctgcataatcaaccagtactggccatgatgtcttttcatattcactaattataaaa

SEQ ID NO: 29726 - DNA, 260 bp, Unknown
  Description of Unknown: RightRegion for integrase B3727 sequence
aacggtcaaccagtctggccatccggtaataatcgggtggtttttttgtttgtcttgtaaaagccccctgccctgtcgtataataaaagaaaaacaaaaagggagaacccactatggcaaaacgaatgctggattgctgcgcttcggattttgcgcagttcaccaaggctgacctgctggagtccatccagaagagcgagggccgggtcattgcctgtgagaccatcggttcggtgcagccgctgctgggcaatgtgacc

SEQ ID NO: 29727 - DNA, 109 bp, Unknown; identical to SEQ ID NO: 29656
  Description of Unknown: RightRegion for integrase B3728 sequence

SEQ ID NO: 29728 - DNA, 109 bp, Unknown; identical to SEQ ID NO: 29667
  Description of Unknown: RightRegion for integrase B3729 sequence

SEQ ID NO: 29729 - DNA, 137 bp, Unknown
  Description of Unknown: RightRegion for integrase B3730 sequence
cccggaataggcagatatgtggagaatgtcttcaccattgatgtatttttacggttatgatttccaacacacatgtgcgaatgaattggcacaccttgaaatggtggctgccattgtacaccagcttacaagaaacc

SEQ ID NO: 29730 - DNA, 260 bp, Unknown
  Description of Unknown: RightRegion for integrase B3731 sequence
gttgtgatacagatgtatcgaaaaactgctgtgttttttgtttgcggttcgattcgttaaaatccgaagggtttcaaggagaataagttggagaaaattatcgtaatggcacccggccatgaactgtgggatgggatcatcgcttttacagcaggctgcccatggaaagcagcatttttggggcagagaagatggagccaaacgattttgaaaataacgaaagagctcttgtggccttgcgcgatgatgacgcggcggct

SEQ ID NO: 29731 - DNA, 260 bp, Unknown
  Description of Unknown: RightRegion for integrase B3732 sequence
acttgcatcgttagagtatcgaaaaactggtttgttgtcgttggaacgtgccagaaatagcaatttccggtgtttgcaaaacaccagatgggcggcttgctgtaagcccgtctaacgccagaaagcggggcaccccttgtcagggtaccccgcttgaacactaataagaaagcttctggccggggtagatcgtataaggtgccccaatgccgttcttgcttgcgatggtgcgccagtcgataccgagcgaagcgccaatc

SEQ ID NO: 29732 - DNA, 260 bp, Unknown
  Description of Unknown: RightRegion for integrase B3733 sequence
attacccgcgatgggaagtggcaattcaaattcaaaaacgaaagagtgatagaagtctaaaccgttaaaaagagaaaggcgcctggggcaagaacctcaggtgccttatttttttgtttagctttaatagcaaaaccataattttaacgcaatggcataaatttaacggaaaaatatgtatagcccacaccgatagagtagaaaggggaaaattgccttaatatatgaggtatatccacaaaaataagcagaattagggc

SEQ ID NO: 29733 - DNA, 260 bp, Unknown
  Description of Unknown: RightRegion for integrase B3734 sequence
aaccttctgtttcacactacattccagcagtatatcccctacaagagatatgggaaatagttactccgggattttaagtttctgcccagcatagatgattgtgtccttgatgccgttcagttcggcaatcgtaggccactcgttgtcgttgcccagcagtttctttgcaatcttccaaaggctatcaccatcctgcacaacgtaggtggtgtaggcaggcttttcctccggggacgtggcaaccaccgtaccaccgcttt

SEQ ID NO: 29734 - DNA, 109 bp, Unknown
  Description of Unknown: RightRegion for integrase B3735 sequence
aagggcggcccgttggataacttcgagcttactcttttcccgaaaattccgcgctcatagaaaaaagccaccctttcgccgggtggcttttaatgtgaacctctgtggc

SEQ ID NO: 29735 - DNA, 260 bp, Unknown
  Description of Unknown: RightRegion for integrase B3736 sequence
acttgcattgtaagggtatcgaaaaactggtttgttgtcgttggaacctaccagaaatagccatttctggtatttacaaaacaccagatggacggcttgctgtaagaccgtataacggcagaaagcggggcaccccttgtcagggtaccccgcttgaacgctatttgatgatgattcgctgaccctgataaatcttgtccgggtctgcgatgccatttgccgaagcaagcctatcgacggttgttccgtacttgcttgcg

SEQ ID NO: 29736 - DNA, 260 bp, Unknown
  Description of Unknown: RightRegion for integrase B3737 sequence
atctgtgaaaagggagaattgcaatttcggtttaaaaacggtactgaaataacagtttgattctgaatcgcagcattattaatttttcacataaaacgaaaagcagatttgtaacattacacaaatctgcttttttgtcttgactttgcgagaaaaatagtgtaatatagattacaagcaaaacgaatgaatccggtgttccgggtttgtcaaaggcagtggttactcactgcacaccctttcggtactgtttgcacacc

SEQ ID NO: 29737 - DNA, 260 bp, Unknown
  Description of Unknown: RightRegion for integrase B3738 sequence
acttgcgttgtaagagtatcgaaaaactggtttgttgtcgttgggacgtgccagaaatagccatttctggtgtttgcaaaacaccagatagacggcttgctgtaatcccgtataacggcagaaagcggggcaccccttgtcaggggcaccgcttgaacgctaataagaaagtttctggccggggtagatcgtatatggtgccccaatgccgttcttgcttgcgatggtgtgccagtcgatgccgagcgaagcaccaatct

SEQ ID NO: 29738 - DNA, 260 bp, Unknown
  Description of Unknown: RightRegion for integrase B3739 sequence
gaggcgtcatgtgttcgtcttagctccactttgagccaccaaaatcaaaaatcctgttgacgaatgtcaatgggatttttaattttgtactattcattcttcatcattaattattaatcattcatttcaggatttttgtaatgaatagtgaataatgaagtcgctttgctgatgaataatgaataattgcaattattcggcgtttctgatataatctaacatggtgatgcctgtgaaagacaacattcttatagataagt

SEQ ID NO: 29739 - DNA, 260 bp, Unknown
  Description of Unknown: RightRegion for integrase B3740 sequence
ggcaacgagattggtttccagctagacattttcccaaaaatccagaagaataatcaatgatatcttctatgagctgacgaactggatcattgatgttatcagtaattataaaaagaaagtcccggggaattaaccccgggatattttttactgtttcttaatatattttgcagatacaaagccataatactttcctgcaatacgaatataataccatttgctgccgtttttatctttctgtgtataattcataacttcta

SEQ ID NO: 29740 - DNA, 260 bp, Unknown; identical to SEQ ID NO: 29623
  Description of Unknown: RightRegion for integrase B3741 sequence

SEQ ID NO: 29741 - DNA, 260 bp, Unknown
  Description of Unknown: RightRegion for integrase B3742 sequence
tacgaactcttttggtttaggaatgtgttcggcctgacaagaaaactgccgcagaggtaattgtcctctgcggcagttttctatttgccggtgtagctctctgtcggcaagagcttataggttttcagcgtcttcccacatctgcggcacttataccggtagatcgtgtcgatgtcgcctgcgctggaaccgacagtgaaatcggaatcaagcatcacccaactgtgcgattcacaggggcataggcgctcctcaagctc

SEQ ID NO: 29742 - DNA, 260 bp, Unknown
  Description of Unknown: RightRegion for integrase B3743 sequence
attacccgcgatgggaagtggcaattcaaattcaaaaatgaaagagtgatagaagtctaaaccgttaaaaagagaaaggcgcctgggacaagaacctcaggtgccttatttttttgtttagctttaatagcaaaaccataattttaacgcaatggcataaatttaacggaaaaatatgtatagcccacaccgatagagtagaaaggggaaaattgccttaatatatgaggtatattcacaaaaataagcagaattagggc

SEQ ID NO: 29743 - DNA, 260 bp, Unknown
  Description of Unknown: RightRegion for integrase B3744 sequence
tccgaacacgggaaactcataattctgaatggagcaatcggatttctattgcgaagataagtcaagccccctccgtaagcagcggagggggctttttcctgtgaaaattgccgaggatacgaaaccctggcaattcatggtaggatgctcaaatgtattagacagtatttcaatccacacccttcgcgaggaagggtgactgcgggagcgcgcccattgagctgtttcaagcatatcatgttccgccggaaactgcaagc

SEQ ID NO: 29744 - DNA, 260 bp, Unknown
  Description of Unknown: RightRegion for integrase B3745 sequence
tacgaactcttttggtttcggaacgtgtttggcctgacaataaaactgccgcagaggtaattgtcctctgcggcagttttatttactttgcatccggaatacgatcaagaaacgcggcggcagtatctaagtcccagcccagcgccaccaaagcgctgtgaacgtcaccggcgtatttaaccctcttgacgagagtgattttcatgtccggcagccgccgagcctcgaagcgccatttcttcgcgtcgtcaccgatcttc

SEQ ID NO: 29745 - DNA, 260 bp, Unknown
  Description of Unknown: RightRegion for integrase B3746 sequence
gactctcttgagctccaccatcaagctgcaccaaaaaagatgccgctgcgaaaagcctagaagtttcaactgtttcaccccataggtacacaatgtgtcacgggggtagcagtcggtacgggcaagaagcaggacgtaaacgcatgaatttgtgtttacgtcctgcttctgctatcttgatagatgtcaacagcaactatgcaagctgtcggggttttcaggcgcagtctgataaaatgccatgttttcaaggctttgca

SEQ ID NO: 29746 - DNA, 260 bp, Unknown
  Description of Unknown: RightRegion for integrase B3747 sequence
aagaccgaaatattggtgattttcaagggcggatacgaagttagaacggaaattgaataacgattaaatttacggcttgcggagaaatctgcaggctgtttttgttgggaggcggttatttggcaggcaattttgatgggataaagacaagaaattttggcattgagatagaaatgacaggcttaactcgctgtcaggcggcaaaagcgctttcaggtgttctgggaggagaggttgtccatgagggtggcacttatgat

SEQ ID NO: 29747 - DNA, 260 bp, Unknown
  Description of Unknown: RightRegion for integrase B3748 sequence
tcctcacaggatgcagaaaagttcgttttggctctccacaactgcaccataagcctgtgacaaaaaaagatgtcacaggcttttttctttgctgtaccgtcaaaaaatggcgatttcgccaaccgatttttggacgcggttttacagtgttgtccaatcatttcagggcggttttcccaacttgatgcccacttttcctgccgttttccggaatttggcaggggagggggcaatttttttgagaaaaaacagaataaatc

SEQ ID NO: 29748 - DNA, 260 bp, Unknown; identical to SEQ ID NO: 29649
  Description of Unknown: RightRegion for integrase B3749 sequence

SEQ ID NO: 29749 - DNA, 126 bp, Unknown
  Description of Unknown: RightRegion for integrase B3750 sequence
attacccgcgatgggaagtggcaattcaaattcaaaaacgaaagagtgatagaagtctaaaccgttaaaaagagaaaggcgcctggggcaagaacctcaggtgccttattttttgtttagctttaa

SEQ ID NO: 29750 - DNA, 260 bp, Unknown
  Description of Unknown: RightRegion for integrase B3751 sequence
ttggtctttttcctttgtggtacgtttggaatttgcgtcgccaggggttcccactggtagctttgcagtcaaatgcaaagcagggaacaagcaaaagcccccgcaggtacgctttggcgcacttgcgggggcttttgttaaatctcggttgttacctcaacggcggcaattttttccgccagctgtttgaggggcgtgtcttcggtgtattcgacttccaggccgtcggccagtttgtgcaaggcttccaggctcatggt

SEQ ID NO: 29751 - DNA, 260 bp, Unknown
  Description of Unknown: RightRegion for integrase B3752 sequence
ggaaaccgtcagaacggcggtatggaccagtttacgcttaaattgtttccacgtctttaatttttccctttacgtatagagattgtgtacacattcctccgtaccgatatcggtcaaggttcccttacactctttatatggcatggcgtagcgctgggaaagataacgcatggaggcgcccatttcgccgtccggcccaccatactgactcattataaactgagccatctgggcattgggctctttgatattaactggaa

SEQ ID NO: 29752 - DNA, 260 bp, Unknown
  Description of Unknown: RightRegion for integrase B3753 sequence
gataaccgccgatttggaaacccagagccactggagttggagtttcaattcaaggtctgatctctcccctgcccgctctgggtattgtgttgctgccatatctatcatggtggatataatgaactggggcatttggaaatgatcggcgcgatcgtccaccagttgacgcggaatctgaaggattctcagatgaaggattcggcgtttgcgccctattttgtggaccacactgcgggggtctaccctactgccgcttccgg

SEQ ID NO: 29753 - DNA, 260 bp, Unknown
  Description of Unknown: RightRegion for integrase B3754 sequence
ggcaacgagattggttttcagctcgacattttcccaaaaatccaaaaggaaaatcaatgatatcttctatgtgctgacgaactagctcattgatgttgtcggtaattaaaaaaagaaattcccggggaattagccccgggataatttttactgtttcttaatatattttgcggatacaaagccataatactttccagcaatgcggatataataccatttgctgccgtttttatctttctgggtaaaattcattacctcta

SEQ ID NO: 29754 - DNA, 260 bp, Unknown
  Description of Unknown: RightRegion for integrase B3755 sequence
cgcggccattcccctttggaaagcctcaccctcgaaatctacccgcgtctgccaaagtaattatttgagacaacttgcgctgaagaatgtgttcttgggcgcaagttgtctcatccgtttttacttccagccatcgatcatcgccttgacctctgcggtcttggcgattaggtcattgtggatggcttcccacgcgacgatcataccgtcggcgtaggcggggttgcgcttgtactcctcggaggccttgtatccctcga

SEQ ID NO: 29755 - DNA, 260 bp, Unknown
  Description of Unknown: RightRegion for integrase B3756 sequence
gtatactccaaagaggacatgcgatatacattcaaggacggaaccgagatcaagctataacccgaacatgaaaaaacatcctgtggcagctgctgcaggatgttttattgcgcccagatgcgtccattctcaaacgaatctgaaaaatgcgtccatttgcgtccattccccaatattactacaggttgtatcaaagtcgaaaaggttttttcataaacgcgcccattaaacggctgcaaaacttcaacaagggttcgcac

SEQ ID NO: 29756 - DNA, 260 bp, Unknown
  Description of Unknown: RightRegion for integrase B3757 sequence
atctgtgaaaagggagaattgcaatttcggtttaaaaacggtactgaaataacagtttgattctgaatcgcagcattattaatttttcacataaaacgaaaagcagatttgtaacattacacaaatctgcttttttgtcttgactttgcgagaaaaatagtgtaatatagattacaagcaaaacgaatgaatccggtgttccgggtttgtcaaaggcagtggttacccactgcacaccctttcggtactgtttgcacacc

SEQ ID NO: 29757 - DNA, 138 bp, Unknown
  Description of Unknown: RightRegion for integrase B3758 sequence
gataaccgccgatttggaaacccagagccactggagttggagtttcaattcaaggtctgatctctcccctgcctgctctggggatagtgttgcagccatatctatcatggcggatataatgaactggggcatttggaa

SEQ ID NO: 29758 - DNA, 260 bp, Unknown
  Description of Unknown: RightRegion for integrase B3759 sequence
tccgaacttgattccgatagggaatgggttcggatttcttgtttttatcaaggacattgaagtttagtttcgggatagaataacatcaaattcaggaggatatacccatgaaaaaactcataagctgcgcgttcaatatggataccgcctgtgtggagcttcgcttcacggacgggagcatttgctccatcgactgcaccgccgtggagaacgaggtggcggacaaccgcttccagcgggcggagctggactatctcatc

SEQ ID NO: 29759 - DNA, 260 bp, Unknown
  Description of Unknown: RightRegion for integrase B3760 sequence
ggaaaccgtcagaacggcggtatggaccagtttacgcttaaattgtttccacgtctttaattttttccctttacgtatagagattgtgtacgcattcctccgtaccaatgtcggtcagggttcccttgcactctttatatggcatggcgtagcgctgggaaagataacgcatggaggcgcccatttcgccatccggcccgccggatgtcaataacatatgattagattaagcccctggaatcatggttccggaggctttt

SEQ ID NO: 29760 - DNA, 260 bp, Unknown
  Description of Unknown: RightRegion for integrase B3761 sequence
tctccacaggatgcagaaaagttcgttttagctctccacaaccgcaccataagactgtgatgaaaaagatgtcacagtcttttttctttgttgtagcgtcgaaaatcggcgatttcgccaaccgatttttgaacacggttttacagtgttgtccaaccatttttgggcggtttgcccaccctgaagcccactttctctgccactttttggaatttggcaggggagtgggcaatttttttgagaaaaaacagaataaatcc

SEQ ID NO: 29761 - DNA, 260 bp, Unknown
  Description of Unknown: RightRegion for integrase B3762 sequence
gtgaatagagatgaaacaataacatttaaatttattaatggtaaagaaatcaccttataagaggagtctatcagttagtgtccgctgatagacttttttgtcactatatggtaaaatatacgcaagtaaatgcatgtacttcgtaggtgcttcctaagtattcgtggagccgagttgagcgtagtgccttgggctcgttaaaaggaagtgcacattcggtcacggaatcagtgattggtctagagttctgatgccacaaa

SEQ ID NO: 29762 - DNA, 260 bp, Unknown
  Description of Unknown: RightRegion for integrase B3763 sequence
cgcggccattcccctttggaaagcctcaccctcgaaatctacccgcgtctgccaaagtaattttttgagacaacttgcgctgaagaatgtgttcttaggcgcaagttgtctcatccgtttttacttccacccatcgatcatcgccttgacctctgcggtcttggcgatgaggtcgttgtggatggcttcccatgcgacgatcatgccgtcggcgtaagatgggttgcgcttgtactcctcggaggccttgtagccctcga

SEQ ID NO: 29763 - DNA, 109 bp, Unknown
  Description of Unknown: RightRegion for integrase B3764 sequence
aaagaaatactttatgatggcaataaaattcatgtaaaatttaatctaaaaaaaaactagatagtgtagaaaatatactatctaggctattcaataaatatagtacatg

SEQ ID NO: 29764 - DNA, 260 bp, Unknown
  Description of Unknown: RightRegion for integrase B3765 sequence
tcctcacaggatgcagaaaagttcgttttggctctccacaactgcaccataagcctgtgacaaaaaagatgtcacaggcttttttctttgctgtaccgtcaaaaaatggcgatttcgccaaccgatttttggacgcggttttacagtgttgtccaaccattttagggcggtttgcccaccttgattcccacttttctgccgatttctggaatttggcaggggagggggcaatttttttgagaaaaaacagaataaatcct

SEQ ID NO: 29765 - DNA, 109 bp, Unknown
  Description of Unknown: RightRegion for integrase B3766 sequence
gcaatatccgaacttttgttcggatatttttttgttatggtcttttttcccatttcataagcattttgcattgtcctgctttgctttatacatctatcgttaattacca

SEQ ID NO: 29766 - DNA, 260 bp, Unknown
  Description of Unknown: RightRegion for integrase B3767 sequence
gacgatataccgtcaaattccgagggctctaccgcgttgcggttggtggaggcgacgtgaccttgtgcgaactttttggacagttcgccagccgccgcctccgcgtccatgacgaggtcgaagtcggcctcggcgttagaaccccccgaatagttgaaagcaatccgcaggtgatcatcggacagatagaccaccgacacaaaggcatcaatgaccttgcgccggaactcttggctctgcaagctgccgccccggaagcg

SEQ ID NO: 29767 - DNA, 260 bp, Unknown
  Description of Unknown: RightRegion for integrase B3768 sequence
ggcaacgagattggttttcagctcgacattttcccgaaaatccagaagaataatcaatgatatcttctatgtactgacgaactggctcattgatgttgtcggtaattaaaaaaagaaattcccgggggtaattccccgggatatttttactgcttcttaatatattttgcagatacaaagccataatactttcctgcaatacggatataataccacttactaccgtttttatctttctgggtaaaattcattacttccac

SEQ ID NO: 29768 - DNA, 260 bp, Unknown
  Description of Unknown: RightRegion for integrase B3769 sequence
gataaccgccgatttggaaacccagagccactggagttagagtttcaattcaaggtctgatctctcccctgcctgctctggggatagtgttgcagccatatctatcatggtggatataatgagctgggacacctcgagatgattggcgcaatcgtccaccagctgacgcggaatttgaaggattctcagatgaaggattccgcatttgcgccctatttcgtggatcacactgcaggggtttaccctaccgccgcttccgg

SEQ ID NO: 29769 - DNA, 260 bp, Unknown
  Description of Unknown: RightRegion for integrase B3770 sequence
tctcttacgggtcaccaaatcatccgaacactttggatcaatgggccaaaagcccagtgatttcaaggtgttcgggattttttatgaccggaaattttcaaagtattccatggatcaatggaagcggttcagaggttcaaacaggatttgaacctctgcttttccattttcaaggggatttttgcagccagcgccctttttcagagggctgcggcggcgagatttcggaaaaattgaagaaaaatctttcacaaagttat

SEQ ID NO: 29770 - DNA, 260 bp, Unknown
  Description of Unknown: RightRegion for integrase B3771 sequence
agaatagagtttagtagagagaataactcagagtttatactagatatagacttatgctaaatggtggctttgctgcctgtaagacctgcactaaaatggtgtaggtaactttttccccgacatatatatcatggttgtgtttcttttatatcgccaccatgatatatatcacagggaaactattctaaacgttgatatatcaaggaggagatatacatgagaatagtatggaaagacagtgcgcctaaaacaaaaccttg

SEQ ID NO: 29771 - DNA, 260 bp, Unknown
  Description of Unknown: RightRegion for integrase B3772 sequence
tacgaactcttttggtttaggaatgtgttcggcctgacaagaaaactaccgcagaggtaattgtcctctgcggcagttttctatttgccggtgtagctctctgtcggcaggagcttgtaggttttcagcgtctttccacacctgcggcacttataccggtagatcgtgtcaatgtcgcctgcgctggaaccgacagtgaaatcggaatcaaccaccacccaactgtgtgattcacaggggcacaggcgctccgccaactc

SEQ ID NO: 29772 - DNA, 260 bp, Unknown
  Description of Unknown: RightRegion for integrase B3773 sequence
tttgatacaaagcgtatcttaattgcggttcattttttatctcttaaaaacggtttgtaatcagtatttacggcatttttgccgattagtaaagtgtcagattgaataaaaaatacggctgttttgtaataaaaaaggcagcctttgagtgcgtttttagagccgattttttattctgacacaaaactttttgaccgtttcatttttaaaaataagcgttttatttttcaaaatcagaatttataacggatgtcctgttt

SEQ ID NO: 29773 - DNA, 109 bp, Unknown
  Description of Unknown: RightRegion for integrase B3774 sequence
cctgtgttcgacttttgtggcgtcaactccaccaaaatcaacaataattttttaacataaaaaaccagtatactaaacagtaatactggtttttatttattttaaggag

SEQ ID NO: 29774 - DNA, 109 bp, Unknown
  Description of Unknown: RightRegion for integrase B3775 sequence
gataaccgccgatttggaaacccagagccactggagttggagtttcaattcaaggtctgatctctcccctgcctgctctggggatagtgttgcagccatatctatcatg

SEQ ID NO: 29775 - DNA, 260 bp, Unknown
  Description of Unknown: RightRegion for integrase B3776 sequence
ggcaacgagattggttttcagctcgacattttcccaaaaatccaaaaggaaaatcaatgatatcttctatgtgccaacgaactggcacatctggagatggtttccaccatggttcaccagcttacccgtgacctcactatggaagaaattgagaattccgggctgggaccatattatattgaccacacagttggcgtgtggccacaggcagcagggggtgttccatttaatgcctgcgaattccagagtaaaggtgatcc

SEQ ID NO: 29776 - DNA, 260 bp, Unknown
  Description of Unknown: RightRegion for integrase B3777 sequence
gacgggatccggttcgtgttccgcaccggtgaacaggtgaggattgccctgaaagggtgatgctcatatcagttgacgtgcacggttaggtacacctcccagaaataaagtaaggttacccttatctaataaggatggtgtttgcgtggacgatattgtaatggatcaggttgttgaaggcgagtatgggtcggcgaaggaaaaatctgtcgctggccagaacgcgatccgtcagctatcgcagccagtgaaaggcaaac

SEQ ID NO: 29777 - DNA, 260 bp, Unknown
  Description of Unknown: RightRegion for integrase B3778 sequence
acttgcatagttagagtatcgaaaaactggtttgttgtcgttggcacgtgccaaaaatagcaatttctggtgtttgcaaaacaccagatgggcggcttgctgtaagcccgtctaacgccagaaagcggggcaccccttgtcagggtaccccgcttgaacactaataagaaagcttctggccggggtagatcgtataaggtgccccaatgccgttcttgcttgcgatggtgtgccagtcgataccgagcgaagcgccaatc

SEQ ID NO: 29778 - DNA, 109 bp, Unknown
  Description of Unknown: RightRegion for integrase B3779 sequence
gataaccgccgatttggaaacccagagccactggagttggagcttcaattcaaggtctgatctctcccctgcctgctctggggatagtgttgcagccatatctatcatg

SEQ ID NO: 29779 - DNA, 260 bp, Unknown
  Description of Unknown: RightRegion for integrase B3780 sequence
taccatctggatatccacttccgcataacggcacagcagtatttggggaaggcgtcgtaaggtttctctctgttcgttcgatatattcacaacatatttgcccgctgctttttcttgaaaagcgttggagtataagatatcatggagcaaagaaacatttctttctccatgatattcttgtgtatccatcattgatctgtactcgttgttttcattggaattggtggggctttgatagttggttaatctaaccacatggg

SEQ ID NO: 29780 - DNA, 260 bp, Unknown
  Description of Unknown: RightRegion for integrase B3781 sequence
aacccccttttgataaacaaatctgtcaaacggaaaacgcaccaacaaccaacaaattaaaagggatttgataatatgagtattgttatatatgttcgacaaactaaggatatttccctttacgaacaatttaataaatgtgctgaatatgccaaacggtacggctattctatcgaatataaagttttagattttgagggcaatatattttatgaagcaataaataaggtgattgtggaccacgacattaccgcattgat

SEQ ID NO: 29781 - DNA, 260 bp, Unknown
  Description of Unknown: RightRegion for integrase B3782 sequence
gaaccctacattgcgtggggaacggtatttgtccaaacaaaaagacactccttaccgtaatggtagggagtgttttctttgtatctaaggcacttaggtgagttaggtgagtaatcgggctaaaatccctataacttcttcttagtacgcgcgtatatagaaaaagttatagggaaatgtacccgattactcaccttcctcacctaaactttttaaatttaggggcaattatagtcttacttcttccccttcaccacgaa

SEQ ID NO: 29782 - DNA, 260 bp, Unknown
  Description of Unknown: RightRegion for integrase B3783 sequence
gataaccgccgatttggaaacccagagccactggagttggagtttcaattcaaggtctgatctctcccctgcctgctctgggaatcgtgttgcagccatatctatcatggtggatataatgaactggggcatttggaaatgatcggcgcgatcgtccaccagttgacgcggaatctgaaggattctcagatgaaggattcggcgtttgcgccctattttgtggaccacactgcgggggtctaccctactgccgcttccgg

SEQ ID NO: 29783 - DNA, 260 bp, Unknown
  Description of Unknown: RightRegion for integrase B3784 sequence
accgaaacaaaacagattattattaaattccgcttccccgagctggaagcgatttcttaaagcactttatttacaatagatgtggcggtatacataggaacgggagataccgagccgtccggcgatttcctgctgtgtcagttcctcctgtccccacagaccatagcggaaaatgacaacaatctgctctcgtttactgagatgttcccgtactgcgtgcagcattttttccgattcgatggcaagatgcagctgttccg

SEQ ID NO: 29784 - DNA, 260 bp, Unknown
  Description of Unknown: RightRegion for integrase B3785 sequence
tacgaactcttttggttcaaaaacgtgttcggcctgacaagaaaactgccgcagaggtaattgtcctctgcggcagttttctcattcgccggtgtagctctcacaccgcgcggtgctcataagtagccgtggtttttctttttcgcctcaatgttcgacagtacgtcccggatttcaaaggcacctatcgcacagttccagtgatcgcacccaaacgagcggaagatgcagttttggcacccgtcctgctgcttgcagta

SEQ ID NO: 29785 - DNA, 260 bp, Unknown
  Description of Unknown: RightRegion for integrase B3786 sequence
gacgggatccggttcgtgttccgcaccggtgaacaggtgaggattgccctgaaagggtgatgctcatatcagttgacgtgcacggttaggtacacctcccagaaataaagtaaggttacccttatctaataaggatggtgtttgcgtgaacgatagtgtaatggatcaggttgttgaaggcgagtatgagtcggcgaaggaaaaatctgtcgctggccagaacgcgatccgtcagctatcgcagccggtgaaaggcaaac

SEQ ID NO: 29786 - DNA, 260 bp, Unknown
  Description of Unknown: RightRegion for integrase B3787 sequence
acggcggacagggagatcattgtcaactttcgatttgcagagcttcagcagacgggataaatctagtcatatcaatggtttgcgccgttatgagcggcgcgattttcaagacgaaatcacttacaatagttcccgcgctatgtctcccgcatcgaaaagcgcgcgctgcaaaagctggaggaggccatggggaaacgggaataaaaaaacgcggggcgcacaagcgccccgcgcccgctcagggggagaagcgggatagg

SEQ ID NO: 29787 - DNA, 260 bp, Unknown
  Description of Unknown: RightRegion for integrase B3788 sequence
cctggtatcggacgattcgtttccaatccctttgaactggatatctacctgcgcctgtgatcttgggcgcaggcattattttcactgtattaaggctttttctgcctgtaatctcctacttttgtgcaaaaataatcacttccatcatgtatgagcgaatgaattagctcatatggaaatgatctgcgccatcgtccgtcagttaacccaggatctgacaccggaagaaatccagaaaagtggctttgacacctactacg

SEQ ID NO: 29788 - DNA, 260 bp, Unknown
  Description of Unknown: RightRegion for integrase B3789 sequence
cggttccggctgaataatggtatggaattgccggagcatatcgaaaggatggtcaggtgatgggaacaaacaggaaactgccttttggctatcgaatggaatttggaaggatcacaatccatttggaggaagccagctgggtgcagtacatctttacgcagtacaatcaaggcgtgtcatttcaggggattaccgataaaatgcgaaactccggaatgccatatgacggggacaagcaatggaataagaatatgattgca

SEQ ID NO: 29789 - DNA, 66 bp, Unknown
  Description of Unknown: RightRegion for integrase B3790 sequence
agccacttagagtgcgggagaagggggtcgaaccctcactccgttggaactggtgcctaaaaccag

SEQ ID NO: 29790 - DNA, 260 bp, Unknown
  Description of Unknown: RightRegion for integrase B3791 sequence
acccttatgtttcatactacttttcagcagtattctccttataccaggtacagagggtgacttaatcaggaattttcaacttctgcccagcatagatgatagtacccttgatgccattcaggttggcaatctcaggccagcggttaccgttgcccagcagtttctttgcgataagccagagggtatcaccatccttcacaacataggttgtgtaggtgggttcgctctcctgcggagaggttgccacaacggttccactg

SEQ ID NO: 29791 - DNA, 260 bp, Unknown
  Description of Unknown: RightRegion for integrase B3792 sequence
tcctcacaggatgcagaaaagttcgttttggctctccacaactgcaccaaaagcctgtgacagaaaagatgtcacaggcttttttctttgctgtatcgttgaaaattggcggtttcgacagctaattttcgagttgctttttataaagatgtccagcggttttcagactgttggacatttttattgcctcatcttcccgcaaaattctgaattgcggcaggggagagggcaattttttttgagaaaaacagaataaatcc

SEQ ID NO: 29792 - DNA, 260 bp, Unknown
  Description of Unknown: RightRegion for integrase B3793 sequence
ttaatcccggttggggatgggttcggatttcttctttttatctcaagtattgtggtgtgatagaatcaaacgacgaaaggagatcagtagaaacaaacagtcagcggttgcagcagtcacattatgaccgacgccacaagaaagcgaggaaccaccatgaatacgctctcctccagagtccacgacagccaaaacggactgaactacaccctcgtcggggattactacctccccgatcttgaaattgaaagcagtcagcc

SEQ ID NO: 29793 - DNA, 260 bp, Unknown
  Description of Unknown: RightRegion for integrase B3794 sequence
attaaagataaggatgtcatagtatttagatttaaagatggaacagaaataaatggataaaattatttaataaatttttagggcaaatgtgaaaatttgctctttttgtgttataatatgcttacagataaatagtaatttgtgttgcagttgtaaattttactttaatatggtattacataaatatgttttattagaaacccagtttaaaatgcttttttaatggaggttaatatgttattagtaagttatattatttt

SEQ ID NO: 29794 - DNA, 260 bp, Unknown
  Description of Unknown: RightRegion for integrase B3795 sequence
attttgacaggttcacacgagccagactggacaattgataaattgtatacatttttataaaggaaattatggcaacactggaagaattaatagaaactttaaaagaaatattgactcttgataaggaaaactataatgcaaatgtttatatcggtgggaaatatttatttatccgcaaattagatcaagatgatgcatattttatagaactttaaaatataacaccaaaattgacgtactttaaatttaaaatataaaaa

SEQ ID NO: 29795 - DNA, 260 bp, Unknown
  Description of Unknown: RightRegion for integrase B3796 sequence
gactctcttgagctccaccatcaagctgcaccaaaaaagatgccgctgcgaaaagcctagaagtttcaacgacttccgggcttttttgcgcccatttttagaggcgtgacaaaatgtatgctattttctgaccgatatacagttgagacaacggagcattttgaaaaagaatttaagcgattggaccgatatacgcagcggacaatggcgctatcggatggaggattgtcgtttgatctgcctgatccaagacaatgagc

SEQ ID NO: 29796 - DNA, 109 bp, Unknown; identical to SEQ ID NO: 29774
  Description of Unknown: RightRegion for integrase B3797 sequence

SEQ ID NO: 29797 - DNA, 260 bp, Unknown
  Description of Unknown: RightRegion for integrase B3798 sequence
ctcttatccgaacccatcatcatgattgatggtgttattgggctggttttgcgaaggtaaggcaatccctctcctatgcgggagagggatttttttatttcgcaatgtgctcatagtattccatgagctttttctccggccctgggccgtccttatccagcagaaaagctttcgccagatctgcataaaactccgggcggtttacgccgtacctgacagctacgtcgtagtagtccgagtacatcatgttcatggtcacg

SEQ ID NO: 29798 - DNA, 260 bp, Unknown
  Description of Unknown: RightRegion for integrase B3799 sequence
agaaacaaaaagcactacacagaaatgtgtggtgcttttttgttgacgccaaacgagtgagggtttagctcagctgggagagcgccgtgcatggactgcaagagggtcaccgtgatcagaatcggcccggtaatctccaccagaatgaaagcactacacggaaacgtgtggtgcttttttgttttatctgccgttcaccttacgtcccctttcatgaaaaaagcgtttgtcgcagcccgcaggccgtgacaaacgctttt

SEQ ID NO: 29799 - DNA, 260 bp, Unknown
  Description of Unknown: RightRegion for integrase B3800 sequence
gattcagatgaagaaactataaaagtaaatcttataggtataaattcaaaccgtaattaaagatatagcttctgctatttggaaatttaggaacttttttccatatagcagaagctatatccatgtcagataaaatagcagtcctttcaaagcgtcctgcaacgattaaaagtatctatactatagacttgaaaatatctggagaaagaacccctattatatcacgtagtgctgaaaactttaaagattattttaacatc

SEQ ID NO: 29800 - DNA, 260 bp, Unknown
  Description of Unknown: RightRegion for integrase B3801 sequence
gaaagtccaccaaaaaagcactgtacttcgttggaagtacggtgcttttctttttgctgaagttggtttttgggggctgcattgcttctcctgcaccgtttttaggcttttgcaggcggttcctatacaacccccaacttttgactttacaccgttttcaaaaaggaatgtttgcaggccggtttttcagcaggctgctgcatcatccccttcaatgtacggcgtaaggtcgaagttgaaggtaatgttgagctgatacc

SEQ ID NO: 29801 - DNA, 260 bp, Unknown
  Description of Unknown: RightRegion for integrase B3802 sequence
gttgtgatacagatgtatcgaaaaactgctgtgctttttgtttgcggttcgattcgttaaaatccgaagggtttcaaggagaataagttggagaaaattatcgtaatggcacccggccatgaactgtgggatgggaccatcgcttttgcagcaggctgcccatggaaagcagcagcatttttggggcagagaagatggagccaaacgattttgaaaataacgaaagagctcttgtgggccttgcgcgatgatgacgcggc

SEQ ID NO: 29802 - DNA, 260 bp, Unknown
  Description of Unknown: RightRegion for integrase B3803 sequence
gatttggctttcttttgttcttttctatttagtttcaccagaatattatatccatattgaccattttttcttgtgcggttttggggtgcatttttctcgcacattttttcgatataaaatgtatgtaacccgccaagtgcgggttcgtcttttgtctgagacggattcaggaggttggtggggacattgttcagatggatttccacataatcggggtagacaagaaccttgtccagatacaggttgatgatctgctccat

SEQ ID NO: 29803 - DNA, 260 bp, Unknown
  Description of Unknown: RightRegion for integrase B3804 sequence
gttgtgatacagatgtatcgaaaaactgctgtgctttttgtttgcggttcgattcgttaaaatccgaagggtttcaaggaaaataagttggagaaaattatcgtaatggcacccggccatgaactgtgggatgggaccatcgcttttgcagcaggctgcccatggaaagcggcagcatttttggggcagcgaagatggagccaaacgattttgaaaataacgaaagagctcttgtggccttgcgcgatgatgacgcggcg

SEQ ID NO: 29804 - DNA, 260 bp, Unknown
  Description of Unknown: RightRegion for integrase B3805 sequence
acttgcatagttagagtatcgaaaaactggtttgttgtcgttggcacgtgtcaaaaatagcaatttccggtgtttacaaaacaccagatgggcggcttgctgtaagcccgtctaacgccagaaagcggggcaccccttgtcagggtaccccgcttgaacactaataagaaagcttctggccggggtagatcgtataaggtgccccaatgccgttcttgcttgcgatggtgtgccagtcgataccgagcgaagcgccaatc

SEQ ID NO: 29805 - DNA, 109 bp, Unknown
  Description of Unknown: RightRegion for integrase B3806 sequence
gattttctgttatatgtacacaatactatgtcgttctccaatggcagaatttatatttaaggacatggtcaataaccgtggggttagtgaccagttctacgtcgcctct

SEQ ID NO: 29806 - DNA, 260 bp, Unknown
  Description of Unknown: RightRegion for integrase B3807 sequence
acttgcatagttagagtatcgaaaaactggtttgttgtcgttggcacgtgccaaaaatagcaatttccggtgtttgcaaaacaccagatgggcggcttgctgtaagcccgtctaacgccagaaagcggggcaccccttgtcagggtaccccgcttgaacactaataagaaagcttctggccggggtagatcgtataaggtgccccaatgccgttcttgcttgcgatggtgtgccagtcgataccgagcgaagcgccaatc

SEQ ID NO: 29807 - DNA, 260 bp, Unknown
  Description of Unknown: RightRegion for integrase B3808 sequence
acccccctttcgataaacaaatctgtcaaacggaaaacgcaccaacaaccaacaaattaaaagggatttgataatatgagtattgttatatatgttcgacaaactaaggatatttccctttacgaacaatttaataaatgtgctgaatttgctaaacggtacggctattctatcgaatataaagttttagattttgagggcaatatattttatgaagcaataaataaggtaattgtggaacacgacattaccgcattgat

SEQ ID NO: 29808 - DNA, 260 bp, Unknown
  Description of Unknown: RightRegion for integrase B3809 sequence
gactctcttgagctccaccatcaagttgcaccaaaaaagatgccgctgcgaaaagcctagaagtttcaacgacttccgggcttttttgcgcccatttttagaggcgtgacaaaaagatgccaaaatggactttgccaaattcgatagacctgtacctttacccaaggcattttgagccgcttttccgaggatttttcgggaaagcggctcttttttgtcttaggcaaaacgtagaatttaagtaggctcttttgttggta

SEQ ID NO: 29809 - DNA, 260 bp, Unknown
  Description of Unknown: RightRegion for integrase B3810 sequence
tacgaactcttttggtttaggaatgtgttcggcctgacaagaaaactgccgcagaggtaattgtcctctgcggcagttttctatttgccggtgtagctctctgtcggcaagagcttataggttttcagcgtcttcccgcacctacggcatttataccgatagatcgtatcaatgtcgcctgcgctggaaccgatagtgaaatcggaatcgagcatcacccaactgtgcgattcacaggggcataggcgctcctcaagctc

SEQ ID NO: 29810 - DNA, 260 bp, Unknown
  Description of Unknown: RightRegion for integrase B3811 sequence
aaagaaatactttatgatggcaataaaattcatgtaaagtttaatctaaaaaaaaactagatagtgtagaaaatatactatctaggctattcaagaaatatagtacatgtcaaattaacacaacacgcttctgtatggccaacaaataaaccacttttttcacctgcacagaataaattatctactccttctactttcatatcattagtccttggtgctacagaaagatatcttattgaattacctttactacctgcata

SEQ ID NO: 29811 - DNA, 260 bp, Unknown
  Description of Unknown: RightRegion for integrase B3812 sequence
atcggtaaaaagggagaattgcaatttcggtttaaaaacggtactgaaataacagtttgattctgaatcgcagcattatcagtttttcacataaaacgaaaagcagatttgtaacattacacaaatctgcttttttgtcttgactttgcgagaaaaatagtgtaatatagattacaagcaaaacgaatgaatccggtgttccgggtttgtcaaaggcagtggttacccactgcacaccctttcggtactgtttgcacacc

SEQ ID NO: 29812 - DNA, 109 bp, Unknown
  Description of Unknown: RightRegion for integrase B3813 sequence
ggtgacggttgcaaaggttcagcttttgcgccgtcaagcgcactaaaagcaccgaggtaacctcggtgctttttttgtgcatgcagcgatgagagaaaacatggaaagc

SEQ ID NO: 29813 - DNA, 260 bp, Unknown
  Description of Unknown: RightRegion for integrase B3814 sequence
cactgcttgtcgccttctgtcggaatgaggcgagctattgacacattttgcttccactaataggctgattaataatatggataatctctcttttttcatacttctgtcccgattacgtcccagttttaggcgtaaaaaggtctagcctttaattctatcataattacaatattatttattcattaaaacttgaattattttctctcttaacctatagtgttacaatattatattcatatcttttaaattctttaatattt

SEQ ID NO: 29814 - DNA, 109 bp, Unknown
  Description of Unknown: RightRegion for integrase B3815 sequence
cttaaagaaactctgacagaatgtgtttatgatggtgaagtactccatataaaattataatatggttttttatttttaccttacctctcttttttatcctgataccttc

SEQ ID NO: 29815 - DNA, 260 bp, Unknown
  Description of Unknown: RightRegion for integrase B3816 sequence
aagttagagtccagttttttatttattcttgcagattcagcccctaaaaaggcttgttaggccgctttcttgcagtttggacgtgaaacccacccgcttttacaaaacgccacgtgcagcctttgtaggccgaacgtggcgtttcctgtttttcgggctgtaatttaacgatactcccgtacggtttcatttttcagcacccgggttcacttttttgcacccggtttcaaatttcaggtgcagggttcaatttgccccta

SEQ ID NO: 29816 - DNA, 260 bp, Unknown
  Description of Unknown: RightRegion for integrase B3817 sequence
tcctcgcaggatgcagaaaagttcgttttggctctccacaactgcaccaaaagcctgtgacataaagaatgtcgcaggctcttttctttgttgtatcgcacaaaatcagcgaagtcgatggccgattttccaggtgcgttttatagagatgtccaaccattttaagtcggttgggcttttttgttgggcggcttggtgtgcgttttcccgcccctgccgacccgttttgcagtttttcagcggaattttcaactttttcc

SEQ ID NO: 29817 - DNA, 260 bp, Unknown
  Description of Unknown: RightRegion for integrase B3818 sequence
tccgaacacgggaaactcataattctgaatggagcaatcggatttctattgcgaagataagtcaagccccctccgctgcttacggagggggctttttcctgtgaaaattgccgaggatacgaaaccatggcaattcatggtaggatgctcaaatgtattagacagtatttcaatccacacccttctcgaggaagggtgactgcgggagcgcgcccattgagctgtttcaagcatatcatgttccgccggaaactgcaagc

SEQ ID NO: 29818 - DNA, 260 bp, Unknown
  Description of Unknown: RightRegion for integrase B3819 sequence
gttgtgatacagatgtatcgaaaaactgctgtgctttttgtttgcggttcgattcgttaaaatccgaagggtttcaaggagaatgagttggagaaaattatcgtaatggcacccggccatgaactgtgggatggaaccatcgcttttgcagcaggctgcccatggaaagcagcagcatttttggggcagagaagatggagccaaacgattttgaaaataacgaaagagctcttgtggccttgtgcgatgatgacgcggcg

SEQ ID NO: 29819 - DNA, 96 bp, Unknown
  Description of Unknown: RightRegion for integrase B3820 sequence
ctaaaagagctttttaaagagtgtgtgtgggatggtgcggtacttcatgttaagctataattttttctccttttcattctgatactttccggtcgc

SEQ ID NO: 29820 - DNA, 260 bp, Unknown
  Description of Unknown: RightRegion for integrase B3821 sequence
aagaccgaaatactggtgattttcaagggcggatatgaggtcagggctgaaattgaataacgattaaaatttacggcttgcggagaaatctgcaagctgtttttgttgggagcgaggtgagataaaatgtcaaagaattttgacggtatcaaaacgcaaaagttcggtgtggaaatagagtgtacaggcttaacaagatcggcagcggcaaaggcggtcgcaaaggtcataggcggttcaccggagcatttcggtggcag

SEQ ID NO: 29821 - DNA, 260 bp, Unknown
  Description of Unknown: RightRegion for integrase B3822 sequence
tacgaactcttttggtttaggaatgtgttcggcctgacaagaaaactgccgcagaggtaattgtcctctgcggcagttttctatttgccggtgtagctctctgtcggcaggagcttgtaggttttcagcgtctttccgcacctgcggcacttataccggtagatcgtgtcaatgtcgcctgcgctggaaccgacagtgaaatcggaatcaaccaccacccaactgtgtgattcacaggggcacaggcgctcctccaactc

SEQ ID NO: 29822 - DNA, 260 bp, Unknown
  Description of Unknown: RightRegion for integrase B3823 sequence
gataaccgccgatttggaaacccagagccactggagttggagtttcaattcaaggtctgatctctcccctgcctgctctggggatagtgttgccgccatatctatcatggcggatataatgaactggggcatttggaaatgatcggcgcgatcgtccaccagttgacgcggaatctgaaggatactcagatgaaggattcggcgtttgcgccctattttgtggaccacactgcgggggtctaccctaccgccgcttccgg

SEQ ID NO: 29823 - DNA, 260 bp, Unknown
  Description of Unknown: RightRegion for integrase B3824 sequence
gttaatagagatggaactataacctttaaattcattgtaggtatagacattacgttataaataaatagagatttgcattgattttcattaagttcactaggtttagacttagtgagcttttttactttagcgtctattttatggacatgaaataaggtataatttaattggtaggtgattaagttgcaaaggcgaaataaacatgaaccaatacgtcaacattatattccgcaatttatactaaggaatttttgctttga

SEQ ID NO: 29824 - DNA, 109 bp, Unknown
  Description of Unknown: RightRegion for integrase B3825 sequence
gactctcttgagctccaccatcaagctgcaccaaaaaagatgccgctgcgaaaagcctagaagtttcaacgacttccgggcttttttgcacccatttttagaggcgtga

SEQ ID NO: 29825 - DNA, 260 bp, Unknown
  Description of Unknown: RightRegion for integrase B3826 sequence
aaaggcaacgagattggtttccagctagatattttcccaaaaatccagaagaataattaatgatatcttctatgaactgacgaactggctcattgatgttgtcggtaattaaaaaaagaaattcccggggaaattaaccccgggatatttttactgcttcttaatatattttgcagatacaaagccataatactttcctgcaatacggatataataccacttactaccgtttttatctttctgggtaaaattcattactt

SEQ ID NO: 29826 - DNA, 260 bp, Unknown
  Description of Unknown: RightRegion for integrase B3827 sequence
aagggcgatgagattagttttcggctcgacattttcccgcgaatccagaaaaaaagttaatgacaacatctatgtgctgaagaactggctcattgatgttatcagtaattaaataaaagaaattcccggggctaattccccgggatattttttactgtttcttaatatattttgcagatacgaagccataatattttcctgcaatacggatataataccacttactaccgtttttatctttctgggtaaaattcattacc

SEQ ID NO: 29827 - DNA, 260 bp, Unknown
  Description of Unknown: RightRegion for integrase B3828 sequence
aaaggtaacgagattaattttgagctagacattttcccaaaaattcaaaaaaatgattaatgacatcttctatgtgccagttcgctggcgcaatgatgctatcattaattttaaaaagaaactcccggggaattaaccccgggatattttatacttttttgatgtattttgcagaaacaaatccaaaatattttccggcaatgcggatatagtaccagtcggttttgtcttttgttcctatcagcgacaaaaaggtggca

SEQ ID NO: 29828 - DNA, 260 bp, Unknown
  Description of Unknown: RightRegion for integrase B3829 sequence
aaaggcaacgagattggttttcagctagacattttcccaaaaattcaaaagaataattaatgatatcttctatgtgccaacgaactggctcattgatgttgtcggtaattaaaaaaaagaaagtcccggggaattaaccccgggatattttttactgtttcttaatatattttgcagatacaaagccataatactttcctgcaatacggatataataccacttactaccgtttttatctttctgggtaaaattcattact

SEQ ID NO: 29829 - DNA, 260 bp, Unknown
  Description of Unknown: RightRegion for integrase B3830 sequence
aagggcgatgagattagttttcagctcgacattttcccaaaaatccagaagaataattaatgatatcttctatgtgctggcgaactggctcattaatgttatcagtaattaaaaaaagaaagtcccggggaattaaccccgggatatttttactgtttcttaatatattttgcagatacgaagccataatattttcctgcaatacggatataataccacttactaccgtttttatctttctgggtaaaattcattacttc

SEQ ID NO: 29830 - DNA, 260 bp, Unknown
  Description of Unknown: RightRegion for integrase B3831 sequence
aaaggcaacgagattggtttccagctcgacattttcccgaaaatccagaagaataattaatgatatcttctatgcgctgacgaactggctcattgatgttgtcggtaattaaaaaaagaaattcccggggataattccccgggatatttttactgcttcttaatatattttgcagatacaaagccataatactttcctgcaatacggacataataccacttactaccatttttatctttctgtgtataattcataacttc

SEQ ID NO: 29831 - DNA, 260 bp, Unknown
  Description of Unknown: RightRegion for integrase B3832 sequence
aagggcgatgagattagttttcggctcgacattttcccgcgaatccagaaaaaaagttaatgacaacatctatgtgctgacgaactggcgcattgatgttatcattgatttcaaaaagagattcccggggaattagccccgggatatttttactgtttcttaatatattttgcagatacaaatccataatactttcccgcaatacggatataataccatttgcttccgtttttatctttctgggtaaaattcattacctc

SEQ ID NO: 29832 - DNA, 260 bp, Unknown
  Description of Unknown: RightRegion for integrase B3833 sequence
atgagccacttagagtgctggaaatcttggtcgaacatcccgatcttgcagagcggataacgatcacgattaaacccaacagaatcattcagagcaacgagacccccacggataacaagtaatccgtaagagcagggcggcgggtaggagccgccgccctcgctttttaattataaccacccaccgatgaaaaatcaaggagaacatatatgaacaaagagcgcagaaaggccctgcagaccatcgttgaccagcttgca

SEQ ID NO: 29833 - DNA, 260 bp, Unknown
  Description of Unknown: RightRegion for integrase B3834 sequence
tctaaatatgagttaacctttaaattctatattggtgaagaaattaaaattaaattgtaaaaagctgcttcaattgagtaatatataattgagaggttcatgaactctccctagatagcactaagttatggtgatgctcggcattcaagtacctatgggccgtaatagatagaagtacgcagattaaggcagttaatcgggtttgactccaacctacataaatggagtctttttatttgctaaaactagccaagattatc

SEQ ID NO: 29834 - DNA, 260 bp, Unknown
  Description of Unknown: RightRegion for integrase B3835 sequence
aaaggcaacgagattggttttcagctcgacattttcccgaaaatccagaagaataattaatgatatcttctatgtgctggcgaactggcacattgatgttatcagtaattaaataaaagaaattcccggggctaattccccgggatattttttactgtttcttaatatattttgcagatacgaagccataatattttcctgcaatacggatataataccacttactaccgtttttatctttctgtgtaaaattcattact

SEQ ID NO: 29835 - DNA, 260 bp, Unknown
  Description of Unknown: RightRegion for integrase B3836 sequence
aaaggaaacgagattggttttcaactcgacattttcccaaaaatccagaagaataattaatgatatcttatatgagctgacgaactggcgcattgatgttatcagcaattaaataaaagaaattcccggggttaattccccgggatatttttactgcttcttaacatattttgcagaaacaaatccaaaatattttccggcaatgcggatatagtaccaagatgctccatctttggctttaatggtatcgcatacatcaa

SEQ ID NO: 29836 - DNA, 260 bp, Unknown
  Description of Unknown: RightRegion for integrase B3837 sequence
gaagacagcagtgcaggggggagcggttcgtttttagtcacggatgctccaccaagataatccgaaccttagaccaatcggtcatgggttcggatttcttgtttttatcaaggatattgaagtttagtttcgggatagaataacatcaaattcaggaggatatacccatggaaaagctcgtaaactgtgcgttcaatatagataccgcctgcgtggaacttcacttcacggatgggagtatttattccataaattgcacc

SEQ ID NO: 29837 - DNA, 260 bp, Unknown
  Description of Unknown: RightRegion for integrase B3838 sequence
aaaggcaacgagattggtttccagctagacattttcccaaaaatccagaagaataattaatgatatcttctatgtgctgacgaattggctcattgatgttatcagtaattataaaaaagtgtcttcgacacttcaactcccctgcccctcaatcttgaggggataggggtttctttttttcaacttttcattcataataggcttatgaatatcttacaaagaatctttactgactactatgaagaaattaaatatacact

SEQ ID NO: 29838 - DNA, 260 bp, Unknown
  Description of Unknown: RightRegion for integrase B3839 sequence
gctcgatctgtgatccgtgattgtagatgggatggtgaaaagctttttcttacgctttaaaactcatctttttgtcaataggagatcaccacgcatgacaaaaagatgagttttgaaagtccacgctgtacagttattttttctgcacagcgtgggctttttcgattactgcttattgcaccatttttgcagagccttgaccatagcagaaggattactgatcacaccgtcaaccggcgtgccgatcttgcgctggagtg

SEQ ID NO: 29839 - DNA, 260 bp, Unknown
  Description of Unknown: RightRegion for integrase B3840 sequence
aagggcaatgagattaattttcagctcgatattttcccaaaaatccagaagaataattaatgatatcttctatgtgctgacgaactggcgcattgatgttatcagcaattaaataaaagaaattcccggggctaattccccgggatatttttactgcttcttaatatattttgcagatacaaagccataatactttcctgcaatacggatataataccatttgctgccgtttttatctttctgggtaaaattcattacct

SEQ ID NO: 29840 - DNA, 176 bp, Unknown
  Description of Unknown: RightRegion for integrase B3841 sequence
acaatagaatatagtcgcgaacgtccaggtgaatttatactagatatagagcttctctgatacctactaccacatatagtaggtattctttaacatatacatatccatcataagtatcttcctttcgacagatgacagggaacgttcgctgtgtaaccaaattccgaagtattcca

SEQ ID NO: 29841 - DNA, 260 bp, Unknown
  Description of Unknown: RightRegion for integrase B3842 sequence
acgatagaatatagtcgcgaacgtccaggtgaatttatactagatatagagcttctctgatacctactaccacatatagtaggtattctttaacacatacatatccatcataagtatcttcctttcgacagatgacagggaacgttcgctgtgtaaccaaattccgaagtattccacggcacaacagttattcccgtttcccgggatgctccatgccagttgttgtacgtactggaagtatcgtttacaaaattatccgg

SEQ ID NO: 29842 - DNA, 260 bp, Unknown
  Description of Unknown: RightRegion for integrase B3843 sequence
catgggaacgaggctaattttgagctagacattttccccaaaattcaagaaaataattaattgtggcgtaacattctatcgacaacatctatgagcagattcgccagtacatagatgctgtcagtaaataaaaaagaaattcccggggaattaaccccgggatatttttatacttttttgatatcttttgcagccacaaatccgtagtacttgcctgcaacgcggacataataccatgaagcaccgtttgttgctttctg

SEQ ID NO: 29843 - DNA, 260 bp, Unknown
  Description of Unknown: RightRegion for integrase B3844 sequence
tccttatccgaacactttgtttttataaacggtgttattgggatggtcgtgcatcgataaaggaatccctctcctgttttggagagggatttttttattttgcaatatgctcataatacgccatgagcttgcgttccggccccggtccgtctttatcgagcagaaacgcctttgccagagcagcgtagaactccgggcggttgaggccgaactccacggcgacggggtagtagtccgagtacatcatgttcattgtcacg

SEQ ID NO: 29844 - DNA, 161 bp, Unknown
  Description of Unknown: RightRegion for integrase B3845 sequence
ccgggtgttggcaggtacgtggagaatgtatttgaattaaatatgcttctcaatatgtaaagacttattttgaagtagtctttactatatccaacatcaatgtaccgatgaattggcgcatcttgagatagtcggtgccatggttcaccagctcacacgcg

SEQ ID NO: 29845 - DNA, 160 bp, Unknown
  Description of Unknown: RightRegion for integrase B3846 sequence
ccgggagtcggcagatatgttgagaatgtatttgagctaaatatgctccttaacatataaagctctttttaaaagcctttctattatctccaacatcaatgtaccaatgaattggcgcatcttgagatagtcggtgccatggttcaccagctcacacgcg

SEQ ID NO: 29846 - DNA, 260 bp, Unknown
  Description of Unknown: RightRegion for integrase B3847 sequence
aaaggtaacgagattaattttgagctagacattttcccaaaaattcaaaaaaatgattaatgacatcttctatgtgccagttcgttagcgcaatgatgctatcattaattttaaaaagaaactcccggggaattaaccccgggatattttatacttttttgatgtattttgcagaaacaaaaccgaagtactttccggcaatgcggatgtagtaccagtcggctttgtcttttgctttaatgatatcgcatacatcaact

SEQ ID NO: 29847 - DNA, 260 bp, Unknown
  Description of Unknown: RightRegion for integrase B3848 sequence
tccttatccgaacacctcatctttataaatggtgttattgggatggttgtgcatcgataaaatatccctcccatatgggagggatattttttatgcttttttaagccgcggctctacaatgccgtgataatacccggcgatcttcgcctcgggcccaccgccgtcctcgtcaaaaaggaacgcctttgcgaggtctgcgtagtattccggccggtcgaggccgtatttctgcgcaacctcgaagttgtccgagtactcca

SEQ ID NO: 29848 - DNA, 260 bp, Unknown
  Description of Unknown: RightRegion for integrase B3849 sequence
attccgggaacgatgcaggtacagaagaatcggtgccgccatgatgtcaatgataaataaacaaaaaaggaagcacacctgaagaattccaggtgtgctttaaagttatttgccggttgttctgctctttgtgcgtggcgggtcattcggcacgcactctataatttcagacggttggcaatgtaacgcctcgcatatcaagtcaagatgctcaaggctgatgcgctcggcaatgccatgataatactcgttgatagtat

SEQ ID NO: 29849 - DNA, 260 bp, Unknown
  Description of Unknown: RightRegion for integrase B3850 sequence
aaaggcaacgagattggttttcagctagacattttcccaaaaattcaaaagaataattaatgatatcttctatgtgccaacgaactggctcattgatgttgtcggtaattaaaaaaaagaaagtcccggggaattaaccccgggatattttttactgtttcttaatatattttgcagatacaaagccataatactttcctgcaatacgaatataataccatttgctgccgtttttatctttctgtgtataattcataact

SEQ ID NO: 29850 - DNA, 260 bp, Unknown
  Description of Unknown: RightRegion for integrase B3851 sequence
aaaagtaatgagatcaattttgaactagacatttttccgaaaatccaaaaaaatgattaatgacatcttctatgtgccagttcgcctgctcatagatgttatcagcaaataaaaaaaagaattcccggggcgattccccgggatatttttatacttttttgatgtattttgcagaaacaaatccgaagtattttccagcaattctgatgtagtaccaagagttaccgtcacttgctttctgagtgaagttcataacgtca

SEQ ID NO: 29851 - DNA, 109 bp, Unknown
  Description of Unknown: RightRegion for integrase B3852 sequence
ttaaaggatctctttaaggaatgtgtttacgacggtcaaactctgcatattaaaatttagtttttctctcttttttattctgatacgttctggtctcatacgaagagcc

SEQ ID NO: 29852 - DNA, 260 bp, Unknown
  Description of Unknown: RightRegion for integrase B3853 sequence
tttgatgagaagattgtggtagagatgaaatccgggcttcatatagaggtgaaagagtaaagaaaaatgtacataaaacgaaacccggagccgacggcgtgtcagtcccgggtgctatttcaatctatcgggatttgtctgataaaatgcgatcagaatagaacatgtttatatcttggttttctattactaaaagatcctttccccattctttgttatcgtgaccgagtaatcttttaagcgatcgatagtctattctt

SEQ ID NO: 29853 - DNA, 260 bp, Unknown
  Description of Unknown: RightRegion for integrase B3854 sequence
ttgaaagacctttttaaagaatgcgtttatgatggcgaaacactccacatcaagctttaatatttctctcttttttattttgatactatcaggtcgcatgcgtaatgacgattttaacaaatcccttatcgtcactgcatttttgccttcaatatttgcatttctaacctccagtcttacaagatttggtatatttcttatctgaagttctgccgcatcctcaattgtaattattctctcgtcctgcggtatgtaatcag

SEQ ID NO: 29854 - DNA, 260 bp, Unknown
  Description of Unknown: RightRegion for integrase B3855 sequence
tccttatccgaacaaattctgtttatcaacggtataatcggtatgcttgttcgccgataaggcgcagcccctctccgatttggagaggggttgctttttatttcacaatgcacctgtaatacgcacaaagcttttcctccgggcctgggccgtccttgtccatcaagaacgcccgcgccagctccgcgtagaactccggcacgttgacaccgaacttccgcgccacatcgtagtagtccgagtacatcatgttcatggtc

SEQ ID NO: 29855 - DNA, 260 bp, Unknown
  Description of Unknown: RightRegion for integrase B3856 sequence
aaaggcaacgagattggttttcagctagacattttcccaaaaattcaaaagaataattaatgatatcttctatgtgccaacgaactggctcattgatgttgtcggtaattaaataaaagaaattcccggggttaattccccgggatatttttactgcttcttaacatattttgcagaaacaaatccaaaatattttccggcaatgcggatatagtaccaagatgctccatctttggctttaatggtatcgcatacatcaa

SEQ ID NO: 29856 - DNA, 260 bp, Unknown
  Description of Unknown: RightRegion for integrase B3857 sequence
aaaagtaatgagatcaattttgaactagacatttttccgaaaatccaaaaaaatgattaatgacatcttctatgtgccagttcgcctgctcatagatgttatcagcaaataaaaaaaagaattcccgggggcgattccccgggatatttttatacttttttgatgtacttcgcagaaacaaatccaaaatactttccggctatgcggatgtaataccagtctgacttgtcttttgctttaatggtatcacatacatcaac

SEQ ID NO: 29857 - DNA, 260 bp, Unknown
  Description of Unknown: RightRegion for integrase B3858 sequence
ttcgaacctatcaaaatgtatttgataggtcggttactgttctgtatgaaacaaatgtaattttaaaacaacggattttgtccgttgtttttttgttgcaaaatttttttaattttttttgaaaaaactattgacataccacccaatgggtgatataataaagacaagaaatgaggaaaacctcaaaataataaacaaaaaggataaattttaggaggaaaagaaaatgaagagatttaaggtaacaaacgaaatgtaca

SEQ ID NO: 29858 - DNA, 260 bp, Unknown
  Description of Unknown: RightRegion for integrase B3859 sequence
attccgggaacaatgcaggtacagaagaattggttccgccatgatgtcaatgataaataagcaaaaaaggaagcacacctgaagaattccaggtgtgctttaaagttatttgccggttgttctgctttttgtacgtggcgggtcattcggcacccactctataatttcagacggttggcaatgtaacgcctcgcatatcaagtcaagatgctcaaggctgatgcgctcggcaatgccatgataatactcgttgatagtat

SEQ ID NO: 29859 - DNA, 260 bp, Unknown
  Description of Unknown: RightRegion for integrase B3860 sequence
aagggcaataagattggtttccagctagacattttcccgaaaatccagaagaataattaatgatatcttctatgtgctgacgaactggctcattgatgttatcagtaattaaataaaagaaattcccggggttaattccccgggatatttttactgcttcttaatatattttgcagatacaaagccataatactttcctgcaatacggatataataccacttactaccgtttttatctttctgggtaaaattcattacct

SEQ ID NO: 29860 - DNA, 260 bp, Unknown
  Description of Unknown: RightRegion for integrase B3861 sequence
aaaggcaacgagattggttttcagctagacattttcccaaaaattcaaaagaataattaatgatatcttctatgtgctgacgaactggctcattgatgttgtcggtaattaaaaaaaagaaagtcccggggaattaaccccgggatatttttttactgtttcttaatatattttgcagatacaaagccataatactttcctgcaatacggatataataccacttactaccgtttttatctttctgtgtataattcataac

SEQ ID NO: 29861 - DNA, 260 bp, Unknown
  Description of Unknown: RightRegion for integrase B3862 sequence
gcaggtcttggaagatatatcaagaacgaatttactcttgatatctttcttaatgtgtgaactacccatcacctaaaggtagtgggttttacgctccagcttataaaataatcatttctaacattgatgttctgatgaacttgcacatagatgatggatatgataattaaaaaaagagaaagaacctttcgaccaatagaggatccggacagactcgatgaagatggcgaggtcatacaatggaatataatcggttatga

SEQ ID NO: 29862 - DNA, 260 bp, Unknown
  Description of Unknown: RightRegion for integrase B3863 sequence
caaggtcacgttgcctccaccatccgcaacgcggacgaaccctcgaaagaaaacgagtgatcgtttcctttcgggggctttctttttggcaaaaatgttccaagagaaatatttgtgatccaatatgagaaaaatcggagaggtacgatgctgatttatacggcggcaacgcttctgtcctgccttttgacatggcacagacaaaaaagactacaggctcagatggtgcaggaaacagcacttcaggcgttttttcaaaa

SEQ ID NO: 29863 - DNA, 260 bp, Unknown
  Description of Unknown: RightRegion for integrase B3864 sequence
tggggcgacggctccgatctctctctaaccctcttcccgctcgtgccggattctgactgataattccgtggagcggattcattcgcgccacggaattatcaatgttgcatatgttacaattaagcaccggagccatgcagttggctccggtgctgtctcttttactctcctccggccacacatcggtaatatgccgctgtcttgcgctccggcccgcccgcgtccttgtcaaacaaaaacgcctttgcgagatcggtgta

SEQ ID NO: 29864 - DNA, 260 bp, Unknown
  Description of Unknown: RightRegion for integrase B3865 sequence
aaaggcaacgagattggttttcagctcgacattttcccaaaaatccaaaagaataattaatgatatcttatatgtgctgacgaactggcacatagatgttgtcggtaattaaaaaaagaaattcccggggctaattccccgggatatttttactgtttcttaatatattttgcagatacaaatccataatactttcctgcaatacggatataataccatttgctgccatttttatctttctgggtaaaattcattacctc

SEQ ID NO: 29865 - DNA, 260 bp, Unknown
  Description of Unknown: RightRegion for integrase B3866 sequence
cacttatccgaacacatcatatttgtaaatggtgttattgggatgatcgtgcagagatgaaaataccctctccggattggagagggtatttttttattttgcgatatgctcataatactccatcagctttcgctccgggccggggccgtctttgtcgagcaggaatgcctttgccagggcggcgtagaattccgggcggttgaggccgaactctaccgcgacggggtagtagtccgagtacatcatgttcatggtcacgc

SEQ ID NO: 29866 - DNA, 260 bp, Unknown
  Description of Unknown: RightRegion for integrase B3867 sequence
aaaggcaacgagattggttttcagctagacattttcccaaaaattcaaaagaataattaatgatatcttctatgtgctgacgaactggctcattgatgttatcagtaattataaaaagaaagtcccggggaattaaccccgggatattttttactgtttcttaatatattttgcagatacaaagccataatactttcctgcaatacggatataataccatttgctgccgtttttatctttctgtgtataattcataactt

SEQ ID NO: 29867 - DNA, 260 bp, Unknown
  Description of Unknown: RightRegion for integrase B3868 sequence
aaaggaaacgagattggtttccagctagacattttcccaaaaatccagaagaataattaatgatatcttctatgagctgacgaactggcacattaatgttatcagtaattataaaaagaaagtcccggggaattaaccccgggatattttttactgtttcttaatatattttgcagatacaaagccataatactttcctgcaatacgaatataataccatttgctgccgtttttatctttctgtgtataattcataactt

SEQ ID NO: 29868 - DNA, 260 bp, Unknown; identical to SEQ ID NO: 29825
  Description of Unknown: RightRegion for integrase B3869 sequence

SEQ ID NO: 29869 - DNA, 260 bp, Unknown
  Description of Unknown: RightRegion for integrase B3870 sequence
gccttatccgaacaaatcctgtttattaacggtataatcgggatgcttgttcgccgataaggcgcagcccctctccagatcggagaggggttgctttttatttcacaatgcacctgtaatacgcacaaagcttttcctccgggccggggccgtccttgtccatcaagaacgcccgcgccagctccgcgtagaactccggcacgttgactccgaacttccgcgccacatcgtagtagtccgagtacatcatgttcatggtc

SEQ ID NO: 29870 - DNA, 260 bp, Unknown
  Description of Unknown: RightRegion for integrase B3871 sequence
aaaggtaacgagattaattttgagctagacattttcccaaaaattcaaaaaaatgattaatgacatcttctatgtgccagttcgctggcacaatgatgttatcattaatttcaaaaagaagccccaaggaataaatttccaaggggcttaagttttatgctttttagattgcaatcaaatctttccaggtgttctcgccacactctccgtctaccaccagtactccatttctggacttctggtactgttttaatgcataa

SEQ ID NO: 29871 - DNA, 260 bp, Unknown
  Description of Unknown: RightRegion for integrase B3872 sequence
gtgaaagacgtaattaaaaaatgtgtatgggacggggagtccctttctattatgctttgaagctcacttttttactatgcgtctttcaccccgcgttataaaaaagtgaaatacaaaaaaatggaaggaggcattgtttatgttagctatttaccatgtattcggatccggcgatttcttttttgaaaccagaagccaacgcgaagcgacactgaccgcccaggacgttgcaaacgaaaccggacagcctgcatcggtga

SEQ ID NO: 29872 - DNA, 260 bp, Unknown
  Description of Unknown: RightRegion for integrase B3873 sequence
aagggcaacgagattggtttccagctagacattttcccaaaaatccagaagaataattaatgatatcttctatgtgctgacgaactggctcattaatgttatcagtaattaaataaaagaaattcccggggttaattccccgggatatttttactgcttcttaatatattttgcagatacaaagccataatactttcctgcaatacggatataataccatttgctgccgtttttatctttctgggtaaaattcattacct

SEQ ID NO: 29873 - DNA, 260 bp, Unknown
  Description of Unknown: RightRegion for integrase B3874 sequence
cccggtgttggccggtatgtagacaatattttcgatcttaagatttctttacgcctttaacccccatgatggatgttataatgaacttggtcacctcgaaatgattggtgcgattgttcgccagctgacacgtggactttccgccaaagaactggaagcttccggatttgcaccatattatattgatcacaccgcaggtgtctggccgcaggctgcgggtggagttccattttccgctaccgaatttcagtcaagcggtg

SEQ ID NO: 29874 - DNA, 260 bp, Unknown
  Description of Unknown: RightRegion for integrase B3875 sequence
aaaggtaacgagatcaattttgatctagacatttttccgaaaatccaaaaaaatgattaatgacatcttctatgtgccagttcgctggcgcaatgatgttatcattaatttcaaaaagaaactcccggggaattaaccccgggatattttatgcttttttgatgtattttgcagaagcaaatccgaaatattttccggcaatgcggatatagtaccaagatgctccatctttggctttaatgatatcgcatacatcaacc

SEQ ID NO: 29875 - DNA, 260 bp, Unknown
  Description of Unknown: RightRegion for integrase B3876 sequence
aaaggtaacgagattaattttgagctagacattttcccaaaaattcaaaaaaatgattaatgacatcttctatgtgccagttcgctggcgcaatgatgctatcattaattttaaaaagaaactcccggggaattaaccccgggatattttatacttttttgatgtattttgcagaaacaaatccaaaatattttccggcaatgcggatatagtaccaagatgctccatttttggctttaatggtatcgcatacatcaact

SEQ ID NO: 29876 - DNA, 260 bp, Unknown
  Description of Unknown: RightRegion for integrase B3877 sequence
aaaggcaacgagattggtttccagctagatattttcccaaaaatccagaagaataattaatgatatcttctatgtgctgacgaattggctcattgatgttatcagtaattaaataaaagaaattcccggggctaattccccgggatatttttactgtttcttaacatattttgcagatacaaagccataatactttcctgcgatacggatataataccatttgctgccgtttttatctttctgggtaaaattcattactt

SEQ ID NO: 29877 - DNA, 260 bp, Unknown
  Description of Unknown: RightRegion for integrase B3878 sequence
attccgggaacaatgcaggtacagaagaatcggtgccgccatgatgtcaatgataaataaacaaaaaaggaagcacacctgaagaattccaggtgtgctttaaagttatttgccggttgttctgctctttgtgcgtggcgggtcattcggcacccactctataatttcagacggttggcaatgtaacgcctcgcatatcaagtcaagatgctcaaggctgatgcgctcggcaatgccatgataatactcgttgatagtat

SEQ ID NO: 29878 - DNA, 158 bp, Unknown
  Description of Unknown: RightRegion for integrase B3879 sequence
gttatcgactatggcagaagcaaaggcggcaagcccgtgttagaaatcattttcaaataagggctaatttttttagccctcattagtagcttgataagtctattttcgtcggcttgcccttgatgttcgaaaccgtgtagccgaaaaacttctgcagc

SEQ ID NO: 29879 - DNA, 260 bp, Unknown
  Description of Unknown: RightRegion for integrase B3880 sequence
ggggtatttttttattgctatttcccgggacattgcggaacggagcggctaaaaaaataagacttgttgccataaaaagagaaatcccccaatacctttcgtatacgatgcctgcaaacggcagatactgaaagggattgggggattgctatgaagatcgtcttttatggggcgcgggagtatgaccattattactttgatgtgctggcggctgacccggaatatggctgtgagatcaggtttttaacggcaaatcttga

SEQ ID NO: 29880 - DNA, 260 bp, Unknown
  Description of Unknown: RightRegion for integrase B3881 sequence
ggaaaccttgtcattcatacctttgtatgctcgcagattaagcgttatcagcggttttagaccttttcggtatagttgtcataggcaagacaaatccagcctgcgccgcttttcagcttgccccagagacccttgttacctgcgctgtcaatctgtccctgcgcttcctcaacaatggtgaatacacccttgccagtataagagccagtagccgcatagttcgtgcctgcgcccttacgaatacgcaaatcagaaacctt

SEQ ID NO: 29881 - DNA, 260 bp, Unknown
  Description of Unknown: RightRegion for integrase B3882 sequence
aaaagtaatgagatcaattttgaactagacatttttccgaaaatccaaaaaaatgattaatgacatcttctatgtgccagttcgcctgctcatagatgttatcagcaaataaaaaaagaattcccggggcgattccccgggatatttttatacttttttgatgtctttcgcggccacaaatccgtagtactttcctgcaatgcagacataataccatgaagcgccgtttgttgctttttgagtgaaattcatcacgtcaa

SEQ ID NO: 29882 - DNA, 260 bp, Unknown
  Description of Unknown: RightRegion for integrase B3883 sequence
gcccgggaagtaataaagaagtgtgtctgggacggggagaccctttatgttgagctctaaacctctcttttttatattgcgtccttcaagtctgaatgttaccatggactacatcatctatggatacgaagacaccgaaccaaagactccggaacagcttttggaaatggaagccgtcgaagaactccttgggcactgcagcgaaaaaaagcgctcctatgccatggagcttctccggctctttttaaaggcctgcgacg

SEQ ID NO: 29883 - DNA, 260 bp, Unknown
  Description of Unknown: RightRegion for integrase B3884 sequence
aaaggcaatgagattggttttcagctcgacattttccccaaaatccagaaaaataattaatgatatcttctatgcgctgacgaactggcgcattgatgttatcagcaattaaataaaagaaattcccggggctaattccccgggatatttttactgtttcttaatatattttgcagatacaaatccataatactttcctgcaatacggatataataccacttactaccgtttttatctttctgggtaaaattcattactt

SEQ ID NO: 29884 - DNA, 260 bp, Unknown
  Description of Unknown: RightRegion for integrase B3885 sequence
cggatggggaacgaagccacctttgtcctggatattttccccagaattcaatcaaattaattaatgataacatctatgtacaaacgaactcagtcatctggaaatggtatccactattgtacatcagcttacccgggacctttccatggaggaaattgagaaatccggatttggaccatattatatcgatcacacagtgggagtctggccacaggcagcaggtggcgtaccatttaatgcatgtgaatttcagagtaaag

SEQ ID NO: 29885 - DNA, 260 bp, Unknown
  Description of Unknown: RightRegion for integrase B3886 sequence
aaaggaaacgagattagctttcagctagacattttcccaaaaatccagaagaacaattaatgatatcttctatgtgctggcgaactggctcattgatgctatcattaatttggaaaagaaactcccggggaattgcccccgggatattttttatacttttttgatgtatttcgcagaaacaaatccgaaatactttccggcaatgcggatgtaataccagtctgacttgtcttttgctttaatggtattacacacatcaa

SEQ ID NO: 29886 - DNA, 143 bp, Unknown
  Description of Unknown: RightRegion for integrase B3887 sequence
caaggtcacgttgcctccaccatccgcaatgcggacgaaccctcaaaagaaaacgagtgatcgtttcctttcgggggctttctttttggaaaaatgttccaagagaaatatttgtgatccaatatgagaaaaatcggagaggt

SEQ ID NO: 29887 - DNA, 260 bp, Unknown
  Description of Unknown: RightRegion for integrase B3888 sequence
gtcatcgactatggcagaagcaaaggcggcaagcccgtgttagaaatcattttcaaataagggctaatttttttagcccttattagtagcttgataagtctattttcgtcggcttgcccttgatgttcgaaactgtgtagccgaaaaacttctgcagcgtctccagatcgccgcgatcccacgcgacctcgatcgcgtggcgtatcgcacgctcaacgcgcgagggcgtggtgttgaatttgcgcgcgacctcggggtag

SEQ ID NO: 29888 - DNA, 260 bp, Unknown
  Description of Unknown: RightRegion for integrase B3889 sequence
aaaggcaacgagattggtttccagctagacattttcccaaaaatccagaagaataattaatgatatcttctatgtgctgacgaactggcacattgatgttatcagcaattaaataaaagaaattcccggggttaattccccgggatatttttactgcttcttaacatattttgcagacacaaatccataatattttccagcaatgcgaatgtaataccacttactaccgtttttatctttctgggtaaaattcattacct

SEQ ID NO: 29889 - DNA, 260 bp, Unknown
  Description of Unknown: RightRegion for integrase B3890 sequence
aaaggcaacgagattggtttccagctagatattttcccaaaaatccagaagaataattaatgatatcttctatgaactgacgaactggcgcattgatgttatcagcaattaaataaaagaaattcccggggttaattccccgggatatttttactgcttcttaacatattttgcagacacaaatccataatattttccagcaatgcgaatgtaataccacttactaccgtttttatctttctgggtaaaattcattacct

SEQ ID NO: 29890 - DNA, 260 bp, Unknown
  Description of Unknown: RightRegion for integrase B3891 sequence
aagggcaacgagattggtttccagctcgacattttcccgaaaattcagaagaataattaatgatatcttctatgtgctgacgaactggctcattgatgttatcagtaattaaaaaagaaattcccggggctaattcccccgggatatttttactgctttttaatatattttgcagatacaaagccataatactttcctgcaatacggatataataccacttactaccgtttttatctttttgggtaaaattcattacctc

SEQ ID NO: 29891 - DNA, 260 bp, Unknown
  Description of Unknown: RightRegion for integrase B3892 sequence
aaaggcaacgagattggtttccagctcgacattttcccgaaaatccagaagaataattaatgatatcttctatgcactgacgaactggcccattgatgttatcattaattttgaaaagaaattcccggggggggggattaaccccgggataatttttactgctttttgatatattttgcagatacaaagccataatactttcctgcaatacggatataataccacttactaccgtttttatctttctgggtaaaattcat

SEQ ID NO: 29892 - DNA, 260 bp, Unknown
  Description of Unknown: RightRegion for integrase B3893 sequence
aaaggaaaagagattggttttcaactcgacattttcccaaaaatccagaagaataattaatgatatcttatatgagctgacgaactggcgcattgatgttatcagcaattaaataaaagaaattcccggggttaattccccgggatatttttactgcttcttaacatattttgcagacacaaatccataatattttccagcaatgcgaatgtaataccacttactaccgtttttatctttctgggtaaaattcattacct

SEQ ID NO: 29893 - DNA, 260 bp, Unknown
  Description of Unknown: RightRegion for integrase B3894 sequence
aaaggaaacgagattggttttcagctagacattttcccaaaaattcaaaaaaatgattaatgacatcttctatgtgccagttcgctagcgcaatgatgctatcattaattttaaaaagaaactcccggggaattaaccccgggatattttatacttttttgatgtattttgcagaaacaaatccgaaatactttccggcaatgcggatgtagtaccagtcggttttgtcttttgttcctatcagcgacaaaaaggtggca

SEQ ID NO: 29894 - DNA, 260 bp, Unknown
  Description of Unknown: RightRegion for integrase B3895 sequence
ccgggtgtcggcagatatgtggagaatgtatttgaactgaacatgcttctcaatatttaagtaattgttctttaagcatcatctacaacatcaatgtactgattcctccgtgcctatatcagtaagcacacctgccacgcgtctgtccttcatggagtagcgctgtgagaggtatctgaatgatgctcccgcttcgccgtccggaccgccatactggcttatgatgagctgcgcaagcttcgggttggtctccttgatgt

SEQ ID NO: 29895 - DNA, 260 bp, Unknown
  Description of Unknown: RightRegion for integrase B3896 sequence
aaaggtaacgagattaattttgagctagacattttcccaaaaattcaaaaaaatgattaatgacatcttctatgtgccagttcgctggcgcaatgatgctatcattaattttaaaaagaaactcccggggaattaaccccgggatattttatgcttttttgatgtattttgcagaaacaaatccaaaatattttccggcaatgcggatatagtaccaagatgctccatctttggctttaatggtatcgcatacatcaact

SEQ ID NO: 29896 - DNA, 260 bp, Unknown
  Description of Unknown: RightRegion for integrase B3897 sequence
aaaatagagttcagtcgcgaaaacaataaagaatttatattggacataatcctgaagtaaccgcataacgacgggcttcgggtacatttttaactaaaatgtctatcatgcgtgtgatgttttgatagcgcatcgatgatatacattaagtaaaaggaggaaatataaatgagagtagtgtggaaagatagcgcccaactggcgaataaacaagtgaagaaagagattaagaaagtcactaagaaaaataacaaaacagc

SEQ ID NO: 29897 - DNA, 260 bp, Unknown
  Description of Unknown: RightRegion for integrase B3898 sequence
gttattgactatggcagaagcaaaggcggcaagcccgtgttagaaatcattttcaaataagggctaatttttttagcccttattagtagcttgataagtctattttagtaggcttatcatgctactaataacaccaaaccgctgatattactgattatatcaaccataaaagaaatggggaatagaaatgaatggcaacatagtattaggccatcttgaaaagcggcttatggccggggaaataagtgaagcagaatata

SEQ ID NO: 29898 - DNA, 260 bp, Unknown; identical to SEQ ID NO: 29830
  Description of Unknown: RightRegion for integrase B3899 sequence

SEQ ID NO: 29899 - DNA, 260 bp, Unknown; identical to SEQ ID NO: 29849
  Description of Unknown: RightRegion for integrase B3900 sequence

SEQ ID NO: 29900 - DNA, 77 bp, Unknown
  Description of Unknown: RightRegion for integrase B3901 sequence
aaaagttcgaccgagacgcgtctggtccgagtggcgagaatcgaactcacggcctcttgaaccccattgtgcttctc

SEQ ID NO: 29901 - DNA, 260 bp, Unknown
  Description of Unknown: RightRegion for integrase B3902 sequence
aaaggcaacgagattggtttccagctagatattttcccaaaaatccagaagaataattaatgatatcttctatgtgctgacgaactggcgcatctggagatggtttccaccatggttcaccagcttacccgtgacctcactatggaagaaattgagaattccgggctgggaccatattatattgaccacacagttggcgtgtggccacaggcagcagggggtgttccatttaatgcctgcgaattccagagtaaaggtga

SEQ ID NO: 29902 - DNA, 260 bp, Unknown; identical to SEQ ID NO: 29835
  Description of Unknown: RightRegion for integrase B3903 sequence

SEQ ID NO: 29903 - DNA, 260 bp, Unknown
  Description of Unknown: RightRegion for integrase B3904 sequence
cacttatccgaacacatcatatttgtaaatggtgttattgggatgatcgtgcaaagataaaaagattcctctccaagtcggagagggatctttttattattttaccacatgctcatagtatttcatgagcttgcgcaccgggccggggccgtctttatcgatcaaaaacgcctttgccagagcagcgtagaactccgggcggttgaggccgaattctaccgcgacggggtagtagtccgagtacatcatgttcatggtca

SEQ ID NO: 29904 - DNA, 260 bp, Unknown
  Description of Unknown: RightRegion for integrase B3905 sequence
tccgaacacgccgagctatatgttatttcagggcttttggcttgtgtcgtgaaaagataggcgtttctcttgtttatatagaaaatcgtgctataatgtcaaatatagagcttccggctctatcctatttcattcggcagtttcgctccggcggggctgctgttttacattttgccgacgtcggcaaaatgctatcgtggcttgactataaaaatcaaaatgaaaaaagtgttgacatacttataagagtatgatataat

SEQ ID NO: 29905 - DNA, 260 bp, Unknown
  Description of Unknown: RightRegion for integrase B3906 sequence
aaaagtaatgagatcaattttgaactagacatttttccgaaaatccaaaaaaatgattaatgacatcttctatgtgccagttcgcctgctcatagatgttatcagcaaataaaaaaaagaattcccggggcgattccccgggatatttttatacttttttgatgtacttcgcagaaacaaatccgaagtattttccagcaattctgatgtagtaccaagagttaccgtcacttgctttctgagtgaagttcataacgtca

SEQ ID NO: 29906 - DNA, 260 bp, Unknown
  Description of Unknown: RightRegion for integrase B3907 sequence
attccgggaacaatgcaggtacagaagaattggttccgccatgatgtcaatgataaataagcaaaaaaggaagcacacctgaagaattccaggtgtgctttaaagttatttgccggttgttctgctttttgtacgcggtgggtcattcggtacccactctataatttcagacggttggcaatgtaacgcctcacagatcagatcaagatgctcaaggctgatgcgatcattaaagccatgataatactcgttgatagtat

SEQ ID NO: 29907 - DNA, 260 bp, Unknown
  Description of Unknown: RightRegion for integrase B3908 sequence
aagggcgatgagattagtttccagctagacattttcccaaaaatccagaagaataattaatgatattttctatgtgctgacgaactggcgcattgatgttatcaataattaaataaaagaaattcccggggttaattccccgggatatttttactgtttcttaacatatttcgcagatacaaagccataatattttcctgcaatacggatataataccatttgctgccgtttttatctttctgtgtaaaattcattacct

SEQ ID NO: 29908 - DNA, 260 bp, Unknown
  Description of Unknown: RightRegion for integrase B3909 sequence
aaaggtaacgagatcaattttgagctagacatttttccgaaaatccaaaaaaatgattaatgacatcttccatgtaccagttcgctggcgcattgacgttatcattaatttcaaaaagaaactcccggggaattaaccccgggatattttatacttttttaatgtattttgcagaaacaaatccaaaatattttccggcaatgcggatatagtaccaagatgcgccgtctttggctttaatggtatcgcatacatcaacc

SEQ ID NO: 29909 - DNA, 260 bp, Unknown
  Description of Unknown: RightRegion for integrase B3910 sequence
aaaggcaacgagattggttttcagctcgacattttcccgaaaatccagaagaataattaatgatatcttctatgtactgacgaactggctcattgatgttgtcggtaattaaaaaaagaaattcccgggggtaattccccgggatatttttactgcttcttaatatattttgcagatacaaagccataatactttcctgcaatacggatataataccacttactaccgtttttatctttctgggtaaaattcattacttc

SEQ ID NO: 29910 - DNA, 260 bp, Unknown; identical to SEQ ID NO: 29892
  Description of Unknown: RightRegion for integrase B3911 sequence

SEQ ID NO: 29911 - DNA, 260 bp, Unknown
  Description of Unknown: RightRegion for integrase B3912 sequence
cgcaaggggaatgaagccacctttgttttggatattttccccagaattcagtcaaattaattaatgataacatctatgtacaaacgaactcagtcatctggaaatggtatccactattgtacatcagcttacccgggacctttccatggaggaaattgagaaatccggattcggaccgtattatatcgatcacacagtgggagtctggccacaggcagcaggtggcgtaccatttaatgcatgtgaatttcagagtaaag

SEQ ID NO: 29912 - DNA, 109 bp, Unknown
  Description of Unknown: RightRegion for integrase B3913 sequence
gaaataaataatttgaatattggttcaaatttgggtaaggatgtcctgccatatttttaaggggttagcaataaaaacaatagctttttattactaacttttttatata

SEQ ID NO: 29913 - DNA, 260 bp, Unknown
  Description of Unknown: RightRegion for integrase B3914 sequence
aagggcaacgagattggtttccagctagacattttcccaaaaattcagaagaataattgatgatatcttctatgaactgacgaactggctcattgatgttatcagtaattaaataaaagaatttcccggggttaattccccgggatatttttactgcttcttaacatattttgcagatacaaagccataatactttccagaaatacggacataataccacttactaccgtttttatctttctgggtaaaattcattacct

SEQ ID NO: 29914 - DNA, 260 bp, Unknown
  Description of Unknown: RightRegion for integrase B3915 sequence
ctaaaagagctttttaaagagtgtgtgtgggatggggaggtacttcatgttaagctataatttttttctcttttttattctgcgaccggttggccgcattcgcaaagcacttcggatcaggtctcggatcgtcacctgattcttcccttccacattggcattgcgcgcttccattcttacaatattttccacatttcgaatctgaagttccgccgaatcttcaatcgtaataattctttccgatgcagggatgtaattcg

SEQ ID NO: 29915 - DNA, 260 bp, Unknown
  Description of Unknown: RightRegion for integrase B3916 sequence
gcatcctcgcaggatgcagaaaagttcgttttggctctccacaactgcaccaaagaatgaaaatccggacattttctcgataggagaaaggttcggatttttatttttttcaagaatgacaattccggatcgttccaaacggctgtgtgtccgaaaccttatcagaaaaacgtataacaaacgtcacaactgtataggtgccgtaaggtagaaaggccacgaacatgaagtacgatgaaagagcctgccattttaacatg

SEQ ID NO: 29916 - DNA, 186 bp, Unknown
  Description of Unknown: RightRegion for integrase B3917 sequence
ctgcaggaaaccttaaaggaatgtatgtatgatggagaagttttgcatattaagctatagcaggtggccttttatttttaaccaccttctcatttttatattgatgccatccggccgcatcctcaaagaggttttaatcagatctctgatagtaatgggctggcagccttccacattggcatttct

SEQ ID NO: 29917 - DNA, 260 bp, Unknown
  Description of Unknown: RightRegion for integrase B3918 sequence
gccttatccgaacaaatcctgtttatcaacggtataatcgggatgcttgttcgccgataaggcgcagcccctctccgatttggagaggggctgctttttatttcacaatgcacctgtaatacgcgcaaagcttttcctccggctccggcccgtccttgtccatcaagaacgcccgcgccagttccgcgtagaactccggcacgttggctccgaacttccgcgctacatcgtagtagtccgagtacatcatgttcatggtc

SEQ ID NO: 29918 - DNA, 260 bp, Unknown
  Description of Unknown: RightRegion for integrase B3919 sequence
aaaggcaacgagattggttttcagctagacattttcccaaaaattcaaaagaataattaatgatatcttctatgtgccaacgaactggctcattgatgttgtcggtaattaaaaaaaaagaaagtcccggggaattaaccccgggatattttttactgtttcttaatatattttgcagatacaaagccataatactttcctgcaatacgaatataataccatttgctgccgtttttatctttctgtgtataattcataac

SEQ ID NO: 29919 - DNA, 260 bp, Unknown
  Description of Unknown: RightRegion for integrase B3920 sequence
cacggtaacgagattaatttcgaactggatattttcccaaaaatccaaaaaaataattaatgacatcttctatgtgccagttcgtcagcgcatagaagatatcatcaattccaaaaaataagttcccggggaattaaccccgggatatttttatactttttcgatatttttcgcagccacaaatccgtagtacttgcctgcgatgcggacataataccatgaagcaccgtttgttgctttctgagtgaaattcatcacgt

SEQ ID NO: 29920 - DNA, 260 bp, Unknown; identical to SEQ ID NO: 29835
  Description of Unknown: RightRegion for integrase B3921 sequence

SEQ ID NO: 29921 - DNA, 260 bp, Unknown
  Description of Unknown: RightRegion for integrase B3922 sequence
cggatggggaacgaagccacctttgtcctggatattttccccagaattcaatcaaattaattaatgataacatctatgtacaaacgaatcagctcatagctgttatcattttaattatgcaataaagctttgacaataccgtacaatgtgtggtattgtttcaatatgaaggaggtaacaattgtgaatattacagaaatgagaaattatataggagtctccagagcagagttctccaggcgctataacattccgctccg

SEQ ID NO: 29922 - DNA, 260 bp, Unknown
  Description of Unknown: RightRegion for integrase B3923 sequence
aaaggcaacgagattggttttcagctcgacattttcccaaaaatccagaagaataattaatgatatcttctatgagctgacgaactggcacattgatgttatcagtaattaaataaaagaaattcccggggctaattccccgggatattttttactgtttcttaatatattttgcagatacgaagccataatattttcctgcaatacggatataataccacttactaccgtttttatctttctgggtaaaattcattact

SEQ ID NO: 29923 - DNA, 260 bp, Unknown
  Description of Unknown: RightRegion for integrase B3924 sequence
aagggcaatgagattaattttcagctcgatattttcccaaaaatccagaagaataattaatgatatcttctatgtgctgacgaattagctcattgatgttatcagtaattaaaaaaagaaattcccggggctaattccccgggatatttttactgcttcttaatatattttgcagatgcaaagccataatactttcctgcaatacggatataataccatttgctaccgtttttatctttctgtgtataattcataacttc

SEQ ID NO: 29924 - DNA, 260 bp, Unknown
  Description of Unknown: RightRegion for integrase B3925 sequence
ggaaaccttgtcattcatacctttgtatgcccgcagattaagcgttatcagcgattttagaccttttcggtatagctgtcataagcaaggcaaatccagcctgcgccgcttttcagcttgccccagagacccttgttacctgcgctgtcaatctgcccctgcgcttcctcaacaatggtgaatacacccttacccgtataagagccagtagccgcatagttcgtgcctgcgcccttacgaatacgcaaatcagaaacctt

SEQ ID NO: 29925 - DNA, 260 bp, Unknown
  Description of Unknown: RightRegion for integrase B3926 sequence
aaaggcaacgagattggttttcagctcgacattttcccgaaaatccagaagaataattaatgatatcttctatgtactgacgaactagctcattgatgttatcagtaattaaataaaagaaattcccggggttaattccccgggatatttttactgcttcttaatatattttgcagatacaaagccgtaatactttcctgcaatacggatataataccacttactaccgtttttatctttctgggtaaaattcattacct

SEQ ID NO: 29926 - DNA, 260 bp, Unknown
  Description of Unknown: RightRegion for integrase B3927 sequence
cgcaaggggaatgaagccacctttgttttggatattttccccagaattcagtcaaattaattaatgataacatctatgtacaaacgaatcagctcatagctgttgtcattttaattatgcaataaagctttgacaataccgcacaatgtgtggtattgtttcaatatgaaggaggtaacaattgtgaatattacagaaatgagaaattatataggagtctccagagcagagttctccaggcgctataacattccgctccg

SEQ ID NO: 29927 - DNA, 260 bp, Unknown
  Description of Unknown: RightRegion for integrase B3928 sequence
tgttatggaaagaaaaataatccagaaaactttgaattgatgatttatacaaaattttaaacttgtatgtgtatatgaagtaaaacattgtaaagtttgtgtagaaagcaaacatgaaggtaaatgtttaaaaggcgtaaaattagattgtccaccatgtagaccagataagccatgtagacctgaacttccttgtaagcctgaaaaaccatgctaaattaataaacgcaaaaaaataacgaataattaataagacatat

SEQ ID NO: 29928 - DNA, 260 bp, Unknown; identical to SEQ ID NO: 29877
  Description of Unknown: RightRegion for integrase B3929 sequence

SEQ ID NO: 29929 - DNA, 260 bp, Unknown
  Description of Unknown: RightRegion for integrase B3930 sequence
aagggcgatgagattagttttcagctcgacattttcccgagaatccagaaaaatagttaatgacatcatctatgtgctgacgaactagctcattgatgttgtcggtaatttttaaaaaaaagaaattcccggggaattagccccgggatatttttactgcttcttaacatattttgcagatacaaatccataatactttcctgcaatacggatatagtaccatttgctgccgtttttatctttctgggtaaaattcatta

SEQ ID NO: 29930 - DNA, 260 bp, Unknown
  Description of Unknown: RightRegion for integrase B3931 sequence
gtgaaagacgtaattaaaaaatgtgtatgggacggggagtccctttctattatgctttgaagctcacttttttactatgcgtctttccggtctcatacgaagtgcagacttaataagatctcttatacttactcccggtgctccgtttatggtcgctgcccgggcttcaaggcgcaccagatttgcaatcccttgaagcttcagttctgcattgtcctcaatagtgataatccgttcatcttttggtatgtactctgaca

SEQ ID NO: 29931 - DNA, 140 bp, Unknown
  Description of Unknown: RightRegion for integrase B3932 sequence
cgcaaggggaatgaagccacctttgttttagatattttccctagaattcagtcaaattaattaatgataacatctatgtacaaacgaactcagtcatctggaaatggtatccactattgtacatcagcttacccgggacc

SEQ ID NO: 29932 - DNA, 260 bp, Unknown
  Description of Unknown: RightRegion for integrase B3933 sequence
aaaggcaatgagatcaattttgagctagacattttcccgaaaattcaaaaaaataattaatgataacatcgatgtaccagttcgccagcacatagaagatatcattaatttcaaaaagaaaactcccggggaattaaccccgggatatttttatgccttttagatagcaatcaaatctttccaggtgtttgtgccgcactcgccatctactttaagaactccgtttctggatttctgataagctttcagtgcatagatgg

SEQ ID NO: 29933 - DNA, 260 bp, Unknown
  Description of Unknown: RightRegion for integrase B3934 sequence
aaacactacgtttacgggcttttactttttcaaaaaaacatttcgaacgaggttttatagttcatatgcctgaaaagcaggcgtgtgagcgataacctaaaactatgtcacggatgcattgcacattgttcttttctcaaagaaaaacctttgaaaccttctgcatattttgcggaaggttttttatttatctaacatactactttagaggtgataaaaatgatcagcgaaaatatgtatcgaaaaaatattaagccagg

SEQ ID NO: 29934 - DNA, 260 bp, Unknown
  Description of Unknown: RightRegion for integrase B3935 sequence
aaaggaaaagagattggttttcaactcgacattttcccaaaaatccagaagaataattaatgatatcttatatgagctgacgaactggcgcattgatgttgtcggtaattaaaaaaagaaattcccgggggtaattccccgggatatttttactgcttcttaatatattttgcagatacaaagccataatactttcctgcaatacggatataataccacttactaccgtttttatctttctgggtaaaattcattacttc

SEQ ID NO: 29935 - DNA, 260 bp, Unknown
  Description of Unknown: RightRegion for integrase B3936 sequence
gccttatccgaacaaatcctgtttattaacggtataatcgggatgcttgttcgccgataaggcgcagcccctctccagatcggagaggggctgctttttatttcacaatgcacctgtaatacgcacaaagcttttcttccgggccggggccgtccttgtccatcaagaacgcccgcgccagctccgcgtagaactccggaacgttgactccgaacttccgcgccacatcgtagtaatccgagtacatcatgttcatggtc

SEQ ID NO: 29936 - DNA, 260 bp, Unknown
  Description of Unknown: RightRegion for integrase B3937 sequence
aaaggcaacgagattggttttcagctcgacattttcccgaaaatccagaagaataattaatgatatcttctatgtgctgacgaactggctcattgatgttatcagtaattaaataaaagaaattcccggggttaattccccgggatatttttactgcttcttaatatattttgcagatacaaagccataatactttcctgcaatacggatataataccacttactaccgtttttatctttctgggtaaaattcattacct

SEQ ID NO: 29937 - DNA, 260 bp, Unknown
  Description of Unknown: RightRegion for integrase B3938 sequence
aaaggtaatgagatcaattttgagttagacattttcccaaaaattcaaaaaaatgattaatgataacatcaatgagccagttcacaagcacatagaagatatcattaattccaaaaaaaataagctcccggggaattaaccccgggatatttttatacttttttgatgtatttcgcaaaaataaatccgaaatactttccagcgattctgatgtaataccagtcatttccgctcttggatttgatcgtatcgcatacatc

SEQ ID NO: 29938 - DNA, 260 bp, Unknown; identical to SEQ ID NO: 29835
  Description of Unknown: RightRegion for integrase B3939 sequence

SEQ ID NO: 29939 - DNA, 260 bp, Unknown
  Description of Unknown: RightRegion for integrase B3940 sequence
caaggtcacgtcacctccaccatccgcagcgcggacgaaccctcgaaagaaaacgagtgatcgtttcctttcgggggctttctttttggcaaaaatgttccaagagaaatatttgtgatccaatatgagaaaaatcggagaggtacgatgctgatttatacggcggcaacgcttctgtcctgccttttgacatggcacagacaaaaaagactacaggctcagatggtgcaggaaacagcacttcaggcgttttttcaaaa

SEQ ID NO: 29940 - DNA, 260 bp, Unknown; identical to SEQ ID NO: 29849
  Description of Unknown: RightRegion for integrase B3941 sequence

SEQ ID NO: 29941 - DNA, 260 bp, Unknown
  Description of Unknown: RightRegion for integrase B3942 sequence
cggatggggaacgaagccacctttgtcctggatattttccccagaattcaatcaaattaattaatgataacatctatgtacaaacgaactcagtcatctggaaatggtatccactattgtacatcagcttacccgggacctttccatggaggaaattgagaaatccggattcggaccgtattatatcgatcacacagtgggagtctggccacaggcagcaggtggcgtaccatttaatgcatgtgaatttcagagtaaag

SEQ ID NO: 29942 - DNA, 260 bp, Unknown
  Description of Unknown: RightRegion for integrase B3943 sequence
aaaggcaacgagattggtttccagctagatattttcccaaaaatccagaagaataattaatgatatcttctatgtgctgacgaactggcgcatctggagatggtttccaccatggttcaccagcttacccgtgacctcactatggaagaaattgagaattccgggctgggaccatattatattgaccacacagttggcgtgtggccgcaggcagcaggaggcgttccctttaatgcctgcgaattccagagtaaaggtga

SEQ ID NO: 29943 - DNA, 260 bp, Unknown
  Description of Unknown: RightRegion for integrase B3944 sequence
aaaggcgatgagattagttttcggctcgacattttcccgcgaatccagaaaaaaagttaatgacaacatctatgtgctgacgaactggcgcattgatgttatcattaattttgaaaagaaattcccgggggaattaaccccgggataatttttactgcttcttaatatattttgcagatacaaagccataatactttcctgcgatacggatataataccacttactaccgtttttatctttctgggtaaaattcattact

SEQ ID NO: 29944 - DNA, 109 bp, Unknown
  Description of Unknown: RightRegion for integrase B3945 sequence
aaaggtaacgagattaattttgagctagacattttcccaaaaattcaaaaaaatgattaatgacatcttctatgtgccagttcctcagtgccaatatcattcagcactg

SEQ ID NO: 29945 - DNA, 260 bp, Unknown; identical to SEQ ID NO: 29906
  Description of Unknown: RightRegion for integrase B3946 sequence

SEQ ID NO: 29946 - DNA, 260 bp, Unknown
  Description of Unknown: RightRegion for integrase B3947 sequence
aagggcaatgagattaattttcagctcgatattttcccaaaaatccagaagaataattaatgatatcttctatgtgctgacgaactggctcattgatgttatcagtaattataaaaagaaagtcccggggaattaaccccgggatattttttactgtttcttaatatattttgcagatacaaagccataatactttcctgcaatacgaatataataccatttgctgccgtttttatctttctgtgtataattcataactt

SEQ ID NO: 29947 - DNA, 260 bp, Unknown
  Description of Unknown: RightRegion for integrase B3948 sequence
cggatggggaacgaagccacctttgtcctggatattttcccaagaattcagtcaaattaattaatgataacatctatgtgcaagcgaactcagtcatctggaaatggtatccactattgtacatcagcttacccgggacctttccatggaggaaattgagaaatccggatttggaccgtattatatcgatcacacagtgggagtctggccacaggcagcaggtggcgtaccatttaatgcatgtgaatttcagagtaaag

SEQ ID NO: 29948 - DNA, 260 bp, Unknown
  Description of Unknown: RightRegion for integrase B3949 sequence
gcttttttcataatgattgccgctttgtgtgagtgctttcattttgccgctgacttctgaccgagtcagcggcttttttgttttgtaggggagtaggggaaaaattcatccatcctcccggggatgcaacaacagccgcaaacggctcgggagggtcattcttgttgccatgcaccgcggcaatatgctatactaaagaaaaaatagaaggggaggcactgcggatgacccgcattgcaatcgtagaggatgaggccgcc

SEQ ID NO: 29949 - DNA, 260 bp, Unknown
  Description of Unknown: RightRegion for integrase B3950 sequence
attccgggaatgatgcaggtacagaagaattggttccgccatgatgtcaatgataaataagcaaaaaaggaagcacacctgaagaattccaggtgtgctttaaagttatttgccggttgttctgctttttgtacgcggtgggtcattcggtacccactctataatttcagacggttggcaatgtaacgcctcacagatcagatcaagatgctcaaggctgatgcgatcattaaagccatgataatactcgttgatagtat

SEQ ID NO: 29950 - DNA, 260 bp, Unknown
  Description of Unknown: RightRegion for integrase B3951 sequence
acgatagaatatagtcgcgaacgtccaggtgaatttatactagatatagagcttctctgatacctactaccacatatagtaggtattctttaacacatacatatccatcataagtatcttcctttgataagacattaatgatggtaacttaagataggagataagtcaatgcgcatcataggaaaagatagctatatcccagaatacaaaacgagaacatacagaggtatcaaagtaaaaagggatggcaatggatggtg

SEQ ID NO: 29951 - DNA, 260 bp, Unknown
  Description of Unknown: RightRegion for integrase B3952 sequence
aaaggcaacgagattggtttccagctagatattttcccaaaaatccagaagaataattaatgatatcttctatgtgctgacgaattggctcattgatgttatcagtaattaaataaaagaaattcccggggctaattccccgggatatttttactgtttcttaacatattttgcagatacaaagccataatactttcctgcgatacagatataataccatttgctgccgtttttatctttctgggtaaaattcattacct

SEQ ID NO: 29952 - DNA, 260 bp, Unknown
  Description of Unknown: RightRegion for integrase B3953 sequence
aagggtaatgaagttagttttcagctcgatattttcccaaaaatccaaaaggaaaattaatgatatcttctatgtgctgaagaatctgtacattgatgttatcaataataaaaagaatcccccaggctgtgactcctgggggtatttttttacagttttttcaataatgttgcaaagcctgctgccttcagcttctttaccaccttattggcagctttctttgttctgtaggtgccaacccggacacggtatgggacgga

SEQ ID NO: 29953 - DNA, 260 bp, Unknown
  Description of Unknown: RightRegion for integrase B3954 sequence
aagggcaacgagattggttttcagcttgacattttcccaaaaatccagaagaataattaatgatatcttctatgagctgacgaattagctcattgatgttatcagtaattaaaaaaagaaattcccggggctaattccccgggatatttttactgcttcttaatatattttgcagatgcaaagccataatactttcctgcaatacggatataataccatttgctaccgtttttatctttctgtgtataattcataacttc

SEQ ID NO: 29954 - DNA, 260 bp, Unknown
  Description of Unknown: RightRegion for integrase B3955 sequence
attccggtaacgatgcaggtacagaagaattggttccgccatgatgtcaatgataaataagcaaaaaaggaagcacacctgaagaattccaggtgtgctttaaagttatttgccggttgttctgctttttgtacgcggtgggtcattcggtacccactctataatttcagacggttggcaatgtaacgcctcacagatcagatcaagatgctcaaggctgatgcgatcattaaagccatgataatactcgttgatagtat

SEQ ID NO: 29955 - DNA, 260 bp, Unknown; identical to SEQ ID NO: 29876
  Description of Unknown: RightRegion for integrase B3956 sequence

SEQ ID NO: 29956 - DNA, 260 bp, Unknown
  Description of Unknown: RightRegion for integrase B3957 sequence
aaaggcaacgagattggttttcagctagacattttccccaaaattcaaaagaataattaatgatatcttctatgtgctgacgaactggcgcattgatgttatcagtaattataaaaagaaagtcccggggaattaaccccgggataatttttactgctttttgatatattttgcagatacaaagccataatattttcctgcaatacggatataataccatttgctgccgtttttatctttctgtgtataattcataactt

SEQ ID NO: 29957 - DNA, 260 bp, Unknown
  Description of Unknown: RightRegion for integrase B3958 sequence
cacagtaacgagattaatttcgaactggatattttcccaaaaatccaaaaaaataattaatgacatcttatatgtgccagttcgccagtacatagatgctgtcagtaaataaaaaagaaattcccggggaattaaccccgggatattttatatttttttgatgtattttgcagaaacaaatccgaaatactttccgtcaatgcggatatagtaccaagatgctccatctttggctttctgagtaaagttcatgacatcga

SEQ ID NO: 29958 - DNA, 260 bp, Unknown; identical to SEQ ID NO: 29849
  Description of Unknown: RightRegion for integrase B3959 sequence

SEQ ID NO: 29959 - DNA, 260 bp, Unknown
  Description of Unknown: RightRegion for integrase B3960 sequence
tccgaacatattttgattgtatcgtcatgtgtgtttggattggtgatgacaaaagaataacgctattcttttgcacaagaaaaagcctcggcatttgcccgaggctttttcttattttcgtttctccagtgccctgtaaagcatcacggcgacctcggcgcgggtggcggtctgctccggcttgaaggtgccgtcgggatagccgttgaggataccccgcgcggcgagctcgttcacggcctctgcgtaccacgccgacg

SEQ ID NO: 29960 - DNA, 260 bp, Unknown
  Description of Unknown: RightRegion for integrase B3961 sequence
attccgggaacgatgcaggtacagaagaattggttccgccatgatgtcaatgataaataagcaaaaaaggaagcacacctgaagaattccaggtgtgctttaaagttatttgccggttgttctgctttttgtacgcggtgggtcattcggtacccactctataatttcagacggttggcaatgtaacgcctcacagatcagatcaagatgctcaaggctgatgcgatcattaaagccatgataatactcgttgatagtat

SEQ ID NO: 29961 - DNA, 260 bp, Unknown
  Description of Unknown: RightRegion for integrase B3962 sequence
aaaggcaacgagattggttttcagctagacattttcccaaaaatccaaaagaataattaatgatatcttatatgtgctgacgaactggcgcatagatgttgtcaataattaaataaaagaaattcccggggaattagccccgggatatttttactgcttcttaacatattttgcagatacaaatccataatactttcctgcaatacggatataataccatttgctgccatttttatctttctgggcaaaattcattatct

SEQ ID NO: 29962 - DNA, 260 bp, Unknown
  Description of Unknown: RightRegion for integrase B3963 sequence
attccgggaacgatgcaggtacagaagaatcggtgccgccatgatgtcaatgataaataaacaaaaaaggaagcacacctgaagaattccaggtgtgctttaaagttatttgccggttgttctgctctttgtgcgtggcgggtcattcggcacccactctataatttcagacggttggcaatgtaacgcctcgcatatcaagtcaagatgctcaaggctgatgcgctcggcaatgccatgataatactcgttgatagtat

SEQ ID NO: 29963 - DNA, 260 bp, Unknown
  Description of Unknown: RightRegion for integrase B3964 sequence
ccgggtgttggcaggtacgtggagaatgtatttgaattaaatatgcttctcaatatgtaaagatttattttgaagtagtctttactatatccaacatcaatgtaccgatgaattggcgcatcttgagatagtcggtgccatggttcaccagctcacacgcgacctcacacctgaggagatagagaaatcaggttttgcaccatactatgtcgaccatacgcttggtgtctggccgcaggcagcgggcggaatccccttca

SEQ ID NO: 29964 - DNA, 260 bp, Unknown
  Description of Unknown: RightRegion for integrase B3965 sequence
catggcgatgaggttaattttgaactagatatttttccaaaaatccaagaaaataattaatgatatcttctatgtaccgacgaactggctcattgatgttatcatcaatttagaaaagaaactcccggggaattaaccccgggatatttttatacttttttgatgtatttcgcagaaacaaatccgaagtattttccggctatgcggatgtagtaccaagatgtaccgtctttggctttttgcgtaaagttcattacatc

SEQ ID NO: 29965 - DNA, 260 bp, Unknown
  Description of Unknown: RightRegion for integrase B3966 sequence
cggatggggaacgaagccacctttgtcctggatattttccccagaattcaatcaaattaattaatgataacatctatgtacaaacgaactcagtcatctggaaatggtatccactattgtacatcagcttacccgggacctttccatggaggaaattgagaaatccggatttggaccgtattatatcgatcacacagtgggagtctggccacaggcagcaggtggcgtaccatttaatgcatgtgaatttcagagtaaag

SEQ ID NO: 29966 - DNA, 260 bp, Unknown; identical to SEQ ID NO: 29849
  Description of Unknown: RightRegion for integrase B3967 sequence

SEQ ID NO: 29967 - DNA, 260 bp, Unknown
  Description of Unknown: RightRegion for integrase B3968 sequence
cggatggggaacgaagccacctttgtcctggatattttccccagaattcaatcaaattaattaatgataacatctatgtgcaaacgaactcagtcatctggaaatggtatccactattgtacatcagcttacccgggacctttccatggaggaaattgagaaatccggattcggaccgtattatatcgatcacacagtgggagtctggccacaggcagcaggtggcgtaccatttaatgcatgtgaatttcagagtaaag

SEQ ID NO: 29968 - DNA, 260 bp, Unknown; identical to SEQ ID NO: 29825
  Description of Unknown: RightRegion for integrase B3969 sequence

SEQ ID NO: 29969 - DNA, 260 bp, Unknown
  Description of Unknown: RightRegion for integrase B3970 sequence
ttcttatccgaacactttgtttttataaacggtgttattgggatggtcgtgcatcgataaaggaatccctctcctgttttggagagggatttttttattttgcgatatgctcataatacgccatgagcttctgttccggccccgggccgtccttgtcgagcaggaacgccttggccagcgacgcgtaaaactccgggcggttgaggccgaactccacggcgacggggtagtagtccgagtacatcatgttcattgtcacg

SEQ ID NO: 29970 - DNA, 260 bp, Unknown
  Description of Unknown: RightRegion for integrase B3971 sequence
gccttatccgaacaaatcctgtttattaacggtataatcgggatgcttgttcgccgataaggcgcagcccctctccagatcggagaggggctgctttttatttcacaatgcacctgtaatacgcacaaagcttttcctccgggccggggccgtccttgtccatcaagaacgcccgcgccagctccgcgtagaactccggcacgttgattccgaacttccgcgccacatcgtagtagtccgagtgcatcatgttcatggtc

SEQ ID NO: 29971 - DNA, 260 bp, Unknown
  Description of Unknown: RightRegion for integrase B3972 sequence
aaaggcaacgagattggttttcagctagacattttcccaaaaattcaaaagaataattaatgatatcttctatgtgctgacgaactggcgcattgatgttatcagtaataaaaaagaaattcccggggaattaaccccgggatatttttttactgtttcttaatgtattttgcagatacgaagccataatacctttctgcaatacggacataataccacttactaccgtttttatctttctgggtaaaattcattacctc

SEQ ID NO: 29972 - DNA, 260 bp, Unknown
  Description of Unknown: RightRegion for integrase B3973 sequence
aaaggaaacgagattggtttccagctagacattttcccaaaaatccagaagaataattaatgatatcttctatgaactgacgaactggcacattgatgttatcagtaattaaataaaagaaattcccggggctaattccccgggatattttttactgtttcttaatatattttgcagatacgaagccataatattttcctgcaatacggatataataccacttactaccgtttttatctttctgggtaaaattcattact

SEQ ID NO: 29973 - DNA, 260 bp, Unknown
  Description of Unknown: RightRegion for integrase B3974 sequence
tatcatctggatatccacttccgcatcacggcgcaacagtatttgggaaaagcatcgtgagggagtcaatatcatttgcaccataatatgcgctgcttgacgatgatcgctttgcgtcggagccgcatttcgccaacgaggaaaaaacgctcgctctgcctacgggtctccaagctgggcattccactcatatctccttctctcttgcttttcaccgtgcttttcgtcaatgtgcaggcctcattgatgactcggacggc

SEQ ID NO: 29974 - DNA, 260 bp, Unknown; identical to SEQ ID NO: 29909
  Description of Unknown: RightRegion for integrase B3975 sequence

SEQ ID NO: 29975 - DNA, 260 bp, Unknown
  Description of Unknown: RightRegion for integrase B3976 sequence
aagggcgatgagattagttttcggctcgacattttcccgcgaatccagaaaaaaagttaatgatatcatctatgtgctggcgaactggctcattgatgttgtcattaatcaaaaaagaaattcccggggttaattccccgggatatttttactgcttcttaatatattttgcagatacaaagccataatactttcctgcaatacggatataataccatttgctgccgtttttatctttctgggtaaaattcattacctcc

SEQ ID NO: 29976 - DNA, 260 bp, Unknown
  Description of Unknown: RightRegion for integrase B3977 sequence
tccgaacatattttgattgtatcgtcatgtgtgtttggattggtgatgacaaaagaataacgctattcttttgcacaagaaaaagcctcggcatttgcccgaggctttttcttattttcgtttctccagtgccctgtaaagcatcacggcgacctcggcgcgggtggcggtctgctccggcttgaagctgccgtcgggatagccgttgacgataccccgcgcggcgagctcattcacggcctccgcgtaccacgccgacg

SEQ ID NO: 29977 - DNA, 260 bp, Unknown; identical to SEQ ID NO: 29835
  Description of Unknown: RightRegion for integrase B3978 sequence

SEQ ID NO: 29978 - DNA, 260 bp, Unknown
  Description of Unknown: RightRegion for integrase B3979 sequence
cgcaaggggaatgaagccacctttgttttggatattttccccagaattcagtcaaattaattaatgataacatctatgtacaaacgaactcagtcatctggaaatggtatccactattgtacatcagcttacccgggacctttccatggaggaaattgagaaatccggatttggaccgtattatatcgatcacacagtgggagtctggccacaggcagcaggtggcgtaccatttaatgcatgtgaatttcagagtaaag

SEQ ID NO: 29979 - DNA, 260 bp, Unknown
  Description of Unknown: RightRegion for integrase B3980 sequence
cacttatccgaacacatcatatttataaatggtgttattgggatgatcgtgcaaagataaaaagattcctctccaagtcggagaggaatctttttattgtataaagaaaaccaccggcaatgccggtggttccaaaaagctttagctatgcccagaaaaaatatccgagcgaagcgaggaacaagtctggaaagcgggcgataaggtgtgattcaaaaagacggataaccagggagaaacgaaaagcaaaatgcgccaag

SEQ ID NO: 29980 - DNA, 109 bp, Unknown
  Description of Unknown: RightRegion for integrase B3981 sequence
gcccgggaagtaataaagaagtgtgtctgggacggggagaccctttatgttgagctctaaacctctcttttttatattgcgtccttccggtctcatacgcaaagccgcc

SEQ ID NO: 29981 - DNA, 260 bp, Unknown; identical to SEQ ID NO: 29941
  Description of Unknown: RightRegion for integrase B3982 sequence

SEQ ID NO: 29982 - DNA, 260 bp, Unknown; identical to SEQ ID NO: 29835
  Description of Unknown: RightRegion for integrase B3983 sequence

SEQ ID NO: 29983 - DNA, 260 bp, Unknown
  Description of Unknown: RightRegion for integrase B3984 sequence
aaaggcaacgagattggtttccagctagatattttcccaaaaatccagaagaataattaatgatatcttctatgtgctgacgaactggcgcatctggagatggtttccaccatggttcaccagcttacccgtgacctcactatggaagaaattgagaattccgggctgggaccatattatattgaccacacagttggcgtgtggccacaggcagcaggaggcgttccctttaatgcctgcgaattccagagtaaaggtga

SEQ ID NO: 29984 - DNA, 260 bp, Unknown
  Description of Unknown: RightRegion for integrase B3985 sequence
gcccgggaagtaataaagaagtgtgtctgggatggggagaccctttatgttgagctctaaaactctcttttttatattgcgtccttccggtctcatacgcaaagccgcccgtatcagcattccgatcccgatggctccctggccctccccgttggcgtttcttgtttccagccgtaccaggttctcaatgtgggccagctttagttccgctgaatcctcaatggtgatcacccgctcttctggagggataaactccgaaa

SEQ ID NO: 29985 - DNA, 260 bp, Unknown; identical to SEQ ID NO: 29960
  Description of Unknown: RightRegion for integrase B3986 sequence

SEQ ID NO: 29986 - DNA, 260 bp, Unknown
  Description of Unknown: RightRegion for integrase B3987 sequence
caaggtcacgtcgcctccaccatccgcaacgcggacgaaccctcgaaagaaaacgagtgatcgtttcctttcgggggctttctttttggcaaaaatgttccaagagaagtatttgtgatccaatatgagaaaaatcggagaggtacgatgctgatttatacggcggcaacgcttctgtcctgccttttgacatggcacagacaaaaaagactacaggctcagatggtgcaggaaacagcacttcaggcgttttttcaaaa

SEQ ID NO: 29987 - DNA, 260 bp, Unknown
  Description of Unknown: RightRegion for integrase B3988 sequence
attccgggaacgatgcaggtaccgaagaatcggtgccgccatgatgtcaatgataaataaacaaaaaaggaagcacacctgaagaattccaggtgtgctttaaagttatttgccggttgttctgctctttgtgcgtggcgggtcattcggcacccactctataatttcagacggttggcaatgtaacgcctcgcatatcaagtcaagatgctcaaggctgatgcgctcggcaatgccatgataatactcgttgatagtat

SEQ ID NO: 29988 - DNA, 260 bp, Unknown
  Description of Unknown: RightRegion for integrase B3989 sequence
tcctcagcggattgtgctccctctgcgctggggagccaagcaaattttaaggcgaactaaaatcgaggacagagagtaatgtttgtgttacttcttttccttggcgttaggtcgccttaaatcgttatttagagccatttatcgcctttacaatcagagtagtttatatatgtatggaagcagggctttcgtatgcttacgtttatgtaagtgtacggaagccctttttttgttgcccgattattcttgataaggtgtaa

SEQ ID NO: 29989 - DNA, 260 bp, Unknown
  Description of Unknown: RightRegion for integrase B3990 sequence
tttgattccaaagtaaaggagcaaagaatatgtttgaaaaatcaaaaggcagatacctgacacgaggcgtggatgcggaaataccgctgtacttgcaaatgtttctttggaatgcagtggacaatatgccccatccgaaagactacctgcaggtgtttcggcttagcgaggagaacggtttgcagatcgtgcaccatacctcggagcagccgcagtttgaaatgacgtacattgcggaggcagaaaagccggtcacagca

SEQ ID NO: 29990 - DNA, 109 bp, Unknown
  Description of Unknown: RightRegion for integrase B3991 sequence
cgcaaggggaatgaagccacctttgttttggatattttccccagaattcagtcaaattaattaatgataacatctatgtacaaacgaactcagtcatctggaaatggta

SEQ ID NO: 29991 - DNA, 260 bp, Unknown
  Description of Unknown: RightRegion for integrase B3992 sequence
aaaggtaatgaaatcaattttgagctagacattttcccaaaaattcaaaaaaatgattaatgataacatcaatgagccagttcgtcagtacatagaagatatcattaatttcaaaaagaaactcccggggaattaaccccgggatattttttatacttttttaatgtatttggaagatacgaaaccatagtatttatttttcattctaatgtagtaccatggagttccatcttttgctttctgagtatagttcatgactt

SEQ ID NO: 29992 - DNA, 260 bp, Unknown; identical to SEQ ID NO: 29866
  Description of Unknown: RightRegion for integrase B3993 sequence

SEQ ID NO: 29993 - DNA, 237 bp, Unknown
  Description of Unknown: RightRegion for integrase B3994 sequence
gcatacatcttcgtcaatggcgtgttcggctgcatcttccctcggaacgatgtagaatgaccgggtgatttcacccggttttttcatttttcggtgtgaaattgaaaataaggctcatttcactttcaactttgcaaggcagatcgtcgcgtgatggtctgcctttttcgtatttcttctaaagcacgcgcgcgggcgcgggcgcgtgagccaccccctcacgcaaccccttcaaaa

SEQ ID NO: 29994 - DNA, 260 bp, Unknown
  Description of Unknown: RightRegion for integrase B3995 sequence
aaaggaaacgagattggttttcagctcgacattttcccgaaaatccagaagaataattaatgatatcttctatgatctgacgaactggctcattgatgttatcagtaattaaataaaagaaattcccggggctaattccccgggatatttttactgcttcttaatatattttgcagatacaaagccataatactttcctgcaatacggatataataccacttactaccgtttttatctttctgggtaaaattcattactt

SEQ ID NO: 29995 - DNA, 260 bp, Unknown
  Description of Unknown: RightRegion for integrase B3996 sequence
gtctgcacagatggcaaaatgatctttgcttttaaagatggttcaaaaatcaaggtttaatgcatataaatttgaaagtctgctgtcgggtatattccgattggcagacttttttctgtaaagaaacgcttttttgaccaaagaaacggcaaatctaaaaaaatgcaaccatagcaaaaaaatgcaaccttttgacatccgtttcgttgctctcactcattcgtttctttgcttattttctgctctccaaagaaacggaa

SEQ ID NO: 29996 - DNA, 260 bp, Unknown
  Description of Unknown: RightRegion for integrase B3997 sequence
aaaggcaacgagattggttttcagctcgacattttcccaaaaatccagaagaataattaatgatattttctatgagctgacgaactggctcattgatgttatcagtaattaaataaaagaaattcccggggttaattccccgggatatttttactgcttcttaatatattttgcagatacaaagccataatactttcctgcgatacggatataataccacttactaccgtttttatctttctgggtaaaattcattactt

SEQ ID NO: 29997 - DNA, 260 bp, Unknown
  Description of Unknown: RightRegion for integrase B3998 sequence
gcccgggaagtaataaagaagtgtgtctgggacggggagaccctttatgttgagctctaaaactctcttttttatattgcgcccttccggtctcatacgcaaagccgcccgtatcagcatcccgatcccgatggctccctggccctccccgttggcgtttcttgtttccagccgtaccaggttctcaatgtgggccagctttagttccgctgaatcctcaatggtgatcacccgctcttctggagggataaactccgaaa

SEQ ID NO: 29998 - DNA, 260 bp, Unknown
  Description of Unknown: RightRegion for integrase B3999 sequence
gcccgggaagtaataaagaagtgtgtctgggacggggagaccctttatgttgagctctaaacctctcttttttatattgcgtccttccggtctcatacgcaaagccgcccgtatcagcatcccgatcccgatggctccctggccctccccgttggcgtttcttgtttccagccgtaccaggttctcaatgtgggccagcttcaattccgctgaatcctcaatggtgatcacccgctcttctggagggataaactccgaaa

SEQ ID NO: 29999 - DNA, 260 bp, Unknown; identical to SEQ ID NO: 29835
  Description of Unknown: RightRegion for integrase B4000 sequence

SEQ ID NO: 30000 - DNA, 109 bp, Unknown
  Description of Unknown: RightRegion for integrase B4001 sequence
gcccgggaagtgataaggaaatgtgtctgggacggggagaccctttatgttgagctctaaacctctcttttttatattgcgtccttccggtctcatacgcaaagccgcc

SEQ ID NO: 30001 - DNA, 260 bp, Unknown
  Description of Unknown: RightRegion for integrase B4002 sequence
aagggtaatgaagttagttttcagcttgacatttttccgaaaatccagaagaataattaatgatatcttctatgtgctgacgaactggcgcattgatgttatcattaattaaaaaaagaaattcccggggaattaaccccgggataatttttactgctttttaatatattttgcagatacaaagccataatactttccagcaatgcgaatgtaataccacttactaccgtcttttgctttctgagtataattcattactt

SEQ ID NO: 30002 - DNA, 260 bp, Unknown
  Description of Unknown: RightRegion for integrase B4003 sequence
ttaaaggatctctttaaagaatgcgtttatgacggtcaaaccctgcatattaaaatttagtttttctctcttttttattttgatacgttcacgtcgcaggataaaaaatagaaaaagaatagccccgggatattcccggggcgcctttgttctgttcgcctaagattcgatcttggcgtcattaaatcccgcctttttgatcgcgtctaagttcgctttagcgatctgctcggtatcgtatgtaccaaacagtaatacga

SEQ ID NO: 30003 - DNA, 260 bp, Unknown
  Description of Unknown: RightRegion for integrase B4004 sequence
aagggtaatgaagttagttttcagctcgatattttcccaaaaatccaaaaggaaaattaatgatatcttatatgtgctgacgaactggcgcatagatgttgtcagtaattaaataaaagaaattcccggggttaattccccgggatatttttactgtttcttaacatattttgcagatacaaaaccataatactttcctgcaatacggacataataccatttgctgccacttttatctttctgggtaaaattcattactt

SEQ ID NO: 30004 - DNA, 260 bp, Unknown; identical to SEQ ID NO: 29962
  Description of Unknown: RightRegion for integrase B4005 sequence

SEQ ID NO: 30005 - DNA, 260 bp, Unknown
  Description of Unknown: RightRegion for integrase B4006 sequence
aagggcgatgagattagttttcggctcgacattttcccgcgaatccagaaaaaaagttaatgatatcatctatgtgctggcgaaccggctcattgatgttgtcattaatcaaaaaagaaattcccggggttaattccccgggatatttttactgcttcttaatatattttgcagatacaaagccataatactttcctgcaatacggatataataccatttgctgccgtttttatctttctgggtaaaattcattacctcc

SEQ ID NO: 30006 - DNA, 260 bp, Unknown
  Description of Unknown: RightRegion for integrase B4007 sequence
catgggaatgaagctaattttgagctagacattttccccaaaattcaagaaaataattaattgcggcgcaacattctattgatatcctctatgaacggatgagttagtacatagaggatataggcaagttataagaactcccggggaatcgaccccgggatatttttatactctattgatatactccgcacatacaaatccgtagtacttgttcacgatgcgaacataataccagtctgcaccgtcggcggctttaatcg

SEQ ID NO: 30007 - DNA, 260 bp, Unknown
  Description of Unknown: RightRegion for integrase B4008 sequence
tccttatccgaacactttgtttttataaacggtgttattgggatggtcgtgcatcgataaaggaatccctctcctgttttggagagggattttttattttgcgatatgctcataatacgccatgagcttctgttccggccccgggccgtccttgtcgagcaggaacgccttggccagcgacgcgtaaaactccgggcggttgaggccgaactctacggcgacggggtagtagtccgagtacatcatgttcatggtcacgc

SEQ ID NO: 30008 - DNA, 260 bp, Unknown
  Description of Unknown: RightRegion for integrase B4009 sequence
catgggaatgaggctaattttgagctagacatttttccaaaaattcaaaaaaatgattaatgataacatcaatgtgccagttcgccagcacatagaagatatcattaatttcaaaaagaaaactcccggggttaatccccgggatatttttagattgcaatcaaatctttccaggtcttctctccgcactctccgtctaccaccagtactccatttctggacttctgataccgctttaatgcatagatggtgttctcatc

SEQ ID NO: 30009 - DNA, 260 bp, Unknown
  Description of Unknown: RightRegion for integrase B4010 sequence
aaaggtaacgagattaattttgagctagacattttcccaaaaattcaaaaaaatgattaatgacatcttctatgtgccagttcgctggcgcaatgatgctatcattaattttaaaaagaaactcccggggaattaaccccgggatattttatacttttttgatgtattttgcagaaacaaaaccgaagtactttccggcaatgcggatgtagtaccagtcggttttgtcttttgttcctatcagcgacaaaaaggtggca

SEQ ID NO: 30010 - DNA, 260 bp, Unknown; identical to SEQ ID NO: 29975
  Description of Unknown: RightRegion for integrase B4011 sequence

SEQ ID NO: 30011 - DNA, 260 bp, Unknown; identical to SEQ ID NO: 29877
  Description of Unknown: RightRegion for integrase B4012 sequence

SEQ ID NO: 30012 - DNA, 260 bp, Unknown
  Description of Unknown: RightRegion for integrase B4013 sequence
aacctgttcttggtggaaaacgggttcggattatttttgttcctaggactcgaacaataaaatgcaaatgtccggtggatattattttttcgagaattcaaccataatctgactcagcagcttttgctgatgctcggtaagaccgggatatggggaatgatcgttcgtaaattcgtaaatcagggaatgaatgatcgccttttgcgtgtcgttcagcccatctaccgagaccatctccgccttatctatcccaacgagaa

SEQ ID NO: 30013 - DNA, 260 bp, Unknown
  Description of Unknown: RightRegion for integrase B4014 sequence
aaaggcaacgagattggtttccagctagacattttcccaaaaatccagaagaataattaatgatatcttctatgaaccgacgaactggctcattgatgctatcagtaattaaataaaagaaattcccggggttaattccccgggatattttttatacttttttaatgtatttggaagatacgaaaccatagtatttatttttcattctaatgtagtaccatggagttccatcttttgctttctgagtatagttcatgact

SEQ ID NO: 30014 - DNA, 260 bp, Unknown
  Description of Unknown: RightRegion for integrase B4015 sequence
cacttatccgaacacatcatatttataaatggtgttatcgggatgattgtgcaaagatgaaaattccctctccaatccggagagggaattttttattttaccacatgctcatagtatttcatgagcttgcgctccgggccggggccgtctttgtcgagcaaaaacgctttggctagggctgcgtagaattccgggcggttgaggccgaattctaccgcgacggggtagtagtccgagtacatcatgttcatggttacgcc

SEQ ID NO: 30015 - DNA, 260 bp, Unknown; identical to SEQ ID NO: 29995
  Description of Unknown: RightRegion for integrase B4016 sequence

SEQ ID NO: 30016 - DNA, 260 bp, Unknown
  Description of Unknown: RightRegion for integrase B4017 sequence
tatgatgataaattaatcttcgaatttaaatccggcatgactattgaactcaaaagataattgaataggaactattacatcaacaccttgcagcaatgcagggtgttttcccgttcatagaaaatttacagggcaaaatcgtgccgggattgagtttatcaaccaaatggtttataatatagtaagtgaggtgtgttttagacatggaggataacgatgaagacatccgatatgattaaagaattatgtaataaaaagaa

SEQ ID NO: 30017 - DNA, 260 bp, Unknown
  Description of Unknown: RightRegion for integrase B4018 sequence
cgcaaggggaatgaagccacctttgttttggatattttccccagaattcagtcaaattaattaatgataacatctatgtacaaacgaatcagctcatagctgttgtcattttaattatgcaataaagctttgacaataccgtacaatgtgtggtattgtttcaatatgaaggaggtaacaattgtgaatattgcagaaatgagaaattatataggagtctccagagcagagttctccaggcgctataacattccgctccg

SEQ ID NO: 30018 - DNA, 260 bp, Unknown; identical to SEQ ID NO: 29905
  Description of Unknown: RightRegion for integrase B4019 sequence

SEQ ID NO: 30019 - DNA, 260 bp, Unknown
  Description of Unknown: RightRegion for integrase B4020 sequence
gttatcgactatggcagaagcaaaggcggcaagcccgtgttagaaatcattttcaaataagggctaatttttttagcccttattagtagcttgataagtctattttcgtcggcttgcccttgatgttcgaaactgtgtagccgaaaaacttctgcagcgtctccagatcgccgcgatcccacgcgacctcgatcgcgtggcgtatcgcacgctcaacgcgcgagggcgtggtgttgaacttgcgcgcgacctcggggtag

SEQ ID NO: 30020 - DNA, 260 bp, Unknown
  Description of Unknown: RightRegion for integrase B4021 sequence
aagggcaataagattggtttccagctagacattttcccaaaaatccagaagaataattaatgatatcttctatgagctgacgaattggctcattgatgttatcagtaattaaaaaaagaaattcccggggctaattccccgggatatttttactgcttcttaatatattttgcagatacaaagccataatattttccagcaatacggacataataccatttgctgccgtttttatctttctgggtaaaattcattacttc

SEQ ID NO: 30021 - DNA, 85 bp, Unknown
  Description of Unknown: RightRegion for integrase B4022 sequence
cccggtgttggccggcatgtagacaatattttcgatcttaagatttctttacgcctttaacccccatgatgaatgttataatgaa

SEQ ID NO: 30022 - DNA, 260 bp, Unknown
  Description of Unknown: RightRegion for integrase B4023 sequence
gggaaaggaaacgagattggttttcagctagacattttcccaaaaattcaagaaaaatgattaatgatatcttctatgtgctgacgaactggctcattgatgttatcattaattcagaaaagaaactcccggggaattaaccccgggatatttttatactttcttgatatattttgcagacacgaatccaaaatactttccggcaatacggatgtaatgccaatcaataccgtctttggcttttattgtatcacatacat

SEQ ID NO: 30023 - DNA, 109 bp, Unknown
  Description of Unknown: RightRegion for integrase B4024 sequence
atgagagatatcttgaaggaatgtgtttgggatggctcagaactttctattgtcctttaaatctcacttttttattatgatggcttctggattcatcctcagcgaagcc

SEQ ID NO: 30024 - DNA, 260 bp, Unknown
  Description of Unknown: RightRegion for integrase B4025 sequence
gggaaaggcaacgagattggtttccagctagacattttcccaaaaattcaagaaaaatgattaatgatatcttctatgagctgacgaactggctcattgatgttatcagtaattataaaaagaaagtcccggggaattaaccccgggatattttttactgtttcttaatatattttgcagatacaaagccataatactttccagcaatgcgaatgtaataccacttactaccgtttttatctttctgggtaaaattcatt

SEQ ID NO: 30025 - DNA, 109 bp, Unknown
  Description of Unknown: RightRegion for integrase B4026 sequence
ccaggaataggaagatatatagagaattctttcagattggagattttcttaaagctgtgaacccgctgtttatgggcatttactatcatatccaatggttaggagctaa

SEQ ID NO: 30026 - DNA, 260 bp, Unknown
  Description of Unknown: RightRegion for integrase B4027 sequence
ttaatagatcatatcgtttttgttaaaaacgagcgaaagctcgtaattacttataaataaaaaaagtacctaatgccattaggttcataaaagggatgaatactttcaaattgatagtggattattgctaattttattaatgggtctacttcatcacttatattaatgtaatctaaaagattatttaaataatcaagtatttcttcttttgattgcggtggagtataaattatttcatctgttttactattttttataac

SEQ ID NO: 30027 - DNA, 260 bp, Unknown
  Description of Unknown: RightRegion for integrase B4028 sequence
gctcgcgctgtaattcaggagtgtacttgggacggggagcggctttttattaagctctaaacctcactatttcataatggtggggttccacccgcaatataaaaaagtgaatgtaaaataaaggaggtctttttatgattttgtgttttgaattatcaatgccgcacgcggcaagctggaatggtaaatggtccggagcggatcaaggacactacattttcaaaacgtcccaggctgcctctatgcagaagctgtttgcc

SEQ ID NO: 30028 - DNA, 260 bp, Unknown
  Description of Unknown: RightRegion for integrase B4029 sequence
gctcgcgctgtaattcaggagtgtacttgggacggggaacggctttttattacgctctgaacctcactatttcataatggtggggttccgcccgcaatataaaaaagtgaatgtaaaataaaggaggtctttttatgattttgtgttttgaattatcaatgccgcacgcggcaagctggaatggtaaatggtccggagcggatcagggacactacattttcaaaacgtcccaggctgcctctatgcagaagctgtttgcc

SEQ ID NO: 30029 - DNA, 85 bp, Unknown
  Description of Unknown: RightRegion for integrase B4030 sequence
ttaatagatcatatcgtttttgttaaaaacgagcgaaagctcgtaattacttataaataaaaaaagtacctaatgccattaggtt

SEQ ID NO: 30030 - DNA, 109 bp, Unknown
  Description of Unknown: RightRegion for integrase B4031 sequence
atgagagatatcttgaaggaatgtgtttgggacggctcagaactttctattgtcctttaaatctcacttttttattatgatggcttccggattcatcctcagcgaagcc

SEQ ID NO: 30031 - DNA, 260 bp, Unknown
  Description of Unknown: RightRegion for integrase B4032 sequence
gctcgcgctgtgattcaggagtgtacttgggacggggagcggctttttattacgctctaaacctcactatttcataatggtgtggttcaggacgcattcgaagagatgatttaattaagtctcttattgtaatctgcccggcacctgaagcatttgcatttctagtctccagactaaccagattatcaattcctgcaatctgaagctctgctgaatcctcaattgtaataattctttcatccttaggaataaaattggaa

SEQ ID NO: 30032 - DNA, 109 bp, Unknown
  Description of Unknown: RightRegion for integrase B4033 sequence
aaagcggggatcgggcgatacatagagaatgttttttctctggaaatccaatataaatagccatatccaacgtatctgtacctatgaattagcccacctcgaaatgatt

SEQ ID NO: 30033 - DNA, 109 bp, Unknown
  Description of Unknown: RightRegion for integrase B4034 sequence
cggatggggaacgaagccacctttgtcctggatattttccccagaattcagtcaaattaattaatgataacatctatgtacaaacgaactcagtcatctggaaatggta

SEQ ID NO: 30034 - DNA, 260 bp, Unknown
  Description of Unknown: RightRegion for integrase B4035 sequence
gctcgcgctgtaattcaggagtgtacttgggacggggagcggctttttattacgctctaaacctcactatttcataatggtggggctccgccagcaacataaaaaagtgaaagtaaatttacggaggtgtctttatgaatgtgatctatcgtgtacacggtgctggtggattctatatggaaacgcagagccaggaccaggctttccgagctgcccggcaggaagctgcggcatccggccagatggctctggtatctttt

SEQ ID NO: 30035 - DNA, 109 bp, Unknown
  Description of Unknown: RightRegion for integrase B4036 sequence
gctcgcgctgtgattcaggagtgtacttgggacggagagcggctttttattacgctctaaacctcactatttcataatggtggggttccggtctcatacgaagagccgt

SEQ ID NO: 30036 - DNA, 140 bp, Unknown
  Description of Unknown: RightRegion for integrase B4037 sequence
gctcgcgctgtaattcaggagtgtacttgggacggggagcggctttttattacgctctaaacctcactattttataatggtgtggttccggtctcatacgaagtgctgacttaatcaaatctctgatggttacagcccct

SEQ ID NO: 30037 - DNA, 260 bp, Unknown
  Description of Unknown: RightRegion for integrase B4038 sequence
atcactctaactgatgataaatttatagtagactttaatattaaaaaaaaaactagataatgctataaaaaaattatctagtctattcgcaaaatataaatcatcgcaattaagacatccatgcagaagctatatgtacaggcaccctagctggccataattcagtaagacttgcactaggattgccacttcttatccttccaagttcaattgctattggagatataatttcatatgaaaatgaacaatctaaaactaga

SEQ ID NO: 30038 - DNA, 260 bp, Unknown
  Description of Unknown: RightRegion for integrase B4039 sequence
gtgaaggacgttataaaaaaatgtgtatgggacggggagtccctttctattatgctttgatgctcacttttttatcttgcgtccttcaccccgcattgcaaaaaagtgaaatactaaaaaatggaaggaggcgttgtttatgctaactatttatcatgtgttcggatccggcgatttctttctggaaaccagcagccagcgtgaagctgcactggccgctcaggacgtcgcaaacgaaaccggacagcccgcgtcggtga

SEQ ID NO: 30039 - DNA, 260 bp, Unknown
  Description of Unknown: RightRegion for integrase B4040 sequence
gctcgcgctgtaattcaggagtgtacttgggacggggagcggctttttattaagctctaaacctcactatttcataatggtggggttccggtctcatacgtaaggcatttttaactaagtcccttattgtaattgctcctgttccctccagatttgccggtctgctttccaaagatacaacatgatcctgcatcagtttcaattctgctgcatcttctatagtaacaatacgttcgtcatgaggaataaatgctgacaga

SEQ ID NO: 30040 - DNA, 140 bp, Unknown
  Description of Unknown: RightRegion for integrase B4041 sequence
gctcgcgctgtaattcaggagtgtatttgggacggggagcggctttttattacgctctaaacctcactatttcataatggtggggttccccacgcatggtaaggaacagggacagcatatccatgtgattgtgaccggag

SEQ ID NO: 30041 - DNA, 260 bp, Unknown
  Description of Unknown: RightRegion for integrase B4042 sequence
gctcgcgctgtaattcaggagtgtacttgggacggggagcggctttttattacgctctaaacctcactatttcataatggtggggttccggacgcattcggagactcgcccggatcagatcgcgcatggaaatctcctgcgagccatcccggttttctacccttgtttccaggctgacaagattcgtcacatggcggatttgaagttctgccgaatcctcgatcgtaatgacgcggtcctcctgtggaatatagccggac

SEQ ID NO: 30042 - DNA, 145 bp, Unknown
  Description of Unknown: RightRegion for integrase B4043 sequence
gtgaaagacgtaataaaaaaatgtgtatgggacggggagtccctttctattatgctttgaggctcacttttttatcatgcgtctttcaggacgcatccttaaagccgtcttgatcagatcccggatggtcactgccccggctccg

SEQ ID NO: 30043 - DNA, 260 bp, Unknown
  Description of Unknown: RightRegion for integrase B4044 sequence
gctcgcgctgtgattcaggagtgtacttgggacggggagcggctttttattaagctctaaacctcactatttcataatggtggggctccggtctcatacgaagagccgtcctgataagatctcttattgtaattggagtaaccccatcggtatttgcatttctgttctcaagccttactatatttttagctcccagaagctgcagctccgctgagtcttcaattgtaataattctctcatcatcaggaatatattgtgac

SEQ ID NO: 30044 - DNA, 260 bp, Unknown
  Description of Unknown: RightRegion for integrase B4045 sequence
gttcacaataaaaaagacatccgggtgaccttcaaggatggcacggaaatcgaaacctgacccgcaagaaaaaaggaatgcctccgaaccatatcggctcggaggctttttcgttagtcatcttcccagataaagtttacgtggccgcagtgcggacatttcacatacccgtctggattgttgccgttttcccacggggctgtatatgatccgccggtcattttttggccacagttctcgcaggttctctcgttcttcct

SEQ ID NO: 30045 - DNA, 109 bp, Unknown
  Description of Unknown: RightRegion for integrase B4046 sequence
ccgggaataggaagatatatagaaaattctttcagattggagattttcttaaagctgtgaacccgctgtttatgggcatttactatcatatccaattgttaggagctaa

SEQ ID NO: 30046 - DNA, 260 bp, Unknown
  Description of Unknown: RightRegion for integrase B4047 sequence
gctcgcgctgtgattcaggagtgtacttgggacggggagcggctttttattaagctctaaacctcactatttcataatggtggggttccggacggactcgtaatgatgctttaattaaatcccttatggaaataacattctccccctgactgtttgcctgtcttgtttccattcggacaatattatcaacagaatcaagttttagttctgctgaatcttcaattgtgactattctttcgtctttaggaataaaattagat

SEQ ID NO: 30047 - DNA, 260 bp, Unknown
  Description of Unknown: RightRegion for integrase B4048 sequence
ccgggaataggaagatatatagagaattctttcagattggagattttcttaaagctgtgaacccgctgtttatgggcatttactatcatatccaaggattaggagctaatgaattaggacactttgaaatgatcagcacaatggttcatcagcttacaagaaatctttcaatggaacagattaagggaactccttttgaagcctactatgtagatcatacagcagccgtatggcctcaggccgctggtggaattccattc

SEQ ID NO: 30048 - DNA, 260 bp, Unknown
  Description of Unknown: RightRegion for integrase B4049 sequence
ccgggaataggaagatatatagagaattctttcagattggagattttcttaaagctgtgaacccgctgtttatgggcatttactatcatatccaaggattaggagctaatgaattaggacattttgaaatgatcagcacaatggttcatcagcttacaagaaatctttcaatggaacagattaagggaactccttttgaagcctactatgtagatcatacagcagccgtatggcctcaggccgctggtggaattccattc

SEQ ID NO: 30049 - DNA, 260 bp, Unknown
  Description of Unknown: RightRegion for integrase B4050 sequence
gtaataataaatcgcgatggaaacataaaatttgaatttaagaatggaaaaataatttaagtaaatgaagccagccaatagcaaagagaagacatatgctattggctggctttttaatttttattttagaaatagcttgacttatttctcatttagagttgttatgtaacaaggaaaatcaaaaataaaaaatgtcatgatggactggtataactccaaccataccagcccagcaaaaggtaacagaactacccgttaca

SEQ ID NO: 30050 - DNA, 260 bp, Unknown
  Description of Unknown: RightRegion for integrase B4051 sequence
gctcgcgctgtgattcaggagtgtacttgggacggggagcggctttttattaagctctaaacctcactatttcataatggtggggctccggtctcatacgcagagaagacttgatcagatcccgaatcgtcacggcaccgtttccggacgcattggcattgcgggtttccagacttaccaggttatcaattccttcaatctgtaactccgcggaatcctcgatggtaatgacacgctcatcatgtggaataaagttcgat

SEQ ID NO: 30051 - DNA, 260 bp, Unknown
  Description of Unknown: RightRegion for integrase B4052 sequence
gtcagtggtgacggttgcaaaggttcagcttttgcgccgtcaagcgcattaaccttttaagaaaaagccttgaattttcaaggcttttttcttttgtccttatgaaatttttttgttacactttgttacattgcttttgaaccgaaaaccctggcgaatacatccgctttttctgtaagtggagtaacagagtgaatataatatttctgcgttgtagaaatatctttgtgacctgcaaagtcagaaatcattctgtctgg

SEQ ID NO: 30052 - DNA, 139 bp, Unknown
  Description of Unknown: RightRegion for integrase B4053 sequence
cggatggggaacgaagccacctttgtcctggatattttccccagaattcaatcaaattaattaatgataacatctatgtgcaaacgaactcagtcatctggaaatggtatccactattgtacatcagcttacccgggac

SEQ ID NO: 30053 - DNA, 260 bp, Unknown
  Description of Unknown: RightRegion for integrase B4054 sequence
gctcgcgctgtgattcaggagtgtacttgggacggggagcggctttttattacgctctaaacctcactattttataatggtggggttccggcctcatacgaagcgccgatttgatcagatctctgatcgtgacctccccggttccttctacgttcgcgttccttgcctccagtcttacaatattctttatattctgaatctgcaattctgcattgtcttcaattgtgatgatgcgttcattttttggaatgtactgcgat

SEQ ID NO: 30054 - DNA, 260 bp, Unknown
  Description of Unknown: RightRegion for integrase B4055 sequence
gacttatccgaactcttttgctttatcaatggcgtcattggtatcgtcgtccggcgttaagtcaaaaaaagaacctcctttttgggaggttctttttttatttacttgcgcccgcgacatacctgtaatacgcgcagagcttctcttccgggccgcccgcgtccttgtctctcaggaacgcctccgcctgccgtgcgtaatactgcggctggtctacgccgaagtcccgggcgacgcgccatccgtcagaccactccata

SEQ ID NO: 30055 - DNA, 260 bp, Unknown
  Description of Unknown: RightRegion for integrase B4056 sequence
ggcaaaggtaacgagattaattttgagctagacattttcccgaaaattcaagaaaaatgattaatgacatcttctatgtgccagttcgctggcacattgacgttatcattgatttcaaaaagaaattcccggggttaatccccgggatattttatacttttttaatatattttgcggaagcgaatccgaaatactttccggcaattctgatgtagtaccaagatgttccatctttggctttctgagtaaagttcataaca

SEQ ID NO: 30056 - DNA, 260 bp, Unknown; identical to SEQ ID NO: 29941
  Description of Unknown: RightRegion for integrase B4057 sequence

SEQ ID NO: 30057 - DNA, 87 bp, Unknown
  Description of Unknown: RightRegion for integrase B4058 sequence
gctcgcgctgtaattcaggagtgtacttgggacggggagcggctttttattacgctctaaacctcactatttcataatggtggggtt

SEQ ID NO: 30058 - DNA, 109 bp, Unknown
  Description of Unknown: RightRegion for integrase B4059 sequence
aaagcagggatcgggcgatacatagagaatgttttttctctggaaatccaatataaatagccatatccaacatatctgtacctatgaattagcccatctcgaaatgatt

SEQ ID NO: 30059 - DNA, 109 bp, Unknown
  Description of Unknown: RightRegion for integrase B4060 sequence
ccgggaataggaagatatatagagaattctttcagattggagattttcttaaagctgtgaacccgctgtttatgggcatttactatcatatccaagggttaggagctaa

SEQ ID NO: 30060 - DNA, 109 bp, Unknown
  Description of Unknown: RightRegion for integrase B4061 sequence
ccgggaataggaagatatatagagaattctttcagattggagattttcttaaagctgtgaacccgctgtttataggcatttactatcatatccaagggttaggagctaa

SEQ ID NO: 30061 - DNA, 260 bp, Unknown
  Description of Unknown: RightRegion for integrase B4062 sequence
aaagcggggatcgggcgatacatagagaatgttttttccctggaaatccaatataaatagccatatccaacgtatctgtacctatgaattagcgcacctcgaaatgattgccgccatcgtccgccagctcaccaaaggcttaagtgctgaagaacttgaggccgccggtttcgctccttactatgtcgatcacacggccgggatctggccgcaggcagccggcggtattccgtttaatgcctgtgaattccagagcaaag

SEQ ID NO: 30062 - DNA, 260 bp, Unknown
  Description of Unknown: RightRegion for integrase B4063 sequence
gctcgcgctgtgattcaggagtgtacttgggacggggagcggctttttattaagctctaaacctcactatttcataatggtggggttccgcccgcaatataaaaaagtgaaagtaaatttacggaggtgtctttatgaatgtgatctatcgtgtacacggtgctggtggtttctacatggaaacgcagagccaggaccaggctttccgagctgcccggcaggaagctgcggcatccggccagatggctctggtatctttt

SEQ ID NO: 30063 - DNA, 109 bp, Unknown
  Description of Unknown: RightRegion for integrase B4064 sequence
atgagagatatcttgaaggaatgtgtttgggatggctcagaactttctattgtcctttaaatctcacttttttattatgatggcttccggattcatcctcagcgaagcc

SEQ ID NO: 30064 - DNA, 260 bp, Unknown
  Description of Unknown: RightRegion for integrase B4065 sequence
gacttatccgaactcttttactttatcaatggcgtcattggtatcgtcgtccggcgttaagtcaaaaaaagaacctcctttttgggaggttctttttttatttacttgcgcccgcgacatacctgtaatacgcgcagatcttctcctccggaccgcccgcatccttgtctctcagaaacgcctccgcctgccgtgcgtaatactgaggctggtctacgccgaagtcccgcgcgacgcgccatccgtcggaccactccatg

SEQ ID NO: 30065 - DNA, 117 bp, Unknown
  Description of Unknown: RightRegion for integrase B4066 sequence
tatgaagataaatttacagtttgctttaaagctggtgtggatttggatatagaacgataagaatacaaaaatagcggcaggggtttggggttgccgcctttgtcgtttttaattctc

SEQ ID NO: 30066 - DNA, 260 bp, Unknown
  Description of Unknown: RightRegion for integrase B4067 sequence
gctcgcgctgtaattcaggagtgtatttgggacggggagcggctttttattacgctctaaacctcactatttcataatggtggggttccgcccgcaatataaaaaagtgaatataaaataaaggaggtgattcagcgtggcttgtaaaattaaaacgctcctgcagtgcaagcactgcaggcatgatcttgagtttgcgacggtgtgtggtaatcgtcgtgtgccgcttctctggtgtccggactgcgatattttgtatc

SEQ ID NO: 30067 - DNA, 109 bp, Unknown
  Description of Unknown: RightRegion for integrase B4068 sequence
gctcgcgctgtgattcaggagtgtacttgggacggggagcggctttttattacgctctaaacctcactattttataatggtggggttcggccgcatacgcaaagctgcg

SEQ ID NO: 30068 - DNA, 260 bp, Unknown; identical to SEQ ID NO: 30055
  Description of Unknown: RightRegion for integrase B4069 sequence

SEQ ID NO: 30069 - DNA, 260 bp, Unknown
  Description of Unknown: RightRegion for integrase B4070 sequence
ggcaaaggtaatgagatcaattttgagctagacattttcccaagaattcaaaaaaaatgattaatgataacgtcaatgagccagttcgtcagcgcatagaagatatcatcaattccaaaaaataagttcccggggaattaaccccgggatatttttatactttttcgatatttttcgcagccacaaatccgtagtacttgcctgcaatgcggacatagtgccatgaaacaccgtttgttgctttctgagtgaaattcatc

SEQ ID NO: 30070 - DNA, 260 bp, Unknown
  Description of Unknown: RightRegion for integrase B4071 sequence
gctcgcgctgtgattcaggagtgtacttgggacggagaacggctttttattacgctctaaacctcactatttcataatggtggggctccggacgcatacgcaatgctgtgcgtatcagatcccggattgttaccggctggacgccctccatatttgcattccgtgtttctaaacgtaccagatttttgattccctgtatttgaagttccgcggaatcctcaatcgttataactctctcatcctccgggatatactgtgat

SEQ ID NO: 30071 - DNA, 260 bp, Unknown
  Description of Unknown: RightRegion for integrase B4072 sequence
gctcgcgctgtgattcaggagtgtacttgggacggggagcggctttttattaagctctaaacctcactatttcataatggtggggttccggtcgcattcgcaacgcactccgtatcaggtctcgaatcgtcaccggcataacgccttccatattcgcgtttcgggtctccagacgcacaaggttatgaattccctgtatctgcaactctgcggaatcttcaattgtaattactctttcatcctctgggatatattgcgat

SEQ ID NO: 30072 - DNA, 92 bp, Unknown
  Description of Unknown: RightRegion for integrase B4073 sequence
aaagcagggatcgggcgatacatagagaacgttttttccctggaaattcaatataaataaccatatccaacatatctgaaccgatgaattgg

SEQ ID NO: 30073 - DNA, 260 bp, Unknown
  Description of Unknown: RightRegion for integrase B4074 sequence
ccaggaataggaagatatatagagaattctttcagattggagattttcttaaagctgtgaacccgctgtttatgggcatttactatcatatccaatggttaggagctaatgaattaggacattttgaaatgatcagcacaatggttcatcagcttacaagaaatctttcaatggaacagattaagggaactccttttgaagcctactatgtagatcatacagcagccgtatggcctcaggccgctggtggaattccattc

SEQ ID NO: 30074 - DNA, 260 bp, Unknown
  Description of Unknown: RightRegion for integrase B4075 sequence
gtattacacgaacctttttactttgtcggcggctttgccgtcacaatatggttcaggtaataccgacagaaaagaacggatattctcacttgttgagagtgtccgttctttctttatgtcctgcggattgtccacggactgtccgtggacaatctgcggacagtcacagaatgcagctattttcacttaccgttcagtaagattttcgcaatttttaatcgcgcgttctcatttgcgcaagaatccacacaaacacaact

SEQ ID NO: 30075 - DNA, 260 bp, Unknown
  Description of Unknown: RightRegion for integrase B4076 sequence
gctcgcgctgtgattcaggagtgtacttgggacggggagcggctttttattatgctctaaacctcactatttcataattgtggggttccggccgcattcgcaaagatgccttaatcaagtcctgcatagtaatctcattctctccctccatgtttgcattcctcgtttctagtcgaacaagattctctacatgaaaaagctggagttctgctgaatcctctatcgtaatcactctttccctcttccctatatattctgca

SEQ ID NO: 30076 - DNA, 260 bp, Unknown
  Description of Unknown: RightRegion for integrase B4077 sequence
gctcgcgctgtgattcaggagtgtacttgggacggggagcggctttttattaagctctaaacctcactatttcataatgatggggttccggtctcatacgaagtgctgacttaatcaaatctctgatggttacagccccttctccttctgcattcggtccgcgtgcttctaagcgcaccagattttgaactccctgaatctgtaactctgcattatcctcgatcgtgatcaggcgttctccttttggtatatagttcgac

SEQ ID NO: 30077 - DNA, 109 bp, Unknown
  Description of Unknown: RightRegion for integrase B4078 sequence
aaagcggggatcgggcgatacatagagaatgttttttccctggaaatccaatataaatagccatatccaacgtatctgtacctatgaattagcccaccttgaaatgatt

SEQ ID NO: 30078 - DNA, 260 bp, Unknown
  Description of Unknown: RightRegion for integrase B4079 sequence
gtgaaggacgttataaaaaaatgtgtatgggacggggagtccctttctattatgctttgatgctcacttttttatcttgcgtccttccggacgcattcgtaatgcagatttgatcagatctctgatcgtaacggaaactgctccttccatgtttgccatctttgcttccagccggaccagattgtcaattcccctgatgcgaagttctgcattatcttctattgtgatcagtctttcgtccctggggatatattccgaca

SEQ ID NO: 30079 - DNA, 109 bp, Unknown
  Description of Unknown: RightRegion for integrase B4080 sequence
gctcgcgctgtgatccaggagtgtacttgggacggggagcggctttttattacgctgtaaacctcactatttcataatggtggggtccggtcgcattcgcagagatgct

SEQ ID NO: 30080 - DNA, 260 bp, Unknown
  Description of Unknown: RightRegion for integrase B4081 sequence
tatgatgaccactatagtgttgagtttaagtctggtattagcgtggacatccacaagtaaatacagtttataataactacacttttattgtgtaggagtcagaatgtaattgaattgtttgatgattataaagatgcggccgaaataactaatgttatttcggccgcgcttatcttttaattgtcaaatttgttcttatcaaagaagtttttgcttttaagttttctctttttatccatgtatagttctttttctaacaa

SEQ ID NO: 30081 - DNA, 260 bp, Unknown
  Description of Unknown: RightRegion for integrase B4082 sequence
tacggaagacgctggggtcaatcgcatcccatatcactgttggcggaactcaaggtctgaactaatgtgcatcatcatggtgcaatttcttcagtgccatgatgatgcacataaataaaacaatagccgccgaacgcgaagctcatgcggctattgcagttagtgtatgtgttttagaaatcaaattgtgctatgcactgcatcgatgtaatcgatggttgaggcgctggagtttcattcttttccttttcacctgacag

SEQ ID NO: 30082 - DNA, 260 bp, Unknown
  Description of Unknown: RightRegion for integrase B4083 sequence
gctcgcgctgtgattcaggagtgtacttgggacggggagcggctttttattacgctctaaacctcactatttcataatggtggggttcggacagcaatattaagcggtgaataccatggttgatcccgcgaaacagttcccagtcccgctctccggtaatcaacagctccgttccctgtcctatcaaaaatttgcgcaggctctcttcacttgtaaacaaccggacatcaaacaaattcttttgatgctgacaaaagtag

SEQ ID NO: 30083 - DNA, 260 bp, Unknown
  Description of Unknown: RightRegion for integrase B4084 sequence
ttcgttttgactcctgatagctccaccattggctcaaataagagttacaaacaccgttgatttcaaatcgaagtcaacggtgtttttgtgtttgtcagcaagcaagttcatcgctattctccaaatactgtgcaagatcaaagttgaagtccacatggatttggtatccgcgataaacttctaccctgcggataagctggctgacgatcatcttttttgcttcaaagctggcactatcgtacaggtctgcgtaagagatc

SEQ ID NO: 30084 - DNA, 260 bp, Unknown
  Description of Unknown: RightRegion for integrase B4085 sequence
gctcgcgctgtgattcaggagtgtacttgggatggggagcggctttttattaagctctaaacctcactatttcataatggtggggttccggccgcattctcaaggccgatttgatcagatcacgtattgttacagaagctgctcctgccatattggccattttcgcttccagacacaccaggttatcaattcctctgattttcagttcagcattatcctcgatcgttatcagccgttcatcttttggaatatattctgca

SEQ ID NO: 30085 - DNA, 260 bp, Unknown
  Description of Unknown: RightRegion for integrase B4086 sequence
ttcgttttgactcctgatagctccaccatacagttcgtactcgaacccgattctttgtgaaaaagggttcgggtgcgttttttgtttatcagaagtttgcgtttgcgacagcaacaaacaccccagtggggtgtttgagcaacagaataggctaccaggaaatcccaagtcgtatgacgtggaattttttgtttcgatcaaggactcgaatggcatctacgtaaaaaatccatagcaaatgagccggaagccttctgtag

SEQ ID NO: 30086 - DNA, 260 bp, Unknown
  Description of Unknown: RightRegion for integrase B4087 sequence
tataaaggcgtatctgtcgatgattttaatctgacagtgttcccgaaaatgcctttgtagtaatgaatgttatagtgcgtgtatagatgaaatagcgcacgcactataacatacaaaaaatcccccgacagagcctttttgctccgccgggggataaatgtttattaaaccttctttaaatcttttgcctttaccgccgcagtgacctgcccgccctgaccgatgacgatataatcctctctgtcacccgagcctgcctg

SEQ ID NO: 30087 - DNA, 109 bp, Unknown
  Description of Unknown: RightRegion for integrase B4088 sequence
gctcgcgctgtgattcaggagtgtacttgggacggggagcggctttttattaagctctaaacctcactatttcataatggtggggttccggtctcatacgaagagccgt

SEQ ID NO: 30088 - DNA, 109 bp, Unknown
  Description of Unknown: RightRegion for integrase B4089 sequence
cggatggggaacgaagccacctttgtcctggatattttccccagaattcaatcaaattaattaatgataacatctatgtgcaaacgaactcagtcatctggaaatggta

SEQ ID NO: 30089 - DNA, 260 bp, Unknown
  Description of Unknown: RightRegion for integrase B4090 sequence
gcttttcgaaagggcaatgatatcacattttcccttgatatctaccctaaaatccagtaatatcataacaaaattataacttttaaaccactgataacctttatgtactgacgaactggcacatcttgagatggtctccactatcgtccatcagcttacccggaatctttccatggaggaaattgaaaattccggacttggaccatactatattgatcatacagtaggcgtatggccccaggctgccggaggtattcctt

SEQ ID NO: 30090 - DNA, 260 bp, Unknown
  Description of Unknown: RightRegion for integrase B4091 sequence
ggaggggctatactcacaggaaaagacttttatctgtttgttgacaatccgagaaaataatgcaaaacttcagcgctgcagaacgtgaattactgcgtcacagatttttatatcttagacaagtacttcctatgatagaccacagggaagggaaaggcaggaaagaaaaaaatagacaatggatattacaactgtcttgtcacataacaaaagttgtggtatactaagcgctaaagtgttaaaaaaatatcacgattcag

SEQ ID NO: 30091 - DNA, 260 bp, Unknown
  Description of Unknown: RightRegion for integrase B4092 sequence
gctcgcgctgtgattcaggagtgtacttgggacggggagcggctttttattacgctctaaacctcactattttataatggtggggttccggtctcatacgaagtgctgacttaatcaaatctctgatggttacagccccttctccttctgcattcggtccgcgtgcttctaagcgcaccagattctgaactccttgaatctgtaactctgcattatcctcgatcgtgatcaggcgttctccttttggtatatagttcgac

SEQ ID NO: 30092 - DNA, 260 bp, Unknown
  Description of Unknown: RightRegion for integrase B4093 sequence
gaaaatgttctaatccgaacatttcagatatctatacctcatcacaaaatagtcaagtaagtcaaacgaaaaggaaggtggttttccaccttccttcttgttatctaataacataatcaagactaatccatcctgcacctgatttaagttttccccacttcgatgctcccgcgcctatagcttcgtctacgatagttacagacatagtttcagtgatcttgcctgtgactaatgatgctgtagttggctgctctcgaatg

SEQ ID NO: 30093 - DNA, 260 bp, Unknown
  Description of Unknown: RightRegion for integrase B4094 sequence
ccgggaataggtcgatacatagagaattcatttagattagagattttcttgaaaatgtgaagccgctattttagtgcatttgcaatcatatccaactgcgtggagctaatgagctggggcattttgaaatgattagcacaatggttcaccagctcacaagaaaccttacaatggaacagattaaaggaactccttttgaagcctactatgtagaccatacatcagcagtgtggcctcaggcggcaggtggtattccattt

SEQ ID NO: 30094 - DNA, 260 bp, Unknown
  Description of Unknown: RightRegion for integrase B4095 sequence
tacgatgaccattttgtagtggagttcaagtccgggattgagattacgataaacgaataagatgaaaataacagtgtgacgctcaggctttggtctgggcgtttttgtcgttcatagaaagttattaaatggatacacctttaatcattgacaaggaatgtcgaaatctgtataatttgggcagtaagattaaatggatatccgaaaaggagcaaggcatggctggaaaaggtagaccaactgtagatgataaacgtgac

SEQ ID NO: 30095 - DNA, 260 bp, Unknown
  Description of Unknown: RightRegion for integrase B4096 sequence
gctcgcgctgtgattcaggagtgtacttgggacggggagcggctttttattaagctctaaacctcactatttcataatggtggggttccggtctcattcgaagggctgaccggatcagatctcggatcgttactgacaccgcgcccgccatattggccatttttgcctccagacataccaggttatcaattccccggatcttaagctccgcattatcttcaatggtgatcaggcgctcatcttttggaatatattctgta

SEQ ID NO: 30096 - DNA, 260 bp, Unknown
  Description of Unknown: RightRegion for integrase B4097 sequence
gctcgcgctgtaattcaggagtgtacttgggacggggagcggctttttattacgctctaaacctcactatttcataatggtggggtccggtctcatacgaagagccgtcctgataagatctcttattgtaattggagtaaccccatcggtatttgcatttctggtctcaagccttactatatttttagctcccagaagctgcagctccgctgagtcttcaattgtaataattctctcatcatcaggaatatattgtgaca

SEQ ID NO: 30097 - DNA, 260 bp, Unknown; identical to SEQ ID NO: 29777
  Description of Unknown: RightRegion for integrase B4098 sequence

SEQ ID NO: 30098 - DNA, 260 bp, Unknown
  Description of Unknown: RightRegion for integrase B4099 sequence
gctcgcgctgtaattcaggagtgtacttgggacggggagcggctttttattacgctctaaacctcactatttcataatggtggggttccggtctcatacgaagtgccgacttgatcagatccctgatggtaacttctcctgttccttctacatttgcatttcttgcttccagtcttaccagattctttacattttgaatctgaagttctgcgttgtcttcgatcgttatgatgcgttcatttttgggtatatattgcgat

SEQ ID NO: 30099 - DNA, 260 bp, Unknown
  Description of Unknown: RightRegion for integrase B4100 sequence
agtgttgatgaatttattcttgacatcaaatttaaagataacatcattgtaaatgaataataaatgttataaatatctatatatgtatgataagcgtccatcttccaatggctgtctgagtgcttcgatacattctgttttaaattccataaattcgtccagaaataaaatgccatgatgtgctaatgtgatctctcctgccgtcggcgtcttgccgcctccaaggaatgcagctttcgggatcattggatgtggctggc

SEQ ID NO: 30100 - DNA, 260 bp, Unknown
  Description of Unknown: RightRegion for integrase B4101 sequence
gctcgcgctgtgattcaggagtgtacttgggacggggagcggctttttattacgctctaaacctcactatttcataatggtggggttcgggacgcatacgcagtgcactcttaaccaaatcgcggatagtaacttcattctttccctccacattgcggtttctggcttccagtcgaaccagatttgcgatgttttgaatctgcaattccgcagaatcctcaatcgtaatcacacgctcttctttcggaatgaaattagac

SEQ ID NO: 30101 - DNA, 260 bp, Unknown
  Description of Unknown: RightRegion for integrase B4102 sequence
gctcgcgctgttattcaggagtgtacttgggacggggagcggctttttattacgctctaaacctcactattttataatgttgggtttcggccgcatacgcaaagctgcgcggatcagatcgcggatcgtaatttctgttcctgattccagatttgcctcttttgcttccagccgcaccagattctccacaccctggatctgcagctctgcattgtcttcgatggttatgatgcgctcgccctttggaatgtaggcggaaa

SEQ ID NO: 30102 - DNA, 260 bp, Unknown
  Description of Unknown: RightRegion for integrase B4103 sequence
aaagcagggatcgggcgatacatagagaatgttttttccctggaaatccaatataaatagccatatccaacgtatctgtacctatgaattagcccacctcgaaatgattgccgccatcgtccgccagctcaccaaaggcttaagtgctgaagaacttgaggccgccggtttcgctccttactatgtcgatcacacggccgggatctggccgcaggcagccggcggtattccgtttaatgcctgtgaattccagagcaaag

SEQ ID NO: 30103 - DNA, 260 bp, Unknown
  Description of Unknown: RightRegion for integrase B4104 sequence
gctcgcgctgtgattcaggagtgtacttgggacggggagcggctttttattacgctctaaacctcactatttcataatggtggggttccggtctcatacgaagagccgtcctgataagatctcttattgtaattggagtaaccccatcggtatttgcatttcttgtctcaagccttactatatttttagctcccagaagctgcagctccgctgagtcttcaattgtaataattctctcatcatcaggaatatattgtgac

SEQ ID NO: 30104 - DNA, 260 bp, Unknown
  Description of Unknown: RightRegion for integrase B4105 sequence
ataggagatgggttcggattatttgttttcttcggaaaattagcgtttgcgaagcaatgaaagccccagtggggcttttaagcgacggaacggtctgcgttagcagatggaggggctttgccccgacaagttccatgcaggtgtccgtggaagatgaaatccgaaatcatagattgaccgacacaaatcatgcaatgatttcaggaggacatgaatgtgaagtacgatgcaagagcttgccatatcaacatggacaccgg

SEQ ID NO: 30105 - DNA, 260 bp, Unknown
  Description of Unknown: RightRegion for integrase B4106 sequence
gctcgcgctgtaatccaggagtgtacttgggacggggagcggctttttattacgctctaaacctcactatttcataatggcggggttccggacgcatacgcaatgctgtgcggatcagatcccggattgttaccggctggacgccctccatatttgcattccgtgtttctaaacgtaccagatttctgattccctgtatttgaagttccgcggaatcctcaatcgttataactctctcatcctccgggatatactgtgat

SEQ ID NO: 30106 - DNA, 260 bp, Unknown
  Description of Unknown: RightRegion for integrase B4107 sequence
cgtatgagccacttagagtgcgatggaagggagtcgaacccccggcctactgattcgtagcgcacgccgggcgattccctcaatttttggaagttacattttaacgttatttctttgcgatgtatcgcaggttttgaacttcgagtttctgcaccctttgtccgattttgcaacaatttgcaccctttgcacgttttgaaaccgtgcaagaaccgtgcagaaaccgtgcacttactcccggacaaactaaaaaccacttc

SEQ ID NO: 30107 - DNA, 109 bp, Unknown
  Description of Unknown: RightRegion for integrase B4108 sequence
gtgaaggacgttataaaaaaatgtgcatgggacggggagtccctttctattatgctttgatgctcacttttttatcttgcgtccttcagggcgcattcgcaacgcagat

SEQ ID NO: 30108 - DNA, 87 bp, Unknown
  Description of Unknown: RightRegion for integrase B4109 sequence
gctcgcgctgtgatccaggagtgtacttgggacggggagcggctttttattacgctgtaaacctcactatttcataatggtggggct

SEQ ID NO: 30109 - DNA, 109 bp, Unknown; identical to SEQ ID NO: 30059
  Description of Unknown: RightRegion for integrase B4110 sequence

SEQ ID NO: 30110 - DNA, 260 bp, Unknown
  Description of Unknown: RightRegion for integrase B4111 sequence
ctcgaacctacgttcaaggaaactcaaaaaatgcccgttttaattgaaattagaggataaaactatgctttttactactaaaaagtgttcgtgcgaggttaaacaaacgcatatttgcctatagaagttacataatccggaataacaacttccgtaatcgttttgtcgtaaacaccttctatctcacaaaatttcaaatttgacgaaaacttggaattcttaagttcgtcttttatcttccactttgccgtatatgtttc

SEQ ID NO: 30111 - DNA, 140 bp, Unknown
  Description of Unknown: RightRegion for integrase B4112 sequence
gctcgcgctgtgatccaagagtgtacttgggacggggagcgactttttattacgctctaaacctcactatttcataatggtggggttctttgtttgtgctcagcgaatagagccaaatgagtacggcgtttttatcctgt

SEQ ID NO: 30112 - DNA, 109 bp, Unknown; identical to SEQ ID NO: 30059
  Description of Unknown: RightRegion for integrase B4113 sequence

SEQ ID NO: 30113 - DNA, 260 bp, Unknown
  Description of Unknown: RightRegion for integrase B4114 sequence
gctcgcgctgtgattcaggagtgtacttgggacggggagcggctttttattacgctctaaacctcactatttcataatggtggggttaggacgcattcgaagagatgatttaattaagtctcttattgtaatctgcccggcacctgaagcatttgcatttctagtctccagactaaccagattatcaattcctgcaatctgaagctctgctgaatcctcaattgtaataattctttcatccttaggaataaaattggaaa

SEQ ID NO: 30114 - DNA, 109 bp, Unknown
  Description of Unknown: RightRegion for integrase B4115 sequence
gctcgcgctgtaattcaggagtgtacttgggacggagagcggctttttattacgctctaaacctcactattttataatggtggggttccggtctcatacgaagtgctga

SEQ ID NO: 30115 - DNA, 260 bp, Unknown
  Description of Unknown: RightRegion for integrase B4116 sequence
tataaaggcgtatctgtcgatgattttaatctgacagtgttcccgaaaatgcctttataatcacgaatgttatagtgcgtgtacaaacgaaatcttcggcggctatccgtggtatcacaacgaggaaattctctacaaaccgggcttcccgtgggcttgctcgaccgcatcccgtgcggatctgctctgcgacgggatactgggcgacattgacccgaatgattatgtcaacttctgctgtaacgaaacgctgaagaaca

SEQ ID NO: 30116 - DNA, 260 bp, Unknown
  Description of Unknown: RightRegion for integrase B4117 sequence
gctcgcgctgtgattcaggagtgtacttgggacggggagcggctttttattacgctctaaacctcactatttcataatggtggggctccggtctcatacgaagagccgtcctgataagatctcttattgtaattggagtaaccccatcggtatttgcatttctggtctcaagccttactatatttttagctcccagaagctgcagctccgctgagtcttcaattgtaataattctctcatcatcaggaatatattgtgac

SEQ ID NO: 30117 - DNA, 260 bp, Unknown
  Description of Unknown: RightRegion for integrase B4118 sequence
gtaaatgagaaagatgatatttgggtgacttttaaagatggcacagaaatcaaagcataaatggatatttggaaatgcaagagagaaacgacatggctttccgggaaaacggaatatagtatgttaatgtacagaatccatctattattaacttaagcttcacagttgataccccgctgatttatctttattagtaatccgcgaaataaaaatagtatgaactcattccgttttgtataataaaagtaaggaaaatccac

SEQ ID NO: 30118 - DNA, 260 bp, Unknown
  Description of Unknown: RightRegion for integrase B4119 sequence
acgatagtcgtcttgccttatggtttcgtacttgcgacccagattaaggataggctttgagcctgtcctttttcttttggtagtcggtagtccgttttaacgaattttccttatatatacatgtaatgcgagggagcgacgagattgcgctttgaatccctttactttttggaaaaatcttcttagtttttacgaactaccagtactaccagatagccaaaggccttgtaaatcaaggactttcttcggtagcaggctca

SEQ ID NO: 30119 - DNA, 109 bp, Unknown
  Description of Unknown: RightRegion for integrase B4120 sequence
gaaggagataaaatcacattcctgcttgatatcttcccaaaaatccaggaaaatacataatgataacatccatgtgccagttcttccgttcccacatcattcagcaccg

SEQ ID NO: 30120 - DNA, 260 bp, Unknown
  Description of Unknown: RightRegion for integrase B4121 sequence
cgaatggggaacgaagccacctttgtcttggatattttccccagaattcagccaaattaattaatgataacatctatgtacaaacgaactcagtcatctggaaatggtatccactattgtacatcagcttacccgggacctttccatggaggaaattgagaaatccggattcggaccgtattatatcgatcacacagtgggagtctggccacaggcagcaggtggcgtaccatttaatgcatgtgaatttcagagtaaag

SEQ ID NO: 30121 - DNA, 260 bp, Unknown
  Description of Unknown: RightRegion for integrase B4122 sequence
gctcgcgctgtaatccaggagtgtacttgggacggggagcggctttttattacgctctaaacctcactatttcataatggtggggttccggtctcatacgaagagccgtcctgataagatctcttattgtaattggagtaaccccatcggtatttgcatttcttgtctcaagccttactatatttttagctcccagaagctgcagctccgctgagtcttcaattgtaataattctctcatcatcaggaatatattgtgac

SEQ ID NO: 30122 - DNA, 260 bp, Unknown
  Description of Unknown: RightRegion for integrase B4123 sequence
cgtatagaattcagccgcgaaaacaacgacgaattcatactggacacgtatttgaagtgattcgattatttttttaaactatgtgggtatcatgtgtgtgcacctttgatagcgccatgatgatacctacctgattaaaaggaggaaatataaatgagagtagtgtggaaagatagcgcccaactggcgaataaacaagtgaagaaagaggttaagaaagtcgataagaagaatagtaaaactgcatagctgaagaaaaa

SEQ ID NO: 30123 - DNA, 260 bp, Unknown
  Description of Unknown: RightRegion for integrase B4124 sequence
gctcgcgctgtaattcaggagtgtacttgggacggggagcggctttttattacgctctaaacctcactatttcataatggtggggttccgcccgcaatataaaaaagtgaaagcaaatttacggaggtgtctttatgaatgtgatctatcgtgtgcacggtgctggtggcttctatatggaaacgcagagccaggaccaggctttccgagctgcccggcaggaagctgcgacatccggccagatggctctggtatccttt

SEQ ID NO: 30124 - DNA, 260 bp, Unknown
  Description of Unknown: RightRegion for integrase B4125 sequence
gctcgcgctgtgattcaggagtgtacttgggacggggagcggctttttattacgctctaaacctcactatttcataatggtggggttccgcccgcaatataaaaaagtgaatataaaataaaggaggtgattcagcgtggcttgtaaaattaaaacgctcctgcagtgcaagcactgcaggcatgatcttgagtttgcgacggtgtgtggtaatcgtcgtgtgccgcttctctggtgtccggactgcgatattttgtatc

SEQ ID NO: 30125 - DNA, 260 bp, Unknown
  Description of Unknown: RightRegion for integrase B4126 sequence
gtccacagcaaaaaggacatccgggtgaccttcaaggacggtaccgagatcaaagcataatcccatagacgcagaaacgcctctgaaccacatcggctcggaggcgttttttgttatctcattccccagagaaaacagtcaattttctttgtgctgcttatccagctataggacggcaaggctttgtcgaaggcatcgatgcattcttttccgttttgagttttaaggaagtctttataccacgcctcgattctcgcata

SEQ ID NO: 30126 - DNA, 260 bp, Unknown
  Description of Unknown: RightRegion for integrase B4127 sequence
cgcaaggggaatgaagccacctttgttttggatattttccccagaattcagtcaaattaattaatgataacatctatgtacaaacgaatcagctcatagctgttatcattttaattatgcaataaagctttgacaataccgtacaatgtgtggtattgtttcaatatgaaggaggtaacaattgtgaatattacagaaatgagaaattatataggagtctccagagcagagttctccaggcgctataacattccgctccg

SEQ ID NO: 30127 - DNA, 141 bp, Unknown
  Description of Unknown: RightRegion for integrase B4128 sequence
gctcgcgctgtaattcaggagtgtacttgggacggggagcggctttttattaagctctaaacctcactatttcataatggtgggggtccggtctcatacgaagtgctgacttaatcaaatctctgatggttacagcccctt

SEQ ID NO: 30128 - DNA, 260 bp, Unknown
  Description of Unknown: RightRegion for integrase B4129 sequence
cggatggggaacgaagccacctttgtcctggatattttccccagaattcaatcaaattaattaatgataacatctatgtacaaacgaatctgctcataaatgttatcattttaagaaagttattaagagacgaaaaattgctttcgaagaatgatgttgtgaggcagctgttagagcgagctgtcttagaagattcaaaaaaggaactctgtaacatagagttccttttttattcctttagattgcaatcaggtctttcc

SEQ ID NO: 30129 - DNA, 260 bp, Unknown
  Description of Unknown: RightRegion for integrase B4130 sequence
gctcgcgctgtaattcaggagtgtacttgggacggggagcggctttttattacgctctaaacctcactatttcataatggtggggttccggtctcatacgaagagccgtcctgataagatctcttattgtaattggagtaaccccatcggtatttgcatttctggtctcaagccttactatatttttagctcccagaagctgcagctccgctgagtcttcaattgtaataattctctcatcatcaggaatatattgtgac

SEQ ID NO: 30130 - DNA, 260 bp, Unknown
  Description of Unknown: RightRegion for integrase B4131 sequence
gctcgcgctgtaattcaggagtgtacttgggacggggagcggctttttattacgctctaaacctcactatttcataatggtggggttcggccgcatacgcaaagctgcgcggatcagatcgcggatcgtaatttctgttcctgattccagatttgcctcttttgcttccagccgcaccagattctccacaccctggatctgcagctctgcattgtcttcgatggttatgatgcgctcgccctttggaatgtagacggaaa

SEQ ID NO: 30131 - DNA, 109 bp, Unknown
  Description of Unknown: RightRegion for integrase B4132 sequence
gtggcgctttctggtggagctgatgggagtcgaacccatgtccgaaaagaaattagttagagtatctccgggcgcagtatgtttattggatttcccttggtgcgggcga

SEQ ID NO: 30132 - DNA, 109 bp, Unknown
  Description of Unknown: RightRegion for integrase B4133 sequence
aaagcagggatcgggcgatacatagagaatgttttttctctggaaatccaatataaatagccatatccaacgtatctgtacctatgaattagcccaccttgaaatgatt

SEQ ID NO: 30133 - DNA, 260 bp, Unknown
  Description of Unknown: RightRegion for integrase B4134 sequence
ggacaaccaaaatatgagcaatccctaatggtgggcagaaaagaaattaggcatatataacagaggtaaaacttgtggaaaactctacttatataacggaatatataagaaaaggcggagctttatgccccgccctccatttttcttattcctctaatttttctcctttcgcatatttagataacttgaagtaaatgtcgtgcctaatcaaggtcttgatgtagccctgcttgttctctatgcccttcaaaaactttagg

SEQ ID NO: 30134 - DNA, 260 bp, Unknown
  Description of Unknown: RightRegion for integrase B4135 sequence
gctcgcgctgtaattcaggagtgtacttgggacggggagcggctttttattacgctctaaacctcactatttcataatggtggggttccggcctcatacgaagggccgcccggatcagctctccgatcccgatctccccggctccctctgcattggcatcccgagtctccagacgtaccagattttcgatgtggtttaactgcagctccgccgcgtcttcgatcgtgatcacgcgctctccgggcgggataaactctgag

SEQ ID NO: 30135 - DNA, 260 bp, Unknown
  Description of Unknown: RightRegion for integrase B4136 sequence
aaagcagggatcgggcgatacatagagaatgttttttccctggaaatccaatataaatagccatatccaacatatctgtacctatgaattagcccaccttgaaatgattgctgctatcgtccggcagcttaccagaggtttaagtgcggaagaacttgaatccgctggttttgctccttactatgttgaccacactgccggaatctggccgcaggcggcaggtggtatcccgtttaatgcatgtgaatttcaaagcaaag

SEQ ID NO: 30136 - DNA, 109 bp, Unknown
  Description of Unknown: RightRegion for integrase B4137 sequence
gctcgcgctgtgattcaagagtgtacttgggacggggagcggctttttattacgctctaaacctcactattttataatggtggggttccggtctcatacgaagtgctga

SEQ ID NO: 30137 - DNA, 260 bp, Unknown
  Description of Unknown: RightRegion for integrase B4138 sequence
gctcgcgctgtgattcaggagtgtacttgggacggggagcggctttttattacgctctaaacctcactattttataatggtggggctccaggatcattgtaggggaagtaagaggggcagaggccttagatatgcttcaggctatgaatacaggccatcccggttctttatctaccggtcacggcaacagtccccaggatatgctttcaaggttggaagtaatggtgcttatgggagcagagctgcctttagatgcgatc

SEQ ID NO: 30138 - DNA, 188 bp, Unknown
  Description of Unknown: RightRegion for integrase B4139 sequence
gtattacacgaacctttttactttgtcggcggctttgccgtcacaatatggttcaggtaataccgacagaaaagaacggatattctcacttgttgagagtgtccgttctttctttatgtcctgcggattgtccacggactgtccgtggacaatctgcggacagtcacagaatgcagctattttcactt

SEQ ID NO: 30139 - DNA, 260 bp, Unknown
  Description of Unknown: RightRegion for integrase B4140 sequence
gctcgcgctgtgattcaggagtgtacttgggacggggagcggctttttattacgctctaaacctcactattttataatggtggggttccggtctcatacgaagagccgtcctgataagatctcttattgtaattggagtaaccccatcggtatttgcatttcttgtctcaagccttactatatttttagctcccagaagctgcaactccgctgagtcttcaattgtaataattctctcatcatcaggaatatattgtgac

SEQ ID NO: 30140 - DNA, 260 bp, Unknown
  Description of Unknown: RightRegion for integrase B4141 sequence
ttcgtttttgctcccgattgctccaccattcagttcgtacccgaacccaattctctatgagaaagggttcgggtactttttgtttcacaagatgttctctatgccgagagtatgcagaacggtaaacaggaacgaacaaaggcaggataccaccatcacggtgacaccctgccttttgtgttacaaggatattctgggggcgattgctgcgcacaaagcgccttaagcccctgtgtttgcttcggtcagcacaaaggtca

SEQ ID NO: 30141 - DNA, 260 bp, Unknown
  Description of Unknown: RightRegion for integrase B4142 sequence
ccgggaattggaagatatatagagaattctttcagattggagattttcttaaagctgtgaacccgctgtttatgggcatttaacatcatatccaagggttaggagctaatgaattaggacactttgaaatgatcagcacaatggttcatcagcttacaagaaatctttcaatggaacagattaagggaactccttttgaagcctactatgtagatcatacagcagccgtatggcctcaggccgctggtggaattccattc

SEQ ID NO: 30142 - DNA, 260 bp, Unknown
  Description of Unknown: RightRegion for integrase B4143 sequence
gtcatcccgattggggatgggttcggatttcttctttttatctcaagtattgtggtgtgataaccaaaatgaatgaaaggagacagatcggaatcactccgatagttgcagaaagtactttataaccgacaccacaaggatgcgaggaacacaatgaacatgcaatccatatgctgaagcgcccgatcgagcaggccgagtgccccatgcgcgggagagcgcaaagcgccattcctaaccaatagggcaagagtcatctt

SEQ ID NO: 30143 - DNA, 260 bp, Unknown
  Description of Unknown: RightRegion for integrase B4144 sequence
gctcgcgctgtgattcaggagtgtacttgggacggggagcggctttttattacgctctaaacctcactatttcataatggtggggttccgcccgcatgataaaaaagtgaaagtaaatttacggaggtgtctttatgaatgtgatctatcgtgtgcacggtgctggtggcttctatatggaaacgcagagccaggaccaggctttccgagctgcccggcaggaagctgcggaatccggccagatgactctggtatctttt

SEQ ID NO: 30144 - DNA, 139 bp, Unknown
  Description of Unknown: RightRegion for integrase B4145 sequence
cggatggggaacgaagccacctttgtcctggatattttccccagaattcagtcaaattaattaatgataacatctatgtacaaacgaactcagtcatctggaaatggtatccactattgtacatcagcttacccgggac

SEQ ID NO: 30145 - DNA, 260 bp, Unknown
  Description of Unknown: RightRegion for integrase B4146 sequence
gggaaaggaaacgagattggttttcagctagacattttcccaaaaattcaagaaaaatgattaatgatatcttctatgtgctgacgaactggctcattgatgttatcattaattcagaaaagaaactcccggggaattaaccccgggatatttttatgcttttgcaagtacttaaatagcgatcaaatctttccaagtgttctcgccacactctccgtctaccaccagtactccatttctggacttctggtactgcttta

SEQ ID NO: 30146 - DNA, 260 bp, Unknown
  Description of Unknown: RightRegion for integrase B4147 sequence
gctcgcgctgtgattcaggagtgtacttgggacggggagcggctttttattacgctctaaacctcactatttcataatggtggggttctgcaagctttggtatggatatgctgacctgtatcgttccttttccgcttctggctccatctttatatgctttctgtacagattcgtcatggggatataccctggaacctttcggaagatccacaatctctccgcctcgttcagagatctgtaccagaccgcctttccagttc

SEQ ID NO: 30147 - DNA, 260 bp, Unknown
  Description of Unknown: RightRegion for integrase B4148 sequence
gctcgcgctgtgattcaggagtgtacttgggacggggagcggctttttattacgctctaaacctcactatttcataatggtggggtccggccgcattcgcaaagatgccttaatcaagtcctgcatagtaatctcattctctccctccatgtttgcattcctcgtttctagtcgaacaagattctctacatgaaaaagctggagttctgctgaatcctctatcgtaatcactcttttcctcttccctatatattctgcaa

SEQ ID NO: 30148 - DNA, 260 bp, Unknown
  Description of Unknown: RightRegion for integrase B4149 sequence
tttcatgataagttcgctgttgaattcaaatcaggagtcgagattgatgtagaagggtaatctttagaaagagaacagaagaattatattggatttttaaagataatatgatataataaaacgacttggaggtggaagaatgtataacttttcttgctaattatatgatgcataataagatatttaaagaaacggctatagaaccgtttgttttgttatgcaaattgcaagaaagttaagtattctacactcaataatac

SEQ ID NO: 30149 - DNA, 260 bp, Unknown
  Description of Unknown: RightRegion for integrase B4150 sequence
aagattgagttcagccgcgaaaataaccacgaatttatactagatatcaacctacgctaactcgcgtgggttactctataaccaccatctctatcatccgtatgatataaaagagtcatcgtgatgatagagaactaaaatataaaggagaaatcatcatgagaatcgtgtggaaagatagtaatgccagaactaaatcaaacataactacagaatatagagggtgtaagttatacggtagcgatgaaggatggacgata

SEQ ID NO: 30150 - DNA, 260 bp, Unknown
  Description of Unknown: RightRegion for integrase B4151 sequence
gctcgcgctgtgattcaggagtgtacttgggacggggagcggctttttattacgctctaaacctcactatttcataatggtggggttccgcccgcaatataaaaaagtgaatgtaaaataaaggaggtgattcagcgtggcttgtaaaattaaaacgctcctgcagtgcaagcactgcaggcatgatcttgagtttgcgacagtgtgcggtaatcgtcgtgtgccgcttctctggtgtccggactgcgatattttgtatc

SEQ ID NO: 30151 - DNA, 109 bp, Unknown
  Description of Unknown: RightRegion for integrase B4152 sequence
gtgaaagacgtaataaaaaaatgtgtatgggacggggagtccctttctattatgctttaaggctcacttttttatcatgcgtctttccggtctcattcgaagggctgac

SEQ ID NO: 30152 - DNA, 260 bp, Unknown
  Description of Unknown: RightRegion for integrase B4153 sequence
ggaagaggcaacgaaattaagtttgaacttgatattttccccaaaattcaagaaaaatgattaatgacatcttatatgtgccagttcttcggctcatagatgttatcagtaaataaaaaaagaaactcccggggaattaaccccgggatatttttatacttttttgatatcttttgcagccacaaatccgtagtacttgcctacaacgcggacataataccatgaagcaccgtttgttgctttctgggtgaaattcatca

SEQ ID NO: 30153 - DNA, 260 bp, Unknown
  Description of Unknown: RightRegion for integrase B4154 sequence
cgaatggggaacgaagccacctttgtcttggatattttccccagaattcagccaaattaattaatgataacatctatgtacaaacgaactcagtcatctggaaatggtatccactattgtacatcagcttacccgggacctttccatggaggaaattgagaaatccggatttggaccgtattatatcgatcacacagtgggagtctggccacaggcagcaggtggcgtaccatttaatgcatgtgaatttcagagtaaag

SEQ ID NO: 30154 - DNA, 260 bp, Unknown
  Description of Unknown: RightRegion for integrase B4155 sequence
gcggacgggcagatagttgttatcgtcaagggcggggttgagattggtgtgggaggataatttctccatttatttatatgcatttggataaatgtgcaaaaaaatgtacatcacctatgctatactctttgtgtaagcaagacgagagggagatagtacgatgtatggtgcgaacaagaaaatgctcaatctgctgattttgagggtgctgcaggagcactcggatgcagatcatcggctgacgccgagcgggatcattc

SEQ ID NO: 30155 - DNA, 260 bp, Unknown
  Description of Unknown: RightRegion for integrase B4156 sequence
ttcgttttgactcctgattgctccaccatacagttcgtactcgaacccgattctttatgaaaaagggttcgggtacgttttttgtttatcggaggttttgcggaaagagtacgcagagcggtaaacgaacaaaggcaggatatcactataagggtggtatcctgccttttgcttgtttgggaatttcgccttgttagaaaatttctggtctatgttgaaaaacctttctttttatgatataatcaatatgggtaaatata

SEQ ID NO: 30156 - DNA, 260 bp, Unknown
  Description of Unknown: RightRegion for integrase B4157 sequence
gtagggcgttttttattgcaatctttcaaagaaggttcaatctggtgcaccatcgggtgacgagaacagctcgggcccgccgccggtccggcgggcaaaaacgccccagtggggcgtttttagagcgcgggagagtccccgatggtgcaccagaaaaagccgcaacgaatgttgcggcttttttgttgcaccattcccttcgggacggactcgcacttcgcgcaagcgctcgtgttcgtctcgcggggactggtcgctaa

SEQ ID NO: 30157 - DNA, 260 bp, Unknown
  Description of Unknown: RightRegion for integrase B4158 sequence
gctcgcgctgtgattcaggagtgtacttgggacggggagcggctttttattacgctctaaacctcactatttcataatggtggggttccggtcgcattcgcagagatgctttgatcaggtcacgaattgtaatttcatttgcatccttcgagtttgcctttttcgtctccatgcgcaccaggtttggaatatttttgatctgaagttcagcggaatcctctatggtgattacacgttcccacggctgtatgtaattcgac

SEQ ID NO: 30158 - DNA, 109 bp, Unknown; identical to SEQ ID NO: 30030
  Description of Unknown: RightRegion for integrase B4159 sequence

SEQ ID NO: 30159 - DNA, 260 bp, Unknown
  Description of Unknown: RightRegion for integrase B4160 sequence
ggacatgggaatgaggccaattttgagctagacattttcccgaaaatccaagaaaaataattaatgatatcttctatgtactgacgaactggctcattgatgttgtcattaattaaaaaaagaaattcccggggaattaaccccgggatatttttatacttttttgatatattttgcggaaacaaatccgaaatattttccggctatgcggatgtaataccaagatgcgccgtctttggatttctgagtgaagttcataa

SEQ ID NO: 30160 - DNA, 139 bp, Unknown
  Description of Unknown: RightRegion for integrase B4161 sequence
cgcaaggggaatgaagccacctttgttttggatattttccccagaattcaatcaaattaattaatgataacatctatgtacaaacgaactcagtcatctggaaatggtatccactattgtacatcagcttacccgggac

SEQ ID NO: 30161 - DNA, 260 bp, Unknown
  Description of Unknown: RightRegion for integrase B4162 sequence
gctcgcgctgtgattcaggagtgtacttgggacggggagcggctttttattacgctctaaacctcactatttcataatggtggggttccgcccgctttataaaaaagtgaatataaaataaaggaggtctttttatgattttgtgttttgaattatcaatgccgtatgcggcaagctggaacggcaaatggtccggagcggatcagggacgctacattttcaaaacgtcccaggctgcttctatggtgaagctgttctct

SEQ ID NO: 30162 - DNA, 260 bp, Unknown
  Description of Unknown: RightRegion for integrase B4163 sequence
gctcgcgctgtaattcaggagtgtacttgggacggagagcggctttttattacgctctaaacctcactattttataatggtggggttccggtctcatacgaagtgctgacttaatcaaatctctgatggttacagccccttctccttctgcattcggtccgcgtgcttctaagcgcaccagattctgaactccttgaatctgtaactctgcattatcctcgatcgtgatcaggcgttctccttttggtatatagttcgac

SEQ ID NO: 30163 - DNA, 109 bp, Unknown
  Description of Unknown: RightRegion for integrase B4164 sequence
gctcgcgctgtgattcaggagtgtacttgggacggggagcggctttttattaagctctaaacctcactatttcataatggtggggttccggccgcatccgcagagacga

SEQ ID NO: 30164 - DNA, 260 bp, Unknown
  Description of Unknown: RightRegion for integrase B4165 sequence
gggaagggcaacgagattggttttcagctagacattttcccgaaaatccaagaaaaataattaatgatatcttctatgtgctggcgaactagcccattgatgttatcagtaattaaataaaagaaattcccgggggaattaaccccgggataatttttactgctttttgatatattttgcagatacaaagccataatactttccagaaatacggacataataccacttactaccgtttttatctttctgggtaaaattca

SEQ ID NO: 30165 - DNA, 109 bp, Unknown; identical to SEQ ID NO: 30063
  Description of Unknown: RightRegion for integrase B4166 sequence

SEQ ID NO: 30166 - DNA, 260 bp, Unknown
  Description of Unknown: RightRegion for integrase B4167 sequence
ggcaaaggtaacgagattaattttgagctagacattttcccaaaaattcaagaaaaatgattaatgacatcttctatgtgccagttcgccagcacattcatgttatcattaattttaaaaagaaactcccggggaagtaaccccgggatatttttatactctctgaatatctttcacagccacaaatccgtagtacttgcctgcaatgcggacatagtaccatgaagcaccgtttactgctttctgagtgaaattcatca

SEQ ID NO: 30167 - DNA, 260 bp, Unknown
  Description of Unknown: RightRegion for integrase B4168 sequence
cgtatgagccacttagagtgcgatggaagggactcgaacccccggcctactgattcgtagagggcctttatatgagtttcggcgttttgggtcattgcagcttatgtagattcatcgtcatttttgtgtttgttcgtgcatggtcgtttcacttcttttcgattcgataaggcaaaaacaaggcactttccagagggcatataatcacataaaacggacaccgtgaagaaggcaaaaaagttgacggctcacgagggcgg

SEQ ID NO: 30168 - DNA, 141 bp, Unknown
  Description of Unknown: RightRegion for integrase B4169 sequence
gctcgcgctgtaattcaggagtgtacttgggacggggagcggctttttattacgctctaaacctcactatttcataatggtggggtttcggacgcatacgcaaagctgcgcggatcagatcgcggatcgtaatttctgttc

SEQ ID NO: 30169 - DNA, 260 bp, Unknown
  Description of Unknown: RightRegion for integrase B4170 sequence
gctcgcgctgtgattcaggagtgtacttggaacggggagcggcttcttattacgctctaaacctcactatttcataatggtggggttcggattgttccgtaaattcacaaaatctctgtgaaattacttttcatttctcagataatatacaaaggaatagatcatcggaataaatgtgaccgcaagtatgagcaccagacttatcggaaatgccgggatccacggctgaatggccagcagaagaatcaacacgccgcctg

SEQ ID NO: 30170 - DNA, 109 bp, Unknown
  Description of Unknown: RightRegion for integrase B4171 sequence
gctcgcgctgtgattcaggagtgtacttgggacggggagcggctttttattacgctctaaacctcactatttcataatggtggggttctggccgtgaacgtaatgccgc

SEQ ID NO: 30171 - DNA, 260 bp, Unknown
  Description of Unknown: RightRegion for integrase B4172 sequence
gcagcgcgttttttattgcaatctttcaaagaaggttcaatctggtgcaccatcgggtgacgagaacagctcgggcccgccgccggtccggcgggcaaaaacgccccagtggggcgtttttagagcgcgggagagtccccgatggtgcaccaagaaaagccgcaacgaatgttgcggcttttttgtcgcaccattccctccgggacggactcgcacttcgcgcaagcgctcgtgttcgtctcgcggtgactggtcgctaa

SEQ ID NO: 30172 - DNA, 260 bp, Unknown
  Description of Unknown: RightRegion for integrase B4173 sequence
tataaaggcgtgtctgtcgatgattttaatcttacagtgttcccgaaaatgcctttgtagtcataaatgttatagtgcgtgtatagatgaaatcttcggcggctatccgtggtatcacaacgaggaaattctctacaaaccgggcttcccgtgggcttgctcgaccgcatcccgtgcggatctgctctgcgacgggctactgggtgacatcgacccgaatgattatgtcaacttctgctgtaacgaaacgctgaagaaca

SEQ ID NO: 30173 - DNA, 109 bp, Unknown
  Description of Unknown: RightRegion for integrase B4174 sequence
gctcgcgctgtaattcaggagtgtacttgggacggggagcggctttttattacgctctaaacctcactattttataatggtggggttgggacgcatacgcaaggatgcc

SEQ ID NO: 30174 - DNA, 260 bp, Unknown
  Description of Unknown: RightRegion for integrase B4175 sequence
gctcgcgctgtgattcaggagtgtacttgggacggggagcggctttttattacgctctaaacctcactattttataatggtggggctccggccgcatacgcagagccgtgcggatcagatcccggatactaatttcctgtgcaccctgtccatttgccggacgcgtctcaagccgcaccagattttttatattgttcaactgaagttctgcagaatcttctatggtaatgacacgctccccctctggtatatattccgaa

SEQ ID NO: 30175 - DNA, 109 bp, Unknown
  Description of Unknown: RightRegion for integrase B4176 sequence
gctcgcgctgtgattcaggagtgtacttgggacggggagcggctttttattacgctctaaacctcactatttcataatggtggggttccggccgcatacgaagggccgc

SEQ ID NO: 30176 - DNA, 260 bp, Unknown
  Description of Unknown: RightRegion for integrase B4177 sequence
atgagagatatcttaaaagaatgtgtatgggatggatcagaactttccattgtactttaatactcacttttttattatgtttccgttccaaacgcataataaaaaagtgagtataaacaaaaatagaagcagataccattcattggtagtcgcttccatactgcaataatttagatatggcttcctatgcgaatatcatttccaaattcccttgacatccgcaagaatcagtattatacttcaagtaccttgtcaatgca

SEQ ID NO: 30177 - DNA, 260 bp, Unknown
  Description of Unknown: RightRegion for integrase B4178 sequence
aaagcggggatcgggcgatacatagagaatgttttttctctggaaatccaatataaatagccatatccaacgtatctgtacctatgaattggcccatctcgaaatgattgccgccatcgtccgccagctcaccaaaggcttaagtgctgaagaacttgaggccgccggtttcgctccttactatgtcgatcacacggccgggatctggccgcaggcagccggcggtattccgtttaatgcctgtgaattccagagcaaag

SEQ ID NO: 30178 - DNA, 87 bp, Unknown; identical to SEQ ID NO: 30057
  Description of Unknown: RightRegion for integrase B4179 sequence

SEQ ID NO: 30179 - DNA, 260 bp, Unknown
  Description of Unknown: RightRegion for integrase B4180 sequence
atctctttgatatggaatttctgccccagctcatcgatgaagttttcgataaaaccatagtggacaacattgccctccgtagttttcagatagccctgccgctcccacacatcgtaaggaacatgatcacgccttacacggagaggcaatgtttcctcaggcaaccagaagtaaggcataacgtagtaatgttcatcttcttccgttggcggaaacaccaaaacaaatgctgtaatatccgttgtgctggaaaggtcaag

SEQ ID NO: 30180 - DNA, 260 bp, Unknown
  Description of Unknown: RightRegion for integrase B4181 sequence
gatgacgaggcgtcatgtgttcgtcttagctccactttgagccaccaaaatccgcactgaaaagtgcggatttttgctttatccgaactttttgaagaagaaccgaggctgccgacgcggcgtgtttttgcacaggcaggcttgatttttcttcgtttcacgcggctgtcgtccgcaccgtaaggtcaaggcaacttgggctgatgtcctccactcagcgacattgacgccaaccctgacgccaacggcgatgggacgaa

SEQ ID NO: 30181 - DNA, 109 bp, Unknown; identical to SEQ ID NO: 30025
  Description of Unknown: RightRegion for integrase B4182 sequence

SEQ ID NO: 30182 - DNA, 109 bp, Unknown
  Description of Unknown: RightRegion for integrase B4183 sequence
ccgggaataggaagatatatagagaattctttcagattggagattttcttaaagctgtgaacccgctgtttatgggcatttaatatcatatccaatggttaggagctaa

SEQ ID NO: 30183 - DNA, 260 bp, Unknown
  Description of Unknown: RightRegion for integrase B4184 sequence
gctcgcgctgtgattcaggagtgtacttgggacggggagcggctttttattacgctctaaacctcactatttcataatggtggggttctggtctcattctaagactagactttattagttgtcttattgtaatttcattttttccttctacattggcatttctagcttctaatcttactagattttttacattcttaatttgcaactccgcagagtcctcaattgttattactctttcgtcatttggtataaagttggat

SEQ ID NO: 30184 - DNA, 109 bp, Unknown
  Description of Unknown: RightRegion for integrase B4185 sequence
gtcagtggtgacggttgcaaaggttcagcttttgcgccgtcaagcgcagttgatttatgaaagagcatcgaagacttaaagttttcgatgcttttttgctcttgcacat

SEQ ID NO: 30185 - DNA, 260 bp, Unknown; identical to SEQ ID NO: 30048
  Description of Unknown: RightRegion for integrase B4186 sequence

SEQ ID NO: 30186 - DNA, 260 bp, Unknown
  Description of Unknown: RightRegion for integrase B4187 sequence
gctcgcgctgtgattcaggagtgtgcttgggacggggagcggatttttattacgctctaaacctcactatttcataatggtggggttccggtctcatacgaagagccgtcctgataagatctcttattgtaattggagtaaccccatcggtatttgcatttctggtctcaagccttactatatttttagctcccagaagctgcagctccgctgagtcttcaattgtaataattctctcatcatcaggaatatattgtgac

SEQ ID NO: 30187 - DNA, 260 bp, Unknown; identical to SEQ ID NO: 30073
  Description of Unknown: RightRegion for integrase B4188 sequence

SEQ ID NO: 30188 - DNA, 260 bp, Unknown
  Description of Unknown: RightRegion for integrase B4189 sequence
ttcgttttgactcctgattgctccaccattggctcaaataagagttacaaacaccgttgatttcaaatcgaagtcaacggtgtttttgtgtttgtcagcaagcaagttcatcgctattctccaaatactgtgcaagatcaaagttgaagtccacatggatttggtatccgcgataaacttctaccctgcggataagctggctgacgatcatcttttttgcttcaaagctggcactatcgtacaggtctgcgtaagagatc

SEQ ID NO: 30189 - DNA, 260 bp, Unknown
  Description of Unknown: RightRegion for integrase B4190 sequence
gatagaatatctctaaagaatatagtgagacaagtccccactcctacaagcaaggtttaagaaatttcaatacataaatctaaaataaacatctatattttgagcaatgcttatatctttgcatttactcacaaaaaataggtgtttttttgagtttaggcacttaaatacactttaactaataaatatttaagttttttgcaaaaaaaagaagccgcccagctcaacagctgaacagctatagccccgctaatgcgggg

SEQ ID NO: 30190 - DNA, 260 bp, Unknown
  Description of Unknown: RightRegion for integrase B4191 sequence
gggaaaggcaacgagattggtttccagctagacattttcccaaaaattcaagaaaaatgattaatgatatcttctatgagctgacgaactggctcattgatgttatcagtaattataaaaagaaagtcccggggaattaaccccgggatattttttactgtttcttaatatattttgcagatacaaagccataatattttccagcaatgcgaatgtaataccacttactaccgtttttatctttctgggtaaaattcatt

SEQ ID NO: 30191 - DNA, 260 bp, Unknown
  Description of Unknown: RightRegion for integrase B4192 sequence
gctcgcgctgtaattcaggagtgtacttgggacggggagcggctttttattacgctctaagcctcactatttcataatggtggggctccaatacccgtcttgcagaatttaaatgttcacactctctgatgatcattcccttattactcatcgttttcccccttacgcactcactgttttatctctctgtaaagcggcattcggaatataaacggtttttcacctgccagcgccactacagcatcaccattccttagtct

SEQ ID NO: 30192 - DNA, 260 bp, Unknown
  Description of Unknown: RightRegion for integrase B4193 sequence
tataaaggcgtgtctgtcgatgattttaatcttacagtgttcccgaaaatgcctttgtagtcatgaatgttatagtgcgtgtatagatgagatcttcggcggctatccgtggtatcacaacgaggaaattctctacaaaccgggcttcccgtgggcttgctcgaccgcatcccgtgcggatctgctctgcgacgggatactgggtgacatcgacccgaatgattatgtcaacttctgctgtaacgaaacgctgaagaaca

SEQ ID NO: 30193 - DNA, 109 bp, Unknown; identical to SEQ ID NO: 30067
  Description of Unknown: RightRegion for integrase B4194 sequence

SEQ ID NO: 30194 - DNA, 260 bp, Unknown
  Description of Unknown: RightRegion for integrase B4195 sequence
gctcgcgctgtgattcaggagtgtacttgggacggggagcggctttttattacgctctaaacctcactatttcataatggtggggttccggccgcatccgcagagacgaacggatcagttcccggattccgatttctctgcatccttcggtattgccgttacgagtctctaaacgaaccagattcggaagaccctgcagctgtagttccgcactgtcttctatggtgatcacccgctcttccgccgaaatatagccggac

SEQ ID NO: 30195 - DNA, 260 bp, Unknown
  Description of Unknown: RightRegion for integrase B4196 sequence
gtgaaggacgttataaaaaaatgcgtatgggacggggagtccctttctattatgctttgatgctcacttttttatcttgcgtccttcaccccgcattgcaaaaaagtgaaatactaaaaaatggaaggaggcgttgtttatgccggctatctatcatgtgttcggatccggagatttctttctggaaaccatcagccagcgcgaggctgcactggccgctcaggacgtcgcaaacgaaaccggacagcctgcgtcggtga

SEQ ID NO: 30196 - DNA, 260 bp, Unknown
  Description of Unknown: RightRegion for integrase B4197 sequence
ttagttaagagaattgtatttcaaaaagatggacaaatcgatatcgaatatacaatctagccagtaaaatatacacttcttttgcgtacatctgttgatacattagtacataaaagaagtgtattatttacggcattttcctagaataattggaatcgatctataggctttccaaatgctccagcatagccatcttgaccgtttggaaaatagaaagaattttcacattctcttctaacatggataatatgtctcaacat

SEQ ID NO: 30197 - DNA, 140 bp, Unknown
  Description of Unknown: RightRegion for integrase B4198 sequence
gctcgcgctgtaattcaggagtgtacttgggacggggagcggctttttattacgctctaaacctcactatttcataatggtggggttccggtctcatacgaagagccgtcctgataagatctcttattgtaattggagta

SEQ ID NO: 30198 - DNA, 260 bp, Unknown
  Description of Unknown: RightRegion for integrase B4199 sequence
tacgatgagaaagttatcgtggaattcaaatccggcacaaatgtggatatccacaggtaaatacagttcagattattggcacctcgcttcggcggggtgttttttgttacaaaaaattcattgttgattcatctgctaatattgtaatttgttgggttctgtagtataataaattatccgatttgtgttagaactaacaagaattacgagcaggagcagcaaatatatgataaagaacaatattgaagtagatgtaaaag

SEQ ID NO: 30199 - DNA, 260 bp, Unknown
  Description of Unknown: RightRegion for integrase B4200 sequence
aaagcggggatcgggcgatacatagagaatgttttttccctggaaatccaatataaatagccatatccaacgtatctgtacctatgaattagcccacctcgaaatgattgccgccatcgtccgccagctcaccaaaggcttaagtgctgaagaacttgaggccgccggtttcgctccttactatgtcgatcacacggccgggatctggccgcaggcagccggcggtattccgtttaatgcctgtgaattccagagcaaag

SEQ ID NO: 30200 - DNA, 109 bp, Unknown
  Description of Unknown: RightRegion for integrase B4201 sequence
gctcgcgctgtaattcaggagtgtacttgggacggggagcggctttttattacgctctaaacctcactatttcataatggtggggttccggccgcatccgcagagacga

SEQ ID NO: 30201 - DNA, 260 bp, Unknown
  Description of Unknown: RightRegion for integrase B4202 sequence
gccggtgcaggtcggtggatagacaatgtattttctcttgatatttttctaaatctttaatttccaacatcaatgtgcatatgagctggcgcattgatgttggatattattataccaatttcttaaaagacagattaccgttatctcttggaaggaaggcgaactgtccaagccttagagagttagtgtattcaccatctgtgacatacagcttgttattgctaaaatatgccacttctgcattactctgaagaaatgat

SEQ ID NO: 30202 - DNA, 109 bp, Unknown; identical to SEQ ID NO: 30059
  Description of Unknown: RightRegion for integrase B4203 sequence

SEQ ID NO: 30203 - DNA, 260 bp, Unknown
  Description of Unknown: RightRegion for integrase B4204 sequence
gctcgcgctgtaattcaggagtgtacttgggacggggagcggctttttattacgctctaaacctcactatttcataatggtggggttcaggacgcattcgaagagatgatttaattaagtctcttattgtaacctgcccggcacctgaagcatttgcatttctagtctccagactaaccagattatcaattcctgtaatctgaagctctgctgaatcctcaattgtaataattctttcatccttaggaataaaattggaa

SEQ ID NO: 30204 - DNA, 260 bp, Unknown; identical to SEQ ID NO: 30101
  Description of Unknown: RightRegion for integrase B4205 sequence

SEQ ID NO: 30205 - DNA, 109 bp, Unknown
  Description of Unknown: RightRegion for integrase B4206 sequence
aaagcggggattgggcgatacatagagaatgttttttccctggaaatccaatataaatagccatatccaacgtatctgtacctatgaattagcccaccttgaaatgatt

SEQ ID NO: 30206 - DNA, 260 bp, Unknown; identical to SEQ ID NO: 30073
  Description of Unknown: RightRegion for integrase B4207 sequence

SEQ ID NO: 30207 - DNA, 260 bp, Unknown
  Description of Unknown: RightRegion for integrase B4208 sequence
acttgcatcgttagggtatcgaaaaactggtttgttgtcgttggcacgtgtcaaaaatagcaatttccggtgtttgcaaaacaccagatgggcggcttgctgtaagcccgtctaacgccagaaagcggggcaccccttgtcagggtaccccgcttgaacactaataagaaagcttctggccggggtagatcgtataaggtgccccaatgccgttcttgcttgcgatggtgtgccagtcgataccgagcgaagcgccaatc

SEQ ID NO: 30208 - DNA, 109 bp, Unknown
  Description of Unknown: RightRegion for integrase B4209 sequence
gctcgcgctgtaattcaggaatgtacttgggacggggagcggctttttattacgctctaaacgtcactatttcataatggtggggctctggtctcatacgaagagccgt

SEQ ID NO: 30209 - DNA, 260 bp, Unknown
  Description of Unknown: RightRegion for integrase B4210 sequence
ttcgttttgactcctgattgctccaccatacagttcgtactcgaacccgattctctatgagaaagggttcgggtacgttttttgtttacaggaagttctgcggagggagtacgtagaacggtaagcaggagcaagtaaaggcagggtatcaccatggcggtggtgccctgcctttttgctttgtatttccctatattgcgcttttcggactaatcgctgcgtacatccgtacatggtcggtacgcacgtacgcaggaaaa

SEQ ID NO: 30210 - DNA, 260 bp, Unknown; identical to SEQ ID NO: 29017
  Description of Unknown: RightRegion for integrase B4211 sequence

SEQ ID NO: 30211 - DNA, 260 bp, Unknown; identical to SEQ ID NO: 29806
  Description of Unknown: RightRegion for integrase B4212 sequence

SEQ ID NO: 30212 - DNA, 260 bp, Unknown
  Description of Unknown: RightRegion for integrase B4213 sequence
cagaaattggagcgctctggccaaaagatagccaatcggaaccactcggcacaaaaataaaccccggggctcacgccccggggttccatcttagttggcccatccttaggccgccttcatcttactacgggagggcgccctcgatgacgacgtgagtgctcggcggcacgcggtcgcagacctccaccaccacgcggcgcatggggagcgtgcgggtcggctgggcggacgccacgagcgcggagagcgcggcggcctcg

SEQ ID NO: 30213 - DNA, 260 bp, Unknown
  Description of Unknown: RightRegion for integrase B4214 sequence
acttgcatagttagagtatcgaaaaactggtttgttgtcgttggcacgtgccaaaaatagcaatttccggtgtttgcaaaacaccagatgggcggcttgctgtaagcccgtctaacgccagaaagcggggcacccattgtcagggtaccccgcttgaacactaataagaaagcttctggccggggtagatcgtataaggtgccccaatgccgttcttgcttgcgatggtgtgccagtcgataccgagcgaagcgccaatc

SEQ ID NO: 30214 - DNA, 260 bp, Unknown
  Description of Unknown: RightRegion for integrase B4215 sequence
tctttttgtgcgaccgggaggattcgaacagcaacgacgacgaccgcagccagcggctgaaacagggaggagttgttggggccgcgttctgatttttcaaagccctgccaaggggctgcagaaaaatcagcaaacgcaacccgtaaggccctgaccaccagattccgctgcggtgcccaacctgtaggaatgtctaccgggaggctgctgcttattttgcttcacccaataattcccctttcgtagtaacaacggataac

SEQ ID NO: 30215 - DNA, 260 bp, Unknown
  Description of Unknown: RightRegion for integrase B4216 sequence
ttcgacgatcacttcatagtcgtcttcaagtcaggcctggagacacaaatcgacttatagcatgatgaaaaggcgcatccttcgagggtgcgcctttttttattgcaatggaatgttttcctctatataatacattatataaggaccaaataacaggagtgtagagacgatacgttcgatgggactttcattaagaaaacggcgagtctgctgataattacagcgaaatttgccgaagagtagcattggcttgagccatg

SEQ ID NO: 30216 - DNA, 260 bp, Unknown
  Description of Unknown: RightRegion for integrase B4217 sequence
tactttcttaaaggcgatgagattacttttttattggatatattcccgaaaattcaatgaaaattaactactgataacatctatgtgccagttcctctgtgccgatatcattcagcactgccgcagccatgcggtttggcatggtaaacctctgagacaggtacctcatagatgccccaatctcaccatccgggccaccgtactggctgaggatatactgtgcaatctttgcattcggtttggtaatatttaccggatac

SEQ ID NO: 30217 - DNA, 260 bp, Unknown
  Description of Unknown: RightRegion for integrase B4218 sequence
ggaacggtcgatacccctactttcgaacttacattaaagcctcgaatccctcggatttaggggcttttcttttactgataacatttttgtcccaacgaactggctcaccttgaaatcatctgtgccattgtgcatcagcttacccgtaatcttacaccagaacaaattgaaaaatccggcttcgacaaatattatgtagaccacacactcgcactctggcctcaggctgccagcggaactccttggagtgctacaacatt

SEQ ID NO: 30218 - DNA, 140 bp, Unknown
  Description of Unknown: RightRegion for integrase B4219 sequence
aaaaatggtgatgacatctcttttactttagatatttatccgaaaatccagcaaaagtaagtgtaggtagcctttatgtacctacacattggcacgtatcgtgtcctccggccaagttgcgtagatctcactgctggcca

SEQ ID NO: 30219 - DNA, 260 bp, Unknown
  Description of Unknown: RightRegion for integrase B4220 sequence
ggaatggcagatattcctacatttgagcttgtgctgaagcctcgaatcccccggatttaggggcttttctcttactgataacatttttgtaccggcgaactggctcaccttgaaatcatctgtgccattgtgcatcagcttacccgtaatcttacaccagaacaaattgaaaaatccggcttcgacaaatattatgtagaccacacactcgcactctggcctcaggctgccagcggaactccttggagtgctacaacatt

SEQ ID NO: 30220 - DNA, 109 bp, Unknown
  Description of Unknown: RightRegion for integrase B4221 sequence
aaaaatggcgatgacatctcttttactttagatatttatccgaaaatccagcaaaagtaagtgtaggtagcctttatgtacctacacattggcacgtatcgtgtcctcc

SEQ ID NO: 30221 - DNA, 260 bp, Unknown
  Description of Unknown: RightRegion for integrase B4222 sequence
gtatcaagggataagaaactaacatttaagtttagaaacggcaaggaaatagaagtataagaaattagataagtattgaccttcatcagaaatggtgggggttttttgcaaatgcaaagaaatgcaacttgcattaattgacaaatgcaataagtttttttataattatgttatcttgataatcgaggtaaataattatggagtatgaaaaaataatattagaacttatggaaagagtcgcaaaactcgaagaaagggta

SEQ ID NO: 30222 - DNA, 260 bp, Unknown
  Description of Unknown: RightRegion for integrase B4223 sequence
cgcctcataaacgggctggaactgacaggctcggagggaaacagcgatggcgagaaatagatgtctgccctttggatacaggttggaaaacggagaaatcgtgatatgcgcttccgaagccgagtgcgtaaagaacgcatatgcttcctatgctgatggcatctcctacgcctccatcgcagtaactctgcaggccacaggcatccgctatcacccagatacgccgctttggaataagcacatggttaaacgcatgctgg

SEQ ID NO: 30223 - DNA, 260 bp, Unknown
  Description of Unknown: RightRegion for integrase B4224 sequence
cacatcgatttcagccgcgagaacaacgccgagtttatattagacgtctatctcaagtgagatgggcgcatggtcggagccgagtatgtcagtgtgaatttcggctgatctgatgcactctcgcgcgaaatcggacacgaggaagtagtccagacgccaaccgatattccgagcccttgcacccgctcgatagctccaccagctatactttgcttcatcagggtgcaggtcgcggaacgtgtcggtataccctgcctcca

SEQ ID NO: 30224 - DNA, 109 bp, Unknown
  Description of Unknown: RightRegion for integrase B4225 sequence
gctgtcagtggtgacggttgcaaaggttcagcttttgcgccgtcaagcgcatataactaagatacagaagcctttgatatacaagggtttctgtatttttttattttca

SEQ ID NO: 30225 - DNA, 260 bp, Unknown
  Description of Unknown: RightRegion for integrase B4226 sequence
attgaatttagtagagaaagtgatttagaatttatattagacatagacttacatcaataaatcatagacccaccatagtgtgggctatcttttaccccgcgtatatatcatcatggtgcagtttttataacaccctaatgatatataccttgtggcaacagtgtagaaaccttgatatatcaacatttaggaggaattgtaaaatgagaatagtatggaaagacagtgttaacaacgaatataaaccgtcaagatataga

SEQ ID NO: 30226 - DNA, 260 bp, Unknown
  Description of Unknown: RightRegion for integrase B4227 sequence
gaggggttcggccttggtgcatcaagctccaccaaacagttcaaaatccgaaccctttaaccggggttcggatttttcgttcttatcttcaaccaaggctatcggacggaaatagatgcaaaatcgcatttcatttcagaccgattttcgtagatttaaatttttatatgacacgcaaataaacagaaatctgtctctgggtttattgcttatagattaatttcccaacgattttgggtaatgtaaagtcgagtggcgga

SEQ ID NO: 30227 - DNA, 260 bp, Unknown; identical to SEQ ID NO: 30212
  Description of Unknown: RightRegion for integrase B4228 sequence

SEQ ID NO: 30228 - DNA, 260 bp, Unknown
  Description of Unknown: RightRegion for integrase B4229 sequence
attgaattcagtcgtgaaaatgatatagaattcatattagacatagacctacaccaataaagtgtgggttagcttttacccttcgtgtatatcattatggtgttatttttatagcgccccaatgatatacacgttggcaaaacaacgtttggaggaaatataaatgagaatagtatggaaagatacagcagtagaaagagcagacttcaaataccgtggatattggattgagggttataagaatggttggaccgtaacga

SEQ ID NO: 30229 - DNA, 109 bp, Unknown
  Description of Unknown: RightRegion for integrase B4230 sequence
aaaaatggtgatgatgtttcttttactttagatatttacccaaaaatacagcaaaaataagtgtgggtagcctttatgtgcccacacatttgcgcgtattgtatcatcc

SEQ ID NO: 30230 - DNA, 260 bp, Unknown
  Description of Unknown: RightRegion for integrase B4231 sequence
agactgaggttttacccgtattattttgaagaaacttttatttttacacaagcaagctaataaaaaatagataggcaaaagcctatctattttttatttatcttctcttttcatctgagcaagccagatatcaaatacctttccttccggagcatcaggatcatgcatataagcctttgccatttttacataggtacttgcttcactgcccagaacatcagagaaatcactgtaaagcatattcatagtataataaaagt

SEQ ID NO: 30231 - DNA, 260 bp, Unknown
  Description of Unknown: RightRegion for integrase B4232 sequence
aaaaacggtgatgatgtttcttttactttagatatttatccgaaaatccagcacaaataagtgtgggtagcctttatgcgcccacacattggcacgtatcgtgtcctccggccaagttgcgtagatctcactgctggccacgtttttgatataatccttatatcttacataataatcctgtgcagaggtatcccctattggcccgtcgtggactacgatatactccgggatcaccactttgtttaatacgatctctccgg

SEQ ID NO: 30232 - DNA, 260 bp, Unknown
  Description of Unknown: RightRegion for integrase B4233 sequence
attttacttgtaagctgtagcgtgttcggttttgtacaaaagatagcggacagggtttgaaaccctgcccgctttttcttttttattttgaaaaagctattgacatttaaacgatttcgtattataataatatcgtagtcaaggggcgcgcacctccaacagaagggaggtgaggccaatgcgaaaaaagctgcttcaatacataatctgtatagctgttctattcctgcttgcggtgattttcgccgtcaaagtaaaat

SEQ ID NO: 30233 - DNA, 260 bp, Unknown
  Description of Unknown: RightRegion for integrase B4234 sequence
aaaaatggcgatgacatctcttttactttagatatttatccgaaaatccagcaaaagtaagtgtgggtagcctttatgtacctacacattggcacgtatcgtgtcctccggccaagttgcgtagatctcactgctggccacgtttttgatataatccttatatcttacataataatcctgtgcagaggtatcccctattggcccgtcgtggactacgatatactccgggatcaccactttgtttaatacgatctcgccgg

SEQ ID NO: 30234 - DNA, 260 bp, Unknown
  Description of Unknown: RightRegion for integrase B4235 sequence
ataaaagcacccgccgtaccccggcgggtgtttttgctttggtgctccgtgagctgctgaggagtcaaacagggcggcagtaccgcagtaccagcccgatggccgatgcggaacgcggatgccgtgcgttcgtcatcctcggtggaatcactctcattataccagtggtttgcccggtgtttgaatgccctgcgaatagccgcctgcccctcatacagggcaggcataaaaaaatacggtgtgcgtgcatcgtggtttca

SEQ ID NO: 30235 - DNA, 75 bp, Unknown
  Description of Unknown: RightRegion for integrase B4236 sequence
gttcgtatgagccacttagagtgcacctccagggactcgaaccctgggcccactgattaagagtcagttgctcta

SEQ ID NO: 30236 - DNA, 260 bp, Unknown
  Description of Unknown: RightRegion for integrase B4237 sequence
attgaattcagccgtgagaataacggtgagttcatactagatatagacctacaccaatgagtgtgggttcctctttgagccacgtttatatcattagggcgctatttttacaacaccctcatgatatataccttgtctgaactaagaagaaaccttgatatatcaacttttaggaggaattataaaatgagaatcgtatggaaagacactgctgttgctagagctgattttaaatatagagggtactgggttgaaggtta

SEQ ID NO: 30237 - DNA, 260 bp, Unknown
  Description of Unknown: RightRegion for integrase B4238 sequence
ataaaagcacccgccgtaccccggcgggtgtttttgttttggtgctccgtgagctgctgaggagtcgaacagggcagcagtaccgcagtaccagcccgatggccgatgcggaacgcggatgccgtgcgttcgtcatcctcggtggaatcactctcattataccagtggtttgcccggtgtttgaatgccctgcgaacagcccgcctgcccctcatacagggcaggcataaaaaaccacggtgcgtgtgcatcgtggtttc

SEQ ID NO: 30238 - DNA, 260 bp, Unknown
  Description of Unknown: RightRegion for integrase B4239 sequence
gtgtacagcaaagacgatatccgggtgaccttcaaggacgggacggaaatcagagcataagcaggaaaaaaggattacggcagagaatccaagaggaaacgcaggattctctgccgtatttttgatgaagaaaatcggaatatgatataatagtaagggtttcaggtgtgcgaagtttgagtgagatataaatgtttggcgaaatatttttgcgtgatggccctctctgcccatcggcaataccgatgctatcaagcccc

SEQ ID NO: 30239 - DNA, 260 bp, Unknown
  Description of Unknown: RightRegion for integrase B4240 sequence
ggaacggtcgatacccctacttttgaacttacattaaagcctcgaatcccccggatttaggggcttttcttttactgataacatttttgtaccaacgaactggctcaccttgaaatcatctgtgccattgtgcatcagcttacccgtaatcttacaccagaacaaattgaaaaatccggcttcgacaaatattatgtagaccacacactcgcactctggcctcaggctgccagcggaactccttggagtgctacaacatt

SEQ ID NO: 30240 - DNA, 260 bp, Unknown
  Description of Unknown: RightRegion for integrase B4241 sequence
ggaacggtcgatacccctacttttgaacttacattaaagcctcgaatcccccggatttaggggcttttcttttactgataccatttttgtaccaacgaatttgcccatatggaaatcgtatgcgccattgtacaccagctcacacgcaatctgactccggaacagcttgaaaaatccggttttgataaatattatgttgaccatacacttgctctttggccacaggctgccagtggaactccttggagtgctacaacttt

SEQ ID NO: 30241 - DNA, 260 bp, Unknown
  Description of Unknown: RightRegion for integrase B4242 sequence
atacaaactaaagacggaatcattaggggtgatatagaaattgaaatcatcctaaaataattatgtacccctgtaacatcatgatggttctcattcatgcgtgagagtttctacatcggaactggtttgattgaagttcgcaaagataaacggtgcaccatatacatcaaaagatgtgcaatatccaccggcagccttacccggcttactttccagatccattagtttatgatctaccataaattgaaagaattcgccgg

SEQ ID NO: 30242 - DNA, 74 bp, Unknown
  Description of Unknown: RightRegion for integrase B4243 sequence
gttcgtatgagccacttagagtgcacctccagggactcgaaccctgggcccactgattaagagtcagttgctct

SEQ ID NO: 30243 - DNA, 260 bp, Unknown
  Description of Unknown: RightRegion for integrase B4244 sequence
aaccaaatacttattattggtttggttctggttcagacaaggaagcatcttatggtttagtgccgtaaggtgcttttgcttttcatatcaacaaagagaatgccccgcgctgttacagtgcagggcattctctttgttggaataaatctccaactaggattgttagcatttcctagtatacccgactattccaatcattgcaaccacattccaaatttgcttcaaacttgcttcaaactttctgcttaccgctaccaagc

SEQ ID NO: 30244 - DNA, 260 bp, Unknown
  Description of Unknown: RightRegion for integrase B4245 sequence
aaaaatggtgatgatgtttcttttactttagatatttacccaaaaatacagcaaaaataagtgtgggtagcctttatgtgcccacacatttgcgcgtattgtatcatccggccaggtagcgtagatctcgctgctggccacatttttgatataatctttgtaacgtacataatagttctgcgcattagtatctcctaccggtccatcatggactacgatatactccgggatcaccacccggcttaaaacaatctctccgg

SEQ ID NO: 30245 - DNA, 260 bp, Unknown
  Description of Unknown: RightRegion for integrase B4246 sequence
acctgcattgtaagggtatcgaaaaactggtttgttgtcgttggaacgtgccagaaatagccatttccggtgtttgcaaaataccagatgggcggcttgctgtaagcccgtctaacgccagaaagcggggcaccccttgtcagggtgccccgcttgaacgctaataagaaagcttctggccggggtagatcgtataaggtgccccaatgccgttcttgcttgcgatggtgtgccagtcgatgccgagcgaagcgccaatc

SEQ ID NO: 30246 - DNA, 260 bp, Unknown
  Description of Unknown: RightRegion for integrase B4247 sequence
cacatcgatttcagccgcgagaacaacgccgagtttatattagacgtctatctcaagtgagatgggcgcatggtcggagccgagtatgtcagtgtgaatttcggctgatctgatgcactctcgcgcgaaatcggacacgaggaagtagtccagacgccagccgatattccgagcccttgcacccgctcgatagctccaccagctatacttcgcttcatcggggtgcaggtcgcggaacgtgtcggtataccctgcctcca

SEQ ID NO: 30247 - DNA, 260 bp, Unknown
  Description of Unknown: RightRegion for integrase B4248 sequence
ttcgcacaaggtcacgttgcctccaccaaacagttcgtactcgaacccgattctctatgagaaagggttcgggtacgttttttatttacaggaaatcctacggcgagagtacgcagaacggtaagcaaggacgagtaaaggcagggtatcaccatggcggtgtaccctgccttttactgtttacttggtataggggtggtctttcggttggcagtatggtatactcggctcagaaaatggtatcgccacactgaaataaa

SEQ ID NO: 30248 - DNA, 260 bp, Unknown
  Description of Unknown: RightRegion for integrase B4249 sequence
ataaaagcacccgccgtaccccggcgggtgcttttgttttggtgctccgtgagctgctgaggagtcgaacagggtggcagtaccgcagtaccagcccgatggccgatgcggaacgcggatgccgtgcgttcgtcatcctcggtggaatcaatctcattataccagtggtttgcccggtgtttgaatgccctgcgaacagcccgcctgcccctcatacagggcaggcataaaataccacggtgtgtgtgcatcgtgctttg

SEQ ID NO: 30249 - DNA, 109 bp, Unknown
  Description of Unknown: RightRegion for integrase B4250 sequence
gactttaagcgcggagatgaaatcactttcaccctggatatctaccccaaaatccaatagaaataccattgataacctctctgtaccgacgaactggcacacatggaaa

SEQ ID NO: 30250 - DNA, 260 bp, Unknown
  Description of Unknown: RightRegion for integrase B4251 sequence
gtacttcttttcgaaggtgcgttcggatttgttttttattttcccatcatgaaagtataaaatgtttattacagtgaggattagtgttgacaaaattggtaaaaatattataatggtatcatatgataccattgtatcggcggtgattatctgatgggttgcaatcacgttcagaagattctgagtgatatgagatatgcaattgataataagaagttttatccaataaataggcgtaaaaatttagatacattggctca

SEQ ID NO: 30251 - DNA, 260 bp, Unknown
  Description of Unknown: RightRegion for integrase B4252 sequence
ggaacggtcgatacccctacttttgaacttacattaaagcctcgaatcccccggatttaggggcttttcttttactgataccatttttgtaccaacgaactggctcaccttgaaatcatctgtgccattgtgcatcagcttacccgtaatcttacaccagaacaaattgaaaaatccggcttcgacaaatattatgtagaccacacactcgcactctggcctcaggctgccagcggaactccttggagtgctacaacatt

SEQ ID NO: 30252 - DNA, 260 bp, Unknown; identical to SEQ ID NO: 30239
  Description of Unknown: RightRegion for integrase B4253 sequence

SEQ ID NO: 30253 - DNA, 139 bp, Unknown
  Description of Unknown: RightRegion for integrase B4254 sequence
aaaaatggcgatgacatctcttttactttagatatttatccgaaaatccagcaaaagtaagtgtgggtagcctttatgtacctacaaatacggcatcatctcttcactctgtgtcggccatccgatatcattccagaac

SEQ ID NO: 30254 - DNA, 260 bp, Unknown; identical to SEQ ID NO: 30239
  Description of Unknown: RightRegion for integrase B4255 sequence

SEQ ID NO: 30255 - DNA, 260 bp, Unknown
  Description of Unknown: RightRegion for integrase B4256 sequence
ataaaagcacccgccgtaccccggcgggtgtttttgttttggtgctccgtgagctgctgaggagtcgaacagggcggcagtaccgcagtaccagcccgatggccgatgcggaacgcggatgccgtgcgttcgtcatcctcggtggatcactctcattataccagtggtttgcccggtgtttgaatgccctgcgaacagcccgcctgcccctcatacagggcaggcataaaaaaccacggtgcgtgtgcatcgtggtttca

SEQ ID NO: 30256 - DNA, 260 bp, Unknown
  Description of Unknown: RightRegion for integrase B4257 sequence
ttcgaacctatcaaaatgtatttgataggtcggttactgttctgtatgaaacaaatataattttaaaacaacggattttgtccgttgtttttttgttgcaaaatttttttaattttttttgaaaaaaggcttgacatttacgcccaatgggcgtataataaagacaagaaatgaggaaaacctcaaaataataaccaaaaacaataaattttaggaggacaaaacaatgaaaagatttcaagttgaaaattgtgtacaaa

SEQ ID NO: 30257 - DNA, 260 bp, Unknown
  Description of Unknown: RightRegion for integrase B4258 sequence
tgggatgaccgcatcaccgtcgaactgaaatccggcgtcagcattgatgtggatgcatgaccctataggtatgcaaaggctccccaccactggataatttccggtgatggggagcctttttttacagtgcaaagtttaaatgaaacaattcatttatagcgtttctaatattggcatcctctatcccataatgtttcatctgcatagcataaacaatatattctaagtatattaaatctaaaagagcaagtccaataaaa

SEQ ID NO: 30258 - DNA, 109 bp, Unknown
  Description of Unknown: RightRegion for integrase B4259 sequence
gctgtcagtggtgacggttgcaaaggttcagcttttgcgccgtcaagcgcattaaaataacaattaggtgtgataaagacggcggtatcgaaatataaagatgccgctg

SEQ ID NO: 30259 - DNA, 260 bp, Unknown
  Description of Unknown: RightRegion for integrase B4260 sequence
acgatagtcgttctgccttacggtttcgtacttgcgacccagattaaggataggctttgagcctgtcctttttcttttggtagtcggtagtccgttttaacgaattttccttatatatacatgtaatgcgagggagcgacgagattgtgctttgcgtccctttactttttggaaaaatcttttcaggttttacgaactaccagtactaccagatagccaaaagccttgcaaatcaaggactttcttcggtagcaggctca

SEQ ID NO: 30260 - DNA, 260 bp, Unknown
  Description of Unknown: RightRegion for integrase B4261 sequence
aggcttcgattttacccatattattttgaagaaacttttatttttacacaagcaagctaataaaaaatagataggcaaaagcctatctattttttatttatcttctcttttcatctgagcaagccagatatcaaatacctttccttccggagcatcaggatcatgcatataagcctttgccatttttacataggtacttgcttcactgcccagaacatcagagaaatcactgtaaagcatattcatagtataataaaagt

SEQ ID NO: 30261 - DNA, 260 bp, Unknown
  Description of Unknown: RightRegion for integrase B4262 sequence
cagaaattggagcgctctggccagaagatagccaatcggaaccactcggcacaaaaataaaccccggggctcacgccccggggttccatcttggttggcccatccttaggccgccttcatcttactacgggagggcgccctcgatgacgacgtgagtgctcggcggcacgcggtcgcagacctccaccgccacgcggcgcatggtgagcgtgcagggcggctgggcggacgccacgagcgcggccagggcggcggcctcc

SEQ ID NO: 30262 - DNA, 109 bp, Unknown
  Description of Unknown: RightRegion for integrase B4263 sequence
aaaaatggcgatgacatctcttttactttagatatttatccgaaaatccagcaaaagtaagtgtgggtagcctttatgcacccacacattggcacgtatcgtgtcctcc

SEQ ID NO: 30263 - DNA, 109 bp, Unknown
  Description of Unknown: RightRegion for integrase B4264 sequence
aaaaatggcgatgacatctcttttactttagatatttatccgaaaatccagcaaaagtaagtgtaggtagcctttatgtacctacacattagcccgtatcgtgtcctcc

SEQ ID NO: 30264 - DNA, 260 bp, Unknown
  Description of Unknown: RightRegion for integrase B4265 sequence
acttgcatcgttagagtatcgaaaaactggtttgttgtcgttggcacgtgtcaaaaatagcaatttctggtgtttgcaaaacaccagattggcggcttgctgtaagcccgtctaacgccagaaagcggggcaccccttgtcagggtaccccgcttgaacgctaataagaaagcttctggccggggtagatcgtataaggtgccccaatgccgttcttgcttgcgatggtgtgccagtcgatgccgagcgaagcgccaatc

SEQ ID NO: 30265 - DNA, 260 bp, Unknown
  Description of Unknown: RightRegion for integrase B4266 sequence
gagaataacgaggcaaagtgttcgtttaagctctgctctgctccaccaagaacgagttgatgaaagtcagctcgttctttttgttttgtagtggtttggaaaatgtaagcgatacgccagtggcgtatcagagccgctctgcggcctgcgtcgagatcacactttcgtcgttttaccacaaaagcaaaaatatcgagctgcccttaggctggctcgatattttctttctctctattttttgcgtgtccgtcctctttcgg

SEQ ID NO: 30266 - DNA, 260 bp, Unknown; identical to SEQ ID NO: 30239
  Description of Unknown: RightRegion for integrase B4267 sequence

SEQ ID NO: 30267 - DNA, 109 bp, Unknown
  Description of Unknown: RightRegion for integrase B4268 sequence
ttgtccgtaccgcggagaatcgaactctatgcagggcgcgggcgtaaagaaaacgcgtaagcgtttttagcccgcgggcgaggacgccggcaggcggccgaagccggtg

SEQ ID NO: 30268 - DNA, 260 bp, Unknown; identical to SEQ ID NO: 30251
  Description of Unknown: RightRegion for integrase B4269 sequence

SEQ ID NO: 30269 - DNA, 260 bp, Unknown
  Description of Unknown: RightRegion for integrase B4270 sequence
ataaaagcacccgccgtaccccggcgggtgtttttgttttggtgctccgtgagctgctgaggagtcgaacagggcggcagtaccgcagtaccagcccgatggccgatgcggaacgcggatgccgtgcgttcgtcatcctcggtggaatcactctcattataccagtggtttgcccggtgcttgaatgccctgcgaacagcccgcctgcccctcatacagggcaggcataaaaataccacggtgcagaattgcatcgtggt

SEQ ID NO: 30270 - DNA, 260 bp, Unknown
  Description of Unknown: RightRegion for integrase B4271 sequence
acttgcatcgttagagtatcgaaaaactggtttgttgtcgttggcacgtgtcaaaaatagcaatttcttgtttttgcaaaacaccagatgggcggcttgatgtaagcccgtataacgccagaaagcggggcaccccttgtcagggtaccccgcttgaacactaataagaaagcttctggccggggtagatcgtataaggtgccccaatgccgttcttgcttgctatggtgcgccagtcgataccgagcgaagcgccaatc

SEQ ID NO: 30271 - DNA, 260 bp, Unknown
  Description of Unknown: RightRegion for integrase B4272 sequence
gactttaagcgcggagatgagatcactttcaccctggatatctaccccaaaatccaatagaaataccattgataacctctctgtaccgacgaactggcacacatggaaatggtagccaccattgtacaccagcttacacgcaacctttccatggaagaaatcgagaaatccggcctcggtccctactatattgaccatacagtaggcatctggcctcaggctgccgggggtgtcccctttaacgcctgtgagttccagtc

SEQ ID NO: 30272 - DNA, 260 bp, Unknown
  Description of Unknown: RightRegion for integrase B4273 sequence
cctggtatcggaagatacgttgaaaacgtttttaaacttgatatcttttataagttgtaaaccatatccaacatctatgcgctaatgagcttggtcatttggaaatggtttccaccatcgtgtaccaattaaccgatggtctttcaccagaggaaatcaaagccagcggttatgacaaatactttgtcgatcatactttaggtgtctatccgcaggccgcatccggaactccattttctgccgatacgttccaatctacc

SEQ ID NO: 30273 - DNA, 260 bp, Unknown
  Description of Unknown: RightRegion for integrase B4274 sequence
ttcgccgaccacttcactgtggaattcaagtccgggatcacaatcaacatcgaagcataaccccctcagataaaagaagccctctcaacattgtagctgagagggtgtgtttttataagctatgtacaggccttataggagtatctccgaattcaggaagcaatttcccttctatgtacttatcaaatattgataaacacaaaaaagttactataccatcgtcatcttgaagttcaatttctaatggctttgatgataca

SEQ ID NO: 30274 - DNA, 109 bp, Unknown
  Description of Unknown: RightRegion for integrase B4275 sequence
gctgtcagtggtgacggttgcaaaggttcagcttttgcgccgtcaagcgcattaaaataataatcaggtgtgataaaggcagcggtatcgaaatataaagatgccgctg

SEQ ID NO: 30275 - DNA, 260 bp, Unknown
  Description of Unknown: RightRegion for integrase B4276 sequence
gactttaagcgcggggatgaaatcacctttaccctggatatctaccccaaaatccaatagtaatatcattgataacctcaatataccaacgaatgggcacattgaggttatcaatggtttggaactgtcgaaaaacgtcttgctattcatcttgcgcagcatatgcgcgagtgatataataaaaccatagaagtgagtgtagaaatgcgcagaacggccggcactgtaatggtgtcggccgttctgcgtataagtatatg

SEQ ID NO: 30276 - DNA, 109 bp, Unknown
  Description of Unknown: RightRegion for integrase B4277 sequence
aaaaatggtgatgacatctcttttactttagatatttatccgaaaatccagcaaaagtaagtgtgggtagcctttatgtacctacacattggcacgtatcgtgtcctcc

SEQ ID NO: 30277 - DNA, 260 bp, Unknown
  Description of Unknown: RightRegion for integrase B4278 sequence
ttaaccgtgatggtatcgcaggacttttttacagtccggatccggcggcaagctgcataaaaaataaaggccatagcgtaatactcggctatggcctttattatatcatcatcgtgcgattttatacagtcttggtgggttcttccttggtattctcttccgttgctttagtcagcacggtcttcactacaaataccagaccttccatgacaagcgggagaacaatgccatcacggacgcggcaccagccggattcctga

SEQ ID NO: 30278 - DNA, 260 bp, Unknown; identical to SEQ ID NO: 30250
  Description of Unknown: RightRegion for integrase B4279 sequence

SEQ ID NO: 30279 - DNA, 260 bp, Unknown
  Description of Unknown: RightRegion for integrase B4280 sequence
atgttcgttttgactcctgattgctccaccagaacgaaagcactacacggaaacgtgtagtgcttttttgtcgctgccaaacgagtgagggtttagctcacccaggagagtgccgtgcatggactgcaagaggatcaccgtgatcagaatcggcccggtaatctccaccagaatgaaagcactacacggaaacgtgtggtgcttttttgttttatctgccattcaccttacgtcccctttcatgaaaaaagcgtttgtcg

SEQ ID NO: 30280 - DNA, 260 bp, Unknown
  Description of Unknown: RightRegion for integrase B4281 sequence
tacgaagataaattcaccgtggaattcaagtccggcttgacggtggatgttgaggaataggcgcgaaaaaattagaaggcattctacggatttgacgtagggtgccttgcttgttaaccaactattgaaatactaaaattatgatactgaataagttggcggcaaaatgcgatattgcgctcatccacgcattgtttgttttgtaaaaaatgattccatacaagacactgttgatgaatacaaaaaagacatcatatagt

SEQ ID NO: 30281 - DNA, 109 bp, Unknown
  Description of Unknown: RightRegion for integrase B4282 sequence
ttacagataccgcggagaatcgaactctatgcagggcgcgggcgtaaagaaaacgcgtaagcgtttttagcccgcgggcgaggacgccggcaggcggccgaagccggtg

SEQ ID NO: 30282 - DNA, 260 bp, Unknown
  Description of Unknown: RightRegion for integrase B4283 sequence
ggaacggtcgatatccctacttttgaacttacattaaagcctcgaatcccccggatttaggggcttttcttttactgataacatttttgtaccaacgaactggctcaccttgaaatcatctgtgccattgtgcatcagcttacccgtaatcttacaccagaacaaattgaaaaatccggcttcgacaaatattatgtagaccacacactcgcactctggcctcaggctgccagcggaactccttggagtgctacaacatt

SEQ ID NO: 30283 - DNA, 260 bp, Unknown
  Description of Unknown: RightRegion for integrase B4284 sequence
acttgcattgtaagggtatcgaaaaactggtttgttgtagttggaacgtgccagaaatagccatttctggtgtttgcaaaacaccagatgggcggcttgctgtaagcccgtctaacgccagaaagcggggcaccccttgtcagggtaccccgattgaacactaataagaaagcttctggccggggtagatcgtataaggtgccccgatgccgttcttgcttgcgatggtgtgccagtcgataccgagcgaagcgccaatc

SEQ ID NO: 30284 - DNA, 260 bp, Unknown
  Description of Unknown: RightRegion for integrase B4285 sequence
tttttgctctttgcagaaggacatttttccaattccaattttttcaaaatgcgcaactaaattcagttgcatttttatctttttgtgctatactatatgagaaagggaggcatgcggcttgggacaaaaagaaaagctcatcaaaaagctgaaatccgttccgaaggacatgacctttgaagaggtcgaaaccctcttgcgctatctgacctatctgcgttccaacaaagggaaaaccagcggttcgcgcgtcttatttt

SEQ ID NO: 30285 - DNA, 260 bp, Unknown
  Description of Unknown: RightRegion for integrase B4286 sequence
aaccaaatacttattataggtttggttctggttcaaacaaggaaacaccttatggtatagcgccgtaaggtgtttttgcttttctatcaaaaagaggaaatgccccacgcagtaacagcgcggggcattctctttgtcggaataaaatttccaactaggattgttagcatttcctattgtaccgaattattccaaccattgcaaccatatttcaaacttgcttcaaacttgcctcaaactatcttcagccttgcgactta

SEQ ID NO: 30286 - DNA, 109 bp, Unknown
  Description of Unknown: RightRegion for integrase B4287 sequence
atggtcaagagaatcgaagttaataaggatggagaggtagacgtccagacatacgtttaactgtgcgtgcttgaaaacacatcacgaacgtcatgcaaaagttgaatgt

SEQ ID NO: 30287 - DNA, 260 bp, Unknown
  Description of Unknown: RightRegion for integrase B4288 sequence
tatgagattgaaattgtgtttgatcttaactatgagcagtttttaaatacaagtaaataactgtatgttcattgctcatataaaaatattaattcagaatattgtaatataagaattattaaaaaagcatccgtcacattgtgtttataagcataatgatgtttatatataatcttagcttattagtataactttgtgttttgtatgattttgtagtgtgtacacaaaagtacacacataaacttggttatattgcacaa

SEQ ID NO: 30288 - DNA, 260 bp, Unknown
  Description of Unknown: RightRegion for integrase B4289 sequence
tttccacgctcatatatatgggtgtggaattttttgtttacggtagtacaaaacgcataaaaattcagcttgtagaaaaagtctgtttttgaaataaacttctgatttattatccctatccccaaacccctttcccctggaaaggggctgagtgtggggctgccgccctcaccccgcttggggctacgccccaaaccccattttcaaaaattatataggtttatcgacagtctgtaaaaattatcccacattttccgtac

SEQ ID NO: 30289 - DNA, 260 bp, Unknown; identical to SEQ ID NO: 30246
  Description of Unknown: RightRegion for integrase B4290 sequence

SEQ ID NO: 30290 - DNA, 260 bp, Unknown
  Description of Unknown: RightRegion for integrase B4291 sequence
acttgcgttgttagagtatctaaaaactggtttgttgtcgttggcacgtgtcaaaaatagcaatttctggtgtttgcaaaacaccagatgggcggcttgctgtaagcccgtctaacgccagaaagcggggcaccccttgtcagggtaccccgcttgaacactaataagaaagcttctggccggggtagatcgtataaggtgccccaatgccgttcttgcttgcgatggtgtgccagtcgatgccgagcgaagcgccaatc

SEQ ID NO: 30291 - DNA, 260 bp, Unknown
  Description of Unknown: RightRegion for integrase B4292 sequence
ggaacggtcgatacccctactttcgaacttacattaaagcctcgaattcctcggatttaggggcttttcttttactgataacatttttgtaccaacgaactggctcaccttgaaatcatctgtgccattgtgcatcagcttacccgtaatcttacaccagaacaaattgaaaaatccggcttcgacaaatattatgtagaccacacactcgcactctggcctcaggctgccagcggaactccttggagtgctacaacatt

SEQ ID NO: 30292 - DNA, 260 bp, Unknown
  Description of Unknown: RightRegion for integrase B4293 sequence
ataaaagcacccgccgtaccccggcgggtgtttttgttttggtgctccgtgagctgctgaggagtcgaacagggcggcagtaccgcagtaccagcccgatggccgatgcggaacgcggatgccgtgcgttcgtcatcctcggtggaatcactctcattataccagtggtttgcccggtgcttgaatgccctgcgaacagcccgcctgcccctcatacagggcaggcataaaaaacacggtgcgtgtgcatcgtggtttgg

SEQ ID NO: 30293 - DNA, 260 bp, Unknown
  Description of Unknown: RightRegion for integrase B4294 sequence
tgggatgaccacatcaccgtagaactaaaatccggtgtcagcatcgatgttgatgcatgactccatagacgcacgaaggctcctcaccactggataatctccggtgatggggagcctttgtttacaagttgattatcattcctcgtcgatttctttctgagccgatgtggttaattccatcatcttttgttgataagtagctccatcaatttcttcgtcagcatactgtctcattaattcatcaatctgtgcttttaatt

SEQ ID NO: 30294 - DNA, 260 bp, Unknown
  Description of Unknown: RightRegion for integrase B4295 sequence
ggaacggtcaatacccctacttttgaacttacattaaagcctcgaatcccccggatttagggacttttcttttactgataacatttttgtaccaacgaatcagtacaaaaatggtatcagttagtttcatattatataggtagatactcgttcctttatcagagcatctgcagtcgtatccagcactgctgccagtatcaccagcatctctgcatccagaactctatcttttttcagttatcctacatacgtcttaccac

SEQ ID NO: 30295 - DNA, 260 bp, Unknown; identical to SEQ ID NO: 30230
  Description of Unknown: RightRegion for integrase B4296 sequence

SEQ ID NO: 30296 - DNA, 76 bp, Unknown
  Description of Unknown: RightRegion for integrase B4297 sequence
cacctaacagcttttgctgtgtggcgaaatgtatttatcattgatatacctgtagaataagagaaatacccttgaa

SEQ ID NO: 30297 - DNA, 260 bp, Unknown
  Description of Unknown: RightRegion for integrase B4298 sequence
gagccagcggctcaatcgtctggatatcgggaaagccaagtccccgctcccaccggctgacggctttatccgtcacatgaatcttttccgcaagctctgcctgcgtcatctttttctcttttcgcattccggcaataaaccgcccgaactctttcacttccacgtcgtgtcccttcctcctgctgttcccgcaccgcctcatgttgcccagcggagcgtttttacagtctcagaataggcgaaaataggctgttttgtca

SEQ ID NO: 30298 - DNA, 260 bp, Unknown; identical to SEQ ID NO: 30260
  Description of Unknown: RightRegion for integrase B4299 sequence

SEQ ID NO: 30299 - DNA, 260 bp, Unknown
  Description of Unknown: RightRegion for integrase B4300 sequence
cacatcgatttcagccgcgagaacaacgccgagtttatattagacgtctatctcaagtgagatgggcgcatggtcggagccgagtatgtcagtgtgaatttcggctgatctgatgcactctcgcgcgaaatcagacacgaggaagtagtccagacgccagccgatattccgagcccttgcacccgctcgatagctccaccagctatacttcgcttcatcggggtgcaggtcgcggaacgtgtcggtataccctgcctcca

SEQ ID NO: 30300 - DNA, 260 bp, Unknown
  Description of Unknown: RightRegion for integrase B4301 sequence
ctcgtcaacaatattgtttttaatgcggatggcgaagtcactatttcatttgccatttaactcttttctttttactttctgcacttctttactgttcaagtgatgatatacttgtatagtaaaagaagtgcaatttttatctaactgtataatccagactaatccatcctgcgccagatttgagcttgccccaacgtttcgcaccttttcctgtcgcctcttccgtgatcgtcaatgacatcttttctctgatctggccc

SEQ ID NO: 30301 - DNA, 260 bp, Unknown
  Description of Unknown: RightRegion for integrase B4302 sequence
tctatcactctaactgatgataaatttatagtagattttaatattaaaaaaaaaaactagataatgctataaaaaaattatctagtctattcgcaaaatataaatcatcgcaattaagacatccatgcagaagctatatgtacaggcaccctagctggccataattcagtaagacttgcactaggattgccacttcttatccttccaagttcaattgctattggagatataatttcatatgaaaatgaacaatctaaaac

SEQ ID NO: 30302 - DNA, 260 bp, Unknown
  Description of Unknown: RightRegion for integrase B4303 sequence
gctcgcgctgtgattcaggagtgtacttgggacggggagcggctttttattaagctctaaacctcactatttcataatggtggggtttggccgcatacgaagtgcgctttttatcaaatcccggatggtaatctcctctgcccccggaagcttgatatcccggctctccagacgcaccagattgggtagcccaagcaactgcagctccgctgagtcctcaatggtaaccacacgttcttcttttggaataaattccgaca

SEQ ID NO: 30303 - DNA, 260 bp, Unknown
  Description of Unknown: RightRegion for integrase B4304 sequence
gactttaagcgcggagatgaaatcactttcaccctggatatctaccccaaaatccaatagaaataccattgataacctctctgtaccgacgaactggctcacatggaaatggtagccaccatcgtacaccagctcacccgcaacctgccgatggaggaaattgagaaatcaggcctcggcccctactatattgaccataccgtaggcatctggcctcaggctgccggaggtgtccccttcaatgcctgtgagttccagtc

SEQ ID NO: 30304 - DNA, 109 bp, Unknown
  Description of Unknown: RightRegion for integrase B4305 sequence
ccggggattggcagatatgttgataatgtattccagcttgatatttttttactcttataatatccaacatctatgtacctatgaattggcgcacctcgagatgattgcc

SEQ ID NO: 30305 - DNA, 260 bp, Unknown
  Description of Unknown: RightRegion for integrase B4306 sequence
cctttcaccaaaaaagatgcgaaagtattcattcacgtatatccaaaaaccccggaataacttgggttctcaacccatgacaacatggcggtgcagactcttccgtgccgatatcggtaactatatggtacctttaatttccggtttaatatacgaatattcaagtatttccgtcatataattgtctcttcgtccggttgtttttactttaagttgaataccaaacggtaatggcttcagccatacatcaagaattttat

SEQ ID NO: 30306 - DNA, 260 bp, Unknown
  Description of Unknown: RightRegion for integrase B4307 sequence
gccctttgttattatggagtttgtctcatttttgtttattcgttaaaatgttttttataacttgtcagacaccttgattatttggtttttttctatttaaccaaggtgtctgtttttttagcttttttccttaaaatcttaatattataggagttaaaaaaactgtatacatatttataggcatacatccactaaatattttgtattaagtgacggctctcttgctgaactgcaaattatgcacagctcacttgaaatgg

SEQ ID NO: 30307 - DNA, 260 bp, Unknown
  Description of Unknown: RightRegion for integrase B4308 sequence
cacttttatattaacgctaccgcctaccctattactttaatagtgccttttggcgtttaaactatataatgtattatataagatatattagttataatacaatgtattcagcataaagaaaagctctataaacgaaaaataaggcctatcgtgctagtatctactaatcacgataggcctattttatttaccaatcatcaataacacagagctatgtgtccaccctcacatagtaggaagataatcggatcacctcgatt

SEQ ID NO: 30308 - DNA, 260 bp, Unknown
  Description of Unknown: RightRegion for integrase B4309 sequence
tataatgatcactttacggtagaacttaaatccgagcttaaggttgatgtagaaagatagtcataaataacaaaggctcctcaccactagaactcaatctcgtgatggggagtcttttcttatgcaaattcttttattgcatatattgcgataaaagataatgaaaccgacattattgcaaaagcagctggccatcctaataaggatacagatacactacttctctttgctaattctgatgctccgtatgtcaatttatc

SEQ ID NO: 30309 - DNA, 109 bp, Unknown
  Description of Unknown: RightRegion for integrase B4310 sequence
ccggggattggcagatatgttgataatgtattccagcttgatatttttttgctcttataatatccaacatctatgtacctatgaattggcacatctcgaaatgattgcc

SEQ ID NO: 30310 - DNA, 109 bp, Unknown
  Description of Unknown: RightRegion for integrase B4311 sequence
ccaggcataggacgatatgtagacaatcctttcagattagaaattttcctgaagctgtaaacccgcagtttcaggggatttcttatcacatacaacaacatggcgtaag

SEQ ID NO: 30311 - DNA, 109 bp, Unknown
  Description of Unknown: RightRegion for integrase B4312 sequence
acaattatagataaaatagttataaccgataaaaatatagatatacactacaagatttagtgtatgtctttttgaatttaatgtatcattattaaaaactaatattttt

SEQ ID NO: 30312 - DNA, 260 bp, Unknown
  Description of Unknown: RightRegion for integrase B4313 sequence
aggtattggacgaacacctatttcttcagcggcggctttgccgtcaaggtgatgctctaatacgaaacagaaaaccgccatcttagattaagttctaaggtggcggttttacatataagcaagtcgtttgaaaaacaagacaatatctgttataatataaacacagaataatattgagtgtaaacgaaataaggagaaccatttatgtgggaaaatattgatattgataggcattacacaggaatgtttcaaattttaga

SEQ ID NO: 30313 - DNA, 260 bp, Unknown
  Description of Unknown: RightRegion for integrase B4314 sequence
tccgatccgcaggattttgaggttaagattttccccaggctgcctgagcctgtggagtagtataaccacggtgtatagcattggtggtggatcataatcctcttgctgatcctcggctggggcaataatggttgtggctgcggctgtgacaacggctgcaacagcggctgtggctatgacaacatttggtggatcatcatactgctgctcattctcggcggcggctttaacaactgcggctgcgacaacggctgtggcaa

SEQ ID NO: 30314 - DNA, 260 bp, Unknown
  Description of Unknown: RightRegion for integrase B4315 sequence
atcacggtttatgagaacggagaaaaaacagttactttcagagatggaagtgtgatatagaggaatgataaaataaagggtctgctgcagtatctgcgtactgcaacagaccctttttgtttgactccttaagaggtagtggatatgcgttttggtctttcaaatatctgattgataaaaagaagaaatggatcaaatacccgattaaacagccacatataaattgagccaaatacatttgtaaaaatacgaagtaaaac

SEQ ID NO: 30315 - DNA, 260 bp, Unknown
  Description of Unknown: RightRegion for integrase B4316 sequence
gctgttgatagaatatctctaaaagatatagtaagacaaattccctcacctactaagtaagcaagggagtttattattgtaaatgcagcgtttcttttaaggctttttgtagtacttgcgaaaaattgatgccttcactttccgcaacacagtttagccatgaaggaagagttacagttttattgacagaaatatttttaacttttgcgcgaaccaatggcatatatacgcttacaagtaaagggatttggcctttttct

SEQ ID NO: 30316 - DNA, 260 bp, Unknown
  Description of Unknown: RightRegion for integrase B4317 sequence
tgcaataacattcacaaccgggcagaagaaattattttgcaagagatgatttattcataacggtatggtagaatgattatgacaaatcgaaagttgacaaggagttttgatagcgtgaaaaaaatatttcttaaaattgtgataggggttgttcttgcttgtattttatttgtttgttttctttatacgaacaatgagatcggcgtgacttcatctaagctggaggcagatattcgttcgtcgcagaagattaaggatga

SEQ ID NO: 30317 - DNA, 260 bp, Unknown
  Description of Unknown: RightRegion for integrase B4318 sequence
aagaaatgtgatgaaataacttttacccttgatatttaccccagaatccaagggaaataattaaaggtagcatttacgtgccagtacattcgcccggatcgtatcgtccggccaggtcgcatagatttcgctgctcgctacgtttttgatgtaatctttgtaacgcacataatagtcccttgctgtcgtatcgttcacggacccatcatggacaacgatgtattccgggatcactacgcggctcagaacgatctcgccgc

SEQ ID NO: 30318 - DNA, 260 bp, Unknown
  Description of Unknown: RightRegion for integrase B4319 sequence
tccgatccgcaggattttgaggttaagattttccccaggctgcctgagcctgtagagtagtataaccacggtgcatagcattggtggtggatcataatcctcttgctgatcctcggctggggcaataatggttgtggctgcggctgtgacaacggctgcaacaacggctgtggctgtgacaacatttggtggatcatcatactgctgctcattctcggcggcggctttaacaactgtggctgcgacaacggctgcggcaa

SEQ ID NO: 30319 - DNA, 260 bp, Unknown
  Description of Unknown: RightRegion for integrase B4320 sequence
cacaaattacaaaaaacaaatattaacataaaaagcagaaatcctcatagaaatctgtaaaacttagttccattataatcaatacaaatcttcacataaataatttttttcaactttactccagtctattacgttccatatatttttaacataatcagctctcaaattttgatactttaaataatatgcatgttcccaaacatcaattgttaatattggcttcatctttaagcttagtggtgaatcttgatttgcagttg

SEQ ID NO: 30320 - DNA, 109 bp, Unknown
  Description of Unknown: RightRegion for integrase B4321 sequence
ccttttactaaaaaatatgcgaaagtattcattcacgtatacccaagaaccccggaataacctgggttcgtaacctatgacagcatggcggtgcagactcttctgttcc

SEQ ID NO: 30321 - DNA, 260 bp, Unknown
  Description of Unknown: RightRegion for integrase B4322 sequence
gttgaatactttatttatgattcagaaaatggaactgttgaatataaaataaggctgtagttatctatggccttatttgttgtttagaatgtgttgcatctgcgccttgccctgttgacaaatcaatagatagaccttcttcttcaaaaaatccttcatttattgcaatatacatcggagcgtaaaacacagatctcacaacttcatttaaccttacagtcttcaattcattagttgtttctcctccattatctttagta

SEQ ID NO: 30322 - DNA, 260 bp, Unknown
  Description of Unknown: RightRegion for integrase B4323 sequence
gaaataaccttcaatctgaagtgcggactgaatataacggaaaggttggtggtggtgtgacacatactccatacggttacattattgaagacgggcaagcggtcattgatgaaccaaatgcagaaagagtgagaatgttattccgagaatacattgaatgtggctccataagagcggcaggcaagaaagtcggaattgaaaaaacgcactcggtaattggcagatttctaaaaaacaaagtgtatgttggaaccgagtat

SEQ ID NO: 30323 - DNA, 132 bp, Unknown
  Description of Unknown: RightRegion for integrase B4324 sequence
gaaagtgtaacatacaaagatgatatgtttcatatatcatttaaattaaaaaaaaactaattgatatttataaaaatttatctatgttaaataagttatactctctatcgcattttagattatcaaggttgg

SEQ ID NO: 30324 - DNA, 260 bp, Unknown
  Description of Unknown: RightRegion for integrase B4325 sequence
gagtcttgcatgactttcctattatatcatggatgcgcgatatttcaactggcggcgtaaaaattccccctgccgatgtggcagggggtcttgttatttgcggacgatatagcgcaggtagcgctcgaccttgtccggctgtgcgtccgcgtcgcggatgaagtcggcggccatgtccgcgtagaaatccgggctgtggatgccgtagcgcttggccgtggcggcgtagtcgctgtacatggcattggccaccgcgtaga

SEQ ID NO: 30325 - DNA, 260 bp, Unknown
  Description of Unknown: RightRegion for integrase B4326 sequence
gcacataaagtattgaaagaatgtgtatggaacggtgaaacactttttttgcgcctttaatgtcccgtaatcattgtgcgcccatccggtcgcacagtgattacgggaaaacgtctacatttatactacatttatatataaaagaaaaagatatcacttgacataggtatatacctatagtataataaaaccgtagaaaggaggtaataagatgtggataacataaaagatgctttagaaataacaaaagacctgttaga

SEQ ID NO: 30326 - DNA, 260 bp, Unknown
  Description of Unknown: RightRegion for integrase B4327 sequence
gcacataaagtattgaaagaatgtgtatggaacggcgaaacactttttttgcggctttaatctcccgtaatcattgtgcgcccatccggtcgcacgatgattacgggaaaatatctacatttatatataaaagaaaaagatatagcttgacataggtatatacctatggtataataaaaccatagaaaggaggtaataagatgtggataacataaaagatgctttagaaatagcaaaagacctgttagaaatcttagtct

SEQ ID NO: 30327 - DNA, 109 bp, Unknown
  Description of Unknown: RightRegion for integrase B4328 sequence
ccaggcataggacgatatgtagacaatcctttcagattggaaattttcctgaagctgtaaacccgcagtttcaggggatttcttatcacatacaacaacatggcgtaag

SEQ ID NO: 30328 - DNA, 260 bp, Unknown
  Description of Unknown: RightRegion for integrase B4329 sequence
tcagattcgcaggattttgaggttaaaattttccccaggctgcctgaacctgtagagtagtataaccacggtgtatagcattggtggtggatcataatcctcttgctgatcctcggctggggcaataatggttgtggctgcggctgtgacaacggctgcaacagcggctgtggctatgacaacatttggtggatcatcatactgctgctcattctcggcggcggctttaacaactgcggctgcgacaacggctgtggcaa

SEQ ID NO: 30329 - DNA, 226 bp, Unknown
  Description of Unknown: RightRegion for integrase B4330 sequence
cgggaggatccggacagtttcatcctggatgtttttctgaaagacgatattatcgactaagaaaaagaatcacgcaaacacaagaaaaggtattgctgcggcaatgagtatcattatggcgatgtaaaggtggagccggccagcattgcgaagcagaggagcagcgaggtaaagctcatgagcagcgcgctttttttgcttttcatgtgttttttctcctttatct

SEQ ID NO: 30330 - DNA, 260 bp, Unknown
  Description of Unknown: RightRegion for integrase B4331 sequence
gcacataaagtattgaaagaatgtgtatggaacggtgaaacactttttttgcgcctttaatgtcccgtaatcattgtgcgcccatccggtcgcacgatgattacgggaaaaatatctacatttatatataaaagaaaaagatatcacttgacataggtatatacctatagtataataaaaccatagaaaggaggtaataagatgtggataacataaaagatgctttagaaataacaaaagacctgttagaaatcttaatc

SEQ ID NO: 30331 - DNA, 109 bp, Unknown
  Description of Unknown: RightRegion for integrase B4332 sequence
atatgcaaggacggcggtatggttttcctgtttaaggacgggacggagatcggggtatgaaatgcattcagaatggagagccttcaacaataaaaggctctccatgtct

SEQ ID NO: 30332 - DNA, 109 bp, Unknown
  Description of Unknown: RightRegion for integrase B4333 sequence
ccggggattggcagatatgttgataatgtattccagcttgatatttttttactcttataatctccaacatctatgtacctatgaattggcacatctcgaaatgattgcc

SEQ ID NO: 30333 - DNA, 260 bp, Unknown
  Description of Unknown: RightRegion for integrase B4334 sequence
gcacataaagtattgaaggaatgtgtatggaacggtgaaacactttttttgcgcctttaatgtcccgtaatcattgtgcgcccatccggtcgcacagtgattacgggaaaatgtctacatttatactacatttatatataaaagaaaaagatatcacttgacataggtatatacctatagtataataaaaccatagaaaggaggtaataagatgtggataacataaaagatgctttagaaataacaaaagacctgttaga

SEQ ID NO: 30334 - DNA, 260 bp, Unknown
  Description of Unknown: RightRegion for integrase B4335 sequence
tggcaggggcggcaggattcgaacccgcgacattcggttttggagaccgaaaaccaatagagataacatactgtttttatatattatttttctttcattctgacttttaaattttcttattctgactcttgctacgtgagaaagaacattgtaagaacaaaattagttgtggcacacttccaattcttgtcgaagtttatcaatcctgactttcactagctagtatatcacaagttttgtaaaatctattcaggaaatct

SEQ ID NO: 30335 - DNA, 260 bp, Unknown
  Description of Unknown: RightRegion for integrase B4336 sequence
ggctttaaacacggtgacgagatcacatttactctggacatttaccccaaaatccaataaaaagcttattgataacctctatgtactgacgaataggcacatagaggttatcaatggtctgtgattcgtcgaaaaatgtctacgggcttttattgcccgtatagattagatgtggtaatatatccatagagatgaaatcagatatgatagcggaatggccggtactgtaatggtgccggtcattttgcgtataagcgtac

SEQ ID NO: 30336 - DNA, 260 bp, Unknown
  Description of Unknown: RightRegion for integrase B4337 sequence
tatcctgaccattgtaccgttgaattaaaatccggccttaaggtcgatgtagaaaagtaaatataaacgtaaaacgcacaaaaccctcctgaccatgatggccgggagggttgtttttgttatattgtgtgaactggtctgactggagtatctccaacttcaggtaacagtttcccatccacataatcatcaaaattagaaagacaaggaaatgtcactactccatctttatcttggaattctatctctagtggtttaga

SEQ ID NO: 30337 - DNA, 260 bp, Unknown
  Description of Unknown: RightRegion for integrase B4338 sequence
gcacataaagtattgaaggaatgtgtatggaacggtgaaacactttttttgcgtctttaatgtcccgtaatcattgtgcgcccatccggtcgcatgatgattacgggaaaatatctacatttatatataaaagttgagcatatcacttgacataggtatatacctatagtataataaaatcatagaaaggaggtagtaagatgtggataacataaaagatgctttagaaatagcaaaagacctgttagaaatcttagtct

SEQ ID NO: 30338 - DNA, 260 bp, Unknown
  Description of Unknown: RightRegion for integrase B4339 sequence
ggcgctgtcagtggtgacggttgcaaaggttcagcttttgcgccgtcaagcgcattataaaattaaaaagggttaagccttagggcttagccctttttgattttagaagcggaagcggcccttgtccccatgggtccaaggtctccgctccgcttcggtcgttgcaagacgtcccccagacgtcttgcaacccatcttccgcaaggctctggttgtggtagctaaattatacggatttcgtttaaaattgcatattagat

SEQ ID NO: 30339 - DNA, 260 bp, Unknown; identical to SEQ ID NO: 30330
  Description of Unknown: RightRegion for integrase B4340 sequence

SEQ ID NO: 30340 - DNA, 260 bp, Unknown
  Description of Unknown: RightRegion for integrase B4341 sequence
ttattttttattgatactagattattttgtcaaataatatgtatgttaaaaaataattagttcctgagacacgtataatgcgtgtctcttttttatgtttagaatataaaataaatttatttactctttaaaatcgggtagacataattagattaatatgctatattttatatatcttaattattaatttttggggggaaaataatatgaatattaaaaaagactttcattatattaatatataataacacaaaataaaa

SEQ ID NO: 30341 - DNA, 260 bp, Unknown
  Description of Unknown: RightRegion for integrase B4342 sequence
tgggatgaccattgcacggttgaattgaaatccggacttatggtcgatgtagaaagataagcatagacgcacaaaaccctcccagccatgatggttgagagggttgtttttatcgtccaaagaattcctgaaatacctttttatcttcgagcttatattttttatcaaaatcagatgtgtaatcagttaacatcaattcatcagcatcaatcgaaatcttcacatttccatttttcttaaaaaagccaaatgcatcaagt

SEQ ID NO: 30342 - DNA, 260 bp, Unknown
  Description of Unknown: RightRegion for integrase B4343 sequence
tgggacgataggttttctgtggagttgaagtcgggaattgttgttgagattgaattataatttttgaatatgtacgaacccctctcggctgtgatggtcgggaggggctatgttatgtattatcaattttggggctgattttctttatttctcttgcacgcaaattatcaatgaaattagcgtacttatcacagtattcctgaagttcagataataattcgtcaatatcgtcttttgccgtttgggttaagtctaacacg

SEQ ID NO: 30343 - DNA, 260 bp, Unknown
  Description of Unknown: RightRegion for integrase B4344 sequence
aatgagatcggctttgtgctgaaatgcggattgacgctcagagaaaggattggtgagtagaatggagcatattccgtacggctatcgtattgagaacggaaaagcggcggttgatgaaactgcggcagagcaggttcggagattatttgaaaactacctcagcggcgattcgctgaaaaaagcggccgaaaacgcaggtatcacaggaaatcacggcactatcaaactgatgttgctgaaccgccgctacttgggagatg

SEQ ID NO: 30344 - DNA, 260 bp, Unknown
  Description of Unknown: RightRegion for integrase B4345 sequence
acaattatagataaaatagttataaccgataaaaatatagatatacactacaaaatttagtgtatgtctttttagttttaatgtatcattattaaaaactaaaatttttgccaaagtaaaatcctcctcatactttttatttattatatgaaaaggatttgcttttggttatatgtgtttaactaattattttacaaattaattatctattttacttctttgcattttactataattcttaatgaactatcatcagtaca

SEQ ID NO: 30345 - DNA, 260 bp, Unknown
  Description of Unknown: RightRegion for integrase B4346 sequence
ggtaatccagatagtgacgcatgggaatactggaaaagttttttggacaatctaaagtaaattaatggcccctggttatgggggctttttttgtctttatgataaatacttttataaaaataattataaggaaactattatgaaagattggtttattactttgacagtattattgattggtatgattataatggtaactggattcataaaagtattgtttttaatgtttctgatatatcttgtattagtactaatatctt

SEQ ID NO: 30346 - DNA, 260 bp, Unknown
  Description of Unknown: RightRegion for integrase B4347 sequence
ttgtctgccaaaaaatgcagatacccttttgggtatctgcattttttattgcagtcgtgagggattcgaacccatctaaatgcaagtgccctgtgggcacttggcgcagccagttcaaaaactggctgccaccttacgttccgcctcccggcggaacggcaatcgaatccctcatcctctgccctcaattccacctgcacgagaagaaaacggattgtggccgaatggaatcccaagagggatcacaccagtctgcggat

SEQ ID NO: 30347 - DNA, 109 bp, Unknown
  Description of Unknown: RightRegion for integrase B4348 sequence
cctttcaccaaaaaagatgcgaaagtattcattcacgtatatccaaaaaccccggaataacttgggttcttaacctatgacaacatggcggaacagaatcttccgtgcc

SEQ ID NO: 30348 - DNA, 260 bp, Unknown
  Description of Unknown: RightRegion for integrase B4349 sequence
gaggacagcgaacaagtgttcgtccgctgtgcgcgatggacgaccatattggtgcaatagaatagatgcacacctcgaaaagctcgtatttacgagctttttttgcgttttgagggtgaaaatttcaggtgttgttgcccgccgcgcaaaacccaaaaaacgcaacaatccgtaagtaaacgtgaaaaatatacaaaacccttaaaaaccctgcaattacagcgttttcggagtgcaataaactgattgatgtgtaatga

SEQ ID NO: 30349 - DNA, 109 bp, Unknown
  Description of Unknown: RightRegion for integrase B4350 sequence
ccaggcataggacgatatgtagataatcctttcagattagaaattttcctgaagctgtaaacccgcagtttcagggggtttcttatcacatacaacaacatggcgtaag

SEQ ID NO: 30350 - DNA, 260 bp, Unknown
  Description of Unknown: RightRegion for integrase B4351 sequence
tccgatccgcaggattttgaggttaagattttccccaggctgcctgaacctgtagagtagtataaccacggtgtatagcattggtggtggatcataatcctcttgctgatcctcggctggggcaataatggttgtggctgcggctgtgacaacggctgcaacagcggctgtggctatgacaacatttggtggatcatcatactgctgctcattctcggcggtggctttaacaactgcggctgcgacaacggctgtggcaa

SEQ ID NO: 30351 - DNA, 260 bp, Unknown
  Description of Unknown: RightRegion for integrase B4352 sequence
tccgatccgcaggattttgaggttaagattttccccaggctgcctgagcctgtggagtagtataaccatggtgtatagcattggtggtggtcatcgtggttatactgcatataaggagccgcctctaacggccccttttgttatccttatattgtcacgcaatagagcgggacttatccttgctctttgtgacgcctccattgcgcaatcttccgggcgttggcggtcttacttaggccgcaatacatagcccgctgata

SEQ ID NO: 30352 - DNA, 260 bp, Unknown
  Description of Unknown: RightRegion for integrase B4353 sequence
ataaaaaatccgaaccctatgccggttggtcatgggttcggatttattattttgtgttgaaatatgactgactattttgaaaaaatattagggtggattttccggtaatatcctcttgtgtctaattcgttttattcgttttgttttacaaactagtaatgaaactatgctccaatcctttttcttttaatcgaacatcaacattgccattaactaaaaaatagaactcaacaaatattatatcaaatgaagttgatggc

SEQ ID NO: 30353 - DNA, 109 bp, Unknown
  Description of Unknown: RightRegion for integrase B4354 sequence
cctttcaccaaaaaagatgcgaaagtattcattcacgtatatccaaaaaccccggaataacttgggttctcaacccatgacaccctgatggaacagaagaactggcaca

SEQ ID NO: 30354 - DNA, 134 bp, Unknown
  Description of Unknown: RightRegion for integrase B4355 sequence
tcagatccgcaggattttgaggttaagattttccccaggctgcctgagcctgtagagtagtataaccacggtgcatagcattggtggtggatcataatcctcttgctgatcctcggctggggcaataatggttg

SEQ ID NO: 30355 - DNA, 260 bp, Unknown
  Description of Unknown: RightRegion for integrase B4356 sequence
tcagatccgcaggactttgaggttaagattttccccaggctgcctgaacctgtagagtagtataaccacggtgtatagcattggtggtggatcataatcctcttgctgatcctcggctggggcaataatggttgtggctgcggctgtgacaacggctgcaacaacggctgtggctatgacaacatttggtggatcatcatactgctgctcattctcggcggcggctttaacaactgcggctgcgacaacggctgtggcaa

SEQ ID NO: 30356 - DNA, 260 bp, Unknown
  Description of Unknown: RightRegion for integrase B4357 sequence
aatgaaattggttttgcgctgaaatgtggtctgacgctcagagaaaggatcggtgagtagagtggagcatattccgtacggctatcgtattgagaacggaaaagcggtggttgatgaaactgcggcagggcaggtgcggcaattatttgaaaactacctcagcggcgattcgctgaaaaaagcggccgaaaacgcaggtatcgcaggaaatcacggcactatcaaactgatgttgctgaaccgccgctacttgggagatg

SEQ ID NO: 30357 - DNA, 260 bp, Unknown
  Description of Unknown: RightRegion for integrase B4358 sequence
tgggaagacaattgtactgttgaattgaaatctggaattaaggtcgaagttgaaagataaacagggtctgaaaaaataactgtgcaaacgcgaataaacccgaaaaacataccaaagctaaaaatgcagcaaaacaaggcaacgttggagagcgccccgatgcagctgcaagatattctacttcaccggtatctttcggcggataaactccgggagtgtgaggtgacctcccccagtgtgggaggcaaatctatgttcag

SEQ ID NO: 30358 - DNA, 260 bp, Unknown
  Description of Unknown: RightRegion for integrase B4359 sequence
gatgccacgttaaattataataattccgggtgtcgctccaccggcaccaaaccaatataatccgaaccaaatcttcttaatcggagatgggttcggattatttgttttcttcgagaaattcgaggatacgcatttcagaaacggcgtggtaaagcgtcccgaatccaagcccagagggccgagaaaaccaaagatatagaggcgtatctgaacgccgtcacggagtacaagccctatgaaaactgaacaacgcacaaaag

SEQ ID NO: 30359 - DNA, 260 bp, Unknown
  Description of Unknown: RightRegion for integrase B4360 sequence
aatgaaatcaagtttgtaatgaaatgtggtctaacattcacggaaaggattggtgattagatgggccatacaccctttggctatcggattgaaaatggcatcgcaatcatagacgaacctgctgccgcaaaactccgacagctttataaaaattatctgagtggcatgtcattatcaaaggcagctgctgaagctgggataccaacctatcatggaacagcaaagcgattgatgggaactgtccattatcttggcgacag

SEQ ID NO: 30360 - DNA, 260 bp, Unknown
  Description of Unknown: RightRegion for integrase B4361 sequence
tacgaggagaaatttatggtggaattcaagtcaggcacaagcgtgaatgtagagagatagaagtaataggctacagaagttagcaccttgcagaaatgcagggtgtttttctgttgttgcaataattatagctgtaaattatgttagggtgattgaaattcacaaaaatgtgtagtacaataagttatctgatttgtgaaacaagttgagagtaaacaagcagaggtgtagaacatgattaaaaataatatagaactaga

SEQ ID NO: 30361 - DNA, 260 bp, Unknown; identical to SEQ ID NO: 30333
  Description of Unknown: RightRegion for integrase B4362 sequence

SEQ ID NO: 30362 - DNA, 260 bp, Unknown
  Description of Unknown: RightRegion for integrase B4363 sequence
catgaaatccgatttgttatgaaatgtggactgacattcacagaaaggattggtgattaaatggggcacacaccctttggctatcggattgaaaacggcactgccgtcattgataaacctactgccactaagctccgacagctctataagaattatttgagtggtatgtccttatcgaaggcagctgcagaagccggaattccaacctatcatggaaccgctaagcgattgatggaaacagcccattatcttggtgatga

SEQ ID NO: 30363 - DNA, 260 bp, Unknown
  Description of Unknown: RightRegion for integrase B4364 sequence
ttgccatcaatgacaatgtggacaccatcaacggagaaagcgagcttgcaccgttcttaaacatcctgaatgaaatgcacgcccgacagaccagcaaaaaggtcaaggctgccatgcacacaagatttgccaatggcgcacactatggagcctatgcaccgctgggctatgtaaaagacccggacaaaaaaggtcatcttctgatcgacccggaaacacgctggattgtagagaagatttttgaccttgctgtacacggg

SEQ ID NO: 30364 - DNA, 134 bp, Unknown
  Description of Unknown: RightRegion for integrase B4365 sequence
tcagatccgcaggattttgaggttaagattttccccaggctgcctgagcctgtagagtagtataaccacggtgcatagcattggtggtggtcattagggttatacattatagcagccctcttaatatttaggtt

SEQ ID NO: 30365 - DNA, 260 bp, Unknown
  Description of Unknown: RightRegion for integrase B4366 sequence
gctaaaatgttcgttttgactcctgatagctccaccaaaaaagcactgtacttcgcatgaagtacggtgcttttcttttttcgaggccaaatttttggggatgcattgagttgcctgcatgtcttttgggcttttgcggaaaaccgggatgttccctcagataagcgggtctgcctcataacaaaagagaccgctgtacagcaagctgctgcacagcggtctcttcttcttttttagctccgcgggatggccattcgtcg

SEQ ID NO: 30366 - DNA, 260 bp, Unknown
  Description of Unknown: RightRegion for integrase B4367 sequence
gagtcttgcatgactttcttattatatcatggatgcgcgatatttcaactggcggcgtaaaaattccccctgccacatcggcagggggtcttgttatttgcggacgatatagcgcaggtagcgctcgaccttgtccggctgtgcgtccgagtctcggatgaagtcggcggccatgtccgcgtagaaatccgggctatggatgccgtagcgcttggccgtggcggcgtagtcgctgtacatggcgttggccaccgcgtaga

SEQ ID NO: 30367 - DNA, 260 bp, Unknown
  Description of Unknown: RightRegion for integrase B4368 sequence
attgactattttacttatgatagtgaaactaatgaagttggttataaaataaggttgtagctaactctacaacctttttcattgcatgtggacatatgttgtttattagattgtgttgcatcggcaccttgtcctgtagataaatcaatattaagtccttcttcttcaaaaaagccttcatttattgcaacatacattggagcataaaatacagatcttacaacttcatttaatctaacagtttgtaaatttgcttcatc

SEQ ID NO: 30368 - DNA, 260 bp, Unknown
  Description of Unknown: RightRegion for integrase B4369 sequence
gccaaaatgttcgttttgactcctgattgctccaccaaaaaggcactgtacttcgtttgaagtacggtgcttttctttttgctttcttagaggctgcatcgagaatcagccaaatgcctgattttgcaggcggacagattactccccctcgatgtatggggtgaagccgaagttgaacgagatgctgatctgatagcgtttcatgataagcggttctttcgggatgcaaaaaaaaatagccgccagcttcaaagacatct

SEQ ID NO: 30369 - DNA, 260 bp, Unknown
  Description of Unknown: RightRegion for integrase B4370 sequence
tcgcaagggatcattccgggaacgatgcaggtaccgaagaactatcccatctcgaaatgataggctctatagtatcccagctcacaacaggcgagggcgcaaagagctttgaccgatacggagtaggcgcatattatatggatcacgcaaatgcggtttacccatccaatgccggcggtgtgccgtttaccgccgcatacatccagagcaaagccgatccgctcgctgatattcacgaagatcttgcggcggagcagaaa

SEQ ID NO: 30370 - DNA, 260 bp, Unknown
  Description of Unknown: RightRegion for integrase B4371 sequence
cacttttatataaattctaccgcctaccctattactttaatagtgcctttcggtgtttaaagtgtatttaatgtattatataagatatattaaatatattacactactatactataaataaaaggcgttaaatagtcaaaaaaataaaggcctatcgtgctagtacatcactaaccacgataggccttttatgcgtttcagttataaattattactttataactcgttccattttggaacaggttcccatacgtccgccc

SEQ ID NO: 30371 - DNA, 260 bp, Unknown
  Description of Unknown: RightRegion for integrase B4372 sequence
ggagataaggataagcctacttttacactgaatttaaagccccgaatcccgcgtatttaggggctttctcattagcgacaacatttatgggcgcaagaactggctcacttagaaatcgtctgtgctattgtttatcaacttacaaaaaatatgacaatggaagaattagaaaaatccggttttgataaatattatgtagatcatacgcttgcactctggccacagtctgccggcggtgttccttggagcgccactacttt

SEQ ID NO: 30372 - DNA, 260 bp, Unknown
  Description of Unknown: RightRegion for integrase B4373 sequence
gtaaaagacgttgtgaaggagtgcgtctgggacggggtagaacttaaaattacgctttaaaactcacttttttattttgcggccatctgacatcattataaaaaagtgaatattaaaacaaagcagcggcagaggttatcccctgccgctgcttttaatctgtcaagccgggatactggagagctccatcctgatccggcgtgagcgtcaccggatcggtggccatgcggccctcctggtccaggtagtaccatttacca

SEQ ID NO: 30373 - DNA, 260 bp, Unknown
  Description of Unknown: RightRegion for integrase B4374 sequence
gagtcttgcatgactttcttattatatcatggttgcgcgatatttcaactggcggcgtaaaaattccccctgcccgagcggcagggggatcttgttatttgcggacgatatagcgcaggtagcgctcgaccttgtccggctgtgcgtccgcgtcgcggatgaagtcggcggccatgtcggcgtagaagtccgggctatggatgccgtagcgcttggccgtggcggcgtagtcgctgtacatggcgttggccaccgcatag

SEQ ID NO: 30374 - DNA, 260 bp, Unknown
  Description of Unknown: RightRegion for integrase B4375 sequence
gagtcttgcatgactttcctattatatcatggatgcgcgatatttcaactggcggcgtaaaaattccccctgccgatgtggcagggggtcttgttatttgcggacgatatagcgcatgtagcgctcgaccttgtccggctgtgcgtccgcgtcgcgaatgaagtcggcggccatgtcggcgtagaagtccgggctatggatgccgtagcgcttggccgtggcggcgtagtcgctgtacatggcgttggctaccgcgtaga

SEQ ID NO: 30375 - DNA, 260 bp, Unknown
  Description of Unknown: RightRegion for integrase B4376 sequence
cttaatattaatgattttatttcacgcaacatacaacagatgagagaactaactgactagctctctcatctttatatttatgtatttatctaaaagtctactctgctttagtattctttctttactgtaattctctcttatcatttgttctaattttgctttgttttttatgattaacagttctactctgtagctcattaaatcacctcatatgtattataacatattatgtttactttgtctgtcgaaacttgtcgaag

SEQ ID NO: 30376 - DNA, 260 bp, Unknown
  Description of Unknown: RightRegion for integrase B4377 sequence
attgagtattttacctatgacagcgaaacaaatgaagttggatataaactaaggttgtaggtagctctacagcctttcatttattatggacatatgttgttatttagattgtgttgcatcggcaccttgtcctgtagataaatcaatattaagtccttcttcttcaaaaaagccttcatttattgcaacatacattggagcataaaatacagatcttacaacttcatttaatctaacagtttgtaaatttgcttcatcag

SEQ ID NO: 30377 - DNA, 260 bp, Unknown
  Description of Unknown: RightRegion for integrase B4378 sequence
gagtcttgcatgactttcttattatatcatggatgcgcgatatttcaactggcggcataaaaattccccctgccgatgtggcagggggtcttgttatttgcggacgatatagcgcatgtagcgctcgaccttgtccggctgtgcgtccgagtcgcggatgaagtcggcggccatgtccgcgtagaaatccgggctatggatgccgtagcgcttggccgtagcggcgtagtcgctgtacatggcgttggccaccgcataga

SEQ ID NO: 30378 - DNA, 260 bp, Unknown
  Description of Unknown: RightRegion for integrase B4379 sequence
tcgcaagggatcattccgggaacgatgcaggtacagaagaactatcccatctcgaaatgataggctctttagtatcccagctcacaacaggcgagggcgcaaagagctttgaccgatacggagtaggcgcatattatatggatcacgcaaatgcggtttacccatccaatgccggcggtgtgccgtttaccgccgcatacatccagagcaaagccgatccgctcgccgatattcacgaagatcttgcggcggagcagaaa

SEQ ID NO: 30379 - DNA, 260 bp, Unknown
  Description of Unknown: RightRegion for integrase B4380 sequence
gctaaaatgttcgttttgactcctgatagctccaccaaaaaagcactgtacttcgtttgaagttcggtgcttttctttttgctttcttggaggtcgcactgaaaatcatccaaatgcctgattttgcaggcgcatggacggcaacccccaattcttgctgtttcgttatttttgaaaatgcttgttcgatgcccgactgttttgcaggcagacgtatcactccccctcaatgtaaggagtgagatcgaagttgaacgaga

SEQ ID NO: 30380 - DNA, 260 bp, Unknown
  Description of Unknown: RightRegion for integrase B4381 sequence
gagtcttgcatgactttcctattatatcatggatgcgcgatatttcaactggcgtcgtaaaaattccccctgccgatgtggcagggggtcttgctatttgcggacgatatagcgcagatagcgctcgaccttgtccggctgtgcgtccgagtctcggatgaagtcggcggccatatcggcgtagaaatccgggctgtggatgccgtagcgctttgccgtggcggcgtaatcgctgtacatggcgttggccaccgcgtaga

SEQ ID NO: 30381 - DNA, 260 bp, Unknown
  Description of Unknown: RightRegion for integrase B4382 sequence
ggagataaggataatcctacttttacactgaatttaaagccccgaatcccgcgtatttaggggctttttcattagcgacaacatttatgggcgcaagaactggctcacttagaaatcgtctgtgctattgtttatcaacttacaaaaaatatgacaatggaagaattagaaaaatccggttttgataaatattatgtagatcatacgcttgcactctggccacagtctgccggcggtgttccttggagcgccactacttt

SEQ ID NO: 30382 - DNA, 260 bp, Unknown
  Description of Unknown: RightRegion for integrase B4383 sequence
aaggtaacacgcaattggtttgccatcgtgaccttctgtgaatcaaacaataaaaaatgactgaacaatcccaaagatctgcttgcttttctctatggtctaccctataataatagacgtcaagaggaaaggaggtggttcaaatggacgagtttttgaaggacttggcagtagccgtgataagcagcttggttacagtagcagcggaaacggcaatccaagccctaaaagaaaagacctctcgcaaagccgggaagcat

SEQ ID NO: 30383 - DNA, 260 bp, Unknown
  Description of Unknown: RightRegion for integrase B4384 sequence
aaaaagttcgcacaaggtcacgtcgcctccaccagtaaaaaaagccacctgaaaacgtaagttttcgggtggcttttgctatacggagcgatgttgtattgttacgccagatccggtaggatatccgaccacagagcctgctcctgccgcaaagcatcgaagcagcagtccagatacattttattgactgccgcaaaaatggtgctgcgcagcaacagacgctcgtcgttgagcgtagcctccggctgggtggccttgcc

SEQ ID NO: 30384 - DNA, 109 bp, Unknown
  Description of Unknown: RightRegion for integrase B4385 sequence
ggagataaggataatcctacttttacactgaatttaaagccccgaatcccgcgtatttaggggctttttcattagcgacaacatttatgggcgcaagaactggctcact

SEQ ID NO: 30385 - DNA, 260 bp, Unknown
  Description of Unknown: RightRegion for integrase B4386 sequence
gaaagttcgaccgagaagcgtttggtccgagtggcgagaatcgaactcacggcctcttgaaccccattgtgcttctctcaaaaacgcaatggacactccgataccacttgtacgcagtatcatcaaatttcaaaattattttatcattctgtttcgttagatgtcaagatgtttcgtttcttttgtggtcaaattgtggtcaaccgaccctgacaaatgaccattctcccctactaagttacatggcgcaattccgattt

SEQ ID NO: 30386 - DNA, 260 bp, Unknown
  Description of Unknown: RightRegion for integrase B4387 sequence
gaatcaattgtaatagatactgatgaatttattattaattttaacataaaaaaaaactagataatgctttaaacacattgtctagtttgtatcttaagcatatccgttcgcagtttagcatatcacacttcagtatgaccaacaaaaaggcctgacttttctcctgcacagaaaaggttatcaactccaacaaccttcatatcattagttcttggagcaacagataaataccttatagaatttcctttacttcctgcata

SEQ ID NO: 30387 - DNA, 260 bp, Unknown
  Description of Unknown: RightRegion for integrase B4388 sequence
gattccgtcgaagaaaatacggcagaaggttcgtttaagctctgccttgctccaccataagtccaccgtaattttgatagaattacggtggactttttctatgcccgaaaaccgcttgaaatagggcttttcggctgttcaggctcataaacggtaagcgctcaataaccacccgcctataaagcatgcaggcccgcaaccacgggcctgcatgttagtcgagataggtattcacataagcgtcagaattcttcacacag

SEQ ID NO: 30388 - DNA, 260 bp, Unknown
  Description of Unknown: RightRegion for integrase B4389 sequence
gaaagttcgaccgagaagcgtttggtccgagtggcgagaatcgaactcacggcctcttgaaccccattgtgcttctctcgaaaacacaatgtacaatccgatactgcctagactcagtatcgttaaatttcaaatatattatatcattctgtttcattggatgtcaagacgtttcattccttttgtggtcaaattgtggtcaaacgaccccgacaaatgacttttctcccccagctaagttacatcgcgcaatttcgatt

SEQ ID NO: 30389 - DNA, 61 bp, Unknown
  Description of Unknown: RightRegion for integrase B4390 sequence
tgttggactcgaaccaacgaccctgcggttaacagccgcatgctctaccgactgagctaag

SEQ ID NO: 30390 - DNA, 260 bp, Unknown
  Description of Unknown: RightRegion for integrase B4391 sequence
gctaaaatgttcgttttgactcctgatagctccaccaaaaaagcactgtacttcgtttgaagtatggtgcttttctttttgatttcttggaggctacggaaaaaatcagtcaaaagtctgattttgcaggcgcatggacggcaacccccaattcttgctgtttcgttgtttttgaaaatacttgttcgatgcccgactgttttgcaggcggacgtatcactccccctcgatgtacggagtaaggtcgaagttgaacgaga

SEQ ID NO: 30391 - DNA, 260 bp, Unknown; identical to SEQ ID NO: 30381
  Description of Unknown: RightRegion for integrase B4392 sequence

SEQ ID NO: 30392 - DNA, 260 bp, Unknown
  Description of Unknown: RightRegion for integrase B4393 sequence
acttatgggcatggtgatgttatcaattttacacttgatatttatcccaaactgcagtaattgtactaaaataaagcggtacaattactgctttattttttgcatataagaatagagataacctctacgtgctaatgtatatgctcatagaggttatcgttatttttattctctttatttttacagctcttttaataatgccgcaaatcctgcttccttcagccgtttttccatctcagctgcatcttcctttgtggcat

SEQ ID NO: 30393 - DNA, 260 bp, Unknown
  Description of Unknown: RightRegion for integrase B4394 sequence
aaagccggcattggtcggtacgtggagaacgtgtttgatcttgatatagagttgttataattcatttccaacatcgcggtgcagattcctctgtgccaatatcggtcagcagccccgccaccttccgatccggcatgctgtagcgctgcgacaggtaacgaaacgatgctgccgcttctccgtccgggccgccgtactgcgacaaaatgatctgcgcgatcttcgcattggggcttgtgatgttgaccgggtactgcagg

SEQ ID NO: 30394 - DNA, 260 bp, Unknown
  Description of Unknown: RightRegion for integrase B4395 sequence
attgaatattttacttatgatagccaaacaaatgaaattggttataaattaaggctgtagttattcctacagcctttttattaaagtggacataggttgtaaattagattttattgcatctgcaccttgtccagttgataagtctattgcaagtccttcttcttcaaagaaaccttcatttattgcaacatacattggtgcataaaatacagatcttacaacttcatttaatcttatggtttttaaatttgtactttcag

SEQ ID NO: 30395 - DNA, 260 bp, Unknown
  Description of Unknown: RightRegion for integrase B4396 sequence
gctaaaatgttcgttttgactcctgatagctccaccaaaaaagcactgtacttcgtttgaagtgcggtgcttttctttttatatagacgcagaaaaaggaggggacttcccacaaaagggaaagtcaccgcctttgatgatcatcggatgagccagccgtaatcctgtctgcaatctaccacatgatccgcataaaccgtatgatctacaatctggaagataagcatatagcgtttttcaaacaagatgaatcggtaagc

SEQ ID NO: 30396 - DNA, 260 bp, Unknown
  Description of Unknown: RightRegion for integrase B4397 sequence
acctatgggcatagtgatgatatcaattttacactagatatctatcctaaattgcaataatatcatcattttgcccatgtaaatgggtgtaaaaagatagggataatctctacgtgccaatatgttggcccatagaggctatcatcaatttaaaaaaagaaattcccgggaaattaaccccgggatactttttactgtttcttgatatattttgcagatacaaagccataatactttcctgcaatacggatataatacca

SEQ ID NO: 30397 - DNA, 260 bp, Unknown
  Description of Unknown: RightRegion for integrase B4398 sequence
cgaggttatgaattagagattatattcgaccttaattatgaacaattcttatctctataaagacttatagattgaatttacaaatttattctgctataatattttcagcttagaagtgggtgaatatatatgagcgaagaaaataagatacaaatttttgaagataaaaagattcgtactgcgtggaatgagtcggaagaagaatggtatttttctatagttgatgtaatttcagttctgactgacagtaacgaacctcg

SEQ ID NO: 30398 - DNA, 260 bp, Unknown
  Description of Unknown: RightRegion for integrase B4399 sequence
attgagtattttacctatgacagcgaaacaaatgaagttggatataaactaaggttgtaggtagatctacagcctttcatgtattatggacatatgttgttatttagattgtgttgcatctgcaccttgtccagttgataaatcaatctctagcccttcttcttcaaaaaaaccctctgtaattgctacatacatgggtgtataaaaaacagatctaacaacttcgtttaatcttacaatttgtaattcaacatcacttc

SEQ ID NO: 30399 - DNA, 260 bp, Unknown
  Description of Unknown: RightRegion for integrase B4400 sequence
aagtattggatgaacacctactttttcagcggcggatttgccgtcagatgtgttctctgatacaaaaacagaacgccgtttcagtgtaaaagctgaagcggcgtttttctgtctttaaaagattttttatccacatattcgatttttgggtaagctccgtttataatgaaatcatcaaaatgaaacggaggtagcagaatgagaaatccgagatatcacttatatttatcacccgatgaacggcgtacagtcatcaacag

SEQ ID NO: 30400 - DNA, 120 bp, Unknown
  Description of Unknown: RightRegion for integrase B4401 sequence
attgagtattttacctatgacagcgaaacaaatgaagttggatataaactaaggttgtaggtagctctacagcctttcatttattatggacatatgttgttatttagattgtgttgcatc

SEQ ID NO: 30401 - DNA, 260 bp, Unknown
  Description of Unknown: RightRegion for integrase B4402 sequence
tacgaactcttttggtttaagaacgtgttcggcctgacaagaaagctgccgcagaggtaattgtcctctgcggcagctttcttattcgccggtgtagccctcacaccgcgcgttgctcataagtagccgtgatttctctttttcgcttcaatgtttgacagcacatcccggatttcaaaggcacctatcgcacagttccagtgatcgcacccaaacgagcggaagatgcagttttggcacccgtcctgctgcttgcagta

SEQ ID NO: 30402 - DNA, 260 bp, Unknown
  Description of Unknown: RightRegion for integrase B4403 sequence
gagtcttgcatgactttcctattatatcatggatgcgcgatatttcaactggcggcgtaaaaattccccctgccgatgtggcagggggtcttgttatttgcggacgatatagcgcatgtagcgctcgaccttgtccggctgtgcgtccgcgtcacggatgaagtcggcggccatgtccgcgtagaaatccgggctgtggatgccgtagcgcttggccgtggcggcgtagtcgctgtacatggcgttggccaccgcgtaga

SEQ ID NO: 30403 - DNA, 260 bp, Unknown
  Description of Unknown: RightRegion for integrase B4404 sequence
tttcgtacggggccgggttcccgcacgggtcaccaagaagcactacttcatttgaggtagtgcttttttctttgtatccgctttttaataggtgtcgggcgtaaaaggtgacccgtgtgggaatcgaaaagcccgggccccgcgtccagcgtaccgcggggcaaaaacagccccgcgggctgtttttagggcgcgggagattccgcgcgggcggaagctgatgtggccggggtggttggcgtgggatgttgttgtttaag

SEQ ID NO: 30404 - DNA, 109 bp, Unknown; identical to SEQ ID NO: 30384
  Description of Unknown: RightRegion for integrase B4405 sequence

SEQ ID NO: 30405 - DNA, 260 bp, Unknown
  Description of Unknown: RightRegion for integrase B4406 sequence
acttatgggcatggtgacgttatcaattttacacttgatatttatcccaaactgcagtaattgtactaaaataaagcggtataattactgctttattttttcatataaaaatagagataacctctacgtgctaatgtatatgctcatagaggttatcgttatttttattctctttatttttacagctcttttaataatgccgcaaatcctgcttccttcagccgtttttccatctcagctgcatcttcctttgtggcata

SEQ ID NO: 30406 - DNA, 260 bp, Unknown; identical to SEQ ID NO: 30376
  Description of Unknown: RightRegion for integrase B4407 sequence

SEQ ID NO: 30407 - DNA, 260 bp, Unknown; identical to SEQ ID NO: 30386
  Description of Unknown: RightRegion for integrase B4408 sequence

SEQ ID NO: 30408 - DNA, 260 bp, Unknown
  Description of Unknown: RightRegion for integrase B4409 sequence
ggagataaggataatcctacttttacactgaatttaaagccccgaatcccgcgtatttaggggctttttcattagcgacaacatttatgggcgcaagaactagctcacttagaaatcgtctgtgctattgtttatcaacttacaaaaaatatgacaatggaagaattagagaaatccggttttgataaatattatatagatcatacgcttgcactctggccacagtctgccggcggtgttccttggagcgccactacttt

SEQ ID NO: 30409 - DNA, 260 bp, Unknown
  Description of Unknown: RightRegion for integrase B4410 sequence
attgaatattttacttatgatagtgaaactaatgaggttggttataaaataaggttgtagctaactctacagcctttcatttattatggacatatgttgttatttagattgtgttgcatcggcaccttgtcctgtagataaatcaatattaagtccttcttcttcaaaaaagccttcatttattgcaacatacattggagcataaaatacagatcttacaacttcatttaatctaacagtttgtaaatttgcttcatcag

SEQ ID NO: 30410 - DNA, 131 bp, Unknown
  Description of Unknown: RightRegion for integrase B4411 sequence
gctaaaatgttcgttttgactcctgatagctccaccaaaaaagcaccatacttcatgtgaggtatggtgcttttctttttgatttcttagaggttgcatcgagaatcagccaaatgcctgattttgcaggc

SEQ ID NO: 30411 - DNA, 123 bp, Unknown
  Description of Unknown: RightRegion for integrase B4412 sequence
attgaatattttacttatgatagccaaacaaatgaaattggttataaattaaggctgtagttattcctacagcctttttattaaagtggacatatgttgtaaattagattttattgcatctgc

SEQ ID NO: 30412 - DNA, 260 bp, Unknown; identical to SEQ ID NO: 30385
  Description of Unknown: RightRegion for integrase B4413 sequence

SEQ ID NO: 30413 - DNA, 260 bp, Unknown
  Description of Unknown: RightRegion for integrase B4414 sequence
agtatcgtatttagcagggaaaataatacagagttcatactggatataactttacgataaccttatactattatagtgtaaggattactttttacccatgatgtgtatcatagatgggcatcttttatagctccaccatgatacacgtcacagggtttatgggaggaaatataaatgagagtagtatggaaagatagcgcaccgaagactaagccatggatcgaattgaagtataggaattataccataagtcagtatgg

SEQ ID NO: 30414 - DNA, 260 bp, Unknown
  Description of Unknown: RightRegion for integrase B4415 sequence
attgaatattttacttatgatagccaagcaaatgaaattggttataaattaaggctgtagttactcctacagcctttttattaaagtggacatatgttgtaaattggattttattgcatctgcaccttgtccagttgataagtctattgcaagtccttcttcttcaaagaaaccttcatttattgcaacatacattggtgcataaaatacagatcttacaacttcatttaatcttatggtttttaaatttgtactttcag

SEQ ID NO: 30415 - DNA, 260 bp, Unknown
  Description of Unknown: RightRegion for integrase B4416 sequence
attgaatattttacttatgatagccaaacaaatgaaattggttataaattaaggctgtagttactcctacagcctttttattaaagtggacatatgttgtaaattggattttattgcatctgcaccttgtccagttgataagtctattgcaagtccttcttcttcaaagaaaccttcatttattgcaacatacattggtgcataaaatacagatcttacaacttcatttaatcttatggtttttaaatttgtactttcag

SEQ ID NO: 30416 - DNA, 260 bp, Unknown
  Description of Unknown: RightRegion for integrase B4417 sequence
agaggttatgaacttgagatagtgtttgatcttaattatgagcagtttttatctaaataaatcttaatcaattgaatttacaaatcttgtctgttataataattttagtattgaaatgggtgaagatatatgagtgaagaaaataaaattcaaatttttgaagataagaaaattcgtactgcatggaatgaatcggaagaagattggtatttttccatagttgatattgttcaggtgttaactgatcaacccagttacga

SEQ ID NO: 30417 - DNA, 260 bp, Unknown
  Description of Unknown: RightRegion for integrase B4418 sequence
ggcttggacggttcggatttgaattgttgtggtgtaccaaaagtcctcgaaatcgtctgatttcgaggacttttgcttttcgtaagttgccgttttgggatactgctttttcctgacccacaccgtgacccacatcggctgttaaactgtacccaagaaaatggacacgagattttgacccatggccccgttcggcggacacgcatttgacccatagggtcagaagcgccgcacctgtgttacgcaaagggcgttcgcgg

SEQ ID NO: 30418 - DNA, 260 bp, Unknown
  Description of Unknown: RightRegion for integrase B4419 sequence
ttaagctccgcaagcagccaccaaaagaggaagcgtcgaactcttcttttacaagaatgagtttgcgcttgtgtataggttgggggacgcctgatggcgtcccctttccgtttccgttgccacgaaacgccgtattttgcgttttaagacgttttaagcccgttggggtactcgtgtacccctcgggcttttttcgtgccttaaaacggctctgaagcggtctgaggacgttcgagcgcccatgtgcatctcgcgttcgc

SEQ ID NO: 30419 - DNA, 260 bp, Unknown
  Description of Unknown: RightRegion for integrase B4420 sequence
cgaggttatgaattagagattatattcgaccttaattatgaacaattcttatctctataaagcctaatagattgaatttacaaatttattctgctataatattttcagcttagaagtgggtgaatatatatgagcgaagaaaataagatgcaaatttttgaagataaaaagattcgtactgcgtggaatgagtcggaagaagaatggtatttttccatagttgatgtaatttcagttctgactgacagtaacgaacctcg

SEQ ID NO: 30420 - DNA, 260 bp, Unknown
  Description of Unknown: RightRegion for integrase B4421 sequence
attgaatattttacttatgatagcaaaacaaataaaattgaatataaaataaagctatagataattctatagcttatataatatgtatatgtattgttgttttgaatgggttgtatcagctacactttcaaaacaacaataatattttttaatacttaatagaatttttaaaggttctaatttactgctttatagttgcaaaataatttacttaaagtaaaaagctagataccaacttattagtacctagctttttaatc

SEQ ID NO: 30421 - DNA, 260 bp, Unknown
  Description of Unknown: RightRegion for integrase B4422 sequence
gctaaaatgttcgttttgactcctgatagctccaccaaaaaggcactgtacttcgtttgaagtacggtacttttcttttttctttcttagaggttgcatcgagaatcagccaaatgcctgattttgcaggcggacagattactccccctcgatgtatggggtgaagccgaagttgaacgagatgctgatctgatagcgtttcatgataagcgtttttttcgggatgcaaaaaaaatagccgtcagcttcaaagacctctt

SEQ ID NO: 30422 - DNA, 109 bp, Unknown; identical to SEQ ID NO: 30384
  Description of Unknown: RightRegion for integrase B4423 sequence

SEQ ID NO: 30423 - DNA, 260 bp, Unknown
  Description of Unknown: RightRegion for integrase B4424 sequence
aaagctggcattggtcggtacgtggagaatgtgtttgatcttgatatagagctgttatagttcatctccaacatcgaggtgcagattcctctgtgccaatatcggtcagcagccccgccaccttccgatccggcatgctgtagcgctgcgacaggtaacgaaacgatgctgccgcttctccgtccgggccgccgtactgcgacaaaatgatctgcgcgatcttcgcattggggcttgtgatgttgaccgggtactgcagg

SEQ ID NO: 30424 - DNA, 109 bp, Unknown
  Description of Unknown: RightRegion for integrase B4425 sequence
gaaggcgctgtcagtggtgacggttgcaaaggttcagcttttgcgccgtcaagcgcatgaaaaaagccttgatgatatcagggcttttttgctgttacaaagtattcgt

SEQ ID NO: 30425 - DNA, 260 bp, Unknown
  Description of Unknown: RightRegion for integrase B4426 sequence
aaagctggcattggtcggtacgtggagaacgtgtttgatcttgatatagagctgttatagttcatctccaacatcgaggtacagattcctctgtgccaatatcggtcagcagccccgccaccttccgatccggcatgctgtagcgctgcgacaggtaacgaaacgatgctgccgcttctccgtccgggccgccgtactgcgacaaaatgatctgcgcgatcttcgcattggggcttgtgatgttgaccgggtactgcagg

SEQ ID NO: 30426 - DNA, 260 bp, Unknown
  Description of Unknown: RightRegion for integrase B4427 sequence
cgcatcgatgagaaaagcagcacggtagtcttccgaggtgggattgagattacaatttaatatgaagaaacacgaatcgaaaggggcatctggcagcttggctggatgcccctttctttatgtactgatattgagtgctgtatgatatgttgatggcaaatacatttaccagcggtatcagattttgaggatattgcgaagctgcaaatatagtttatcacagatgccggaggtttttcctgtaatggcgtagatcttct

SEQ ID NO: 30427 - DNA, 260 bp, Unknown
  Description of Unknown: RightRegion for integrase B4428 sequence
gcggcccccgcccatggtgagggggttctactattgccgcatcatctccaccagaattagtccaatcgtgacagttgattggtggaataaaaagcagaggatagtgtgtgacagcactattctctgtttttgtttgcaagctgtttagtgtgtgtaagctgcttgcctataacagcacgaggataatgtactttcgcggtacgttatcctcttttttgtttttaggatgaatttaagcataggtgatgcaaaatttttat

SEQ ID NO: 30428 - DNA, 260 bp, Unknown
  Description of Unknown: RightRegion for integrase B4429 sequence
tattacgtggcatggcgcacggtcgtcatagtcacgaaatacaggaagaccccctgctagggggtcttcctcttttctggccaaatgaaaagccccactagcgcgggcgctagtggggccaaaccgtgaaggtttcacatcgcggccattatagcattccgctacaccttcgaagcgtatgcggctccctggtacctgatggcgaaccagccgtccgaggtcttgccccacaggtttccgtcctcgctcgctgtctgcgt

SEQ ID NO: 30429 - DNA, 260 bp, Unknown
  Description of Unknown: RightRegion for integrase B4430 sequence
gccaaaatgttcgttttgactcctgattgctccaccaaaaaagcactgtacttcgtttgaagtatggtgcttttctttttgatttcttggaggctacggaaaaaatcagtcaaaagtctgattttgcaggcgcatggacggcaacccccaattcttgctgtttcgttgtttttgaaaatacttgttcgatgcccgactgttttgcaggcggacgtatcactccccctcgatgtacggagtaaggtcgaagttgaacgaga

SEQ ID NO: 30430 - DNA, 109 bp, Unknown
  Description of Unknown: RightRegion for integrase B4431 sequence
tcaggacacggaagatggattgaaaacaagtttaaacttgaaatttttttacgtttataatttccaacatttatgtaccaatgaattggcgcacctcgagatgattgcc

SEQ ID NO: 30431 - DNA, 260 bp, Unknown
  Description of Unknown: RightRegion for integrase B4432 sequence
tcgcaagggatcattccgggaacgatgcaggtaccgaagaactatcccatctcgaaatgataggctctatagtatcccagctcacaacaggcgagggcgcaaagagctttgaccgatacggagtaggcgcatattatatggatcacgcaaatgcggtttacccatccaatgccggcggtgtgccgtttaccgccgcatacatccagagcaaagccgatccgctcgccgatattcacgaagatcttgcggcggagcagaaa

SEQ ID NO: 30432 - DNA, 260 bp, Unknown
  Description of Unknown: RightRegion for integrase B4433 sequence
ggagataaggataatcctacttttacactgaatttaaagccccgaatcccgcgtatttaggggctttttcattagcgacaacatttatgggcgcaagaacacgcccaaaaacgttctcgcttatttttcttccttattataatgcgtttttacagcgtttctgcgtatttactggatatcttaatccagccctcgccggactttaatctgccatacggcatcttctccacggtcctcgtttccgtgatcgtatagaccga

SEQ ID NO: 30433 - DNA, 73 bp, Unknown
  Description of Unknown: RightRegion for integrase B4434 sequence
gaaagttcgaccgagaagcgtttggtccgagtggcgagaatcgaactcacggcctcttgaaccccattcaagc

SEQ ID NO: 30434 - DNA, 260 bp, Unknown
  Description of Unknown: RightRegion for integrase B4435 sequence
cgaggctatgaattagagattatattcgaccttaattatgaacaattcttatctctataaagcctaatagattgaatttacaaatttattctgctataatattttcagcttagaagtgggtgaatatatatgagcgaagaaaataagatacaaatttttgaagataaaaagattcgtactgcgtggaatgagtcggaagaagaatggtatttttccatagttgatgtaatttcagttctgactgacagtaacgaacctcg

SEQ ID NO: 30435 - DNA, 260 bp, Unknown
  Description of Unknown: RightRegion for integrase B4436 sequence
gagggttcgcctttggactcgtctgctccattaaaactgaaccagtcgaactctgtataggatcttatcgtatacagaaatcggttttgtttggtgtattgaagaaaataggaattctctaaaagaaaattcgtacatagattattattatcatggatcaattgagattttgataaaattatttgaatgataaaatggaaatgtaaggaatgtgtcagattatactgcatcagacataaaggcaattctaccatgtgaat

SEQ ID NO: 30436 - DNA, 260 bp, Unknown; identical to SEQ ID NO: 30399
  Description of Unknown: RightRegion for integrase B4437 sequence

SEQ ID NO: 30437 - DNA, 260 bp, Unknown
  Description of Unknown: RightRegion for integrase B4438 sequence
aaagaccttgaaccaaagttcaaaggcactcgaaatacgcttgtttatattgaaatatgatgaaaaataggctcaaaagtgttctaacgaggttaagcaaacgcatcaacttttttcgccacatctgctataatgccgttcgtcgaagtaaacgtatagagtaataaacgagctgtgccgtttgtcgtccgcgttaaatcatcgcctggatctatcgtcggatatcccgcagtgtcatatatggattttatttcagccgt

SEQ ID NO: 30438 - DNA, 260 bp, Unknown
  Description of Unknown: RightRegion for integrase B4439 sequence
gatagagaaaaagttcgcgcaagttctccatcggtcaaccagaacaaagccatccgatgaacgatcgggtggcttttctgttttgttttctgccgatttcacgcagtgaacacaccgcactgtaccaaaggtctttgggcaaatcaaacacccgcaccgcattcccttttcttgggagatgcagtgcgggtgcttttttcgtttgtcaaccagcgggctgaatcatcttacaggatgctgatgcggcctgcaccgtaggg

SEQ ID NO: 30439 - DNA, 260 bp, Unknown
  Description of Unknown: RightRegion for integrase B4440 sequence
gagtcttgcatgactttcctattatatcatggttgcgcgatatttcaactggcggcgtaaaaattccccctgccgatgtggcagggggtcttgttatttgcggacgatatagcgcagatagcgctcgaccttgtccggctgtgcgtccgcgtcccgaatgaagtcggcggccatgtccgcgtagaaatccgggctgtggatgccgtagcgctttgccgtggcggcgtaatcgctgtacatggcgttggccaccgcgtaga

SEQ ID NO: 30440 - DNA, 260 bp, Unknown
  Description of Unknown: RightRegion for integrase B4441 sequence
ccaccagtaacacgaatactgcttttgcggtgttcgtgttatttttatacccacgcctgatttcctaatcttcgtttaatctttacacgctatgataaaatctgtataattataccggaaggtgatccaatgcgtattctgcttgccgaggacgagaagagtctcaacaggataatcacaaagcagctcaaggctgccggctacagcgtggacagctgttttgacggcggcgaggcatatgatctgataacatcgaccga

SEQ ID NO: 30441 - DNA, 172 bp, Unknown
  Description of Unknown: RightRegion for integrase B4442 sequence
attgaatattttacttatgatagccaagcaaatgaaattggttataaattaaggctgtagttactcctacagcctttttattaaagtggacatatgttgtaaattggattttattgcatctgcaaataacgtaaaataacaacatttgtccacttattttattattaattat

SEQ ID NO: 30442 - DNA, 109 bp, Unknown
  Description of Unknown: RightRegion for integrase B4443 sequence
tcaggacacggaagatggattgaaaacaagtttaaacttgaaatttttttacgtttataatttccaacatttatgtaccaatgaattggcacatctcgaaatgattgcc

SEQ ID NO: 30443 - DNA, 260 bp, Unknown; identical to SEQ ID NO: 30435
  Description of Unknown: RightRegion for integrase B4444 sequence

SEQ ID NO: 30444 - DNA, 260 bp, Unknown; identical to SEQ ID NO: 30415
  Description of Unknown: RightRegion for integrase B4445 sequence

SEQ ID NO: 30445 - DNA, 260 bp, Unknown
  Description of Unknown: RightRegion for integrase B4446 sequence
aaagaaatcgtctttgaactgaagtgtggactgaaattaaaggaaaggttggtgggataatggcacatataccctacggatataagattataaatggaaaagcagaggttgatgaaaaacaggctgaggtagtcataaagctgtttgatggctacattgcaggacttggattaaagcctgcggcagagaatgcgggtcttgatatttatcatggcagtgcaggcagaatgctgcgaaacacgcattaccttggagatgaa

SEQ ID NO: 30446 - DNA, 260 bp, Unknown
  Description of Unknown: RightRegion for integrase B4447 sequence
gctaaaatgttcgttttgactcctgatagctccaccaaaaaagcaccgtacttcgtttgaagtacggtgcttttctttttgctttcttagaggttgcatcgagaatcagccaaatgcctgattttgcaggcgcatggacggcaacccccaattcttgctatttcgttgcttttgaaaatgcttgttcgatgtccgactgttttgcaggtggacgcatcactccccctcaatgtaaggagtgagagcgaagctgtttgaga

SEQ ID NO: 30447 - DNA, 260 bp, Unknown
  Description of Unknown: RightRegion for integrase B4448 sequence
acaaagattgtgttccacctaaaatgcggattgaatctaacggaaaggttggtgaactaaatggcagcacataccccatatggatatcgcattgtagacggaaaggctgttgtcgatgaggtacaggcggaacaggtcagaagcttttttgaagagtacatttccggtaaggcactaaaggttgctgcagaaaatgtggggctaaagatttttcacggcagtgccggaaggatgcttcgaaatacccgttatcttgggga

SEQ ID NO: 30448 - DNA, 164 bp, Unknown
  Description of Unknown: RightRegion for integrase B4449 sequence
gacttggagggttcggatttgaacggttgtggcgtaccaaaagtcctcgaaatcgtctgatttcgaggacttttgcttttcataagtcccgttttttgtgtgccgcctttttctgacccaaacgctgaccccaacgggagcgggtagcggaaaccatcagacgg

SEQ ID NO: 30449 - DNA, 260 bp, Unknown
  Description of Unknown: RightRegion for integrase B4450 sequence
acctgcattgtaagggtatcgaaaaactggtttgttgtcgttggaacgtgccagaaatagccatttccggtgtttgcaaaataccagatgggcggcttgctgtaagcccgtctaacgccagaaagcggggcaccctgacaaggggtgccccgcttgaacgctaataagaaagcttctggccggggtagatcgtataaggtgccccaatgccgttcttgcttgcgatggtgtgccagtcgatgccgagcgaagcgccaatc

SEQ ID NO: 30450 - DNA, 260 bp, Unknown
  Description of Unknown: RightRegion for integrase B4451 sequence
agaagagaagtagagtttgaattaaaattcggcttaaagctgaaggaaaggattgattaaaatggcacacataccagtagggtacaaaatagttgacggttgtgctgtagttgatgaaacggctgcagaacaaataagggcaacctacagatactattttgaaggcaagtcacttattgatgcagctaaagaagcaggttttaagatgaaccatgcatcagtaaagagaatgctttctaacaagaagtatctgggaacag

SEQ ID NO: 30451 - DNA, 260 bp, Unknown
  Description of Unknown: RightRegion for integrase B4452 sequence
ttattcgatgaattgataagggaagaggatacaataagagttgaaaagcaaactatttaaatagttacttttgtatttaataatacctggagttcacgcttcacatggtatggagagaactcactatgatgctttagaaaacaccataaaactaatatatttgtatttaacaagataaaataagaaaaataattaataaatttgagtcatctaaaagtaaaaaacacttttaggtgactttttttagattattatataac

SEQ ID NO: 30452 - DNA, 260 bp, Unknown; identical to SEQ ID NO: 30399
  Description of Unknown: RightRegion for integrase B4453 sequence

SEQ ID NO: 30453 - DNA, 109 bp, Unknown
  Description of Unknown: RightRegion for integrase B4454 sequence
caacaaaaaaactccgaacgcataagcgttcgaagttgttcttcttggctccccgagtaggactcgaacctacgacgccctgattaacagtcaggtgttctaccggctg

SEQ ID NO: 30454 - DNA, 260 bp, Unknown
  Description of Unknown: RightRegion for integrase B4455 sequence
aaaaagttcgcacaaggtcacgtcacctccaccagtaaaaaaagccacctgaaaacgtaagttttcgggtggcttttgctatacggagcgatgttgtattgttacgccagatccggtaggatatccgaccacagagcctgctcctgccgcaaagcatcgaagcagcagtccagatacattttattgactgccgcaaaaatggtgctgcgcagcaacagacgctcgtcgttgagcgtagcctccggctgggtggccttgcc

SEQ ID NO: 30455 - DNA, 109 bp, Unknown
  Description of Unknown: RightRegion for integrase B4456 sequence
ccaggaataggtcgatatgttgataatccctttagattagagattttcctgaaactgtaaacccgcagtttcagggaattttcaaccacatacaacatcaatgttctaa

SEQ ID NO: 30456 - DNA, 260 bp, Unknown
  Description of Unknown: RightRegion for integrase B4457 sequence
attgaatatagcagggataataatacagaatttatattagacgttttcctgaaggattaaatgtctatatctaactcaattgggcagtgatcggaacccatgacatcggttaagatctccgcatctttgatcttatctttgatagaatctgatgttaagaaataatcgatacgccatccggcattcctttctcttgccttaaatcgatagctccaccatgaatacttctctgtatctgggtgtaaatatcgataagaatc

SEQ ID NO: 30457 - DNA, 260 bp, Unknown
  Description of Unknown: RightRegion for integrase B4458 sequence
aacatgcgtttgtttatgtattcagattacttctctgtccgtattcgacgcattgcttaattactggtctgcaggtatcattttagacaacagtttatcgaccatccacagtacaacagaaattaaagtaggaaggaatgcggaatcacgaaacttattccaaccagtctctttttcagcatccgcttttagtgctgtagtataagaatcagctatctcctttactgcaggaagtgcagtatcttttaaccaggcaacag

SEQ ID NO: 30458 - DNA, 260 bp, Unknown
  Description of Unknown: RightRegion for integrase B4459 sequence
tccctagtaaaagacgattcttttgacttagaaatattccctattctacctagaaaatagccttttctttaatataggtatcgtcttgttccatattcataggggctataacgatacctatatttcatttagttacctactttcttaaataatgcaactattttataacaggattagtctgctttcaagtgctttattttttcagataagttcttgttgtcgagccggccaatccgtcggcagtgattccacacgcttct

SEQ ID NO: 30459 - DNA, 260 bp, Unknown
  Description of Unknown: RightRegion for integrase B4460 sequence
ccgggaataggtcgatatgttgataatccctttagattagagattttcctgaaactgtaaacccgcagtttcaggggattttcaaccacatacaacatcaatgttctaattcttccgtgcctatatcagtcagcaatccggcaacctccctgtatggcatggaatatctctgtgaaagatatctcattgatgctccaagctcgccatctggtccaccatactgcgaaataatcattgctgccagcgtaggattacaattc

SEQ ID NO: 30460 - DNA, 260 bp, Unknown
  Description of Unknown: RightRegion for integrase B4461 sequence
aaccttgaaatacggatcgggaaaggctggttctccatcgtctatcctattgcagcataaaaaatcggggacaacattagaaaatgttatccccgcaaagcagttccctgcttttccttggcttattaaataaaggcggagacggcctacacaccgcagtgtgttgttctagaaatctccacctcgctcccggcaaaggagtgctcagctctaatgcctaccccattctgggacccagccgggaaccactatagtaatat

SEQ ID NO: 30461 - DNA, 109 bp, Unknown
  Description of Unknown: RightRegion for integrase B4462 sequence
ccgggaataggtcgatatgttgataatccctttagattagagattttcttgaaactgtaaatccgcagtttcaggggattttcaaccacatacaacatcaatgttctaa

SEQ ID NO: 30462 - DNA, 260 bp, Unknown
  Description of Unknown: RightRegion for integrase B4463 sequence
cggaacgctatggcctgccacagagcactgattttcatcagtgctcattttttgttttaattaattttaataataattttgtgataattgtgatataatataattaaaaatcctaaaatttgttatttattttaattgacctttttcgtcaataatagtataatttgatacagtaaaatatgaatatatggaggcaaacataatgaaaaaagttttagctattactttatcacttgtatttgtattatttgcatttgcag

SEQ ID NO: 30463 - DNA, 260 bp, Unknown
  Description of Unknown: RightRegion for integrase B4464 sequence
tcacgacaaaaaataggatttgttctgagatgtggccttacatttgaggagatgatttaatgggacacacgccatttggatatataatcgttgacggaaaggctgttgttgacgaagccactgccgaacaggttcgcaatgtctatttgaattaccttagcggactttctcttgtcgatgcggcaaagagggtaggacttaatatgcgacattgcggagtgaagaatatgctgcaaaacaagcactatcttggcgattac

SEQ ID NO: 30464 - DNA, 260 bp, Unknown
  Description of Unknown: RightRegion for integrase B4465 sequence
gctcctgataaagttgacgattttgaattagaatttatctctaaattacctagtaaataagccttttttttattttttatattatgctgacctcatataaacacagacctcaatgaagacctcgctgccgaacagaaagccagaacaacttatgaataccttatgaaaatgacagacgaccctgatgtattagagccattaaagttccttagagaacgtgaaattgttcattatcagagatttggtgaggcccttagaat

SEQ ID NO: 30465 - DNA, 173 bp, Unknown
  Description of Unknown: RightRegion for integrase B4466 sequence
cacaaagattatatcgtagtccttcatgttgtcccgtttcacggcaatttccggtcgtgaggcgggattgttcatttcaatcgtactgcgggctttcttgtccatccagttcaaatccacttccgtgtaaggcaccttcggctcaatctcaaagatgtccgcgccgattgcct

SEQ ID NO: 30466 - DNA, 260 bp, Unknown
  Description of Unknown: RightRegion for integrase B4467 sequence
gattacaccatcaccaagagcataggtcggacattcctgccgacaccggaattacagtaggaaatatgacaccggatataaacaacaacgcctgactgcaaccatgcaatcaggcgttctctcttgctcggaactagaagttcgagcccttcgtggtcgagatgacaggattcgaacctgcgacctctgcgtcccgaaagtagtacaaaaatcccattacattcgattataaagcaccttttaaatcttttgtgacaccc

SEQ ID NO: 30467 - DNA, 260 bp, Unknown
  Description of Unknown: RightRegion for integrase B4468 sequence
ccgggaataggtcgatatgttgataatccctttagattagagattttcctgaaactgtaaacccgcagtttcaggggattttcaaccacatacaacatcaatgttctaattcttccgtgcctatatcagtcagcaatccggcaacctccctgtatggcatggaatatctctgtgaaagatatctcattgatgctccaagctcaccatctggtccaccatactgcgaaataatcattgccgccagtgtaggattacaattc

SEQ ID NO: 30468 - DNA, 260 bp, Unknown
  Description of Unknown: RightRegion for integrase B4469 sequence
aataaacgttctaatgcatatactaaaccagttcttaaaatacgtataattttacgctaattttaaatgtattataaaaagttgtatcggcgttcaaatcgaagcattgattgattatgttcacctcttttatcaagaaaacacagcagaagctcgcaaagctattttagtagaacaacgtgatcgtctccagaaacaaattgataccatgaatttagttattgaacgcttaaataaaaaagtagaccgttatgaagaaa

SEQ ID NO: 30469 - DNA, 260 bp, Unknown
  Description of Unknown: RightRegion for integrase B4470 sequence
aataaacgttctaatgcatatactaaaccagttcttaaaatacgtataattttacgctaattttaaatgtattataaaaagttgtatcggcgttcaaatcgaagcattgattgattatgttcacctcttttatcaagaaaatacagcagaagctcgcaaagatatcttaattgaacaacgcgaccgcttacaaaaacaaattgataccatgaatttagttattgagcgcttaaataaaaaagtagatcgttatgaagaaa

SEQ ID NO: 30470 - DNA, 260 bp, Unknown
  Description of Unknown: RightRegion for integrase B4471 sequence
tacggtgttgaaattgtgtttcgcagcgttataaaggaactatgccaaatgaaagtgtaaaagaaaagcgctcatgccgaagtcatccttccaggcatgagcgcttttcttgcggttgtaaagttttttgctttcgaccttcttgggcgtgggggagaaggcccagacggtgcgcttctggctgtccagctcttttcgggctttcttgctgagcttttcgcgggagatgaattttgccatgaggttcacatcctttcaag

SEQ ID NO: 30471 - DNA, 260 bp, Unknown
  Description of Unknown: RightRegion for integrase B4472 sequence
aataaacgttctaatgcatatactaaaccagttcttaaaatacgtataattttacgctaattttaaatgtattataaaaagttgtatcggcgttcaaatcgaagcattgattgattatgttcacctcttttatcaagaaaacacagcagaagctcgcaaagatatcttaattgaacagcgcgaccgcctacaaaaacaaattgacgctatgaatatagtaattgaacgtttaaataaaaaagtagaccgttatgaagaaa

SEQ ID NO: 30472 - DNA, 260 bp, Unknown
  Description of Unknown: RightRegion for integrase B4473 sequence
ccaggaataggtcgatatgttgacaatccctttagattagagattttcctgaaactgtaaacccgcagtttcaggggattttcaaccacatacaacatcaatgttctaattcttccgtgcctatatcagtcagcaatccggcaacctccctgtatggcatggaatatctctgtgaaaggtatctcattgatgctccaagctcaccatctggtccaccatactgcgaaataatcattgctgccagcgtaggattacaattc

SEQ ID NO: 30473 - DNA, 260 bp, Unknown
  Description of Unknown: RightRegion for integrase B4474 sequence
aataaacgttctaatgcatatactaaaccagttcttaaaatacgtataattttacgctaattttaaatgtattataaaaagttgtatcggcgttcaaatcgaagcattgattgattatgttcacctcttttatcaagaaaacacagcagaagctcgcaaagatatcttaattgaacaacgcgaccgcttacaaaaacaaattgatgctatgaatatagtaattgaacgtttaaataaaaaagtagaccgttatgaagaaa

SEQ ID NO: 30474 - DNA, 260 bp, Unknown
  Description of Unknown: RightRegion for integrase B4475 sequence
cacgaggacaggatcacggtcgagttcaaatccggccttgcgatagacgtggatgcgtagcagcacagaagcaataaggcactcggaattttccgggtgtctttttctgcgtgttgtgttgaaaaattcataaacttgtggtataatgaattatcttgtcagtgcaattgtgcttcaccaaaagcgaggtgcattatggtaaaaaatgattttgatatagacgttaaggtcaaatgtctggaggagcgcatcacccaggc

SEQ ID NO: 30475 - DNA, 260 bp, Unknown
  Description of Unknown: RightRegion for integrase B4476 sequence
aataaacgttctaatgcatatactaaaccagttcttaaaatacgtataattttacgctaattttaaatgtattataaaaagttgtatcggcgttcaaatcgaagcattgattgattatgttcacctcttttatcaagaaaacacagcagaagctcgcaaagatatcttaattgaacaacgagaccgcctacaaaaacaaattgatgctatgaatatagtaatagaacgtttaaataaaaaagtagaccgttatgaagaaa

SEQ ID NO: 30476 - DNA, 260 bp, Unknown
  Description of Unknown: RightRegion for integrase B4477 sequence
gccacgaaccgtggctggattgtctgggatatttctgttgacgcaaatttgtgtatataattctatcatcgttgtaccgacgaaccagtacaacgatgattactataatatacacagcaaaggaggcggtttcccgcctccttcttacatctcgtgcaccatctgctccgtttcggcatatcttctctttacgtcttccggtacttcccatccatgattttcgtaaatccgccagagcctcttcgcatgtttcagctctt

SEQ ID NO: 30477 - DNA, 109 bp, Unknown; identical to SEQ ID NO: 30384
  Description of Unknown: RightRegion for integrase B4478 sequence

SEQ ID NO: 30478 - DNA, 260 bp, Unknown; identical to SEQ ID NO: 30471
  Description of Unknown: RightRegion for integrase B4479 sequence

SEQ ID NO: 30479 - DNA, 260 bp, Unknown
  Description of Unknown: RightRegion for integrase B4480 sequence
attgaatatagcagggataataatacagaatttatattagacgttttcctgaaggattaaatgtctatatctaactcaattgggcagtgatcggaacccatgacatcggttaagatctccgcatctttgatcttatctttgatagaatctgatgttaagaaataatcgatacgccatccggcgttcctttctcttgccttaaatcgatagctccaccatgaatacttctctgtatctgggtgtaaatatcgataagaatc

SEQ ID NO: 30480 - DNA, 260 bp, Unknown; identical to SEQ ID NO: 30471
  Description of Unknown: RightRegion for integrase B4481 sequence

SEQ ID NO: 30481 - DNA, 260 bp, Unknown
  Description of Unknown: RightRegion for integrase B4482 sequence
gctcctgataaagttgacgattttgaattagaatttatctctaaattacctagtaaataagcctttttttttattttttatattatgctgacctcatataaacacagacctcaatgaagacctcgctgccgaacagaaagccagaacaacttatgaataccttatgaaaatgacagacgaccctgatgtattagagccattaaagttccttagagaacgtgaaattgttcattatcagagatttggtgaggcccttagaa

SEQ ID NO: 30482 - DNA, 260 bp, Unknown
  Description of Unknown: RightRegion for integrase B4483 sequence
gctcgcagcgttcttaaaaaatgtgtctgggacggagagtcactttttttgactttctgatttcgcctttttattgctatcgggactgcaatgtgtttaaaaaggtgaaaaaagcagggcatcagctctgcttttttgtatcttttactatcaaattttctatgtaatttgatagcgttcttccttcctccgcagcctttttttctgctgcggtttttactgaagggagtaccttcatgtaaatgattgagcttcttttt

SEQ ID NO: 30483 - DNA, 260 bp, Unknown
  Description of Unknown: RightRegion for integrase B4484 sequence
attgaatatagcagggataataatacagaatttatattagacgttttcctgaaggattaaatgtctatatctaattcaattgggcagtgatcggaacccatgacatcggttaagatctccgcatctttgatcttatctttgatagaatcagatgttaagaaataatcgatacgccatccggcgttcctttctcttgccttaaatcgatagctccaccatgaatacttctctgtatctgggtgtaaatatcgataagaatc

SEQ ID NO: 30484 - DNA, 260 bp, Unknown; identical to SEQ ID NO: 30471
  Description of Unknown: RightRegion for integrase B4485 sequence

SEQ ID NO: 30485 - DNA, 260 bp, Unknown
  Description of Unknown: RightRegion for integrase B4486 sequence
aataaacgttctaatgcatatactaaaccagttcttaaaatacgtataattttacgctaattttaaatgtgttataaaaagttgtatcggcgttcaaatcgaagcattgattgattatgttcacctcttttatcaagaaaacacagcagaagctcgcaaagatatcttaattgaacagcgcgaccgcctacaaaaacaaattgacgctatgaatatagtaattgaacgtttaaataaaaaagtagaccgttatgaagaaa

SEQ ID NO: 30486 - DNA, 260 bp, Unknown
  Description of Unknown: RightRegion for integrase B4487 sequence
ccgggaataggtcgatatgttgataatccctttagattagagattttcctgaaactgtaaacccgcagtttcaggggattttcaaccacatacaacatcaatgttctaattcttccgtgcctatatcagtcagcaatccggcaacctccctgtatggcatggaatatctctgtgaaagatatctcattgatgctccaagctcaccatctggtccaccatactgcgaaataatcattgctgccagcgtaggattacaattc

SEQ ID NO: 30487 - DNA, 260 bp, Unknown
  Description of Unknown: RightRegion for integrase B4488 sequence
tcgagaggtcagagagtaatgtttgttaaactctttatcctcggcgataggtcgccttaattcgttatatagagccatttatcgcttttacagttaagagtagtttatgtatgtatggaagcagggcttccgtatgcttacgataatgtaagtgtacggaagccctttttttgttgcccgatgaaaggagaacaacgatgaagaagaaagaatatcccaaaaatctgttatcgcaggtgttcgtaaacggactacccacc

SEQ ID NO: 30488 - DNA, 260 bp, Unknown
  Description of Unknown: RightRegion for integrase B4489 sequence
aataaacgttctaatgcatatactaaaccagttcttaaaatacgtataattttatgctaattttaaatgtattataaaaagttgtatcggcgttcaaatcgaagcattgattgattatgttcacctcttttatcaagaaaacacagcagaagctcgcaaagatatcttaattgaacaacgcgaccgcttacaaaaacaaattgatgctatgaatatagtaatagaacgtttaaataaaaaagtagaccgttatgaagaaa

SEQ ID NO: 30489 - DNA, 260 bp, Unknown
  Description of Unknown: RightRegion for integrase B4490 sequence
gatgccaaaatgttcgttttgactcctgattgctccaccattggctcaaatgagagttaaaaacaccgttgatttcaaatcgaagtcaacggtgtttttatatttgtcagcaagcaagttcatcgctgttctccaaatactgcgcaagatcaaagttgaagtccacatgaatttgatatccacgataaacatctatcctacggacaagctggctaacaatcatcttttttgattcaaagctggcactgtcgtacaggtct

SEQ ID NO: 30490 - DNA, 260 bp, Unknown
  Description of Unknown: RightRegion for integrase B4491 sequence
ccgggaataggtcgatatgttgataatccctttagattagagattttcctgaaactgtaaacccgcagtttcaggggattttcagccacatacaacatcaatgttctaattcttccgtgcctatatcagtcagcaatccggcaacctccctgtatggcatggaatatctctgtgaaagatatctcattgatgctccaagctcaccatctggtccaccatactgtgaaataatcattgctgccagcgtaggattacaattc

SEQ ID NO: 30491 - DNA, 260 bp, Unknown
  Description of Unknown: RightRegion for integrase B4492 sequence
tcagtttttgtcacaacgcggtttgtgcgaatcgtcgtgacagtaaaagacacctcctgattggggaggtgtctttctatttactctgcgaccgcttccgcccggtgtactgcgtcggtagtggattcctgcggcttcttgaacgcctcgttaaattcagccacggccgcctcgatcaagacttccatttcgtccgcatcaaagtcaatgcccttcttcttaagcagcgcctcagcggtttccagagccttattcagctt

SEQ ID NO: 30492 - DNA, 260 bp, Unknown
  Description of Unknown: RightRegion for integrase B4493 sequence
ggagataaagataatcccacttttacgctgaatctcaagccccgaatcccacgtatttaggggcttttctattagcgacaacatttttggactcacgaacttgcccatctcgagatgatctgcgccattgtgcaccagcttacccgcgacctgacacctgaacaattaaaggaatctggattcgaccaatattatgttgaccacacgttagcactttggcctcaggcagccagcggcacaccttggagcgcaacaacatt

SEQ ID NO: 30493 - DNA, 260 bp, Unknown
  Description of Unknown: RightRegion for integrase B4494 sequence
gagaagaatgatccgaacctgttcttggtgagagacaggttcggattatttctgttttaggactcgaaaaggcggcggaagcgcttatggtggaaaatggagaccaaatcccaataagccgcaagaccagcgctatctgggaaatcccggagaaatcaaaagaacgataatgaataacggtgatgtttacaagacaaaaatggggcctgatgggcgggcggaaatggaacggcatgagacaaatcacaaccgtggagata

SEQ ID NO: 30494 - DNA, 260 bp, Unknown
  Description of Unknown: RightRegion for integrase B4495 sequence
ccgggaataggtcgatatgttgataatccctttagattagagattttcctgaaactgtaaacccgcagtttcaggggattttcaaccacatacaacatcaatgttctaattcgtcagttccacaatgttgtatgtggtaatcccttcctatttataatagaataatatcacatatattttatatgctcaattctaattaggtaacttaagttccattcctgtgtaaagaggtgtattaatatccatatcgttgaattccg

SEQ ID NO: 30495 - DNA, 260 bp, Unknown; identical to SEQ ID NO: 30471
  Description of Unknown: RightRegion for integrase B4496 sequence

SEQ ID NO: 30496 - DNA, 109 bp, Unknown
  Description of Unknown: RightRegion for integrase B4497 sequence
ggaaaagggttcgtatgctgcttgccatgctccctcctgtgttgtgcgaacccttgttgaagttttgcagccgtttaatgggcgcgtttatgacccgtgctgcggctcc

SEQ ID NO: 30497 - DNA, 260 bp, Unknown
  Description of Unknown: RightRegion for integrase B4498 sequence
cggactcggattgcagtaagctcagacgaatggaaaataacagccaatcttgcggcttaactataagggcaggtacgaacctgcccttagctcattttatcatttgtgccagccaagtgtcaagaactttcccctctgatgcgtccgggtcgtttatgtatgctttagccatacgcacgtagttattagtatcgctgccaagaatttctgcaaaatcgctatgcagcatattcataacatagtaccaatcagctttacaa

SEQ ID NO: 30498 - DNA, 260 bp, Unknown
  Description of Unknown: RightRegion for integrase B4499 sequence
attgaatatagcagggataataatacagaatttatattagacgttttcctgaaggattaaatgtctatatctaactcaattgggcagtgatcggaacccatgacatcggttaagatctccgcatctttgatcttatctttgatagaatctgatgttaagaaataatcgatacgccatccggcattcttttctcttgccttaaatcgatagctccaccatgaatacttctctgtatctgggtgtaaatatcgataagaatc

SEQ ID NO: 30499 - DNA, 260 bp, Unknown
  Description of Unknown: RightRegion for integrase B4500 sequence
aataaacgttctaatgcatatactaaaccagttcttaaaatacgtataattttacgctaattttaaatgtattataaaaagttgtatcggcgttcaaatcgaagcattgattgattatgttcacctcttttatcaagaaaacacagcagaagctcgcaaagatatcttaattgaacagcgcgaccgcctacaaaaacaaattgatgctatgaatatagtaatagaacgtttaaataaaaaagtagaccgttatgaagaaa

SEQ ID NO: 30500 - DNA, 260 bp, Unknown; identical to SEQ ID NO: 30479
  Description of Unknown: RightRegion for integrase B4501 sequence

SEQ ID NO: 30501 - DNA, 260 bp, Unknown
  Description of Unknown: RightRegion for integrase B4502 sequence
aatcactcagatgccggctttaccctgaaaatataccctcttatcatgccgaaaaagtaagccaaacagttgagttttccacaaccaaaaagtgcttataagcctatgaaataaggcttttagcaaaacttctaccctcaacgtgcatacgaatacgcgcatggatggtggaagtaatataaacttaatacacagactgtctgtttacgttcattataaaaaagtaagactcacccttaattaaggagtgagcccgtttg

SEQ ID NO: 30502 - DNA, 109 bp, Unknown
  Description of Unknown: RightRegion for integrase B4503 sequence
ccgggaataggtcgatatgttgataatccctttagattagagattttcctgaaactgtaaacccgcagtttcaggggattttcaaccacatacaacatcaatgttctaa

SEQ ID NO: 30503 - DNA, 260 bp, Unknown
  Description of Unknown: RightRegion for integrase B4504 sequence
aataaacgttctaatgcatatactaaaccagttcttaaaatacgtataattttacgctaattttaaatgtattataaaaagttgtatcggcgttcaaatcgaagcattgattgattatgttcatctcttttatcaagaaaacacagcagaagctcgcaaagatatcttaattgaacagcaagaccgcctacaacaccaagacaaagctggaagtgcagaggtgcttttacgatacctttcttccagtatacacctacggc

SEQ ID NO: 30504 - DNA, 260 bp, Unknown; identical to SEQ ID NO: 30471
  Description of Unknown: RightRegion for integrase B4505 sequence

SEQ ID NO: 30505 - DNA, 260 bp, Unknown
  Description of Unknown: RightRegion for integrase B4506 sequence
gattacaccatcaccaagagcataggtcggacattcctgccgacaccggaattacagtaggaaatatgacaccggatataaacaacaacgcctgactgcaaccatgcaatcaggcgttctctcttgctcggaacttgaagttcgagcccttcgtggtcgagatgacaggattcgaacctgcgacctctgcgtcccgaaagtagtacaaaaatcccattacattcgattataaagcaccttttaaatcttttgtgacaccc

SEQ ID NO: 30506 - DNA, 260 bp, Unknown
  Description of Unknown: RightRegion for integrase B4507 sequence
tccagacatgaagtcggatttgtcatgaagtgtggtcttacttttaaggagatgatttgatgggacatacaccacttggctatcgtatcgagaatggcatcgcagttatcgatgaagaagctgcagctaaggtacgacagctatacaagaattaccttggtggtctttcacttacgaatgctgccaaagaagcaggaatcaatgcactgcatgctggttccaagcgaattatgcaaaacaagcattatctcggtgataac

SEQ ID NO: 30507 - DNA, 260 bp, Unknown; identical to SEQ ID NO: 30456
  Description of Unknown: RightRegion for integrase B4508 sequence

SEQ ID NO: 30508 - DNA, 260 bp, Unknown
  Description of Unknown: RightRegion for integrase B4509 sequence
ttcactatatcccccaaacgttcaaaaagccgtagcggtggattgacgcggttaaaataaaaaagcagagcgtcagccctgctttttatcaataattcgcaatacgatttatttgcgtatctattccttgttctgcaagagaaataaactctaatattttttcgctccatcctgcaattatgtttgttttttctccgatgaattgttgtgttccatatccctgcaaatcaactgcatgtacccacatattcggatttatt

SEQ ID NO: 30509 - DNA, 260 bp, Unknown
  Description of Unknown: RightRegion for integrase B4510 sequence
ccgggaataggtcgatatgttgataatccctttagattagagattttcctgaaactgtaaacccgcagtttcaggggattttcaaccacatacaacatcaatgttctaattcttccgtgcctatatcagtcagcaatccggcaacctccctgtatggcatggaatatctctgtgaaagatatctcattgatgctccaagctcgccatctggtccaccatacttcaataagatatacagtttttctacctatttatatatg

SEQ ID NO: 30510 - DNA, 260 bp, Unknown
  Description of Unknown: RightRegion for integrase B4511 sequence
gccccgaaccgtggctggattgtcggggatatttctgttgacgcaaatttgtgtatataattctatcatcgttgtaccgacgaatacgttccacgatgatgactataataaaagaggcggtttcccgcctcttttacatctcatgcaccatctgttctgtctcggcatatcttctctttacgtcttccggtacttcccagccatgattttcgtaaatccgccagagcctcttcgcatgtttcagctcttccctggctgtt

SEQ ID NO: 30511 - DNA, 260 bp, Unknown
  Description of Unknown: RightRegion for integrase B4512 sequence
ccgggagtaggtcgatatgttgataatccctttagattagagattttcctgaaactgtaaacccgcagtttcaggggattttcaaccacatacaacatcaatgttctaattcttccgtgcctatgtcagtcagcaatccggcaacctccctgtatggcatggaatatctctgtgaaagatatctcattgatgctccaagctcaccatctggtccaccatactgcgaaataatcattgctgccagcgtaggattacaattc

SEQ ID NO: 30512 - DNA, 260 bp, Unknown
  Description of Unknown: RightRegion for integrase B4513 sequence
gatgctaaaatgttcgttttgactcctgatagctccaccaaaaagcactgtacttcgtaggaagtatggtgcttttctttttctcagccgcaaaaaatgggggctgcactgccttgtctgcatcgttttcagatgttttgcaggcggttcagtgcagcccccgagtcattggtgcttcggcaggtcagaggatgccggttcagctgacgatctccagcatttgatcgaacatctcttccatctggcgcaccagcgtgaac

SEQ ID NO: 30513 - DNA, 260 bp, Unknown
  Description of Unknown: RightRegion for integrase B4514 sequence
cacaaagattgtatcgtagtccttcatgttgtcccgcttcacggcaatttccggtcgtgaagcgggatcgttcatttcaatcgtgctgcgggcgttcttttccatccagttcagatcagcttccgtgtaaggcaccttcggctcaatctcaaagatgtccgcgccgattgcctcagccagcgtctcggctacctttgcagtcacgccggacgcagaaaaatatgctacaagtttattactcattgtgttcttcctcatca

SEQ ID NO: 30514 - DNA, 109 bp, Unknown
  Description of Unknown: RightRegion for integrase B4515 sequence
ccgggaataggtcgatatgttgacaatccctttagattagaaattttcctgaaactgtaaacccgcagtttcaggggattttcaaccacatacaacattaatgttctaa

SEQ ID NO: 30515 - DNA, 260 bp, Unknown
  Description of Unknown: RightRegion for integrase B4516 sequence
tccagaaatgaagtgcgctttgaactgaaatgcggtctgacgcttcgagaaaggatatgaatacatgggacatacaccctacggctacagcattgaaaacggctgcgccactattaaagaggatgaagccaataagatacgaaagctctatgagaattacctctccgggatggcactggccaaggctgctgccgctgctggcattgaaacctaccacggcacggcaaagcgcctgatggaaaacaggcactacctcggag

SEQ ID NO: 30516 - DNA, 260 bp, Unknown
  Description of Unknown: RightRegion for integrase B4517 sequence
gatgccaaaatgttcgttttgactcctgatagctccaccaaaaagcactgtacttcgtaggaagtatggtgcttttctttttgctgaagccgatttttgggggctgcattgcttcgcctgcatgtcttttgggctttttgcggaaaaccgagatgttcccgcagataagcgggtccccataacaaaagagaccgccgtacagcaagctgtgaaccgccccaagattagtagacatgaataaaaagcgccctgtgtagggt

SEQ ID NO: 30517 - DNA, 109 bp, Unknown
  Description of Unknown: RightRegion for integrase B4518 sequence
tccagacaggaagtcggatttgtcatgaagtgtggtcttacttttaaggagatgatttgatgggacatacaccacttggctatcgtatcgagaatggcatcgcagttat

SEQ ID NO: 30518 - DNA, 109 bp, Unknown
  Description of Unknown: RightRegion for integrase B4519 sequence
attgaatatagcagggataataatacagaatttatattagacgttttcctgaaggattaaatgtctatatctaactcaattgggcagtgatcggaacccatgacatcgg

SEQ ID NO: 30519 - DNA, 260 bp, Unknown
  Description of Unknown: RightRegion for integrase B4520 sequence
aataaacgttctaatgcatatactaaaccagttcttaaaatacgtataattttacgctaattttaaatgtattataaaaagttgtatcggcgttcaaatcgaagcattgattgattatgttcacctcttttatcaagaaaacacagcagaagctcgcaaagatatcttaattgaacaacgcgaccgcttacaaaaacaaattgatgctatgaatatagtaatagaacgtttaaataaaaaagtagaccgttatgaagaaa

SEQ ID NO: 30520 - DNA, 109 bp, Unknown; identical to SEQ ID NO: 29944
  Description of Unknown: RightRegion for integrase B4521 sequence

SEQ ID NO: 30521 - DNA, 260 bp, Unknown
  Description of Unknown: RightRegion for integrase B4522 sequence
gagtctcttgaggtccaccatcaagctgcaccaaaaaagatgccgctgcgaaaagcctagaagtttcaacgacttccgggcttttttgcgcccatttttagaggcgtgacaaaaagatgccaaaatgggctttggcaaattcgatggacctgtacctttacccaaggctttttgagccgcttttccgagaatttttcgggaaagcggctcgcttttgctctcggcaaagtgtagaatttcgactggcgtttttgttggtt

SEQ ID NO: 30522 - DNA, 242 bp, Unknown
  Description of Unknown: RightRegion for integrase B4523 sequence
ggagataaagataatcccacttttacactgaatctcaagccccgaatcccgcgtatttaggggcttttctattagcgacaacatttttggactcacgaacttgcccatctcgagatgatctgcgccattgtgcaccagcttacccgcgacctgacacctgaacaattaaaggaatctggattcgaccaatattatgttgaccacacgttagcactttggcctcaggcagccagcggcacacc

SEQ ID NO: 30523 - DNA, 260 bp, Unknown; identical to SEQ ID NO: 30479
  Description of Unknown: RightRegion for integrase B4524 sequence

SEQ ID NO: 30524 - DNA, 260 bp, Unknown; identical to SEQ ID NO: 30513
  Description of Unknown: RightRegion for integrase B4525 sequence

SEQ ID NO: 30525 - DNA, 260 bp, Unknown
  Description of Unknown: RightRegion for integrase B4526 sequence
aataaacgttctaatgcatatactaaaccagttcttaaaatacgtataattttacgctaattttaaatgtattataaaaagttgtatcggcgttcaaattgaagcattaattgactatgttcacctcttttatcaagaaaacacagcagaagctcgcaaagatatcttaattgaacaacgcgaccgcctacaaaaacaaattgatgctatgaatatagtaatagaacgtttaaataaaaaagtagaccgttatgaagaaa

SEQ ID NO: 30526 - DNA, 109 bp, Unknown; identical to SEQ ID NO: 30502
  Description of Unknown: RightRegion for integrase B4527 sequence

SEQ ID NO: 30527 - DNA, 109 bp, Unknown
  Description of Unknown: RightRegion for integrase B4528 sequence
ccgggaataggtcgatatgttgacaatccctttagattagagattttcctgaaactgtaaacccgcagtttcaggggattttcaaccacatacaacatcaatgttctaa

SEQ ID NO: 30528 - DNA, 109 bp, Unknown
  Description of Unknown: RightRegion for integrase B4529 sequence
ggtgatgtcagaaatgctaattttgaattaactataaaacctaaaataccacgaaagtaagcgtaggcactaggcttacgcttacttctacaaattgcgggatgtttcc

SEQ ID NO: 30529 - DNA, 260 bp, Unknown
  Description of Unknown: RightRegion for integrase B4530 sequence
cacttttatataaattctaccgcctaccctattactttaatagtgccttttggcttttaaagtatataatgtattatataagatatattagttataatacaatgtattcagtataaaaactctataaatgaaaaataaggcctatcgtgctagtatctactaactacgataggcctattttatttaccaatcaaaactcagagctatgtgtccaccctcacatagtagggagattatggatcacctcgatttcatcgaat

SEQ ID NO: 30530 - DNA, 260 bp, Unknown
  Description of Unknown: RightRegion for integrase B4531 sequence
gccccgaaccgtggctggattgtcggggatatttctgttgacgcaaatttgtgtatataattctatcatcgttgtaccgacgaatacgttccacgatgatgactataataaaagaggcggtttcccgcctcttttacatctcatgcaccatctgttccgtctcggcgtatcttctctttacgtcttccggtacttcccagccatgattttcgtaaatccgccagagcctcttcgcatgtttcagctcttccctggctgtt

SEQ ID NO: 30531 - DNA, 173 bp, Unknown; identical to SEQ ID NO: 30465
  Description of Unknown: RightRegion for integrase B4532 sequence

SEQ ID NO: 30532 - DNA, 260 bp, Unknown
  Description of Unknown: RightRegion for integrase B4533 sequence
gatgccaaaatgttcgttttgcctcttgaatgctccaccaaaaagcactgtacttcgtaggaagtatggtgcttttctttttgctgaagccgatttttgggggctgcattgcttcgcctgcaccgttttcaggcttttgcaggcggttcctatacaacccccgacttttgactttacaccattttcaaaaaggaatgttttccgcccgttttttcagcaggctgctgcatcatccccttcaatgtacggcgtaaggtcga

SEQ ID NO: 30533 - DNA, 109 bp, Unknown
  Description of Unknown: RightRegion for integrase B4534 sequence
aacgcagtagagaataacgaggctgagtgttcgtttaagctctgctctgctccaccataagtcccgccgtgattttagtcaaattgcggcgggctttttgcgttgacac

SEQ ID NO: 30534 - DNA, 260 bp, Unknown
  Description of Unknown: RightRegion for integrase B4535 sequence
gatgctaaaatgttcgttttgactcctgatagctccaccaaaaagcactgtacttcataggaagtatggtgcttttctttttgctgaagccggtttttggtgggctgcattgcttcgcctgcgctgttttcaggcttttgcaggcggttcctatacaaccccccagcttttgactttacaccgttttcaaaaaggactgtttgccgcccgttttttcagcaggctgctgcatcatccccttcaatgtacggcgtaaggtc

SEQ ID NO: 30535 - DNA, 260 bp, Unknown; identical to SEQ ID NO: 30475
  Description of Unknown: RightRegion for integrase B4536 sequence

SEQ ID NO: 30536 - DNA, 260 bp, Unknown
  Description of Unknown: RightRegion for integrase B4537 sequence
gaaagcggtgcaatcacttttgtattgaagggagatttagagttcagcgcggaggtgtgaaatggcaaatagaatgattagtttcggatacgggatagacgggaataaaatttgcgttattgatcgggaagctgttgtggtgcgcgaaatattcgagaaatatgccgcagggaaactgttacaggaaatagccgatgaactaaccgcgcgtaacgtggatttttttcaaggaaactgtaattggaataaaaatcgcgttt

SEQ ID NO: 30537 - DNA, 109 bp, Unknown
  Description of Unknown: RightRegion for integrase B4538 sequence
gggaagaaagacacccccacttttgaactgacacttaagccccgaatcccgcgtatttaggggctttttcattagtaacaacaattacgggcggattcttccgtcccta

SEQ ID NO: 30538 - DNA, 260 bp, Unknown
  Description of Unknown: RightRegion for integrase B4539 sequence
gaaaaaggaaatcgttggagagaaagcacttttgagattgatataactcctcttatttaaatattttttatcaattccatcataagtgtgctatttctatgggaggctcccaggtatttttagaaccaggtgaaacccagagcgtagacactatgataaaatgtattgctgtctcctccgctaacgatgcatgtgtggcgtattcgcatagtaggaattaatttgctacctgaaatggattacggaatctgtaataaata

SEQ ID NO: 30539 - DNA, 109 bp, Unknown
  Description of Unknown: RightRegion for integrase B4540 sequence
atccgtaagatcgtaaagaactgtattttcgatggagaaaatctgaaaatcaccttctaaatcattcaatattatatacagatcggtacacccatcatcgctgtggagt

SEQ ID NO: 30540 - DNA, 260 bp, Unknown; identical to SEQ ID NO: 30483
  Description of Unknown: RightRegion for integrase B4541 sequence

SEQ ID NO: 30541 - DNA, 260 bp, Unknown
  Description of Unknown: RightRegion for integrase B4542 sequence
tccggaattggaagatatgtagataatccattcagattagagatattcttaaaactgtaaaagcccttaaacagggcttttacacaaccaccaacatagtggttctgatgaagagggtgttatggatgttatgcgcgaggaaggacgtgaggaaggacgtgctgatgctaccttaaaagatatcagaaacatcatgactaagcttaacaagtctgctgatgaagcgatggatatattagatgtcccaatcaaggaaagag

SEQ ID NO: 30542 - DNA, 260 bp, Unknown
  Description of Unknown: RightRegion for integrase B4543 sequence
gcacgcagtgtgctgcgcaagtgtgtatgggatggggagactctttttttagaattttaatttatgtatttttgcgactgtcgggactgcaacagaatcaaaaatatgtaaaattatttgaaaatgtattgacgtatcactcattgagtgctataataaaagcataaagggggaacaaaagaaaggaggaaaagatggacacattgaaggatgccatcggaataggaaaagacctgctagagatcttagtcttggcgctc

SEQ ID NO: 30543 - DNA, 260 bp, Unknown
  Description of Unknown: RightRegion for integrase B4544 sequence
gcccgcagtgtgctgcgcaagtgtgtgtgggatggtgagactctttttttagaattttaatttatgtctttttgtgactatcgggactgcgatagactcaaaaatatgtaaagaataaacctctttacttgtttgttcttttttgctatactgaaactgttccagaatgttgtaacatttgacaatggaactacaggtaaataaagagcgaaaaagccccggctaccatggggctttttcgttttttgcctatactgcac

SEQ ID NO: 30544 - DNA, 260 bp, Unknown
  Description of Unknown: RightRegion for integrase B4545 sequence
tgttcgtataagcgctgttatggttcaccagacttaattaaagtcgaacacttattttgagtgttcggcttttttctttatcaccgagttcgtcaaggctgatgcacttttcgccgtccttgtagttgaacagcacgatgattttatcatcataaacatgaacgctgtttacgaaaacatcgatcagccttaccggaaaaagaaaagactagccgtgtggggcgggtagagcggggaatggcagtggcaaataaaggaat

SEQ ID NO: 30545 - DNA, 260 bp, Unknown
  Description of Unknown: RightRegion for integrase B4546 sequence
tgttatgtgcaggttagccgcaattggtttgtaattgtcagcaacttaaagaacacctgatgggcggctcaatataagcccgtataagacacgaaaacggggcaccccttgttagggtgccccgttttaagctagattttcaagacttgccccggataaataacattcgggtttgcaatgccgtttttcgccgctaacgtctggtaggtggtgccgtatttcgcggcaattcctgaaagcgtgtcacctgatttcacggt

SEQ ID NO: 30546 - DNA, 260 bp, Unknown
  Description of Unknown: RightRegion for integrase B4547 sequence
gaaaaaggaaatcgttggagagaaagcacttttgagattgatataactcctcttatttaaatatttttatcaattccatcataagtgtgctatttctatgggaggctcccaggtatttttagaaccaggtgaaacccagagcgtagacactatgataaaatgtattgctgtctcctccgctaacgatgcatgtgtggcgtattcgcatagtaggaattaatttgctacctgaaatggattacggaatctgtaataaatat

SEQ ID NO: 30547 - DNA, 260 bp, Unknown
  Description of Unknown: RightRegion for integrase B4548 sequence
ttcacatttcatttgaagtgcggattgaatttgacagaaagggtgaagacagatggctagaggtatcattccgtttggatacaaaatggttgacggtacgatcggaatcgtgcccaaggaggcattgcagcttagaaggatgtgtcgagcctacttgtcagggctgtcactgagcaaggcggctgcagcggtcggattgaagaaagatcactcccgggccggggcattgatgctcaatccccggtactgtggtaacgagt

SEQ ID NO: 30548 - DNA, 109 bp, Unknown
  Description of Unknown: RightRegion for integrase B4549 sequence
gcaggtaaatatgaactaaaccttgactttttgcccattattccatcagtcgaagattaagcatataagatcaaatgacctacgaatggggatattctcggtcggcgcc

SEQ ID NO: 30549 - DNA, 260 bp, Unknown
  Description of Unknown: RightRegion for integrase B4550 sequence
ctggataaacttctacaaattattactcgcatgaaagtgagggaactatatgctgcctgaaaaaaatgaattctcaataattcaaattgagattgcaaaaataaaatttcttaacccacgaacaagaaataaggtagtgcatgaagaaataaaggaaagcataaaaaaaagaggattaagcaagccaataagcgtaatagctattgatgaaggcgatttcaaatatgctttaatttgtggtcaagggagaatagaggctc

SEQ ID NO: 30550 - DNA, 260 bp, Unknown; identical to SEQ ID NO: 30483
  Description of Unknown: RightRegion for integrase B4551 sequence

SEQ ID NO: 30551 - DNA, 260 bp, Unknown
  Description of Unknown: RightRegion for integrase B4552 sequence
ctcgtatttacgagctttttttgcgttttgagggtaaaaatttcaggtgtaaaaccgtagatgctttttcgataaaaaaggatctgaaccatcaacaattaaacatcgtcaaacaaaacggcagactttaagtatattttgctctaagcctgccgttttgtatataaaagaactttcacaaagttttcaatacaaatttattggatctgccgattttgttggtatctcttaaaatagagaaaccaataggatcggctttt

SEQ ID NO: 30552 - DNA, 260 bp, Unknown; identical to SEQ ID NO: 30456
  Description of Unknown: RightRegion for integrase B4553 sequence

SEQ ID NO: 30553 - DNA, 260 bp, Unknown
  Description of Unknown: RightRegion for integrase B4554 sequence
gctcgcagcgtactccgcaaatgcgtatgggacggtgagactctttttttagagttttaatttatgtctttttgtaactgttgggactgcaatagaatcaaaaagattcaaaaaacatttgaaaaggtattgacacgccactcattgagtgttataattaagatacattaaaggaagggaggtggtgatgtgaatgatcccatagaaataataaaagacctgctcgagatcatcgttcttctcgaaacgcttcgaacgat

SEQ ID NO: 30554 - DNA, 260 bp, Unknown
  Description of Unknown: RightRegion for integrase B4555 sequence
ctggataaacttctacaaattattactcgcatgaaagtgagggaactatatgctgcctgaatcaaatgaattcccaataatccaaattgaaattgccaaaataaaatttcttaacccgcgaactagaaataaggtagtgcatgaagaaattaaggaaagtataaaaaaaagaggattaagcaagcctataagcgtaagagcaattgatgaagacgacttcaaatatgctttaatttgtggccaagggagaatagaggctc

SEQ ID NO: 30555 - DNA, 260 bp, Unknown
  Description of Unknown: RightRegion for integrase B4556 sequence
agcgacctccatctgacaatccaccccaaaattgctatacctcaaacctctaacatttaagttattgctgctgcgcgctgcatgaagtaccccgttcaatctgctcgtgcttcggcggtgatgatctcgtgctcagcaacgatggctatcagctgttcgtaaccctcggtcagttctcgatcatccgacttgagcgcgacattcagctgctcatgcccgcttacgacgtatgtctgccgcggcgcgactgctcgaacagc

SEQ ID NO: 30556 - DNA, 109 bp, Unknown
  Description of Unknown: RightRegion for integrase B4557 sequence
attgaatatagcagggataataatacagaatttatattagacgttttcctgaaggattaaatgtctatatctaattcaattgggcagtgatcggaacccatgacatcgg

SEQ ID NO: 30557 - DNA, 260 bp, Unknown
  Description of Unknown: RightRegion for integrase B4558 sequence
gctagtccatattcctcgaaaaaggccttcacagcttcaccccctctccaaataaattgataataatttcaaacatgattgccataaacagcactgtcacgccaagcagcggcagcattccccaccattgaaaaaacatcagcttactctcggcacggctgctgcgctcacttctcagccactttgtggttgtttgaatcatgcggttaaactgaacgtaagcatcttccttgcccaccgtattatagcggtataaaagc

SEQ ID NO: 30558 - DNA, 260 bp, Unknown
  Description of Unknown: RightRegion for integrase B4559 sequence
gcccgcagtgtgctgcggaaatgtgtgtgggacggagagactctttttttagaattttaatttatgtctttttgtgactgttgggactgcaacagaatcaaaaatatgcgaaaaataaatctctttacttgtttattcttttttgctatactgaaactgttccagaatgttgtaaacatttgacaacggaactacaggtaaataaagagcgaaaaagccccggctaccatggggctttttcgttttttgcctatactgca

SEQ ID NO: 30559 - DNA, 260 bp, Unknown
  Description of Unknown: RightRegion for integrase B4560 sequence
ggagataaagacaatcccacttttacattaaatctcaagccccgaatcccgcgtatttaggggcttttctattagcgacaacatttttggactcacgaacttgcccatctcgagatgatctgcgccattgtgcaccagcttacccgcgacctgacacctgaacaattaaaggaatctggattcgaccaatattatgttgaccacacgttagcactttggcctcaggcagccagcggcacaccgtggagcgcaacaacatt

SEQ ID NO: 30560 - DNA, 151 bp, Unknown
  Description of Unknown: RightRegion for integrase B4561 sequence
ggagataaagataatcccacttttacactgaatctcaagccccgaatcccgcgtatttaggggctatttcattagcgacaacatttttggactcacgaacttgcccatctcgagatgatctgcgccattgtgcaccagcttacccgcgacc

SEQ ID NO: 30561 - DNA, 260 bp, Unknown
  Description of Unknown: RightRegion for integrase B4562 sequence
gaaaaaggaaatcgttggagagaaagcacttttgaaattgatataactcctcttatttaaatatttttatcaattccatcataagtgtgctatttctatgggaggctcccaggtatttttagaaccaggtgaaacccagagcgtagacactatgataaaatgtattgctgtctcctccgctaacgatgcatgtgtggcgtattcgcatagtaggaattaatttgctacctgaaatggattacggaatctgtaataaatat

SEQ ID NO: 30562 - DNA, 260 bp, Unknown
  Description of Unknown: RightRegion for integrase B4563 sequence
ccggaaaaccctttattttccgggaaattttccattcatacgcacttgcggtctggttgacccaatggggatcctgttccctgggcgagcagggctacagccccattgagatcctccgctacttctacggggaaagcatttacatcaacacggcagaccagatttccggcattcccatttcctggcctggatatgagctgacgctgggttcctccggcgataaagtccgccacgtccaggaacagctggataccatcgcc

SEQ ID NO: 30563 - DNA, 260 bp, Unknown
  Description of Unknown: RightRegion for integrase B4564 sequence
gcccgcagtgtgctgcgcaaatgcgtatgggacggggaaactctttttttagaattttaatttatgtctttttgtaactgttgggactgcaatagaatcaaaaagatgcaaaaaacatttgaaaaggtattgacacgccactcattgagtgttataattaagatacattaaaggaagggaggtggtgatgtgaatgatcccatagaaataataaaagacctgctcgagatcatcgttcttctcgaaacgcttcgaacgat

SEQ ID NO: 30564 - DNA, 260 bp, Unknown
  Description of Unknown: RightRegion for integrase B4565 sequence
attcgtaagatcgtaaagagttgtattttcgatggtgagaatctgaaaatcaccttctaaatcattcaatattatatacagatcggtacacccatcatcgctgtggagtccggttacgtggaagcccttggctggaatcagtacggcggctggcgcatcggaatccgcagctttgataaaaagcgttactactactatgcacaccttcgccagaatttcccttatgcgttggatttaaaggaaggaagcgtggtaaccgc
